United States Patent Application Publication US 2007/0083945 A1 - sequence listing, part 37

SEQ ID NO: 251275 - DNA, 417 bp, Glycine max
cttttggaccttgaacaagcaatcaactcctcttccagatacctgccatgtgctcgcgactggcccctttcttcccttcgcaactagagttcactattgctaccccatagagctccgcgaaatctgtttcggccatactcttccttgcgagccctcttggtctcttgttcaagggctcttgcggtaattgcattctcttgccataacccgacacactcctttcgaacgtgtgtagcggccaacttgaacttctccttggcaagtttgcctttcctaactcgcttttgagagcttggacttcctcgtcctcttccggtgcttcaaaattctcttcgctgacgacttttaacttggcgagccaatctaaacctcgtatgcgaactctcagccattcgtggtactcacccatgatgccat

SEQ ID NO: 251276 - DNA, 205 bp, Glycine max
gtgaacgactagctgtgagtaataatctttgcatcaatctctgaattctagaatgaaatgtattaatgaggacatgatgaaggccatgattgtacatacacaagccttttgaccaaaaagcttaccttgaatgataattatatcctctgcacctttttaagctgaatgatattgtataaaaattgaaccctgaacttaaataatt

SEQ ID NO: 251277 - DNA, 453 bp, Glycine max
taaagtatgcccgagtcattcatccctatgagatgttgttgaagtactgtcgatcagacttgccataccttggattatagggttgaaccaagctcatgcttttataataagggtcatcaagtcaagttgaaatatggaagtaaccatcttgcaccaatggggcaatagatgaatcgagtcacatcactgcttcgtctactgccaaacataattacgattgttgatgttcttgttacttccagtttcaccttgacatagatgtcatggaccatgttgataatctaaattgattcaaccccatatcctgcgtaaaaattcgcaatacttcgactgtacatcattcgcatgcatccatgcctttcattggttgattgctcgtccattcttccctgcaaataaataaaagaacttaatattgtataaaaagaagggaccgcttcgacccttaccgac

SEQ ID NO: 251278 - DNA, 413 bp, Glycine max
  unsure (1)..(413): unsure at all n locations
agcttaggttctaagagagcattcatccttagattaatcctttctactattattcccaacttctattacattcctttaggtacttacgctttctttttctcatttaacaacacacacattttatttaagatacttacaaacaaacttatttatttaatttgttttttgaacttattacttactgtgtgtgctattatctccttaccattgaaagctttcacccagtgaactcctccaaatntgggaacaaattgctctgaaccataatatcattntatgaatgatgctctcctacaacctaagacaaggtagaaggagataaactatacaggctcaatataaaaaaatgttacataatggaggttattctgcggaggttttatataccttcttatattattaaaaactacaat

SEQ ID NO: 251279 - DNA, 528 bp, Glycine max
  unsure (1)..(528): unsure at all n locations
gtcacctgcagcatgaagcttcttataagctggaaccatttatcaataaacacaagttgagttttattcagaanattagagtttatctcttttatcttagtgagagtgattctaataaattcttgagtgattcaagaacaccctgactgcatcaaaggacttttacaacctttgtgtgttgccctcgtcggaaagagagattctttccttcctttcatcttcaaccttggtctttcaaaccactattacagaaaatccacttctgcccagaattatctcgtggccataactcccattttacacactcaaattaagtgattcttgagcctaaattgaatttcaaaacgagacctctcacgtcattttggaatcacctcatttggagctctgtagctagagttattgccatttctatctntctgtccagccaccacttaacctacgntntaccatcccattaantccatttatgccaagaaccaccttattaagacccacganataaccaccttattttcatccttaatc

SEQ ID NO: 251280 - DNA, 391 bp, Glycine max
  unsure (1)..(391): unsure at all n locations
actatccatactcagcttaccggatgacgccgatcgaacatttcctaaccgacgtcatgcaaatttcgttcagggattgaattgagaactcgttaggcgacatctgtcgtgaagtagcgaccgatatttttcagccgacatcgcacaattctttttagaaaagctcgctggtcgataatggtctttttacggcaaagtaagttttcttgttttggtgttgcataaaaaagttacaatgtacttcggctaggtttttcgtgcgagttcaaccgacattttgtttcggccaggaaaacattagcccacctctgcaaaaaaaatatntgctaaccgtcttcatgcatattccattcaacgattgaatagaaaactcaatagccgacaacggtcg

SEQ ID NO: 251281 - DNA, 365 bp, Glycine max
  unsure (1)..(365): unsure at all n locations
ttcctagagcatttctcttattgtttcaatttacacaagacaatgcgattattggatctgacgctctctctcggcggtatgcattactttctatgcttgaaaccacaatgataagtcttgaatgattgaatagcatctatgaaaatgatgaaacatctggagaaactctaaaaattgtgaaaaattttcggtaaatggtttctttagacatgaaggccttcttttcaaagaaaacaaattatgctgtccataatgatctacaagaaatttgcttgtcttgaagcatatgaagaggttaatggggcatctgggtccaacactntaaaacatacataacatttttttgcctatatgaaaagatggca

SEQ ID NO: 251282 - DNA, 105 bp, Glycine max
aacttgataagaaagagaattctttatggaggagagaactttgcttttttgcttgataccaatgcgcacgactacctctctatttatactactctaaagagaact

SEQ ID NO: 251283 - DNA, 212 bp, Glycine max
gacactattcaatatctacgctctggcccgacgaacctaattatctatcatatgaacgcatgttattgatcgaagaatctcctacgtataagacattactactaggatacactcatatcacatttgatgttaattatcatataaatattatgtgaaaccgagatgtcccacagtacaacaagaaacatacatcatatgatcaccccactata

SEQ ID NO: 251284 - DNA, 384 bp, Glycine max
  unsure (1)..(384): unsure at all n locations
gattcggtctgacgaggggtcgattgttantatttcaggctacaatgcacaacacaagagcgtggttgattagagaaatatatttatatgcatcagcttgtttgtttgaaagacccaacatttctacctattgctgtcacttttacttactttgtattttatagtttttagcataaaagttagttaaatcgtgtttgaaattatgaatcatacatgttctttcaacaatgctccatttctgaacttaattcacgctaacatttgttccctgtgttcgatactcggattcatccgttttaatccttaaatacttgacgatccggtgtgctttctggaaatcgatttcccttgatatatttgacgaagatatgtggaacaaaagca

SEQ ID NO: 251285 - DNA, 493 bp, Glycine max
  unsure (1)..(493): unsure at all n locations
ttggagtagaaacatgggaccttctctttntatttcaaaaaaggaagtcgtatctagtcaaagtctgagagaccatacaagtttcctaatgatntctaattatgtgggccattaagtctatcatatgctgacaatagccgagaagcccatgaatctcttctgaggtggagtaagtgtctgccatcgccttggccttggctaacaagcggagaagttcttgactcccgtncaaagtaagagcaaaccggtccatccacatggatgccttntggtgcaaagagtcgatcacccttcctctagcctctttttccgcatatatttgagcgtactcatccgcgattctatgctcgtgggccgcagctagacctaactcttcttggtacttggtgatgatagctagcatgttggtctccgtctcgcataaacgctgagacaagcttcttttggacctttgacaggcaactaactcctctttcaaaacatgccatgtgct

SEQ ID NO: 251286 - DNA, 477 bp, Glycine max
  unsure (1)..(477): unsure at all n locations
tctatatatagaaggtttggtcctaatatctttacacttttctcacctctcaatgagctattgaagaagaatgtggcattcacttggggtgaaagacaagagcaagcctttgctttgctcaaagaaaagctcacccaggcacctgttctagctctttctgacttttctaaaacttttgagctaaaatgtggtgcctctggagtgggtgtgggagctatattgttgcaaggtgggaacactattgctttttatagtgaataccttcatggtgccaccctcaactaccccacctatgataaagagctttatcccttaataagagccctccaaacttgggaacattacctttgttccaaggaatttgtcattcatagtgatcatgaatcacttaattacattagagggcaaagcaagttaaacaaaatgcatgcaaaatgggtagggtgcctagaagaaattccatatgttatcanatac

SEQ ID NO: 251287 - DNA, 416 bp, Glycine max
agctttccttctgagaggtatttatgagcttcttctctcattctgcaaaccagatcgcacacaatgaaattccttctttgcagtatggagatttatttcttgtttactcttcttttgtatgcttcatctaacatttttgctttattctttacttcttcccgcatgttcaaatctactattagagcttcggcgttgtcaacagcattatacataatccttctaagtgagggttcaccgatctctactggaatcatggcattagtgctatacgtcatcatgaatgaagagtacagcgatagccccaaagtatgcatggaagttcttcaaccctgagtccttgtggtagttttgataatcactttcttaacttcggaaatataactttgttagcccgtgtagcctaccccctcatttga

SEQ ID NO: 251288 - DNA, 401 bp, Glycine max
ggatcttagcaccgcgctcacttgactcatcggacctctctttttttaatttaaagaaccctttgggacactaatagttccaaattgaagaggaaaaaaaaaaagagcttgctcggagagagtgagactgagagggaagatctggatcacgattcgggggtgaggtgaggtctttcatttgatacgcttttctttctcttcctgtttgagcctattttgaatatttgtaatttttctaatctgcagtacattttgaagatttatttgaaagtgtgtggttttgctggatttctttttaattactacatttgtgctgtgttgactataacatactctagatggtgtatgatggttcaagggagtcttaagcttccacatgcgaatttatattaatgaaatct

SEQ ID NO: 251289 - DNA, 420 bp, Glycine max
  unsure (1)..(420): unsure at all n locations
tctcaagcaagcttctatcaagtatgattatgttgaatattatacatgacggaatgaatcatgattctgttgtcacaacccgttgattactttttatcaccccacacataaataacaacggaatcatgattttgttatctttcttctcatcctccttaacacgacaaaattgtgttctcattgttattttttcacaacacaattggaattatgaattccttgaggtgaataagattaaacaacgaaatctaaattttggtgtactattttaaaataaaataaaaataactttggtgttctttattgattgaactgcatctattgattgaacactactctntttangcgtattgattaacactacatttttcttatatgcatatcaacccgattaatatagacccatctaattccttatat

SEQ ID NO: 251290 - DNA, 450 bp, Glycine max
  unsure (1)..(450): unsure at all n locations
agcttcgtcctcagatccctcttgttgacaattgtccaattanacgaccctcttaagtttagactaacttaaactgagttctgtccgccaatcccttctgtaagactagactcagctcaagcagcttacgaaaggttagcctaatttagcctaagcttcgtttgcagatccctcttgtaagactaggtctagactaaacagcattattgtaacaacataattaaaaccgaaacttaatccgcagatcctctttgtaagacttagttcgatcttgcttcaatcaagttctaaggcaacaatacatttcctaatgctaaagtcacctaactatgcacacaaatggatgatcagaccacaagcatacaaacattaagcattgaaggaggcattggacacacaaaacataatcaattagatattaagtatttacatcagttgttcattagaaat

SEQ ID NO: 251291 - DNA, 343 bp, Glycine max
gcttacacaaacattactagtccaacacacacttaacaaatagtcatcatcaatccatagttccaatcaatcatgctcagtatgatgcatgcacctgacctcaactctcaaatgcaatgtggtactatccctgaggaaatagcctaagtgtgtccacacgacactctcacttatgaaaactaggcagtaagtgttgaggtcaccctgttgaggacaggcaactcccccaccccatgatgatcaacttgagtctcaagggagtccgaaaccgagtgacataccctctagtaaaagtattcctcctcacaagaaaccacaagtacttactgacaaaagttatact

SEQ ID NO: 251292 - DNA, 480 bp, Glycine max
  unsure (1)..(480): unsure at all n locations
taataagtggctntgttcgtgcttgcgtgcttagcgacattatgatccgcttagcgcacattagtgaattttcgcttgatgagatgaagtggtgcactcagcgaacctgtatagctcatcttcttccagatcctttctcgtgcttagccactaagtgttgcgcttagcgaacgctcgctaagccagcagattggcttagcgaggaggtgaaaaatagcactttgccaagtctagaagttttagattgggctatagaggtcatcaggccagagatcagggctcctatgttcatatccaagcaagagactaggccaaagatcagcctagctcgtgggggccaagttgaagtatgagaggacactccacacctaagctagtgtagtcagatccttcctaagaatcttcccaggatggccctcagagttcaagaagaaccctcggctaggtatgcataaggcaacctctatctctctgtagtct

SEQ ID NO: 251293 - DNA, 87 bp, Glycine max
gttgggcctttccaactcacttttgatagcttggactttcaccgctctttccggagcttcaaaatgcttctttctgacgacttttaa

SEQ ID NO: 251294 - DNA, 355 bp, Glycine max
  unsure (1)..(355): unsure at all n locations
agcttgaaagagctctggtagtcaaagagaagttcaagtccatattcatcaaagtctaaagaagagagtatgatgaactaagggacgttaatatggccaccgatgaagccttggaatgagaaaccaagaaggcccgataggaagaacacgaccaaaacaagttttgaggggctntatagggcagcaatagtgagctcaaactcctgaaaggtgaaaggaatcatcacgggtcaaaggcatgatcttgaaggatgagctaaaggctagccttatgtcgaaaagaaatttgtcccataagttaagcgagactgaagggaatatgtgggccatcatcgatgagtgcaaagagaagcta

SEQ ID NO: 251295 - DNA, 398 bp, Glycine max
atacacaatgcgcgcataaacccaccatgcacggatgcccacctccaactgaactcacggactccgtcgtagcccatataactcgtttatgtcaacaccgggaccccatcaaagctcccaagctgccactacatacaagcgaaacaacattcaaacaacacaagctatcacagccaagcacaacagaacagagacagaatactctgctcgcacatcaaccaaaaccacagcgtttctcacttaaagaccacacgaacaaatccttcgatccaactcattaaccgatggatcgactccaaaattctactgggagtctatagtgcataaacctacatatggaccgtcgcgatctactggcaacatccagactcattctgactatacattcaccaccacca

SEQ ID NO: 251296 - DNA, 456 bp, Glycine max
tctcattgacatacagtcgttgcagttgctgtcgatctccatgtccttcccatttctggtgcctatgtagtggtaggcgtccaatggcttaaatcattgggtccactactcacagattataacatcttgtgcatgcagttcttctattagggacgcatggtggaactgaatggtgatcaggatgacacttcgaacttcatcacactgtcacaattttggcgaatttcgcagacccaagctttaggactgtactaccacatcacacttctatcgaaagactcgcccaacccacaggaccttcacccagatattcagtccctcctgactaagttcgcacacttgtttcaccaacccagcaccttgtcatcgaagtaagacaccgatcatcacattcatctccttcctcagttcactccggtcaacgtgagaccgtatcactacccacacttctagaag

SEQ ID NO: 251297 - DNA, 388 bp, Glycine max
  unsure (1)..(388): unsure at all n locations
tacctatcaaactcagcttaacaactctgtctttatgttagtcaagactactaatgcttttaatctcttctcgtctaaatcaactaactcatctgacatcattttccaataatggtcgatcggaatgtccatttgtttttgtactctagctgattgcaaatgtatttcgaccggaagtatagcatcgtgcccataagtcagtcgaaatggggtagtattaattgattccttaagagaatttctacatgcccatagaacttgatctaacgttttattccaatttcttggctattgggcaatgtgttntttaatcaagttgattacaatcttattggctgcttcgacttgaccatttgcttgcgcataatttggtgtcgagggtaataat

SEQ ID NO: 251298 - DNA, 192 bp, Glycine max
  unsure (1)..(192): unsure at all n locations
catgcaagctnggacataacaggtctcttctaatatcttaattaagctactacttcaaggagaaagcagtctcaatagcctccataagagagcctagctcattgcttgataaaatgatgtgctcacttgccactatattccttaagctgagcataccctgtcaagaatttgcggtatggatatccatccaca

SEQ ID NO: 251299 - DNA, 302 bp, Glycine max
tctggcttcaattcatcagtgggcttttcttctgtgtccatcatcttgagatgttcccagcctttgatgacaactttccaggttctgctatccagtgatttgagaaaggccaccatccttgctttccagtattcataggtggtcccatccagaattggtgggctgttcacttgtcctccttctatctccatgttcatcaaaattgatctccctagatctcactcagtgattttgagtgcccgctctgataccaattgaaattctgatactgcggacagatgtcttacaggatgtcacgacat

SEQ ID NO: 251300 - DNA, 406 bp, Glycine max
acatccacaaatcgcgcatgaacccaccatcccctattgcccacctccaactgagctcacgtactcccacgtcacccatatactcggtgctctcaacaccgggtacgcatcaatcctgccaagctttctcaacattcaagatattcagcattcaaacaacacaaactatcacagccaattaaacagggcaaaggcacaaaactctgcccagaacaccaaccgaaatcacaacttgtctcacttaaagactcgagtaacatttgctttgatccaattcggtaaccgctggatcgactcgaagattctactggaagtctgtagtacataagtctacattgtgaccagtgggatctactagcaaacatccagaacatattttgactactcgttcacaagcagaaaacat

SEQ ID NO: 251301 - DNA, 496 bp, Glycine max
  unsure (1)..(496): unsure at all n locations
agctngctaattaacctgaaaatgagagaatattattattaaacacacaaaatgaaaatactaagtatttattacctatacttaatagaaaatacttatcacactacaaaataaccataaattgggagagtttgattcaatttatacaagttgtatacacaaaagttagtcattctcaccgactaacaactcccccatatttatagttttgcttgtcacttgtcctcaagtgacaatgacatgcagagaactatgtacaaaggtgtatgctacaaagttattgattgcatgatgagaaagatgaagcaatgtgtacctataacttgtcttcacaaaatatgcggatattcaaagagaagaataaaatgtgaactgaacaaatagaaggagttaggcataagacatatattaaagaaagtagcttaaaccatagtctcaccactactggttcactcaagcacaagtgtgtaagctatgcattaataacaactagcaa

SEQ ID NO: 251302 - DNA, 244 bp, Glycine max
  unsure (1)..(244): unsure at all n locations
cgagagcatccctttgatcttagcgagagtgattctcctaaattcttgagtgattcacgaacaccttggctgtatcaaacgactntcacaacctttgtgtgtcgcccgtcctggaaagagggattctttccttactttcatcatcaccctcgtcctgtcaaaccacaattccatataatccacctctgaccataattatctcgtggccataactcccattntacgcactcaaattaagtgattc

SEQ ID NO: 251303 - DNA, 448 bp, Glycine max
  unsure (1)..(448): unsure at all n locations
agcttgaaggaaatacataagttgaccattttatggccgacctgtctccgattctaaagagaatggccgagaaggcgaaatctgtttttcagcttctgaagcagccaatcaacttccattgggaccaatagtgcacagcaatgtcttctgagttcaagattntcctcaccactctacccatctttactcgactcacgtctagagctgagttgtactatatctatccatttcgaactccgtaataagcttgacccttctagaggaggaaggatgttaacaaagaataacttggaaatataactcgaagctcaagaaatgtagctttaagctcaataacttggtttggaggctccaaggagatgcccggaaggatagctcagaaagaaagctctcaccaaactgagaatgccctattcgcatcaccgagtccatgcaaaacgatgcgtat

SEQ ID NO: 251304 - DNA, 182 bp, Glycine max
ttacacctaatattttcccgaatcaaaaattgactcctcaacacccaattttgccctataaatgggctctgggttcacttggtcattagttttttctctagcacagcctaacccttcttacatgttctaaatggcatttcaagctaagaataactcactttaacctccatttaccacacaat

SEQ ID NO: 251305 - DNA, 429 bp, Glycine max
  unsure (1)..(429): unsure at all n locations
agctttgagccaatacaaacgacaataacttttttctcggatgtctgattgattcccgtaacatatcgagacgcttgaaattgaaagctgaagctctgagccaatacaaacgaccataactttntactcggatgtctgatcgagtcccgtaacatatcgagacgctcgaaattgaatgttgaagctgtgagccaattcaaacgataataacttttttcacggatgtctgattgagtcccgtaacatatcgagacgctcaaaattgaatgttgaacctctgagcaaattcaaatgacaataactttntactcggatgtctgattgagtcccgtaacatatcgagacgctcgaaatngaatggtgaacctctgagccaattcaaacgacaataactttttactccgatgtctgattgagtcccgaacatat

SEQ ID NO: 251306 - DNA, 401 bp, Glycine max
  unsure (1)..(401): unsure at all n locations
acatactcaaacatccgagaaaaaagttattgtcgcttgaatatgctcaaaggttcaacattcaatttcgagcgttttgatatattacgggactccatcagacattcgataaatattattgtcgttgaaatggctcagagcttcacaatcaatttcgagcgtctcgttatattacgggactcaatcatacatccgactaataagttattgtcgtttgaattggctttgagattcaacattcaatttccagcgtctccatatattacgggactcaatcagacatccgagttaaaagtattggcgtttgaactggctcagagcttcaacattcaatttcgagcgtttcgtatattacgggactcaatcagacattcgagtaaanagttattgccgattgaatt

SEQ ID NO: 251307 - DNA, 455 bp, Glycine max
  unsure (1)..(455): unsure at all n locations
aattaatatttttacattnttaatctaattacaaaactagcttgaataatagaaaagatttaagtgttcatataaaaatatgacatatttaatccattaggtttaatatcaaacaccaattttataaaatgaagccaataaaagcatatagaaaatttatataaaaaggacaaaactaagaaattgtgaatcaaaattatcaaccacctccattgctacttcgttgtctttgcaaaaacacaactacaatcgatgttaggcaatatagtcacaccattcaattgaaaagggtcctttttccaattttattctccaagccatgtatcattccncttaanaagctatannaaaaacatatatattaatgtgcaatataaaacacttgatttcttttatttaatagaaaatatttaaaatttaaannatatatcaatttgtacaacatgacaataatt

SEQ ID NO: 251308 - DNA, 469 bp, Glycine max
tcgcatggaagagagagaccggtcacgagcgcatagcatggttgtaaaagaagagttagccgattgctcaaagtccagaaggaacttgactcagcatttatgcgagacagagaccagcatgttagctatcatcaccaagtgccaagaagaactaagtctagccacgacacacgagcatatggtggcggacgagtttgcccaagtgtacgcggaaaaggaggctagaggaagggtgattgactcgttacaccaagcggcaaccatgtggatggacgcgattgctcttaccttgaatgggagccaagaacttccccgattgctagccaaggccaaagcaatggcggacacctactccgcccccgaggagagacacgaacttgtcgactattgtcagcatatgatagatttaatggcccatataattaggaaccactacggaacttgtattgcactcagatctgactagtat

SEQ ID NO: 251309 - DNA, 412 bp, Glycine max
agcttctgttgacaccaaaaaaacttagggattttcttcttcttgagattctttttgtgagaactgtgatttgtgagtgattcttcattgttttcaccatcatatttgtgattgtggtggctgagtggggttcttgatagtcaagaacgcgggtagaggaacctctgagatagccgttgtgtataggaaagtgaaggaggatcaaggtgcaacatggctggctcaaacagtatcattcaaggatctttaccggttttcgatggaaaactgtttgatgatcggaaggtcaagatgctggcaatctttggctttcaagatgtatttgaagtggtgacatttgggtttgaagatcctggaaagaaagccactgaagaacagcaattgtatttcaaacagaagcaaaaacttgact

SEQ ID NO: 251310 - DNA, 459 bp, Glycine max
  unsure (1)..(459): unsure at all n locations
tggagtagagcttgacttgtagagatagaagtgattgtgacataatacttggtacttgtgaaagttagtggaacttaatggtttgtcaagatttggacgtagtctcaatgaaagagaagaaccaatataactccttgcatttgatcttatttgctttctttctactttaattgacctagggtttgaatttgcttttagacatttaaaaataccttttgcttgccaaaatcattnttcatcgtctaactatattttcaaaaacatgttatcttttttacaaagttttactttcatacgaaaactntgtttgattatgaaaaggctntanaaacttctaaaatcacaattcaaccccccttattgtgaatttgtcttacaaactctttattaattaattatgaaagtactgtgacttgtacatttanatgcaaagctgagtgctgaatatgataaacatat

SEQ ID NO: 251311 - DNA, 509 bp, Glycine max
  unsure (1)..(509): unsure at all n locations
agcttatttaaaatcactttagatacgactttttatttaattatctacttataaatcatcatatttcttatcaaatgtaaatgtttggtccatatcgcaacttcatttggatgaaaataattaatcacatttatcaatatgtttagcattggatatatttatatatctattcntatgatagaacctattttaattagaaacaaggtaattttattctatattgctataatagatcagtgcacacggcattcttctatccttaactggttgttttgacttcatatagatgtattaaataataataaaatctttgttattcacaatgacctgacttggctcaagcatgatagtcaccccttgcggaaatatgtaatattgacaaanataatgatcatttatttactttcatttatactttaatgacaatcaaantcatttatgttgttcacaacatatatatatatatatatatatatatatatatatatacctacatatatatatatatc

SEQ ID NO: 251312 - DNA, 372 bp, Glycine max
ctcatcgtctctcacagtctttatatttgggagccaatccaatccttgtgtccggactctcagccacttatgatagccgccgatgctcccattactgcttcccctaagctcttttgcctttcttcacgccgcatcccatgccttgcgaactccttggagtaccctcgcgttgtggtcactaaaacctcgtgcgatgaaaggcgtgatgctttcgtctgatggcactcctctcatgggacatccttcgcatgaagattgaatcctgattcttccttccttctagcgagggaacctattaacaaacgcccctccatgctagccaagagttggtcccaattcgtctttctttttcgacgcacaagcggtgacctt

SEQ ID NO: 251313 - DNA, 463 bp, Glycine max
ctctctttctattattttatttaagcaatgccacatgtctccatttgagtggagcaaaaagggcccactttcccttttgactgtgacccatactcagccacaaaagtgagaaatatctgacctttgaaacgctaaaatcgtgcctcggattgcatgccgattctctggttccagttcctcgtgtatctctgcgtccgttagggccatgtttcgaaagtacgcaatatatatatcgaaacgctcagaataaaaccccgagcgtggttcagaggttggtttcgttaaattctaagtcgcacgcaaaacgatgatttataaactaattaattaagaattaacctataacctcccagttatggatgtctcttccttaattagcctaacccgcgtatcttggccccactactcctacttctaccaagaacatatatgcatataccctgaataatacctatatatatat

SEQ ID NO: 251314 - DNA, 297 bp, Glycine max
taaatctcagctttgtgaaatctttgtggtttttttttttttttggtttgtgctataggtgcttctcattgaagtgggtagacagacttgcggctgaatatggatgccctgtggataactgggtggggggtatgaggaagtttgtttcggctgacaatgacatgctgggttgtgggaaacttggcatttaggatggccgtccacatgggttttccctttttccaccctttatttgcccagtttcttacttccctagacgaggataaatctgcctcttttggagccacttaatttttt

SEQ ID NO: 251315 - DNA, 235 bp, Glycine max
  unsure (1)..(235): unsure at all n locations
gtcttattggctccccccaaagnttgtctcttcccggacaacacgcgacactgccaattctgttttttaaccggcgcaaaaggtcgtaaccgcaatccttaatacgtccagaaacttatcaaccaaactgaggccacttcactaaaaacttgaataacccgttgtgaccttaccaggtgtgtattttccgaactcttgcaaacccattgacctcttctagatagaaacacgtatt

SEQ ID NO: 251316 - DNA, 334 bp, Glycine max
acctgcattacggacctataaaactcagcttgtatgttgcgggcctcctccttgctagtctagcttcgtcctatgccaacaatacgagattatcgcgtatagcacctatacagtagttgctccccttagctgagacgatccaaatccacttggacgatatacttgattgtctaacctcgagggggagcaatcattggagagattcagaccttcgtcgattgagaaacgccctcgacgcctctatcacaatacaaaaaatatctccactgcgcataactatgccttggacatgcaccacatttatatcttctcgactatatgactctagagacaa

SEQ ID NO: 251317 - DNA, 454 bp, Glycine max
agctagtccatgtcaagagctaacaccttatttttgtatgttttacaaaagcactttcaggtttggtttctggtaaattcattgtcaaattgggaatgattaacatctattcaccaacttaaggggtatcacgattaagcagctgcagttaattacaagaagttatttgaatagctaattggctatgacagttagttagctactcgaagttatttgagtaagttagttgattactcaagttagttatcttctgtctttgtataaataaaccaactttgtaatactttgatgaatgaatctttgaactgcttttcatttatctttatttgtctataattatctaacaattcatgtcaatttgagttcacaatctgttttaaacacacactaagtcttggtgtgtgtaagctagaatgaattttcttatggacactcgtatatatgcttaacgtaa

SEQ ID NO: 251318 - DNA, 486 bp, Glycine max
  unsure (1)..(486): unsure at all n locations
cattcggaccttaaaactcaagctacatacataatggattgtgattagatgattatgcaaataaatctatactcttagtatataaccgtttttcttttgatagtgtgaaaaaatcttatattatcatttaattatgattcatcatgtatgataaatttgttgacttctataatattaaatgtatcaataatttgcatatttttttctaaacttatccttataattattgatattttactctcttattttcgcgtgatatgaacacgaaaaaaatatgaaattgccttgaaaaatttatgtttagagaatagtagttcttaatttttcagggaacagtatcgatctaactcttaagaaaattagaatgtaagtgataagcggtgtgatattggtcatggaaagatgctttcataaatcacatttggntctcctttttaaccatattattgatatagaatatctatcggttatgttgatgtctaatat

SEQ ID NO: 251319 - DNA, 324 bp, Glycine max
  unsure (1)..(324): unsure at all n locations
agcttggttcgaggtacttaccggttgtagatctaataacgatgaagaacgaatgaagaacgtcgaagaacggttgaaaccttggcgaaattcctcacggaaaacgttacggaaacgtttcggaagcgcctcggcttatattttcttcacggaaacaatttttccaagcacattcgaaagagagaaaagtgcctcaggggctgaaccccttccttcttgctttcctcccctatttatagcaaaataggggaggtggttgccgnccagctcgcccaggcaagcaggggtgcttcctccagaacaaccgccttctggaggaatatt

SEQ ID NO: 251320 - DNA, 421 bp, Glycine max
atgcgaatgctattagcaccatcaattgatggtagcctatccctctatcaagcctaaaaagccatttggaatcattacgcctgttcattgctgtatgacttgagatgaaatgcaacggttgggacttgtgttatttgtgtatgatggaatgagcctaatctcttaagcttgagtgaaacaatgactctgacgttttggttgatgacccttccttgaattctgtcgtcctaactagcttatttcagatgtgactctaatacgtgtgttcctatctttgaacacctagctgattgtgacaagcaatttattgaagctttccatgatattcagctcatatggttgaattactctatgatgcagacaccatttttgggtgaccactgtatgtagccacttgatgacatctgaactgtactttctt

SEQ ID NO: 251321 - DNA, 344 bp, Glycine max
  unsure (1)..(344): unsure at all n locations
atccttaagtcacctgcggcatgcaagcttgaatcggacatccgtgtganatgttattactcttttgaattctcaagagcttccgttgttcaatttcgagcctctcgacatattatgcacccgaatcggacatccgtgtgaaaagtcatgatcatcttaatttctcgagagtttccgatgtttaatttcgagcgtatcgatatgttataaccgcgaatcggacctcagtgtgaaacagtatgaccatttgaatatgacgagagcttccgntggtcaatttcgaatatcactatttgtgatgcgcctcaattggacattcgagttatatgttatgaccatttgga

SEQ ID NO: 251322 - DNA, 179 bp, Glycine max
tcgaacatacacgtgagaagctatggccatattaatatcgccagagcttcccacgcggatgttcgagcgtggcgctttatatgtcgcctggctcggacctgcacgaggcaagctattgccatatgaaactggcgagagctttcgcagataaattccgagggaatccatatggtatgcac

SEQ ID NO: 251323 - DNA, 405 bp, Glycine max
agcttcaacattcaacttcgagcgtctcgtttattatacgactcaatgagacatccgagtcaaaagttattgtcgttagaattggctcaaagcttcaacattcaatttcgagcgtctcgatatatgacgggactcaatcagacatccgagtaaaaagatattgtcgtcttaattggctcagagcttctacattcaatttcgagcgtctcgatatatgacgggactcaatcaggcatccgagtaaaaagttattgtcgtttgaaatggctgagagcttcaacattcaatttcgagcgtctcgatatgttacgggactctatcagacatccgagtaaaaagttatttgtcgttgaagtggctcagatcttcaacattcaatttcaagcgtctcgattattacgggac

SEQ ID NO: 251324 - DNA, 465 bp, Glycine max
  unsure (1)..(465): unsure at all n locations
ttgagccaattcaaacaacaatgactgtgtactcggatgtctaataaagacctgcaatataacgagacgctcgaagttgaatgttgaagctttgagcaaatttaaacgacaataactttntactccgatgtatgattgagtcccgtaatatatcgagacgctcgaaagtgaattttgaagatctgagcaaattcaaacgataataacgttttactcggatgtctgattgagtcccgtaatatatcgagacgctcgaaattgaatgttgaagctctgagcaaattcaaacaacaataactntttacccggatgtctgactgagtcctataatataacgagacgctcaaagttgaatgttgaagctctgagcacatttaaactacaataactgtctacatggatgtcttattgagtcctgtaatatatcgagacgctcgaaaatgaatgtcaaactctgagcaaatc

SEQ ID NO: 251325 - DNA, 357 bp, Glycine max
  unsure (1)..(357): unsure at all n locations
agctntgcagcataacgactgcagtttgagagctctgggcatttgtgtcctgccgaagcanacggaggagctggagtggatgatgaaaggatgtcatctgctctggccctagttntcctttttcttgatgccatctagaataaaaagaactcacaattcacattagacccacatttatctcaatttaaaaacagcaaataaaagctgagattaactatgagcgcttagcggaataaggctcgcttaatgcgcgctcagaanaataacactacggcttagcgcaacagggccacgcttagccaaatatgactganaaattgtttttgcataattgcgttaatgaagtagatactcact

SEQ ID NO: 251326 - DNA, 361 bp, Glycine max
  unsure (1)..(361): unsure at all n locations
aacaactcatatggatagcatatatagcattatggggttctcttcaagtggctttcaattcccatttaagtccaaattctccacttaaaatgaacaaaaataacatagcatgaggttccttgtttgtttttgcatacttgtatttaatactaacattggctaccttggctcctacctgtcacatgaaggcatagatgcacatcactttcaccaataaataacccaacaatgcaaaccctntaggataatttctcttcagtctattaccaaatatggacaaaactgactagactatgcaaccaaccacagtcatatgtagaaatcttcgtggggcctttgccatcgattatattgttttctc

SEQ ID NO: 251327 - DNA, 433 bp, Glycine max
  unsure (1)..(433): unsure at all n locations
cagcttaagaatagaaagttcaccaatagaactcttgtttctatagcttanaggccaaccagttgaacattntctcatcaaagctgtccagaagattgaacccttttcaaagaaaccagaaatacagttcttatgcagaattgtgagcgacaaaatagaagccttaatttatacatatagacaccaactatgaatctacgattctatgaactatgcagggtgacgtgagaaagactaatatcaattatcaagcgctaactccatctccggggttaaattctgtgatcccaagtcggccacttgaaactgtgaagcatacttggtggaagcagcttctataactggcggttcattcaaaaatgcccagctggttctggtccacctgcactcaccccaagcataagctgaaatatatattaattacctatacatc

SEQ ID NO: 251328 - DNA, 432 bp, Glycine max
  unsure (1)..(432): unsure at all n locations
actcagcttcctgattaggcgaccacactatgctatcgagaatactgcttgtcatattacaatanctcgtagtttaactagtttacagaattaactaaatgtcttgtctaactcctcttgcgtatcaagcatgttctcacactgcaacattaactctacttgattatgatcctatgttcggatgaagggcacatttcagccatgaacaacatatttctcatctaactacggttgagattccatatcactgcctcattccacatttacacggttcaaattgtgcaccatttgggtgatattccacggatcttactcgatcactgtcaattgtcgcatctttgaaacttatatgctgaaacctgaatttttaacttgttgacaaatgaaccactcgacccagcaggtgcatattctgtaacataccaaatcatg

SEQ ID NO: 251329 - DNA, 373 bp, Glycine max
  unsure (1)..(373): unsure at all n locations
ccatgatgtaatctccttcttgacagtctctcaccaaggtggagtggtatcacagcattgaactaagatgatcgttcccatgggatgatgtgtttgattgctgcacataatgtgtgtgattgtgagtttctggtcccatgagttaaactacaacgactaaaaaaaatattgtcgtaactttaaagatcaaaaggataattaaaccttttatttttttattactttntttaacaacgggttatatatatgcagcagtttattctaaacaatggactacgtctgaaatctttgaattctatgtaagaaatgttatttcaaacttctcatcagtcttcatgtcaatgatggcatgctccatttgaattctatgtct

SEQ ID NO: 251330 - DNA, 327 bp, Glycine max
cactttacatgtgggtcctaattggattcctaatattcaacttacctatttggatgtgacatcttggcagataagtcccaacttttcatcgtggatactatctctaaacagactttaatatgttggactgtctaacacggagactttagattctattcccacttggttctgggaaccacactctcacgtattgtatttaaacctctcttataatcatatccatggtgagcttgcgactacattacaaaatccaatatctatccaaactgttgatctaagcacatatcacttatgtggtaaattaccctatctttctaatgatgtgta

SEQ ID NO: 251331 - DNA, 433 bp, Glycine max
  unsure (1)..(433): unsure at all n locations
gcatgcaagctcttggagtataaacatgggaccaacttatttttttttataaagacagtcgtatctactcaaagtctgagagaccatacaagtttcctaacgaattctaattatgtgggccattaagtctatcatatgctgacaatagccgagaagcgcatgaatctcttcgggggcggagtaagtgtctgccatcgccttggccttggctaacaagcggagaagttcttgactcccgttcaaggtaagagcaaaccgatccatccacatgagtgcctcttggtgtaaagagtcgatcacccttcctctagcctcttnttccgcgtatacttgagcatactcgtccgcgattctatgttcatgggccgcggctagacctaactcttcttggtacttggcgatgatagctagcatggtggtctccgtctcgcat

SEQ ID NO: 251332 - DNA, 424 bp, Glycine max
  unsure (1)..(424): unsure at all n locations
tatccatatcaagctgtgactgaggtggtaagattggattacaggtcaagtattgtttgatatactactacttactcattcattctctaagttacttctctttcatgtatatgtggagagaagagaaaaatattggtaggttgcatcttntacccttgcgtacacagcaacaacaagccttccttcatgatttagccttctgatccaatccagcaacttgagtatcacatcagagtatgtgacatcaatagcccttcatccagaaaccacctccaacacaacaatcacaaagttgaacacatcagatattgaggtancaatgctccttctctggaagctccagtggcaccagctagccaagcttctctatagttaatttcttttatttacattctcaccctgttagtgtacgttccatcatgga

SEQ ID NO: 251333 - DNA, 254 bp, Glycine max
ctttcaagcactatatacaatccaggtgggaggaatcatcccaatctgagatggaaaagctctccacaacaacaacaaccatggtcctctctttcagaaagatgctggtccaagcaagccacatgttccttctccaatacagcaccagcaatcactacacagacaacaagaaactgaggctcctcctcaaccttccttacaagaagtagtgatgcaaaagaccatccagaatattcctattcagcaagagacaa

SEQ ID NO: 251334 - DNA, 435 bp, Glycine max
accactttgctgccaattctttcgcggctcaaagattttttaggtttgtgctaaggaggtcctcgacattggaagcgcggtatacagactttgtggttgatttagggatggcctttgtggataactgggtggtggggtaaagaggaggtttgttattggctgagtaatgacattgttgggctggtaggaaactttggcatataagaaatggtactcacagcatgggtttctccctctttttaccctcttcatttgcccgaggttctcaggcggcctattaggatgatcaaatatgcctctattccgatccacttcgatctatttgttggcgaacaccaaatctgtaaaacttgaaggtgtgtaacccaacatttttttcatatttaaacaccggtcactgtctctatcattatgataacactttctctgtttaag

SEQ ID NO: 251335 - DNA, 233 bp, Glycine max
cgagctgcacttaataggaaaggggcttcttttttgtgttcacgcgactaggcctgtcttcttcccgagctattaacgccgcgaaagctaacctaacaacccccacatgtccggatcatcagcacttgccgcgtggtttgctaaccatccggatataacgtccgaaaaaccggcctcatacgtgctcgacaacaagtagccaaaggagcccgagagagcgccccaaaaatgaa

SEQ ID NO: 251336 - DNA, 199 bp, Glycine max
  unsure (1)..(199): unsure at all n locations
tatatttatatatatcatttgcatgaatgctcgcattgttaaaagatcttcttgattcaggtactncaaattgaagaaatgtgtcagtaagacatatgttacaggagattatgctattgggataattcccaagaggccggagaggcttactgcaacacctccgagatccacactcctgtaaaacggtgttgatgtgttc

SEQ ID NO: 251337 - DNA, 422 bp, Glycine max
  unsure (1)..(422): unsure at all n locations
atataccataaattgttgtagaatctactagttttattacgctgacttatcctttcattcgctaactttcaaaaggtatataagcttcctcttatagtctgctaggccatgtattagtgtctcaaaagccaaagcatgctactactaaatatgtttctaaagagacatacaaaatccctttctctcctttggcttcgattattgctaatcttgctgatcattgcttcagttaatggaaatgagcagaatgcatttgatttcttctcccttttcattccttattagcaatagatctatttgatatgtttcatattaaaacttctaacctctaacatgcatgttaatcgttgctttccgtatgagctcaaccattatttgacttgtctgcagaactattacatagttnttttgggagctcatac

SEQ ID NO: 251338 - DNA, 443 bp, Glycine max
  unsure (1)..(443): unsure at all n locations
gaccttacaaactcagctcnaggtaaaacttactagcgcacaacattcctgatattctcntataatagataccatctgtgacacgagtctaatacaagcatgaagttgtgcgcgaagagaaactacatgatcactttccttaatatactcctgcagatcaaggagacatacgaaaacctatcatcaaatcaaacaaaagcaaaagcattagctgagtcaaacaaccacaccttaatcaagaattcatactaaccacgataagcanaactaaaagcaccagctgccaacagattcagaaaattgaccacaaacctgaattgaatccaattcaactctgcgcaaatccgactcaactacttttgtataatccctaagcttggtacctctagacagaatatgtgccactacctacacaatacaaagcaccacagtaacttaatata

SEQ ID NO: 251339 - DNA, 333 bp, Glycine max
  unsure (1)..(333): unsure at all n locations
agctagaatcggacatccgtgtganaagttattatcattgaatttctcaagagcttccgttgttcaatatcgagcctctcgacatattatgcacccgaatcggacatccgtgtgaaaagtcatgatcatttgaatttctcgagagttttcgatgtttaatttcgagcgcatcaatattttataaccctgaatcggacctcagtgtgaaaagttatgaccatttgaatttgacgagagcttccggttgtcaatttcgaatatcactatatgtgatgcgcctaaatcggacattcgagttgaaagtatgaccacttggattctcaagagatctgt

SEQ ID NO: 251340 - DNA, 182 bp, Glycine max
ctcggacatccgcgtgagaagctatggccatattcatatctccagagcttccgacgctgaagttcgagcgtgtcgctatattattcgcctggctcggacttgcgcgtgacaagctatggccatttgaatctggcgagagctttcgctgtgcaattccgagcgtctctatatgggaatcacct

SEQ ID NO: 251341 - DNA, 494 bp, Glycine max
agcaagctttaaaagggtaaaggctcacattctctttcttctacatcatattcaaacttgtccaaataaataataaagtcatctcgactcaaagaaggtcatctaagtctcatacaattaatatagaacctatatcctaatgtcacatcctatcagagcgtggtgttcccgtgtcctctagcatgaggttcttcatagtcatccacctattcatctgctcccccgaacacaaagttcaagatcatcacaggatccaaacacaaacagcaaaccgggagtcaaatacaatttacttagcatatctcacattattccaactactagagagaaacaacacaacatatagtagccaaatacaatgtacttagcatatctcacattatttcatcactgtgtcattcatcaatcacacttttcatccatcaatcacaccgttcaatcatcaatcactatacacaggaatcacacacttcgatcaagacataataacacat

SEQ ID NO: 251342 - DNA, 277 bp, Glycine max
  unsure (1)..(277): unsure at all n locations
atgacttcgaatccaagattgggagaaagcgacttccgcaagtctattcccgatctcagatcctatgataccagaagaaatatgcttactagcttttgggccatacagtatctgatcaatccataattgtcgcctccgattttggatatattggtgacaacgacctgaagcgctcctatcccttngattgactctcacattctgtgctgtattgactttgtcaccatgcactattcaaaaatagaaacggatcaggtctaatcactctgagccaaaa

SEQ ID NO: 251343 - DNA, 333 bp, Glycine max
acatcaatgggccatgagcaaccacacaagtgaacttgactccacgctttaacccaaaaccttaaggcttaagtttatgggtcttatcttcacatatataatgttcaatcttcatattcttacccgatgtggaacttcacctcacattagtagtccaacaatctccccttcaagtgtgagtctcttccacattatagcctccccatcgagcggaagacattttcaatccacgagtattaaaggtggtccttagagcttaactgtggctgccccgacttatctaaccattaccgctaacatgctctattaccttgcacccgcacaacacctttg

SEQ ID NO: 251344 - DNA, 70 bp, Glycine max
tggataaatcctcgttggtttacggaaattaacatgaccttcgagatggaaacaatcggatcttgtaaag

SEQ ID NO: 251345 - DNA, 471 bp, Glycine max
  unsure (1)..(471): unsure at all n locations
agcttgtcgctcgagctgacccatcaactactctaactctttcatactagcgactcctanactcttgaccttgactagatagnaacctcttttaagcgaaggcgtctgactcaatcccatgttttactaaagtgaaacaaaacccagtgcgaatcaagactccaacatttatcatgggtggaatggatgaatgcatgaagaaatgtgtatggcacagatgcattttatgaatatgggagcccgggagattgtccccttcttagatacaacattcgggcagcatggtgcccgatgtatgcatttaagaaggcgacacggacccttcatcagttcgtgacaaagtgatgggatcaagacgcaactcgtgcatgatgcatatgctaaaaagggcacaacacggtgatgtacatagtatgacaatatccacaaataatcatacatcanaggcataccatgacatttagactacat

SEQ ID NO: 251346 - DNA, 456 bp, Glycine max
  unsure (1)..(456): unsure at all n locations
atcctaactcaccatanaccttgaccctgtgtgagaatgcccatccttgctctcagaagaagacaaaaaaaagaaagttcccgatcaagggtcggaagaaagcaaaagaagaaaactcccaatcaaagattgggagaaagcaaaaaaagaaagaaaattcccgatcaaagatcggaagaaaacaaaagatatatgcagaaaggtctttgggccagacaatatctgaacaatacagaattgtcaccaccaaataaggaaagaaaggaaaccacgacctgaagtggtcctctccctttgattgccaaccaaaatcctgtgcgtcagtgactttttcacctcgcactaaacaaaaatagaaaaggaaaaggccaaaacactcagagccaaaatcccctccaaaaacactatgccccaagaaaaagtccaattgatccatgatcacgcatataatctttg

SEQ ID NO: 251347 - DNA, 258 bp, Glycine max
cccccccaaggttgtctcttcgacttatacgagtcatgatcatacccgattatctactacaacaaaggcatagcatcccatgtaccccataagctaccttagtaaaaaggacaaaggtctggagtgcaaacacctgaagataataaccaaggcgaccacaaaacttgagaaaacccccactattagatatacaaaaagttgaggaaatacctcacaagtttgactagttgtatttacaacagaaaacttccaattcaa

SEQ ID NO: 251348 - DNA, 481 bp, Glycine max
  unsure (1)..(481): unsure at all n locations
ctggtaagcacattcacagaagcagctgncacctgcgctagcaccatcattatggcaggcttcaactcttgcactcctttccatgtgtaattcatctttattgcctagctgctgtaatatactggtttgaaattgaataacgaaaaagagaaattataggatatatagaacatgcatatcattgccaatagcccacacagcaatgcatatatataggaaactaataatactcgatcagattatttctaggttaaaaaagcttgcatttcgttttagtttactatacataaactaaggacaaaacttatagtgacgcatctcaagagaattaatttgtcttatttgtcaatataaaatagagttttatggggatttaaatattttctcgttgagttatatggggaattaaatatattcttcgtgagtcactgtataagttatactataattaattataatacactactacaaatacaagaat

SEQ ID NO: 251349 - DNA, 312 bp, Glycine max
  unsure (1)..(312): unsure at all n locations
ctttcattctcttctttctttgcccaaaagaaatcaacaaggactaatcgcctgaattctttttgggtctctcttctcccttnttcaaaaaaatgaaagactaaccgcctgaattcttttgcgtctcccttctcccttctcaagagaattcaacaggacacagtctgagaatccttttgattcttccctttcccttaaacaaaagattcaaaggactagccgcctgaggtatctcttgtttccccttacaaagattcaaaggactaacctgctgagaattctttagtctaacacattggaggacacatcctt

SEQ ID NO: 251350 - DNA, 179 bp, Glycine max
ctgcgacatacctcacgaacacgcaggaaatatctagcccgtgtacacgcgggatgcagcaccggctccggtctactaactgaactgaaagtcggcgcggtggctaaatcctctatagaagtcaggaccatgaacatgacctccgagatggaagccattcgatcctttaaagtcgatat

SEQ ID NO: 251351 - DNA, 246 bp, Glycine max
  unsure (1)..(246): unsure at all n locations
agctttgnagcagagctctgaaagacaagagttgtgtaatagaagctcaagatggccgtcactaaggtcacgaaagtatgattagctaaaagatgtcaacctataagggctcgaaaggaagaatggaacaggaacaagttctgaggggctctgtggggcagcaataacgagctcaagcttacaagtgctgacagggacgaatcgatgattgaaagcatggtgttagaaagtaagttaaaagcttgt

SEQ ID NO: 251352 - DNA, 354 bp, Glycine max
aatggacctacattcatcctttttaaacgtttatttaaattcacgagtcaacttgtgatcgtatatattaacttacaacatgccttatgagattaattttggtcgtacatgccttttccaattatgttcatggccatatgtatggttatgcccttcagataatgtgaaacattttatttctatttaagtttccattccagtgtacgaaaatattgaatttcctaattggttttatagaataatcttcaccaaataattcttctttttttatggagaaaaattctggaaaaattttcaatttccttgtatctattgacgtaacatttttggtaatgtttatttttcacgtcactg

SEQ ID NO: 251353 - DNA, 180 bp, Glycine max
ccaacaaggcaaactgcttcctcctgaaaataacaattataggtggagtaagaggagctaaaccttcgcactacgagacatgtctccctatatgggctgcgtaacaaggacaacttaaatgtataggacctattctactgggaggcccaaaattatcttagacggaacctcctttaaata

SEQ ID NO: 251354 - DNA, 443 bp, Glycine max
  unsure (1)..(443): unsure at all n locations
tcttaaaatcacctgaggcatgcaagcttngctcgtatcaatcaagtgtattgtctcttttgtatccaacgtgctcatcaataatggttccagattaaacgtgatgcccaataacacattggagaaattaccattcaatgcttcccacctaaagccaagttccatggtggttagtgccttccaccgcacccgccgagaggttaagggagagatcgacctctctgtacagataggccctcacacctgtcaagttaccttccaaataatggatattaacgcctccctaacagctgcctcgttggggcacctcgtggatccactctatgggagtaagtccctctacactccaccaaaagttgagatncatagtggacggcacttggtcatccgatcaagcgaggaagacatcgtggtacgctgcccatcatctatgccttatgtgg

SEQ ID NO: 251355 - DNA, 417 bp, Glycine max
  unsure (1)..(417): unsure at all n locations
tatccacactcacgcttaagtacaaaatggatctagggcgtatcgcatgacaactctggtagcactactaccgtaaaaattttccagagaagaagtggcacttaacacatcatccacgccaagcccactacttaaggttcaattatagtgaagatgttgggcttagcgcagngatgtgcgcttaactgaactatttagccaaccaatcaggggtctctgcgcttagcgtaagcaagctttggctatcgctggagactgagcgcttagtggatagacaattgcaaaataatttgagtctttgtctgtctatcttttcacaccagcttaaaaccccttgttcattactaaacaagctgaaattaatcacaatcactagcaaggtatcctaactacatgcaagagataagaattgaaaat

SEQ ID NO: 251356 - DNA, 430 bp, Glycine max
  unsure (1)..(430): unsure at all n locations
agcttcaacattcaacttcgagcgtctctgtaattatatgactcaattagacatccgagtaaaaacttattgtcgtgtgaatttgctcagagcttcaacattcaatttcgagcgtctctatatattatgggactatatcagacatccgagtaaaaagttattgtcgtttgaatttgctcagagcttcaacattcaatttcgagcgtctccatatattacgggactcaatcagacatccgagtaaaacggtattgtcgtttgaatttgctcagagcttcaacattcatcttcgagtgtctcgttatattacgggactcaatcagacatccgagtaaaatgttattggcgcttgaatttgctcacagctctaacattcaaattccagcgtctcgtatatnatacgactaaatatacatccgagttaaaagta

SEQ ID NO: 251357 - DNA, 439 bp, Glycine max
  unsure (1)..(439): unsure at all n locations
ctataaaactcaagcttagcaattcaacaacaatacttttactgggatgttgattgagtcccgcaatatatcgagacgctcaaaattgaatgttgaagctctgagccaattcaaacgacaataactttttactcggatgattgattgagtcccgtattatatcgagaccctcgacaatgaatgttgaagctctgagccaattcaaacgacaataactttttactcggatggcctattcaatgacgtattatattgggacgtttgaaattgaatgttgagcctctgagcaaatacaaacgacaataactttgatgcaatcctccctatgaagggaccaatcactaaaaccatgagcaagatgctccaagaagattgggctatagctgctgaagaatgccctangattctcatgaaccttacggtagatttctgagccatg

SEQ ID NO: 251358 - DNA, 205 bp, Glycine max
ctattctccaccttaaaaaactactacatatgccctgccctttacgaagatgcaaataccctgcctatgaattcaaacctgtaatcagaacattgtcaagaataccccaatgggaggactgatggatcaaaaaaactacccaccaatatatgtaaaaacataaaaatgtggttacgaaaagaagaacttgaccttgtaaaactgt

SEQ ID NO: 251359 - DNA, 360 bp, Glycine max
tttgagccttgcatatggagtcatattaagcatttatatgcacatgtatggatcaagccattcggtgacctttccattatttgatgagggatctccaacacatctccctcatgttaaggattggacatgtccaacacaccaattaagccctgcaacaatcactagctaacaccatattaggaatttgagtttgagcctaactcaatcccacaaactctacttgtgaggtaaaggttccccctgcccacttataacaactatctggtcatataactagcgggttggaatcttcaacatctaataacacaatcttataggaaccacattccagactataagtactatacaccttgtctcctt

SEQ ID NO: 251360 - DNA, 321 bp, Glycine max
  unsure (1)..(321): unsure at all n locations
tcattacaaaactcgatctgctcatgagaaacaaagaaaatccgtactaatgaacaccatantacactctactaccagtcgcgctctgtccatagttatcattaaagggaatttcctggcctcacatgtgagccttactggcgcaagcacataaacacaatactccaataatgcatcatacgggactctttttgaaaatggatcttttactctgtgcctgcaaggactactgacccttccaccttatgagtcagcgcatcacatagacacgatatatcgtaagatataagtctggatgacatatatggagagagccacacg

SEQ ID NO: 251361 - DNA, 169 bp, Glycine max
  unsure (1)..(169): unsure at all n locations
ggaccttaagcaccgcagctgcactttgagaaaactggaccactcttttatttanaaaggaagtcatatctattcaaggtctgagagacctatacaagtttctaacgatttctaattatgtgggccattaagtctatcatatgctgacaatagccgagaagcccatgaa

SEQ ID NO: 251362 - DNA, 413 bp, Glycine max
cttgtatggtagaaggtgtatgacacccctatgttggatatatcccggataatgccttaccttacatcggaagtggtgaaccatccacagagaagatcaagttgatctcttataggatgaggactgctcacagtacgcataaaagttattatgattataggaggaatggtttggaattcaaagatggtgaacatgttattttgagagtcactctgtggactggggttgagtgaatagtgagataccgaaaactcacacctcgctttattggtcctttccaaatacttaagatagtatggcctgtggcataccaaattgcatacccacgtctcattctatacttaccacttctttcatgtggctaactccgtaacttattcgtgatccatccattggattgaattggatgatgt

SEQ ID NO: 251363 - DNA, 365 bp, Glycine max
agcttttgcacgacagaacaatatcatctatctttgaagaggctcacttttctgagtcatcatcttctaattcacctacatcctgggaatctcaaacaacagaatttgaagccgaagtcatggctgaagagcaacctccatgagtgaccttgggagattactcaagtacttcggtgccgcaatatttctcaagtgttgcgcgaccagaggttcaagcacaaaacttaacttacccaccttcaatgatacagttaatacagagcaattagtttcatggtttaccaaatgaagatccatactcacacttggcaacatatattgagatttgaatactgtcaagcttgctggtgtacctgaagatgcta

SEQ ID NO: 251364 - DNA, 371 bp, Glycine max
ctgtcagtgtacctgaagatgctattaagcttatttctgtttcatcttcttcaaccggggaggccaaaagatggtcgtgctcattcaatggcaacaatataaagacctgggaagaagctgcagataagtttctaaaacaattttctctagaatctaatactggacagggaaaagttgtaatttcttcattccatcaatgtcccgtagaatctttgagtgaggcattataaacattccgtaccttgctatggaaactcccactcatggtttataagaccctatacagctgaacatcttcattgatgggaaatggccgcagacaaagcagttactcaacgcttttgcgggaggaaacattaagtcgaagacac

SEQ ID NO: 251365 - DNA, 408 bp, Glycine max
  unsure (1)..(408): unsure at all n locations
agagataagggggagcacgaaattgaaggaagaaaaagggagagaagttgaactttgagttgtgtctcacaagactctcattcatcaaagttacaacaagtgttacacatgcttttatttatagactaagtagcttccttgagaagctttcctgagaaaacttcctttagaaaacttccttgagaagctagagcttagctacacacacccctctcataactaagctcacctccttgagaagcttccttaagaagattcataaagaagctataacttaactacacatacctctctaatagctaagctcacctccttgagatgagaagctagagcttagctacacatcccctataatagctaagctcacccccatggaanaatacatganaataccaacaaaaatcctac

SEQ ID NO: 251366 - DNA, 472 bp, Glycine max
  unsure (1)..(472): unsure at all n locations
acttccaatactcaagctcttaacaagatatgatcctcctggacatcaggaggtttcatggtggaacagacaatatgaaactccttaagatgcttatgatgatcttcacctgcatgaccatgaaacttgggcagcaaatgtattagtccagtcttgagaacatatggaacaccctcatcatgatattgaatgcacaagctatcataagtgatatcaagtgcagccatttccctaagagtcctctcacgaggtggaggttgagccatgttcttagtatgaaaattagtaattgaaagctcaaaatcagaatattctgaatcaccagctacagaatactaagaatgctcaacatgctcataatgcacagaatgactaggatgcacactatgcctaactaatctatgaaaggctctatctatttcatgatcatacggttgaaatcacctgaanttgccctaaacatgcactatat

SEQ ID NO: 251367 - DNA, 465 bp, Glycine max
  unsure (1)..(465): unsure at all n locations
agcttctattgacagccactcatggcacatgttctcatgcttccctcctttgagaggtattagtgcaatgacatgtcggcatggcatccttacatcaaagttgtaaaatcagcacacaagtatgttaggaatgataaaaaaaaactataaagaacacaacctggtagtggccatactccacaagtgcatgtccattcacctaaattgacctcaaccttattcccccacatgtggacctcacatctcaggcccatgttatcaccacaccaaatgggagtccattgattnagcaaatgaaattctttttctagtcttttatactgcactggacataatggtccaggctttccagaaagtttaactctgtgggcagccataggtctcatgaatataacttctaattcttcaagcattgtgataataggcttgcacctatactgcagaattcttgaattgatacctcac

SEQ ID NO: 251368 - DNA, 407 bp, Glycine max
ttgagcctaaatcctgactcaccataaaccttgacacatggtgagaatgtttatccttaccctccgaagcaaaataaaaaatggaaaaatgataaggaaaacttccaatcaaaggaaaaaggaaaggtaatctcccatctaagagtgggagaaagcaaaaagaaaagaaagataattcccaatcaacgaatgggtgaaagaaaaaatgatagatgtttaacagatgatagctcctggtcagagaaaccataagaaatgtgccgagaggtccttggaccatacaatatctgaacaatacagaattgttaccacatgaataaacaagaatgaaaggaaaccacgacctataatggtctctcccctttaattgccaccaaaatcttgtgctccccgcactatacataaac

SEQ ID NO: 251369 - DNA, 431 bp, Glycine max
  unsure (1)..(431): unsure at all n locations
agctagagaatacncttctagatcaagtagatggacttagtccgctcaagcatgtaaactctgcgtaactcttatagaaaaaagtccaagttatgcattgagatacagaccaatgccagttaaaaagctacccttcttaagaacttttcggagttggaaaacaaatggaaagatcttcaaaaggatctgaaagagcttaatgaacttgaccatcatcaaaagaaagaaagatatgatctttggagaaagtgtgcataagcacacaaagattatgttgaactcataacgagtaaacataatctgtgggtggaatgtgaagaacacaaganatctgaagtgtttaataatgagctttaaagtataagaacttaaggtcaaccttaagatgttgaatacttcatgagaaaataagaaccttanagactacttta

SEQ ID NO: 251370 - DNA, 280 bp, Glycine max
  unsure (1)..(280): unsure at all n locations
tgacagagaccaagagagaaagcggtgtgcgaatgaatgaaagagagggacagaatttgaactttgtaaggttgtctcataaagactctctattcatcaaaagctgctacaaagtgttacacatgctcctatttatagcctacggagcttccctatagaagctaagtgctacacccttccaactactcagctcacccccatgccanaataaagcattcttgagaagcttcgttacacccctccaatagcttagctcacccccaagggaacacacacacat

SEQ ID NO: 251371 - DNA, 373 bp, Glycine max
  unsure (1)..(373): unsure at all n locations
ctctgaattcgtgatggtgctcttatcgctgagtaagtggattgatcttagcgctagtcgtgcgctgagcctggctgaagacaactgttgcgcttagcgcagtgatctcgcgcttagcgcatggccttgatattgatgctctgccagattcttctgtcgcactaagcgcactgaagttgcgcttagcggtggatgcgagcttatcccactaatgaactaagctcaactgtcacttttagcacttcatgacttagcctctntttcacctganattgtacagaattcatcattaaattcaatggaaataatctagagacggctctaaccataaaacaagaattatntacaaaatcactacaaaataaccataaat

SEQ ID NO: 251372 - DNA, 431 bp, Glycine max
ttgcatgtttggtgattctagagagagaaaggtccaaattctatagagttttgagagattttgctgtgtgaatatctgcagagaccagagcctgaagaggaagctgttctgagagcttgagatgagtttgtgagtggttgtgagatcctagaggtgaaggagacatcctcaccacttgtattttcgcaatctttcatcttgttcttctctttgttgtaaaggaggctttctgtgtatggaaagctaaaatcctctattggatctttcctgcaggtacttgatgtaaatatcgttctatctatttattgatgatttgtgtgttctctgtgctatcagcttttcattctagtatgcctttaccttgatcacgtagatgcatgctttgttagggtattcaacagtggaaactggtctgattctgatgaccttga

SEQ ID NO: 251373 - DNA, 367 bp, Glycine max
  unsure (1)..(367): unsure at all n locations
agctnctagccaaatggacttacctcgatgatatttttttatagccctcttgagccttgtttccctttccttggtttgaagctcactacaagccttaaatgaagaaccatgatatcaccatatctttaaagaattttggagctttggaattgatttgggaataagtgtggcggggtttttgtttcattggataacctgttttgttggctatgcttccggatggattttgggccatacttgatgtacattgttattggttaaatgttggacatgctgaatgaaatgttgtttttcacaagctatatagtaaaaaacaaaaaaaatcttaaaaaagaataataaaaaaaaactcataagttgaggaata

SEQ ID NO: 251374 - DNA, 258 bp, Glycine max
tgctcattctactatagtaaaccatcctttatgggatcattgtcactaatgagctggtggattgggcttataggcatgacataagttctttatgttcaaagatcactcttaaaaagcttacaattctattaattagcaggtcctatactataattcatagagattgggatttggtatataaaggaggagagggtgtaacgccatagtttgtacaaataacatattcgttctagccaacgacaatttgatatttgaatt

SEQ ID NO: 251375 - DNA, 405 bp, Glycine max
  unsure (1)..(405): unsure at all n locations
agctntataagcgtgggtctgggagacaaatgttaagtgttcgcgatatgcgaagatgatgttccgagtactttggatttggtacgaccatgccctcctgatntctggctcgggaaatggcgagtggaagaacgccccggcatttatgcaacgagcataatgtaaacctttacggttttaaaagctctatagttgggcctaagctttagagtttttccttttgttaagggcttgtgtcttttgtttttgaatttataatacaaggatctttcttcatctgttcctgggctctacccattctcattcatctacatgtttacttctttttctgaaatggcagatccgatgacgagtccctcgaaggtactaatacctgtgacccgcctatcgacttctagcaagaaa

SEQ ID NO: 251376 - DNA, 434 bp, Glycine max
  unsure (1)..(434): unsure at all n locations
tccatcaagtggaatcagagcacaagagcttctagtaggtgctccttaaacctccattaattatttttctttaccttctcttccatatttgtttcttcatttttctccatgtatctcctcacatgtcttgttctaaatgtttttaacatgattctttatagtttccaccgattaaacttgctatagaagttagatttgattttctatggttcaaatttcttgttcttgttcttgaaccatgaattgtgttgagtttacgttcctttgagttttgtcttgctattttttgtggctgaaacctaaaccatataattcttacaaagatattaaagtagaagaaaacctcataaatctagagtgacttgntcacctatctgagtcttgtcatagaagtcatgtctagtcatgaaactctgcacataagatntcttatg

SEQ ID NO: 251377 - DNA, 434 bp, Glycine max
  unsure (1)..(434): unsure at all n locations
atccttaagtcacctgcggctgcagcttgaaatatatgcctgtgcttctctttacgtaattctgagctgccaagaagctcgtcctctacctttcaccttcttaagaagtaatcaaagccatgcattntcagggagtgccacaaaattggttaaggagcttttgctaaggaagcaattgcttggtacggaaaattatgagcctaatcgactcagtccaggtggtccagaccctcttcatcactaatgaatgtgcaattaatgcatgaaaacttgagaatcatagattcttgccacaggaaaaggaaagaatgttattgccactgcatttaccttcccacgtacgcattccttttagaaataggagtccataaatcattctatcgcataaaaagaattaattgaccatctttagttgattcttaagaagaatcaca

SEQ ID NO: 251378 - DNA, 407 bp, Glycine max
tacggaactataaaactaagctcctcaccacgagtggacctgcgtttggtgcttattgaatctccattctcaacttttttggagccccataaagtgcgttttcgttcatgccacctccacccacgaatttggagacatgcgccatgaatgcttactgcaatttctcattctcaatcttttttccgagccccatgaattgcggtttcgatcatgcgtcctccacccaccaatttggagacatgcctagtgatagcctagagcaattctcctttttaaccctttttggagcccatgaatgcgtttcgttatccggctccatccacgattggaccctccagagatggctttgaaatcttatattaaaatttttggaccccagaatggctttgttatgaccccacctcaat

SEQ ID NO: 251379 - DNA, 264 bp, Glycine max
  unsure (1)..(264): unsure at all n locations
ncagcttnatggagctaacctcataagactctctgtttgtacaaaacaagatgctatctaagcaactaaaggctctaacacaaacactcagtacgttgccaacttagcttcattctgcacaaacttcacattcttctatcttgcaagttgcaggatgtataatttatggtggagctcatgaatctggatgttgtattcctaatgaagagcaaattgcacatgaagttaattatatggggaatcatcccacaggaaatttcaata

SEQ ID NO: 251380 - DNA, 374 bp, Glycine max
tgcgtagttgagctatagaatgctcctgtaatggttgccttccataaatatctagataccaacattctcttttccagactgagtgctgtaaatttctctacaactactcaagaattatgcattttggatgttgatgataattttaatacaatggatatactaggaaccaaatactcgttcatctctgtattctttatacacactccgtcagagaacataattatatgctatatgaattgatgcagccattacttaaagaattaacaactattcttatatagatgacgtagatagacacttaaatgatcacagacccgctatatcactttagctcttttcaatttaatctactcaaatttgttacccatactcac

SEQ ID NO: 251381 - DNA, 267 bp, Glycine max
tcatatcttatagactcgcataaactgcaccatacatctgttgaccacctctaactgatgtcacgtactcccacgtagactatatgcttggttctttttacaccgagtatccatggatttctccaagcctccccagtatcccattaagtaccattcaatcagcacatactatcacagccacgagaaacagggcacaggctgaaaactgttgcccaaacatcaaccagaatcgcagatttgctcacttatagacaccagtacattatc

SEQ ID NO: 251382 - DNA, 465 bp, Glycine max
  unsure (1)..(465): unsure at all n locations
agcttccactcataatgactcaatctctccatatgtggtcctccgtaaatatacctcacagaaccaggctaaactagaaccaaattgactccaaaaggccttagatctatcctcaaacagtttgacatggcctgcactgcaaccttgctatcacaataagaccctgcccaaggggctgacacataaccaaccacactgccaacattcactatgctaccacttcttctcatagccatgtgaggcaccacatgctgtgtcattcttaattgcccaagtgtgttgatttcccaagcctctctgattgcattaagtggcaactcaggcaaaggcgctgtgctacctatttcagcattattaatcaaaatatctatgtgaccgtgtgttgatataacatgtgccactgctgatgacacacttngatcacaatacacatcaaactcaagtgtctcgatgttaggatctgac

SEQ ID NO: 251383 - DNA, 361 bp, Glycine max
  unsure (1)..(361): unsure at all n locations
agaagaagaagaagntcatagtgattcaggcttgtaaggattgtaatgaaatgattagaaaagtattcaagatgcaaatcaaagccttgcttttatagactcttcatgtctgatcaagaagaccatttagaagagttataacttttagaaaaacttaaaaccaatttgaaaaagtcaaaacctttttgaagagttacatcttttgatttattcagaaacagccgctggtaattgattaccaaattagtgtaatcgattacacaaggcttttaagtgaaaggatgtgactcttcacatttgaatttgaatttcaatgttcaagggcactggtaatcgattaccaaaacattgtaatcgatta

SEQ ID NO: 251384 - DNA, 485 bp, Glycine max
  unsure (1)..(485): unsure at all n locations
tggagaggatgcttcaatggaggataagaaagagggagagaaagagagaggggggagcacgaaattgaaggaagaataagggagagaagttgaactttgagttgtgtctcacaagactctcattcatcaaagttacaacaagtgttacacatgcttctatttatagactacgtagcttccttgagaagctntcttaagaaaacttccttgagaagcttctttgagaaaacttccttgagaagctagagcttagctacacacacccatctaaaaactaagctcacctcattgacaaaatacatgaaaatacaaaaaaaagtccctactacaaagactactcaaaatgccctgaaatacanagcttanaaccctatactactagaatggccaacatacaaggcccaaaagagtgaanaaactattctaatatttacaaagaagagtgtgatccaccttgacacatgagctaanaaatctaccctaag

SEQ ID NO: 251385 - DNA, 413 bp, Glycine max
  unsure (1)..(413): unsure at all n locations
accttgaacaagcaatcaacttctctttcagaaccatgttatgtgctcgcgactggtccctttctttccttcgcaacttgagttcactattgctaccccatagagctccgcgaaatttgttccggccatactcttccttgcgagccctcttggtctcttgttcaaaggctcttgcggtaattgcattctctttccgtaacccggcacactccttccgaacgtgtgtagcagccaacttgaacttctccttggcgagatttgcctttcctaactcgcttttgagagcttggacttcttcgtcctcttccggtgcttcaaaactctcttcgctgacgacttttaactcggcgagccaatctanacctcgtatgcgaactttcagccattcgtggtacccaccaatgatgtcatta

SEQ ID NO: 251386 - DNA, 455 bp, Glycine max
  unsure (1)..(455): unsure at all n locations
actcagcttaatataacctaaatgcataaagaaaggtggagaattatatgagtgatcgacagaacanaactagtatgtattctcttgagttcaggattgtcatcatcataaagggggagattgtggaagcaatgacttccaacattattttgatgatgcctaagaatcaagagttaagcatgttcctaagaatcaggagtcaaaaagctttaagaatcaagtctcgaagaattagattcaagaataatcaagattgagattcacgaatcacgagaagactctatcaagataagtactaaaaaagtttttcacaacattgagtagcacaagaatttttcacaaaatcttttaccaaagagttatactctctggtaatcgatnaccacaagatagtatccgataccagtagccaccattgttntcataactgatttacaagctattatcgattacca

SEQ ID NO: 251387 - DNA, 464 bp, Glycine max
actcactgctttacacctgaggttgtccttggcatatttgatttcctttagcggatgtgggctgcgttggcacgctggggggtgcgaacacgtgaccgctgcgggttatgctattcaaccaagtgatgttggtactttggccgatagtgagccgatgttggtagcttcttccttcttgccgcccgaaggggcgtacctccacggaactgcgcgactattcttgtaatgaaaaggaataggtctaacgcccgatactgacgagtgctgtcggggcctatggggaaccgagtccctggtgaagtgtattaccaaaggttgaggcttttaagaccttccttaatgccactgcatgcatatatgttgtgccccttcccctattgtgacctcaacccgacctggtcaatcatttgttgaatagaactctaccactgacatgtttcatgtatgtacacccctgatgaata

SEQ ID NO: 251388 - DNA, 353 bp, Glycine max
  unsure (1)..(353): unsure at all n locations
tgtgaattaagacgcatcaacaagaatcaatccctggctattgtgcaagcaatcaatggggcataacacaccaaatgattataatgatggatggctcaaattctcacaaaggtaaaatcatcactttcaaattgagctttcaaaactatcatgacatgtagagaagaatcaacgatctcaagtctcaaaatgtcgagaactattattttaaaacaaatactcatttctctaacatatcctataattaaaagaaaaacatgccaaggcgttcctctccatgaaantgacccaaaatattaaactgaagatccgacgaaactaacaacattaacaaattaacaccactcacaaat

SEQ ID NO: 251389 - DNA, 352 bp, Glycine max
tatggtaatcgattacagctttgtaaatcagttctgaatacaatgctggctactggtaatccattaccacagatgtaaacttatctggaaaatattttgtgaaaaattcttgggctactcaatgttttgaaaaacttttttaatacttatcttgattgagtcttctcttgactcttgaatcttgaaattgatagttcttgaaacttgattcttgaaactcgattttggaatcttgaatctcgattcttgaaacttgattcttgaatctttgggatttgcttaacttctgattctttggcatcatcaacataatcttggacgtcattgctttcacactctatatggctcaatg

SEQ ID NO: 251390 - DNA, 267 bp, Glycine max
agcttgtagaatggctagacatgatacatgtcttgtgttggcttggttcaaggataaaaaggatgccccacacttatttcatgacacaaatgcaaagatgatgatttggaaattttatgcaaaactggtcatgcatgcacctatgtggacgctcaagtgtcaaaattttatggtcatgtgaagctagggctcaagattcatttcctctattataaatcaacacaatgtgtccaaatatgctcttttatcaatttatgcatttatcct

SEQ ID NO: 251391 - DNA, 318 bp, Glycine max
aacacgtttaactgtataattcttaagtaatgagttaccaaaaaatatatacatcttgttagtataggtagtactaatttacttctttaaatcatcacgaactaaacaggtttatacttgcaccgcctttatatctttctcattcgagagtgtatacctgattcattcaagtatcgccctcccccgccccagtgtatacctgattgattcaagtatcgcccccctaaaagcttgccaataatcacctattatttgtgcctcatctcttttacatcaacaatcactcctccgttttgtcgacagttaagatagtacacc

SEQ ID NO: 251392 - DNA, 444 bp, Glycine max
  unsure (1)..(444): unsure at all n locations
agtcttatgtttgaaaggtatacgaaagaatgcctaggaaattcannaaattaatgactgcccacacctactgtctcgtggggggtatgaactgcttgacaagaaacttatggaggagaagaccaagcgttgacatgaggaacatcagtttactgaaaacccaacactcaacatcgaccctccatcccctatggcaagacacttgaagtggaagatcgcacgcacaaagagttatgaccaaatgacgtctgaagcggcacaagaaattgtagacaaaattgtgagttcatgtcttctttggttactgtcattgccaaataatggttagccaacatagtcaaatttattttattcaaattcaacaactatacatccatgcaagattcattacaggaacaagcaacacaagggagttttgttccgcatgagtgacaagacatactg

SEQ ID NO: 251393 - DNA, 452 bp, Glycine max
  unsure (1)..(452): unsure at all n locations
cttgattatgttcagaagaaatcacatgtttgtcatcatctataagggggagaatgtgaatgnatgtatacatgattttgatgatgtccaacaacgatcatttgcttcaagacgaatacaacattcaaacaaagccttgatccaagatttctttaagaacaagccttgcctcataacgataggtttcaagtcatccaaggcacatgtaatcgcttaccaatacatgtaatcgattaccaaggtacatgtaacttgattaccaatggtatgaaagtgtgtaatcgattacacatcatacgtaatcgatgaccacagactctaaatgttgggaattcaatcttaaatgaagaagcacaatttgtcaagaaaaataactgtgtaatccattacactaatgctgtaatcgattaccagagacaattttctaggaatatctccaacagtcacatcct

SEQ ID NO: 251394 - DNA, 489 bp, Glycine max
  unsure (1)..(489): unsure at all n locations
ggatctctaagtcacctgcggcatgcaagctagagaatatcatgccttgtccttctctttacgtcaattctgatctgccaagaagctcgtcctctacctttcaccttctcaagaagtaatcaaagccatgcattntcagggagtgccacaaaattggttaaagagcttttgctaaagaagcaattgcttggtacggaaaattatgagcctaatcgactcagtccaggtggtccagaccctcttcatcactaatgaatgtgcaattaatgcatgaaaactagagaatcatagattcatgcaacaggaaaaggaaagattgttattgtcactgcatttaccttcccacgtacgcattccttttataattaagagtccataaatcattttatcgcatacaatgaattatttgaccatttntagttgagtcttaagacgaatcacaaagagggtaggtggaatgatcctagactattctctgtcgtctgtagc

SEQ ID NO: 251395 - DNA, 381 bp, Glycine max
tcctccaaccacgagctggagccatgcgttgtgtgtgcttattgcaatactccattctcaatcttgtttggaagccccataaattgcgttttcgttcatgcgacctccacccacgatgttggagacatgcgcaatgattgcttaacgcaaatttccattctcaattctttttcagagccccatgaattgcgttttctttcatgcgtcctccacccacgagtttggagacattgcgtagtgattgcttagtgcaattctccattctcaaccctctgttggagccccatgaattgcattttcgtacatgcgtcctccaaccacgatttggagccatgcctaacggaatcttaatgcaattctccattctcaaacttttttcgg

SEQ ID NO: 251396 - DNA, 417 bp, Glycine max
ctgtttattatcttatgaccaatttgtagaatgcaaaaattatctcttgaagatgtaggctctacgaacttgaaggtttccaattagttctcataaacttattgtaataatcatgagtaacccaaacaaccatgaagtgaaaaccttctatgaataattttccctacattaactactaactttatcaaaataggcttatgatccgacttaaaaaggaggctagtggaaaatcgtagcattctgaaatcttaaccttcattgcaaattcatcaacactctatctagcctttgctccaaattctctcttttccaagtaaatggacctcttagaaaccaatgtaatgagctcaaatccttcttcattgatataaactattacattctacaaatagagaatgaaagcgcatttctttcatg

SEQ ID NO: 251397 - DNA, 277 bp, Glycine max
tacttggcctgaaatggatatctactcaagttgaacggtaccctgaacatagtcaaggttccagcattggatgactaacttctaagtagaccttaccaattgaaatttgaagtgtctttaattgtcaatagaatgtgaatgatgagacttggtacattttctatgtggtgacatactttttaagatgagatagagaagttctatatttctgttacacgactagggaacctaatccgaagtgctgatatggcacctgtgagcaccgtgatgatctttg

SEQ ID NO: 251398 - DNA, 256 bp, Glycine max
ttcttcggaagttcagaatggtgaacaattcaactgccactggccattacaatcaagtgattatgatatgaagcctgtgtttaaggatctaaatcactcctggcctgttgacggcgatgatctggagaaacaagaatctgctatgtcagatatatcagtggagtgtgggattacagttgcctcagattctaaagttgtagagcctgacatttctatctctgatgaactctgggaggggtttgatgcattcaattcc

SEQ ID NO: 251399 - DNA, 134 bp, Glycine max
ttgtttgaagttgaatattaagaataattggttaaaactagctcctataaagattaaaatttcattgaccgactcattaactagcctgaatacgtagagatttaaactatgttaaggctaagacattcgacttg

SEQ ID NO: 251400 - DNA, 427 bp, Glycine max
  unsure (1)..(427): unsure at all n locations
agctngngtcagttcattagaggcaatattttatattatttgcatctccgaaagaaatgagcatttgggtgttataattctaacaagcactatgcgaacagatggtgcactttactacacattactaccaaagtgggaaggacaatatttccaactttaaacaaattcatttcttcactccatgcaaagaaaatggatagaaagttgctgatcaagaaatcaacactgacaaataacatatatcacgtttcaacttcccatggcacatcactgcaatttgcttatcatacttcaatgtgatattaagactttacttgaaagaggtaaatgtattaaaaggtccagagacatataaacatgcaaatgatgatatatatttgaaagaaaattagacgttatatatgatgaacatttgtaacaataatta

SEQ ID NO: 251401 - DNA, 442 bp, Glycine max
  unsure (1)..(442): unsure at all n locations
tatcttcagtgggaaactttggttttgtattttcttgataagaagcgctgattgcttgattccaccttaagctctttcccgatctcattaaaaagaaaagtctccaaatgaaacaaaaaacatgaataggtgatatattgattagagtggaattcaacttacactctgacctaaggtttaaattttaaaacttttgaatganaataatacgattaggaagaaaattttcattaaaaataaccagtcatatttttaacaaatttaaaaatcgataaaatcagtaagtattttagattaaaggatatgaatagttgttattctcttttaactgtgtgcaacctaaggatgaanagcacaaaaactgtacacaataaagagaggcaactaatggcctattcgtcacttcgtttagacatgcctgcaaccaaaataccatttgctt

SEQ ID NO: 251402 - DNA, 432 bp, Glycine max
  unsure (1)..(432): unsure at all n locations
agctngataatgtttcgatggcgcgttnttgttatggcttctatctcattctcaaaggattttatactctcaatgtttaagttgtttgaatcacacttcaacttttttacagcaaatacttgacctcctgacatctccgctttataaactattcccagtgctccttccccaatgcaatacttgttgtcaaagttcttggtagcttcaattatgtctctatacacaactttcccattgaagtaccaaattgaaaatggattcggacttttgaatgaacttatttgccttggagctcttgattttctcttgaagcaaaagaaaacaatcccaagtaaccccaaagaaataaaaagagcacctcccaaggaagcaacaatagggatcacaaccttgtttcgttcactggatccaccattaggattagtgagatta

SEQ ID NO: 251403 - DNA, 432 bp, Glycine max
  unsure (1)..(432): unsure at all n locations
agctttcttgagaaaacttccttaagaagtttgagcttagctacacatacctctctaatagctaagctcacctccttgagatgagaagctagagcttagctacacaccccctataatagctaagctcacccccatgacaaaaaaacatgaaaataacaaaaaaaagtccttattacaaagacaactcaaaatgccccgaaatacaaggctaaaaccctatactactagaatggccaaaatacaaggcctagacgaaggaataacctattctaatatttacaaagataagcgggctcatacttagtccatgggctcgaaatctaccctaaggctcatgagaaccctaggcctggatctctagcccaatctacttggagtcttctagccaatgcccttgcggngtaggattgcatcattccctccaccttggaa

SEQ ID NO: 251404 - DNA, 397 bp, Glycine max
  unsure (1)..(397): unsure at all n locations
agagtggtacctggagatatgtcgcaggggtcaggagaccttggggacgtcaggtggggtgctattgcccaaaaccaagcttgaccaatcccgacccaacccgggcatagtcagtcagtgagaacctgtgatgtacctaaacaggcgagctcctggcagtcaacagataaaaggaacaaagaccacaaagcaaggaggcttgtgtggtggctggccagctgtgaatcttgtgtgacatatgggttatggcctctggtaatcgattaccaagggtgggtaatcgattacaaggcttaaaaatgaagacaggagactaagatggtctctggtaatcgatcaccacggngtgtaatcgattaccaggcttgaaaacaaggtcaggaagctaggggagctt

SEQ ID NO: 251405 - DNA, 431 bp, Glycine max
agcttataagaacaaaattgcctaaattattttctaatatgcatctgaattaggaagcatcaacaagaatcaagccaaggctattgtgcaagcaatcaatggggcaaaacacaccaaaagattatgatgatggatggctcaaattctcacaaaggtaaacttatcactttcaaattgagctttcaaaactatcatgacatgtagaggaaacacaaggatttcaaatcataaaatgtcaagagacttttattttcagaacaattacccattacttgaacatatcctataattcaaagaaaaacatgcaaatttaacacaacaaaactaacaaaattaaactagaacccaacaaaactaacaaaattaaactaatttaacacaactatcaaaaccaaaaccaaagaacactccccccccccccccccatactt

SEQ ID NO: 251406 - DNA, 444 bp, Glycine max
  unsure (1)..(444): unsure at all n locations
ngaaggtgtgtagcccaccatcttttcatagtagaatactggtaatgtgtctactatcattgtcatcatttttttctccgtcattaaggtgccacttgagctgctaggtctctccacctttgggcgtattcttttgaaagattcgtgcccccttttttgcacatgttctgtagttgcatcctatccgaaaacattatactgacactgcctaacgaaggcaaccactaggtccttccaagaatggactcgggaaggttccaagttagtgtaccaggtaacagctaccccagtaagactttcttggaaggaatgtatcagcaattcctcatgttttgcgtatgcccccatcttccgataatacatctttagatggttcttggggcaagtagtccccttgtacttgtcaaagtccagcaccttgaacttgggaggggtgatgatatt

SEQ ID NO: 251407 - DNA, 416 bp, Glycine max
  unsure (1)..(416): unsure at all n locations
agctntttatcataggaggggtagtggatgttggcactatgaagnttttcactaaaataagcaatatggtgcccaccttgtaacaatacagctccaactcccactccagaggcatcacattctagctcaaaagttttagaaaagttaggaagagctagaacaggtgccctagtaagattttctttgagaaaagcaaaggcttgctcttgtttttcaccccaggtaaatgccacattcttcttcaccaactcattgagaggtgatgcaattgtagagaaattaggaacgaaccttctatagaagcttgctaacccatggaagttcctaatatctcccacacttnttggggggggccattcttggatggccttgattttctcagggtccacttggacctcatttctaccaactacaaa

SEQ ID NO: 251408 - DNA, 450 bp, Glycine max
  unsure (1)..(450): unsure at all n locations
tgtcanaactagctcgttaagaacactcacattgaaagcatactcatcaaccctacacgaactagctttgcagaacctaggaatcaaaagctccaaataaggatcaaaatcaagtttggaagcattgaccaaccaaacaatctagaagaagatcatcttccttgatcatgcacgtggtgaaattcgaagaagcaataaccatgaagccaataccttttctataatcactgaggaattcaaatcattgcaacattcatcttcatggttatccattctcacatagcataaatggttagtcccaatcgagcataatctagtggaggatccaaaaacaaatttggatcgcttccaacatttaactcgtcggtgtcgcaacctatctcatgatgggaagatgaaagaaaatannagaaggcatcttctaaaaaaagaaaacgagtgggattacca

SEQ ID NO: 251409 - DNA, 415 bp, Glycine max
  unsure (1)..(415): unsure at all n locations
agcttgatgttatgctaagcctcacatcttatactaagcgcatattacaaaaatatttttggtgttgcagaaagcgctaagcacagcctgtcgcgctaagccccaaatgcttacgggattttacaacttcaagttaggcttggcgcgaggctaagctaagtgctagtgttttaaactcaaaacgtcacgttggcatgctaagtgcagctgcgcgctaatcgcgccatacaaatttcagtttttttaaaagcaaagacagaggcacttgggttgttacctttgcacccaaacctctgcgccctctcatctttgagcatccctttactttctgttacgcgtgtacttcttctctgcatcatttttgcttcagnttaagaacaatccaagtaagttagcacatttctatttttacttt

SEQ ID NO: 251410 - DNA, 446 bp, Glycine max
  unsure (1)..(446): unsure at all n locations
gggtttgaggtacttacccgttgagcactgaaganttctaagcacgaacgatgaatctttgaagaatggtcgagaatcttcgcgtaattacccacggaaacgttacggaagtgcctcggcttggattttcttcacggaactaattttcctcaacaaattcgaaagagagagaagtgcctaatgggctgaacccttttcttcttcacttcttcccctatttatagcaaaataggggagaagcttgccgcccagctcgcccaagcgagcaaggttgcttcctccagaagcaacagccttctggaggaatcttctggagggcccaagtgggcctggttgctatttacaccccccccctttnttactaaatgcacccccttttctatttttttgtaattctttttccgtaatgttacgaaactttacgaatttcgtaacgatacttactt

SEQ ID NO: 251411 - DNA, 414 bp, Glycine max
  unsure (1)..(414): unsure at all n locations
agcttcatgacacttaatcctagcttattttctctnttaactattaattctaactctaactaagtctttntatttaataaatcctcttttaaattagttttggccatatttaccaatatgacattaatgagttgaccaatatcaatccctttccattgaccctattggcctatggttgattttgttgactttctacaatttctactaaaatgtgttcttttcctcattttccctctaatcctaatgtattatatctctaatagtttaattacttgcttactaaggtatcattactattatttctaatagtaatatttctgaattcttataatngaagttttgggatagtacactttgtcctcactcacgtttttcgaaaaactttccaaatggtcacccattccataattgctc

SEQ ID NO: 251412 - DNA, 457 bp, Glycine max
  unsure (1)..(457): unsure at all n locations
tattagaattttcaacctgacacaagagaaattctaatatttanggatgtaagcttcatggagaatgagaagtggagctggaatgatgaanaaaatcagcaaactgatgatttgaatcaagaaaagttagttgatcatcctcctttatgcggcactagattacttgctaacatatatcaaaggtgtaatgttgttgtgcttgaaccagcaggatatcaggaagcagaaaaacatcctaaatgaagggatggtatgcagaaagagcttgcaatgatcgaaaaaaatcagacttgggaattagttgaaagacatcaacatcagaaggtgattggagtaaagtgggtgttcagaaaaaaggagaatgtagatggcttaattaacaaatataaagcaaggttagtggtaaaagggtatgctcaagtttttggagtagattattctgatacttttgttccag

SEQ ID NO: 251413 - DNA, 345 bp, Glycine max
atatttggaaaacacaaaccaaaatctttggaatgaggtagatactactccaaacatctcaatctttctcactatgaaattccttcatgaatgaagtcatgcttagaagacctgtcaaccaccaagagcaattcagacaattgatgcatacacacgatagacaaatccacaaatgaagtaccgaaagatcaatatagatgcatcatttttcattaatgagaacaaagttggtattggtcatctgttacacagcgaggaaggaaccatttttaaggcaaaaactatgcctgattcaggaagaccacaagcagaggaagcgaatgcttgggccttgctccatgctat

SEQ ID NO: 251414 - DNA, 329 bp, Glycine max
tggtgctcgcggctagtgtgtgtgaatgtgttgatgtttctatgacacctggtatttataggagtgaagcgtagttgcaggtccttgtgacaccctctacccctcacatatatattaataaaggaataaaaattcaaatattaattaaaagtatttttaaaacatttttaaatacaagcttttcaaatggataaaaggctcacattcactttcttctacatcatattcaaatttgcccaaataaataataaagtcatctcgactcaaagaaaatcatataagtctcatacaattaatatagaacctatatcctaatgccacatcttatc

SEQ ID NO: 251415 - DNA, 431 bp, Glycine max
  unsure (1)..(431): unsure at all n locations
agctngcttgcctctagctgacaaattgttcttataaccataaggtatctccacatgtcatcggacttgccgtctctatatgacaaaggtgcagatgaagacgttagtcactatgtctcaaagggctcgcttgcctctagctgacaaaaggtgcagataaccacaaggtatctccgcatgtcatcggacttgccgtctctggatgacaaaggtgcagataacgatgttattcactacgtgtcaacgggctcgcttgcctctagctgaataaaggaatggataaccataaggtatcttcgcatgtcattagacttgccgtctctggatgacaaaggtgcagatgacgacgttagtcattgtgtgtcaacgggctcacttgcctctggctgacaaaaggtgcagataaccataaggtatctccacatgtcatc

SEQ ID NO: 251416 - DNA, 444 bp, Glycine max
  unsure (1)..(444): unsure at all n locations
gtgctctntaattgttgatggatgaagttgtaccaatgttgcaagatccaggctagtgtccaaactgaatttggatactaagccccattctaggccatacagacttcaatggcttagtgaagatgaagaggtaaaactgactcatcaggttgaggtgtgtttaaccattggaagatacaatgatagtgtgttgtgtgatgtggttctaatggaggcgactcatataatattgggaagaccatggtagtatgataccaaagcatgatggcttcaccaacaagatttctttccagcaccatgaccagaagattattcttaaacctctatcccctagagaagtgtgtgatgatcaaatcagaatgagagaaaagagagaacaagataaataaaagagtgaggcaccaaagaggaataggaaaaagaagtgtgatacacatgagagaa

SEQ ID NO: 251417 - DNA, 423 bp, Glycine max
  unsure (1)..(423): unsure at all n locations
agctngtggatttggtttcactacttcgtttaaagagaatctagtccatatgtattggagtgagaaggtggggaagtttttgtgtggagtagtcagttctgttttgtcgtttcaacgattctgatgtgttaatttggtgatggtgttgtgtgtcataatactcttcaattattataaataaataaatattatcataagcgatcagccatacaccccattttataataaaaatgatttaaatatattttttatttttaataaatatttaattttatatttatttttaataaatttttattttgagatgagtctcataaaataataattttatttttattcttatatctatatctacgattaataaaatttgtgtttattttatgagaaaattttttatttgtattaatatatattagaaaaaat

SEQ ID NO: 251418 - DNA, 438 bp, Glycine max
tctcaaggaagctacctagtctatgaatagaagcatgtgtaacacttgttgtaactttgatgaatgagagtcttgttagacatacttcaaagttccacttctctccctcttttattccttcaatttcatgctccccccttctctctttcttttcatccattaaagcatcctcttcaagcttcttatccaaggcaattcttggtggtgaagctccttcttccttggcttattccctagtggatggtgcctcccctctcctcttctcctttgccttccgctgcatccctatggtgaaaaatcaccattgaaggacttcattgaagctcaaagatccagcttccatagaagctccacaagcaagcttccatcatgtatatacatatattgcctaattggtgctctatttttcaaatgctttcaaatatgcctactgtcacg

SEQ ID NO: 251419 - DNA, 342 bp, Glycine max
  unsure (1)..(342): unsure at all n locations
agcttgatttcaagagcgagtntttgttgtataagnaaggaatatttactgaggataattgggcctgtagtggggttttcattgagggatccttctttgttgataagctacaaagataatctccctttcttcttcatcaacctaatgaatttttagggttaacactcctgtcagaactgcgggtcattttcttactcatgcctgtttgtaccttattctcctgataacaatgtctgagaattttgatgaaatacttcttatcatttctttntcatatagagaggctttacctaggtagctacctcccttagccttagagcctactcattgaacatttctcta

SEQ ID NO: 251420 - DNA, 426 bp, Glycine max
  unsure (1)..(426): unsure at all n locations
tcccgccaatggtatttgaggattaatgatacctttatttcctttagatctaaggaaaatattgtttatcggtttatgtatctgaaggtcagtgggagtaaggttattttctaattttgtatattgatgatatcttgcttgcagctaacgatcttggtcttcttcatgagactaagaaatttctctctagaaactttgaagtgaaagatatgggtgaggtaagctatgtgatagggatagaaatattccataatagatcataaggattgttaggcttatctcagaaagtacatatatcgataaagtgctagagaaattcaagatggaaaggtgtttaacatcgcctattctaatttagaaatgagacagatttagtctcacacaatgtcctagaaatgatatggaacgaanacaaatgaaagtaat

SEQ ID NO: 251421 - DNA, 413 bp, Glycine max
  unsure (1)..(413): unsure at all n locations
agcttctagaataccttttctagaagtgtttataaatactaatttggaaatgatcattccaaaacatatactacatatttttagaaaagctttcccataaatgtatttatattattttagaatatttgttcgaaaaatggaatgttaaaaaatacaattctgaaatgcatgctacatacttttggaaaaacttttccaaaactatgtttatattatttttggaataccatttttgaaattgggagtgtttaaaaaatacaattctagaaaattcattttgaaacacaacttacatatatttctagaaaatgtntttcatgactgtatttatattcttccggaatacttgttcttggaaatagagtgttaaaaaactcaattatggaatgccacttctataacccatggtacat

SEQ ID NO: 251422 - DNA, 428 bp, Glycine max
tggaaggaaggttctacttttctggagtttctttggcatggtaaattatgtatagatgtacttataacacttggtttttttttaatagatgttctattatgtagcatatcattatagggtgattatcatgcacttaaaaatctgggacacatgtggtagttgtactattttaaatcctgacttggtgtttgtggtaatgaaaagagggatgttgtttggaatatgaactagtgcaagtgcacaacaatacaaaattgagggaaattccttttttgttatggtgtttgaattgcttttgagtaaaagaaactttgctcttaataaggaagttgtttgttttattttttactgtataggcaatagcaatgatccttcaagccacaggagcaacttcacttgtatcaaacatgggagctcagtacttttct

SEQ ID NO: 251423 - DNA, 196 bp, Glycine max
agcttcgtcgcgagagaataaaggaagtttcatttatatttcacacaagggctcgaagttcaacgcttctatgaaaactaaaacaattctgattaacaaacaaaggccttgaggtcgaatacgaaatacaatatactttacatgactcccagcgcaaaaacacaatattgcgctcttgtgaaatcaacctcaaggg

SEQ ID NO: 251424 - DNA, 402 bp, Glycine max
  unsure (1)..(402): unsure at all n locations
agnggaatggcagaatctcttacttgaaccgtagggcttgtcgataattggttgcatacatatgtattcatttaattatgcttgngattaggagtgctttattcaaacaaacggaatgtgaaatcattaaaagggtaccagaaaaagggcgaaaaagaaaggatgtggagggttttatgcacatttttcattataccacaaggcgtgtttcttttggtacaaattccttcttatgagaatctagtattacttggagtggaatttccattcacccgttacacaaaatgacccatgttttcctaccatttatattgtgactatgtgtgctaaatgctaatgaggggttatgaaccattgatnggtatttgttttacgttattataatgatggtaattatagatg

SEQ ID NO: 251425 - DNA, 437 bp, Glycine max
  unsure (1)..(437): unsure at all n locations
agcttgccacccagctcacgaggcgagttttgttgcttcctccanaagcaaccaccttctggaggaagaatctggaaggcccaagtgggcctggtttctatttacaccctttttttactaaatacacccctctgcttttttggtgattctttttccgtaacgttacaaaactttactatatttgtaacgatacttattttctttccgtgaggttgcgaaaccttacggatcatgtaattactctttttttagcttttgaaaaagttacggaaactcacggattgcgtaacaatacttccttttggtttccgttacattacggaattccacgtattgcgtaaccatgcttccttttgatttccggcacgtctcgggacttcacatattgtgcaataaagggtgccaagtacctcaaagcgttcaataaagggtgcatg

SEQ ID NO: 251426 - DNA, 420 bp, Glycine max
  unsure (1)..(420): unsure at all n locations
aagatgatgacaaaggtgatgacaaaaagctcaaagatcaatcaaagaacaactcaagtgaatcaagaacaattcaaggttcaagatctcaagaatcaagattcaagactcaacattcaagaatcaagagaaggctcaatcaagataagtatgaaaagtttttctcaaaaattgaatagcacatgagtttttgacaaaacctcttaccaaagagatttaactctctggtaatcgattaccagattgttgtaattgattaacagtagcaaaatagttttgaaaaagttttcaaattgaatttacaacgttccaattattttcaaaaagctgtaatcgattacaatgttttcataatcgattacgagtgcctttgaacgttgaaattcanattcaaatgcgaagagtcacatcctttcacat

SEQ ID NO: 251427 - DNA, 438 bp, Glycine max
agcttgagttgcatcagatatagtgtgtgttgaatcatcaagatctataaaatcgaaagaaaaaaaaggtgaaagctgggttgacccatttcccctcagcttgcaacttttgcagataacaaacaacaaatgaataaaaggaaatgaaataacattggagataaagtaaaccctaaagcctcttcatataccgaagcatcacgggcagcatttgaatatgcaacagcagtgttgccacaatagacatcctatctgtgaagagagtgaggatgaaaaagaagagaacaaatgataaagtgaagactatagtatagaaaaaaaaaaggagagagcaagtacacgaatagaaggagagggaccaaggaaaagagagaagagaacaaggattataacgagagagatagagaagacaactatcatggaaggtgatgacaacaa

SEQ ID NO: 251428 - DNA, 446 bp, Glycine max
ttagaagctctttttgaaacgagataatcgattaccatattttgttatcaattaccatttttcttggaatggggaacaagaaggatctaaacgaattaattgattattatcttttgattagataccctcacttgtaatcaattaccatattttttttgttaaaactatatataccctcacttgttcattctcattagtgacttttcattagatattatcttttgaaaatactttctaggagtcatctagaggaaccactttgcatttcaacaagacattcattcattcttcatcatggtttgagaaaggaaagaaaggcttgaagataatgtgatctacacattcaggtgtattcaatcctattttgatttctttctagtttttgaactttattagggttatcaagggtttatgtgagttaatagggtttcaactcctgagccttc

SEQ ID NO: 251429 - DNA, 430 bp, Glycine max
agcttattggtgatttcttttatttgcaccactaacttctttacttgatcttttaatgaatttattacctccatggtgttctcgaggttggagtaggatgtggtgctaaggttgattacgacttcttctaattttctagtgccttctctcatgaatttggcttccttggctccatacaacaagaggtatggtagttaccttcacacttttaataattgaagttgttttactatgcttttggttacgtcctccatcatagctttcatttttgtttgttgtttgagggatatatctttagtgtcttctatgggaacgtctattgaagaggtgttgttgcaaccatgaccttgttcattagctgccacatcttctataagttttttttactctggtcgtggttccattagcatagtatcctcctactgaagca

SEQ ID NO: 251430 - DNA, 446 bp, Glycine max
  unsure (1)..(446): unsure at all n locations
atcttaattgctttgcatcttctatgtggcttctgttatatctaaattaccttttcttcacattagaatctttaattttaggtctcagacaacatcacttaattcaccaaaatctatttggctattagtgattgtattttctttgcatcatctcacttgttaacattgtttgagtcactattggggtgaatatcttactatctgatgatctaatttatctactaaattttgtgaatttcttcaggttttggggacacatagtaatggcttatgcgtttaccttttggacttgctatgttttgctaaaggagtatgggaaggttgcaacaatgagacttggctttcttgcagcagaaaagcgtcgtcctgatcaatttacggtaaaatggttttttcatccttcanttttaaggaaattatntaactataacttgttcatctttaca

SEQ ID NO: 251431 - DNA, 395 bp, Glycine max
ggaccttaagcaccgcggctgcagctatctcaataacttttctgggtcctatttttaaatcaccccggaaaaattaacattgatttctcgaaaaattcaattggggtattgcaaatcaaccgagtgctgattttttgttctgggaagatagagtttttttctcatcgtatttctgattcaatatatatgttcgggttataattacaaaaatacttctgcgaattacaatgcaaaattgtgcattcctatgtatgaattgagaagaaaaaacttgttatttattaagttaaatccatgcatgctctactgtgaaagagattcctttgtggggagagtcatgccatgaggaacgctaatttacttcctaccttgggatatattttttaacccaaatt

SEQ ID NO: 251432 - DNA, 425 bp, Glycine max
  unsure (1)..(425): unsure at all n locations
ntagatattagcaagggtggcggttgtattagcgggtcattgttcttttngatatcgctggaaatcacagaaaaaattgattccaattgcggtcgccaacagttaaaaccttgtatattagctagggacttgacactagaggatgttcttttcgtaacggttttgttgtgcttataaacaatgtcaactgcgtttagcagcttcatgacatccttgaacatctgaaagtataactgcataaatagtattgttttgtaataatagagaatagaacttgcatgttgatttggaatttagatttacattcatggcttttatntgtactcttatcttaatgcattgttaccacttccttacgttgaaacgttatgaacattgttacctcacttcgtacataaccggtaaatcttgatgctgcaaccatg

SEQ ID NO: 251433 - DNA, 328 bp, Glycine max
ttaaatactcaagctgacgttatgaggccccatagatgagagactatttatcgcacggaccctcatacacctgtaggacattatgacgccatgcgctatagaccacctggggatgagctcacgttctccgatcgagcccatatcctcatcagtcttaactctaccatcgcatcagatcttcctatgaatccccgacatgcagaaggtgtaagacacatacatgacggactatgacatgcgataacacacggttaaggactaaaactgtgccccaaacaccacccgaaagcacagctgttctcacatagggactcgacgtgcattagct

SEQ ID NO: 251434 - DNA, 421 bp, Glycine max
agcttctcgatatattatgcgcttgaatctgacttccgtgtgaaaagttatgaccattggaatttctcgagagcttgcaatgttcaatttcgagcgtctcgatatattatgcacctgaatcggacttccgtgtgacaagttatgaccatttgaatttctcgacaccatacgttgttcaatttcgagcgtttcgatatattatgcgcctgaatcggacatctgtgtgataagttatgaccatttgagtttctcgagagcttcgcgtgttcaatttcaagcttctcgatatattatgcgcctgaatcggactttcgtgtgacaagttatgaccattggaatctcgcgagagcttccgatgttcaatttcgagcgtctcgatatattatgcgcctgaatcggactttcgcgtgagaaagtatga

SEQ ID NO: 251435 - DNA, 446 bp, Glycine max
tctcgatatattatgcgcctgaatcagacttccgttatttaagttatgaccatatgaatttctcgatatattatgcgccttaatcggactttcgtgtgacaagttatgtccatttgaatttctcgatagcattcgttgttcaatttcgagcgtctcgatatattatgcgcctgaatcggacttccgtgtgacaagttatgaccatttgaatatttcgagagcatccgttgttagatttcgagtatctcgatatattatgcgcctgaatcggacatctgtgcgacaagttatggccatatgaatttctcgagagcatacgatgctcaatttcgagcgactcgatatatgctgcgccgtgaatcggactctcgtgtgaaagttatgaccatttgaatttctcgagggtcttcgcgtttcacattcgagctgctagatatattatgcgc

SEQ ID NO: 251436 - DNA, 445 bp, Glycine max
  unsure (1)..(445): unsure at all n locations
tggaagcaaacgtatgtatgattgtaagtttgcttgttattggatgctgacattcctttctagttgcacctattactaatatttttgcttgaatctgcagattctattttgattttaacatgacttatgtgggagcagggatgatttgcccccaccttgcaaatttgtctttgctccttggagccattctctcctttggagtgatatggccgctcattgatcgtcgcaagggagattggctccctaccaatttagatgagagcaacatgaaagctttgtacggctacaaggtctttctaacagttgctctcatgctcggngatggcttatacaactttgtcaagattttagtttcctcaatccttagcgtacatgaaaaaattaagaaccgtaaaaatggtatgacgtacatgtcaattcccactatctttttggatatttagtc

SEQ ID NO: 251437 - DNA, 237 bp, Glycine max
agcttctagggagactggatctctgagcttctttgaggcccttcgatggcgaatctcaaccatggagatgcagcggaagataaaggaaaagaggtgagaggaggcgtcatccactagggaataagccatagaaggaggagcttcaccattaagagagtgtcttggataagaagcttagagaggaagcttccatgaaggaaaagaatgatagaaagaggggggggggggggtgctctt

SEQ ID NO: 251438 - DNA, 473 bp, Glycine max
ctatcacggacctatgatactcagcttagaagatttgaaagaagcccatctatggatgaaatctgtgcttccctctaaagatctcaatcttaccatatcccaaagacatcaagaaggccttacatagaaaattatcaaaggctacaaagagcaaacaacatcagaatgaagctcatcagagtctacatcaaaatgatgaatatcttgactttgaagaactgaacatcataatggttcagaattgctcagaatgcaccacaaggactaaattagatctcccatataatgccacatatacagagggcacaccataagactaaagttgacaacacttcactttccatatgttgccacatacaataagggaacatcaaaaagtgaaagctaactgcataaggagatgcaaatatgttgaaacttgaatctttccttgagaagaactaatgagaagcattagaatacaagactgaaga

SEQ ID NO: 251439 - DNA, 392 bp, Glycine max
agcttagcgcgagtttggcactgaacgattattcacttactcgcgctaagcgcgacatcgaggttagtgagctcttttttaagcctgacttgaggagaatgaaaggaggtctaaggagagcgctgaatagccataagagcttgaatagtgaaatacacagaggcaaagaatggagcaaagaagccaagtttttatcttttaagaaaatttgtgagtttttgagtgattgtgagattcctagacatggaggagacatccccactcctttgtaagcaagcaatttctcttaattcctcttctttattggaaaaggagcttccttgctatggaaggctaaatcctcaatttgggaattctagctgagtaattgatctaaactctttccctatcta

SEQ ID NO: 251440 - DNA, 442 bp, Glycine max
tactaataaataaaacctccaacttactctttcctttgagtattaataatttgaaaattataattactagtttgaatcccactccaagggttgcaaggtctctgaagaggaaggatagcccttccaaatgcaaagtgctttccataatggggtcagacttacaaggacaaacctaaagctaagttctcatgtacatttaaatgagtagaagcacaattataaaaaatacaccatgcattggtgttataatttgggccacatatttttacaaccaaatatatcttgtggtaaggaatgatttccatacattccaaagttggaaaggctatacatcaccactatcacaagtcataaaccccatactaactctacttggccctaatagaccgtgacgtttactctgtgcaaaaacaatccttatgcaccatgaaatgcaactcac

SEQ ID NO: 251441 - DNA, 278 bp, Glycine max
  unsure (1)..(278): unsure at all n locations
agctgnccacatggcacattatttgttttaaaacaatctgggtcacataaaccaatttaccggtgaatgaatgaagacataacatcatagatgtgaaaaaaatgaagaatttatataagattggtatttactatataagtagccccaatgatcataaaaacaaataaggagctgaagtttagtaattattcattctagcaattcttgtatggaaaaaaaatagaatacttagttgtttagtgttccaacaaaaaataaacacacttcaacaagaaaaa

SEQ ID NO: 251442 - DNA, 417 bp, Glycine max
  unsure (1)..(417): unsure at all n locations
ntaccttttccacgagatgaacaaccaaatgaatcatgacagtgaagaataaaggaggaaatatcatttccatgtggtataaagtgagaacaacttgattntgtaattagtctaaatccttaactttcaataatttaaccacatatttttttaaagaatgagcataactcaattaatactgttgaaacctcatctgacaatgtagatcacatggctaatggtagcaattgccataccaatatgtgacaattgtgactcttcaacgttccagtcaactttagattttctgagtcgatacaccaagaaatgttgcttgaataaccatctgacacaatgatattctttaaggttgttaanaatgttctattacctttactatccaaagtaaagatagttggagaaatatcttccatttta

SEQ ID NO: 251443 - DNA, 424 bp, Glycine max
  unsure (1)..(424): unsure at all n locations
agcttcattaagttgcttagaggtgtgcatgtagatccctaccaagggggattactgccagttggattcaaacctaagcctcataagctaagttctttaatttatcttttccaattgaatcaatcctattggtgactctattttggttatctataatctgccaaatgctttttggggcttggttatggttatggttgacaagtcattttagttagattttagaattcttttactagctaaaaaatttgtatgattgttcgctaaacaaaattttttaaagaacttttagtatttttttagtagtttttttagcattttgtgaaacactacttgaaataacattttgtagaacgttaacttttttcttttatcntttaatcaattcttattccaaaatatttattcaatgttataaaccctttta

SEQ ID NO: 251444 - DNA, 442 bp, Glycine max
  unsure (1)..(442): unsure at all n locations
ntccatcttgtataggatacattggtttacaaatattttattatgagaaattaaagcgcaaataaaaattgtgaaagtattatagctgttgttttcctttggagataatttttcttcttttagattataagtatttttatttaatataactttactcgagacaaatatattaatatattatgaccaatattntaatctatgtattgcgcagaataaatatctatattctataaaaaaaagtatatattaaataaatatttctaaatgtataagttataggcttaaattcactttttgattcttatagtattataaatatggaattttggttcctataaaaatttaattacacgtctagttttcaacgttttcaaaatttagcaattttagttcaatgactagttgtcatccaaaattagagagacaatgttggtgtggtcgt

SEQ ID NO: 251445 - DNA, 443 bp, Glycine max
  unsure (1)..(443): unsure at all n locations
caagctttgcatccaacatacaatggcgtctgctcatctatttgaagatcatcataaatatctgcatgaaaatcacgaaagccctcttgcccaagatcacgtatcatgtcttccattcgatcgccgctttctagctcaactggctgagctggacatgttgttctatgaccaagcaactcaccatgccatatccactttgtgcatgtggggctaaacccattacatatcagatgtgatctaatgtcattcaaggaatgacgcctaccattcacacatttaacacaagggcagaaatactntgcatctgtggttggtgaatttatttgggcaaatgacaaaaactcttcaacctcggtttcatacgctttgcttatgcgaggtgctataatccaacttcgatccatggtcgctgttgtgtaatactaggcacgtcatactcaacg

SEQ ID NO: 251446 - DNA, 458 bp, Glycine max
  unsure (1)..(458): unsure at all n locations
ttaaagnntatgttgagntataaataatgcacatgacatcatgcaattatggcacagttgcagaaagtctttgatttataaaatcttaaatggtgtttgttttgccacgagtaaccttagcgacctaatattatttgaacattgtaattcttaaaccttttgtccatttgtttaaaatattgtttatgttttcatttgttgcaggaaatttttttgcaaactacaaattgcagcttcttatctgataataagctattgttgttctccctcccatcatcgcactgctagcattttgacatgtatctttgcaggtatgtatgtcatacttatgttcgtaacgtatctaaacagttatagcattatctatgttgtggattggtaatttctagtgcatgcatgagataccctttgtttcccgttcaagatntcaaaaaggattaatacggtcagtttggata

SEQ ID NO: 251447 - DNA, 429 bp, Glycine max
  unsure (1)..(429): unsure at all n locations
agcttcttcaaanattctgtggctatgttctttttttncacgnanagcattctttcaagatggcaatgactaagtctcttgtgccagagtttcgtgggtgcgacttgagtgaaataggttgcatgctcctcctctgctggatcaaatgagaaacttttacttttcattttaacccttagaactttccggccaacaatgtcatacataaagcaatgttgatgttcaaatgacactttaaatccctttttaatcaactgacctacacttancaagttttggtcaatgtttggtacataaagaacatctgatattaatttgatacctgaacacgttgaaattgaacagttccttttccttttacaggaatatagccaccattctcaattctgacctttgagacattagttggcttcaaatccttgaatagag

SEQ ID NO: 251448 - DNA, 351 bp, Glycine max
aataattgaactgatccaatttatagtataacttaatcgaattgatccacaaaaaaaaaccaaaccaaaattttaaaatctgaattgaactcttttagaactagttcagttaattgaatcggttttgtgggggcaattatcattattcggatagtgaaaacacttagtcacttactcagttatagttatacacttatacttattcagacattcacttgctcatcgtcactcattgctcaagcctcttctctctctttctctctggtgttgtctttccatcattgatgttgaggctatctctctagtgtcgttgcggctctctctccgatgtcaccacttctgtagccaccg

SEQ ID NO: 251449 - DNA, 434 bp, Glycine max
agcttgaagatgttttctctgttacatgcctaactctgttgagtggcatttgtattggttgttatattggatgttgtatctgggtccatatcatatcttttgtgcatcatgcatcatcatgagtaagtgagaagaaaaatttctaagttagaaaattttcttcataaggtaagactctctattttaatcaattacaaccttatcgtaatcgattacaactttctcgtaatcaattacacgactgtttttgagacaatgactgatttgtttaagagtctctgctttaatcgattaccatgtgatataatcgattacttctctttctataagtagttcagaagtgaacaagaacactttaatcgattactttgagtatctaatgtgtacattgttcttgagttgtttctagggtttgggaagaacacattaatcga

SEQ ID NO: 251450 - DNA, 447 bp, Glycine max
gctgaactctctttgaaaagactaaacaaaagttgcatttgtgtgtggacaattcatggcaagattggcatctttgatgtgtttgtgaaacataaattacatgaaaactgagattctgtagtacttgttcttgttgctactgtatgtgtttaaaatgctacatctcttaaatgtgcacatcatgttttggtcttgaagtctttctctatgacttgcgtgcatatattttgaaccacttcattttttaatattggaccatatcatacatgactgcattaagatgtttcatagttgttttccatgtctatcatttgagtttggaacaatcaggattatagtgtgcatatatgctagaacatatctatatccttgactttgttcaagattatttacatatacttatagcatgtgaaattgttctcatacatgacctctagaacaaaatgt

SEQ ID NO: 251451 - DNA, 309 bp, Glycine max
  unsure (1)..(309): unsure at all n locations
agctnggatcgaggatatagttatatattttatttcttttgacgacacctgcttctatttcaatctttatttgttcggctaaacaataagtttaaaacctaaatgtatcctttctgtgaggaaagctgcttacagttacccttccctaacccactaagtcacccattttatggggaaatcaggtttcaccattttaatgttaagacatgtcacaaaattgactgagcactaatgacttatcaagacttcctaatgaaggaccactcagttgatttgagccaaaaccttttttgttgatgctgtctgatc

SEQ ID NO: 251452 - DNA, 435 bp, Glycine max
  unsure (1)..(435): unsure at all n locations
ggacctataatactcagctagcgctgacagagancctcacagccgtagatgtgagaatatcttttccgcttagcgcacagacacgctcagcaggctcatcacttatgttcatcaccacggattaacgtgcttagcgcgacatggtccccttaacgtgttcatctggaaacccaaaactataacaggtgcgatgaacatgctaagcgcacaagcacgcttattgcgttcatcacaaattttacaaagaaccacagggggcttaaccccttttcactcaccttgcccctaatgggcttctcaagtaccaaaaattctacattgactaaccctaaaactaattaccttaacctaacattagccaacttagaaaacataaatggatctattcttaagtttgaagaattcgaaacacacatagaaatatgctcacttact

SEQ ID NO: 251453 - DNA, 425 bp, Glycine max
  unsure (1)..(425): unsure at all n locations
aagctttntcagatatcagtctccctgtttatcgtggatatagcactgcaccaaaatcaaaccctgtactgaagtggtgcgtgattaccccacaatctgtagttcaataccacgtacccacatcatatcttcattgatttcaatgattttcgcctaataggtggtgcccaaagtttacttttaaaaggtgtctttgtagggtagtgggtacttgctttgctgaattacaatacaattctccttataagttttcattttaaaattagtaacaaaaaacttaaatatgattttcaaaaaattatcattaaaatccagtaacctcagaattaattaataatagacaaataattctttgttattaaattaatcactactaacaccgttattttttagttgtagttgttaaccaaattaagagaaaatta

SEQ ID NO: 251454 - DNA, 474 bp, Glycine max
  unsure (1)..(474): unsure at all n locations
cacgcgacacttagaaactcagcttagaccnagcactcaaatctaggatgtaggatttttcaatntagcggaatttcaaggattgagaagtgaatatgagaatggggtaaatttggagcaaactctcacctcacacaagtctataaccttaatctaaacttgctcaaactggttttacgcctaaaattccaccgaatcaaaatttgactcctcaacacccaatttaccctagaaatggctcttgccttcactttggtcattcatttttcccctttgcacagcccaagctttcccacagtcctaaatgacatttcaaactaggattaactccctttaacctccaattaccaccaaatccagatttaacttttcaaactctcaaagcatcactcttttccactcatagcactacattctcactttctaaccctaggttaactctacccttcatctctagcagttttccataagcaa

SEQ ID NO: 251455 - DNA, 407 bp, Glycine max
agcttcttgaacgtgatcaatacattcattggcatagattcaaggatgaagttgtggtgcgtgatctgttttggtgtcacccacatgcaataaagttatgcaatgcatgtcatcttacattcgttcaagcttcgatcttccaccaccgccgccaccatcatcttaaatttctattataatattattagcactttgatttgcagccttgtattttggctatattattatggtatttgaacaatttactatttccctatttgcatgctatgttttgaacaaacactaagtatgttatttgactatatgggttttatagataatttatttatgaatgttgcttcatgattcttgcttcatgcgttggttgttactttctcaatgtatgaatgtttagctatgattgatta

SEQ ID NO: 251456 - DNA, 347 bp, Glycine max
  unsure (1)..(347): unsure at all n locations
ggacctatgaaactcagcttattggttattggtnngaatttatgtatgagcatatttctctttacctaagnatatgttatttgtgagtccttattgtaaacatatttgttttattttgacagggtcatcggaacaccaccatcgtcacccctgcagtcagatgttcagtcagaagctatgtttaagaatactagacaatccacaccgcttatacgggtgacttttagaaccttggatcagcccaaaccaactgtataacttgatgctgctattgggcgaggattgggcccacataaagagaagtttcacagttatctagaggtcgtagccagagaaaaaattcccat

SEQ ID NO: 251457 - DNA, 429 bp, Glycine max
  unsure (1)..(429): unsure at all n locations
agcttagacgaccttgttgagtcgagaattctttattattnatttggacaagtttgaatatgatgtaaaagaaaatgaatgtgagcctttttcccctttgaaagacttgtttaaaaaaaaatgttttaaaaatacttttaattaatatttgaatttttttattccttattagtatatatgcgaggggtagagggtgtcacactaaacacccattattgggagctcaaaaatcaaatactcttgatataatgattctaactctttatttaatgttattttgattttatcgcctcttttatgtgtttatcatcatgtttatggtttgatcactcatgctcatgtggttttatagggtttaggcattggaaaatatttatttcctaagaactcgaaaagaacatctaggtaatccatctctagggatataat

SEQ ID NO: 251458 - DNA, 291 bp, Glycine max
  unsure (1)..(291): unsure at all n locations
tgcaatcctcatctcannatttcttgagaagcatgatattttccttcatgaatgaaattcaaaccaatttaatctttgattgcagacttatatggaaacttacatcaattgagttttaatgttatcagttccagcctctccatacatgagaattttttgtatggtccgggactacacgtgtccatgatcctggtcaatcttcacatgataaataacagtttttcaatttatgagaaagggttagtaaaattcgattatagtgtcacatggagattgactctgactaggggt

SEQ ID NO: 251459 - DNA, 126 bp, Glycine max
  unsure (1)..(126): unsure at all n locations
agctngntcaattgtagtatggacagttttctctatgcggaccgagaataaggcaggtgtgctgtgctttgtcgagtctcctgtcctggaacgaattgtccctgacagttcatttgatcgcagacg

SEQ ID NO: 251460 - DNA, 449 bp, Glycine max
tgtcgagtatgaataacgcctcaacagggtagccgattttctgctagatcccctcttattcattagtggaacacacgcatctcagatagagaacactctcttctctcgaaagcatcacatctcacactacacatgtatgctattctcaataacctcttacaccaaaatcccaaatccttcactctgaaaaactactccaacggtttaaatgcaaacaacaacgcgtttgaatgatatagtgtctgttcacctacgttggttcaacacgagaagaccaaatgctgtgaaaaacaaaaccctttcctttactggaaagcactgattgcgtcaatcaacactggagggtgacgatgatcgacgtggaacacacaaaagcattgattgatccatgaacagtgaagggtgacgagaaacgggaaccaccaccactgggagagggatgatctatg

SEQ ID NO: 251461 - DNA, 335 bp, Glycine max
  unsure (1)..(335): unsure at all n locations
agtttttttttacgcncacaggcactggtcattgattaccacaacattgtaatcgattacagctttttgaaattaattggaacgtcgtaaattcaatttgaaaactttttcaaaacaattttgctactggtaatcgattatcagacagtaagaactctttggtatacatgttgtgagaaaaatcatgtgctactcaattgttgagaagaacttttcataattatcttgattacaccttctcttgattcttgaatcatgagtcttgaatcttgatcttgattcttgagatcttgaaccttgaatgtcgattcttgacacataacttttctcttgag

SEQ ID NO: 251462 - DNA, 228 bp, Glycine max
acatgcatcttattggcagctgcaggacctcaacgttcccgtgttcttgccactttgtacaaggtgaatgtttacacattaaacaatatacagattctagaatcctgtttgcaaaggtcaaatctcataatatataatgcttgtgggcttggattaagatgaacggcgttcaaagttgaagatctatccaatactgcggaaggtatctccccctacccatccctcctt

SEQ ID NO: 251463 - DNA, 444 bp, Glycine max
  unsure (1)..(444): unsure at all n locations
tgaccaanagcaaaaacagtccctgattcaatgtttctatgattcaaatagccaagcaaaggtgttgcttgcttctgtaaaagcatcttctgatggcattaacttaattggagcttcaagggtcatgcttcttgatgttgttaggaatccctcagtggaaaggcaagctatttgtcgagcatatagacttggacaaaagagggttgttttcacatatcatcttcttgcacagggcacccccgaatgcacaaagtattgtaaacaagcagaaaagaaccggttatctgaacttgttttctcaaatagaaatgctgaaagtgataagctcaagagtagtggagtaaggtttgaggatagagttcttgatctcatggttcagcataaaaaactcaaggatatgtttggtgaatgtcttggtcaaccaanggagagatatttggagac

SEQ ID NO: 251464 - DNA, 337 bp, Glycine max
agcttatgtggcagacatggataatagacctcctcaacagcaaaaccaacaatagcagaataattatgacctttcaagcaatagatacaatccaggttggaggaatcatctaaatctgagatggacaagtccttcacaacaacaacagcctatccctccttttcagaatgttgctggtccaagcaagccatatgttcctcctccaatacagcagcagtcacaacaaagacaagcaactgaggctcctcctcaaccttccttagaagagttagtgaggcaaatgaccatccagaatatgcaattttatcaagagacaagaagcctcattcagagtctg

SEQ ID NO: 251465 - DNA, 444 bp, Glycine max
tcatggacatctcccagagatatgtcaccttcgtattttctgttgcctatgctatgctagcacacttaaagcaaaccgaaagaaactagatcctagagcacacccatgcatcttcattggtttcaaatcaaacacaaaagggtacctggtttataacttgcattcgcatagcatcatcacatcatgaaatgttgtattttatgaagatcattttccgcaaatctctgaaacacaacactcacacctaaaacccagtacacctctcccagaatccttttccagtaaccaatatgacccaaccatggaaaccacaccaccacaacccaccatacaagaacccaaagatcatacacacacagtgaaatctacttcctcacaacccagacgctcaacacgaatgaagcacgcaccaacatacttacaagattatcaccgtgatctctc

SEQ ID NO: 251466 - DNA, 432 bp, Glycine max
  unsure (1)..(432): unsure at all n locations
agctctncattngatccagcagaggaggagcatacaacctatttcactcaagtcacacccacggaactctggtacaagagacttgctcattgccatcttgaaagaatgttaaacatgaaaaaaaggaaatatgcaaaagaaaatttgaagaagtttcaaatggaggaatgcaaatctgttagcacaccaatgaatcaaaaggagaagttcagcaagaaaaaaggtattgataacattgatgaacgatattatgggagcttgattgggtgtctaatgtatctcactacaacaaggccaaacattctatttgctcaaaagaacaaaactagaatttttgttgagaatcaagtagtcattgctattgcaaacaatctcgtgtgtcatggganaactaaacatttcaacatcaaggtttattatttgataaagatg

SEQ ID NO: 251467 - DNA, 460 bp, Glycine max
  unsure (1)..(460): unsure at all n locations
ttggtagttaactaatattacaagtaattaactagttgatgattatggtttccaaaaatgtctccccttttcctcacactgaacctcctcttctttccacttgtctctgctcgtgggccatgccctggtccaaactcaaactcaaacccaaacccaaagcctaagcccaggcccagacccaggcccatcaacctttcagatggttctaacacttcagaagcctcttcttgcccacgtgaagaactcaaactaagcatatgcgccaatttgctacgcagcactagttactccttgctgcagcctcatcgcgggcctagttgattttgaagctgcagtgtgcctctgtactctcctcagacaaaacattntgggcatcaaccttaacaatggtattcaactctcttatcaacatttgctcaagggaagtcccacgtgactntatatgttaattnttattatg

SEQ ID NO: 251468 - DNA, 433 bp, Glycine max
agcttgtagtaactataaaatgtgacgtctgttatgtattttgagaagatacttcaatagtagttgtgcgtgttattttgctgctactattctttgtttcatttttgtatgtatacatatattatattattctatataattttatatataacaggtaaactctacctcccttgtctgatcctaggtgggatctattgttttggctacctttggaagtaaggccgcagagctcttgatgttacttatagtttgccttgttgcatttatggctaaccagttatggggcaatcagataattcttagtagccatgttgaagggtttatacttgcacttctgttttatcccccattgttatataaaacatgaactgcatgggcagtgctggtgccggaaccaacttcatcatcttgctacaacaaaagagtttgtgtc

SEQ ID NO: 251469 - DNA, 414 bp, Glycine max
  unsure (1)..(414): unsure at all n locations
ntagggttggntctctatggctaattgttatcacattattttctatcgnattacctaactaacttcgctttatagagctaatatggtaatattttaccttttatgatgtttttttatctacttactatttttttcatctaaattgaatatattcttcgttgatttagatataataatcttgcaatccctttttagattttttccaacaagcaaccaatgattacgaatttcttttaggtaagagattatggaattagaataagtaatggtttcccactaagtaatgttgctcactgtatttacatatattgatgtcagctagtgtaaataatatcgctcttcgttacaatgaattgtggctagttaaaaggacataacaggttaaccaaagcacacaccaattatgttttaaag

SEQ ID NO: 251470 - DNA, 434 bp, Glycine max
  unsure (1)..(434): unsure at all n locations
agcttctagccaaatggacttaccttgaattatttccttngatagcccttttgagccttgtttccctttccttgttttgaagctcactacaagccttaagtgaaaaaccatgatattaccatatccttaaggaattttggagctttggaattgttttgggaataagtgtggggggtttttgtttcattggacaacttgttttgttgggtatgcttcatgatgtattttgggccatacttgatgtacattgtatattggttaaatgttggacatgctgaatgaaatgttgtttctcaaaggctaatgagtaaaaaaaaaaatcgaaaaaagaaaaagaaaagcaataaagttgactgaataagatcttaaatggcacaagaatgatgaaactcttggttctactcttcatgtttaatttttatctttacttcttt

SEQ ID NO: 251471 - DNA, 428 bp, Glycine max
  unsure (1)..(428): unsure at all n locations
agcttcttatccaaggctcatcttggtggtgattctcattcttccatggcttattccctagtggatggtgcctcctctcacctcttctcctttgtcttccgctgcatctccatggtggaaaaccaccattaaaggacctcattgaagctcaaagatccagcctccatagaagccccgcaagtaagcttccatcaagtggtaatcagagcacaagagcttcaagtaggtgctccttaaacctccattaatttttttgctttaccttctcttccattgttgtttcttaatttttctccatgtatctcctcacatgtcttgttctaaatgttgttaacatgattttttagagtttccaccgattaaacttgctatagaagctagatttgattttctatggttcanatttcttgggtcttgtcttgaaccat

SEQ ID NO: 251472 - DNA, 440 bp, Glycine max
  unsure (1)..(440): unsure at all n locations
ntcaaaccccattntagtgacttttttgtggacgagcctttctacgcgagnttgatttagccttagtttcactttagttattagtcaattcgattaagaatgaaaaatcccaaagaaaaaacgtccaattgatttttcgcatcattttactaaaaggtattttttggattattatattattattttacctcttttttgatttccaacgtggttacggcatgaccgaacggtcggaattcattttaacaaaaattgacggatattacaaatcaaatgaacggtggaaatttattttattttttgattaggcgagaaatgacttaaataaattactgaagcacgtcaaaaaggggtacggaaagtaaatgaaaacgagaataaaaatacatgaaacaaaatgggaaccaccacgggtacatagaatgaattgaaaagctcag

SEQ ID NO: 251473 - DNA, 385 bp, Glycine max
  unsure (1)..(385): unsure at all n locations
agctnntttttagggagccttattgagtgctgttttaccttcctgaaacaatttttaccttaaccctcccccaaattaggggcatattatgagtaaaatccttatgctctcttgaaccctaaaacaaggtagaagataattaaagtaggcttaggggttttacaaaaaaaacatgattatcattttttgcttaaataaggggcaagggataaattatcatcaaaggatggctttttggctaagtggctgaaaataagaagaaacatggccttgatcatttccacctcatgtaattaatctaacagtctaagaatgatgcaaaatcgggaaattaaaaaacagatgttctctcacaagtaaagttcacacaactcaccgggataaa

SEQ ID NO: 251474 - DNA, 456 bp, Glycine max
  unsure (1)..(456): unsure at all n locations
tactaagctgcaacttcctcaccaaccagtcggttttgtttgcccggantaaggcgggttgcagcaccggctccgcttccctaactgtactggaggcggntgtcgtggctttatcctctatagttttctggagttttaacatgacctctgagatggaagccatttgatcttttaaagtcgaagatcggccttcatctgttcctgcacgccctcttcattatccatttttctggatcgagtgttataggggtgccttggtgttttcttagttatgatgaaattcccaaagaaataaacaacggtgagtatgccaccaaaacatgaatatgcaaatggatgatcggagcacttggatccaccccaaggttnttagataacatgatgagttcagaactattcattntatataaagaacatagctttcatctagccaagattatacagaggtattacaag

SEQ ID NO: 251475 - DNA, 418 bp, Glycine max
agcttggagttaacatgagcgcattcgtctttttctttagaccacacttcttgtggcttcaattcatcaatgggctatccttctgtgaccagcatcttgcgatgctcccagcctctgatgacagctatccaggttctgctatacagagatttgagaaaggccaccatccttgctttccagcatacatagtcggccccatccaaaattggtgggctgctcactcggcctccttctttctccacgttgatcaaaattcatctgcctatacctcactcagagagtttgagtgcccgctctgataccaaatggaattccgataccgtggacagacgtcgtacacgatgtctcgacatcacgcttcagaacatgccgatagtctttgacgtggtgaacagattacacatgttaatgacactag

SEQ ID NO: 251476 - DNA, 409 bp, Glycine max
tgtatgattatggggtacccatcacatgtgacactatatacgctcataaacccacatccacgaatcgcgcataaacccaccatacactattgcccacctacaactgagctcacgtactcccacgtagcccatatcctagattctctcaacaccgggtccgcatcaatccttccaagcttccccaacatccaagatattcagcattcaaacaacacatactatcacagtcaataaaacagggcatatgcacataactctgcccagaacaccaaccaaaatcacaacttttctcacttaaagactccagtgacatttcctttgttccaattcataaaccgttggatcgactcgaatattctactggaagtctctagtacataagtctacattatgaccgtagggatctact

SEQ ID NO: 251477 - DNA, 363 bp, Glycine max
  unsure (1)..(363): unsure at all n locations
agctnggaaactgggcggagattngatgcatatgtaaataaaacagacttatgagtggttcattatatagtctgcctcttatctataaaaatttactatttcctaactaacttcccgagacttgggatagtatgatactgtttactctcgttttaaaaaaaatgttcctatntataatcccaccatcgatattccccttcaatatacttagtttgtctattgcattttacacacaacacatgcatgtgtcaatgaataattgtggatgacacaattgaatagtcagtgttgatgagattatccctcctgatatgcctatttcattgacaaactcagaatgcggactttactttatataaataa

SEQ ID NO: 251478 - DNA, 451 bp, Glycine max
tgtaacacacggatgcgcttataactgtgactcgatatgccatgaaaaggcactactggatgtggacacgctgatctggtttggaatctaacgacaagccacatgcgagtgcctataatcacgaagctgtgtagcacgattatactatgacccatgcttgcttcactcaagaaactcccttcaacataatctacacatggaaaagggatttctatgctgagacatatcgaaccttctcctttgtggcgacaattatcttctgcacatactttttcacacaccatgtagatcctatcagaacagaagccgaatatgatgttgaaatcgctaccgactatatggttgtgcaagtgtatgatcctgcactctgtagcgtctatgatcatccactcaatgtggaactcgacacaaccatataggcacttgctcacgccctaaaggatcatgctca

SEQ ID NO: 251479 - DNA, 402 bp, Glycine max
agcttgcataacaagtttctaaaactatttttgtacaaaatgaagtaactaactcactgtcatatcctaatttcgttcggggaccattgtttggtggcatgcaaccttctcttgatcgctttgaggcacttaacacccatcgttaggcaatccgtgaagttccgcggcatgccggaagtcgaaaggaagcattgttgcgcaatccgtaaagtttcgcaacattctagaggtcaaaaggggcattgttgcataatccgtaaggtttcgtgacattccgaaaagaaaataagtgtcgttacgtaatccgtaaagttccataacgttacggaaaaggaataaaaaaaaagcaaaaggggatatatttggtaaaaaaaaaggcgtgcaaatagcaaccaggcccac

SEQ ID NO: 251480 - DNA, 447 bp, Glycine max
  unsure (1)..(447): unsure at all n locations
ntgttgggactntctttntgttgttgttttttggaatatgcaaggcatgggcaacttgttttactattgttcgacggccagcaagtgcaccggatcgcgcaagtagtataaaacggtaagaaccgagtatcgaactctcggggaacttgttttacttggtaaagctgtggttcagtaaataagtgcctttggatgaaagtttggtgcgtggtatggacagatatgtaaactaaaatattcaacagaaaatcatgtgagtagtggtgtgtgaagacagataaagaacatgttggtcttcctactggatgattgatgttattaaagatattctctacctaacaatgtttctgtgttttatgatgtctcctggactgctaaaccccgatgtctcgtgcatgtttagcctaatcctagccaaacgtcatccttagatccctcttgttggac

SEQ ID NO: 251481 - DNA, 413 bp, Glycine max
agcttgcttgtgaagcttctatggaggctggatctttgagcttcaatgaggtcctttaatggtgattttccaccatggagatgcagcggaagacaaaggagaagaggtgataggaggcaccatccactagggaataagccatggaagaaggagcttcaccaccaagatgagccttggataagaagcttggaaggatgcttcaatggaggaaaagaaagagggagagaaagagaaaggggggagcaccaaattgaaggaataaaagagggagagaagtggaactttgaagtatgtctcacaagactcttattcatcaaagttacaacaagtgttacacatgcttttatttatagactaggtaacttccttgagaagctttttgagaaaacttccttgagaagctatagcttaac

SEQ ID NO: 251482 - DNA, 440 bp, Glycine max
  unsure (1)..(440): unsure at all n locations
tcctcggggccatttcctttggctgtggacttggtcgtttattggtcggccatgtggtgtaggcaatactcaaacctttttgtggatgagcagaggtgaactctagaggtggtggtggtgtgtctattgcccgctaccgaccatcccaatgctgctgtggtgtttcgccctgcgcctgcctagggacgcagtacttcttgatgaaagctcgatcagtagggggcctaatgcccttgctggaggttacaggtactctgtagaactgacagagacccgtaattagagcttgacaactccaagaccctgttggacttcttcgggtccactgngtgtcttgcaggtgcgatccctgcaaacaattgatgaaatcagaaatcagttgagcgatgtgcatacttacctatgatgacantaaccttgccggggggtactggcaccct

SEQ ID NO: 251483 - DNA, 356 bp, Glycine max
  unsure (1)..(356): unsure at all n locations
agcttctatataagatgaaccattttattatttaagacaagctgagttntattcagaaaactagagtttatctcttttatcttagggagagtgattctcctaaattcttgagtgattcaagaacaccctggctgtatcaaaggactttcacaacctttgtgtgttgccctcgctggaaagagngattctttccttcctttcatcttcacccttgttctttcaaaccacaattccagaaaatccacctctgcccagaagtatctcgtggccataactcccattttacgcactcaaattaagtgattcttgagcctaaattgactttcaaaacgagacctttcacctcgtttttgaat

SEQ ID NO: 251484 - DNA, 459 bp, Glycine max
  unsure (1)..(459): unsure at all n locations
tgatgganacttgcttgtggagcttctaatgaggctggttctttgagcttcaatgaggtcctttaatggtgcttttccaccatggagatgcagcggaagacaaaggagaagaggtaagaggcggcgccatccactagggaataagccatgaaagaaggagcttcaccaccaagataagccttggataagaagcttggagaggatgcttcaatggaggaaaagaaagagggagagaaagagagaggggggagcacgaaattgaaggaataaaggagggagagaagtggaactttgaaagatgtctcacaagactctcattcatcanagttacaacaagtgttacacatgcttctatttatagactaagtagcttccttgagaagctttcttaagaaaacttccttgagaagtttctttgagagaacttccttgagaagctagagtttagctacacacacc

SEQ ID NO: 251485 - DNA, 384 bp, Glycine max
agcttcttgcttactgcagaagtaacctatctcgaccaggcgagttggttacttcatccctaagctttttagtgggcccaggggatgaaaaatgcccaaaagtgaccctcttgcccttattttgaatattttgcactttttttttccgaaatctcacaaaaccctatggattgcacgacaattagtgttcagcaactcaattcggctggcaagaatccaaatgtttgcaaatgatcatcccagacaaaattagggtatgacaattgcccctctttacttatcttttattggaaataaaagggaagtaaagataaagacactaatttcgtttgagggatctcaccatccaactggccactagtggaagtccaagcagcatgaaat

SEQ ID NO: 251486 - DNA, 441 bp, Glycine max
  unsure (1)..(441): unsure at all n locations
tgtacgaatgtaagaaacatcttcttcaaccttggtgatccttgactccatctcattgaaatgcatgcccacttgtaactccaaggtatcaaacctttcaccaacaaaggtttgaagaccatcaaacctgtctaaaatcttttgaagaagagaggaatcttctccaccatgtaagtgtccttcttcatcgatgggttgagcaccctttttcacccaagagccatcatgctcttttcggtaaccaaaggatgcaatcactgcagcgcgtattagaaaagatctcttgattggaacataaggttcagaatcaagagaaaagttgaagtgttgaatatggcaatggagcatttaatcgcaatgccttatgcatgtgatatcggacctaagtgtgcccaatcaattgtcggcctttatgaanagcccacataacaataagatctt

SEQ ID NO: 251487 - DNA, 340 bp, Glycine max
agcttgagaggattgatggggaccctatgttgagagaaacaaggatatgggctacgtgggagtacgtgagctcagttggaggtgggcaacaggggatggtgggtttatgcgcgatttatggatgtggaaaaacttgttgtgcaccatcgcccgaccgccacctagtaccacatgtgatgggtaacccataatcctacaggcttgagatgaggaagtgtagaagggtgaaacttcctgcttttattcgttgaccacagagtggtacctggagatatgttccgggggtcatgagacaatggggacgtcaggtggggtgctatttgccaaaacctagagggag

SEQ ID NO: 251488 - DNA, 409 bp, Glycine max
  unsure (1)..(409): unsure at all n locations
ntntntgttcgatgttgcctaagaaatgtacaatgcagttcggctaggctaggtttcttcgtgcgaactgaaccgaagttgtgtttcggccgactggcatgttctcattttgtcggccaggaaaacattagcccacctcggcataaaaaacatgattcaccgatatttgacaggaaaagaaaaatgctagccgacgtcggccaggaaagatgaccgaccgaggtctgaaaaagaagcatgaccggatgactccggtcgaacatttcctaacagatatcatccaagtattattcagggattgaatagaaaaaacaatagccgacatcggtagttaaatagccgtgactgatatttttcggccgacattgcgcaatttcttttacaaacgctggcccgttaatattcttta

SEQ ID NO: 251489 - DNA, 435 bp, Glycine max
agcttctccatctccatcatcgaggtgcttcacttcccaaccccactacactccccatgaatttcccaaccaactaacaattactcttcttctcgcagaacatgaaggaagactatggcctattcgtgtggccctgcagcgtagttctcgccgagtacatttggcaacacaagcatcgattttcaggagccaccgttgttgaggtacccactcatttcaaattcgtgtcttattttgtgtgctctttattctccattttttcttattattaaattcatgcagctaggtgctggaacttccctgcctggcttggttgcagcaaaactcggtgcccgtgtcactcttactgatgactccaccagattagaggtattacactattatcacccaataattatccgattattattattctttatatattcttatagagct

SEQ ID NO: 251490 - DNA, 443 bp, Glycine max
  unsure (1)..(443): unsure at all n locations
gcttaccgtctctggctacttcgctcagcattcgcttcgctccttctccttccttcacanatcacanaagagtcaaagcaaaattgtcaacggtgtggatctggatcacttgattggcccggttcgtcggtcttgatgagaattattgacctcgtttaaagcccaatatcactgtccgtatggatcctgtttttgcttgagtgaaaggcatttatatcttgcacctctcatttcacatccagtacttcctaaaagactctagcagacaaaaatactcttttactccaaaaagactattttggaataggatacttttctagaagagctattctggaatatagtttttcgaattccaaaatacctattatggagtagctttccataatgattatcctattccttaatagctatttcaaattataatttttgtgtctagaataata

SEQ ID NO: 251491 - DNA, 428 bp, Glycine max
agcttgagatgaggaagtgttgaagggtttattttcctgcttttatcggtgaccacagagtggtacctggagatatgtcgcgggggtcaggagaccttggggacgtcaggtggggtgctattgcccaaaaccaagcttgaccaatcccgacccaacccgggcatagtcggtcagtgagaacctgtgatgtacctaaacaggcgagctcctgatagtcaacagataaaaggaacaaagaccacaaagcaaggaggcttgtggtggctggccagctgtgaattttgtgtgatatgtggattatggcctctggtaatcgattaccaagggtgggtaatcgattacaaggcttaaaaatgaagacaggaggctaagatggtctctggtaatcgattaccacggggtgtaatcgattaccaggcttgaaaacg

SEQ ID NO: 251492 - DNA, 442 bp, Glycine max
  unsure (1)..(442): unsure at all n locations
ngctctaaatntacattgatgtttgtatttatttggaggtgnttatgccatttttgctttaagggtagcatttcttggtaaaaactaactttccaaatgtttgccttcgcaggaatggccccgaggaagcttgcctcaaagaggtccaggaaggacaaggcggcggaaggaactagttccgctccggagtacgacagtcaccgctttaggagcgctgtacaccagcagcgcttcgaggccatcaagggatggtcgtttctctaggagcgacgcgtccagctcagggacgacgagtatactgatttccaggaggaaatagggcgccggcggtggacatcactggttactcccatggccaagttcgatccagaaatagcccttgagttntatgccaatgcttggccaacagaggaaggtgtgcgtgacatgagatcctgggtaa

SEQ ID NO: 251493 - DNA, 423 bp, Glycine max
agcttgacaatatcgttaccattctcagtgctttctgcttccacataagcaaagtttatggctccttgtgcctcttcaacagcagcgtcaaaaccaaatgacttatcaataacctgattcaggtaaaacatgattaattaggtgactattcaaaagcaaattatttttacagtctcggaaaagtagcttcaattgtccaattcaaccatgcttactaggacatcactatcactatcaacgaattttgttccaagaaatcgaacagagccaatcagacatggctccactctcatatttaaaaattaaagcatctaaaatcacaccaaccaccaacaaatttcttcatcacctaacattttttcttcttgaaggaaagaaggcaaaccagaattgaagcaaatacaaacaaaatcaaacaaatcg

SEQ ID NO: 251494 - DNA, 450 bp, Glycine max
  unsure (1)..(450): unsure at all n locations
tgggcaattaanaaacaaaagaggtgcacaaatacgtttttttaatactgatgactcacccatccaataaatatgtaaatgagtaagaaagcaacttacacattgacatacctgcactaccatttgaccagccagaggcagctgctgctcgggtgtcatgaatactcaattggcgtgtcaatttcgagagaagggatgattgtttctggattcgatcccttctgcgcttaacattttgatcttctagaagcagttcctcaatcttagccgtgctttgagcactaatcacggaaacatacaaaaaaatgttaaacagagaccaacatcaaagcaactaaatgtaaaaaattgttattatcatacaaaactgtaacatacagattaattagcatgcaacttgtacatgaacacttgaatcaataatgaattatgaagcanaattacggtatc

SEQ ID NO: 251495 - DNA, 427 bp, Glycine max
  unsure (1)..(427): unsure at all n locations
agctcatgatgttgaatgaggaggattctttttgntctgatgataacaaagatgatgacaaaaagcccaagagaatgatttcaagattgagtcaagaacaattcaagaatcaagaaaatttgatttcaagattcaaaaaaagattaattcaagattcaagagaagaaatcaagaagacttcacaagggaagtattgaaaagatttttcaaaaaacaaacatagcacagttttgtttttcaaaagaagttttcacaaaattttctaagttactagagtttttactctcaggtaatcgattatcagatttctgtaatcgattactagtggcaaagtttgttttcaaaagctttcaactgaatttacaacattccaattaatttcaaaatggtgtaatcgattacaatatattggtaatcgattaccagt

SEQ ID NO: 251496 - DNA, 259 bp, Glycine max
catgcaagctcaacccaagaggagagggaccctttcatattttacagaggagcaacaacaatgcttataagttgtacctcccaaaagagatggagtcaccacacacttttaacactttctgaattaactccctttgcaggtacaactgatattgaggaggaggaaccaacagatttgaggtccaaatctcttcaaggggaagaagatgatgcaatcctccctaagaagggaccaatcactagaaccatgagcaagaggc

SEQ ID NO: 251497 - DNA, 389 bp, Glycine max
tagagcttatctctttcatcttagagagagtgaatctcctaaattcttgagtgatgcatgaacaccctggctgtatcaaaggactttcacaacctttgtgtgttgccctcgctggaaagagtgattctttccttccaatcatcttcacccttgttctttcaaaccacaatcccagaaaatccacctctgcccagaattatctcgtggccataactcccattttacgcactcaaattaagtgattcttgagcctaaattgaatttcaaaacgagaactttcacctcgttttggaatcacctcattcggagccctgtagcttcagttattggcatttctatatttatgtccagccaccacttaacctacattgtacccatccattcatcca

SEQ ID NO: 251498 - DNA, 426 bp, Glycine max
  unsure (1)..(426): unsure at all n locations
agctngaaattaaacaacggaagctctctatatattcaaattgtcataactnttaactcggaggtccgattcaggcgcgtaatatatcgagacgctcgaaattgaacaatggaagctattgagcaattcaaatggtcataacttttcactcggaggtctgtttcaggcacataatatatcgagactctcgaaattgaacaacggaagctctcgagaaattcaaatggtcataacttttcactcggaggtcagattcaggcgcataatatatcgagatgctcgaaattgaacaacggaagctctcaagaaaatcaaatggtcaaaacttttcacacggaggtcagatttaggcgcataatataacgagacgctcgaaattgaacattggaagatctcgggaaattcaaatggtcataacttttaaca

SEQ ID NO: 251499 - DNA, 449 bp, Glycine max
  unsure (1)..(449): unsure at all n locations
tcttatctgtcggcggtgaatcttctctgtcctgttttattagtagatggngcctcttctcacctattctcctttatcttccactgcaactccatggctgaaaatcaccattgaaggacctcatcgaagcttaaagatccagcctcatagaagcttctcaagcaagcttccatcaagtggtatcagagcacaagaacttcaagtaggttgctccttaaacctccattaatttttagctttaccttctcctccattgttgtttcttcattttctccatgtatctcctcacatgtcttgtgttgaatgttgttaacatgattttttagaatttccactgattaaacttgctatagaagctagatttgattttctatggtacaaatttcttgttcttgctcttgaaccatgagttgtgttgagtctaggttccattgagtnttgtttgctat

SEQ ID NO: 251500 - DNA, 436 bp, Glycine max
  unsure (1)..(436): unsure at all n locations
tgtaaacagtaataacatttgtcacatggctgctttctttgtaaacaataagcctttacatgagaacaaagggaggggaaataatgtataaaatgaacaagaggaagtagaaaataattntctccttccttgatttgatgccaaacatgaggcgaataaaatgctaagaaaaattaaaatcacatactaatccataaaagaaatttgtcaagatattattttaaaaagaaccatataatttaacattgtgaaaagttcctaaaggtcaagtcccacaagtttaacacccgatcaactgattgtctcaccaagaactaaaataacagactactatgactcccacagtagcactatatgtgtcttcaattcactgtctcaccacattgaatgtcatttcatttatcgagaggaggattgatgttgaatgtgcattaaa

SEQ ID NO: 251501 - DNA, 388 bp, Glycine max
  unsure (1)..(388): unsure at all n locations
agcttcaccaccaagagagtgccttttatattaagcttanagagaaaacttcaatggaggaagagaatgaggtatagagagagagaggaagtggcttggaaattgaaggagaagagggagagaagttgaactttgaagtgtgtctcaaaagtctctcattcatcaaagttatgacaagtgttacacatgtttctacttataacctaccccataggaagcttccttgagaagcaaggaaggtatcatccttgggaagctagaggaagaaagctctcttgagaggctagagagggactactcatacccctccaatagctaagctcaccctcatgcccaaatacatgaaaataccaaaagtctctactacaaagactactcaaaatgccct

SEQ ID NO: 251502 - DNA, 402 bp, Glycine max
  unsure (1)..(402): unsure at all n locations
cttgtcgtgaattcatatnatgtgaaactgaatttttatttnnttatcaaacattacacatgagtatatatatgagattatagcggacttaagatcctctccctttttctgtttttgatttgttgtctcatataaatactgtcaattaagtgaaaaaatataagcatcttaaattctgtcttctctcatagtttggcagtatatttttgtgcgattaaatgtatataattaaggagtgtctcttgatagatctcgtgcacaatagtatgctaatagttctcaacttctcatagctttacttcaacttggtgtcttgtgcagattccttcaacaatgaccaagtgggaaaatcggttgccattattgtgggagtatttgcaggtcttgccgttctagttgtac

SEQ ID NO: 251503 - DNA, 388 bp, Glycine max
  unsure (1)..(388): unsure at all n locations
agcttgcatttggaatgtgcgaaagccttattctatcattaggattagnacctgacatctcaaacaaacaaatcaaacgttacaagacaatttagttgctgtttgaatacctcacccacttcagggtatcacacaattatggcttttctctaatgaaacactcttgccttttaccactctaattccccttgagttcttaggcaattcaagagaatatggcacaacaaagaacaattcaccaatatgtgtaaggaaggctagaaaggaaaaggttaccaagaaaatgcttaaatgtttttaggcccaatgaacgaaataaattcaaatttatgaatccagaacatccttctgcaaccatatattacttaaagagtttttttttaaattt

SEQ ID NO: 251504 - DNA, 411 bp, Glycine max
  unsure (1)..(411): unsure at all n locations
tccgtggttcaattccgagcatctagacatatgatgtgttcgaatctgaccttcgtgtgaaaagttatgaccatttgaatttctcgagagcctccgttgttgagtttcgagcctctcgacatattatgcgcctgaatcggacatcctgtggaaaaagtttgactanttcgatttctcgagagcttacgatgttcattttcagcgactcaattataataagcctaatccgaccttcatgtaaaaagtttaccatttgaatttctcagaactttcttggtaaatttaaccgctcactattataacctgattcgactacgtgtgatagtatgccatttgattttcccgagcttcggtggcatttcgacggctcgaatgtgaaggcccgaacttacactcgtggaaaatttaccc

SEQ ID NO: 251505 - DNA, 399 bp, Glycine max
  unsure (1)..(399): unsure at all n locations
agctngttgggccattactactccagcctaaacccatttcaggctcgtacccatcccttagcataacgcaggacaccatcaaagaggcattatatagacacgattgcaccggaggagcctccacataagcattgttcacaatttctagcgcttgaaaagatgtttccaatgactcttctgcagcttcaacatagggtgtagaggatggtgttagacaagtggcctcagatatcttaagaagggggggggggggtgaattaaaatattctcaactgtcttccctaattaaaaaatctatttcactctttacctcaagtatgaattcccttaatgacaatcttcttaaatattaaattccacgagacaacttgaatatgaatcataagcgctaataaataa

SEQ ID NO: 251506 - DNA, 448 bp, Glycine max
tgttgtatgacagttaagaatcagaggcgcatgagggatatgtattgaaagctagagagcatgtgagaaaggaattctcagaatatcatatttgattaaacattaagaatgagtacagcattgctcttatttacagtgaatggttaaacactagagtgggcaactgattgccaactaattagcccatcttaaataataaactaactaatttaacaactattacattattaatatctctgttaacctgtttatagggttggttgtgttgaatgagtgaatgtaatagaaatgcaagcaatggggggatggtgatgttcttgtcttttgttcattttgttgggattaatgttgtgtattgtcaagaagcattggagtttctatggttattgaggcttgggttgaagctttatttgaagtggtgcttcattctgattgcgatagatgggta

SEQ ID NO: 251507 - DNA, 258 bp, Glycine max
tgactacgtctaaagaaggtggggcgtgagtgagactttattgtattggacaagccaaacgaagagatgagaacttttataatatctcgtaatttagagtaaaataatcacttaatataagtatgctattgaataaatttgtaatggttgaaccaaggtaagcactagattaatgattacaatgattaagatacgtgcataatcgattaaaacagtaaggcactgtgattacaataaccacgatgaacctgatgtaat

SEQ ID NO: 251508 - DNA, 298 bp, Glycine max
agctggggaggattgatggggacccgacgttgagaggaacggggataagggctacgtgggagtacgtgagctcagttggaggtgggcaacaggggatggtgggttatacgtgatttgtggatgtggagaattgttgtgcaccctcgcccgaccgccacctagtaccacatgtgatggataccccataatcctacaagcttgaaacgaggaagtgtagaaaggtgaaacttcttgcttttattcgttgaccacagagtggtacctggagatatgtcgcgggggtcaagagaccttgggg

SEQ ID NO: 251509 - DNA, 284 bp, Glycine max
  unsure (1)..(284): unsure at all n locations
tgagtataattcattctttgtgttacgagcctacatcatatagttggattatggatgtttctgtcacaatcaagcgattatggatgtctccatatgggtgtacatggtggaagaaaagcttccaagcttattttgatgatgccaaagactcaagtcaagaatcaagattcaagcaagtttcaagaatcaaagagtcattcaatcaagaatcaagaattcagtgaaggttcaagagaagactcaagatatgcaagaccctcaagaaaagcattaanagaattttc

SEQ ID NO: 251510 - DNA, 438 bp, Glycine max
  unsure (1)..(438): unsure at all n locations
agctntgcctcanaacaaagtgttttcaagacattctaggctgtggtaatcaattactaggaagtgtaatcgattaccaaaagacaattttgaaaaaacaatttttagaaggattttgaaatttgaatttaaaagctgtaattgattaccattgatgtgtaattgattaccagcaacgaaactcttgaaattcaatttgaaaagtcatgatccttcaaaaacataactgtgtaatcgattaccagtgaagaatttcaaaaaaagctttttgaaaagacacatctcttcaaaccattttgaaaaggcacgaatggcctatatatatgtgtgtctgacttcaaaaagcaagagagagatattctaagacaacttcattgccaaatgctctctcaacaactcttgggtaaacacttgcaaatctattgagagttcatccag

SEQ ID NO: 251511 - DNA, 436 bp, Glycine max
  unsure (1)..(436): unsure at all n locations
agctngcaaatttgtgacaagtgtaccggattttctttcaaagctgaaggtgaataactttctcatcatgctgataaattccttcttgagtagctttttatactcgtgttaacagaggattatcaattcagaatttaagaatgaagttctttagtatattaataaaagaaccagtttttttgtttttttgtatgcttatactttaaaatatacagtattgatatccaacatatgttaactttgattcatgtcccatgtccaagacaaacaatttgaatgtaaaaagttaaaacactaggatatatactctgatgaaccttatagaaatagagaaaaaagagactttttgctatggttttcaaaatgcagtaatgatgaagctggattgacaatgataacatagcgctagcatatattctgctggttaaactttaac

SEQ ID NO: 251512 - DNA, 378 bp, Glycine max
tcctatctcttgtagctcatagctgcaacaagaataatgctgcagtttatctatcttccgtgggatttggaagtctagaagcacaaggcataagaagcctacaacatgtagggaagctgtagattcaccccaatcataagcaaatgctatagaagcaaatatataaggctgatttataagactgacagcgacaggtttgaataacaagtcgattggaacaacatatcctagggaagccaagtatcttttcattcagattccctacatccatatcattcgtaggtcttgtttcaccaaacaaagaccgaaccttgtgtgcctcaaactctttattagtttgccatgtcatcttttcccttgctgacatgatcatatcct

SEQ ID NO: 251513 - DNA, 408 bp, Glycine max
ccgcgatccttatagcgacctgcggcatgcagcttgttaagaattagaggaggcattatcatgcttgctcgcacatcgttcgcgtgtatgatatccactccacaaggcttgaagttgaggagaccttcaatcctattacgcaccggggcggacaaaagtgggctgttaacttgaatggtcattattggcaatgcagaacgtattctgcgcttcactatccatgttcacacattatagcagctagaggttacatgagcatgaactactaccattatatagaggttgtttacacaaacgaacacatcttaaaagcttactccgcacaatggtggcctcttgggaatgaagcggctattcctccttctaatgacgcatggacacttatccctgacccaactacaattcatg

SEQ ID NO: 251514 - DNA, 292 bp, Glycine max
  unsure (1)..(292): unsure at all n locations
nggtcatttaagcctcctctcgagattagccgacgctttctagtctccgnatcctctagagacttccaagaatccttggtcgattgtaccaatgtctcatttgccttggtagccttggatatggctttttcaaccttggcacattcaaaaagttcccttcgaaactcgacgtcatcccttaagtctgtgcttggaaatgcgcaatggaatccattaacgctcgagggtcggcttcacgttagcatacctcagtttgactgcctgaacataaaggattggatgagagcacaaa

SEQ ID NO: 251515 - DNA, 392 bp, Glycine max
agctttgaaagcagagctcgaatagacatgagtggtgaaagagaagctaaagatggcagtcactagggtcaggaaagtatgatgagctaaaagatgtcaacctaaaagggctcgaaaggaagaatggaacaggaacaagttttgaggggctctgtggggcagcaataacgagctcaagcttaaaagtgctgaaaaggacgaatcgaggatggaaagcatggtgttagaaggtaagttaaaggcttgtcagaggtcgaagaaaagtttgacgaaagagttgagcaaaaaagaagaaaatattttgataatcatcgaccaatataaggaaaaggtgaacctatctggtagtcatgggcagatgctataagatgaacatgcaaaggtgtcagctt

SEQ ID NO: 251516 - DNA, 466 bp, Glycine max
  unsure (1)..(466): unsure at all n locations
gacctataaaactcagcctttaatatctcttctgatatggacctacatccaatccttatttaaatgaannatttatatatcatggttcaacttgtcattgttagatattttcttacaataggttttatgagattaattntggttgtttcatgccttttccaattatgtacaaggccatatgtatggttatgcccttcagattatgtgaaacattttattcctatgtaggtttccattcgtgtgttcgaatattntgatattcttaattgttttatataaaaaaatattacacaacataatctttcatttgtataatggagtcaaaagttgggaaaaatcttgcatttgtccttgtattcaatttgcatgtaacgatattattgctaatgtttttatttatacaagttttattgcaaagtgaagtttaataaacatgttagcaatacaaaacccatccttngttctt

SEQ ID NO: 251517 - DNA, 221 bp, Glycine max
atataatttccatcattgcatacccccccaacccttcaaggtctctgaacaggaaagatatccccttccaatgcgcaacaccctcccatgatggggtcagacttacaaagacaaacctaaaactaagttctcatgtccacttatacgactataagcaccactataaaaaatacaccatgcattggtgttataaattgggccccatatatttaccaccccaa

SEQ ID NO: 251518 - DNA, 355 bp, Glycine max
agcttatatcacagatgctggtgttcattattgctgaacacgcctaattatacgttctgctatgttcttatatttgcatggatgtggatccatggcctcctatgcatgaggatatttgctttttcgacgaacaaatctggtttgcggccatatgagcgattgcccctatggcgcccacataattggaatgatggggatctatcatgatgcttttccatcctttgcttaaaaaaatattctcttttaaattgatttttgaatgtgataagaaaactttgtatctatattctcttaatagatcgccattgtcctcatctttattatgctcctaatgacctataatgttgaccttttc

SEQ ID NO: 251519 - DNA, 373 bp, Glycine max
tatgatgacgctgggaagatcaagaagtacgctaaccttattgtcgattgggaatcctaagtagactctggctggctacagatttggcgaataagcaaattttgcctatgttgggtgcagatcatgcaagagctgcagaaactgaagaggggaccccagttagagtttgggacatggacaccatatgcatgcaccagctcgttctagagcgatggtcttcttccaagagctatgttcttattgcaaagtggaaccaatatttcgtgagaagaagagacctccagagaggggatgagatcggatttcattgcgatccatataattgcgttataatttctgtgtccttaaacgagctatgccagataattaatct

SEQ ID NO: 251520 - DNA, 403 bp, Glycine max
agcttgcctcagagaggtgcaggaatgacttggcagccgaaggaactagttccgctccggagtatgacagtcaccgctttaggagcgctgtacaccagcagcgcttcgaggccatcaagggatggtcgtttctccgggagcgacgcgtccagctcagggacgacgagtatactgatttccaggaggaaatagggcgccggcggtgggcatcactggttactcccatggccaagtttgatccagaaatagtccttgagttttatgccaatgcttggccaacagaggagggcatgcgtgacatgagatcctgggtaaggggtcagttgatcccgtttgatgccgacgctatcggccaactcctaggatatccgttggtgttggaagagggccaggaatgtgagta

SEQ ID NO: 251521 - DNA, 385 bp, Glycine max
  unsure (1)..(385): unsure at all n locations
tgagatgaggaagtgtagaagggtgaaacttcctgcttttattcgttgactacagagtggtacctggagatatgtcgcggnggtcaggagaccttggggacgtcaggtggggtgctattgcccaaaaccaagcttgaccaatcccgacccaacccgggcatagtcaatcagtgagaacctgtgatgtacctaaacaggcgagctcctggcagtcaacagataaaaggaacaaagaccacaaagctaggaggcttgtgtggtggctggccagctgtgaactcttgttgatatatgggatatgggctctggtaatcgattaccaagggtgggtaatcgattacagggctaaaaatgaagacaggaggctaagatagtctctggtaat

SEQ ID NO: 251522 - DNA, 431 bp, Glycine max
agcttgtctcagcgtttatgcgagacatataccaacatgttagctatcatcgccaagtacgaagaagagttaggtctagccacggcccacgagcataaaatcgcggatgagtatgctcaagtatatgcggaaaaagaggctagaggaagggtgatcgactctttacaccaagaggcaaccatgtggatggatcggtttgctcttaccttgaacgggagtcaagaacttccccgattgttagccaaggccaaggcgatggcagacacctactcccgccccgaagagattcatgggcttctcggctattgtcagcatatgatagacttaatggcccacataattagaaatcggtaagaaacttgtatgggctctcagaccttgactagatacgacttcctttttgaaataaaatgagttggctcatgtttcta

SEQ ID NO: 251523 - DNA, 448 bp, Glycine max
tgaatcatctacctcatttctgacagccagtgggtgagtccagtccaagtggtccctaagaagacagacctcacaataattaagaatgaaagggatgagcttatccccataagagtgcagaacagttggcgagtctgcattgattataggaggctgaaccaggtaaccagaaaagatcattttcccctgcctttcattgatcaaatgcttgagcgcttggctggtaagtctcattaatgctctcttgatggtttttctggttatttacaaattcatattgctcttgaggatcaagaaaagaccacatccacctgtccctttggcacttttgcctataggagaatgccatttggcctatgcaacgcccctggtaccttccagtggtgtatgcttagcatttccagtgactttctagagagttgcatagaggtgtttatggattgattta

SEQ ID NO: 251524 - DNA, 418 bp, Glycine max
  unsure (1)..(418): unsure at all n locations
agcttagngattgtctttctgcctcttttgttggagtctataggtaggattaatatgtctcaccatgctggggattttttgaggctttactaatgatttcctggtcttagttatagataattaaattgttaagacctttattatagtgaatttcaatgactatatagagagtgtcaagtgagaattctttactattttcataaattaaaataatgaatatacagtactcgatgatatttgagggggacaattaaattcacttacctttatttagtttaggaagtcttcataaattctacttaggatatcgatcttcattgtacaagtggaatttcttttgctctaacacatgaaagagattagaagttctgacaaagatgaagaatgtgactatcagtgagatgtctaggtggagaac

SEQ ID NO: 251525 - DNA, 430 bp, Glycine max
  unsure (1)..(430): unsure at all n locations
tanggtagagcttacaagtgtaagagctagaaatgactgtgatcaatacttataactttgataagttagtggaaacttggtagttgccaagaactagatgtagtcttggatttaagacaaaccaatataattctttgtgtgcttatttatattgcttgaattgaaaagggtttgaatttgttttcagatcttatatctctttttgttttactaagaaaactatttttctcatcgcttgataaagtttgaatcaaaacctttctaagtggttttaggtttatttacatcagacgataaacatgtttttagtcttagaaaatttttaaatgtctaaaagcacaaatcaaccccctttattgtgttatttgcttctacagtatggtattagagcttagcctctaagggtgagcacttaacagtgtgtagagga

SEQ ID NO: 251526 - DNA, 353 bp, Glycine max
agcttgagaagaggaagcgtggaaggtttatactccccgcttttattgctgaccacagagtggtacctgtagatatgtcgcgggggtcaagagaccttggggacgtcaggtggggtgctattgcccaaaaccaagcttgaccaatcccgacccaacccgggcatagtcggtcagggagaacctgtgatgtacctaagcaggcgagctcctggctgtcaacatataaaaggaaaacatgacccaacacaaggaggcttgtggtggctggccacctgtgaattttgtgtaatacgtggattgtggcctctggtaatccattaccaagggtgggtaatcgattacaaggcttaaaa

SEQ ID NO: 251527 - DNA, 348 bp, Glycine max
  unsure (1)..(348): unsure at all n locations
tctcaaggaagntntctcaagagagctgctcaatgaagttacctaatctataaatagaagcatgtgtaacacttgttgtaactttgatgaatgaaagtcttatgagacacacttcaaagttccatttctctccctcttttattccttgaattttgtgctccccccttctctctttcttttcctccattgaagcatcctctccaagcttcttatccaaaggaggtgagcttagttatcaaaatggtgtgtgtagctaagctctagcttctcaaggaagttttctcacagaggcttcttcaggaagttttctcaagaagcttttcaaggaactacctagtctataaatgg

SEQ ID NO: 251528 - DNA, 323 bp, Glycine max
agcttcttatccaaggcccatcttggtggtgaagctcttttttccatggcttattccttaatggatggcgcctcctctcacctcttctcctttgtcttccgctgcatctccatggtgaaaaatcaccattgaaggacctcattgaagctcaaagatccagcctccataaaagctccacaagcaagcttccatcaataacttttcacacggatgtccgattcgggcgcataatatgtcgagaggctcgaaataacggaagcacttgagaaattcaaatggtcataacatttcacacggatgttagattaaggcgcatcatatat

SEQ ID NO: 251529 - DNA, 289 bp, Glycine max
ttatgaccagagcaatcgctggagagtttccaatgtctatttatgagcggctccatatatgaacattctgaataggagatccgagcgaaaagatatgaccatagcaatcgctggagagctctcagcgttcagttacgagcgtctccagatatgaagctccctaagagaacatacgagcgaaaggatatgaccatagcaatcgctggagagtttccagcgtttaatcatgagctgcgccatatatgaacatccggaataggacatccgagcgaaaggatatgaccatatg

SEQ ID NO: 251530 - DNA, 428 bp, Glycine max
agcttataatatattgatacgtggcgaattaaacatcggaagctctcgtgaaattcaaatggtcataacttttcacacggatgtccgattatggcgaatcacatatcgagacgctcaaaattgaacaacggaagctcttgagaaattcaaatggtcataacttttcacacggatgtccgatacaggcgaatcacatatcgagacactcaaaattgaacaacggaagctcttgcgaaattcaaatggtcataacttttaactcagatgtccgattaaggcgcatcacatatagaggcgctcgaaaaggaacaacggaatctctcgagaaattcaaatggtcataacttttcacactgaggtccgattcaggattataatatatcaagacgctcgaaattaaacatcggaagctcttgagaaattcaatt

SEQ ID NO: 251531 - DNA, 443 bp, Glycine max
  unsure (1)..(443): unsure at all n locations
tctatataagctgaaccattntataataaacacaagtgattttattcaaaaattagagnttatctcttttatcttagtgagagtgattctcctaaattcttgagtgattcaagaacaccctggctgtatcaaaggactttcacaacctttgtgtgttgccctcgctggaaagagtgattctttccttcctatcatctccacccttgttctttcaaaccacaattccagaaaatccacctctgcccaaaattatctcgtgaccataactcccattttacacactcaaattaagtgattcttgatcctaaattgaatttcaaaacgagatctttcacctcgttttggaatcacctcatttggagccctgtagcttccgttattgccatttctatatttctgtccagccaccacttaacctacgttntaccatcccattcatccat

SEQ ID NO: 251532 - DNA, 440 bp, Glycine max
  unsure (1)..(440): unsure at all n locations
agctnctttgagaaaacttggttgagaagcttttgcttanctacacacacccctctcataactaagctcacctccttgagaagcttccttaagaagattcctaaagaagctagagcttagctacacatacctctctaatagctaagctcacctccttgagatgagaaactagagcttagctacacaccccctataatagctaagctcacccccatgaaaaaatacatgaaaatacaaaaaaaaaatccctactacaaagactactcaaaatgcctggaaatacaaggctaaaaccctatactactagaatggccaaaatacaaggctcaaacgaaggaaaaatctattctaatatttataaagataagcgggctcatacttagcccatgggctcgaaatctaccctaaggctcatgagaactctaggaccttcccttggg

SEQ ID NO: 251533 - DNA, 458 bp, Glycine max
  unsure (1)..(458): unsure at all n locations
tacggacctatgaaactcagcttcacaacatccaagcaaaacaacattgtgacagcacattctatcacagccaagcanaacagagcanaggcagaaaactctgctcaacacatncaaaccaaatcacagctttttctcacggtaagaccacagtaacaattccttcgatccaattcgttacccgttggatcgactccaaaattttactggaagtctatagtgtataagcctacattttgaccggtgggatctactagcaaacatccagaactcattctgcactagactttccacagccaaccacacacaagcatttttctgcacttgtgcaaaattctgttgcacaatttcacagcaaaaattctgcataagtgcagatttcgaaaatcacccttcctctcatccaatcttgcccaaatcaaatcctacaagtcccaaatcatgtatcagacatgtct

SEQ ID NO: 251534 - DNA, 315 bp, Glycine max
tggcaatggtatgggaaacttaacaattttcttcttcaacaaacgtttgatagataaaaagttggttaaaacacttttcatttaaaaggcctctcataacaatttcacttgtgcaagtttatggggatggaatcattttttgttccctaaaaaatctctttgtgaaaattttgtgcacaagatgtagggagaggttgaaatgtcaatgatgagggaattaaataactttcttaggctctaagtaaagccaaaagatcatggaatatttcttcatcaaacaatatattgcaagaaacttcttaagaaggttgagat

SEQ ID NO: 251535 - DNA, 446 bp, Glycine max
  unsure (1)..(446): unsure at all n locations
ngaaccananactggcgaaagtgtgaccttactctgtgactgaacgactaactgtgaataatgatctttgcataaatctctgaattctagaatgatttgtataattcagaacatgatgaaggccatgaattgtatagacacaagctcttttgaccaaatagcttaccttgaatgatacttgtatcttttgctcccttgtataaaacttattgatttgtcatgaattgaaccataaactntgaatgattatctcttaataccttgtttagattctaggagagcatatggttcaaggcaaatttactctaaatttgggggaggaaagtcaattcgaatgacaagaaaaaggttaagcatcaacacacacaacaaataagttgtatgttaaaaaagaaaaacaaaagaagaataaattgtgttggtacaataagatcaaaagcaacttg

SEQ ID NO: 251536 - DNA, 367 bp, Glycine max
agcttccaggtcttgtcgcagagattctctttggcaatgaagacttcacaaagtcctgtgacctgactcaacaagttgctgatcatgttggaaccaccaaaagtgccactatttccaccacaaaccaaccacaccaagagagacaagccccttctccggtgaccaccgctaagaagccgccaccaccggggaaatctacctgaataatttgttattaccatatatgatcaaattgtgtatgtggattccataaccctttgtgcttttgcttcattttgtgtttctagttacctttaaggatatttttttccttttttctttggttgggctttctttttatttggataataattgcgacataatggga

SEQ ID NO: 251537 - DNA, 448 bp, Glycine max
  unsure (1)..(448): unsure at all n locations
tgcacttgagganggaaggatatttgcagctaatgaacatctttcttaactatttgtccttcagattttactgtttctttttgctaatatgtaaatataaatagtataaggctatggcttatggacatggtcttttttacccctaaggacaaaatcagattttactgtaaaaacaaaagttgaaaggaaagatattgagctggtagacgaggaagaagcacagattggtgctgatcattctagtgcaacctctaataaagctgagatttataacgaggaagcacgaaatgcaacacagaagcataagccaaagagggtggagagtgtcaatgctgatgcagaagcctttggtgatcactggaaaattctgattgctttatgcattctgaagctgaagcactagaacatacgaagaanagagatacaggccatcaaagtgtgtcattgt

SEQ ID NO: 251538 - DNA, 281 bp, Glycine max
aagactggaaagcggtttctaaccactcctccgcggcctccacataaggcataaaggatgggccccttaccaagatgtcttcctcccctgataccatgaccagatgcccttccactaccaatttcaacttttggtggagggttgaaggaacaactcccaccaattggatccaccggcgccctaacaggcagctgtagggggggttaatatccattatttggaaagtaacttgacaggtgtgagggcctatatgtacagggaggtcgatccctcccctaacc

SEQ ID NO: 251539 - DNA, 342 bp, Glycine max
gctatgctcgtgctcgtgcgcttagcgcaattgtgaaccgcttagtgcgcattaatgaatttcggcttagtgcggcttttctcgctcaacggatggactgaagcggcgcgcttagcgggatgacccttcgctcagcgaacatgcataactcatccttcttacagattcttcctcgcgcttagtcgaggattgctgcgctcagtggatggcgtgctaagccaatatattggctgagcgagagagtcagaatcagcacttcgaaacttgcctaattatcctgatattgagagaaaatgattattaaacacacaaaatggaagtactaagttattattacctatc

SEQ ID NO: 251540 - DNA, 367 bp, Glycine max
  unsure (1)..(367): unsure at all n locations
agcttgcncgagagttgctgtgggcctcttatggaaacttgccgatgtggccgcaagttgaccattacctagccacccactcgggattcaacatcacgaccacacgtgtacgctgagtgcttcatcacactctgagctctaaggagttgtcttctaatgcacttgaagggctcctccctgtcggacagtactgcgatcactgcgacaatgtcataatggcctgcaatgtaatctgggatcgtgcccggcttctttccgaacgtatctcataggaagtggtacccggggcaacataccaagaagtgttgcgggaccactcgacccacggcaataatttcccccactttgcccgtcgccggtgaacgaa

SEQ ID NO: 251541 - DNA, 259 bp, Glycine max
cttaaaactcagcttgcgccagaatcgaatgcttgtgagtgagggattttgtttcagtgaatacatactatgcccgcacgttgaaaatggctaacagtgtgaacgcatgtggagaaagcatgcgagagaacattattgctgcaaaaatcttgcagtccatgattacgaaattaaattatgatgtatgcttgattgaagaatccaataatttggacactatgatgatcgatgaactgcaaagtagtcttttagttcatga

SEQ ID NO: 251542 - DNA, 421 bp, Glycine max
agcttgagctatcagaggactggcttatttatttagtgctaattgctctacctacacagtttagtcagtattaagatctcttataactgtaagaaggtgaaatgatctcttaatgagctcatttcatactatgtgcgagattaggaaagggtgaagcatgataggactgaaagggttcatgtcttgagtacctctaaagacaggggcaaacgataatgaaccgtggagcccgtgaatgaagttgttaagggtccaccacacatgaaacaaaactaaggtgacaactgtttcttttgtatgtaagcctatacatataaagaagagatgtaccacttatcatgcttgctgtgcaaagaaggatatgttgcttactatggtctattttgaggtcaatatagcttaagtacctagaaacacttgg

SEQ ID NO: 251543 - DNA, 447 bp, Glycine max
ttgaacgtgtgtaacccaccttcttgcagtagtggattcttattgtgtgtctactatcatagccatcgtttattcgccattgaggtgccactctgagctgccaggttctccacctttgggtgtattctttgaaagatttgcgccccccccttttgcacatgttctgtagttgcatcctatccgaagacattatactgacactgcctaacgaaggccaccactaggtccttccaagaatggactctggaaggttccaagttagtgtaccaggtaacagctacccaataagactctcttggaatgaatgtatcagcaatcacttatcttttgcgcatgcccccatcttctgataatacatctttagatggatcttgtggcaagtacgcccctagtacttgtcaaagtccagcaccttgaactcggaggtgtgatgatatggagtctagg

SEQ ID NO: 251544 - DNA, 383 bp, Glycine max
  unsure (1)..(383): unsure at all n locations
agctngagaatatcatgcgttgtccttctcttcacgncaattctgatctgccaagaagctcgtcctctacctttcaccttctcaagaagtaatcaaagccatgcattttcagggagtgccacaaaattggttaaggagcttttgctaaggaagcaattgcttggtacggaaaattatgagcctaatcgactcagtccaggtggtccagaccctcttcatcactaatgaatgtgcaattaatgcatgaaaacttgagaatcatagattcatgcaacaggaaaaggaaagaatgttattgtcactgcatttaccttcccacgtacgcattccttttagaattaggagtccataaatcattttattgcataaaatgatatatttga

SEQ ID NO: 251545 - DNA, 408 bp, Glycine max
tcctccaaccacgagttggagccatgcgtagtggttgtttattgcaattctccattctcaatcttttttcgaagccccataaattgcgttttcgttcatgcgacctccacccacgagtttggagacatgcgcaatgattgcttagtgcaattctccattctcaatcttttttcggagccccatgaattgcgttttcgttcatgcgtcctccacccacgagtttggagacatgcgtagtgattgcttagtgcaattctccattctcaacccttttttggagccccatgaattgcgttttcgttcatgcgtcctccaaccacgagttggagccatgccgaatggtagcttaatgcaattctccattctcaatcttctttcggagccccatgaattgcgtttttcgtcatg

SEQ ID NO: 251546 - DNA, 246 bp, Glycine max
agcttggttaccttcttgtgcactgctttatgaatcaccggggtgagacttctttgtggctatcttactggataaaccccatcctctaaatttatgcgacgcttacctgtggatgggctaataccaggaatgtccgccaaggtccaccctatagccttcttatgcattttgagaactgataacagcttctaatcatgcttatcaaaaagggaggcttatataattactggaaaacttttgctatca

SEQ ID NO: 251547 - DNA, 448 bp, Glycine max
  unsure (1)..(448): unsure at all n locations
tatgcgcatatatcatcacgaacgctctgttgcccatgtatttctattaaccgaaaactatgcacccatatactatcacagcagctatgatacctagactatatacacgtgcttccaacgagcatatgatacttacatcacacacatctacttggctaacttcacatacatgcatacttcgagcattttgcgtgaccaaaaattgcacatgtgcacatcttggcatttctaatacctatacatacacagcattcatgaggaatcttgactatctacacaataaaangctacatctcatgcgtctattcaagctttcgctacctagagcctcatgccaaatcaagcatatttatctttgntgactagaatcggattccaattatatatatatactctctggaatatgtttcctttcacatatcattgcacatacntatatatatctttt

SEQ ID NO: 251548 - DNA, 332 bp, Glycine max
agcttgtacattcaatatcctggtgagggtgttccatatgttctcaagactggactaatacatttgctgcccaagtttcatggtcttgcaggtgaagatcctcataaacatcttaaggagttccatattgtttgttccaccatgaagccccctgatgtccaagaagatcatatctttctaaaggtttttcctcattctctggagagagtggcaaaagattggctatactaccttgctcccaggtccattttcagctgggatgaccttaagagggtgttcttggagaaattctttcctgcatctatgaccactgccatcagaaaagacatttt

SEQ ID NO: 251549 - DNA, 445 bp, Glycine max
  unsure (1)..(445): unsure at all n locations
tgtagaatggctagacatgatacatatganggcttggtttggttcaaggataaaagggatgccccacattatttccatgacacaaatgcaaaaatgatgatttggaaactttatgcaaaactggtcatgcatgcgcctatgcggacgctcaagtgtcaaatttttatggtcgggtgatgctagggttcaggattcatttcctctattttaaatcaacccaacgtttccaaaatatgttcttttatcaatttgtgcattcatccgagtccattttgggcgtctgggaaaatcttcacagcattcaccctttaggtgtatacacatgttttcaaaaactagctatgatcagcgaatttttcttttaaagaacagttggaaatcatctcttttcanaagcatgtcgatttttaactagacaacttattttctctttttcacctttttt

SEQ ID NO: 251550 - DNA, 350 bp, Glycine max
agcttctgcatgtgtgagagagttctatttatataaaggcccacgttccatagagtttgggagatcttgttgtgtgaaaatctgcagagaccagagccatcctgagagaatgagatgcgtttgtgagtgattgtgaggtcctaaaggcggaggagacatccccgctacttgtatttccgcaatctttcatctttatcttctgtttattggaaaggaagtttccctgttatggaaagctaaatcctctgttggatctttcttgtacgcacttgatgtaaatatctttttatatgtgtaatgatgtttcggtgtgcattgtgctatcacaactgcgttctacgatgctttta

SEQ ID NO: 251551 - DNA, 447 bp, Glycine max
  unsure (1)..(447): unsure at all n locations
tcaatggatcttacatcatgtggtatcagagcttcaattataataaaattaattgaatttctagaaacccaatccaattaaattttagagggggaggtgagcatttggttactacacctcattgccacattatattgtcacacgttgtgcatgtccttcatgctttacatgcctcatcccacctaagcacacttagtggagaatcttggaattgatcttggattagtgggctgaaccataactaaaattcactaatcataattggtgaaattttggctgcaaagtttggctccacaaattcaatttcaaattcaagtgaaatttgaattgaaattcaaatttccctccaattttgtgtgacacttatgctataaatagaggtcatgtgtgtgcattttttcaactttgatcattngaaaattaaactttagatttcacagctctctt

SEQ ID NO: 251552 - DNA, 277 bp, Glycine max
agcttgttgattactgcataatcctggtatttttgacagacgagtctgaatgaaatgtttcaaaatcacaacctgttgagtcttgagactggtatattctagctctgcatagtagacagaaacaaaaagtcactccggttaagaccagaaactgatatctcaatagtcaattgcgtcaaagtataaattatacttatttttccagagaaaaatctttggaccatctgaatccaaatatactaactaataaatggaaccttccatacaactacattat

SEQ ID NO: 251553 - DNA, 391 bp, Glycine max
  unsure (1)..(391): unsure at all n locations
ntggcaagccattcattaattcatataattgatttatctttanaataaaagccatgtatttcacagatctcacttatctagaacaggtacaataatntaataacattcatttcacaatagttatatttcagcaagtgcaaacctgagcaatggcagaaacacagagaattggaaaggctgcaaaagccacaagtgctaaccgccagtgcagcaaagcaccaatgagaagaccaacaataactgcagcactgtcctgtataaatatggaaagcctgttgctaaaagcagctcgcacaaaagtatcatcattggccaatcgcatggacaaattgtcagcactgttttctcatcataaaccatcccacttattgcgtacatggctgcatattat

SEQ ID NO: 251554 - DNA, 427 bp, Glycine max
  unsure (1)..(427): unsure at all n locations
tgaggattngatacagaagcatgtatccactgttacatctactcactcgtctagagatgatatataatgctagctcaatttaccttctattgcttgtcataaaatccttgacagacgtacgcaggaactatgacgatcctttaatgatggtgaggattctatcacggctgcaacgagatatgggctcatcggcaggctctcatttaagacacgtatgctggtatcacttctgaattatcatttttactattgaagtctatgattaagatgaatcttcgattaaaaggtataatatcgtagatactaatagaattagagttagaatgtataggaaatatatgcgtgatatatcngacaacacatgcatgcattataatcatgtgcattattagtataacaatataattgttctatcagaactatcacc

SEQ ID NO: 251555 - DNA, 437 bp, Glycine max
  unsure (1)..(437): unsure at all n locations
gacctatgatactcaacttatgtaatatgcagacatcattattggtaggttcctcccttgcccttatctctataatatgattgctaattatacccttttagccttttttaaaaatacaaaacaaccctatgctggtgttattacttttatttggtgagaaggaggacctacgatccaaacaaactaaccaggaacactattgggcaaagacaagcccattacatcattccttaacaaagttttaaaccctgttttacacctctgtcttttaaaagtgtaaaaacaaggttaaaagggtataattagcaaatttattaagaagagaaggtattggtgtacttagcaataattaggatctatttangaagagccaatctgaataagtaatacgaggggttatgactataagcctgaaattgatgggagaagaatatatc

SEQ ID NO: 251556 - DNA, 424 bp, Glycine max
  unsure (1)..(424): unsure at all n locations
aagtcacctgcggctgcaagcttgaatagaaaagagcaactacatatgatcttgacgagaattcggngtcgcagattccgcattacttcacattctacactaaagctccttgatcccaattcaaggtccaaattaaataatttgactgcaacaaccatcctatttggaagtatacctttgaacacagagccaaaactacccttaccaagcaaattactctcatcaaatccattggttgcccgggaaagttcattgtaggaaaattgtcttgttgctaatacacgtgatgaactgacttcagtaggatcaccaccaccatgctttttttttgactctttttctgaagaacacacattaacaaccacaatggtggacacatacaggcgaatgctttgatgaaaacatatgtgctttgacctttttt

SEQ ID NO: 251557 - DNA, 460 bp, Glycine max
  unsure (1)..(460): unsure at all n locations
gacacataaaactaagcttgttgatttgagcaaacgcgtcgacacctcaatgttcaatgnaaaggcgatctagngtctcggtttaatttgctaagaccatnttgtcttgaatctattgttaggtctggacaactatttctttcatctacttggactttgataaatataaaaaaagtataaattaataatattttaataaatttctgacaagtagacaagttcaatctattttttaaaggacttaacaatatgttgtatcatccaagaaggttttttggtaactatctatcgaacgttcaacacattaaaactaaacagtgtccactctctataacaattaatgttatacattacgttattgtctatataataagtaactcatacatcttctaaaatgataaacactagcaaaatgtttacggtaactataaaagggaagtatacgtgttccatcctatac

SEQ ID NO: 251558 - DNA, 393 bp, Glycine max
agcttctgtaatgctgcattctactaatatatttagttggccactactttgcctgaggatgacaattgctagaccataacaatgttacaggcggtaaaggacaacggtcttttaaataaacatgttgtacatgcagaaacaatattaactcaagtgtacacaagtaattgcataagtttaaaaataacactatctatcttcaatgtacctgaacaaaatgattgtcatagatgtgaccgatacaaattatgcgatgcatataagaatctgttgatgattgacttctaaaaggaaagaacgtcatgctttgttgttgggacaaccataccaagattacattataccttgatgtgatgacactatccatctcgggtatattcatctacttatcca

SEQ ID NO: 251559 - DNA, 439 bp, Glycine max
  unsure (1)..(439): unsure at all n locations
tggagcttcaaagaagatccacccacaatgagtgttgtttttttgtaaaaactcctcanattcattctcctagtttgtaatctatacgtatcccaaattaaccatgtgggttaaatttggttgtgagagaagtgataagaagaacccatggaatgtggatagcttagagagagtctctaagagtgtcaccttaagaagtaaaggacaatacttgtattgtctttcctaaggccaattgtagtgttatggttgagatggatttcttctcaagagtgaagaaagttttaaggagagggacatctattgagagggaaagggttcctaccaagaatcgtggtggttctatggtgagatgtcttcccttccaggaattgaattactntgtgggttaagcccacttgagaaggtaaataatacttggttagctctgtcatgactt

SEQ ID NO: 251560 - DNA, 427 bp, Glycine max
agcttagcccagataggctgggcttatttcgcgactttcaacaaaaaaattgactaagttacctgtgcttagcgattcagccttgcttatccactggtatctcaacaagaggatgagtgttcatcctcacaagatgaactcgcttatcgcagtaggtgcagtttgcttggaaacacacatattcaacgaagattgatgaacttgcttatctcaacatgctcgcttagcgagtgcatcacatttttcagaaaagacatagaaaatgcagtttgttctcttccatttttgagcctctaaaaggcatattaaacatacaaacccagccaaactatctacatagcacaatcattcaccaaaacctaattcttaactaatctaatatcatttaaaccctaacaattaagagctacatttatgagtttgtacc

SEQ ID NO: 251561 - DNA, 451 bp, Glycine max
ctgctactacaatctccccctttctgatgatgacatattctgaaatcaagagaatatatgcaatatttgatctatcgctcactcatctctttctccccctttctttttgaatttatgcttaatttaaaagatagtaaataatattatgtcttaatttctaaaatacccattttctctccccttttggtaacatcaaaaagccaaagtgagtgaaaatgaaataaaataacaaacatatatcagatgctaacagacatagcaacaagacaaaaaaaaaacacaatgaacacaatgaacgtatatcagatgctaacagacaaaaaaaaaaaacataatgaacacctcattatctaagtcactagcatctaaaagaccaagttctcttctaatggcagagaatgtttcctttgggaaaggttcggtgaagatgtcagcaagttgattcttagta

SEQ ID NO: 251562 - DNA, 407 bp, Glycine max
  unsure (1)..(407): unsure at all n locations
agctntanaatttgaattagaacgttcaatattctgctggaatcgattaccatatatgtgtaatcgattacacagtgcaaattttgaattcaaattttaacagctgttgtaaatcatttttggccattggtaattgattaccagagagtaaatctcttggaaaacactttttaacttaaattacttggccaaaccttttgctaaatcaattaggaattcccttcctaaaatactagtgatcatcttgatgttgtggcgtgtattgttgaatctttgtcttgaatttaaacttgaaaagcccatttgcatcatttacatcaaatcatcatgatcatcatcaaaacaccaaaggcatttgcttctacaatctccccctttttgatgatgacaatataagtcctgaaatc

SEQ ID NO: 251563 - DNA, 438 bp, Glycine max
  unsure (1)..(438): unsure at all n locations
ngtcataataagctataagctctcgtgtaatctgctgtcttatacacatgtgtaaactgttaagcttctcacacaaagaatctgattttccaccatattctctattgatatctaatgtcaacaagagatatggccaatattgtccttataaggcatagacaatttgtaccttacaagtcggttttgtaaggttacgttagatcctaaacttaatttctaaggtggtatcaaagtctattttagatttgttatctgttattggatcacctatttttgtttacgctatagatgtctattcgtaatttcctaaacatgagggagtgttgttattgggcaacaatcccacatcaactaaagatatggataatatagtccttatatgtttgggaggtcctcactttataagccaattttatggngtttaattangtcctaagt

SEQ ID NO: 251564 - DNA, 408 bp, Glycine max
agcttatcaacactgttatatataacatttactggatttggtttatgttgatgaaggtatatggtagcatatacttcagatcatctttcttcaagtgagtttgaaccccaaccgtaggaaaggcagtaaggcacatgttgtgagtctagaccactcacaagtattttagtcatgtgatgagcaatttatgtagtaacataataacatgcgagtcttcaactaataagttttcaagctatgattatgaatttgctctcttcctttttgtttaatgctttctaattgtggtaagtgtgtcataaagtgttttgttataggaaagttaaaacaagttaattgttgacaaaaaatatttttttaggcacaattaattacttatacaactaataagtcaataaattggtgagt

SEQ ID NO: 251565 - DNA, 446 bp, Glycine max
  unsure (1)..(446): unsure at all n locations
ncttacagtaggttcacaccattgagtgatgtcttgatttcgggccggttgactatcttggatgcgaatctatgatgatctacacatcatacaataattatgataatgcatttgcttacgacagattgctgatgccaagaatataatctgatttgatatgaattacaccgaccagctccaattacattatgctagattaatatgctatatcattctgctggcttattagcacaactcattgcacgtacaaagcacataaaataacgtttggaataaacaattaaatatacctatgcgtgtgatgatgtgaagaactctctatataagcaccacgtcccattgtcattatcatgaagcaatacactcgctcgaagcttgtaaagctctcttctattaggctctcgcagccaaccaaagcttcaatagtgacccatcatggcacaact

SEQ ID NO: 251566 - DNA, 330 bp, Glycine max
  unsure (1)..(330): unsure at all n locations
agctttgatcaactgttgagccatatttttatcctgagaattcaactccattactcctctataggtggntggagctctatcatgttgagctctaaagtcactggatgccatattttcaatcatctcttacaaagtcttggtcttgattcttcctccactaattgcaacatcaagcatcacctttgtttgttctttcacacccccaaagaagatatataatgggtcaacctcatcaatactgtgattgggctaattcatcaagagagaagcttgtacctctctcaagcctcacataatggttcatcattcatctggaaaaaactcaatata

SEQ ID NO: 251567 - DNA, 449 bp, Glycine max
  unsure (1)..(449): unsure at all n locations
tcacgtgacactatgaaactcagcttacaatattgtaatattgtactagcaacaggctttatttagtagagcacagcacagatcccccctttgaaagaaaccatgaaagatgcaatgcagcccatactaatctcactcaagtaaataaataaataaaatagtgaaactgataaatgattatacgatttctattgatctttacctacagtaaaataagtaaagcattgacaacaaagagaggcattaggaaatagattgagatcacaaatgcaagattactatgcacgaattatagaaccactactagaaattgattgcagagagagaatgaaaagtaaaaagaataataattttttttacagaagctgaaacgtacttgtgggtgttggtgcttctgctgnggtagcttcttctgttgcttcggcttaaccatatccttgtcctaaatc

SEQ ID NO: 251568 - DNA, 302 bp, Glycine max
agctttaagatgagaagaatggctattatatttgtaagtcaagggattacttggcctgaaatggatatctactcaagttgaacggtaccctgaacatagtcaaggttccagcattggatgactaacttctaagtaaaccttacaacttgaattttgaagcgtctttaattgtcaatagaatgggaatgatgaaatttggttacatttcctatggggtgacatactttttaagatgagatgagaaatttctaaatttctgttacacgaatatggaacctaatccgaagtgctgagatgtgcac

SEQ ID NO: 251569 - DNA, 459 bp, Glycine max
  unsure (1)..(459): unsure at all n locations
ctatcacggacctatgatactcagcttagatgaatcctatgaaaaggaggggcacttgttattattgaggttcatactaatgagaacctgataccgaagaaggaagaagaagaagaagaagaagaagaagaagaagaaaagatgaagaagaagaagaagaagacgaagagatagtgacatctcctaaggtaagtataccttttcctcaggcgggtaaaaatgaccagtgggatgtgcaatttagaaaattacttaaagttatgaaaaaagtgcacgccaacctccctttcgctgaggctatttcatagatgccatcttatgccaagcatttgaaagtggttttatcaaacaaaggaaaattggaaaattctggcactgtgggtcttaataaggagtggtctgcaatggtccttacgaaattctcccanatatgaaagaccccgatatatctactattcc

SEQ ID NO: 251570 - DNA, 420 bp, Glycine max
  unsure (1)..(420): unsure at all n locations
taatgggccaangannctgaattgatggcgggttgtattctttttaagaggatcaggagttatagcagtactcctcgacgttgacaatgcaatgtccttgaatgataaaatgcaatcctattgctttcaacggtttggtacatccgtgcctacccaagttggcacgattgttacacaacaaacctcctatttggcaccacaataaccttattctatgtttgtatataaatatagattaaagacagtgtattcaattatacaaagaaacgggagagaatgagacataaggttgacagtgtgttgaacaaaagacaaaaaacgttataaatctatttcttcttactaataaaaaataataattgatatttgtccataacaaaataagagaaaaaaatgtttaatgttatttgaggtggagac

SEQ ID NO: 251571 - DNA, 381 bp, Glycine max
agcttcaagaagaagatagcctttttttatttcttatgtccagaagggaattctattaatagacctccaatctttaatggagagggctaccactactggaaaacccgaatgcaaatttttatcgaggcaatagatctaaatatctgggaaaccattgaaatatggccttatatactcaccacagtagaaaaagctttaatagatggtacttcatcaagtgaaagcataaccatagaaaaacctatagatagatggtctgtagaggatacaacacgagtacattacaacctaaaaaccaaaaacataataacatctgccctacgaatggaataatatttctacagattcaaattgcaagagcgcttaagaaatgtgggacac

SEQ ID NO: 251572 - DNA, 443 bp, Glycine max
tctccatgcctctcggaaccacagagaatagcggtagttctgtctgcttaaaacaaaacaagttatatcacagattatttcaatacctattcctttatcaaacattttagtaaacaccataacataatgaaagactagttggaagacataaagacaccgtatcaccaattcaaatgccagctagagaaccaaaaaataaaaaataaaaaaccactatgaatttactcttggaactgaaaaccacactgaaactgttccgcgaaaccctctggttcacaatcccattgacactattgttgctttgcatggtgccccgaatctgcaaaaaaatggtgccgtatccaccaggcccaaaaggcctacgtacccctaataggcaacatgaacatcatggagcaactcacacatagaggcttagcaaacttagcgaagcaatacgacag

SEQ ID NO: 251573 - DNA, 218 bp, Glycine max
  unsure (1)..(218): unsure at all n locations
gatcttaagcacctgagctgcactgtaaaattggaaagttcttattttcattntaataaatcttactaaacttaactgagttttgtgccaacaactataagaaggaatgcaacttaaaaaagaaaaatgcagttcaatcattctttatccttgtgtttctttccgtccctcctaaaaacaccatatcacaaatgatgcaatcttaccccacaagggca

SEQ ID NO: 251574 - DNA, 443 bp, Glycine max
  unsure (1)..(443): unsure at all n locations
nntaggaaatgggagaattggactagactgtggcttttaaaaacaacacttattgtaggtgaaatgcatggaccaatggaattgcaaggcctaatccttatctttttaatctaagcactttgaatgaccattaatatgactaattggcagcttggacaacccttgatgtgcttcccatgagcttagtcatgccttatatgacttctttcacttttccaaaactagctataaaaggataaagtagagttttgtcaaaaatagtaaaaattgcctttgctaaaactagtaactttcatcctaatcttctattagtgtgctaacctnccttggcatatgtgtacttagagtgaaccttgcacagagacaattacactacactcaatgataaatgcaatttttgacagatagaaatctagctagacatatatatttctctgtcagct

SEQ ID NO: 251575 - DNA, 336 bp, Glycine max
gctcaacttttaaaaataacctttataaatttttatagtgaagttgctctaaaaatttaatatggtactcaataaaaaaaacccttagtatctcttcctaatatatacatatataaatttagtaggttcaataaattggcactcaaaaaaaccacccatgtatgtaaaaaataatgtaatgtaagtcacttactgccctgtataaaggccacaacatcttttattgtccgtacatataacaaatataaccctcaggccttacacaagatcttatacataccacttgtgatcacactacccattctatgttgaaaatctggtatcttaatatctgtg

SEQ ID NO: 251576 - DNA, 412 bp, Glycine max
catattgtccttatctgttttattattattttgagcaattattgttatacaacgaatttttaaaatcatcatataaaaagagaagagagatgtctaaaatttaataagtggtgtaacgaagcaaaaaaatgttaagagaaggtgctataaaaaatattcacaatataactaattgtgtaagaatcacgcacattttagggattgactttcggtaactatgatggataaaatgacgtatgcgaaatgattatatatacacatggacagtatatggtattcacacttatgcacttgtctcttctcactgctaatgaagagtaaaagcatagatacaagttagaaagccaagctggcacaaataattgtgtatacttcttaatttttgccacagttaatctattagaagtttctg

SEQ ID NO: 251577 - DNA, 300 bp, Glycine max
  unsure (1)..(300): unsure at all n locations
ccacccaatttttcctcttctgcacgtacgcncctgtaccatcttccacaatgcattcatacttcccaactcaatattgaactaaaaacaatgaaggcatctgcaccatccatttacaacatacctacaccaatattatcgcatgttgcccctgtagtgaccaacccaacccacttactcttgattcctacatgcacctctgtttaactctgtcggtgactattacaatgatcataccattagttcctataaggatcaaaccactcccttatcccaccactacccattcaacttctctta

SEQ ID NO: 251578 - DNA, 359 bp, Glycine max
  unsure (1)..(359): unsure at all n locations
agctgcagctttcaatccgacatggaagacttgcaactgccttcttatgcagnacctatacaacacggatatggctcctgatcggaaccaacttcatagcatgaccaagcgggaacatgagtccattaaagaatatgctctaaggtggagagacctancagcccaagtcgtcccgcctatgactgaaagggaaatgatcacgactatggttgatacattcgccacattctactacggagaagctgatangatatatgccaccttactttgcagaccttgtctccgtcggacatagactcaagctcggactgaggataggcaattctgaatataccttcaacgctagccccaacaacaat

SEQ ID NO: 251579 - DNA, 223 bp, Glycine max
  unsure (1)..(223): unsure at all n locations
gcttcacattcaacttcgagcgtntcgttatataacatgactctattanacatccgagtaacaagtattgttgttcgaattcgctcatagcttctacattcaatttcgagcgtctgcttatattacgggactcaatctgacatccgagtataaagtgtttgccggtcgaatttgctcacagcttcaacattcaaattcgagcgtctcgttatattataggact

SEQ ID NO: 251580 - DNA, 348 bp, Glycine max
gtaatatatcgagacgctcaaaattgaatgttgaagctctgaaccaattccaacgacaataactttttactcggatgattgattgagtccccgattatatcgagaccctcgaaattgaatgctgaagctcttgaccaattcaaacgacaataactttttactcggatggcctattcaatgacgtattatattgtgacgtttgaaattgaatgttgagcctctgagcaatacaaacgacaataactttgatgcaatcctccctatgaagggaccaatcactataaccatgagcaagaggctccaagaagatggtgctagagctgctgaagatgccctacgattctcatg

SEQ ID NO: 251581 - DNA, 329 bp, Glycine max
  unsure (1)..(329): unsure at all n locations
ccctttttttatcttctctagataagaacaatacctcttcaccatcaaagctgatagtgtcattatgntaaagatcttcatcctctaagcatgcatccaatgctggttcagctttactggtggacgcatcaaccatcatacatatgttggcttcttcctcgctgtccgtgtcaaacgatgaatcatccaagtcctcccaagtggttatgaggcttttctttttggacttgaagaatatcttcttcttatcctttgacttttcaaggtcaggacattctaacttgaaatgtcttgtcatcttgcactcataacaaatgactcgacttttc

SEQ ID NO: 251582 - DNA, 181 bp, Glycine max
tcaatggactcttattcatcaaagatacaacaagagctacacatgctcctatttatagacgtggtagcttccttgagaagctctctgtagaaaacttccttgagaagcttctttgagaaaactctcttgagaagttagagcttatctacacacaccctctcataactaagctcacctcctt

SEQ ID NO: 251583 - DNA, 288 bp, Glycine max
  unsure (1)..(288): unsure at all n locations
tacccaaacccaatcacctgggtcaagcacgactttctttctgcttttgttggcttgccttgcataactcgcaattttcttttctaattgaaccttcacttgctcatgcaacttcttcacatactcagctntagcctgtgcatccttatgcttaaacatagcaatgttaggcataggcaacaaatcaagaggagtccaaggattatnatcatacactatctcanatggtgaaacaatagttgtgctatggacagcccgattatatgcaaactcaacatgaggcaaaca

SEQ ID NO: 251584 - DNA, 467 bp, Glycine max
tcgccggatgatgctgatcaaacatttcccaattgtgattatcatattgttattcacggattgaaaagaataaacaatggtcggggtcagtcgctgtatggtcccgactgatatccttcatccgacattgcacaatttcttttacaaacgctggccgataatgtttttttacagtaggggaagttttttgtaatggggttgcctaaaaaatttacaatgtatgtcggctaggtttttccctgcgagctcaacccaagttgtgtttcggccgacattggcgtgttctcatttagtcggccaagaaaatgatagcccaccccggcacataataaacatcattcacgaaaattgatcgaaaaaaatgatagctgacgtcggcgtcgagagatgaccgatctatgtctaaaaaggaagcatcaccggatgacgccgatcgaacatgtcgtaatcgacatcattcaaatctc

SEQ ID NO: 251585 - DNA, 194 bp, Glycine max
agatgtcacacaataatctaacagcgctgctctcaatgataagcatttgcgtcaagaataattcaagattgctcaacaaacacagccttgttcaagattcactaaagaccaagccttgctctaaacaatgtgctttaagacatgctagctttggaatctattaccaggaacgtttccattaccaaaaacacggt

SEQ ID NO: 251586 - DNA, 398 bp, Glycine max
taatgagtttatgagcaactcaagattcataagatgtgacatggaccattgctgctatgttaaaaaatatactaatagttatgttatccttggtgtgtatgttgatgacatgttgattgcaggatctagtatggcagaaattaacaggttgaagcagcagttggcagaatactttgaaatgaaggatcttggtccagctaaacaaatccttggtatgagaattcttagaaacagatcagaaggaattgtgaagctgtctcaggagaaatatatacacaagttgcttgacagggtttaccttggagattctaagaccatgaatacccctttgcgatctcatttgaagttttcacagaagcaatctttgcagacagatgaagaataatgttacatgtcat

SEQ ID NO: 251587 - DNA, 454 bp, Glycine max
tcaagaatcaagattcaagaatcatcttgtttctagaatcatgattcaagaataatcaagatcaagattcaagattcaagaatcaacagaagactctatcaatataagtactaaaaaagtttttcacaacattgagtagcacaagaatttttcaaaaaatcttttacaaaagagttttactctctggtaatcgattaccagaaggtagtaatcgattaccagtagccaacattgtttttcaaaatgatttacaaagatgtaatcgattaccataatcatgtaattgattaccaatgttgtaaaacattagatttcaaatttcaagagtcataactagtgataaaatattttcaaatgatgttaaacttgtgtaatcgattacacaatacttgtaattgattactagtgtttctaaacgtttggattttcaaatataaacatgaagagtcacatc

SEQ ID NO: 251588 - DNA, 426 bp, Glycine max
  unsure (1)..(426): unsure at all n locations
actctatctataattatacttacttaaataaataagataaactacattttcttttatgtttcacaagccaagactaaaaggcttaaatatctgtcggttggctcatatacacgcctaataacaagtatcaactatgctacttatgtaagagtatcatttcatagcgattgactcgttttgtcactttctctttatttctgtatttacagttgcgttgggcataatgatgaataattgtacagaacaatttataatcacttgaaacatttacagctgtgcatacacaattaaactctcaattctctctgatcaaatttatcctcttatcaatctgaagcatatctttccncttattttatattctcacgaagagtgtacatacttcttattgaccacacggcacttaagattataagaacaaagctc

SEQ ID NO: 251589 - DNA, 199 bp, Glycine max
ctacatccgaattctgattatcagtcacatgtattagcttactcaaccgattctcttgtgtataactaactagtcaactggaatttaagcagctgaatccaagtgagtgaacatctcactttccattaaggtggcaggataccggctcaagttgacatactcacttatagagcatatattctcataggatcagaatcat

SEQ ID NO: 251590 - DNA, 443 bp, Glycine max
cgaggtacttacccgttgaagatcgaagaacgttgtgtatcattgatgaacgtcgaagaacggtcgaaaccttcgcgaaattccttacggaaaagtttcggaagcgcctcggcttggattttcttcacggaaacaatttttccaagcaaattcgaaagagagagaagtgcctaaggggctgaaccctttttcacttcacttctcccactatttatagaaaattgtgggagaagcttgccacccagctcgcccaggcgtggttggaatcttctggagggcccaagtgggcctggttgctatttgcacccccatctttactaaatacacccacactgcctgtttttggtgattcttttttcgtaaagctacggaaacttacgaatttgtaacgatacttgttttctttccgtaatggtacggaaccttgcggattacataatcat

SEQ ID NO: 251591 - DNA, 327 bp, Glycine max
taaataccttatactttcctacctctaaacagaagtttttatttttcccctttctaaaaaagatgccacccagcctaggtgggggctatcaaggtctaaccactggataggccattagtatggcccaacaaacttatcatataacttatgaactaatctactaacctctttatataatctacttactaatttttttataaaaattttaaagatttggctattactattccatacagtgacaatcatccttcatgattatgccaggtgctttgactcacattcataaaagcttcctatttcttaccaacactatctaaattaaactgt

SEQ ID NO: 251592 - DNA, 137 bp, Glycine max
actatatctactcagattgacaaactctacattccatttcacatacactgatgctacttgatagagcagatgatcgagacaactaggatattattttaataccttacggaccttgaaatactgcagacaactgaaga

SEQ ID NO: 251593 - DNA, 180 bp, Glycine max
  unsure (1)..(180): unsure at all n locations
ctgcaacttgtccacgttcctcaatagttttcttctggatctcatcctatctccattagaaaagaggatgaactcagcacaatgaagacatgggaagccacatctcacttaacatctaaatcaattgggactggcctatccttacttgaagattnatatatttgcttggaagatcttctt

SEQ ID NO: 251594 - DNA, 231 bp, Glycine max
acataatgtcatctcatcacgcttaagtctcattcaaacattgaaatacacctttgaacattgtgctaagcataatccaggcaaggaaagcacaaaaaattgcaatgatatcataactttcaaaatacataaagatagtgaaagaaagtccagtcataatcaagaactataaggggttaaaacaccatgaacctctgtctcaagatgaaatcttaatactaaacagggtat

SEQ ID NO: 251595 - DNA, 260 bp, Glycine max
ttttaagagtattccttctaatctcttgaaagactcctattcaaatgaatacagctgtagacactgcctctcctcacaagtacttgggcagactcttgcctttcaacatgctccttaccatattcattatggttctatattttctctctgcagctccattatgttgaggtgtgtagggaggagacacttcatgaattatgccttcctgatcacaaaattctcgaaatttgcaaaacatattcacaccaacatctgttctc

SEQ ID NO: 251596 - DNA, 385 bp, Glycine max
aacaaagtagtgtacaagtacttggtgctattgttttccgtgctcctcaacatttgtctcggtgtctacctaatattgttcccaaattggctgaggtataacatgaagcaaacattatttttcacttctaaattccttttaagctatagattgcattaccttaacccatctcagtatttgaaggttgtgactgatacacatcctaaagtccagtcatctgggcaaatggcccttcaacacgttaatcttgacttacgaactattctatacatttgattcctgcttgcttctgtgattaatgttcttaaatttcatgtattttacaggtagggaatgtgatagagtccagaaatatctggtcttgtccctactctacttaagtaaa

SEQ ID NO: 251597 - DNA, 329 bp, Glycine max
  unsure (1)..(329): unsure at all n locations
atattttgtatatattatatttatctctttgattcaatgggtacgcacaccgacggtggatttatttaatcaagttaccgatatacaatcacacgttggtggaatttattnatttttaagtaacgagaatgactangtaaatgctttgcccgtcacagggataaaagttatgactgaaataaaatccgaacacatgggcccccggtactaatgatcaaagctgtcaggactaccgtgaatcaaacataaacaatggacgtaaaacgtgaccttcaatctccgaacttcgaacttgagcctcgttaattttcgacatttcaccatcgaaa

SEQ ID NO: 251598 - DNA, 408 bp, Glycine max
  unsure (1)..(408): unsure at all n locations
acggaccattcaatccctggaggacctttngaggtcatgtgtcttatagcaaaaggggagagctttctttcattgatagagttcacttacaacaacagttttcactctaccattggcatggctccctatgaagctttgtatggtataacgtgtatgacacctctatgttggctaaagccctgagaagacctcaccttaagacttgaagtggtacaacaaaccaccgagaaggtcaagttgatccaagataggatgacgactgctcacagtttgtagacaagttatcacgataagatgaggatagacttggaattcgaggttggtgatcatgtattcttgagagtcactctgtggactgctgttggtcgagcattgattcccaaaactaacactcgcctatcggccttt

SEQ ID NO: 251599 - DNA, 299 bp, Glycine max
ccacatccacgaatcgcgcatttacccaccatacagtatttgccacctacaactgagctgacgtactaccacgtagcccatatactcgtttctctcaacaccgggtgcgcatcaatcgctgccaagatccacaacatccttgatatgctggattcaatcgacacatactatcacagtcaataaaacagggcatatgcagataactctgtccagaacaccaaccaaaatcacaacttgtctcacttaaagactccagtaacatttgctttgttccaattcaggtaaccgttggatcgact

SEQ ID NO: 251600 - DNA, 329 bp, Glycine max
actagaggtcatcgcttgtatcttagtgagagcgactctcctaaatgcttgagcgattcaagaacaccttggctgtttcaaaggactttcacaacctttgtgtgccgtcctcactggaaagagtgattctttccttcctttcatcatcacccttgctctttcaaaccacatttccagaagatccacctctgcccacaattatctcgtggccataactcccattttacgctcgtcaaattaagcgattcttgagcctaaattgaatatcaaaacgagacctttcacctctctgtggaatcacctcattcggagccctgtatcttcgatta

SEQ ID NO: 251601 - DNA, 314 bp, Glycine max
gccattaacctagggcattgatacaaacttaatgcctgcatgttctgaaattgttgctaccaatagcaccctctcagccaacatggatcctccatttgagctcccaaattgctgatgcctatgttgacatttgtgcaccttattacatcttgaactaatgcccttttagttgattaacccaaaacatatttttggtcaatcatctttacatggattgtgccattatttatactcactcatcacccttaaattgaaatatagtggagacattaattactcatatgggccatgatacaactcacaaccttggactt

SEQ ID NO: 251602 - DNA, 460 bp, Glycine max
tgcaactgcattcggaatgaaagaggagatgatgtttgtgttctctgtcatgagaattcagacaaacatgcatagagtaagtagcaatgagcttacaaagtataaaattcatttataatatgagcaattcaaagacgatgccaacgaaaatcgtcatgatctgcttatgagcaaaggcaagttttataaaactgcctttgtaacatgcacatcgaatgcggttttataataaccatcgttaacatgtcaaaaagttcatgtaaatttcaaaaatgacaccacatgatttactatattggtttttcaataaccgacgtagatttaatgatgttaattctttattttgagctgtgcttgttccttaatattaaattgaaagccaactggatgtgctctaaaaatatatgacactactagaaatgtaattaacatcgcaagttaaattgattttataaacata

SEQ ID NO: 251603 - DNA, 335 bp, Glycine max
attccgccactatatacttatgcaagcctacatgttggagcaataacaattgaaccctatatggtttatgtccctaatgagagatggttgcctgtatcactctcggacaatgatctcaaatattgtgatcattgacatattgagtgacttacggctaattacccagcctaccactagatataagaaatctgtctagactactatatgttgggcctggatgatataatatgatatatctgggcggtcctaaaatatccatcatagtattgtacgataaaaagatgtaactgtgcgatggactattggatcatatgaagggaactaggacatactta

SEQ ID NO: 251604 - DNA, 353 bp, Glycine max
  unsure (1)..(353): unsure at all n locations
tataacaatcattacaaacaagggccaaacagcacttctcatggcaccagtgtcaacatgcactttataaaataatcatattggggtcgtgctattttatgacacatacgtatttgcacacatataaattgtgtgtgaagcattntacgacacctatccatgtacatattntttgacaaaccttttcatgctacnatctatatatatacacattttttttggaaagcttctttttgtacctactcacaaatacacatatttngataaacactnttacgctacccatccaacactttgtaaggcacttcatgctatatatattcatattatgcagggcattttcatgccatata

SEQ ID NO: 251605 - DNA, 444 bp, Glycine max
  unsure (1)..(444): unsure at all n locations
cccatcacatgtggtactttgttggcggcgggcgatggtgcacaacaagttttccacatccacaatgcgcgcataaacccaccatcccctgttgcccgcctccaactgagctcacgtactcccacgtagcccatatcctcgtttctctcaacaccgggtccccatcaatcctctcaagcttccacaacatccaagcaaaacaacattcaaacagcacaagctatcacagccaagcaaaaacagagcaaaggcagaaaactctgctcaaacaccaaccaaaatcacagctgttctcacttaaagaccacagtaacaattccttcgatccaattcgttaaccggtggatcgactccaaatatntaactggaagtctatagtgcataagcctacattgtgaccgttggatctactagcaaacatccagaactcattctgtactactc

SEQ ID NO: 251606 - DNA, 371 bp, Glycine max
ttgggggagatgctaaagttaagtgggaattacagccttctatcaataatgcagggggattattgtgtatctggagtgatgtatctttcaaagtggaaaaggtgacgggcaatggttttatatatttggaaggtacttgggctggtgatggtggaaaagtgactataattaatatttactcaccttgtgacatagcttccaaaagaattctacgggatgaaatcaaacaacttatagctgccaacaatgggggcctatgttgtattttaggagacttcaattgcattagaaggcaatctgaaagagtatgagtatgtcaaaggattcggaatggcggcaacatgaacgaattcaatgactggatcgctgac

SEQ ID NO: 251607 - DNA, 386 bp, Glycine max
  unsure (1)..(386): unsure at all n locations
ttactccaacctagctcccacatcccacacctcagatctaaatatggatagagctagggtggtctatggcttggtgactaagatggatatgaacatcggagcccttatctcaggtcagatttcttttatcgctcagagtaactccactaggctcagatntccagccttgatcactgccttatngcagagtagaggagttacctctgacagtctgacctatgagaacctgagcccgaccattaacttggcctacattaagaaaaactgttggaatgtggatgatctaacacgtaacttcagaggggtgaggaaggcaggggaagaccagctgatgttcttctttactactctaccagtcttccactttgtactctacccactcctca

SEQ ID NO: 251608 - DNA, 412 bp, Glycine max
tgaccttaaaactcagctggcttggttatacatgttgatacacgattgggactgttgatttgattgacaagatggagacgggaagtgtgattttcaaatctgcacttatgcagaatttgttgtcaaaatacgtgcagcaggattttatcttggtgcagaaaatgcatgtgtgtggttggtgtggaaaagtacacagaatgagttctggagttgctatagatccagacggcaaatgaggcttatgcactatgacttccataaatttggagtcgatccaacggtaacgaatgatcgaagaatgtactgggctttaaggaaaagctggatttggtgatggtgacacattcttgcttgcttgttgttgaatatacaggctgttaagttttgcagaactgaattcgaactgtctata

SEQ ID NO: 251609 - DNA, 252 bp, Glycine max
tcacttcccctctagctggagcataaatatcgtaactccaagcttggaacataatacactgaatccttagcccctctaaaggtgtagtcgaaatatctgctggctgatcacatgagttattgaacctcaaagacaattgtctgtacacagttatttctcccgaatgaagcgaccatcatgctattagtgcttactcctctcatggaagacggtgtctgacgcaatgtgaaagcaacctgattatcacaatta

SEQ ID NO: 251610 - DNA, 190 bp, Glycine max
ttccgctccggagtacgacagtcaccgctttaagagcgctgtacaccaacagcgcttcgaagccatcaagggatgtgtcgttctccgggagcgacgcgtccagctcatggacgacgagtatactgattttcaagaggaaatagggcgccggcagtgggcaccactgtgtactcctatgaccaagtttgat

SEQ ID NO: 251611 - DNA, 256 bp, Glycine max
  unsure (1)..(256): unsure at all n locations
taataagtctagaacctaaatgtaacctttctgtaggtaaggctgcttacaattaccctcccctaacccactatgtcacccattntatggggaagtcaggctcaccattctaatgtaggacatgtacaagatgactgatactaacgactatatagacttctaatgaangccaccagtatgattgaccaaacctttttgttgatgctgttgatcttacagttgaccaacctcttggcaacagatatttgactgacaa

SEQ ID NO: 251612 - DNA, 345 bp, Glycine max
aacgtgcttatcgtgacatggtccgcttattgtgttcatctggaaatccaaaattttaacagttgcgatgaacaggctaagcgcacaggcacgcttagcgcgttcatcacgatttctataaagaaccacaggggtcttcaccccttttcagccacattgcccctaatgggcttctaagttaccaaaaatcctacattgactaaccctaacactaataaccttaacctaacatcaaccaactaagaaaacaagaagtcatctatcctaaggtttgaagaataagaaacaaagatagaaatatgctaacttacttggattgtttttgagatgaagcaatgaacatgc

SEQ ID NO: 251613 - DNA, 260 bp, Glycine max
  unsure (1)..(260): unsure at all n locations
taacctgtcaatacttataattggagtgagaccactctcttcttctaatacatncgtaaattgccctcgataatgaatagagcggattcaatagcatctggcactgtaagaattcctattgagttagctttccttggaaagaggatattttattcatttaatgcatgtatggttaacaaatgaaattgttatatccgttattaacactcttaattcgatgatgaaaaactttatcattgattataaccgaagttgaattg

SEQ ID NO: 251614 - DNA, 358 bp, Glycine max
actaagcttgcatatttcttgcttgaactcctcaactagccttgcatcatcttcagtaactaaaagatcatcaacatagagagaaattatgaaaaagttatttcccttatttttcacataaagagtggactcagataaactttttgcaaagcctaagctcaataggtgatcatttatcttgctatagcagacccttggcgcttgtgttaggccatataggacctttttgagaagataaactttatcttcaccttgcttcacaaatccttctagttgctctacatatatttcttcttgtagttctccgtttaaaaaaaaattgatttgacatctagttggaattgtaacatcccatttt

SEQ ID NO: 251615 - DNA, 182 bp, Glycine max
ttcttcctctttggcaacatcaaaaaaccatagaactctgtaatcaacacaggtataacaattgagtagcaagatataagcctcagagtatcaaatacaataagccaaactcacaaacaagaaataatccaaccagatatgaaataacataatatgtctaccaccaccaaacatccaagact

SEQ ID NO: 251616 - DNA, 328 bp, Glycine max
tcccactgttcaagataaagagagtaccttttaatcacaatcttatcccaaaatgataaggaccaacttatgagcatgggccttgaagcaaagcatggatttggtggaccaatcacaagaacacgtgctaatcaaatggtgaatgaagtccaatctgatatgaaaaacgtgaaacccaaacccatattggtcaactacttgaggaatataaaaaagagctaacctgaatataagatccatgaataaatctgatttgcatttgagtccatatttctgtatgatattttctatcaaataatgggtgaagtttatctctttattttattat

SEQ ID NO: 251617 - DNA, 359 bp, Glycine max
ggccatctaccctctcccatggccatcactccctcaacgccaaaattgactctatccatgtaaccctgtcctctcatatcgagtctcttttcgatcgtcttgcggcaatcactgtccctgtatcttagacacttacccctaccaaccctgctcctccaccattctcacgccaccaccacttgaagctagatgtggcacggttcgacagccatgatcccattggttggatacttaaaatatcccagttctctgattaccaagggatcccatagaacgagcgccttaccattgcatccttctatatggatggtccgaccctctcatggtacacgtggatgcaccgcaatgattactttcct

SEQ ID NO: 251618 - DNA, 302 bp, Glycine max
  unsure (1)..(302): unsure at all n locations
tgatcctctntgctgttatcgattaacatggatcgttcacaagcatataatcaacatgtaactntacaatnggcgagaactacgtaggtctgatttcctcaccacaattgaggaatacgtaggagcaagggaaacaccattgtcgaccacaaaatgataataaatacaaacaagacatacnaacatcaaaaagggagaataatacacattgaagtcatatttgcacacttgattaaaggtgtcgtccctcgtgatggacgcgtggtgtgtaataccttcccatgcgtaaatcaactcccaac

SEQ ID NO: 251619 - DNA, 349 bp, Glycine max
  unsure (1)..(349): unsure at all n locations
tgaatcccataatatatcaagaatctcgtgatatataatggaagcgctgaccaaattcatacgattataatttcgtactcagatgtccgattgagtctcgtaatatatcgagacactcgaaattaataacaaatgctctgagcaaattcaaacgacaataaaaatgtactcggatgccgattgagtcctgtaatatatctagacgcttgaaattgaaaactgaagctctgagcaatttcaaacgacaataaacttttactcagatgtccgattgantccttgtatatatcaagacgctcgtgattgataatagatgatctgaaaaattcaaacgacaataactgtttac

SEQ ID NO: 251620 - DNA, 360 bp, Glycine max
cagtccctcattctttgttacattgattcaaatagccaagcaaaggtgttgcttgactttgtgaaaacatcttctgatggcattaactcatattggagcttctacggtcatgcttcttgatgttgttaggaatccctcagaggaaaggcaagctatttgtcgagcatatagacttggacaaaagaagtgtgtgatcacatatcatcttcttgcacagggcacccccgaatgcacaaagtattgtaaacaatcaaaatagaaccggttatctgaactcgttctctcaaatagaaatgctgaaagtgatacgctcaagagtacagagtaatgtttgaggaaaagtatctgatctcatggttc

SEQ ID NO: 251621 - DNA, 376 bp, Glycine max
  unsure (1)..(376): unsure at all n locations
taccttggttgtgatgaagacgtctaacacaaaaaggttctgatgaagaggtgatatatatctgaatgaaacaatgtcattttaccctgataacaaattccaaagcctgcctttccgagtttattaaaagcagagaagttacttgttgcaacttgtattgtgtccaagttgaattgcaatgattcaaccgttttaatttcatcattgtcttcatcttctttgtcaaatatgattcagagaacaatatatattagaattactgcagtcaaaatggaataacatcangagattaatttggaaacaaaacaaatgaccgacattgattcttttccaagnatgacgagtgcttgaaatatcatgattatatacactacta

SEQ ID NO: 251622 - DNA, 446 bp, Glycine max
  unsure (1)..(446): unsure at all n locations
ctaactgctgcagaaaataaaanatcatgcatgaaataatcttattatcatgttatcgagagtttactcttaaagaagcacaatatgagtataatagattatccacactataaatcccccatacaaactgaaattcaaatgcaactttgcaaaggcattacctgacagagctcaaaataattaaaataccataatccaaacattgacctaaaatgtccatacaaagtttgcgtgcatgcatgttgcttggaatcagtttagactgtccggtagatatttccttacaaaaacaagttacgatttttatactactagtttcgttggttttggtagacgtaaagaagctaaattttttggcaataagccatctatgctacacttangggtatacagtcagaacgtaattctcgtatctataaggagaattctatgaatgaagcaaatct

SEQ ID NO: 251623 - DNA, 303 bp, Glycine max
gctgcgcttctggaattaactacagatttcttctccaaaacttaatgggaatttctttgaactttttcaagtagcgaaaatgactatgaaatctgaatgtttatggtgtagcttaaaaataggataataagtctgatagttttaaaactcagcacatgtacctttccattgataatctaaagtgttgctcactagtggtgttgattctagacaggctctattcagtcctaaccgttctgctgaattttttctactctcataactaattaagtagtttgcttctgaaaagcctgctactctttt

SEQ ID NO: 251624 - DNA, 489 bp, Glycine max
  unsure (1)..(489): unsure at all n locations
cctttcggaccttaaatctcagctttagcttgaagtccattgaaatgttcccgaccaatgcctttagtttatttaaaaaatgtgtttggatgtaacacctataaaagaacattgtcgaaaaanaaatttatgatgagaagaagttcgtattgaagttgggattagaggctaagaggattgattgttgtgtggatggttgcatgttgtaatgatggagcgctaactaaatgcaagtttcgtaacaagcccaagtatcgtgcgaagactattggaacaatcattaaaaaaccagttccagtaaaggcaatgttctattttcttgtaataccaaggttgcagaatatatttgcattgatgcatattgcaagccaaaagacatgacactatgagaatagaagatattcagccatgttacgttatccctcttttggtgaagcctataaacactttgatcanngtacatgcagattttctattgatctgtggaat

SEQ ID NO: 251625 - DNA, 133 bp, Glycine max
tgtgagtttgaagaggatcccgatggggtcctcgtaaggtgaaggtgagaatcgtgcctcgagtgcttctaaaaaaccagcccaagtggtcagctagtggtttcgggtcatccactaaaaccacgctaacgct

SEQ ID NO: 251626 - DNA, 407 bp, Glycine max
  unsure (1)..(407): unsure at all n locations
cctacagtaaacgtgaatacagcctctgttataggctcangcccgcataaagacaagtttcacagttatcttaaggtggtatcgcgagacaagattcctattgtgcactctagctggaatgatgtacccgaaatgctaaggaacatgatatgggatgacatattggtaagtcccttctgtaggtcacttaatttctgttacaaacattgatatctaagtaaacatgacgccaatacaaatgctttgtaagctaaatttgacatccccgaggctgatagtgcataacataggtcatgtctacggtggctacacgatggatgcaatttaagtcatcgctgacaataaaatatgtgtatggtaataatgaagaacaaccaaaagatgatcctttatttaaatacggtatt

SEQ ID NO: 251627 - DNA, 376 bp, Glycine max
  unsure (1)..(376): unsure at all n locations
ctccgactggtcctttcttctttcgcaactgattcactattgctccccattagcttcgcaaatttgttcggcctactcttcttgcagccctcttggctcttgtcaagagctttgcggaattgattctcttccgtaaccgcacactcttccaacgtggtagcggcaacttgacttctcttgcaagtttgctttctacttctttgaagctgacttttngctcttcgggcttaaactctttgtgacacttactggcagcaattaacctgattaacttaccttctgaccacagatcctacatccttacttgacttttacggtcccccatgattttgtactgatttggccaatctacagaagactctttcgcgctctatgg

SEQ ID NO: 251628 - DNA, 426 bp, Glycine max
  unsure (1)..(426): unsure at all n locations
tgttgaaattgccatgtttggatgagttaaacattctctttctgttntagggtttntgtgatgatgtttgtgatgtttatatgctgaaattgctgatggaaatctgttagagacgaatggtagaactaacctagggttagaaagtgagaatgtgatgttatgagtggaaaaagagtgagactttgagagttggaaggctaagtctgaattctgtggtaaatggaagttaaagtgagttaatactagctcgaaatgtcatttacgacttgggagaaagcttggactgtgctatatagaagaacaaatgatcaaaatgaacaaagagctatttctatggcaaaattgggtgttgaggagtcaaattttgattcggtggaattctatgtgtaaattcagtttgagcaagtttagattgatgttatggac

SEQ ID NO: 251629 - DNA, 172 bp, Glycine max
  unsure (1)..(172): unsure at all n locations
gcacaatgtaattccgatctaagatatgaacttgtctccatacaatccaaatcccctaaagctaggttgataactcctaacatgcatctaagcanagaattgaaatatgatcacattactaagaattgatnagaaaatagagaattacatacttgaattctactctcactta

SEQ ID NO: 251630 - DNA, 355 bp, Glycine max
ttgattgtgaaggaatgcattgaccgcataccgatgagagtgtgatccttaatatttgagagaaatgactatcatttagtactgattgttgcatgaatctctgaagtatggattgaatgcatgaaattgaggatgatgaaggccatgttagattgtgatagccacttagccaaaacgctgaccacgtgctttaatgatttatcctttgcacccagtttgagctgaatgaattattgattgattgaaccttgagcctatatagtgttatctcctgctaccttgacttacgttgtatgagagcatcatccatacgaagtattgttcaagcatacttgcccaaatttggggagaatta

SEQ ID NO: 251631 - DNA, 62 bp, Glycine max
  unsure (1)..(62): unsure at all n locations
gatatgatataantnnnttagggttgttgtcctttccgtccaacacgcgctcactgctttat

SEQ ID NO: 251632 - DNA, 313 bp, Glycine max
  unsure (1)..(313): unsure at all n locations
aatatgtccatctatggtttgaaacaagcctcccgacttctgtctatataaattcatgaagacatttcttcatttatcttcgaagagaacgccatgtatcactgtatataccanaatgtcagtgggagtaaaattcgattccttgtattatacacagatgatattctgcttgcgactaatgataaaggtatgctatatgaagagaaacaatttctctcaaagaacttcgatatgaatgatctgggagatgcatcttatgtcatacgcataaagatccatatagtaagatctcgatgcattttacgcttgtctc

SEQ ID NO: 251633 - DNA, 426 bp, Glycine max
  unsure (1)..(426): unsure at all n locations
tctcccaaatacactacagccccgcatccattgaatgtctcaacttttttactgtatcccacacaattcttttattgtgtatgtcacatggagaataaatattaacaagggtgaccagttgtgcttcttggacccatctcccaaccagtaaaataaagtcattaccagtgatttccctctgcagtntatatgatntatcactccacacacatattatgcctcctgctgtattgatagctggcaacaatttccaacttacctctgcatgtccccataaagcctgacacatagacttgtctgccatttctttctttgctctcgaagacaatcatatccacacacctctgttaatcaatccttaattgctcccatttcacccctcattgcccaacataatgagatatttattgatctgtgtataacctc

SEQ ID NO: 251634 - DNA, 400 bp, Glycine max
  unsure (1)..(400): unsure at all n locations
tgagcttcacgatatcattgaacctccaacttgtggatggtataaagananagaaaatcacaattaaacagaagattaccatcaattccaaaacctattttacaacctcatccttatcatttgtacagctgtaaagcccagtgttttttttctctattttgtttctattcataattggattctgttactaggatctagaatttgccgaggtgtatcttttctgttatttccttttaacttttctttcataagttgtatatatataaattccccattccttattcattagtggaaacgggaaatcattttcatccttttgtctctcggcatttccttccttgccttgtgtntccttttattctcctcccagagaatgtgagatacccgaaattccatgtga

SEQ ID NO: 251635 - DNA, 405 bp, Glycine max
  unsure (1)..(405): unsure at all n locations
ntaacctcatcgtctctcacagtacttagatgtgggagctcatccagtccttgtgttcggactctcagccacttatgatagccaccgatgatcccattactgcttcccctaagctctctgtcctttcttcacgccgcatcccatgccttgcgaactccttggagtaccctcgcgttgtggtcactgaaacctcgtgcgatgaaaggcgtgatgctttcgtctgatggcactcctctcatgggtcatccttcgcatgaagatagaatcctgattcttccttccttctagcgagggaaccatttaacagacgcccctccatgctatccaagagttggtgcacaacaaacaattcttgcgccgctcttttcacatccccggtcgaacgtgtcatacatggccaaaatg

SEQ ID NO: 251636 - DNA, 309 bp, Glycine max
atctatatatctgacatataaatctacaagcatggcttacactgcagttgccatgcctacctctccatcagctacctcggcaactgtagacattgcaaaagagcataacggtcttcgccgctcgcaatccagcatagaactacacacacgtgccgttatgcggaggtcttattctgacaaccacctatgttgctccatcaatcgcgtacaagccacatcagtgccaccataacttatgagcaatcaaccaatggtgatttcaccatttcaattttcaggctccattcttgcaaattcactgcgctcctt

SEQ ID NO: 251637 - DNA, 454 bp, Glycine max
  unsure (1)..(454): unsure at all n locations
ctgcagcttacaattaaactccttgcatgttntaaagtgtatttttatggcacgcgtttcagctgatttaccattaaaaatattgggtgtaatgcttttgttcatgaacataagcagatcagaaaactcgacccacgtgctataaagtgttttcattggttactctccaacccanaaacgatataaatgttgttatccaaaatcacaaaatatttttgtaagtatggatgttactttctttgagaaccaaccttttaatgacattcatcttcaggaggaagatcanaggaagaatataatgtcctttatttacgagattctgaaacttgcattgttgcaccgaaacaaaaaagccaagaatcattatgtgaacccactctcataatgagtgaggtccttgtgaatccaaggtacatattcaaagcanaataataacanacaatctttggatact

SEQ ID NO: 251638 - DNA, 433 bp, Glycine max
cgcctcatagatgtccaggaatgacatggcggccgattgttctatttccgccccggagtacgacagtcaccgctttatgagcgttgtacaccagcagcgcttcgaagccatcaagggatggtcgtttctccgggagcgacgcgtccagctcatggacgacgagtatactgatttccaggaggaaatagggcgccggcggtgggcaccactggttactcccatggccaagtttgatccagaaatagtccttgatgtttatgccaatgcttggccaacaaaggagggcgtgcgtgacatgagatcctgcgttaggggtcagtggatcccgttcgatgccgacgctatcagccagctcctgggatatccgatggtattggaagacggccaggaatgcgagtatggccagaggatgaaccggtctgatgggttcgat

SEQ ID NO: 251639 - DNA, 292 bp, Glycine max
  unsure (1)..(292): unsure at all n locations
catgcaagcttgggtacctganaaaatgctaggaccgtacgattatctaactctcatagtttgttctaataattccttgtctcatcatatcggctacatttgaggtagtattttnttaactacacccgttgattggtttgagaaatggcaacccaatgaacaataatttggcttcctcagttgatattcgcgagggaagagttcttccaaatttgtaacgagacactgtatcgcagaaatttactgagccaaatatagggagaatttttatttcttgtccttgattatattc

SEQ ID NO: 251640 - DNA, 191 bp, Glycine max
tgaaaaggcaaatcgtccacgtgatacaacgttgcttcccagaagtacttcaacttcacattctacatcctgatcgccggctcaacttctcctccgacttcgcctcgtcgtgagagacctcgcggtgggcgtacactgcgtctgcaccgacggtcttggggagctccaccatcaccgtctcgggcttcccg

SEQ ID NO: 251641 - DNA, 114 bp, Glycine max
aaacaaaaactctgtgaaagtattgaacgcggtccgagactaaaagggtagtattcaacccctccaaatcgcgctcggtgctttatttttggaatgcaggcttaataaaaaaat

SEQ ID NO: 251642 - DNA, 324 bp, Glycine max
  unsure (1)..(324): unsure at all n locations
aaagaacgagacacccatgagagcgcaagcccangttcttgtcactacaacactatgcaatgggggagcgaacggcgccacaacacacaagaagggggaccgaattaaagatgcccaaaccccgacaaaagaaaaatgacgcgtccaaggcaggcactaaagcgtgaaaagaacgaagagcagaagagaaacctgaacagaaaggaaaagcggaaacgaaacgcacaacgaaaaggaaaagaccagggaagaaggaaacaaacacacaagaagttgtatactgggtcggcaacaacccgtgcctacatccaagccccaagcgac

SEQ ID NO: 251643 - DNA, 375 bp, Glycine max
  unsure (1)..(375): unsure at all n locations
ccgcaacaggtacaatcccaggtggaggaagaatcatcccacccttagatggtcgaatccttcacaacaacagcaataacaacaacagccttattttcagaatgctactggcccaagcagaccatacgttccttcaccaatccagcaacaacaacaacagcaacaaccctataaacaggtaacagttgaggctccnccgcaacctctccttgaagaactngtgatgcanatgaatatgcataacatgcagtttaacaagagacaagagcctncattcatagcttatctaatcagatgggacaattggctacacagttaaatcaacaacagtcctagaattctaacagattacctttctcatctgtctagaatccc

SEQ ID NO: 251644 - DNA, 370 bp, Glycine max
gcacaaatcacatatcaaccctccatcccctattgcccaccttcatctgatctcacgcactcccacgtcaccattatcctcgtttctctcaacacacgggtccccatcaatcctaccaagcctgcacgacatccaagtgattcagcattcaatcagacgtactcacacagccacgataacagggcaaaggcagaaaactatgaccgaaacacaaaccgatatgacagcgtttttcacattcaaataccccaatacattctcttcgtccagctcgtaaccgttgaccgactcaacaatgacctgacgtctctatacataagtaacattgtgccgttggatctgctacaaatgtcagcaccatatgactacc

SEQ ID NO: 251645 - DNA, 167 bp, Glycine max
  unsure (1)..(167): unsure at all n locations
agacacaactcacagttcaacttctctcccttnttcttccttcaatatcgcgctcccccctctctttctctcccactttcttttcctgcattaaagcatcctctccaagcttcttatccaaggctcatcttgggggtgaagctccttcttccatggcttattcctta

SEQ ID NO: 251646 - DNA, 429 bp, Glycine max
  unsure (1)..(429): unsure at all n locations
tctctcaaagagtcgctttttcatggaggattatctcgttctagagtctcatcaattcgaggtgtccttggttttatggagactcatttctatttaactatcttggagtgccaatctttcctggaaaatcgagcaaaatatatctccaaagtgtgtttggatgagaaaatgttaaattctgagaaatgttaaattctaagaatttcaaatacttcaattgaaattcttttattcttaaaattgtgtttggataaaaaaaaataaaaattgtgagggtgaaagaaaatgaatgcaaagggaagagaagatatgattggtgtgttctaaagagaagatatcgcacggcatggagagtacacantactggacacganacatcaccacctacccgccacacattagtcatgaccaagcatggctaacccttga

SEQ ID NO: 251647 - DNA, 206 bp, Glycine max
  unsure (1)..(206): unsure at all n locations
gacgcagctgcaccttttttacgacatactagctaaaacattttgttttttttcctatgttaaattnnggncaagtgagggcaatgttcaaatgacaagaggagaggagtgcgcgttatagctaacatttctcatgtacagaaataacacagacaatttgaaatggatatatatgagacacatgcggtacatgtttataagttgaa

SEQ ID NO: 251648 - DNA, 377 bp, Glycine max
  unsure (1)..(377): unsure at all n locations
atatcacaagaactgttttaatgtttccttatctaaagctcacccatgcacattgtatcacatcatgaatctcatcgcacttaatacttattagcttgcattaaatcctatctgcagctggcaacattttcactgtgaacaaatactgggattataactctctagctttgctgtgatattttctttgggattccataacataaaccacttatattttcactcatgtgttatctaggcatagaataactgatgctaaccctcattttttcgacccatcatatgtgtgataccgattacctctacctccattatgtgaaacaaataccttataaaagtgttcctacacaaactataatgcntgccaacaaattgccttc

SEQ ID NO: 251649 - DNA, 338 bp, Glycine max
  unsure (1)..(338): unsure at all n locations
actaactatgttgaattctttaggtcctgaatgtacaaccttcanaatgttgctcgttcccctctttctcttctgtctaaaagaaaatcaaatgctgtgaaaacatggatgaagtcctaatataatcaatatcatagaatacatgggtgaaatcacaattaataagcacaacttcctatctttcataggccctgtttgaatgagccttgctccttatatggtggggggtgtttataatgaatacttttgcctcaaaaaaactatactaatctctttataaacaatttgttgtatagataaaaaatggtgtcactggtcactctctctctttctctcgc

SEQ ID NO: 251650 - DNA, 291 bp, Glycine max
tttgttcttcttaaacctccattaattttttttctttaccttctcttccattgatgtttcttcatttttctccatgtatctcctcacatgtcttgttctatatgttgttaacatgattctttagagtttccaccgactatactcgctatagaaagtagatttgattgtctatggatcaaatttcttgttcttgttcttgaaccatgaattatgttgagtttaggctcctttgaagcttgtcttgctattttttgtggcttgaaccctaaccattaaattcttacaaaaata

SEQ ID NO: 251651 - DNA, 284 bp, Glycine max
  unsure (1)..(284): unsure at all n locations
gcttacttggtgttgaccctcttccacatttcctttttccaaaattgaattactctttttatgcggaagcggtttaccggatagtgcctcggatcgccaagtaaataattaaaacggaatgatccgagtgtcaaacacagggaacttattcctttggcaaagctttggtcaacaatcatgcattttgttgacagaaaataataattgtgaatggaagtanaagtatgatatatcctaattgaaaagcagtaaacgtgagcaaataagtgtgaaaacagtgatct

SEQ ID NO: 251652 - DNA, 399 bp, Glycine max
ctcttttgtgcaactatctcatcctctttttcaggtgtagaatgaagcttgacaggttcacgtgcaggtgctgctactgtgggaggcatttcaatttggttgccatacctcaaggtgatggcactcatatttttcggattctgcacagtttgtgaaggtaatttgtcagaattttggaactgagtttggttcaactgagtagccatctgccccatttgattttttagactctgaatgtaggctcttatctcttgctgaaattgcatattctagatggtcatttgcctcactaactcttctaaggaaggttgaggaggagcctcagctgcttgttgtcatttgtgtgactgttgttattgctattgctgtattggagggggaacatatggcttgcatgga

SEQ ID NO: 251653 - DNA, 375 bp, Glycine max
  unsure (1)..(375): unsure at all n locations
aaaactcagctntntatggtgctccctctatctctaacaatcttcatgttattcacttggtacctcatcccaacaaccaacatgatagagaaagattcccatgttagatcaattccatggaaaccttcatccgtacatttcagacattgtagatgtaagatcagatggtcattgtgggtatcgggcagttgcagctttacttggcatgggtgaagattcttggcctataatccataacgattttcatatagagttgtgacaatggcgtgatgagcacgccaatatctctagatgatatgattgcttgatcagacaagcaatccttattcgtgatcatgttccactgtcacctcccaaatctggtcctccctccct

SEQ ID NO: 251654 - DNA, 293 bp, Glycine max
  unsure (1)..(293): unsure at all n locations
aagataagcattctgaatcatattggctcaatcatcaaacagagtgcaagaggactctttntagtattattaagtatcatcccctattgtgtcatttctttgaaagactcgcatacaacaggggtggtgatgaaagaaatgttacaggttagtgcattttcctcatctctgtacaagttntcctctctgccattntactaatcattaattgatgtagtagtacctagaatgaatnntgtgctctaggttaattgttaagagaagaaatttttatatctaactaatntatatat

SEQ ID NO: 251655 - DNA, 459 bp, Glycine max
tatgctgcatatatttacaatagacctcctcaacctcatcttctaaatcaaccacagcaaaacaattatgacctctccagcaacagatacaaccctggatggaggaatcaccctaacctcagatggtccagccctcagcaacaacaacagcagcctgctccttccttccaaaatgctgctggcccaagcagaccatacattcctccaccaatccaacaacaacaacaaccccagaaacagccaacagttgaggcccctccacaaccttccctcgaagaacttgtgaggcaaatgactatgcagaacatgcagtttcagcaagagaccatagcctccattcagagcttaaccaatcagatgggacaattggctacccaattgaatcaacaacagtcccagaattctgacaagatgccttctcaagctgccaaaatcccaaaaatgtcagtgccatttcat

SEQ ID NO: 251656 - DNA, 191 bp, Glycine max
  unsure (1)..(191): unsure at all n locations
gtatattgngtattgctcatattaacatggatcatctaaataggttaatttcacaagatctagttattggattgcctagattaaatctaanaatattgtttccaccactaaaccattgcaattattacacatggatttgtttggaccatctatggtcatgagctctggtggaagtactatgcattaataat

SEQ ID NO: 251657 - DNA, 384 bp, Glycine max
taaaggagtctgagttgcgggctaccaatgatatggatgccaacaaagagcttgaggaggagcttctcatttacaagaaggaggttgtggagtagcagtataaagagtttcaaaaggccttcaagtatgtcggtttcttcgccaaggacactgactaggatctctttgattctttaaaggatgtgaaagatggtgtcttgcttgatgaggaaaaaattcctccaaaggaggaagctgttgatgaggagcagggcgctacaaagcaaggtgatgatgcctctgtttaagtttcctttgtctttatctgttttcttcattttttgaactctagccgtataggccttgtaactatgacaattatttttatctgtcttcaatacatat

SEQ ID NO: 251658 - DNA, 219 bp, Glycine max
actgccgcaattgaaagaaacaccttagttattaataagtcctcataagagaaaattttaattgcacacaaccagatctgtgactgtgatggggcctataacaaaaagagttcaactgtcatactaactggggatatcatcacttaactctctcagtgccgttcatatttaaaacgcaatttagcagaacttttcccaagtaaatttaacaattggaaa

SEQ ID NO: 251659 - DNA, 456 bp, Glycine max
tggtcttgtgttctataatctgcatatattgctgttgttctatatggcacaaagcgcatgagtggtagttgttaatcacactggctaacatccatacttttgtcaaggctcatttggagcttgctatcgtgccagtcccagatggtggaagcaaaactgcattgtaaaaaatcatggtcaatcgtttcaatagaaccaacgcaaaggtcacacttagaggctgtgaaacaaccctatgagcttaaaatgtcattaatggagatctttctaagcgaacagtgttaaagaactagcgattttgtcgaatggatgtagtttcttcatatcaacttatcaactttggagttggagaccataagatagagtgtgattacttcagatctagagggaaacataataatctgcataccttgtgtatgtataaaatatatataccaagtcatgatacataatgta

SEQ ID NO: 251660 - DNA, 181 bp, Glycine max
acgacgatctactataaacaaagccaaattctttttctgtatttgaccataacacaataagccactgcttcgtgcaccactcatgtggcacaacacacacaatgattatgatgatggatggctcagattctcacaaaggtaaaatcatcactttcaaactgagactctcaaactatcatga

SEQ ID NO: 251661 - DNA, 322 bp, Glycine max
cgcatgaattaatagcaacaaattcgtctaatgttctatttttcctctcaactaactccatttgttgaggggttctaggtatataaaaattatgttctatcccatcttcatcacaaaataattcatagtctttattctcaaattcccctccatgattatttctaatggatgcaatattgaaggtttttctcattttgaatgattttggcaagtttcttataagcatgaaatgcatctctcttgtgagcaagaaataaagtccatgtaaatctagaataatcatctactatgacacgagcataataatttcaccaaagctcat

SEQ ID NO: 251662 - DNA, 318 bp, Glycine max
gagatgatatcaccgcttttgaaggctgtacaccacagcgcttctaggccatcaagggatggtcgtttctccgggagcgacgcgttcagctcatggacgacgagtatactgatttccaggaggaaataaggcgccggcggtgggcatcactggtttcttccatggccaagtttgatccacaaatagtccttgagttttatgccaatgcttggccaacagaggagggcgtgcgtgacatgagatcctgagtaaggtgtcagtggatcccgtttgatgccgacgctatcgtgcaactactatgatatccgtcggtgttgg

SEQ ID NO: 251663 - DNA, 317 bp, Glycine max
  unsure (1)..(317): unsure at all n locations
tgtctatanatggatcctatcagtctagtacagggtctgcttatataagaatttggggatttgtaatgttgttgtgacnaaagtttgggacttatctttatgggtctaagtggctaatcaatttcagcttacaagggtgcttttcaagttgtcccatatttatagggaggctaatacatgtgttgaattccctgcgaattatgatcaacactctctctgtgagttcaattcctgcgaattatgtgtgatacctcatagtcattcattataataaatgttaacggaaaaggcatgcatatttgacatgaattatttga

SEQ ID NO: 251664 - DNA, 333 bp, Glycine max
cggagtatgacagtcaccgctttatgagcgctgtgcaccatcagcgcttcgaggccatcaagggatggtcgtttctccgggagcggcacgtccaactaatgacgttaaagaagcgctactaggaggcatcctagtaccttttgaatctatgcttggtatttgatcactttctatagtaggacgcacctgagtgctcatgatcctggagatttaaataaaacaagcgcaagctaggaaggtagtcatacctcacaaaatatatatatggtatgttaggtagcgaaaatacgctacatatgcatgtatgctaacaagataatacttgacaaatat

SEQ ID NO: 251665 - DNA, 457 bp, Glycine max
  unsure (1)..(457): unsure at all n locations
atggacttaccttgaattaattcctttgatttcttctttgagcctatgttccccttttctttgttttgaagctcattacaagccttaagggaaaaaccatgatctcaccttaaccttaaggaattttggagctttggaattgttttgggaataagtgtggggggttttgttggataacatatttcgttggctatgcttcatgatgtattttgggccatacttgatgtacattgtatactggttaaatgttggacatgctgaatgatatgctatttctcaaatgctatagttaaaaaaaacaaaaaagaatttagttgaatcaattcgaataaaagataaagaaaagcaataaagttgagtgaataagatcttaaatggaaaaagaatgatgagactcttggctctactctctgcattaanatttatctgtaggtgtcgtatttttcttaaatgcact

SEQ ID NO: 251666 - DNA, 210 bp, Glycine max
  unsure (1)..(210): unsure at all n locations
gcagcttctgagagttaacttaacatgtagctactccgcattgatcttttcttctctcttttattnccgggggcaggtatggtcaagcacttatagtganatgggcatatgccaataacagtatggaggacacgtctggttaattttaagcagtccatttattgttggtctcaattattctgcttctttggggcatatcttttctctttt

SEQ ID NO: 251667 - DNA, 246 bp, Glycine max
  unsure (1)..(246): unsure at all n locations
caaaacgcggtttcagaccattacatgtttaaaaaatggttgtagcaaatatctttttcaaaagcttgattcgatctatagcataatattatatattatattctggagaattgaatagactatatgtgcttcaaggaaggtacttgctaatgggacggagacttaaccaagcaagtgcatgttgttgtcanaaatcttcactttttctatacccgtctcaattaaatataatttacattatacata

SEQ ID NO: 251668 - DNA, 387 bp, Glycine max
gtaacttcataccagctgaactatgaaacgaacacatacgttcttactgttcagccaaaaagctttaggctgatcgggtatctgccctagagaccagcaatggtgggctggccccaataacctgtggcgtgcaatcgcagcggaacacaccaattttggcaacccactcgtcgtcattggtctatggaacaccactaaacactgaggggggcggaatggaacagggctctgcacaacttgccatgatcacgatacaattaatacagacttaccatggacttccgcatgcttatgcgggccgaattgcctcgcgtcatggccagcactagtcggcgtgcgacataagactacatgagtcgtctgatagactggggactaaaggtcatt

SEQ ID NO: 251669 - DNA, 59 bp, Glycine max
  unsure (1)..(59): unsure at all n locations
gaggaacaananaaaaaagagttgtgtctgaaccgaacgaaacaaagagaaaaaaaaga

SEQ ID NO: 251670 - DNA, 134 bp, Glycine max
  unsure (1)..(134): unsure at all n locations
ctaaacatggatgctagcctaccgttgagctctagacttctcgaatgttggtgaagctacgcatctccagtatggcagtgcatttgtcaaggttgactctaatntcctagtgtgtgatcatgaagttgaggaac

SEQ ID NO: 251671 - DNA, 438 bp, Glycine max
  unsure (1)..(438): unsure at all n locations
gacttgagtcatcaagagatataaatatgtgaccatggcatgaanttgaaatgatcatagaaaatttatgaatctatctttcaatcttctctcaacatcattcaatatctttcaactctttctacaaaattgtctgattcatttctcttcatctttctaaaagtttttgttcaaacactttcttttccaagaaaagttctttggtcaaaaacttgtgctattcatatttttcattctcttcttccttttccaaaagaacgaaggactaaccgcctgaattctttggtgtctctcttcttccttacaaaagattcataggactaaccgcctgagaattcttttggttcttccctttcccttaagcaaaagaattcataggactaacacgctgaaatatcttttgtttcactctacatagatcaaaggaataaccgcctg

SEQ ID NO: 251672 - DNA, 292 bp, Glycine max
atattctcaactgatatgagatgtgaagggaaacctcgttttttgtgacccagatggacctgatatattccggggtaaaaaactgggactagggggggctatgccaaacaacttgacaatccgcccacccgggctattcgtaatggacctgtgatgtacttacagcgactcctgcgcacaattaagaaacagaccaatctggaggtgggtgctgcaatggatttgtgaatggatgggctcggatcatcaagttaattagcggagctaagcctgatcattcaggtgtatatac

SEQ ID NO: 251673 - DNA, 256 bp, Glycine max
  unsure (1)..(256): unsure at all n locations
cactgaagcatgcagcttatcttcatccaagattttgtgttttgaagatttattgatttggatgaagatgatgatcttatcctctttgtaaaaaggctcaaccaagtcccgagaatcagaggaaatcataggagaccaaattctaaacctaaaagaaggatagaagagttaccctctacttcataatgctatgaatgcaatcaacctgcacattngagggttgattgtctgatcttcaagaaaagaatggacaaat

SEQ ID NO: 251674 - DNA, 418 bp, Glycine max
  unsure (1)..(418): unsure at all n locations
actaagctgtnngcctgatcttcttatcaatgatatccttttcttcttgaagttcaatggcagtgtaatggagaaggaagaaagatgattggagacactacttcaaggagaagatgagtcaatcgctcaccaccatatgaagtcatgcttgaaggacgagaaaatgatgggagggagaagcagcatgaaatcttgtacctcanataatgtctgaaattcgaattataattctcaaatgataaaagttcaaaaaaatgcacacacatgacctctatgtatagcctaagtgtcacacanaattggagtgaaatttgaatntttattcaaaacttacttgaatttgaaattgaatgtgtcgagccaaaatttcacaaattatgattagtcgaatttagctatggttcagcccactaattca

SEQ ID NO: 251675 - DNA, 234 bp, Glycine max
  unsure (1)..(234): unsure at all n locations
gagcattgggttcccgtgtcctctagcatgaagatcttcataatcatccacctattcatctgctcccccgaacancaaggtcaagatcatcatatgatccaaacacaaacaacaaactgagagtgagttatcacattcctaactactagagagaaacaagacaacatatagtagccaaatacaagttacttagcatatctcacatatttcatcactgtggccattaaaattcaa

SEQ ID NO: 251676 - DNA, 473 bp, Glycine max
tcagaccaaagcaactcataatctaggtatctaaaacccttcaatttagttgattgtcaaggtttgagaagtgaaaatgagaatggggtaaactcggagcaaactctcatctcaaacaagtctatatcatcaatctaaactcgctccaactggttttacaacgaaaaccctaccgaatcaaaatttgactcctcaatacccaattttaccctagaaatggctcttgttttcactttggtcactcatattcctcattttcacagtctaagctttctcataagtcctaaatgacatttcaaactaggattaacttcctttaacctccaaataccactaaatccatatttggtcttccaactctcaaagcctcactctttgtccactcataacaccacattctcactttctaaccctatgttaactctacccttcatctctagcagttttccatatgcaatttcagcacataaaca

SEQ ID NO: 251677 - DNA, 134 bp, Glycine max
gtatgtcactcgctgtgggtggcatacaccggagtcatgatgacatactcctgcaaaaatgtcactcgtcgtgggtggcatgcattggagacttaatagagtgctcgtatgcatatgtccggggtggcatgtac

SEQ ID NO: 251678 - DNA, 469 bp, Glycine max
tttgtcactccacccatatctacccttaacattaaccatacttacttggcttcacttcttttatattgcgtcctgtcagactagcacgaaggatgaagactaaggaaatgataaagggtcctatgagactaagaaaggaagaaggacttcaaatagcagtgcgagaaggagaacaaactacagaaacacgaaaaaattagaagaaacctaaactttcatgaccgacagttgagaactacgagagtcacattgaggttgcaacgtgccacgactgatggcgacaatgacgttgcagcaccattagaggttccaatatcgccgatgaatgagttaaagtgccgcgagaggttgcaaatcatagtgccaaagcattcgagtgagagtgatcagaatgagagtgaaagtgatgagaatgagaggtttcaaagttagtgaacttcaagggtttctgcgccaaacaatgattaaa

SEQ ID NO: 251679 - DNA, 199 bp, Glycine max
  unsure (1)..(199): unsure at all n locations
tagctgataaggtncaaaacatgtggaaatagtaacgattatattccaaatggaccaaggaaactatcattgcttacagttaaacaatagaagaagctagaaccaaagagcagatgcatgaactataaaaatgactttccgaactcaagcattctatataaaagaagaagttcttgcaagcaacatgcaatgtgtaagt

SEQ ID NO: 251680 - DNA, 53 bp, Glycine max
aaaagattaaaaaaaaaaaagggaatgtctctgcaaccaaaaaacacggggca

SEQ ID NO: 251681 - DNA, 317 bp, Glycine max
gtgtgaaagggactttatttgctgggagaatcaatctatttgaaaggtgtgaattgatgcctgctgccaacttaccatttagaatctatgttaactctgggtgcagctatgccatttcacaacaaaaatctacatattgtattataacaaattactatttgcaataaaatgttgagctcgtaagagcttacattgaagttaatgacgtttcatactaagaattttatttagatgagtggggggtaaagaacacacttgaaaaatgttagcatggaatgttcacatttaaactgttgcttggtctggtgagaagaaat

SEQ ID NO: 251682 - DNA, 429 bp, Glycine max
actaagcttcaaccaaggcttaagtatgtatttgacctgttctttcatttgcatgtgcttgacttcttttcgtcgcaactcatccatgttagaagtgagcttcttgcataagttgttcataaagggttccagcctaagtatcgttgtcaagtgttgcatggtgcctgctatgtctacgtttcaaatattcaaagatttatttttgaaatgttccatgaaagtccgaatcgactctttctttctttggtcatatgttgatcgaggccatcgacattaagtgatgaggttggctagttgggaactgcattctgaactaagttgccagtgtatcaaaagagtctatggtgttaggggataatcaagtgaactagtgaagggcttgaccctacaatgatgtggggaacagcatacatataacaacatcatcac

SEQ ID NO: 251683 - DNA, 272 bp, Glycine max
  unsure (1)..(272): unsure at all n locations
cacacaaaatggaagtactaagtatttattacctatacttaacagaanatacttataacactacaaaataaccataaattggaagagtgtgatacaatttatacaagttntatacacaaaagttagttgtattcaccgactaacaactccnccaaatttacagttttgcttgtcctcaagcaaaaagagaacaactcactttgtcctcaagcgacaacaacatgcagtgactatgtacaaaggtgtttgcaactaatagtactgattgcatg

SEQ ID NO: 251684 - DNA, 345 bp, Glycine max
cctagaggggatggaccttgtcaggctctgtagaggatctatatcaatgcatataggttggacctcccagaagagtatggagtcagcaccacttttaacatttctgatttaactccttttgcaggtggagctgatattaaggaggaagaactaacagatttgaggtcaaatcctcttcaagggggaggggatgatgcaatcctccctatgaagggaccaatcactacaaccatgagcacgaggctccaagaagattgcgctagagctgctgaagaaggccctagggctctcttgaaccttaaggtagatttctgagcccatggtccaaggttggatccaattatc

SEQ ID NO: 251685 - DNA, 184 bp, Glycine max
atatatacatatataatactataaggtataattaatttggagcgagagagaaagagggggttgagttaatttggactgtccactatatgcggagagggggcagaattgtcgagcattcttattccaatgaagcttcctttgcgttcaaggaacaaaggggtcactaagagcagattgtcaaacc

SEQ ID NO: 251686 - DNA, 412 bp, Glycine max
ctaacccatggaagcttctaatatctcccactctttttgtggtgggccattcttggatggccttgattttctcatggtgcacttggaccccatttctaccaactacaaaacctaagaaaactatattatctacacaaaatgtacacttctctatatttgcatagaaggtgtttttcctaaggactgaaagaacttgtctgagatgtcctaagtgatcatctaagctcctactatacactaaaatatcatcaaaataaactactacaaatctacctatgaaatcccttaagacatcatgcataagcctcataaaggtgcttggtgcattaatgagccctaaaggcatcactagccattcatacataccatacttggtctagaaagcagttatccactcatctcccttttcata

SEQ ID NO: 251687 - DNA, 121 bp, Glycine max
tataagttatttcacatcttttttgtcttgcataaattaatggtttaaaaagaattgcatttttccggacctccaattaataaggggctttattttcttaatagctgatcactttttcctg

SEQ ID NO: 251688 - DNA, 361 bp, Glycine max
  unsure (1)..(361): unsure at all n locations
gacttataacaatcataacattcttgctccacatcgttcgcgtgtatgatatccactcacatagcttgaagtatagagaccctctatnctataacgcaacgtggcagacaaaagtgggaagataacttgaatgaccattattgtcaatgcggaaagtattctgcacttcgctatccatgttcacacattattgcaacttgtggttacgtgagcatgaactactaccaatatatagatgttgtttacacaaatgatcacatcctataagcgttctccgcacaatagtggactctcgtgaatgaagcaataatttctccttctgaagacgcatagacacttatccctgaaccaatacaattcg

SEQ ID NO: 251689 - DNA, 177 bp, Glycine max
  unsure (1)..(177): unsure at all n locations
tcttgatttcaggtattgtattgtcatcatcaaaaaggcggagattgtagttgcaattggctgtgatgttttgatgatgatcatgatgatgtgttgcaattgatgcanatgggcttttcatgattaaaattcaagacaatacttcaagattacaagtcacaacatcaagatgatcac

SEQ ID NO: 251690 - DNA, 403 bp, Glycine max
tctcgatatatatgcgcctgaatcagactttcgtttcattagttatgaccatatgaatgtctcgatatattatgcgccttaatcggactttcgtgggacaagttatgtccttttgaatttctcgatagcatacggtgttcaatttcgagcggctcgatatattatgcgcctgaatcggacttccgtgtgacaagttatgaccatatgaatttctccagagcatccgctgttaatattaagaatctcgatatattatgcgcctgaatcggacattcgtgtgaaagttatgggcattgaatgtttcgaagcattcgggggtaatttcggcgtctcgtttatctgcgcgtaatcgacttccggtgacagttataccacttgaatttcgatggtttcgttttaattt

SEQ ID NO: 251691 - DNA, 407 bp, Glycine max
  unsure (1)..(407): unsure at all n locations
tgcaagctctactatgcagagaatatcctatgaaaatacctttatctgacttagtttgaaattttcctaagtggtctttaccattattcaatacaaaacatttacaaccaaagatatgaggatgtgagatgtttggttttttgccatcgaataattcatatggagcggtcttgacgatgggttttattaaagccctatttaaaatgtaccatgtagtgttaacggcttcagcccaaaaatattttgcttttcagacttctccatctttttcttgaagatgggacaatcaacccttaaatgtctaggttgattgcattcaaagcattttagagtagaggatgaagtttctgtccttcttttagatntaaacgtgggtcgcttttgatttcctctgactctcaggaact

SEQ ID NO: 251692 - DNA, 239 bp, Glycine max
  unsure (1)..(239): unsure at all n locations
gcctttgggtcaccctccggggtttggagtattgggaaattggttttcgcgttacgcccgctcatcaatatcgcggctaggtcgtaagctcgtgccgcttcttctgctgtttcgaacgtgcctagccacaccctcctcttgctgtttcatgcagtgatggaaatttgattcaagnngaaaagaaaagaataaactatcatttatgataaagatgcatagacacccattctattaaacac

SEQ ID NO: 251693 - DNA, 396 bp, Glycine max
gcaagcttcaacatcagaccacttccatggtgctggaactactttacatggatttgatggggcctatgccagttgaaagccttggaggaaagaggtatgcctatgttggtgtggatgatttctccagatttacctgggtaaactttatcagaaagaaatcagaaacctttgaagtattcaaagagttgagtctaagacttcaaagagagaaagactgtgtcatcaagagaatcaggagtgaccatggcagagaatttgaaaacagcaggttcactgaattctgcacatctgaaggcatcactcatgagttctctgcagccattacaccacaacagaatgggatagttgagaggaaaaacacgaccttgcaagaggctgctcgggtcatgcttcatg

SEQ ID NO: 251694 - DNA, 244 bp, Glycine max
  unsure (1)..(244): unsure at all n locations
ttcaacattcaatttcgagcgcctcgatatacgacgggactcaatcacacatccgagtaaaaagttattgccgttgaataggctcagagcttcaacattcaatttcgaaggtctcgatatattgccggactcaatcagacatcccagcaaaaagntattgtcagctgaattggctcagagcttcaacattcaatttcgagcgcctcgatatatgatgggactcaatcagacatccgagtaaaaa

SEQ ID NO: 251695 - DNA, 404 bp, Glycine max
tttctacccaaagaactacttaagtctgattatttcattgcaccgggggatacgtaggagcgagaacaaaccccttgtcggcctaaaaaacataagaaccctttttttttttttctaaaaataaaaaattcctttctttttctaaataaacaaaaatataacaagcctaattcatgttctcgagggaagataaacaattaaaaaatcactttatttttatcacactctattaaaggctgccattttcatgacagacgcgtggggtgctaacatttttcctgtgcgtaaacaactctcgaacccttttctcaaattggagactgttccttatcttttgggtttttctgatattttccctaaataaacattggtgacgactccccagttttctttttggaaaacat

SEQ ID NO: 251696 - DNA, 355 bp, Glycine max
  unsure (1)..(355): unsure at all n locations
gggccatttcctgcgagaactttcttttggaagttttccctacaagataatgcttatcttaacacaaaaatggcatgttaatccctctgattttagaacgaactcatgtaatctatttatgcacacgcgtatgagtagaatatcctactatttataccaacatacaaggacatccgacacattctaattgtcacacatacatatgcattttgaaaagaacatacacttttacgctcaaagcattgcgtcaaaatttacacttaattacatcctaaacatttgctattacaaactacctacacatatttgaaatatatatcatacaaacttttattggtncactcacacttatgca

SEQ ID NO: 251697 - DNA, 414 bp, Glycine max
  unsure (1)..(414): unsure at all n locations
gcaagcatgtgctattccaagttcatttttcatgcctttaatctatattgctttcttcactccttcaactagggccatgtactctgctttagttgttgaaagagcaacaactgattggtgatntgctttccaactgattgttgtaccaaacaaagtaaacacatatcctattaaggacttccttgtgtctacatttcctgcaaaatctgcttctacatagcctgtgactgctgcctcgtgggctgtcttcttgtaccttaaactagctttcaaagatccatttaaatcaccttaagtccacttcacagcttcccagtgtgcactgccaggatctcccatgaatctgcttataatacttacaacatgagccaagccatgtctacttgaaaccattccatacattatgctttcaac

SEQ ID NO: 251698 - DNA, 305 bp, Glycine max
  unsure (1)..(305): unsure at all n locations
atggatgaggaacaacacaatggctcanagaatgggtgaggggccggaagtaataaagccccttaggtaatattcctatccaacaccggcttaagaataaaaccgggcatggcctaatttattataaaaaccaccatggccaccagcccccattttaaaacggtatttaatacccgcttataattgcactatgaaaaacaaattttggttttcctatttacaaaattgccaccacataatattctaaatcatttcttgaaaatcgtcaaaaatacaagcttttgtagaagtgttatgatcgcggt

SEQ ID NO: 251699 - DNA, 377 bp, Glycine max
agcttagggatggaacacttactttttggtgatgatctaaagcgcaaaacggaatcaaaaaatgcggaaaaggatgaccctagggctgcaaactcgtcaatccccggggtatggcttttgaaaggggggaaaagaaatttttgaatgcaaaaacgcccccctttcgtcattcttataatttggtgcagggggggctcgcccaggcgagctaacttgcacatttttttttttttgaggagaacaataaccatgtcccctcccttctcatggattaccatcttgcctaacttgaacttacttaggttagaattaggcgttgattacttattttttttactgtttaaaacaaacaaaaagtaaaaaaaagctgccaaata

SEQ ID NO: 251700 - DNA, 350 bp, Glycine max
  unsure (1)..(350): unsure at all n locations
agccacccagctcgcccatgcgagcaaggttgcttcctccagaagcaacaggcttcaggaagaatcttctggatggcccaagtgggcctattaactatttgcacccccatttttactaagtacaccccctgcctttttttggagattcttttttcgnaaagttacggaaacttacgaatttcgtaacgatactttttttctttccagaaagttacggaaccttgcggatgacataatcatccctttttttgacttacggaatgttatggaacctcactaattgagcaacgatgtttccatttgatttccagagagcacagaaccttacagagagagcatcaatattttct

SEQ ID NO: 251701 - DNA, 375 bp, Glycine max
  unsure (1)..(375): unsure at all n locations
tactcggaatttgtaactacattttntaagctgaaaggtttactgaattttggagacctttggaccaaaatttaaaaaaagaacccagcgatttggattaaagaaaaaaattaagaaaacatcacacaagttggatgaaaaatcagtgtccaggaaaataaaagtgaaaaggaagtgtgcttgttgttttagctcaaaattttttttataattggtgcctactttataccactcctagttctgaaacttcaattgaaaataattatgaaaacaagtgccaaaaatagaggtttcttgagtctttttttcgcttttcttttttaggtnttctactctactctatagcctttctagggttggctttgagtcctaact

SEQ ID NO: 251702 - DNA, 349 bp, Glycine max
  unsure (1)..(349): unsure at all n locations
ttacacccaatnaatatccttaaaatttgctatcacaaactacttacattcatttgaagnacaccatacaaattttaggagttcactcctattcatttatatgcatattggaaagctaattacatcctgcacatatttgcattctaaaaaggcattccacactatcatacattcatttaagaaaacaattactcatactttgctaagaatttcatgctccttatatttacctatgtatacacactattgcaaggtgttttccacgctacctctatgtaaagnatcaaacatggggcagcccatattcgagcataaactctcacaagcaaatccttattttcatgttttt

SEQ ID NO: 251703 - DNA, 395 bp, Glycine max
  unsure (1)..(395): unsure at all n locations
agcttatttatggttatgagaattttactgaagcattacggaagccccggaagccccgaaagccattttttaacaaaacgagggaggtggttgccgcccagctcgcccgggcgagctaggttgcttccaccttaagcaagaaaatgcccaaaattctctagatgggcccagatttgaaaattgctatttgcacccccaattttactaaatacaccccctttgccctttttgttgattctttttccgtaatgttacgaaactttacgaattacgtaacgatacttgttttctttccgtaatgtcacaaaactttacggattacgcaaccatcttctctttgacttnctggaatgtatggaactttacggattgcacaataatgcttcctttcgact

SEQ ID NO: 251704 - DNA, 413 bp, Glycine max
agcttttatgcaatattaaattatggattaatagtatgtggaggctcatcccatgcttttcatcagttcaatgaatttgtccttaaataaaattttcaagctttttctcagctcaagatccgcctccgcctgacatgaccttggaggcttggaccagtaatcattcccccacatgttcaactaatatgggccataaaataaaataaaataaaaactccgttactgacagacataatatatattatgagatgtgatacaataaaataattctaacttgaatatatatatttttgaatcttcctaatattaatagtgcgaagtatcgttttttattattatttggggtaatttttattttaaaattatcaaatgaaaatatttctgaattaactctcatttaaagataagtcata

SEQ ID NO: 251705 - DNA, 322 bp, Glycine max
  unsure (1)..(322): unsure at all n locations
gacttcatggttttgaactagaggcaagagatcatttgtaaatattttatgcttaagtaagatataagtaaaattacactggagtatgaggntcaattagtaaaattatgctttctagcgagagagagagcatcatatcccgcaccgtgcgtaaagaattttttcaccatcaacggntgatttgatgcactcaacgttatgttagcacacaagattataagaccgcaactccttgggtcgcgtaatcctttgaagccgcgaatccaagcacatagaacatattctcaatctcaaataaaacataatttcatccctcgacact

SEQ ID NO: 251706 - DNA, 409 bp, Glycine max
agcttgaattaatctgaagatcttatatagctttccctttttgtaggaacctataacgacaactattcaagaaactagaaatttaaaaactctagcttaggataagttgttaggcattcgaagagttcatgaggtccatcttcagaaaagggatcatctcccgaaaataaattttgctaccctcaaaactggagaaaccaactccggacttgaagaaagaaagagctcatctaaggctttgaaggtataaatgaatgagtttgatgccttagataacaactttgaagtatccacaaatgatgaagtggctcttatgtcaagaaaattcaaacaaatgctgaagaagaatggaaagtttcaacactcctccagatggaaggatacaagatttaaaaagaagcacacagag

SEQ ID NO: 251707 - DNA, 270 bp, Glycine max
  unsure (1)..(270): unsure at all n locations
tcagccacttatgatagccgccgatgatcccattacagcttcccctaagctctctgtcctttcttcatgccgcataccatgccttgcgaactccttggagtaccctcgcgttagaggtcactgaaaccccatgcgatgaaaggcgagatgctttcgnctgatggcacttctctcatggggtagccaagctgtcttatggcgaagacaggattataattaatacaacccctagtaccatcaagagaacattaggacatccttcgcatgaag

SEQ ID NO: 251708 - DNA, 406 bp, Glycine max
agctttaatgtacagctgagatcttgcagggggggtcttactgttgctggtaaaacttattaagtttaggatatgttcggttaagaatagtccttaagtcagtaaatcaatgccaagaaatgttgacttatattcgacttaagggcttgaattaataggttcaaaatataagaagcgtgaatgtgatttattcatcaatttatattattttgaaatttgttaaatgttgagttattaaaaaaaaagccatctaaatcaatggttcaaataatattgaatatgacttttatggtaaagtatttaatgctaagaattcaattcatatttcatattttctgggctttttattttttattttttattagaatgatatgtatgatacgcggacaaattaactattcttatc

SEQ ID NO: 251709 - DNA, 407 bp, Glycine max
  unsure (1)..(407): unsure at all n locations
gcttagaaaatagcncattttcctaagctagacatctgtaactaattttgcatctcctccataaggtgacgcaccattctttttaattattgcttgggactaacatatcatcaacatacaaagaaacaattaaagagccaccatccatcaaccttttcaaacaaagagatgcatcattttcgctcctcgtgaaaccttgaccgcaaaaatagacatcaattttgttttactatgctctaggagcttgttttagtccatacaaagctttatgatgcttatgcaccttgtcttcactttctttcacaacaaaacgttcaagttgagctacataaatttcttcaataaaaattccacttaagaaagcagattcaacatctaaatgtcaaaatttccatttcatttgagtt

SEQ ID NO: 251710 - DNA, 275 bp, Glycine max
  unsure (1)..(275): unsure at all n locations
aaaccttcattaattatcatattaaccttctgctccatagtttcttcatttttctccatgtatctcctcacatgtcttgagctgaatgtagntaacatgattctttagaatttccacttattaaacttgctatagaagctagattagattttctatggntcaaatttcttgttcttattcttgaaccgagaattgagctgagnttaagntcctttgagttttgnatagctatttttttgaggctggaacctaaaccataaaattcttacaaaaac

SEQ ID NO: 251711 - DNA, 327 bp, Glycine max
agcattgttagtttcaagcgcctttttgtcttcttctttaatccagacttgttctggctccaattcatcagtgggcttttccttctgcgtccagcatcttgggatgttcccagcctttgatgacagctttccaggatctgctatccagcgatttgagaaaggccaccctccttgctttccaatattcatagttggtcccatccacaattggaggtatgttcactggtcctccttctttctccatgttcatcagaatttatctccctagatctcactcactgaatttgagagccgctctgatccaattgaaattctgatctggggaca

SEQ ID NO: 251712 - DNA, 341 bp, Glycine max
  unsure (1)..(341): unsure at all n locations
ggttttcttcacatgtttttctagaaacgcgcataaacccacatgcacaatatgggcataaacccaccatcccctattgcccacctccaactgaactcacgtactcccacggagcccatatactcgaggctctcaacaccgggtccccatcaatcctgcgaagcttccccaacatgcaagaaattcaacattcgaacaacacaaactatctcagcctatagaacaaggcaaaggcagaaatactctcccaaaacaccaaccaaaatcacaacttttctcacttaaagactccagnaacatttgctttgtccaattcgtaaccggtgatcgatctcgaaatt

SEQ ID NO: 251713 - DNA, 355 bp, Glycine max
agcttattgtatgcccgacacgtttttccctatatatgttgcagaagcagaggccatatcaagttccagtccttgaaacactgcgtggaacctagctattgcttttactaaggggcatatcatgtctcatttgcagacggtagctcccatcctgctgaatttgtgcaaaggatgaatcggggcacatcactgccttggctctgccaaacatatggaggattgcttgagtccttgttactgccagatcaaccttgaccaacaacatgtgggccatgtggaacaaatagatggacacactcccttaacccgcttaaaacgactcatacttcgaccgtacatcatgagcattgttcat

SEQ ID NO: 251714 - DNA, 388 bp, Glycine max
  unsure (1)..(388): unsure at all n locations
agcttgtttgattatggggnacctgtcatatgtggtactagggggcgatcgggcgatggcgcaaatcaactctcccactttcacaaatcaaacatgaacccaccatccccagttgcccaccttcaactgagctcacgtactcccacgtagcccatatcctcgttcctctcagcaccgggtccccatcaaccccttcaagcttccacaatatccaagcaattcaattccaattaccatgaaactaccctaaaccaagaaaacagggcagaggcagaaaactctggccaaaacacattcacacattacaactttccttacttaaatatcccagtaacattctcttcattccaattcgttaaccgtgggatcgacttgaaaattttactgg

SEQ ID NO: 251715 - DNA, 377 bp, Glycine max
cttccatcttgtggtatcagatcacaagaaccttcagtaggtgctccttaaacattcattaattttcagctttaccttctcctccattgttggttcttcattttttttctccatgtatttcctcacatgtcttgtgttgaaggttggtaacatgattctttagaatttttactgattaaacttgctatagaagttagaattgattttctatggttcaaatttcttgctcttgttcttgaataatgaattgtgctgagtttaggtttctttgagttttgtattgctatttttgtgtggctgaaacctaaacataaaattcttacaaaaacattaaagtagaataaaacctcaaaaatctagagtgacatgttcaccta

SEQ ID NO: 251716 - DNA, 283 bp, Glycine max
  unsure (1)..(283): unsure at all n locations
acccttccattggcaacatncacttccttcccaagatgaaagccctgaagatggatctttgaagctttctttgatattgacaagagcttgcctctcttcttcattgcagccaagagatgattagccaccggaataggaagataacaatgaaaatgccattagaaagattacaaagcttaagtaagtagagctttgcatgtctgctgctggagtatctaaatcaaaaagttagctgcctatgatgattataggaatatgatgatatggcctttctgagctacaa

SEQ ID NO: 251717 - DNA, 347 bp, Glycine max
  unsure (1)..(347): unsure at all n locations
agggttcctaagcctatcattactttatcgcttatcaagcaggntatgccgccgaagtccttgcctaaacccatttcaggctcgtaaccattccccaacatcactcgggccatcattactaccgcatcggacaagcaaggttgcccaaataaagaatctacagatgcaaagctaaccacctcaaaagactagaaggtcgnttctaatgactcctctagggcttccacatatggcatagatgacgggcaactcaccaagatgtcttcctcgcccgatacgataaccaaaagcccctctaccacgaatttcaatttttggaggagcgtagatggaacaactcctactga

SEQ ID NO: 251718 - DNA, 409 bp, Glycine max
cttttctctttcccatgacttgtattggcattcctttttaagtagccttctctcgctgagcggcatcaaagattctacacatgttggacaactgggcaaagctgtgaataccgtgataattgaccatcatctttacttctggtcgtacgccattgacaaatttcacgcatttggacctctcccctgcttccccctgataatgaggaaaataccttacaaggttctcaaacctcgctgcatactctaccaccgtcatactttcctgtttcagctcgagaaactccatcttcttcctattcttcacatcttctggaaaatacttctccagaaaagtttgtctgaaattctttcattggacaacaacaccacctgctccttctaaacgtgggcgagtgttctcccaccaata

SEQ ID NO: 251719 - DNA, 203 bp, Glycine max
  unsure (1)..(203): unsure at all n locations
ttagacaactcgcacaattttcaaatgttagaaaactccctccaacagccataaacaactaacttccaagcttattgaatgagatcaatttgatagagcttgctgcaaagaatgagagccacaaatatatggttcggncattagagttgagtagctcaaaaagatacctcatatatataaaaaaaacttcttagtcaaaacac

SEQ ID NO: 251720 - DNA, 351 bp, Glycine max
  unsure (1)..(351): unsure at all n locations
ccttcaaaagacttctcgcccttgccttcagaagactccacgtcctcgccttcagatgactgcatgtcctcaccttcagatgactacacgtcctcccctatagatgactacacatcttcgcctttagagggctacacgccctcgcctttagaaggttgcacatcctcaccttgggtactagtaccctcaccttcagatggctacacgtcctcaccttcaaaagactacacgtcctcaccttcagaggactacacgtcctcacctttagatgactacacatcctcacctttaaatggctacaccgcctcacctttagatggctacacgtnctcacctttaaaagactacaca

SEQ ID NO: 251721 - DNA, 404 bp, Glycine max
  unsure (1)..(404): unsure at all n locations
agctttggagttgaaaactatatattagcaccaaggctctatttgaagtccttctctttcattttgagttttaggcttttcttcttcttttagacactttttcgttttgcaattccagttgttacttttcattttagcaataaaattttgttctctattgattaatggaagactaagtctccagcgttgttttctcttgaggatcaaacacagttctctttgaggttctattattactattaaattctgatcagtttttcctcttcaccaattactctgtatttgatgttattaattcatgcatgcttagtgcttgattaattgtctctgcgcttaatttacgttcatgcttaatgatncgtcatgattaattggtggatgtgttgtttaatcacataatgaat

SEQ ID NO: 251722 - DNA, 342 bp, Glycine max
aagccttaagaataaatcaaagattttgcaacttgttcaatatgttcttaagatgatcaacaatttttataaaatgagttgttcaaaataaaattatattcaaactcttgattagttaaacacaaagaaagataaatattagatacatgaagttttatactagtttgtctctttcaatgagactgcgtccggttctcgacaaacaaccaagtttcactaacttttcaaagttacaagtatttttcaccgtcatttttggctcttacaaaccaagcttatcatcaaggttggacaactcaatattctttgtcctatcacgccactgtaggctctaaaacaaat

SEQ ID NO: 251723 - DNA, 407 bp, Glycine max
  unsure (1)..(407): unsure at all n locations
agctntatggtctaccaatgtccacaaacactacccgtgccatgatctgtctccatgagaaagaggtggattttgaacttgttccagtcaatgtgttcgctgcggagcataagcagcctccttttctctccaagaatgtaagtgcttgtagtatttttcttttctcaataagaaacctcagtcacagccacaccaactttattttgtgttgtacacgcagccctttggtttgattccattactggaagatggtgatctcactctttttggtatgctttcattcttctttttcagttggtatatattactatttttttacaatttttcactctgcatgagaccccttttattcaaaaaaaacttactataaatgcaagtttgatttatcaagtatgaaaaaattatca

SEQ ID NO: 251724 - DNA, 404 bp, Glycine max
agcttggtacataaaaggtcttttctaatttcaaaataatttcactacttaaaggtaaaatgcaagtttcaatagcctccataagtgagcctagcttattgcttgataaaatgttttgctcacttcccactagtttccttaagttttgcataccctgtaaagaatttgcaatatggatatcaatccacaaggtgttaatattaacactaatcatattagattcataacatactaatgagattgatttacctttcttctcaagccatttctggaatccgggacaattcttcttcatgtgtcccttcttcatgcaaaagaaacactttgccaccatcttaatatcgtcttaccactccccttctgattagcttgagacttagttgcttttttcttcccacaagcag

SEQ ID NO: 251725 - DNA, 269 bp, Glycine max
  unsure (1)..(269): unsure at all n locations
agctntggaggttccaagngccatttcttattcttctttattccagacttgttctggcttcaattcatcaccgggctgcccttctgtgaccacaaactcggaatgtccccaccctttaatgacggttttccaggttctgctttccattgattcgataaaggccaccttcctgggtttccagtgttaaaacatggtcccatccagaattggcggcctgaccactggccctccttgtttctccatggccaccacaattaatcatcctaaat

SEQ ID NO: 251726 - DNA, 298 bp, Glycine max
tacccatcacattttatgcctgattcgcgcatcaacgcacctccccgacgcgcgcatgagtggcctgtcccctataggccacctccgactgagctcacgtactcggacgtagcccatatactgtggtctctcaacaccggaaccccatcaatgctacgaagcttccccgacatgcaaaaaatcctgcattgaaacaacacaaactatcacagccaattatacagggcagagagccgaaaactccgcccagaacaccaaccaaaatcacaactttcctcacttatagactgcagtaaca

SEQ ID NO: 251727 - DNA, 111 bp, Glycine max
gccccggatcttaagcacctgagctgcagctttttttaccaggcttttttttttacgttcaacagccgtcggactaattatcatggggccacctgtgtgacaaatatggga

SEQ ID NO: 251728 - DNA, 392 bp, Glycine max
agcttgttcttgattcttcctatgttctgtaacaagcttataacaataaactgggccttgtcttaattgtctttgggcttggcgaccacgatcaacaaaatactttcggcacctactatatgttgacttgaccaacgctgctattggaatgctgcgacaatctttcaacaccttattcacacattctgataggttggctgtcatgtgaccatatcgtcgtccagatgtatcgtaagccatgctccatttttcctttgaaatgcgatcaatccatcttgctatggctggactcacgtgacgaaatttttctaagttttgatcaaacacatgcttgcaaggagtgtacgctgcatcaaatttgttatcatgaaaagttgtacatagacatcaaa

SEQ ID NO: 251729 - DNA, 212 bp, Glycine max
  unsure (1)..(212): unsure at all n locations
aattagtagatagagaacgaaaaatagatcgatctcataagaaaaaatattgatcattagatacttatggggaaagaaagtttaaactttatatccatctacagaacctgtaggtcaagctctagttggagttcgncttgatctcatagagagaagaattaggnttacaaatcccacaacaagtgagtagtgttaagagattttacacaatg

SEQ ID NO: 251730 - DNA, 362 bp, Glycine max
ttctgatccaaagagctagatttacagcatgcttagcagctacatattctgcttctgctggggatagagctattacttcctgtttctttgaataccatgagaaaattccagaaccaaagctaaaaagataacctgacgtacttctcatatcatcagcacatccagcccaatcactatcagaataaccatgaagtctgaagtttttaacataatggtatctaattccaaaatcaattgagcctttaacatatctaagaattctttttgctgcctgaaaatgaattctactagcacagttcatgtaccttgataacaagcttaatgcatgcaagatgagaagccttgatgcacttaaatacatt

SEQ ID NO: 251731 - DNA, 362 bp, Glycine max
gctgttatattctattggaatgtttccactcaatctttttgacaataaggcaagtgtgctgagctttgtcaagtttccaatattggaaggaattggccctgaaagtttatttgaacgcatactgaggttggtgagctttgtcaagtttcctatagtggaaggaattggtccagagagattattcacacctaaaccaagatgagtaatttgtgacacaaccccaatttggggaggaatacttccattcaatgagttatgactcatatctaaaatgaggatgtttggaagtgatgaaaagatgagagtttgaagcgtacccgttaaaccaatacctctaaaggtatgttgagacagattggagt

SEQ ID NO: 251732 - DNA, 343 bp, Glycine max
  unsure (1)..(343): unsure at all n locations
atttagcatatctcttttgaagaggattcccaattttctactagctagnacgagacttgattttcctttttaaagtctgacaattatttcactaataagctacttgaagtagtctactgcttttgttgtatgttttacatggcactagaataggnttttcttttataaaagtctagcatgtgtaagcctaattggctacttaaactaatttaaagcttttagtgtctctatttttttttacatggcactgtcgcggttgtcataccctaatttcgtccggagacctttgcttgatgacatgcgacctttgtttggnccttagaaagtgcttggcacccatcat

SEQ ID NO: 251733 - DNA, 112 bp, Glycine max
agcttctttttctatggctaatttcttcaaggaggacgccgcctgacaccaatgttcccttatctttgactgttaatccatagctgaggattacccttggaggacttaatgg

SEQ ID NO: 251734 - DNA, 311 bp, Glycine max
  unsure (1)..(311): unsure at all n locations
agaccaaaagcaaattctgtccctcattctatgtttcaaagattcaaatagccaagcaaaagagttactagcttctagaaaagcatcctctgaaggcattaacttaattggagcttcaaaggtcatgcttcttgatgttgattagaatccctcagaggaaaagcaagccatttgtcgagcatataaactcggacaaaagatggtcgttttcacatatcatcttcttgcacatggcacccccgaatgcacaaagtattagaaacaagcagaaaagaaccggntatctgaactagntttctcaaatagaaatg

SEQ ID NO: 251735 - DNA, 276 bp, Glycine max
aaatcccctcttatatcaatattgagagcccacgcttcttagatagagaacactcgcatctgtcaaaaggatcacatttcacactacagatctatgctgttctcaataacctcttaaaccaaaattccaaatccctcactctcaaaaactactccaacgggttaaatgcaaactacagcgcggttgaatgatataaagtcggctcaccttcgttggtcaacacgagaagaccaaatgcagggaaaaacaaaaccctttcctctactaggatgcact

SEQ ID NO: 251736 - DNA, 162 bp, Glycine max
acctgcacgcatgcaacctttataaggattaaatccgatttatctctagccaatttcttattaaacaccctctcaaactcagcacagtgaaggtgttccaagaggccacaattaaggcaggtcaagggtggccaccaactaaagagaggaaattgggggaac

SEQ ID NO: 251737 - DNA, 362 bp, Glycine max
  unsure (1)..(362): unsure at all n locations
ttacagggatagtgaacaaaaaaaattcttttctttatttagaattcatgagaggtattagcatttcacttgttttcaacacaagaagataggnttagnatgaaaaaaacaattttatggtcaagctgtctgcaactcacattgtagagggggcagtttccacgtgattcaaaaccagactgccaaaggaatctgtttacttgggccatccttacgtagggattcttatctcttttttttttctgcctttagatctcctcgatttacttcttttctttctattctatttaatgggcattaatgcaacaaacttttaaaatataataatactattccattatttgnatcactctcactatttt

SEQ ID NO: 251738 - DNA, 387 bp, Glycine max
agcttgtattgtcactcaaatctttattagttataactttctgaataaaatgagtttatcccgcatttttactccaaaatcaatgtgaatcaaattactcccgcattctttacgtactcctcacgtttggttttttaggaaaaacgccataactaaacgcgccccaaggcatccctatcgcaccagatccaaatttaggacgatgggtgaccaagaggagatgcaggaacagatgaaagccgacatgtcggctttgaaagagcaaatggcttccatgatggatgccatgctaggaatcagacaactaatggagaataacatggtcaccgctgccgttgttagttcggctgccgaagcagacctaactctcccagctaccgcgtacca

SEQ ID NO: 251739 - DNA, 355 bp, Glycine max
agctttatgtatgtaaccttgctgtttttagctaatatttcctggaataagaaaatatttcttttgagctgcaaatgttctaaaggaagaagctgtatgggtcttatgcctacaatttaaatttaaacaagttacagtaccttgtggtagatttactaagttcaatctgatatggaaccaatttttttctttatacattacagttgctttgggggggtggggttagttctagttcatattcattttgtgtttaatgatttaaacaaattacagtaccttgtggaagatttactaggttcagtctgatatggaaccgattttcttctttatacattacagttgttttgtgggggta

SEQ ID NO: 251740 - DNA, 240 bp, Glycine max
agcttttttttagggtgccttattttgtgctgttttaccttcctgagaacaattttaccttaaccctcccccaaattaggggcatatcatgagtaaaatccttatgctctcttgaacccctaaaccaaggtagaagataattaaggtaggcttaggggttttacaaaaaaaccatgattatattttttgctttaataagggccaggggataattattattcaaaggaggctttttgggtt

SEQ ID NO: 251741 - DNA, 240 bp, Glycine max
  unsure (1)..(240): unsure at all n locations
agcgaactataccttcgaccaaacactgtctagtttctgtctaggcccttatttaaagcgggttgcagcaccggctccgcttccctaactgtactggaggcggntgtcgaggctttatcctctatagttttctggagttttaacatgacctctgagatggaagccatttgatcttttaaagtcgaagatcgggcttcatctgttcctgcacgccctcttnattatccatttttctggatc

SEQ ID NO: 251742 - DNA, 382 bp, Glycine max
  unsure (1)..(382): unsure at all n locations
agcttgttttttaataganccactttattttcatacggctcgaaaaaaccgggcaagacttataattggagggagaccactctcttcgtttaatacatttggatattgcccttgataatgaacagagcggattcaatagcctccgccactgaaagaatatctattgagttaactttccttggaaagaggatatgttactcatctaattcatgggtggctaaaaaatgaattctttatatcggttattaaaaacttttaatattgctgattaacaacttttaacattgattattaaccgatgttgaaattatcgacggtgaaagcttaacgatacattgattttcaaaatggtgtcattaaatattcacaccattttatccaa

SEQ ID NO: 251743 - DNA, 353 bp, Glycine max
agcttgtttatttatcttaaatttttagaacatgattcttttagtctcaaaatgaacactctatgtcttaatgacctatacttaataggaaatagttattacactacgaaataaccatatatggagacagtgtggttttttttatacgagttttatgcactggacgttagtctttgataccgactaacaactcgcgcatatatatagtttatgcttgtgaacttgtcctcaagagacaatgacatgcaaagacactatgtacaaatgtgtgtgctccaaatttattgattgcatgatgagaaagacggagcactgtgtgcctataacttgccttcacaaaatctgcggatatt

SEQ ID NO: 251744 - DNA, 361 bp, Glycine max
  unsure (1)..(361): unsure at all n locations
taaaacccagccaagaagatggcagagccaaaggatgttttctcttgataagagaaagnagaaagattgcctaataaggagtaccattncgatatcacattttgttgcaaaatgattttccttcttaacaatcttctaggatgaatccttttcctctttttccttccccttggcctttgaagacgaagccttactatccttctttttctttaggntttctagtttttcttcctcttatctttcaaagntaggttatccttggccacctgcaaaagagttagaagatgcaacacaaatttagagccaagattggagataggaatctcattagttatagccatagaaatgatccttctatcaa

SEQ ID NO: 251745 - DNA, 392 bp, Glycine max
agcgtatcttacctatctatctcttagatgtctttgcaaagattcaatggataaaaaacatgaagttctaattcaagatgttttctttgttgcatgggcataatgcaatcactctatgtctagcaatgattttattaagatgtccctacctttgagttctactaaaaattatcctctctcgagcgactaatccctaaaactgatgcatataaaaccttcaatgtatttctactaaggattaccctctttcaagcgccaaacccctaaagatgatgcaaggatgaagcatataatacatttgttggcattttaggcctgccaagccctaactaaacgggtttagcctttcattgtcatgagagacttttacactttagggggttgatatgaat

SEQ ID NO: 251746 - DNA, 294 bp, Glycine max
ccatatgagcagagaaagcaacacctgagctgataggttagtctttcatggtcttatagtatagaattttgttaggagggctcttcctccttctttcattaaggaagattttttagaaattagttaggtcttcctaactataagctctcatagctttctggatttatctcatggattttggccgatgtcccccatgctagctatttcttttcctctttttttatatatataatcttgcagagcggcagagtctaagttggggcaagggagccaaatcgctgggatgtcagcccc

SEQ ID NO: 251747 - DNA, 189 bp, Glycine max
agctttgtcggaaaattgtcattttttatacaaaatcccatatgaatcactggttcatacggattaacaatccgtatgggtttttttataaattaaatgggtttattaattttttgttaaattataaaaaaatgtttaaaatttggctgggaattttttttaaaaaaaataataattgctatgccatac

SEQ ID NO: 251748 - DNA, 350 bp, Glycine max
  unsure (1)..(350): unsure at all n locations
tgagatgaagaagtattgaaaggagattcttccagcttttattggagaccacagataggtacctggagatatgtcgcgggggtcaagagaccttggggacgtcaagaggggagctattgcccaaaaccaagcttgaccaatcccgacccaacccgggcatagncggncagagagaaactgtgatgtacctaaacaagcgagctcctggcagncaacagataaaaagaacaaagaccacaaagcaaatatgctagtggaggctggccagctgagaaacttgatagatatgagagatattgnctctagtaatcgattaccaaaggtgaggaatcgattacaaagcttaaaaa

SEQ ID NO: 251749 - DNA, 287 bp, Glycine max
  unsure (1)..(287): unsure at all n locations
ctacgattaataactcggaatcatcagaaatcatcatatcgacctctttcataagaataattattgattcatgagttcgaaaacaagtgaaataagaatttgcttcccccaatacttactcatactcaggaacagnaatacgagaaagattatctttcctacttcttctaacctttttgattccttcaaactttttatcttggttttgctttttccttttttcatgagagtgtccaaaaaccccctaatcattagnaatgactcaccataaaactcttcatttcccc

SEQ ID NO: 251750 - DNA, 226 bp, Glycine max
cactaagcaatcactacgcatgggtccaaactcgagggcggtggatgcattaaccataacgcaattcatggggcgtcgaacaaagggtatagaatggaaaattgtccttaggaatcattccccatgtgatccatctcgagggcacgaagatgcataaacgcttctaactcgagggtggaggaatcttgaacctaagaacacttcattgggctcccaaaaccggtaa

SEQ ID NO: 251751 - DNA, 360 bp, Glycine max
  unsure (1)..(360): unsure at all n locations
gacaacggttngaagcgggacaccgactttcctgcttcaaccatccccgctactgcaaagctcttctgcatgggggacactgactttcttctatcctcaactatgcttccaatcgcggctggcgatgctgctgcctctatgaaagacaccgattttcttcgcctgaacataccctcctgctggtgatcctaactccaagcaagacattgatttccttgcttcaacaaattctccttctgctcttgctccaatgtccaagtctctgtggccatcacttaaaaattcgagttcttgaaatcctgtgcaaccaactgcgtgaattggatttcttgtcctgtgccacaccatgctccaactttt

SEQ ID NO: 251752 - DNA, 411 bp, Glycine max
agcttatattatataataacaaattatgaaatttagaactttatttaccttcatcatctgaaaccatttcattcattacattagcactttcagcaacaactttatagctcgtagaacctataaaaatacattactagtattagttcttgaataaacacaaatatcaatttaacaacatatatgaataaaactttacccatattttcagcactccgcaaccaacttctagcgcatattaaagcctctaaagtagttcattgaagtctactacgatgtgggcttaatacttgaccaccagtgctaaatgcagattctgaagctacggtagatactagaatagctaatatatccttagcaattgcttgaagtgttggatacttgacaccattaaacttccaccacatcaaaata

SEQ ID NO: 251753 - DNA, 290 bp, Glycine max
tatattaagacccatcgttaggtcattattatctgttataccgattctatataattgagttaatttttatccccaatttcaagataatcaattatgaaaaaaaatgcacatttatttataaacccacgcctttggtattagatattttttcaagtgtctgatagatccttgaagtgtgagaacttcgaattcgaatcatatcatttaaataaatagctaaaattaaaatataaactaattataacatttatttttctcatccacacatacctcttggaaatataccaaat

SEQ ID NO: 251754 - DNA, 413 bp, Glycine max
  unsure (1)..(413): unsure at all n locations
gcaagcttcttagtttcagatgatgctttttagtttgnggctacttcatgcactcctctaatgactatagcatggcgctaaactgttgggagttggaaaccatcttctcaattaaattcatggcttcagcaggggtcatgtctccaagggctccaccactggcagcatctatcatacttctctccatgttactgagtccttcataaaaatattggaaaagaaactgctcagaaatctggtggtgagggcaactagcgcatagttttttaaatctctcccagtattcatataggctctctccattgagttgcctaatgcctaaagtatcctttctgatggtcatggtcctcgaaacacggaaatttttttctaacaatactctcttgaggtcatcccagctcgtgatggacctt

SEQ ID NO: 251755 - DNA, 150 bp, Glycine max
tttacgacccctttttcccccttttgaatttccttatcgattttccagtgcaggcattcgttccgttgcggaagggttatttacactcgaataagaaacggggtcccaaccctgtgaacaacaacaaaactgggaacaaggatatccttt

SEQ ID NO: 251756 - DNA, 312 bp, Glycine max
  unsure (1)..(312): unsure at all n locations
aagagaccatanaaactcagcttgaaacgccctggcttttggggattttatgccgccataggcagctgcaggacaagaacccattcactgcccataccgncattcgtactggcgggataaggatgaataagagagatgatcatgtcaccattggagctggcgggataagagagattaccgccattggagctggagggacgtgccaacatggacaggcccaccattggcacctgagntacatgtttgatgggactgatgaatgttgagactgaagcgtgatgcagctaaggttttcacatgcaatctgaatat

SEQ ID NO: 251757 - DNA, 290 bp, Glycine max
tttggcacccttttaatttaagtcgaccacggaccggagtatccctacttctatatgtctcgtattcgtgaccaccctgttggcccttgtgcaagaacaatggaagcattaccttcctatatactttattagccctttatttcttgaggcctaaaacctcttccaatggtggaggacgaacccctaccactcttcactttcgcttgacctctaaggccatatttccaagtttactatatggtactaaaacccactattctattaaacaaggttctgctaagcctatacta

SEQ ID NO: 251758 - DNA, 395 bp, Glycine max
  unsure (1)..(395): unsure at all n locations
agctnttttctgaatttgcaatgtttcaattgacttttaaatggngtaatcaattacaatatattggtaatcgattaccagtgtatctgaacgttgaaattcaaattcaattgtgaagagtcatatcttttcataaaatgctttgtgtaatcgattaaatggttttggtaattgattaccagtgacaagttctgaataaaaagtcaagagatgtaactcttccaatggttttctcaaagattttctcaaggttataactcttccaatggttttcttgaccagacatgaagagtctataaaagcaagaccttgacttgcatttcaataagacttacaacttcttacatatacttgtacaaccctttaatctctttgaacattcttttgaacttctt

SEQ ID NO: 251759 - DNA, 194 bp, Glycine max
ctttgcccatttttcaagcctctgatttcaggagaatttgcagtagaggggtgtgaacctctaatttctttacaaaagaagaccaggtggtgccccaatttcttgttgaaagagtaaacaaccacttttttgttaaaaaatgttttcgaatctttttaccccgagtgtgagggacacacttttcgaggacccca

SEQ ID NO: 251760 - DNA, 332 bp, Glycine max
  unsure (1)..(332): unsure at all n locations
ataggttttttgcatcttttcttctgtgatggcctaagacagnntaataaatcaaactcatgcaatatttatttcgcatttggaagaaaaatatcaagttaattagaggatctacaagaaaaagaatttaaaggatgtctatgcaattttatattaagaattcttatataataaagcaattgactgattctggccatgttaaattctatatttaattactatctttaaaacataaaaaattaacactaaatttaaaattattccatgttctcttgtaagccatatatgtagcctttatatatggatataggntaacttatataattaattaa

SEQ ID NO: 251761 - DNA, 323 bp, Glycine max
gcacccgtagtctgtgagctttgcccttactctatgatgacccactaacctagaattaaaataacttaccgccatcacactgggaattaaaaaaacctgaatggctgattgatactgaaaacgtggcacccaaaagtcacccccaacagccaacaggtaaggcaccatttggtctcccaaaaggctgatgcctaggtggccacttgggcccttattacaccttgacctaaacctaactaacgcccttttagttgattaacccaaaacatatttttggacacccaactttacaaggattgggccattatttacacaaactacac

SEQ ID NO: 251762 - DNA, 219 bp, Glycine max
  unsure (1)..(219): unsure at all n locations
ttttttttatggttttttttatttctaancagnagaaatcccatgaattagagattttttgaggccactcaattgagataccaagatctttgaactaattagactaaattttatgtccaggtctctttcttctggctttttttttcttggtagaattaggatgaaatataaactagactgaaattttttatgtcctggtctcttttaaattttactttt

SEQ ID NO: 251763 - DNA, 391 bp, Glycine max
  unsure (1)..(391): unsure at all n locations
tagaggagacggtctctttccaagtgtgtttttatatataacttctatgcctacaacaccgactcgcctactgagtataatggcactgccactcttcaacgggtttgaactatctccttttgacgcagacggccgacccttggattccctgacaaatccctttcaagaaggagggaatgattacgacataacccagggccccgaccatgaagcacttcaaagtcccatgaccggatgccgacttaaacaagcccaacacgttatagagacaatgctcgtcatttgtataactgccattgatgaagactgaaggcccaactggagaaagataaacgcccanaggcagaagcactacccagactactaattgttgttgaagccccactaactt

SEQ ID NO: 251764 - DNA, 231 bp, Glycine max
ataacgtaagggccaccttcaatgggtctgaactatccctttttgaagcaaaaggaggacccttggatttgaggacaaatccttttcaataaggagggagtgatgaggacattacccatggccaggaccatgaagcacttgaaggtcccatgaccagaggcggacttaaacaagcccaacacgttataaagacaaggctagtcatttgtatagctgccattgatgatgaat

SEQ ID NO: 251765 - DNA, 348 bp, Glycine max
  unsure (1)..(348): unsure at all n locations
cgctcaagcgagcttatgttcttcctccatatagcagtgcctccaggagaacattcaggaaagcccaagagggcctggnttctatttgcacccccttgtttactaaatacacccccagcctttttttggtgattctttttccgtaacgttacggaactttacgaatttcngaacgatacttgttttctttccagaaagtcatgtaaccttacagattacataatcatcccttttttggcttccaggatggtacagaactttacggattgagcattaacacttctttttgacttccggcatgtcacggaacttcacagatggagcaacaatgctttctttagacttctg

SEQ ID NO: 251766 - DNA, 220 bp, Glycine max
  unsure (1)..(220): unsure at all n locations
ctgcangcatgcaagcttaacgcacagaaaagcccactttgaagttcaaagatgttgttagcacaagaactcgcactaatcgcgaagtcaatgtgaaaactaagctacctgaagcttatttaagatcgaggaagcaaacgggaaaaacccaccgatcttaaaactctttaaggaagaaattcaaaggttgagcatctcccttagggaaaccttttttttt

SEQ ID NO: 251767 - DNA, 410 bp, Glycine max
  unsure (1)..(410): unsure at all n locations
tgcaagctttctccgcaaaaatcactatattatcggtttaaggtttctcgccttatatgggcctctttgcttttatcagntaacatggaccgttcaaaagcatgaaattaacatgtaactttaccgcttttgcaagaactacgtaggtctgatttcctcatcgcaattgaggatacctaggagcaaaagccccgcttatgtcgaccaccccaagagatcgttaatggtccaacgccttaatgtttctctcctttcaaaaacaagagatcattaatggtctagcaccttaacgtttctctcctttcaaaatagaaagatcatttaaatggtccaacaccttaaatgaccttttattcagtcaaaatatatatatcttgcaaaaaagataaaaacaacttaaccaacgttta

SEQ ID NO: 251768 - DNA, 389 bp, Glycine max
  unsure (1)..(389): unsure at all n locations
gacttgccgccatattttctcgctggcatatatttacttcactaaggcccgggacctgactcaacaagttgctgatcatgttggaaccaccaaaagtgccactatttccaccacaaaccaaccacaccaagagagacaagccccttctccggtgaccaccgttaaaaagccgccaccaccggggaaatctacctgaataattggttattaccatatatgatcaaattgtgtatgtggattccataaccctttgcgcttttgcttcattttgtgtntctagtcacctttaaagatattcttttcctttgttctttgggcgggctttctttttacttggataccatcgcgacataatgggagtgaaaatccatggccttggaatatgtatc

SEQ ID NO: 251769 - DNA, 219 bp, Glycine max
tgattgaaaaacgggatgccccacattattaccacgacacagaatgcggaaaacagatcatgtggaaactttatgctaaaatgaccttgcctgcaacgatgcagacacgtcttttgaaacaatgtatgactatgtgacgctgcgtgtccaagaatattggcacctattaaaatatacaaacgcttacaattattgttgttacacctatctgtgactaaa

SEQ ID NO: 251770 - DNA, 314 bp, Glycine max
  unsure (1)..(314): unsure at all n locations
cacattctagatctttctttggctaacatacacactagctcaaacttatgaaaaagaacacaaactccatcacaatcatgcattcaattcaatataaagacatacacccatttttcacaaaaagacaaaagggnttcactgccatgtcataaaaatcaagtcaaccgttcaaaatgctccagaatatgcaaatcaactatctataaataaaactagcagggcatgtaatcataaaagaaatattgtactaaaaccataattatcataaaaataatctaaaaggcacaaaaaattatcatcaggaatttaaaaat

SEQ ID NO: 251771 - DNA, 242 bp, Glycine max
gagcctggtttttaggcttctagtattgtctctggtgttaggccccctggatatgattctccagagtctgaattgaaattgaacgacatttttgagtttgagggtatccttacatatgacctagaccttccggatgactatgagaattgtgacttatcaaagggcattttgaagatcctttggccatttccccctatgaactcccgcctatttgttcttcaccgaaccagcgggttaactct

SEQ ID NO: 251772 - DNA, 318 bp, Glycine max
agctttgtttatttggtcttcgcttgtgtaaagatcgatgtgggttcgaaaagaggcaaatttgatcatcctactaggacgactgagaaaactggggcaaatgaagagggtgagaaagagggagaaacccatgctgtgactgccattcctatacggccaagtttcccaccaaacccaacaatgtcattactcagtcaataacaaacttgctccttacccaccacccagttatccacaaaggtcatccctaaatcaaccacaaagcctgtctaccgcacttccaatgacgaagaccacctttagcacaaaccaaaaaaa

SEQ ID NO: 251773 - DNA, 348 bp, Glycine max
  unsure (1)..(348): unsure at all n locations
gacttgagtcatcaagagattatatttttgtgaccatttcttgagnnncattaatcatctatatttcaatctttacaacatcatctctcaacatctttcaatatccttctacataattttctgattcatttctcttcatctttctaaaagtttttgatcaacactttctcttccaagaaaagttctttgntcaaaaacttgttctattaatctttttcattgtcttctccctttgccaaaagaacagaaagactaactgcctgaattcttttgagtctttcttctcctttacaaaagattcaaaagactaaccgcctgagaattcttttgattcttcccttcccctca

SEQ ID NO: 251774 - DNA, 330 bp, Glycine max
agctctaagcttttaggtgaaggtttgcacataaattattgcatgtgacatctataacgcaccccgtcatacaagagtcctttggacttgaaagcgcgaataatgcacaagtccacctaccttgggctaaaattcaacctttatatgaaaaaggaaccccccaggagtgacatcaaactactttggtatagaggatgtataccatgcctgaaaaacatttcaaaactttaaaaatgccatgaatgattatattaaatttcaggacaattagtcataacagaaattctagcggggaaactgctttttcccccacctaattctacgcaaacc

SEQ ID NO: 251775 - DNA, 257 bp, Glycine max
  unsure (1)..(257): unsure at all n locations
taccaatcatcatatacgaacacacttttcatagaatcaatattagagaatctcaagctagaagcatatcttttattacattagaaaacacaactgtncaagagaaataaagaaaatcctatctaatagaacaccataataaactctattaccaggcgcgctcttctcatagntatcattaaaggtatttacatggccccacatgtaagccttactgtcacaagcacataaacacattactccaataatgcatcata

SEQ ID NO: 251776 - DNA, 371 bp, Glycine max
  unsure (1)..(371): unsure at all n locations
tgtttgcaagcttttcttttatcaaagcatattctcgctctngttctccaccccaggtaaatgccacattcttcttcaccagctcattgagaggtgatgcaattgtagacaaattaggaacgaaccttctatataagctggctaacccatggaagctcctaatatctcccacacttttcggggtgggccattcttggatggcctttattttttcagggtccacttggaccccatttctaccaactacaaaacctattaaaactatattttctacacaaaaggtacacttctttatattcgcatagacggcgttttcctaacgactcgaaaaacttggttgagatgtcctaagtgaacatctatgctcctac

SEQ ID NO: 251777 - DNA, 388 bp, Glycine max
  unsure (1)..(388): unsure at all n locations
ctatgggttaaatcacattcacagtaacatgggaaaggcaatatttggagccaataaaccaaaatccactacttaacagcatttgaagtcttttttcatcaatacagttgggtaaaatttgcattataaacttagtaagacataggacaaaaagcactactttgttactattcatattcatctttgcaacaaccactatttttttattaaaaatctagcaagagagtatccatcacttttaaaaattaaccggttgtacaccataaagtgaaccaaacactccctattggcacaaagccaaaaaaccaaagaagcaagggcttcctcctacatgtctggggagaantagacctatgcagaggctcattcagcttccaagactttcata

SEQ ID NO: 251778 - DNA, 367 bp, Glycine max
ttaagaatattcctaaagaagctagtgcttagctacacatacctctctaatagctaagctcacctccttgagatgagaagcttgagcttagctacacaccccctataatagctaagctcacccccatgacaaaaaacatgaaaataacaaaaaaagtccttattacaaagactactcaaaaagccccgaaatacaaaggtaaaaccctatactactagaatggccaaaatacaaagcccagacgaaagaaaaacctattctaatatttacaaagataagcgggctcatacttagcccatgggctcgaaatctaccctaaagctcatgagaaccctatggccttcccttggatctctagcccaatcta

SEQ ID NO: 251779 - DNA, 142 bp, Glycine max
tatggctaactgctaattatgcaaatgatgggtcatcccaacactttcctacaggaaaaaaattgacaatacaactacccaaaaatatataccctacaacatgttagaacaaagaaaaagggaaaacctcattttttaaact

SEQ ID NO: 251780 - DNA, 357 bp, Glycine max
  unsure (1)..(357): unsure at all n locations
aagctagaaagggagnatcccaacatgtcgatcatttttcactgttttcggggctagcatcatctgagaaagacatacctcatatattgagagcactacccaagcagcccagtacctacatataacggcatatgcgctgatacataggagaccccttcttagacatacatggtacatacttactatctgataccgagtctaacgacccttactaacagaaagctccattatgaccttgctataatggacgcccagaagatctcttaacagagccccctgtaaccactacccgacatacacttgctaggactgaatgactcacgtatagcgaatctttcgagtatgccccactcttcc

SEQ ID NO: 251781 - DNA, 171 bp, Glycine max
aacagggctagcaacttcaactaacttaaccttcttacggctctacgccagcacatgaaacctatgctaatagcgccctcttgaccaattgaaagatttattgcttaaaagacagactttatagccaactagaattcactccttgtagactgtaggaacacgcgacctata

SEQ ID NO: 251782 - DNA, 162 bp, Glycine max
gcatgcaagcattttggcttacatcagatatttgttcaatctggtttttgtcccattaatggcacccgttcaaccacaaagggccttcacttaaaacttgacttcaagacaatctttccccgccggcaacttcaattcttgcatgagccccaatccgggaaa

SEQ ID NO: 251783 - DNA, 351 bp, Glycine max
  unsure (1)..(351): unsure at all n locations
agcttctcaaggcggngagcttagttattagaggggtgtgtgtagctaagctctagcttctcaaggaagttttctcaaagaagcttctcaaggaatttttctcaagaaagcttctcaaggaagctacctactctataaatagaagcatgtgtaacacttgttgtaactntgatgaattaaagtcttatgagacacacttcanagttccacttctctccctcttttattccttcaatttcgngctcccctcttctctctttcttttcctccattaaagcatccttctcaagcttcttatccaaggcacattcttggtggtgaaagctcttcatangttattccctagtggat

SEQ ID NO: 251784 - DNA, 359 bp, Glycine max
  unsure (1)..(359): unsure at all n locations
aactcaagctaggaagattatggggtacccgtcacatgttgtagcagagtttggtcaggcgatggagcaagtcgactatccacatccacaaatcacacataaatccaccatccccagttgcccaccttcaactgagctcacgtactcccacgtagcccttatcctcgntcctctcaacaccgggtccccatcaatccctccaagcttccggaacatccaagcaatttcaacatccaaacatcatgaactatcaaaatgaagcaaaaacagggcagaagcagaaaactctggccaaaacacaaaccaataccacaacttttnttactcaaataccctatgaacattcccttcgtccaatt

SEQ ID NO: 251785 - DNA, 306 bp, Glycine max
  unsure (1)..(306): unsure at all n locations
taaacatggtttatttagncttcctacttttatttggcgaccatagagttgtacctggagatatgtcgcgggggtcaggggaccttggggacgtcaggtggggtgctattgcccaaaaccaagcttgaccaatcctgacccaacccgggcatagtcagttagtgagaacctatgacgtacctaagcaggcgagctcttggcagtccaccaataaaagaacaaagtccacgaaacaaggaggcttgtgtggcggctgaccaactatgtatcttgggtggtttctgaaaattaccctctggtaatcga

SEQ ID NO: 251786 - DNA, 251 bp, Glycine max
  unsure (1)..(251): unsure at all n locations
ttcccatagatgcaaagctcacaaaaagaagatgttccaccttgagatttccaaagaagccccgattgctcagaatatctagacctttttcactcatgtggcccatatgcaaataccattgagaattatcagatgagctataggatgcatggcttttagaacttcggcttccatcttgacatcaatgncacgtagctccatcagaacagagnttagctcatcaagatgttccttcagaggagtaccttccc

SEQ ID NO: 251787 - DNA, 394 bp, Glycine max
  unsure (1)..(394): unsure at all n locations
agctntgtgttatcgattacacttttttggtaatcgattaccagtgtttgtttctgaataaatcaaaagatgtaactcttcaaaaggtttttgactttttcaaattggttttaagtttttctaaaagttataactcttctaaatggttgtcttgaccagacatgaagagtctataaaagcaaggctttgattngtttttaaatacacttatacttttacttttccaatcaatcctttacaagccttgaaactctttgaacttcttattcttctttgtaccaaaagctttctgaagttttctggttctccaaaccttgaagactttgggtattcatcttttcattctattcctcctttgccaaaaaaaattctccaagactacccccttgatttt

SEQ ID NO: 251788 - DNA, 352 bp, Glycine max
  unsure (1)..(352): unsure at all n locations
taaaaggcaaatctctctgttcactcttgganccagaacatccccccggagatgagcaacaacaaccccnnnntcccccacacaaaaaaccatataagttccatcaaaaacgaccataaaaaactcaaaatagcaaaacccaaaaccacaaagcagatgaaattaatatcaacttatttttttccctttatcttctataaccattggcatccaagtcaccaaaaaaattatcttctaagaacaaaatctattcttttatgagagcaaaaaccaatattcattcaaataaaaaaatttacctagagctgcctcagcccggaggacagnngaaacaccacacgacccgacaaaa

SEQ ID NO: 251789 - DNA, 292 bp, Glycine max
  unsure (1)..(292): unsure at all n locations
ctgcggcatgcaagcgatacatggagccacattagttttttcccctttatttcccaatctaggccgcctgacactatatttatatggaaatatgggaagctaatgctaacctcttgagaccctttatccttttctcttctttgggagcgaggacttgtatggaacctatgccttcctccataagagncacttaaacattttaatcaaacttttacaaggcttatgactaccataagaagcgtttctgcgcttccctaaaagattcataaaaatcctctttcttcccccttat

SEQ ID NO: 251790 - DNA, 343 bp, Glycine max
tcgccgtatcatgccgatctaacatttttctagcgacatcatccaataggttttcaaggatagactagaataaacaatggccagagtcagtcgctatatagccccgactgatatccttcagccgacattgcgcaatttcttttacaaacgctggccgaaaatgtttttttacggtagatgatgtttcttgtttttgggttcccgatataatttacaatgtaagtcggctaagtttttccgagcgagctcaaccgaagttgagtttcagccgacactggcatgttctcatttattcagccaagatatacgtagcccaccccagcacaaaaaaaacatcattcac

SEQ ID NO: 251791 - DNA, 189 bp, Glycine max
  unsure (1)..(189): unsure at all n locations
tcacatattcaagagttttcgtcctaattccaaatcatagatatgtcataaatagattttgtaagtaatttcccatcaaatcaatgataatacgcataatcatcatggatcaataagactttttaaagtcagactttgcaagaaattggnttttgttgctctggcctttccccttcttttcccttttgt

SEQ ID NO: 251792 - DNA, 323 bp, Glycine max
cagctttgatcttttattcccaactttatccataaacttgttccctcaaacgcgaaacacaaaaataaaagggagaaagcaggaaaggagtaaaaggcacaactattcccaatcacaagagtgggagaaagcaaacttaaaagacaagaaggaaagttcccaatcaaagagtgggagaaagcaaaaaagaaaagaaggaaaattcccacatcaaagagtcggaacaataaaagaaaggaaagaaaattcccgatcaatgatcgaaagaaaacagaagaaatatgcttaaaggtcttttagaccagaccacatctgaacaaata

SEQ ID NO: 251793 - DNA, 374 bp, Glycine max
tgcaagctcgtggaagaatggggcaacttctgaaatattctatagatgggggaaccttctggaaccttatgaaaaagtatggacgagagtccaacagtgttcagactcctaaaatgtgtaaagcattctagagaattgatctctatcctaggatacacgtaatctccaccatttattggggaggtggagtaggataaataagggtaggatccttcattcctaaataatctaaggagagagcctctctgagagagaaaataaatagcttgggaagtctctattctcaagcatgagtaagcctctctgagagagaagataaatagcttgggaagtctctatcctcacggttgagtgagccaccgcagagtgagtca

SEQ ID NO: 251794 - DNA, 279 bp, Glycine max
  unsure (1)..(279): unsure at all n locations
ataaagaatatcacagataggaatagcccccccatagaaagagaactcaagnccgaagaagaaactctatagtatgccctctagatttgatgatatcaanttcatgcattcaagagaaaatagttgccctccatgcctcagctgagaaccctagtactggtaacaattcttcgagnaaagaaaaaaattaatttaggctaatcatttacagggagtatttgncttaatcctttttttctttccctagntagttgntcccacatcatttgtccatcattc

SEQ ID NO: 251795 - DNA, 354 bp, Glycine max
aacgcctgcaagcttatggatggaatacttccttgttggtgcttaacatatgcttgcaactgtttcaaaaaatgcgaaaaatgatgatcctatggctgcaaacccgtcaatcccgcgggtatggcttttgaaaggggggaacataaattaatgaaagcacaaatgctcccccttttgtcatacttatattttggcgcaggggtggctcccccaagagagcttacctgctattttttcttttgaggggaacattaaccatgttccctcctttcttatggattaccgtctcgcctaacttgaacctacattatttataattaggcggtcgttacttatttttaaaacaaacaaact

SEQ ID NO: 251796 - DNA, 150 bp, Glycine max
taatttctcttctatagcatctcctctcaatgagccggagaagaagaatgaggcattcacccggggggaaaaacaagagcaagcctttgctttgctcaaagaaaagcttactaaagcacctagtctatctcttcctgacttttctaaaac

SEQ ID NO: 251797 - DNA, 417 bp, Glycine max
tctgcacgcatgcaagcttacacaaacattcatgagtctaacacacactcaattaatagtcatcatcagtccatatttccaatcaatcatgctcaataaatgcatgcacttgatctcaactctcaaatgcaacgtggtaccatccccaacgaaataacctaagtgtgtccacatgacactctaacttaagaaaactaggcaataagtgtcaaagtcaccctgtcgtgcacatgcaactccccccccatggtgatcaacctgagtgtcattggagttccaaaccgagtgacatgcccccaagtacaagtattcctcctcatgaaaaactacaagtacttactgacaaaggttatactattttcatgtcatatgaagtatgaaagatgggcaccatcaatgcactgattgtggataatt

SEQ ID NO: 251798 - DNA, 411 bp, Glycine max
  unsure (1)..(411): unsure at all n locations
agctttaggagaaaccattaaaactaaggtagttcctattcaaaaatcaattgaggaagcttcgccaagtatccccattgaaaaacctttattcaaacctttcaaagttagtgaaaaggctaaacaaaaaattatggaacttagaaaaactaaatccttaattgaaggcgtaggtgacaatcatagtgaattactaaacaagattggtagtttacttaaggtcattccagatactccccaagcctcagaaaatacatccaaaatggtaacaagaagtacctccaaattaattaatgttattaatgaagatagtgaccaaaactcagataacacaactgagatagaatcagtgtcagagaanaatataaatccaattaattccaaacactggaaaacaccctccaaattata

SEQ ID NO: 251799 - DNA, 230 bp, Glycine max
  unsure (1)..(230): unsure at all n locations
tatatttctagttgactcttgggagagttccttgnaggaattcaggttggtcattttatggcttaaatatacttctgggctatgataaattaacaaattttggtttggatacataataattttgntctttgcgnagagaccctaataatataaaaanatttntttatcattattattttagataggccctcccacanatatacatatatatatatatatatatatatata

SEQ ID NO: 251800 - DNA, 245 bp, Glycine max
aaacgccgccccaacttcgtttaccggtggatcttttcaaaaattgggctggcacttcacaaaacaattggccatgatctgaccggtgggatatttgataatatatctggagggggctcgaagctttcattcccgagaggatttcttatttaagcccttcagcctttgctttcgtgtagcttaagaaaaatggcatttcttcttctttctttcttccaaagccatttctaaagttccaagaactt

SEQ ID NO: 251801 - DNA, 259 bp, Glycine max
  unsure (1)..(259): unsure at all n locations
attccctaaaaatcagaactatacaatataacctccataaatcccccactgtaaaaggacattatataaaaactatttatataaataccccatttatatatgcnataaatccctgacaaaaatattatagaatataaagcacttattaatttttatacatgctcncccttaaaaattaaatgatccatacttaatgatcccttcatatttngacagatcagnatcattaataagatattactttttcctaaaatatcaa

SEQ ID NO: 251802 - DNA, 265 bp, Glycine max
  unsure (1)..(265): unsure at all n locations
atgcccggacctctaaacgcctgcggcatgcaagcttttcttaagtggncttcgtttttacatttaaacctcgaccattgtcgaatagtacctttgcgaaaacgtggtccatacatcttaccgacacatgtagagccttgttgtgtcctctcccctcaatgggaaactntttttccgcaaacaccatgtatttgttggggggtatatgattaatgaagccttctaaaacctccactgaaatatcatgtgctacatgggcatcgtt

SEQ ID NO: 251803 - DNA, 286 bp, Glycine max
  unsure (1)..(286): unsure at all n locations
acacccaagcttggagcatatgattcatatactccaacttgtgatggagtgcctatgatncatactatnnncaaggaaggtcagacatagagactatnccangntctatgtaattaccagaattaggcaattaggatatctgcaattattcctttattattatccatagaatataataatatacttggctagagaaaacactcccggattcagttctctagcttcgcttcctttcaataaattcctaaaagaagaaaagataatatccatgaaagctcacctgata

SEQ ID NO: 251804 - DNA, 315 bp, Glycine max
  unsure (1)..(315): unsure at all n locations
gctagaatgcaagcttgtttatatnacttgtctctatttaagagggtttctgtattgttcgttcatatatgcacgtacgtacagattatcgcgatttttggaggggatatacttgtgccaatattagtgttatgacactgcatgtgcacgtgagtctctgcatattaaaagattgactcgcttttaacactttttttttgtcttagcccttttattcctaaggaaaagatgtcttcactaaccccaaaataactagcaatattttattaattatgaattattctctgcaaagcttaattatttgattgattatct

SEQ ID NO: 251805 - DNA, 351 bp, Glycine max
  unsure (1)..(351): unsure at all n locations
agctagaaagaacaaaagatcaaaaatcttattattaaaagtctcactatgctttncttagntattcaagctgacttacttttgcctaactaaggacaccaaaaattgccaagcctgagaaaaattaggaagaggtaataaatttcaagttcttgcaatgcacaacagaacattcaatttttcaagatttatctaattttttgagctgnnttaattagaaacctgcagcatccaaagtctcaagtatgttaggaggaacaaaggaaaaatgagctggttgtcagaaaacggagnatcccactgagaatgtaagaatacaaccataatgtttgtctactaacacaagcttat

SEQ ID NO: 251806 - DNA, 205 bp, Glycine max
tatgccatttttgctttaagattaatgtcccactaaaactaactttccaaaagttagccttcgcaagaatggcaccgaagaatcttgcctcaaagaagtccaagaaagacaaagcggccgaaagatctagttccgccccggagtacgacagtcaccgctttaagagcgttgtacaccagcagcgtttcgaagccatcaaaggatg

SEQ ID NO: 251807 - DNA, 414 bp, Glycine max
  unsure (1)..(414): unsure at all n locations
agcttcatgatgaatcaagattgattcanagatgtttttatgataacacagatgatgacaaaggtcatgacaaacagctcacaggtcaatcaaagaatgagttcacgatgttcaagatataatcaagaacacttcaagattcaagaggaaagttgaagaacacttcaagattcaagaggaaagttgatttcaagaatcaagattcaaggatcaagctttcaagaatcaaaatcaagattcaagagtcaagattcacgaatcacgagaagggcttatcaagataagtatgacaaggttctatcaaaaactgagtagcacatggattnttctaaaacatgttaccaaagagttttactctctgcgtatcgataccagaagcaaatggacttgaaaagtttcaaatgaattacaatg

SEQ ID NO: 251808 - DNA, 107 bp, Glycine max
ctgcagctcctcatcaccccgcatcccatcatttatattcaatataactcctagacctgagtccccctgatatggctttttagtagcggttgaacaatcctacttcc

SEQ ID NO: 251809 - DNA, 134 bp, Glycine max
cttaagccccgcgcatgcactttctctgatttctggtcggctctcatgtatgtctatacaaaattggacttcaattcactgctttgcgccaggacgatcacctctctctatagacattatttcgcctattccac

SEQ ID NO: 251810 - DNA, 142 bp, Glycine max
caacccgcgctcactgcgaatcatctccctcccacttatttttttttgcagccaaactcggggacatctctcgtcgaaatacgccctgtcggagaccacacaagacaatatttggccgtattactcccctggtcgcgagacg

SEQ ID NO: 251811 - DNA, 96 bp, Glycine max
attttcatgacacaaatgcgcagatgatgatttgcgaaatatatgcgacactggtcatgcctgtccctatgcggacactcaagtgtgaaaatttta

SEQ ID NO: 251812 - DNA, 270 bp, Glycine max
aagcaccgagcagcagcttcaataaactccgaacggcttctggatagtatgaaattgattctcaggctccgattcaataagcttctcaatatagcgcgaatggacccccacgaactatgaccttcgattttacgactttttgacaatcagcgttcagaatatcaccaaacgccccgcggaaagaaaacctttaatatcggagtctgcgtgaataagctttgaaatagcgcccgatccgccctcaaaggcacataaattttgggaacgcgc

SEQ ID NO: 251813 - DNA, 250 bp, Glycine max
  unsure (1)..(250): unsure at all n locations
catgcaagctatatacgactagcctctaatcgggtatgtattcatgcctgangcataatccagtattagcagcaaaaagaagttaccatgaacatataattgattatgtccaagttaaagcataatccaatatgagcctttacagttcttatgccacgagactcatgaagcttaagcaaggaattgttttggaatgtaaaaaatctccataaaacattgggcattttcggcggctttaccttatttttaa

SEQ ID NO: 251814 - DNA, 270 bp, Glycine max
  unsure (1)..(270): unsure at all n locations
ctcttaattgtctttgtgcgtggcgaccaccatcaacacagaacttttcgcacctactatatgttgacttgaccaacgctgttattggaaagttgcgacaatctttcaacaccttattcacacaatctgatnggtggggtgcatgcgaccatatcgccggccagatgtatccgaagccaagctccattatttctttgaaacgccaacaatccatcttgctatggctggcactcactgacgaaacacttcttaagttttgatcaccacatg

SEQ ID NO: 251815 - DNA, 346 bp, Glycine max
  unsure (1)..(346): unsure at all n locations
agctatatatctctcccatgcaatgaagaaagacttatatattctttattggaagctcgttatccttttcttgatagcttcaattctttattctggaaataatcgattgaagaacttgtctctgatttgctcccatgaggtgagactatggtgtggcggagaattgagcaattcatagtgcacttccctctaatgaaaagggaaanagtaccatcttgattgtgactgtctttgatatcgcgattcttactaatgtccatattctttggaatcgctcaaagtgggtatgaggttctttagagctagatcctcgcaaattgagtgtaatggagccgattatatgatc

SEQ ID NO: 251816 - DNA, 295 bp, Glycine max
ctaagacacgcagctgcagctgttaccctggaactcctatatcttcttattatttggcgtgggccactcttggatggccttgattttctcaaggtgcacttggaccccatttctacctactacaaaacttaataagactatattatctacacacaaggtacatttctctatatttgcatacagggtgtttttcctaaggactgaaagaactttcctaacatagcctaaacgaacatctaggctcctactgtttactaaaatattatccaaataaacaacgacgaacctacctatg

SEQ ID NO: 251817 - DNA, 334 bp, Glycine max
  unsure (1)..(334): unsure at all n locations
catcatttccaatatgcatgtgaattacgaagcatcaacaagaataaagccaaggacaatgtgcaatccatcaatggggcgaaacacaccacatgattatgatgagggagggctcaaattctcacaaagagaaacccatcactttcaaattgagctntctaaactatcatgacacgtagaggagaaacaaggagttcacgcgacaaatagccagaactattatttccaaacaatacccacccttgacaaacccataattaaagaaaacatgcaagtcgacatgcccccaaatgaccccaaaggaaactaaaatctgcgaaacaacaccttaaca

SEQ ID NO: 251818 - DNA, 216 bp, Glycine max
atatatattcaacacccgcctttaataaaacaccgatgttaacaaatcgatgtcgcgttaacatcggcttatccaaaaactatgtaattgatgaatgtcgaatcggttcttgaaatcacgtaacaagcatctatataaaacgctgtaataagtaccttctttgttatctaaaccgtgtaacgttctcttaactcagttccaaaatcgtgctacgat

SEQ ID NO: 251819 - DNA, 63 bp, Glycine max
gaactgggggaattttttttggtaccttggcgggcccctaactattcttgcttggtggcgcca

SEQ ID NO: 251820 - DNA, 197 bp, Glycine max
ctctaagtcacctgctgcatgcaagcttcttaacccggctgatgaaaatgaatgtgcggctactttatgcactgctctcacgacaataacatggcactaaattgctgggagattgaacccctcttctcaatcaaatatctcgcttcaacacgggccatagtctccaagggctccaccactgcgagcatcaatcatac

SEQ ID NO: 251821 - DNA, 405 bp, Glycine max
gctttgaagatagtgtgaggacaagctctattgcagagcttgatagagcctgtgtagtcgaagagaagttcaagtccatagccatcaaagtctgaaatgagtatgatgaactatgggacgtcaatatggccaccgctgaagccttggaacgagaaaccaagaaggcccgaaaggaataacacgaccaaagcaaagttctgaggggctttatagggcagcagtactgagctcaacctccgaagaggtgaaaggaatcatcacgggtcaaaggcttgatcttgaagggcgagctataagctcgccttatgtcgaatagaattctgtccaacagttaagcgatactaaacggaatatgtgggccatcatcgatgagtgcaaagagaagctaaatctagcggcgactca

SEQ ID NO: 251822 - DNA, 431 bp, Glycine max
  unsure (1)..(431): unsure at all n locations
ngtaggccttgtatcttcttcatcaatggagtcctttgcttcttgaagatcaatggcagcaaaatgaaataggtggaaaggtgattggagacgccacttcaaggagaagatgagtcaagaacaagctcaccaccataggaagccatggataagagcttgaaggtaggaaaagatgagtggaaggagagggagagaggggaggcatgaaatttatgtctgaaataaggtctgaaatttgaagtgtaattctcaaatgatcaaagttgaaaaatacacacacaaggcctctatttatagcttaagtgtcacacaaaattggagggaaatttgaatttctattcaaatttcacttgaatttgaatttatggagccaaatttggagccaaaatttcactaattatgattagtgaatttcagctatggttcagccc

SEQ ID NO: 251823 - DNA, 383 bp, Glycine max
  unsure (1)..(383): unsure at all n locations
atccttagagacacctgcagcatgcaagctntgatgagtgcaacataagtcggccttctaggtgtttaagatgatttgtctttgtttcaaggaagtgttgacagtggccactgtggaggatctagtaatgtaatcaggcaaagtgtggtgagaatggccgtacagagctatatacaaagacattctgatggcagagtgaaaggtggagttgaaccaatattctgcctagttgagataattgaaccaaatgcaaggatgcttactgacatatcatctaaggtaagattccaaacttctattcaccacctagtgttgaccatccgtctctggatggtaggcaatgctgaactgtattctgtgccttgcatttagaacaatccttc

SEQ ID NO: 251824 - DNA, 435 bp, Glycine max
cgaaacatatagattgaatcctagttcctgttaaggacttattttatatatctgtcaactggccattagaattgatgaacccagtgataatctccttggacaataatatctctcgaatgaaatgataatccatctctatgtgtttagtcttttcatgaaagactggatatgaggcaatgtgaagagctgcctgattatcacagtataacttcatttgcaccacttcacaaaattccaactcttggagaaattgtttaatccacataagttcacatgtaaccatagccatagatcgatattcagcctctgcactaaatcgagcaacaacagtttgttttttgctctttcaagcgataacatttcctccaataaaaacacaatattctgacgtaaatttcctgtctatgggacaaccagcccaatctgcatcacaat

SEQ ID NO: 251825 - DNA, 386 bp, Glycine max
  unsure (1)..(386): unsure at all n locations
gactataccttcgactgaacacttgttttngttttgtctacgcccggattcaaggcatgttgcagcaccggctccgcttccctaactgtactggaggcggttgcagtggctatatcctctatggctnttcggagttntaacatgacctccgagatggacgccatttgatcttttaaggccgatagatcagccttcatctgttcctgcacgcgcttttcattatccatttatctagatcgagtgttataggggtgcctcggtgtttcctagttatatgaaatcctaagaaataacaacggtgagatccaccaacatattatgcaatggtatcggacacttgatccacccaaattcttaatacgaatgagtcataactcttatttata

SEQ ID NO: 251826 - DNA, 443 bp, Glycine max
  unsure (1)..(443): unsure at all n locations
atagaatactaagctntgcggatntggtctttgcgagtgaaatgatccatgtgtgtctgattttatgtaaacataatcatcctgcttggacgaatgacaactctggggcacacgacgagggtgaggacgaaggagaagcccgtgctgagactgtcctacctatccaaccagatttcccacgcaccctacaaacgtgaatactcagcctcttttcaaagcatctccttaccaaccggccaggtgttcaccaaggccattcctcaaatcaaccacaaagcctacctaccgtacttcccatgacaaacaccacctttagcgtatacctatgcacctgccattaaacgaattttgcatctagaaagccttataaatcaccccaattactgagatctatgctgacttgctgccatatctacttgatggttcaatggtatccctatccc

SEQ ID NO: 251827 - DNA, 428 bp, Glycine max
ctatcagaaagctctgaaagaagctcataaagcaatatctttttattacacgagtgaattcacaaactaatgcaaatgaaacactaagtatttatcttcaaatataacatgcaacccatcatattgacgcaatcgtaacagtaaatggtctaagatgttcatgtgacattggacatagccactacataacaccgtaaactcttgagagaagataaataaaagaaataaaagatatcaacgacagattaaaaaaggggtttcatttgaaaatatatacaagttattttgcacctatagattctgctttgtttacagagagattgaactttgccttccttagcttttcttcagcatcatattaccagcctattcatatgaacaagaatccattttaaccttatagaccgctctgcgaactttgacaatca

SEQ ID NO: 251828 - DNA, 361 bp, Glycine max
ggaccttaagccaccgcagcagcaacttccaagagctacaaccatttttaagctgtgaacacttgctgtaactgagatgaatgagagtcttgtcagacacaactcaaacgaacacttcttttcatatatctgcgttcagaatcatgctacaccctctctatctcacttactctttcttctactacactgaagcatgctattcaagcttcttatcctatgttcaatttggtggggaagctcctatatcatggcttacctcctagaggatggtgccaactctcacctctactactatgtcttatcactggatctccaagggggagaatcatcattaaaggaccatattgagagatatatgata

SEQ ID NO: 251829 - DNA, 420 bp, Glycine max
cgaaatgaagagtaatagtggaagttgtcacttcattgttgtttacttggtaacttggatatgtaagaatcaaggttcaattgtgttgtccactattaaagcagaatacatatcaattgcaagttgttgtgcttaacttctttggataacgtactaacttgaagactacaacatctatgagagtaaaattcctatcttctatgataataaagatgttgtcggtctttcaaaaaaccttacattgcattcaagggcaaaacatatagaaattaagcatcattttataagagaccatgtttagaaagggatagtggatttacagcttatacccactgatcaacttgctaacatattcacaaaaccccttactgaagaaaggttgattttgttaagaagtcaacttggaatggactttataaa

SEQ ID NO: 251830 - DNA, 422 bp, Glycine max
  unsure (1)..(422): unsure at all n locations
ctttaaaaacaagaggaagcaatgtttcttattgttaacagacaatgtagctaatcaaagatattaacacaatttaatagttcagagagatagagaacacacagaaaaagcacagaaaggctgacattgtcgcacaagactccgcgccaggaacagaagtcatcattatgcaaagcatcccaatcatgcagaacatctgccacattgctgaatgaagacttaatcttcatcaatgcttgtcctatatacattntcacgtgcatgaaaaatcaagcatatcaaaatctcatgggtgtataaaatctatgagcaatattatntgaacataagagaattgacaccttgtatgactccatatacaataactctatctctcacttgctctttatattctccatataaaataatattatctcaaaaat

SEQ ID NO: 251831 - DNA, 244 bp, Glycine max
tcctgaccatcggaaacgccaacccccgacactctcttcttctaaggcagagcatttacaacaacattcaccactcgagcaagatgggactgagggcggagccttgactgctaacaagcacaaagatagaaccaaagagggaggaccccaactgcgccaacgggggaaagtggactatgaccttcccaaggggaaaacgtgaaaccactcggtcgtataccgcaatgctgacattaacacctgc

SEQ ID NO: 251832 - DNA, 387 bp, Glycine max
actcaagcttatccacttagttacatctctctgtagagctgcgttgtatattattaaattaatcttcaggttaacttgagatactgccagatacagatttttatactatcaattaattaattgtacttttgaagtaattatcataaagataaatttttttaataatataataatccataatacagtaatgtagttcaattaaacctgcttatttaatcacatactaacacaattcctcggaattataaaataattatttaacatagatatttataaaataaacatttctttatgcgtaataatatagtaatactttgccctgtatataaacctagacaatatatatgcgccattataataaaacaacagtctttaataatcaacaga

SEQ ID NO: 251833 - DNA, 432 bp, Glycine max
  unsure (1)..(432): unsure at all n locations
catagaaactcagcttattaacagnattatttctaatttaataagtgccttatttattaaggacaaaagacctgagcattttcttcagcatcagcttcacgaaaacgacgacttcagctgcagactaagcccatgttatctgttacaaagaagatgcattgatcaagctccaccagaaaccgctgtttcgattttcaatactctcctttattgcatacttgcattatgcagcatttatcgtagcttatttagacttgtggaaggagcttattatgacatttctataaaaactctatttattagctcaataaacttcctggtaaaacttaaccaattaagttctttttaaattaggtttaactaattaacgacataagttatgtttaattgattatactagtcttcacaatccagcttatagaccaatgctca

SEQ ID NO: 251834 - DNA, 425 bp, Glycine max
ctttttaaattaaagaaaaaatacattactttttcttttttatatcagcccatgttaatcgttgattcttattaaaatattaatggaagatctgacccaccatcttttcttccacgcttccctttctcccttaacacttaaacctaactttaatgatatattaaaatacattcaacaaccaaaatgataataaatgattaaatataaggacttagtatatcgtcaaatgactaaacgtgcgcctgattgtagataaatatgagagaaatttttctaattatgtgtaaatctgatccctttttttcttattttaattaaaatatttattcctaattacatgcatagcatacccaccataaaagtgtgggttactaattactccgccaaacaagaaagaaaaatagaaggaaaaggaaagcttacat

SEQ ID NO: 251835 - DNA, 383 bp, Glycine max
  unsure (1)..(383): unsure at all n locations
agcatgaactgaatgaccaagacacaaagttgtgtattttaatccatgaacctgtggccgctgaaaagcctattctaacaaactctggcaacatcgtcctcaagtcaatgacataccaaagactagaattgccattaaaagtcggattattagcataagtaaggaacacagataattttgggtgcatagttgtaccatatccaagcattaacgaccgatccgtgcttaatgctgttcttccaagtgacattttgaacagattgaatggagttgacattgatatctacatgatcagagctcggaacccattctatattgaagctgcnaactcaaccgcaactaactgatctttcttagtgttgaatgcggattcattgctgaat

SEQ ID NO: 251836 - DNA, 435 bp, Glycine max
actaagcttatagactatattataaaagatctatgtcaattgaagagtctatacatgtttcctttgatgagtctaatgccattcctctaaggaaggattttttagatgatatttcagattccttagaagatacacatattcatggaaatgactctaaagaaaaagatgaaggaagcaatgaggattctcaagataatggagttagaggaaataatgaacttccaagagaatggaatgccttaagagatcatcccctcaacaacattattggtgatatatcaaaagtggtaacaactagacattctcttaaagatttatgcaataatatggcttttgtatctatgattgaacctaaaaatataaaagaagccatagtagatgataactggatcattgccatgcaagaagaactgaatcaatttgaaagaaacaatg

SEQ ID NO: 251837 - DNA, 486 bp, Glycine max
agctcttatgtgaaaggatgtgactctccacttttgaatttcgaatttcaacgattcacaaggcacttggtaactcgattactcaaaactattgtaattccgattaccagcatttttggataattatatatggacacgtatgtataatttcatatcttgaataacttgtttacaaaacatattcttgcttattggtaactgcgattacacacatatcttggtatatcgattagcatgagagtaaacatctctttgttaaacatgtttagagaaaaatcatgtgctattcaatttttgagacaaacttttcatacttatcttgattgagccttctcttgattcttgaatcttgagtcttgaatcttgatcttgattctcgagatcttgaacctagaatcttgattcttgactataaactttcttcttgagtcgtgaatacttcttgatttacttgagttatctcttgatcgatctctgattcacttg

SEQ ID NO: 251838 - DNA, 386 bp, Glycine max
  unsure (1)..(386): unsure at all n locations
tgtgaaagacggagatntgacggatcaatactttattgaagatgattatattgattagaattaataataaatatacacgtgacaaatatacctttggatgacatgatatctatactgtaatctaacgaattgaatatctggccattcataatctacatcgactatgcttatgacccctatattatcactgacgagaactcaaatgcctgctctgtgatgtaaatcaccatatcatttcgtatttcattggaacagtaattaccttgagtacttttctaccaaagtttctctaagaatatgtaccattgtgattatgtaacaggtctttggatctttacttacgacctcaaagtagattgttatatcttgtcttttaagtacaatat

SEQ ID NO: 251839 - DNA, 433 bp, Glycine max
tgctcttcttattagttctgttttggtcaccgaagagatttttttgtttttgaaatgctgagaagcctaaacaagaagccaaccgaaacagaccctctatctgcaggaatcatgctcacgattgtttcaagaatttttcggtttttctccttattagattcttctgtttgagacgctgaactgccagaacttttgagcttcgtgaggcccggtagccaccggcaggcatagacatgcaaagcttctccaataagctgcggagggagcacataggttgatctaatagccatgattatgcacctgaaaagatctatgtcaagatcagaaacatcctccgtccaccaatcctttggcacagaatggtgttgtttttttgtgtaacctcgcctggtgtaggtgtaggaccatttgacctgcacagaatcatcgttta

SEQ ID NO: 251840 - DNA, 414 bp, Glycine max
  unsure (1)..(414): unsure at all n locations
ntggacaagctaacatgcaaactataaactgaaataaaatactatttactgaaacataactataaacctaaattataaaatgtactaaaagcataataataataaaagtgttcaaaagacaggaaattagaagtcctatcatgggtcctgtggagcagaaagggcaaaatccatggctgtgacatcatcctcatccttagagagctctagcataggtgtacctgctggtgatgcctacagagaagacaactctagcactggtgtggtcactggtgatggctgtggagttgtctctagagtagccgggtcagtctctgggatgtctagcgctggaatctctatgtcagcctctggatccgcatctgtattaccctcctgagcagccttttgctcttgctaaagcttctgggctgt

SEQ ID NO: 251841 - DNA, 418 bp, Glycine max
  unsure (1)..(418): unsure at all n locations
aactcaagcttcatggatttctgcaaagcctggtgtctgatatagactttatttttgtcagcaacttctggcatgagtggtttcaattgagtggcaccaaaatccaactgagtaccacgtaccacccacaaacggatggccaaacggaggtcctcaaccgcgtcttggaacaataccttcgttcatatgtccatcatcggccatctcaatggaccaaattcttagcacttgcagaatggtcttacaacacgaccatccactctagcaccggcgtgactccattccaagagatttacggcaaacctcccccgtctatccctcattatttatagggcacctcctcagtggaagctattgatacaatgttgacagacagagatattntgcacgttgttctacaacgccggttacgcaaagc

SEQ ID NO: 251842 - DNA, 398 bp, Glycine max
  unsure (1)..(398): unsure at all n locations
agctngcttgcgagtctcactatctcacattttctttacactatctgaaacacacaaggacaacccttcctctgtgttagagtacaataaataaaagatgttaagggaatacgaagtgcaaacacagtttttatactggttcggcaatagtctggtgcctacgtccagttcccaagaagcccgcttggaagtttcactatctcacaaatgctttacacttgctgaaacacacaaggacaacccttcctctgtgttcagatactntacaacaagagactctcagtctcttagccctctgatataaagagaagaaaagatgatgatctctttgaaagagatagaggttacaatgaacacttaattcttattgaatacacaatgtttgacatgaatatgat

SEQ ID NO: 251843 - DNA, 421 bp, Glycine max
  unsure (1)..(421): unsure at all n locations
tgctaactgtggtgtgttttacccctcttnttgttggatgaatttgcctccccctttcattttgaatgatgttgatagagatagctccaaatttcctttttacaggtttaaatgattgtggtttcatccgccttccatggattcggtttggctccccatgggtttgtgtcttgttttctttgatatatctcatgattggggttttttttagttgtttaggggtattagtgccaacctagttgggatagttccacttcctagctattgcttctcatatttattaaaaaaaatacaacttaagttattataccatcaaaggaaaaatataattataagaagaaatcttggactcttatataagtgtgtgtgcacgcgctacgactgactaatgagagaccaggaaaaatttggcttttaacat

SEQ ID NO: 251844 - DNA, 179 bp, Glycine max
tgcagcatgcaactatgggataattaataactcaattctattatcttcgacattgtatgataaagaatggtgggcggtaaacagtcaacaggagaataaactatacgtaccacaaatgagaatgttacaatgtgttaatatacatactatacaaaaaaattattatgaatgaatgcctt

SEQ ID NO: 251845 - DNA, 430 bp, Glycine max
tgttataaatataaccaattctcagtcccctcagagacttatttatgatatctgccaacggatcacttgagttaaaaaaatcttgttgcaatatctcccgattccatcttctctctgataaaatggcaatccacctcaatatgtttggtcctctcatgaaagactgcttgattgtcacatattaacatcatttgtgtgtcctcttcaaacttgagctctctgagaaagtggtccacccatatgagttcacaagttaccaaagccatggccctgtattctgcttcaacacttgatctggctataacacttttcttcttacttatccaagatatcaagcttcctccaatcaatacacaatatcctgacgtggaccatctatcactaggtgaccccactccatcttgatctgaatagccaataatttgagaat

SEQ ID NO: 251846 - DNA, 410 bp, Glycine max
tcttagagccttggttgagcgcggtattggccattgttttacggtcgccaccttcgcagccaccggttccacgcctttatgggagacaatatgtccaagatattcgacctgaatctgcgcaaagaagcatttatataacttcaggacgaaatgattatcaagtaatacctagaatgtggtctctaagtggcgcaaatggtcctccattgttccactatacaccaagatgtcatcgaagaagacaatgatgaattgccagagataaggcccgaagagcaggttcatggtggcctggaaggatgacggggcattgcaacacccgaatggcattaccttaaattcataatgtccatggtgtattctgaacgccattttcgggacatcatcggagttcatgcggacttgatgat

SEQ ID NO: 251847 - DNA, 219 bp, Glycine max
ttaagtcactgagctgcacttaaagggactcgattttacatgtgtaatgtaaactaaagatgatgtctctatggtcacgaaagactgtgatttgctgagatatgtctccatgactactgctgaaaaattatagcgggaaacaaatatggctccataggaataatggagcaagaacaatttccgatgggatctatgggacaacgtcaactggcttaatct

SEQ ID NO: 251848 - DNA, 437 bp, Glycine max
  unsure (1)..(437): unsure at all n locations
gacctataaaactcagcttgaatgtntagttgcatgttggaaaaaatggggttttaaagtttttctcaaactatttttgtaaagctttgaatgttttagttgcatgcatgtcttcttctcttcttttttcttttttgtgccttggaagagctcctaatacaaaggagactctgtccaatttttcttaagatttttaaacaaactttggatttcaaaatttggggctatgagaagggagaggtgattgagcatttttagtttactatttttatatttttcttagcttattttacctttctttgactcttattttctcaccttaacttagttntagtcttaggcaaataattgggcttaattgacaattgttgcttattttatnggatgtgtgcttacttgacctatttgttcttcattcttcttcctctcttcaactc

SEQ ID NO: 251849 - DNA, 425 bp, Glycine max
  unsure (1)..(425): unsure at all n locations
tgataccgagtgaactttgggccagttcgagttaaaacgactacttagatggagatgtttgtttagtggaaactaaaagggataccattggagaaataaaggttaataagcaatctatcattaacttttgatcatcctacattggggaatgacttagcatttgaagcctttatacgtgaaagcccagatatatggtaaaaaattgtccatagtatatgtaaatgggggacccattttgaatatgatgtcattgaccatgttgaagaagttaggtaaaaggcgtgaggagttaattcctacaaatataaaaatgaccaattctatgggaggagccactccaacattangggttttggtagccaaaatcacgatttgacctaagcccatgtattcaacattcttgattgtggatgccaagcaatctt

SEQ ID NO: 251850 - DNA, 445 bp, Glycine max
  unsure (1)..(445): unsure at all n locations
agcttatactagagttgaatnttatgccagctatttacaatgtaaatattattattattattataatattttgaattgcagattctagttcggataacacttaattctgatgagaataattaattaattaattaatttgaattgcagatttcatgaagccagctcacgatcagtactgtttacagccatgccaatgggtatatactattcattcattcttttgagattctactcggaatagaattgtgttagtatttattttcttcttttttttaattctctataacggttgttgataccttaaagcttgtgcgtgattgggttggctccttcccacattgctttcaaggatgaatgtggaatcacagccgttgatttcaatgttggaaagtctgatcgcagcgggataatagtcactgaatagcagaagaaggtatgtatttct

SEQ ID NO: 251851 - DNA, 430 bp, Glycine max
tcaattatggtagcattgctgaaaagaagtaaaattaatctcttttgttggacaccttgtaaggcataaaggaccggtaagttctgctttgcgtttataagccaagctgttgttgagttttaattgtccttaaccatatatattgtttgcttaatttaaaatcctatcttatatttctttgttttaggttggtggtcttgagttttatgtcattgcaccaaatcttcttgcatctggggctaaggatggtgaaatttcttgcccaattttgtaattctacttatttctcatagatagagacaaatacattaagcacttttaatttacgcaaattaattattcaatattttgttatgtgacctgttcttgattgccaaattgtttgtagcagagtgtttcaaggatagaattaatgtacaatgcttgcata

SEQ ID NO: 251852 - DNA, 375 bp, Glycine max
agcttcaagctgtacaatggctccacgatgtttctcataatggcaatggtctgtatggtggtcggcatatgatcataaaccacaaagtctagcgacaggtattgatttttgattcatggccatgtgggtgaccaggttaaccaaggcgtctagtttaccttcaagcttcatagtttcatatgatgcagatgagtttgtggctacctcatacactcctctaatgactatagcattatttctggcgctaaactgttgggagtaggatgtcatctattcaattaaactcctggcttctacaggggtcatgtctacaatggctccaccactggcagcatctatcagacttctctctcatgtactgagtccttcataaat

SEQ ID NO: 251853 - DNA, 432 bp, Glycine max
  unsure (1)..(432): unsure at all n locations
tcttattnttaaagataaaataacacaaaacgaaaatattttttataaaatttaatatttatggttatactccaaattattttatccaacttttaatttaaagaatgtttaaagtaaaaaaataataaataataaacaacttctacttattttttattttaacttaagtaacttttaagaaagaaaaaaataataaagctgggccaaacggtatcttagtattaaatatggaatgagctataaatgcatgttggtatttaacaaggatgggccaaattccataaagataagaaccgggtgaaaacaactataaaatatgttttgtctaaagaagagaatgacattctctttgtctgaaagggaaaattgatgcaatcctaccccgcaaaggcattggatagagaactcaaatatattgggtcagagatgcaa

SEQ ID NO: 251854 - DNA, 452 bp, Glycine max
tagcttggaaagatgcttcaatggaggaaaagatttatggacagaaagagagagggggggagcatgaacatgaacgaagaataagggagaaaagttgaactgtgagttgtgtctcacaagactctcattcatcaaagttacaacaagtgttacacatgcttctatttatagactaggtagcttccttgagaagatttctcgagaaaacttccttgagaagcttttttgagaaaacttccttgagaagctagagcttacctacacacacacctctcataactaagctcaccgtcttgagaagccttcttaagaagattcctagagacgctagagcttacctacacatacctctctaatacctaagctcacctccttgagatgagaggctagaacttagctacacaccctctattatatcttagctcaccaccttgacaagaaacatgacaata

SEQ ID NO: 251855 - DNA, 428 bp, Glycine max
  unsure (1)..(428): unsure at all n locations
tgttatcctgttaggtggaagaacccggtggaccgttcggtcccgcctacaccctctttcggagccacgtgaatgttattgcttaaggctgttcatgtgtcctccgctttcgagtttggagctgagttccatgattgcctaagagaggaccctcaaggcaatcctccattctcatccttttccggagccacatgaatgttattgcttaaggctgttcatctgtcctccgctttcgagtttggagttgtgttccatgattgcctaagagaggaccctcaaggtaatcctccattctcatccttttccggaaccacatggatgaattgcgttgtcattcatgtgtcctccatttttgagnttggagctgagttccatgattgcctaagagaggaccctcaaggcaatccttccttcttatgcttttccag

SEQ ID NO: 251856 - DNA, 333 bp, Glycine max
  unsure (1)..(333): unsure at all n locations
cggctattcctccttcttatgacgcatggacacttatccctgacccaactacaattcgtgcgaaaggccggccaaaattaactaggataatgaatgagatggattgtgtcgaaccatctgagcactgacaaaaatgcagtatatgtggagccgaatggcataacaaggcgtcactatccaatgcaatttgagcgtgagagttgtcacatcatagattatgtatgtaagcgagtgacctgtattcgntaagtctcttcatgtatcgaattctggcgatgataaatttgtacttaaaacatacttatttgaatttgacattactatttgtgggtt

SEQ ID NO: 251857 - DNA, 432 bp, Glycine max
tctcatttgatccaattgaggaggagcaggtagcctatttcactcaagccaaccccatagaactttagcataagagacttggccattgtcatattcaaagaatgctgaacatgaagaagaaagacatgacaagaggtctaccggtattttctgatcacttgccaaattgcaatgcttgccagtttggtaaacaaaatagaatgccatttcccaaatcaacttggagagcctctcaaaagctgcaactaattcacactgatgtggcaggacctcaaagaacaccatcactacaaggtagttcatactttattcttttcatagatgattttacaagaatgtgctagattttttccttaaaattcaagcatgaagtggctggagtatttataaagttcaagaagatggtggaaactcaaagtggctgcaagattc

SEQ ID NO: 251858 - DNA, 369 bp, Glycine max
  unsure (1)..(369): unsure at all n locations
atttattaaacatgagcttcatattctaaaatatttaatatatttgttggattaaagtcaaatgaaattaaaaattattttacttctaaagcaacaaatgtttccttctcacttgttacattacaatgcacaaacatactcttataactttaaatctaacatagtcttattatttcatctgccaaatctagctgcacagaaacttggatattctcggngccaagattccacctagctaccatttagcaaaatctcaatggtttattgggtattacaacatttagtaaaaaagagaatgcgatcaatgatcaattattctgctggagagagaatccaattgcattgacttcttctgcttctatcttttta

SEQ ID NO: 251859 - DNA, 428 bp, Glycine max
tacagagaaagataccacctaagtgcagacgaagagccacttactctttctaaaaggggtcaaaataatacctagtgttaattaatatacagaatactgcaaatgtttctctttacgacgagaaagaaaactgatttttaccgaattatattttttaataaaaaattaaatctataaatttcattctatatttaaaactaaataataatttaaatctatagataaaaagtatctattaacttaaatcgacattcataccttacaataattaatgattaatttcgattgagaaatacttgattcaccactaaaaaaataaagaaacattaatatatctcctgggtatctgcttctacctattatccactatgtatcgaatcattcccatattagtttagaaaacttcacttaataacaactttaaaaat

SEQ ID NO: 251860 - DNA, 415 bp, Glycine max
atcgactacatatattatacaacactatctgacatcggttaatttatcataaaactatacgagtcttgattctcgcccgtaataatttaaacgacttccatattcatttaaaattaattatgcacataatcttaatttgctctctctattctatacgcagaagagcatcagtacaagactaaccttgcctacctaataattacataccttatgtgccaagtgtacagcaataattttaaaattatagatcacaacctaacggcaccacgactatattagatgatcaccacgcatcgaattcaaattctagattggtgaagactacatacacccccttctcaacatttataatctaaggcaactccacggtaatatgctacaatgcttaacccccccacttactctctgaaattca

SEQ ID NO: 251861 - DNA, 212 bp, Glycine max
ccttgcgctcaacatagagccacgcggcgctacccggaacgaaaccttcaatcaacgatcataccgcacctggcacagaagacaataaagaaaaggaaccaaacgtcctcaagaaagcgccgtgagaagagcaatgcaacacctgaagcgaaccatgtagagaaagaaaccacctgccacagaaacatttctgatggcgggacggcacctca

SEQ ID NO: 251862 - DNA, 343 bp, Glycine max
  unsure (1)..(343): unsure at all n locations
tagcttgtgcaaancaattcactctagcatcttatacttatcatgcatgcatctctttctttacccacatcctcacgtatggtttctcagggtataacaccatatctattcgcgccacaaggcatccctatgccaccagatccaaatgtataacgattggtgatcaataggagactctggaacagatgaaagccgacttgttggatctgaaagaacaaaaggtctacatgatggatgccttgttaagaatgattgacgttattggaaagatcgctgtcactgcttgcgctgtatgtcacctgccgaataaacccactctcttggatctgacaccatcctctct

SEQ ID NO: 251863 - DNA, 412 bp, Glycine max
tccacaacatgcgagcgaaacaacattcaaacagcatatgtcttcacagccaatcaaaacagagcagaggcagaaaactctgccaaaacaccaaccgaaatatagtctttctcacttaaagaccccagtaacaattccttcgatccaattcgttaaccggtggattgactccaaaattctactggaagtctatagtacagaagcctacattgtgaccgctgggatctactaacaaacatccataactcattctgcactactctctccacagccaaccacacacaagcattgttctgcacaagccaaaattctgctgcacctattggacagcaaaattctgcataagtgcagattgcgaaaatcacacttactctcatccaatcttggccaaatcaattcctacaaagtccca

SEQ ID NO: 251864 - DNA, 206 bp, Glycine max
gatattgtacaatctttaaaacacatgcacattcttggactagattctaaaggaaaacgagaacgaagctatgtagatcctccagtataagtcaaagaacataatgatcttccaatagagtggaaagcttacagacatcatccccttgacaacattactggtaatatctcaaaagggattacaactatacactctctcaaagatta

SEQ ID NO: 251865 - DNA, 432 bp, Glycine max
ctctaacgatgggcctctcatctcccatatgtcctattatgtatttgtcctcttattctctgaggccaaagcttcccaagcaagactcatatccaagttactgtgtgatttttggtaaccgctcatgttcgaatatcataaaatctagagcattattttctaaaagggttcctcataagaaacaagataagtttacttccattcgccacataatgagcactgggagccttcaaaagtatttgggcttccccattctaaaaggccaccaagaaagcaggacttcaactttattattgaaaagctctagatcatgttgacttcttggaaaaatcgccttctaaataaagctaggaggttggctctagccttatcagttttggcttctatccatccctactactgcaactttattggcttccgcacgatacttgt

SEQ ID NO: 251866 - DNA, 410 bp, Glycine max
tgaaagttctccaagtaatggctctctcctttactttttttttttaaggcatgtttctaagttttcatatatttctgtgtgcttcattccttacaggtattgtcatggttatctatatgatacataaaattgtttctcctctgaccttcctacatacctcttcctctaagatcccaagatgaaaatgcgtacttttcagcttgagtaacatcttttaattaatcaatctcagctcagaatggggatatcacatcaccaaagcgaaatgttttaatggaaagaaattctttctcttcaccactgaaagatcgccttcttcccttctacagccttaagtgataactacccccaactcctttgcagtcagcatttgccacgtataacaagaatgatctggtcgacttatatat

SEQ ID NO: 251867 - DNA, 340 bp, Glycine max
gctagtataaactacgacacacttactatttgtattgatgaatatgtggcagttaaatatacgatatgcctgattctaatgtgaagctgatctctgcttatctctaacgcgcatattgaatgccagtagtttctttcaagcgtgtatttcactaatacattatctgtagattaaaaatctacgttatgcctatcatactaaaaaaataacattaacttcttgtgcatgcatgtgtaagatgtgcttctcttcgaaatttgaatatgccttatatttatccgaaatatgcttataactcacaatatataggttatccgtgactactttgtctttaattatt

SEQ ID NO: 251868 - DNA, 423 bp, Glycine max
tatctagacacaatatatttcaccttaaatatttgttatctaaactctcttctacgtaatgcggaataagtaaaaaactcggtggattaacaacaaattattgctttgtgtttgaaattattaagatgtaacaatgtgatgaggaaactaaactcaacaaactttttgcttgtagggtctacctattatgcaaactttaaccctcaagtctcgaccatgaaataaacagtagaggtgacagaaaggttgggatggctcggatgcaaaaggtacccaaatccaaagaccaagctggcaacctatatggacacacgctgacaagcccaggactcttttttattccatatacatccgaaattgtttttttttttctctctctttgggtactaatgtattttgatgtgcatgttcagcatcaattaa

SEQ ID NO: 251869 - DNA, 318 bp, Glycine max
  unsure (1)..(318): unsure at all n locations
gtcacctgccgcatgcaagcttaggtgtccctattgtctttatgaatgttcaaaccgagtccctacttactaaggtaaataatgatcatgatcaactccctaattgcattgaggcacattcagttgtggcatgctagtagcacaatgttaatttactactattatgttgttttccaacatgtcacttgatgtacacaaactgttgttaagcctctcttatcgtcacactaatatttttgaagggtactaattcatgattcacatgaacttttgtaaattccacgagtccacacacaccaaanaaataaaaaatcatat

SEQ ID NO: 251870 - DNA, 425 bp, Glycine max
taattgtggctgcctcagccttgcttacattgcaaccaatatactctagtactttgaatcatcacaccttgcaccactgtgctctctgtcaagcctcgaccacagaagatgatgcctgagcttaatgcattgactcactcattacgaagactttcgatacaagagattttcatgttcatggattcattctcaactctattatactcattcaaggttatcactaagttgaatcatcgaatttgttatcaattgttaagaaatccgagaggggttaacactaaaaaaatttacaccaaagagtcataagcaactatataagtgaattttgacattatactttaacctaaaatcttaaaactcatatctatgggtcttctcctcacttatatgatatttaaccctatcattttattcaatatgaaact

SEQ ID NO: 251871 - DNA, 287 bp, Glycine max
  unsure (1)..(287): unsure at all n locations
tgcatatatacctattatgggttaactcataaaaaggagattaacgaggggaaaaggacctaccatcctacagtgggtcacaaactcaagataagaaaggagatcaactctgcacatagggaaatcaatctctattcttaagagtgagagatgatgctccttgtatgtagaggagaaatatagaatacgagagctctgagagaagagaatgatattctcatatacgnggttctatgagcttcgaagagaacatatatatatgtgtgtgtgtgtgtgtgtgtgtgagt

SEQ ID NO: 251872 - DNA, 430 bp, Glycine max
tgttggactttttttccaccaaagtctatgtctcgtagatattttagtaataaatctttctctactctaagcaactcaaaaacatcagtatgtttctcaaatttattggaaatgtctctattatgcttgtttgtttccataggcttatggttaagggcagcttctgttgtcttgccatctttctccagatgaagtgcatactctctactggcttggtttttctttgagtagtccatgctactgttgcctttggagttttcgttgttaaactctttctcagtgcgtggttcctttttgcgatttttgggagaacttttgcctgcagcatgcaattttttgctaggttgcccgacctaatattaatattagacaaaattacaatattatattcacatatatccatgttaaataggagatcaatctataattg

SEQ ID NO: 251873 - DNA, 430 bp, Glycine max
  unsure (1)..(430): unsure at all n locations
gcttggcgctgcatatgacagtcagatattgtttgtatgtgtcgccacgtgcaggaacaggggcagtttggttgttgtttggtgcggcaaaaggacgtgcgtgagagcacagtttggctgttgtttgtgacagaaaggtcattggagctccgacagtggccagaaaagtcattgggaaagcttacacagcttaaacagtgggtccccaatgagacacaattttcatgatacctcaatcaaaaatatcaagctttgataccatagagaagttttattataattgtgtgtgtaggatgaccatactaatcctttatttataatgagcanaagagcatctacattaattacatagaatcaatctaacatgagtgataatgaacatatccctaattgctctctaatcatacataagagaataatatgtaatcta

SEQ ID NO: 251874 - DNA, 435 bp, Glycine max
  unsure (1)..(435): unsure at all n locations
tgttgaaattgccatgcttggatgagttagacatacccattctgttttagggttttgtgatgatgtttatatgctgagattgcctatggaaactgttagagatgaagggtagagttaacctagggttagaaagtgagaatgtgatgttatgagtggaaaaagagtgagactttgagagttggaaggctaagtctgaattctgtggtaaatggaggttagagtgagttaatactagcttgaaatttcatttagaacatgtgagaaaggttaggctgagctagagagaaaaacaaatgaccaaagtgaaccaagagccatttctagggcaaaattgggtgttgaagagtcaaattttgatttggtggaattntaggtgtaaatccagtttgggcaagtttagattgatgttatggacttgtgtgaggtgagagtttg

SEQ ID NO: 251875 - DNA, 321 bp, Glycine max
tctttcttatggttgaggaaaaaagtcactcgtttgatcctaaatcggaaaattgttggaaaatcaccgtcctccgtcgttcgggggatcacaaatttcaccgtctcacgtctcgttgtcttctgtctcggctcaccggtagtctgaatgacttcatcatcttgccctagggtctattgttccggcttatttattattacttcgaccctttgcggcttttattactagtatttctgctatcaaaaatattatctcctgtcattgaatgaatccgtattctattaaatatatcgttgtcatatgctgacacgtggaccaaaa

SEQ ID NO: 251876 - DNA, 427 bp, Glycine max
  unsure (1)..(427): unsure at all n locations
nttaaggaagttttctcaagacagcttctcaagaaagctacctagtctatgttggatcgagtggtctcagaataattaagaagggggggttgaatgaattattccaaaaactttaccaattaaaaatttactcttttaaggcttttacatatgttgttaagagaatatggagtataagagaaacttaacagaaagtaaaagcgaaaattaaatgcacagcggaaagtaaaagagtatggaagaaggaaacaaacacacaagagtttttatactggttcggcaacaacccgtgcctaccttcagtccccaagcgacctgcggtccttgagatttctttcaaccttgtaaaaattcttttacaagcaaagatccacaagggatgtatcctcccttgctctctttgaaaccctagtggatgtaccctccc

SEQ ID NO: 251877 - DNA, 443 bp, Glycine max
  unsure (1)..(443): unsure at all n locations
acttaccttgaatttattctctntgtatgccctcttgagccttgttaccctttccttagtttgaagctcactacaagccttaaatgaaaaacaccaagatatcaccatatccttaatgaagtttggagctttggaattgtcttggaaataagtgtggggggtttttgcttcattggataactatttcttgtggctatacatcatgatgtattctggccatacttgatgtacattcgatattgcgtaaatgttggacatgctgattganatgtagttctcaaagctatcagcaaaaataatcgaaaaagaaaagacagcaataagttgatgaataaaatctaatggacaagaggatgaactcttggtctactcttatgataaacatatcttactactttattttctatttcttctaatatgcactatccccattgtcctctatt

SEQ ID NO: 251878 - DNA, 451 bp, Glycine max
gcattacggaccttaaaactcagctgtatcattaacggatcagatactttttgcagctactacacttgtgtaatcaatttatgatcagcttgcaatcaattaaaatagagatttttaacttcataagaaattttctaactttagaaacttttcttcttactcctacatgatgatataggatgcacatgtgaaatgatagagactaagatgcaacacataatacaacaatcaatacaaatatcactcaagagagttgggcatgtagaagacaagacttcttcaagcttcaagatcaggtcttcgtgttgctcccattatctctaacagtttggtgaacgtatatcgtgaaaaatttactctcattttcataagcaaattaacggagttttcatttaaaaaacattgaaatttatgcagtttagaatagtgatattgtcgcgacaaggcgggt

SEQ ID NO: 251879 - DNA, 341 bp, Glycine max
agcatatggaacgttgtcctgtcaatgatctacaaacatgtgacataatacattctaaacaagaaatggcttagcaaaaagcgtagtcatgataaattcattgaggcacatgggtcacattattgctagcttatatatctatatacctcctcttataacaaatgattgagtcacatgtgggccaaaagaatataacatttattgatgaaacagagcatcccataatttattaaaagatctaaggggggaaccaacatgagaacaaaatatttagggaagcatcccatcccttaatttttatctaagggtgattagagaatgttctcatttctcacaatcat

SEQ ID NO: 251880 - DNA, 426 bp, Glycine max
  unsure (1)..(426): unsure at all n locations
tgtcatttcatccacatcanactccttattcaatctctcattaacaacatccaaaacattcccttccacatatagttgccacacccagctcacaagaggcacatgatattccccatcttggtaagtcctccttccacatgcaatttcaagagccacaaccccgaaactataaatgtctgattccttgctagccctaccatcgttgatattgttggtagtttattagatgatagttgatagttgatagttttagagaattgttttaaaaagaaggctatgtcattgatttcttggattgatcaattacaacataccaattgcctatttataagctcaagtcactaacctctcaatggtgatgaatgtttctacattactttaggtctttctagaggtctcatgatagaataatatcatgataggtct

SEQ ID NO: 251881 - DNA, 440 bp, Glycine max
  unsure (1)..(440): unsure at all n locations
agctntgagccaaaatcctaactcaccatttatcttgacccagggtgagaatgtcaatccttaccctcggaagcgaaaagaatagaagggaaatttccaatcaaagataaggaaagaaggaagatttccaatcaaagagaaagccaaaaaagaaaagaaggaaaattcccaatcaaagagtgggagaaagcaaaaagaaaagaaagaaaattcccaatcaaagaatgggagaaagtaatacaggaagaagaagaaggaaagacagctcctgatcagggatcgaaagaaaacagaagatatgtgcagaaaggtctttggaccggacaatatctgaataatacagaattgtcaccaaatgaacacaaagaaagaaaggataccacgacctaaaatggtcttctccctttgataccaaccaaatcccgtcgctacgacttttc

SEQ ID NO: 251882 - DNA, 433 bp, Glycine max
gttctaatatgaataacctaggattcacttagcgattttgtggagagaaaatgtgtgagagatctctctaaaactttatgaaacagatattggtaataaaaaaaatagtattttccaagaccaagtcaaagataagataaaacctagtctaacaaactaaatcaacaagaccaagttaaacaaattatttttttttataaacaataaattaatgttaaaaaaacattttctatatttaattaaatagacatggtattgaaatatcaagaacatatagaacacagaaaacacaagatgtttaactattattattattattattatgattattattattttaataaacacatataatttaattatttatactaattgataattctttatatcttaaatgtataagtttatattattttatcagttaagatattat

SEQ ID NO: 251883 - DNA, 446 bp, Glycine max
  unsure (1)..(446): unsure at all n locations
agcttaagctccttcgactgcacaagactcttaatatttgaagagtatccttgtggaaccttcacccgacgaagacactgacaaaaacttatcttctccttnttggacaaagtatggcaagttgggggcaagtaaattttcttcccatcataccttggatgcaactgtgatcgtatccccatatcagctagatcttgacgggtattcaagtcatccttcctcttgccttgaatgttaaggagcatcccaatcacactgtcacaaacatttttctccacatgcataacatcaatacaatgtctaacgtctagattagaccagtatggaagatcaaagaaaatggacctctgcttccatatgcaactcttacttttatccttcttttgggtctttccaaatacagtattcaggtgtngaacccgctgatatacctgctcaccagtcaa

SEQ ID NO: 251884 - DNA, 429 bp, Glycine max
tcttcacaagggttttctcttattggagcattggggcttgatcaactttgacactgccccaccttcttcccatgcggatgaagagtatatggaggaggagtattgcaaggtttgcttcaaagagggtgcccccagttagtttccattttgaattttgaatttcaaattttgatttgagtgcataatagttggttctattattttgatttatgtagtttgaaacttttgtttttggtttctgaattatgagatctggtttcagatctgcaatacctgtgcttgtgagtttgatttttgaatttgtatggctttattaattttttttcagatgtgtttcgatttcaatgtgaagaaccctacttgtgcatccatcacgtatgggatctttctcagcatggattgctccactgttcacaaaagtctcggcat

SEQ ID NO: 251885 - DNA, 420 bp, Glycine max
gatccctctgatccttatgtcatcaagggcctcatgtataaactaacacaaccccattatgttactcttgttctcctacaacattatttcaagcattgccttagtaaaaaacaaagaaatgactcaaacaagaaaaggtaattactaatttatgatcctcctctagtgacttacattacaacttgctatggtaggttgacaaaaaacaatttgaaaaaaaatcttctctacatcgagcatggaaaaagagaagaggccacccttttgacatggggcaaaagagtgggaacaaaggttactacattgagccaacaattttctccaatgtaaggtgaattctaactccgcgaaatttttgcaatctgatgaaatcatgcaaacaatattcacaattaagaattattgtttgtcaaaatacaa

SEQ ID NO: 251886 - DNA, 356 bp, Glycine max
attaagatgaacggccataaagcacaaaacaaggtcataataagacatctatgacgggcaacagaggaaagtgtgaaaaacaaaggggtattcatttatagtggtcaaaactgaaagatactgaacactattaaaacagaccaatggggatagttctcagctgtcattgagaatattcaacacaaaaatatgaacataagaaaaaaaaaaaacatgttaaatcttgaatatgtggataagaaccaactctttctacatgtcccaatcaaagggctaacgcataattatcaacaacaatatcatcctagttgatgacctaagtaatgccactaccaacatccggtgatacaggcaga

SEQ ID NO: 251887 - DNA, 353 bp, Glycine max
tatattatcaatatcaatagaaacacaaatctcttcaatacatgtagacagattctaataccagaacaaataattcattatcctgccacctattgacaatattaagaataaaaaagatatatatgcttccaatagcatgtaccaacttcaccaagaattgactaacttgtactttgactttaagaaaatatattgccttctgcatacaatacaacatttgggtggctttcatcaaatactcagggagtgatagcaaactttctctggcacaccaccgcgaataaaaaacaccagccatagtgtgaaacgtgcgtgatgctaaacaaataacctttcttaataagtttcctaat

SEQ ID NO: 251888 - DNA, 423 bp, Glycine max
  unsure (1)..(423): unsure at all n locations
tgtgattccttagtacatactcattaattggcgaattcttacttcttatgtgcacgncatatactcggtatacgaaccttataattctaagtatatatcgttgtagcatggcgttccgccttaattgcattaatagtatggctggctgcgatttcttgttcttaatgatgctaagactttatagccggatgactcctatcaagttatatttcatcaggaatactctttagaccgtaccttctaatactacagcaacctattctttgtgttgtgtgcttaactcatataaatcgattacacttgaaagcctgagaataattaattcttagtgttatgagactacatcaaaccataggattatagatgtttctatcacaatcaagcgattggtgatgtcttcatatgggagtacatcgcggccat

SEQ ID NO: 251889 - DNA, 432 bp, Glycine max
cgtgcaagcttcttatccaaagcacattcttagaggcgtagcttcttcttccatggcttattccctagtggaaggcacctcctctcacctctgcttctttgtctccgctgcatctccatggtggaaaatcaccattgaaggacctaattgaagctcaaagatccttcctccatagaagcttcacaagcgagcgttcatcacactggcttcttaactccgctatggcttgaatactttgatttttgagctgaaattctaattacataaaatagacattcggacaaaatctgtggaaaagaatgactaaaacacaaataatgaaaagaaaagttataatttacatcaaagacacgtcacaaaacaaaaaaatggttcttgtttgctaaaatgttatattttagtgttcacaacctattgtttgagctctttttt

SEQ ID NO: 251890 - DNA, 426 bp, Glycine max
  unsure (1)..(426): unsure at all n locations
ttagcaactctttctttntgtttagtcaaaacttctaatgctcttaatctctcctcatctaaatcaaccaactcatctgacatcattttccaataatggtcgattggaatgtccatttgtttttgtaccctggctgattgcaaatgtatttcgaccggaagtacagcatcatgcccataagtcaatcgaaatggggtagtattagttgattccttaggagaatttctacatgcccatagaacttgatctaacgttttattccaatttcttggtttttgggcaatgtgttttttaatcaagttaattacaattttattggctgcttcgacctgaccatttgcttgcgcgtaatatggtgttgaggttaataatcgaaagccagtttctttggcaaattcttgcatttttcgttcagtaaaaactgaa

SEQ ID NO: 251891 - DNA, 386 bp, Glycine max
  unsure (1)..(386): unsure at all n locations
tgcagcttgtgattgctgatactactatatatggaatagcccattgcgttgactgagaataacaaaggcttgaccacaacagcgctgggggcggcaacggacaatggtctgtcagataaacctggtgtacatgaacaaacattatatcatgcgttgaccgtgccaaacgaaccagcgaagtcattgcataatagttacactaactatattcaatgtacctgaacaaaaggatttgcaaacacgtgaccgacacatatgatgcggtggccacaagagtcaggtggcgtgtgacttctaagagggatnaatgtcatgctttggttgtgggacacgatacaccgattacgttataccgtgaaacaaccacatatcccatgtcgtgtata

SEQ ID NO: 251892 - DNA, 425 bp, Glycine max
  unsure (1)..(425): unsure at all n locations
gggttcgaggtacttacccgttgaagatcgaagaacgatgatgaacgaatgaagaacgtcgaagaacggttgaaacctttgcgaaattcttcacggaaaacgttacggaaacgtttcggaagcgcctcggcttaaattttcttcacggaaacgatttttccaagcaaattcgaaagagagagaagtgccaaaggggctgaacccttttcttcttcacttcctcccctatttatagcaaaataggggaggtggttgccgcccagctcgcccaggcgagccaggttgcttcctccagaagcaacagccttctggaggaatattctggagggcccaagtgggcctgggtgctatttgcacccccatttttactaagtacacccccctctgcttttttggtgattctttnttcgtaaagttacggaaac

SEQ ID NO: 251893 - DNA, 207 bp, Glycine max
actccaaactctgtctgaagcttaaatttatagatactgttaactgctgaacattgtgcagcacagcatatctcatcagcctattgaagagcttgggctctgccataccgcgacgcgtgaattcaagattgagcagggaaactgaaccatctctgtcatacaaaacgccagacacaaatttgttgaatttacaacattgttaagaag

SEQ ID NO: 251894 - DNA, 428 bp, Glycine max
cttgtagtgggtggaaccaacatgtgacaatacctacaaattctctgcacttgcctgcgttaaaaagcatgcatcttgcatatgtcaattttactacaagtgacaatgactgtgctgagacattctcatactttctcgtcttgagtactttggtacttgaagatttttctttgcataatgatgcataagccctccgcatatttaatcataccctttggatatataacaccctttcccatttgagaatacaacaacaacaagatttcaaacttgtgttgtctactctagatcttagagtgtgttccgataagaaatttaaaattccgaaaaattttaaattttaagaattttaaatattttaattgaaattattttatttttaaaattttgtgtttggataaaaaaatataaaacggtgaggatgaaag

SEQ ID NO: 251895 - DNA, 312 bp, Glycine max
gacttgtaggattcaatttaggcaaaattggatgagggaaagtgtgatttctaaaatctgcactttatgcagaattttgctgtcaaataggtgcagcagaattttggctttgtgcaaaaagtgttgtgtatttgctggttgtggaaagagtagtacagatttggttttgaacgttttctagcagatcccaacggtcataatgtagatttatgtgctagagacttccagtaaaattttcgagtcgatccaacggttaacgaattggatcgaggagaatattactgtggtatttgagtgtgaaagctatgatgt

SEQ ID NO: 251896 - DNA, 432 bp, Glycine max
  unsure (1)..(432): unsure at all n locations
ngaaattgataatggaagctctcgagaaatacaaatggtcataacttttcactcggattgccgattcaggtgcataacatatcgagacgctcaaaattgaacaacagaagctctcgagaaattcaaatggtcataagttttcacatggatatccgattctgtgttataatatatcgagacggtcgaaattgaacaacgactcgagaaattcaaatggtcataacttttcactcggatgttcgattcaggcgcataacatatcgagacactcggaattgaacaatggaagctctcgagaaatacaaatggtcataacttttcactcggatggccgattaaggcgcatcacatatcgagacgctcaaaattgaacaacggaagctctcgagaaattcaaatggtcataacttttaactcagatgtccgattcgg

SEQ ID NO: 251897 - DNA, 300 bp, Glycine max
ggggccaaaaagacaatcttgggtttctcagggccagctgaaaaagcaagagccttgcctatgtcaacattactcccagcgacaatgaccgcgcagagacattctccacctctctcgcctgactgccttgagaccagaagaaatttcctcattaaggaccgccaagccgcacacacataaaaacaaagccctaggacaaatcacacgaagcaccatatgagaataccaccacagcaggatgacgaagctgaatcgtgtatggttgaacttatagagcgtgccaacaataaatatggaaac

SEQ ID NO: 251898 - DNA, 341 bp, Glycine max
  unsure (1)..(341): unsure at all n locations
agcttgctcttatgtgctactcattgctctatttgttgaaaaatccctaataatatgtcttggcaacactctatcggttaaactatcatttcatatctcgagtctatcctaattgcttgccttttagatgccttatcggtgacttgccatatacggaattggaaaggaggatcggcgacatcccttgataaatttgagtcaagaagtaacgggaaaaccaccttactagctgttggacttataaacactccaaattgagtgactctccaaagagagaacgatcaccaaaaattcaggacctttttgtaattnttataattgagaatgtacttaccttcatt

SEQ ID NO: 251899 - DNA, 359 bp, Glycine max
  unsure (1)..(359): unsure at all n locations
cacggtgcacaaccacgtgtncacattcacaatgcgcgcataaacccaccatcccctgttgcccacctacatctgagctcacgtactcccacgtagcccatatcctcgtgtctctcaacaccggagacccatcaatcctcccaagctcccacaacattcaagcagaccaacattcaaacagcacaagctatcacagcgcagcaaaacagagcaaaggctgaaaactctgctcaaacaccaaccagaaacacagcttggctcacttaaagaaccccagaacaattccttcgatccaactcgttaaccgctgaatcgactccaaaattgtactggaagcctatagtacataagcctacatt

SEQ ID NO: 251900 - DNA, 427 bp, Glycine max
tagacttgcaatagtgctaaaggttctggctttagtttctctatattgtcgacaattaacttgggttcctgtcttcatgatttttaagtttactgcgcaaagttgtttcaagtttggtctttggcaagtgcgtacaaagatattcatgacccgctgattaataggaaagattcaacacctataggatatgaagagacttttggtgtactgctaaattgctgatttcttaatatgatgcaaggctaactcaatgatgtctactccaatatcaatgatatagagtcttggaaattgtgggtttttgcttaaaaaaattcaaatattgaaagtcttatttccttaatatcttggctctataaagattccaataaacaagaagaagagagacacttatcttcaaataattgtattgtctcttacattgaaa

SEQ ID NO: 251901 - DNA, 281 bp, Glycine max
  unsure (1)..(281): unsure at all n locations
aataattgtacatatttatctgaataacacacctctcatattgttcatagaagttattactgaaaagataattattctattcatatataaaatattaataaaatgcatttgactatgttatccaaatagagaaatttgaaaaaaagaaattcacattctcttatccaaatacaaaaactttgaaaataatgaaatttaatttgtntatcctaacatataattntgtaaacgaatgaattcacatgaagcattcgaaattttagagtctaaattagaattta

SEQ ID NO: 251902 - DNA, 364 bp, Glycine max
gtgtgagcccgcttagaggtatgggattagtttattgcaattgaggttctaatgaatatgtgtagggatccttataggattacattggggtttattttgggatgtttattgaattataatttttcctttaagactatacataccatattgttatgctttacgtaccaagatgtgcttatgagaatcgattgataaatttgagtgtccttgatgcgttaatggtttgacctatgactttgaataattgcgcgaaactatttgaggggtgctactccccatggtgtgataaaccttttgtatgaattgctcttttgagattatgaaaatgtggctcaaatcgcgaggatgtgatataatgaacttg

SEQ ID NO: 251903 - DNA, 422 bp, Glycine max
  unsure (1)..(422): unsure at all n locations
cttgttctgaanactcatttaaccccaataacttttctatctttaggcctttcaactagctcctatgttttgtttttgtgtatcatagacatatcctcctncattgcaattttccattttggatcttttagtgcttcctcacagctagcaggttcataaattgctacattacatctttgatagatgtcagacagtagcctttttcctcttattggaaggtcatcttctaattcattctgcataagttatgttgattactctctgggatgattgtctccactattgaggaaaaacccagctatttatgagttgttccaatcccatttctgaccttcattgaagtgcacatctctagtgactgtcatctttttagtttgaggatgatagactctgtaggcttttgaaactgaaatgtagcccac

SEQ ID NO: 251904 - DNA, 149 bp, Glycine max
ctgacgctgcagctttaacccaagtttctttttttttttttaaaaacaagaaagatagggcaaaaaaaacgtgctattgtgttaaaaataattaggtgaaaaaaataacctagtgaataatgaagttttcatgataaacctctttatac

SEQ ID NO: 251905 - DNA, 420 bp, Glycine max
aattataaaaacatagatgcttctccaaaacactgtatgttgtatttgggagatgatgaaaaaagtttggatgcttgtaagcattgtggtacatctagatggaaacccaacaagaagaagaaaatagctgcaaaggttttacgttactttccattgaaaccaagattgcaaagattgttcacatgtcgtaagactgcaaaagatatgagatggcatgttttggaagacaataaagatgggttgttaaggcatccaagagatggagaggcatggaagacatttgatttaatccatcctgagttttcttcagatcctcgaaatgttcgtttaggccttgctactgatggttttaatcctgctaggaccttgagttctacctatagcatctggccaatattcttaattccatataatcttcca

SEQ ID NO: 251906 - DNA, 441 bp, Glycine max
  unsure (1)..(441): unsure at all n locations
cttgccttttatgaggatagaatncatgtgtatgacggacaaatacaggaattgaagaagatggttgcaaaagaagaggcttattgtcaaggatatgccactggagttgaagagctacagataaaattagcaaagcaacagatgaagacaaacattcgaggatatgccactggagttgaagagccacatgaaaaattagcatagcaacaaatgaagacaaacatttagacaaacactaaggtgcattggggtcttcctttggggtttgttatgtgttgtcatagctgcatttgcaattaagtagatcaagttgtgatcataacggtctgggtttggtgttagtaatcgaaggacaagtttatatgaccacatgattatgtatgaattttttgttgtaactcatactcatgtttcagggctatgtattgtgcaatacattga

SEQ ID NO: 251907 - DNA, 438 bp, Glycine max
ctaagcttaaataatacttggaaataatggtaataggacgctacattatctaatatgcactcaaaaagttttaacttaatgttctttctgttttgtttaggctagagcataatcgaacaggatactgataggctgtttttgcgtacatgcatgattcaaatgttattctagatgacatgctacctagggtccattgacagtggcaatatagtagcatcagtttaaattattggataattttcaccactcgttagcaatgaagaaaactaaattaatatttaaagaatttaatagtgttggtggtgttaaagaacacttatttcttactatctatttaacaatagaatatcagaaccactggaacaggtttttgaattagtatcaacaaaatgtcaaaatagaacatgcattgccataaaaagacaacatgaatgcaaa

SEQ ID NO: 251908 - DNA, 409 bp, Glycine max
cacttgtggactataccttcgactgaacactgtcttgtttctgtctgggcccggattcaaggcgggctgcaaaaccggctccgcttccctaactgtactggaagcggatgcgatggctttatcctctatggtctctctggagttttaacatgacctccgagatggaagccatttgatcttttaaggctgatagatcggccttcatctggtcctgcacacccttctcattatccattcttctggatcgagcgttatatgggtgccttggtgttttcttagttatgatgaaattcctaaagaaataaacaacgatgatgatgccaccaaacatgagtatgaaatggatgacggaccacttgcatcaccccagtgtttttaataacatgatgagttctaactcttatttata

SEQ ID NO: 251909 - DNA, 446 bp, Glycine max
cctatgaaactcagcttctcaggaggtgagcttagttattagatgggtgtgtgtatcttatctctagcttctcaaggaagttttctcaaagaagcttctcaaggaagttttcttaagaaagcttctcaaggaagctacctagtctataaatagaagcatgtgtaacacttgttgtaactttgatgaaagtcttgtgagacatactacaaagttccacttctctccctattttattccttcaatttcgtgctcccccctctctctttctcttcctctttcttttcctccattgaagcatccttccaagcttcttatccaaggctcatcttggtggtgaagctccttcttccatggcttattccctagtggatggagcctcctctcacctcttctcctttgtcttccgctgcatctccatggtggaaaatcaccattaaaggacctca

SEQ ID NO: 251910 - DNA, 428 bp, Glycine max
actaagcttttatccaggctcatctaggaggtgaagctcccgcctggcttattcttatggaggcgccaactatcacctattcgctttgtctgccgcgcatcccacggtggaaaagcacccatcaaggaccccattgaagctcaaagagctagactccatagaagctccacaggcaaacttccaccaagaatcttctggatcagggagctaacgaaaattttaatgcaggtggaccttactatagaaactctgacttgcagcatcctactatacctgttgcatttaacactatagcaattcccaccacaagaatgggataagaggcaaaggagatcctggagaccttcaggaaagttgaggtgaacatacctgtgctagatgccgtcaagcatatccccagatacgccaagcttatagaggagatgtgc

SEQ ID NO: 251911 - DNA, 334 bp, Glycine max
  unsure (1)..(334): unsure at all n locations
ggaatcgataccatatatgtgtaatcgactacacagngcaaatgttgaatccacaatttaatcagctgttgtagatcatttcaggccactggtgattgattacatcctctagtaatccattaccagagagtaaatatcttgaaaaagactttttaacttaaatttcttggccaaacctttcgctacttcaattaaaaaattccttcctattaacaacactcttactaagactttagagactgactctgaaatccatctcgatatcattaatttctctgcttgaaataagctatgagaaacatgtgaacctgtgcatcatcaaaacattcaactt

SEQ ID NO: 251912 - DNA, 428 bp, Glycine max
  unsure (1)..(428): unsure at all n locations
tcctcaacatccaggtaaaacaacattcaaacagcgcantctatcacagccgagaaaacagggcagaggcagaaaactctgcccaaaacaccaaccaaaatcacagcttttctcacttaaagaccccagtaacaattccttcgtttcagttcgttaaccgttggatcgactcaaaacttttactggaagtctctagtacataaacctacattttgaccgttgggatctgctagtaaacatctagaactcattctgcactactctttctacaaccagcgaaacatagcacttttctacacttatgcaaaattctggtgcacaatctcacagcaaaattctgcataaagggcagatttcgaaaatcacactttccctctgtcaatcttgcccaaatcaaatactacaagttccaaaacatgtatcaatcg

SEQ ID NO: 251913 - DNA, 215 bp, Glycine max
  unsure (1)..(215): unsure at all n locations
cttatggagactacaactggtatgcttatcatatgtatgctnttgacttgatgaaaccacaagacatttggtggattgtcatacaccattctacattatctgaggcattgcttgatgagctctttatcttcatcaagactctagactgatgattatacctatagatttgaaaaccacccttatttactacatgcacatatggatccttaaatatc

SEQ ID NO: 251914 - DNA, 426 bp, Glycine max
cggatacaatgaaccatcgatttttaataatctcgtactcatatttcacctctctttcattgaccacaaatttgcgtatcaatagaggagttggagatggatatccaactgttgtcaagccattccacgaccctgttctcattcttatatcagatcccttgaattcaatcatctgaggtaaccctcgaagatcaatttttatagcatattcttcctcatcaggatcatcatcacttttccaagaagaaatagatctttctagtccagtctctaagttccatccaagttttattcctggcatcaaggtatcacccggataatcaaaactctgccacaagacgccgttctcgctatttttaccacaaaatttcccgaatcaaaaagcaaccattgggtattcactgattgcttgaaccatattggatg

SEQ ID NO: 251915 - DNA, 345 bp, Glycine max
  unsure (1)..(345): unsure at all n locations
agctngantgcttgattgtaacccatgactgtatcttatatgctaagccatgatcaacttcctcataccaaaacaaggagggatcctcaatattaggtaacaacacaatggaactggtcttcataatgaatagtactgattatgagacaaccaattgttagacattaagtatttctgtgcaatttacttaaatatccttcattcctaaatggtgtgctatgtttgaaaaaactatgttcattgttttattgagggataagctcttaagtctgctgaagtttgaggatgtatatattttgaccttttgaaatgcagggactaggaagtatttagatatcacaaatg

SEQ ID NO: 251916 - DNA, 435 bp, Glycine max
gaccttaaaactcagctcacttttattacatcaactggctgattatttttgtatgtaggaatagtcacacaagctttatcatttaaaattatatggtgtgctcttctatatctgtaaatctaatgattttttctgggtgggggtgattgccttggtgatattgcagatacaagcccaggatattcatgtaggtaatatagtatggctacgtgaaaatgatgaagtgccttgtgaccttgttttgattggcacctctgatcctcaaggagtttgctatatagaggtaattatgtcgtgaaacatgctaaaactggtcttctctctctgcagcattgcagggaaattggaatgtcattccactattcttctctttttctctcatttggggcagacatttcattatatacattttaacgaccttatgatatgacatgt

SEQ ID NO: 251917 - DNA, 425 bp, Glycine max
tcatccagttgagggattaaccgaattgatggactatgttcataggtggatgagaaaaataacttgttgaataaagggaatggtggaagtggaacaagtttgggaactaaggctggattcataacttataatagcacgaggacagtgacatgggaaccaaatgctaagggtcaaacacaagtgactttatcggcgggtagctctacagggaactctagaaccaatcattcctttaaaaagaggggttttaggagtttgatagatgctgaagtgctagataaaagaccaaaggggtcatgttttaagtgtgatgaaaaatttggtcctggtcatatctatccaaataaacaattgcaagttttattgttggaggagggtatggatgaatagtctgcagagcacgactcataaagggaagatgagat

SEQ ID NO: 251918 - DNA, 417 bp, Glycine max
  unsure (1)..(417): unsure at all n locations
nttctcagtcgtctgtaggatgaatgggtgttagatatctttttgcctactgtagactgtgtttctcccatgttccagttgtatgtaactagtattttcttcacagatggggcatgcatgatgacccttaacactgtaaccgctgagatttccatatgctggaaagtcattaatggtgcaaaaaagcattgcacgcattncaaacgtctccttgcggaacgcatcatacactacaaccccctcgtgccacaactgtctcagatcttcaaccaacggacttatataaacgtcaatgtcatttcctggctgtcttgggcccgatatcatcatacacaacatcatgtattctcgcttcatgcacaaccaacgaggccaattgtaaattactagcagaactggtcatgaactgtgttgagt

SEQ ID NO: 251919 - DNA, 373 bp, Glycine max
caatcagacgagactcaaacacacacccgcattattctttattaagaaactctctacaccgacacagaccgaaatattaattgaggatgagaaaatacgcacttatcatccaatatgataagaggacataacagatagattatccaatatgggcactgggagaaatcaaaaaggcatgattagcccacccgagcatcctattgaacaatagcagagcagcatgagtaccagtgcctcttacacacagaagaatcgaaaggcaaaagaatacccatacactaactaaccatgttaaaaggaaccccccatgctcttaaagggttccatgctgggaaacaaatgaagaatgaagagagccacccctgaaagcgag

SEQ ID NO: 251920 - DNA, 340 bp, Glycine max
tcaagctgtatgttataatcataaagttatcatgatatgctaacaacacactctcttgaatacactctctacactgggagaaaatattaaaaatcatgaatgtctatggatctcacttcctatttaatgaggtgttctccataatttgtagtttttaacaaatattaacctataacaaaatacgtgttaaaaagagcgtgctgcttatctctctcagactatcataaacaatttattgtgtgcaaacaattttgtggatcaggtgtggctggagaagcgttatgtgtgtacacgtacacaattaaatggtctatacagcacgaagaatagttatacgggc

SEQ ID NO: 251921 - DNA, 407 bp, Glycine max
tgagagcctaatctagagtgacatttccagggacttctatgataatacatgccctgcttggattcgcttgccacgtagaggttccactactctggggaaatttggtcatttctagaaaattctgtcagaaagtctaccatgaagtttatcttcatggcgcaaccaggttcgtattggagatcgaactctgacaattctactaaccatgctaccatcctttatgcttttgcaacacatgtttgatggggtagttcatcttaactaccacttcgtgactctgaaagtatggcctgagacgtcagttcgaggtgatgagtgctagtgccaccttctctatcatttggtagcacttctcagtgtcatggagtatgcgactagcgaagtatatgggaaaatgatgcttccct

SEQ ID NO: 251922 - DNA, 426 bp, Glycine max
  unsure (1)..(426): unsure at all n locations
taatcaaaattccaaattgaagcattccgcgtatacttttctaaattcaacattttctgcctcttgaactatntgtagttagattaattatttttcataaaacaaataactttttttttccattacattttgtcccaaacagagcattacattgtaagatcttgttaaaatggcaagagtatgaaacatgaaccacgcagtcaagcacgcacttggagttgtactcaatggatgttgtctaaatgtcaatggagttaggatgaaataaaggaaataaaagacactaatgttgtaagtcgtagcgaaacacaatttgcatgagtgtgtttatactttatatgatctttgatgaatctctctatataaaggggccaagatatgtttccacctttgaagttcacttactcgggtggaatttgaaatttg

SEQ ID NO: 251923 - DNA, 381 bp, Glycine max
tgcttaccacctcaaaagactggaaagcgtgttctaatgactcctctgcggcttccacataatgcatagaggatgggcagctcaccaagatgtcttcttcgcctgatacgatgaccagatgcccttccactacgaatttcaactttgggtggagtgtagagggaacaacccccactgagtggatccacgggcgccccaacagacagctgtagggggggttaatatccattatttggaaggtgacttgacaggtgtgagggcctatctgtactgggagatcgatctctctcctaacctctcggcgggtgccgacgaaggcacgaaccaccattgaactcggctttatgtggaagcattgaatggtaattctccaaagtgctc

SEQ ID NO: 251924 - DNA, 424 bp, Glycine max
cttcctcaagaagcttcctcctggcttgtttgataagctctctcaagacgcttctttgagaagctagatccttatctacccacactcctctattaactaaattaacctccttgaaaataattacggataaaaataatgcaacaaataatgaaacatcaaacataattactaaaaatatatagatatatatatcagggtgttacaagcttcatccttagatccctcttgttgtattaggctcaatttatacagccctccaaggtttagactaacttaaactaagcttcatcctcagatccctcttgttggaatagacttatcttaaatagcttacgaagagttaaactaatttagcctaagctttgtcctcaaatccctcttgttgcactagacttagaccaaacaacattatcgtaacaacata

SEQ ID NO: 251925 - DNA, 406 bp, Glycine max
  unsure (1)..(406): unsure at all n locations
agcttaccaccatatgaagccatggataagatcttgaatgtaggagaagatgagtgaacggagagggagaaaggtgggacatgaaatttatgccccanatgaggtctaaactttgaagtatcatttcaagttgaaaaatccacacactggggctttatttatagcctaagtgtcacacagaattagagggaaatttgaatttctattcaaatttcactattntaattcgaattcgnggagccaaatttggagccaaaatttcactaattatgattagtgaatttcagctatggttcagcccactaatccaagatcaagtccaagattatccactaagtatgcttgggtgtcatgaggcatgtaaagcatgaaggacatgcacaaagaatgactatatatgatgtga

SEQ ID NO: 251926 - DNA, 429 bp, Glycine max
tgtatactgaattgagtatggcgcatgcattgcatgtctgatatgccttttagaggttggaaaagtgcaagaaaatgagctgtgttttctgcattttctggaaaacgcgatgaactcgctaagcgagcatgcggcactaagcgagtttatcaatactcattgtatataagcgttatctgaagaactcgctaagtggacttaccatgctaagtgagttcatcttttgaggatgaacactcatcctcttgctgaactacctgtggctaagcgaggctgaatcgctaagccctggtaacttaaccaaatttcgtattgtaagccttgcactaagccaagtttacttgagctaagcacatttcatcatggcaacctttaggctaagccgacatgttatgttgctcagggcgcattgagcgagctgtatcccgc

SEQ ID NO: 251927 - DNA, 116 bp, Glycine max
ataaaatctcggatgactatgctcaagttcatgcagtaaacgaggctagaggaatggtgatcgaccttttacaccaagatgcaacctatttggatggactcggcttgctccttacc

SEQ ID NO: 251928 - DNA, 366 bp, Glycine max
tggaatcgaaaccaaagagaaataaaatctcacaatcattcgaaagagtcctgtggccaaaccttgtgcatcatcaacttaggaaccctatctaagactccacagactaaatccgtcattaatcccggagttcatgacatcatgtcctggatcaaaatgagaagcgcatatctctggcatgatggaaacttcatgacaaatgggcttctacgaactcccccgatattatgacgacaatatcctaaaatcgagataaactacatgaacttatgccgtaagttagaaaaaccaacccttgtgtatcccctttggcaacagccaaaaaccaaaatcgcctaatgaatacatctaattcaatatcaaaac

SEQ ID NO: 251929 - DNA, 354 bp, Glycine max
gcaagctttataagtgcgggtctgtgagacgaatgtctagtgttcacaatatgcgaagatgatgttccaagtactatggattcggtacgaccatgctctcttgatttacagttgggaaattggcgagtggaggaacgccccggcatttactcaacaagcataatgtaaacctttacggttttaaaagctctatatgtgggcctaggctttaaaagtatcattttgttaaggctctgcgcctctcgtattgaattataatacagggatctttcttcatctgttcctggtctctacccattctcattcatttgcatgttcacttctttttctaaaacggcagattcgatgactagt

SEQ ID NO: 251930 - DNA, 428 bp, Glycine max
  unsure (1)..(428): unsure at all n locations
tgtcaagtgttaataaacaactnttaactttaaatcagtatatataaaagactaatcaattcatttgattgtgaatgaaatcatttattatctttaaaataataatgatgaattataaaagaaaatattattgaaaaattaatgatatttcaatattttgtttaaaaataaaataaaaacacgattatcttttcaataaatactattaaaaaaggaaatgaaatatttatctaaaaaaatagttcattttattcacaatgataactataaaaggataaaaaaatattttatcaaaattatgaaaaagatatataatacttaagtattattatcaactctaaaatcaaaccctatcaaataaaagtaattactgtaattaaattatcacttatactaggaaaaaaaaatcaaaaccaggaaaatcagtc

SEQ ID NO: 251931 - DNA, 214 bp, Glycine max
aagacatatggacagataagttattggctctgatagaaatattcgtcgaagccgatgtagtcgccaaccaggattacaaacagccactaagatgcttctctatacgggacttgttactagtaccaatcttatcagaggatatttagattgtgtaatgtccgcatggaggaagaaagacataacttatatctggggatatccctccatggggaca

SEQ ID NO: 251932 - DNA, 434 bp, Glycine max
aaaactcagcttgcctgaccactaatagccttcccaatcggaccttatctttcctactcatgggtcgttccttgcttcacctcatacttgtcacactaggtcgccaggttgaaatgcttgaggttggagcttggtatcgtatcttcttgatgttcagagcttggtggcctcttccttgattctggccatatcttgctctttgtcctttgcctctagttctaccatcatatcttcttcgttttgttgttcttggaaaaatagactccttctcaacgattccccaacttcaacggggattatggcgtccgtgtcgtatgtaaggcaaaaaggggttttgttggtcgtcgtctggggtgaacagtgatacgcccaaagtatgctgagggatttcctccttccacaaacccttggacttgtaaagattgtgcgccggc

SEQ ID NO: 251933 - DNA, 295 bp, Glycine max
gctccaatacactactcatgtgaagcacggactctctactcccttgttcggttcggtgtcccacacacctccgtgtcaatgtacgacaccgacactacacccgtattactttctatattatggacataacatgctgccacgggtccgtatccttgttggtccagtgccgtgtctgagtggtgcttatatggtgaacatacttgctgatgtaagaagtgtgtgctatatattttactctattatatagagatattgcatacaaacacctattctctgctctagttattatatcgtg

SEQ ID NO: 251934 - DNA, 333 bp, Glycine max
tgcgaattggaaatgagaacagctctattaggtgttttcttgctctaacaggcactgtttattgttctttttgttcaattctgcaattaatagatagagagagagaggatggaacggaataccttggtgtggcccttgagtacaatctcgttgctgaggggaatccggaagcgggttcctacctcatcttgatccgaatcgtcttctgactccgacgcgatcggcggaagcgggggcgggccaatcatctcagcgtcggcgtcgccttcttcttcttctgcagctgtgggcggaagcggcggcggtcccaccattgggccgtcgtcgtgatct

SEQ ID NO: 251935 - DNA, 242 bp, Glycine max
  unsure (1)..(242): unsure at all n locations
acgtctacgatcgttgtccactagtatcatctgtngtngagagaccactggtgcatgttgatcctgctacagggaatgtcgatggtccccacatgataacattaataacatatttggggatcgtggcgcgtgataaggcggacatcacctaccataactggaaggaggctcctactgctcacaaagacctaatttgggaggacatcccagaatttctctattctaattcgagtgtgtgaatt

SEQ ID NO: 251936 - DNA, 430 bp, Glycine max
  unsure (1)..(430): unsure at all n locations
taaagatgagaactttgagtcctatgtaagataaatgcgatgactntgagtcctatggaaacataaaggcgaggatgttgagtcctatgaaacataaaggcgaggactttgagtcctattaaacaaaaacaaaggatgttgagtcatatgaaaacataaagcaaaggatattgagtcctgtgaaatatgccaataagtactagtacccaagggtttaaccttataaggaagcaagaggttgaatctttgagaggacctctcatcctaaactcaaaagataggacattggattttggaaatttgtatataaagagaaatctatgcacttatagcctgatatgaacatgagttttggaatacaaaggcatgctaccttcatcttgaaatgcagtaaatgtagactttgtatctagcaatgcaaaaggttttg

SEQ ID NO: 251937 - DNA, 426 bp, Glycine max
  unsure (1)..(426): unsure at all n locations
ntgatgatatggtcttcaccgacgaaaggatcgatgtgtgtctatatagaggcaaatctagtcatcctgcttggacgaatgagaaaactggggcaaatgaagagggtgaggatgaaggagaagcccgtgctgtgactgccattccaatacagtcaagtttcccaccaacacaacaatgtcattactcaggcaataacaaaccttctccttacccaccgcccaggtatccacacaggccatccctataatcaaccacgaagcctacctaccgcactttcaatgactaacaccacctttagacgaaaccataacaccaaccaagaaatgaattttgcagcgagaaagcctgagaattcaccccaattccagggtcctatgctgacttgctcccatatctacttaataattcaatggtagccataaccc

SEQ ID NO: 251938 - DNA, 412 bp, Glycine max
taaacgtaatgaataaaataggctaagaaaatgagattactttattcattctctctttatgaagaatataaaagatttaaatgttattcgatgactatctcgggattaaatttaattttactaataaaatataacatgtaattgttcaaatatctatgtttacaatcttacagcgatattttttcatttatgtgaaaaatatatgcatattttaagttataagtcataatcatattattatgttctaaataaaaaaaatagagttttatgcgattatgctttcatttcatttataaaattgcattcaatatttatatagagtgaattgctctccatttatatggatccctttaaaaaatgagtgggtgaaatattgaccagagtatttattggacaatttattaaaatattt

SEQ ID NO: 251939 - DNA, 422 bp, Glycine max
  unsure (1)..(422): unsure at all n locations
tgactcacaccaaacatggcaagttcaacatgcttttnactttttcttgacaaataactatcatgaagcagaaacctagcaaaactacccatcatatctcccaaaacccaatacccacgaaaatcaagtgagaaagaaatctactcaaacctgaaattttgaagtcccacacgtagagatgcgcttcacgactccgaaaatgccttcctttcgcgatttggagcagaaatggctaccaaaggttggagctttgttggagcttcaatggtggaggaagaagaatagaatggcaacgtgagagagagagggagaaaggcttctgaaattctggggctgagtaaagagagagagtgttgctttttggtttaaaaaaacggctgtctcttttcttattattttatttttcagaaacacttgccact

SEQ ID NO: 251940 - DNA, 428 bp, Glycine max
  unsure (1)..(428): unsure at all n locations
tgaaggcgtgtaacccaccatcttctcacagtagaacacttgtaatgtgtctactatcattgntatcatctccctctccatcatttggggcgctacttgagctgccagatccctccatctttgggtgtattctttgaaagattcatgctccatcttgcacatgttttgcagctggattctattcggagccatatcagaattgtactgatactgcctaatgaaggcaaccattaggtccttccgagaattgactcaggaaggttccagattagtataccagctgacggtttccccagaaagactttcctggaagaagtacatcaacaatttttcatttttcgagtatgcccccattttcctgctgtacattatcaggtgattcttggggcaagtagtccccttgtacttatcaaaatccggcaccttga

SEQ ID NO: 251941 - DNA, 430 bp, Glycine max
  unsure (1)..(430): unsure at all n locations
agctnnttggagtagaaacatgggaccaactcattttatttcaaaaaggaagtcatatctagtcaagggtctgagagaccatacaagtttcctaacgatttctaattatgtgggccattaagtctatcatatgctgacaatagccgagaagcccatgaatctcttcgggggcggagtaggtgtctgccattgccttggccttggctaacaatcggggaagttcttgactcccgttcaaggtaagagcaaaccgatccatccacatggttgcctcttggtgtaaagagtcgatcacccttcctctagcctctttttccgcgtatacttgggcatactcatccgcgaatctatgctcgtgggccgtggctagacctaactcttcttgtacttggaatgatagctacatgttggctctgtctccataacgctg

SEQ ID NO: 251942 - DNA, 436 bp, Glycine max
tgttaatcgattacacccccttggtaatcgattaccagaagccctcatagcttcctgacctcgttttcaagcctggtaatcgattacaccccgtggtaattgattaccagagaccatcttggcctcctgtcttcatttttaagccttgtaatcgattacccacccttggtaatcgattaccagaggccatagcccatatatcacacaagattcacagctggccagccaccacacaagcctccttgctttgtggtctttgttccttttatctgttgactgccaggagctcgcctgtttatgtacatcacaggttctcactgactgactatgcccgggttgggtcgggattggtcaagcttggttttgggcaatagcaccccacctgacgtccccaaggtctcctgacccccgcgacatatctgcaggtaccactctg

SEQ ID NO: 251943 - DNA, 464 bp, Glycine max
  unsure (1)..(464): unsure at all n locations
taagtcacctgcggcatgcaacgcttgaaggtgcgtagcccaccattctccatagtataatactggtaatgtgtctactatcattggcattcgttttttgacattgaggtgccactttgagcttccaggttctccacctttgggcgtattctatgaaagattcgtgccccctttttgcacatgttctgtagttgcatcctatccgaagacattatactgacactgcctaacgaatgaaaccactaggtccttccaagactggactctggaagggtccaagttagtgtaccaggtaacagctaccccatgtagactttcttggaagaaatggattagcagttcctcatctgtgtgtatgacattatcttcccgaaatacatctttggatggttcttggggcaagtagctccttgacttgccaagtcancaccttgacttgggagggtgagatattggtactatga

SEQ ID NO: 251944 - DNA, 446 bp, Glycine max
acctataaaactcagctgtcattcatttcatgcattttgatagtcaaggtgctatatctaaagttactagccaaaattttagtgaagaaagaagacacttaagagtgagacataagtctatcagaaatttgatttctcatggtgtcatttctcttgactttttcaggtcagaaataatattgcggatccacttacacaagggttgatgtgccaacaagtacttgagtcattgaggggaatgggactagagcccattatttagttacaacaatagacacctatctccgcgtgattggtaatcatatgaatggagttcaagggtcacaatgaaattgcttgttgactaaagtacaccaaaataaaattctgcggagttgttccatttctcattcctatgacgaggagtattataaattgtggcaatattaacgttgaggtatttatat

SEQ ID NO: 251945 - DNA, 427 bp, Glycine max
gaaactaagcttcacaccatggcacgcacataatctacgtatcctaaacccctcaatttttggatgtgcaaagtatgagaggtgacattgacaatgaagtatatttggagcaaactctaacctcacacaagtctatatcatcaagttatacttgctacaactggacttacacctagaattgcaccgaagtaaaatttgactcctcaccactcaaaatttaccctagaacatggctctttgttgcctacggtcatttcgttttctatcttacacaagccaggctctctcataagtactaaatgacgtttgaaactaggagaaactcactctagcctacacaaaccactaaatctatatttggccttgccactctcatattgtcactcttgtttccacatacaatggcggactctcaccttctaaccct

SEQ ID NO: 251946 - DNA, 289 bp, Glycine max
tgaatctgagaagctagctgtgtcttattctgcatccatggaccagtgtggaactggaagctcttctatctatttctattctctagtctttttcgcacaagtcatttttttctactatcattcaccataacgaaactgcaagctactagtacatacatacataatttatctctctacactctctaatatctctctctggcccctaccactacgcaaaacactcatgcaatataatattctttttatctcaagcggtggaacactctgtctcaccagtaccgcccatcca

SEQ ID NO: 251947 - DNA, 432 bp, Glycine max
tccacaacatctttggctgcttcggaatctgacatagattgtgttcttatgtttaaggagaggtctggctccgtcgaacgtgatgatagtaaggtttgcattaccgtttgtgaattagtgaacatggagaatagaagatctagctaataggtttgtttttcagggggtgaaatatacaaaaggtaatgaaattattaatagctagaaggggtgagagtacttgagagtttaattggggatgtgatgtggaaaaacactagttcagaaaagcaaagaattgatgaaggggggaatggaaaggaatgaattgaaagaggtgaaaaggaagggttttattaagggctttgattatatcatgagtgacttatgatttgtgttggtaaggcaatagtaggctttttagtacgatccccactagggttgaaagaacac

SEQ ID NO: 251948 - DNA, 417 bp, Glycine max
tgtgattcaggttctatatatagaagatatatatgtatatatatagataattatgtaaagaaaaatgcggatgtgagaacaaagggaatggaaatactactttaatgtaaatttatcaagtcctgagttgaaatataccaaaaacatatatcgaacttggtagaataatactactcaaagtcatacgtttgtgttgaaccattctcctttagcaaatattactcagtttatgtgtaacttctgccagtgttgattgttatctagagtgaaatactaccaataaacaagattctaatagggacaaaataataaatttaaagccaagtattgcaaaagctccaaatatggatttgaaattcaaacacgtgatatagtaagtacctgatgaaacgtgagacaaatatgaaaaacgtagag

SEQ ID NO: 251949 - DNA, 395 bp, Glycine max
  unsure (1)..(395): unsure at all n locations
attcaatccaatttccaccaactatgttgcaatcaatcatgaagcgaagggcacaaagtacattgctttcataagtcaagaagctcttcattcctaaaccatcaagttgaatacccctatccagaatacctcgcaagatttgaaatattagcaagacatggtgatgcatgaggtaattgctgctgataaagacaactgtaaaaacaaacaatgcaaacatactagtgtcaagatgcatgacactaaaatataacacttaacctacctatagggtatgccatggccatactatgacaatatcataacgtcagcccaatgagaaccagagaacgtanctcaaacatcactcatgtgattctcgacttcattgagttctgatatcacaataatatact

SEQ ID NO: 251950 - DNA, 427 bp, Glycine max
tgtactttggcacagacgaaaggagttgaaggaactattatagaccttcacccccttttagaagaacatgtgtataatcctgtgatttaacaagacagaaagatgagtgaaactcaaagaagacattattatctttataaaactgactgacacaaatgagattcttagtaatagaaggaacaaacaatctaaggacaagagagaatctacaattaagaggagaagaaaaagaggaaacacttgaagaattaatattgagaccttgaccattgccaatagtgatctgatcaagaccctcaaaaggtgtcacttgctgtatattttgtgacatatttgtcacatggtgagaaacacctgaatcagagtaccaactctgcccttgagttggagtgtgagaggaactagctagataaacttgaggatgttt

SEQ ID NO: 251951 - DNA, 417 bp, Glycine max
gctcactaactttgtacacgaatgaagctctgataccactatgtttttatctagtgcgccccagatattcttaggaaggagggggagaattaagatattccaaatcttctctcctaaataaaaatctatcctactgttcacttatcttacgaattccctgaaagacaaacttctgaaatatcacttcaaacgaggcaactgtgccccacgaatattgagcccatataagtgaaggagactaagggaagagaaaatgcacactcagttttatactggctcggccacaccctggtgcctacgaccagtcctcaagcaacccgcttgagaggcccacttactctggaattccttatacaagttctgaacacacaaggactaccctatctctgtggttagagagtttttacaacaagagac

SEQ ID NO: 251952 - DNA, 422 bp, Glycine max
cttcgcaaagcttatggtaaaatctgtgacttagcctttgtataagtctccacagaggccattgcctccctcgcccagtattatgatcagccgatgaggtgcttcacctttagggacttccagctatcacctatggtagaagaatttgaagagatcctaggatggcctctagggtgaaggaaaccctatctcttctcaggggtctatccctcatttgctagaatttccaagatagtccaaatctcggtgtaggaattagacgacaggaagcaagtcgaaaatagggtggttggaataccgagaaaatctttggaggcaaaagcaagaatcttggcaagtaaaggcgaatgggccctgttcatagacattcttgcactgttgatctttggaggagtcctctttccaaatgtggatgggttggt

SEQ ID NO: 251953 - DNA, 382 bp, Glycine max
  unsure (1)..(382): unsure at all n locations
tagcttgtnagtgttaaagcaaataatgacaatgtataatactaataacttaaataaattaataaatactcttttttattagatgatgtgaataatactcgtaactttggtaagttagtgaaaatttgatggttaccaagaattggatgtaatcttgaggctgaaacggaccaatataaatactttggatgtcttcttgcttaactaataaaggcttttttaaagtgctcttaaattttatatattctgttaaagaaaaatattcttctcatcatctgatctatatatattccgcagatgataaaacgtgtttatattcttaagaaaaattataaattctaaaaacacactctaaatttcctttcttgcgctatntgcttct

SEQ ID NO: 251954 - DNA, 402 bp, Glycine max
  unsure (1)..(402): unsure at all n locations
cggaacttaaaactcagcttatgcaattcttgtggggaagactcttctacatggattctacacaagaatcagatccttatacattttttaatgtaaaatatggagtaaataaaaaataatatgtgcgaacatttttttttatataatctcttacggaaaaatatgtatacattagttggaatgtatatactcgtctaaaaatatctacttgatttttacattttcctttttctgagtaaagaaagatggaaaacatattgaaaggcatatacttaatggtattatttttttattagaaggatttaaaagggaataaaaaaggtatttaagcttaatataagttgtctaaagcgtaaacgttactctcttntttttttcctgaaatgttctgtacttttgggg

SEQ ID NO: 251955 - DNA, 421 bp, Glycine max
  unsure (1)..(421): unsure at all n locations
ggtttaccccatgttgaatntgcttacaatagagctgtttattcaccactaattgttctccttttgaagttgtttatggttntaacccactaactcctcttgatcttttgcctatgcctaatgtttctgtttttaagcataaagaaggtcaagcaaaggcggactatgtgaagaagcttcatgagagagtcaaagatcaaattgagaggaaaaataaaagctatgctaaacaagccaacaaagggagaaagaaggttgtcttctaacccggagattgggtttgggtgcacatgagaaaagaaaggttttcggaacaaaggaaatcaaagcttcaaccaaggggagatggaccatctcaagtgctcgaaagaatcaatgacaatgcttacaaagttgagctgccccgtgagtataatgttag

SEQ ID NO: 251956 - DNA, 96 bp, Glycine max
ggacctagcccgagctcaccataccaacaatttttatggacagaaaaacactttattcttctgtggaggatagtatacatcatacctttaactccc

SEQ ID NO: 251957 - DNA, 406 bp, Glycine max
taaacatataatttactctttatacgtgtttcaattctcttttcgattcatatatgtagaaatttattaaatatgctcctatagaatacgctacacatgtggggactaagttaagaatgtataagaaagttatactaggaactaaactgataacatttgtacatatagatactgaattttgtgcttcttttgtaggaatcaaattaagaatgtgtataggcatagtcaataaaaatttgcaattataaactaaaattaaaaatatatttgaaccaaagattaaacatatattttagtctctatatgtgttgtaattctcaatttgattcatatatggagaaatctaataaatatgtccttatagaataggctacacatacagggactaagttaagaatggatgaaa

SEQ ID NO: 251958 - DNA, 378 bp, Glycine max
  unsure (1)..(378): unsure at all n locations
cacaacaagtttttccacatccacatgcgcgcataaacccaccatccccttgagcccacctccaactgagcttacgtacctccacgtagcccatatcctcgtttctctcaacaccgggtccccatcaatccttccaagcttccccaacatcaaagtaatacaacattcaaacagcacaaactatcacagccaagataacagagcataggcagataactctgccaaaacaccaaccaaaatcacagcttttctcacttaaagaccccagtaacaattccttcgttccaattccgtaaccggtgggatcgactccaattnttactggaagtctctagtacataagcctacatnttgaccggggggatatactagcaaaca

SEQ ID NO: 251959 - DNA, 154 bp, Glycine max
ttgtaatagcctaacattcaagtgctagatccagactgctaagcaagacggcagattcccgacaccactagactcacaagtactagagcgttcgacaccctagcaattcttcaagaagcccgggcctgatctcatgacaaactatacatgcaaa

SEQ ID NO: 251960 - DNA, 400 bp, Glycine max
tacataatccataaacttacggattcacaatccataaacttatggattcacagtctgtaagtttacgtaattcgtaaatgaatccgctacacataattcatataagtgtcgagttcacataaaattttgttgtacttaagtagatgaatatttaattaataaattaatttaaagaaattgatttgaaaatgttgcgagaaaacagtacaataaattggtggaaaattaaattcaaataaacaagaaaataaattaagcatgaatttaaattaattaattaaaaacagacgagatatgacaaaccaatattatagaacgtaaatgtagaagatgagaatgttgaaacttcgtctgcagagctactctttgatgactataatgaatttctctattataatca

SEQ ID NO: 251961 - DNA, 414 bp, Glycine max
  unsure (1)..(414): unsure at all n locations
agctntgcggatntggtcttcgctgacgaaaggatcaatgtgggtctgaaaagaggcaaatntaatcatcctacttggatgaatgagaaacctgaggcaaatggagagggcgagaatgaaggagaaacccatgctgtgactgtcgttcctacatggaaactcccccaccagctcaacaacatcattagttagccaatatcagcccttctcattatccaccacccagtcatccacaaaggccatcccaaaatcaaccacaaagcctgtctaccgcaccttcaatcatgaacaccacattcagcacaaaccgaaacacaaaccaaaagggaattttgcagcaaaaagcctgtaggattcacaacaaattttggtgtcatatgctaacttgctcccatatctactcgataattcaat

SEQ ID NO: 251962 - DNA, 369 bp, Glycine max
  unsure (1)..(369): unsure at all n locations
cactaagcgagttgtctcaatcttcatctttttcttaaaaataacaggtaagtaaaggaattataatcaatcttagtcaaaatttcctattaatggaacctatattttacaactatcatcgatttttcagaaactgatgttaacatgagttgggtaacatcggtttttacaaaaatcaatcttaaccaactcatgttaacattgaattttggaaaatttaacgttggattgtcttatttataatattttttacgctntttccagttcactcatnctcctcatgcttcgtctncctcacgcttctggcaacctcgaaccctttgtcactctcaaactcactctcgcggcgctgaaaccactatcatcact

SEQ ID NO: 251963 - DNA, 350 bp, Glycine max
gcttgtctcagcgtttatgcgagacggttaccaacatgctagctatcatcgccaagtaccaagtagagttaggtctagccacggcccacgagcataggatcgcggacgagtatgcccaagtatacacggaaaaagaggctagaggaagggtgatcgactctttacaccaagaggcaaccatgtggatggatcggtttgcccttaccttgaacgggagtcaaaaacttccccgattgttagccaaggccaaggcgatggcggacacctactccgcccccgaagaaattcatgggcttctcgactattgtcagcatatgatagacctaatggcccacataattagaaatcgc

SEQ ID NO: 251964 - DNA, 464 bp, Glycine max
  unsure (1)..(464): unsure at all n locations
agcttgtaggattatggagtacccatcatatgtggnactaggtggcggtcgggcgatggtgcacaacatagttttccacatccacaatgcgcgcataaacccaccatcccctgttgcccacctccaactgagctcacgtactcccacgtagcccatatcctcgtttctctcaacaccgggtccccatcaatcctcccaagcttccacaacatccaagcaaaacaacattcacacagcacaagctatcacagccaagcaaaacaaagcaaaggcagaaaactctgccaaaacaccaaccaaaaatcacagcttttctcacttaaagaccacagtaacaattccttcgatccaattcgttaaccgttggatcgaactccaaaatttactggaagtctatagtgcataagcctacatnttgaccgttgggatctactataaaacatcaagaactcattctgtactac

SEQ ID NO: 251965 - DNA, 466 bp, Glycine max
  unsure (1)..(466): unsure at all n locations
agcttgatgtcattcataagagactatgtctacctttatgaagactgaacatgcatngnttatctaattgtattcattatgcgatataatttgttgtaagccattaaaggataattattaagtactcgttgtgttaagaaaaaaattagttggtacaaccaaaatcaattacgcatgtaggatacattgttgtcataattgacaatacataatgatatgcatgcatattaaagtttgagtgtgacacgacattgactgacttgacaacacattctgatgcacgacattggtttagtatgaaacataaacacgaaacatgttcacgcgtgttcttttgtaaaaaaaaaagtgaagcaatctgtcagtgagaaccatgtatatatatgagacacggcanatgctaataaatcacacattatcttgctttcacatactctcccaatngatacacaaagtatgacatttt

SEQ ID NO: 251966 - DNA, 461 bp, Glycine max
ggatcttaagcgacgcggctgcagctttctttataatcaatctgtcttctgactaacaattctaaatacaagttcacattcttgttctttctttgtctaacatacacacttgctcaaactcatgataagaaacacaaactccatcacaatcatgcacttaattcaaaatgaaagcatacaaccattttcacaaaaagataaaagtgttttactgccatgtcatcaaaaacaagtcaaactgttcaaaatgctttaggataagcaaactgactacccataaataaaactagcagtgtatgtagacctaaggaaaatactgtatgaaaaccaaaattataatgataataataaatcaaaaagcaaaaagtatcatcaggaatcaaaattcctgtgactggttctggatattatgtgcctgaacatcctccttatctgtcagatgcaatactggagtagctgga

SEQ ID NO: 251967 - DNA, 378 bp, Glycine max
  unsure (1)..(378): unsure at all n locations
gctgggcactgcagatctgatctgcgttatcctcatccacgtacattgtgtatgctccggttgagtcggtgtaccccttcttcgtgtacacaacctcgttgctaaccctgctcttgcattgcaacataatctcagcacctgcaaacaatcattaatcaaacaatacgtgttacaaactagcaacaactactaaggtaatgtttccattcacattaaatcattcaaaattaccttctaatatgtaattntaaatatatgttcacatgtttagtctcatgccaaagaaatgatgttagatctaaaattaattttgacctctaatttatttctaagttgcttcagaataaaaagatcccatataaataactttacttcaaa

SEQ ID NO: 251968 - DNA, 341 bp, Glycine max
  unsure (1)..(341): unsure at all n locations
atggaatattcattagatatatattatataacacattcatgagtgaatcccttttgaggtgaagatctacaatctgtgttgtaaaaaacatagataccttttaccgttgtaagtccaacagtggttgccaaagctgaaatccaatggtataactggtctagttctggttagggntggaagtccaatgttataactggtctagttctggacgtagcccaaggttggggtaaaccactccatactttgattntgaatagatctatcaaatgcttgcttaaacactacatgtcataccctaatttcgtccggagattattattngttgatatacaacctttgat

SEQ ID NO: 251969 - DNA, 376 bp, Glycine max
  unsure (1)..(376): unsure at all n locations
gtcacctgaggcatgaagcttggtcaacttaaactagatcttttctttgggttnataaactgtttactcagtgcaaccaagtgagaaccaagaactgtagttgttgaatccacatccctagttntaattatgacaaaccatctaagaagaaaactgtcaagatgatgagattatgtgatgaccaacattcttcttaagtgtttcagtgctaaatattcttaagaagcgaatatgtgcatgcattctgaagtgcttagaacatatcttagaaataatgtctcataaatactatcatgagtaaaggcttcaaaagattccttgcagtcccatctgaatgatgaaagatgcttcactctgagtacttgaacatgataaa

SEQ ID NO: 251970 - DNA, 451 bp, Glycine max
  unsure (1)..(451): unsure at all n locations
agctngtaatgttgctctcggcttatgtttctgtcttaattgagaactgggaagcttgggacatgcatggcagagatggggttgttctggtaacaaggagcttgttatttgcttcgttggctaaaaaagtaatctctagtgaaaatagtgcgaccatggagggctggccctggcagtattattttgcatattaaatcgaaaatgctaattgattgacaagaaaaagtatcacaaagagggggaaaagaagagaaagcaatacctttttttttttttattggtatttgatgatatcattggtcaaatagtgatttgtgaatgtgggttgaagctgtgtaaggagaataagcaaagatagttgactagaggagaaaggctttggagagtgtaaggatatggggaaatgctaaggctgatgaaagtttttgctttaactgtcttaacatggatg

SEQ ID NO: 251971 - DNA, 165 bp, Glycine max
  unsure (1)..(165): unsure at all n locations
tttttgtttgctgttacatntataagattgggtaatatatatataagaatagaagaaataggaaattaaatctattaaaaacagaagaattaaatctatagaatataaattattcgatagaaaaccccaccccccacccacaccccccccccaaacccccccccc

SEQ ID NO: 251972 - DNA, 478 bp, Glycine max
  unsure (1)..(478): unsure at all n locations
agcttctgaagagtggagaactgtcacatatgctatatttttaatggncgaannngaattcaatgtcgctggtgattgtgacatatagcccctcctaatttcctccttacctgcaaatgataataaccaaaataccttaattctttattaattttttggaaccagaatgataataaccaaaatgccttaattcttcattaattaaacttttattgttacgaaccatctacaatacttcttctttaagtcaagcagaattcatcgtattaatattcatatataataaaaaaggaacataggaaaatggaatcctctacaatatataaggttcttctttatttttttatacttttctctagagtatatgtggggaaatgacaagaagaaaatatatatcaattcattttgaaattatgtcttgaaaataaaattagtgatataaattgaccaaaaaaataaatagatatgtatgatatag

SEQ ID NO: 251973 - DNA, 371 bp, Glycine max
  unsure (1)..(371): unsure at all n locations
agcttaatagagtccttagtgatcatatttgtatgcgngattgcattgaatgagatgatgtgcaatgttggaaatgttaatttcagtagttttgattgaaatacacgtaactgaaacacttgtgtgcttaagagaacactatccttgtgaaagtgaagcatggttaatcttctttgatgcatgccatacttgctaacctattttatctccaagtgcattcttgcatgcttctatcatgaaaactatgacaaatgtgaacttgagagttggaaattgaagttgcttgaaagatatgcagttatctcggttattatggttggttacattctaaacatcgtcattgacctaaattagtgtagttagcttacttt

SEQ ID NO: 251974 - DNA, 356 bp, Glycine max
  unsure (1)..(356): unsure at all n locations
agctngtgggggtgatcggcactccatataattggcacaggcctatgatcaaagcaggaaatcccaaggccctgttggacttctccgggtccactgggtgtcgaggaggcgtgctccctgcaaactgatacatagcatttgagatcaactgggcaatatgtacactcacctaagtcaggatggtgtagactagctgatacttcggtagggggaggtctaagttatggtcgctagggagaatgttgctaagcaacaacgtcatccaaatttgcgtgagggtggtcatgctagtgcgcatgatccgcatccatctccctactacgctccaggaaaaatcctgccccggaacgcacaac

SEQ ID NO: 251975 - DNA, 464 bp, Glycine max
  unsure (1)..(464): unsure at all n locations
gcaagctggattgctgattcactaatattggaattgccactgcttgcctgagaaaacaattgcttgacacaacagcgctggagggcggaacggacaatggtctttcaaataaacctgttgtacatgaacaaacattatatcatgcgctgaccgtgccaaacgaaccagcgaagtcattgcataattgttacactaactatattcaatgtacctgaacaaaatgatttccaaacacgtgaccgacacatatgatgcggtggccagaagagtcaggtggtggttgacttctaagaggcaaaaatgtcatgctttgttgttgggacaacgatacaaggattacgttataccgtgaagcaatcatatatcccatgtnctgtatatccatccacttgtccacactaacctgaatgaaccanacatacacattgtagtaattaaacattgtattaataaaaataacctaa

SEQ ID NO: 251976 - DNA, 441 bp, Glycine max
  unsure (1)..(441): unsure at all n locations
agcttgttgaattattactacaatatatctgttatatatatactaaccaaaaaattaatgttagtccttatatttatcgttgagtgtgagactttgttcatgtaaattaaattattcataaaatttagcataagttaatatatgcaataaaagtataaaatcttttcacattatcatttactacaaaattgaaatatatttgttgatatttactttaactatcttaaattttttttatcaatgttgactaaaataagttaaaaaaacaaaataaaattcctttgttatcattnttttaatgataaaatttataattatcattatcatcaacataataataaaatgcacaaaaataataaaaaaataatgataaaatacatgaaaaatgaaaatttgatgataaaattntaanananaagttacaatctggtaaataatgat

SEQ ID NO: 251977 - DNA, 306 bp, Glycine max
  unsure (1)..(306): unsure at all n locations
atcctctgagtcacctgcggcctcaagctggggactgaaaactatatactgtcccagggtctagtttaggggccccctctctccctcgcgggagactctctctctctcctctctctcttctattgttcgctnttagatttaggctctcttctctttctcttttatttgcgntttttttacaattccagttcagacttttagttttatcaataaaatttcattctctatttgattaatggaaggctaagtccgcagcgttgttttcccttgaggatcaagcacagntctctttgagttctattatta

SEQ ID NO: 251978 - DNA, 388 bp, Glycine max
ctcggcgagacgatcgtgctctagtaaaatcttgagtaactgccatgcgttgcggttcacgccgacgtgaacgggtgaaaaccatatgattactcccgtcgtgatggaggctattaacggcttaattgaagtgccttgtcatggttgtaccgccgtaaaaaaaaaatttttttctgaatattcgaatcctaatgatgaacatattcgccgcagtatgctgtgaaaaggaaggctgtgggaatttggggatgcaaggaatgtggtaaagagaaagctggcggtgcctacactgtgaagtaatgtccctgttgcttcctatcctactcataaaatgtggattattctccttgagataactagctagagttggtcttactatttggatata

SEQ ID NO: 251979 - DNA, 449 bp, Glycine max
  unsure (1)..(449): unsure at all n locations
gctcaagaatcaagagaagacgtaatcaagatatgtntgaaaaggatttttcaaaactgagtagcacatggattnttcacaaaacatgtttgccaaagagtttttactctctagtaatcgattaccagattgttgtaatcgattaccagtagcaaaatgtttttgaaaaagttttcaaattgaatttacaacgttccaattaatttcaaaaagttgtaatcgattacaatgtttcggtaatcgattaccagtgcctttgaacgttgaaattcaaattcaaaagtgaagagtcacatcctttcacataaaagctttgtgcaatcgattacagtgatttggaatcnattaccagtgatgggttctgaataaatcaaaagatgaactcttanatggttttgacttttcaaatggnttaagttttctaaagtatactctctaatggcctctgg

SEQ ID NO: 251980 - DNA, 187 bp, Glycine max
ccacatccacaaatcacacataattgcagcatccccaggtgcccaccttttaatgagctcacgttctcccacggagcccttatcctcattccattcaacaccgggccccattagtccctgcaagcttctcaacatcctagcaattgggcattccaacgtcatgaactatcaaaaaccaggagaacag

SEQ ID NO: 251981 - DNA, 300 bp, Glycine max
  unsure (1)..(300): unsure at all n locations
aaccaccctatatgcctcaactggtatggtaaaaaaaaccaacacttctacctactggctgcaattttactcgcatttttattggttttaacctaaaccttagttaatcatgttctaaatcaatcattatcaatgtttctttcaacaatgccttatttctgaattaaaccatgtcttagactagttccctgagttcatactcagatcatccgtttaattnaaatacttgcgatcccgtcnctttctggcaaccagattcccttgacgtatttgataaaaaaaagtggaccaaaagtactg

SEQ ID NO: 251982 - DNA, 474 bp, Glycine max
  unsure (1)..(474): unsure at all n locations
agcttgccgctggagctgacccatcaactaccctatctcttttaaactggtgattcctaggctcttgaacttgacttgatagaacctctttttaagcgaaggtgtttgacttgatcccattgtttactaacgtgaaacaaaatcggcgtgaatcaaaactccgacatctatcatgggtggagtggatgaatgcatgaagaaatgtgtatgatacaaatgcaatttatgaacacgggagcccgggaagttgtctctttcttagatacaacgtcttgnggtggcaaagtgcccgacgtatgtatttaagaaggtgacacggacccttcgtttgttttccaaagagaggggatcaagacagcacccgtgcgtgatgcatatgcgaaaggtgcaacacgggaatgtacatagtatgacaatattcacaaaatataagcanaaggttacatgacacttatgcatggcagtgtgaaaaat

SEQ ID NO: 251983 - DNA, 411 bp, Glycine max
aagtctcacgattgtcacgtgctcatgcaacaattgttaaccgaggctatactagacatcttgccaaacaaagtcaggttaacgataactcgcctgtgctttttcttccattctatatgtagcaaagtcattgatccagtcatgtttgatgagttggaaaatgaggccgcaattatactgtgccagttggagatgtattttccccctgctttctttgacatcatgattcacttgattgtgcatttggtcagagaaatcaaatgttgtggtcctgtttatctacggtggatgtatccggttgagcgatacatgaagatcttaaaaggggatacaaagaatctatatcgtccagaagcatctattgttgagaggtacattgcagaagacgccattgaattttgttcataatac

SEQ ID NO: 251984 - DNA, 341 bp, Glycine max
  unsure (1)..(341): unsure at all n locations
ctctcacctcttctcctttatcttgcgtagcaattccatggctggaaatcaccatggaaggacctaattaaagctcaaatatccaacctccatagaagcttctctagcaagcttccagaaatagcacttaagtttttctcatttaataaaacaaggcatgcacntttacgcattgaatattatgcaactatantttgtattcagcatcagcacgacattaaatctccatgatacctatggtacatagtcggcattgacacgacattaaaccgccatgataactatggtacaccgtcgacattaacaccgcattaagcttgcatgataagggaaagtttatc

SEQ ID NO: 251985 - DNA, 300 bp, Glycine max
  unsure (1)..(300): unsure at all n locations
gatcttcctttgaggacttgatgtaaatatctttttatctantaatgatgttttgggtgttcactatgctatcagaacttcattctaccatgcttttgccttgatcatgtagatgcatggtgttttaggatcattcaacagtggaaactggtctgattcttagaacttgataagacggngctagtttgtcatattttcacgagaaaatggggtacgataacctagttggtgtatgtttgtcttaatgcgnngcctgaccaagttagtccaacaagaggaatctacggacgatgcttgatc

SEQ ID NO: 251986 - DNA, 468 bp, Glycine max
  unsure (1)..(468): unsure at all n locations
agcttgatggagagtacaagatctattatttcagctnttacaaattggccatctgcagtaaggaggacccattggtaaaacactaaaacatgggaccataatcattaatatccctcgccaaacttgtgacagacagaacagcaaaaacagtatagaagaccctggtgttgcttcttaagttgccattagatattttatttgtagaacaattcgtacaataattatataactaagagaaaaataaaagataaaaaaaatgagatataatagatgatgcaatagtcatacgagattttacatcgactagtaagtgtatataagtgaagaacaactcttgtcttacaagacagttttgtggaattgaatttgactcaaacttaaattaataatagtttattgaccactgaactgcaacattttgttgagatattaatctttggcatgaaaaagtgtttagagaacatcact

SEQ ID NO: 251987 - DNA, 364 bp, Glycine max
  unsure (1)..(364): unsure at all n locations
agcttancccaagaggagatggaccttttcatgtcttggagaggatcaataataatgcatataggttggacctcccaagagagtatggagtcagcaccacttttaatatttctgaattaattccttttggaggtggagttgatatagaggaggaggaaccaacagatttgaggtcaaatcctcttcaagggggaggggatgatgcaatcctccctaggaaaggaccagttaccatagccatgagcaagaggctccaagaggattgggctagagtagataaagaaggccttagggttctcatgaaccttagggtagaattttgagcccatgggccaaggttgggtccactcttctttgtaaatag

SEQ ID NO: 251988 - DNA, 423 bp, Glycine max
agcttgttgtcactcaggtcaacaatgttcaaagacttgaggtctcctatacccacaggaatagaaccagagatattgttggtggaaaaattcaagacttggaggctaccaagtcccccaatgccagatggaagcacaccagataatgcattggatgacaaatccaaaacctcaagaccatgataagatgcaggtgtgggcttcagtgaaggataattgcccttgctgaagccatccccagaaagagagatactttgcacacccatcttaaaaatccatgaaggaacatggcctgccaagtgattgtggcttatgtcaagagccaaaagcttggtgcagttcatcatagaatcaggcatgtttcctgtcaaccgattcctatacaaattcaatctatgcaaagagtcaagattccctaatgac

SEQ ID NO: 251989 - DNA, 353 bp, Glycine max
  unsure (1)..(353): unsure at all n locations
agcttagaggacattttttttatagttgttggattgcctaaagtgatggtcattgacagcgatntatccttgataaatgcaggggaatctgtatttcttgaagcatgtagtttattgtgccaatttcacattaaaaaaatgtgaaagcaaaatgcaagacttacgttgctcccaaagaggcataggaccaagtcatggatgcatggggtagtgttaaagattgtcttactcggtctaagtatgaggggcgtgtcaagatgtttgaaattgtatgttcaccatcagagtactttgtcaagtatgtgaagaatgcatttgtgatccctcacaaggaatgtttgtaaagcatggac

SEQ ID NO: 251990 - DNA, 453 bp, Glycine max
  unsure (1)..(453): unsure at all n locations
tgcaagcttattacaatgtgttgctaattactatatggctcattcgaaagaaaattctcaaaatcctttggtttttcctttcatgccaccaccaccaccactaatgaatcttatacaaaataatcaatccttttccacaaaaaattctcaaacttttccttcaatgccatgaaacaantttgtcatgtttcataggcctcctaatagttctagtggtccaaaaactccttccaatgatgaagttgaaatgcaatttccataattttctatccaaattaggctagaaaatatcactctagaggaaggaggagagaattctacaaaaaagagagcataagtttacttttcaattgaagatgatatgcatctcattggttcatgggctaatgtctcaatggattcattggcgatgatggatcaagagatacttgggtgggagtaacaaaatacaca

SEQ ID NO: 251991 - DNA, 335 bp, Glycine max
  unsure (1)..(335): unsure at all n locations
acaaaagtgattccacaatgcanatgctggtcatcctcacttctcttagcacatcaacaaccaacactagcttttgttcattaaacattggagggtgcatggtggctgtttgactcttcatacccttcttcaaccacttcaatgtttctttcttcagtttcttcctatagcaattgtaggctgcgattntttcttcaattcctggatcaccaatgcttgctctacgcaaagtgaattgaagttcttggaggtgttcttttactagcaagagaacatcttttgagatgccacacacctccaacatnctcagagatgactctgacacatcatcaaac

SEQ ID NO: 251992 - DNA, 452 bp, Glycine max
  unsure (1)..(452): unsure at all n locations
ttagagtcacctgaggcatgaagctggagggatatggggtacccatcacatgtggtactaggtggcggncgggcgatggtgcacaacatgttnttccacatccacaatgcgcgcataaacccaccatccnctgtagcccacctccaactgagctcacgtactcccacgtagcccatatcctcgtttctctcaacaccgggtccccatcaatcctcccaagcttccccaacatcaaagtaatacaacattcaaacagcacaaactatcacagccaagaaaacagagcaaaggcagaaaactctgccaaaacaccaaccaaaatcacagcttttctcacttaaagaccccagtaacaattccttcgttccaattcgttaaccggtggaatcgactccaaattttactggaagtctctagtacataagcctacattgtgaccgttgggatatact

SEQ ID NO: 251993 - DNA, 311 bp, Glycine max
  unsure (1)..(311): unsure at all n locations
aaagcctattctaacaaactctggcaacacgtccctcaagtcaatgacataccaaagactagaattgccattaaaagttggattattagcataagtaaggaacacagagatttttggttgtagagttgtaccatatccaggcattagcgaccgatccgttcttaatgctgctcttccaagtgacatttgtaacagatggaatggagttgacattgattcctacatgatcagagctcggatcccattcatttttgaagctgtcgaactcaaccgcaactaactgattnttcttagtggtgaatgcggattca

SEQ ID NO: 251994 - DNA, 465 bp, Glycine max
  unsure (1)..(465): unsure at all n locations
agctnttcgattcattctatgtacccgtagtggtccacattgtgttttgtgtatttctattctcatttcatttactttttataccccctcttgacgtgcttaagccattttacttaagtcatttctcgcttaacttaaaaataaaataaatttccaccgaacgtttgaattgtattatcctttaacttcggttaaaatgaattctgaccgttcggtcgtgccgtaaccacgttggaaataaaaaaaaagggtaaaaaataatataataatcaaaaaacatcttttagtaaaataaagcggaaaatcaatcggacgttttctctgtgggatttctcattcttaatcgaattgattaataactaaatggaaactaaggctaaaatcaactcgcctagtcaagctcgtccataanaataggcttttgaagtttgtcatttcaatctctcactaagtaaaatggatcat

SEQ ID NO: 251995 - DNA, 351 bp, Glycine max
  unsure (1)..(351): unsure at all n locations
agctnnttggagtagaaacatgggaccttctattntatttataaaggaagtcgtatctagtcaaggtctgagagaccatacaagtttcctaacgatttctaattatgtgggccattaagtctatcatatgctgacaataaccgagaagcccatgaatctcttcgggggcggagtaagtgtctgccatcgccttggccttggctaacagtcggggaagttcttgactcccgttcaaggtaagagcaaaccgatccatccacatggttgcctcttggtgaaagagtcgatcacccttcctctagcctctttttccgcatatacttgagcatactcatccgcgattctatgctc

SEQ ID NO: 251996 - DNA, 318 bp, Glycine max
  unsure (1)..(318): unsure at all n locations
agcttgagcagaatctaacgactatatctttttactcgaatggtccgatgtctcccattgtatatcgagacgttaaatattcagaatagaagctctgagcaaaatctaacgacaataactttttactcggatgtccgattgtgtcctgtagtatatcaagactctcgaaattcagaactgaagctctaagcaaaatcaaatgacaaaaaaattntactcggatgttcgaatgaatcccgtaatatatggagacgctcgtatttgaaaacggaagctctgagcaatatcaaacgacaataactttttactcggatgtct

SEQ ID NO: 251997 - DNA, 373 bp, Glycine max
  unsure (1)..(373): unsure at all n locations
agcttgagaaagatctaacagattcaatctaatgttcatgagaanganngnngcagataatattaagataactctccctaagactgataatgctaaaaagtttatggtgttagtgggagagcgctctcaaatagcttataagtctcttgctgggacattagtgagtacattgaccatcatgaagtttgatggttcacgtactatgcatgtacatgtcacttagatgacaaacattgcaataagatttaagacctcgggaatggttgtgaataagaacttccttgttcagtttattntgaactcattaccatntgtgtatgacctgttccaaatgagctataataccatgaaagataaacggaatatgcatgaa

SEQ ID NO: 251998 - DNA, 449 bp, Glycine max
  unsure (1)..(449): unsure at all n locations
agcttcacatggagctacgtcatgtggtatcaagatcacctccgtctaggtgatgttnttttgcttcctctatcttttggttcggtcaattcactttaattccttgttcttcatcttattctccatgtatatcctacattgtcttatggtttggtgttgtttagagtatattcaaaaaaataaaccgattaaatcttatatctacacttgttcttgcatttctatggttcaaattttatggatctactcttgaatcatgtttttgtgttgattttaggatctgtcttttttcagtcataatcttcttgtgttgaacctttcgatctaaattttcttccaaaatattgattagaaaaaaaaaacacaaaaatctaagtgtaaatcacttaatccttgttgtcttagagtcatgtttagtcataataattgtcacattaagttctaagttt

SEQ ID NO: 251999 - DNA, 310 bp, Glycine max
  unsure (1)..(310): unsure at all n locations
agctngctctaaatatacattgatgtttgtatttatgggaggaggntatatgccattcttgctttaaggatagtgtcccactggtaaaattaactttccaaatgtttgccttcgcaagaatggccccgaggaagcttgcctcaaagaggtccaggaaagacaaggcagccgaaggaactagttccgctccggagtacgacagtcaccgctttatgagcgctgtacaccagcagcgcttcgaagccatcaagggatggtcgtttctccgggagcgacgcgtccagctcagggacgacgagtatactgattt

SEQ ID NO: 252000 - DNA, 435 bp, Glycine max
  unsure (1)..(435): unsure at all n locations
agcttctggtgggacatcttgacttgctttccaatctgacattcaccacagattctgccctcttctattttcagattgggaatgcctctaacagcacctttgtcaatgattttcttcatgcctcttaagtgcagatgtccaaatctttgatgccatattttgacttcatcttctttggagaatagacatgtggaggagtaactggtttcttgaggtgtccataggtaacagttgtcctttgatctgctgcccttcattagaacttcactcttctcatttgtcaccaagcattctgactttgtgaaagttacattgaatccttcatcacacaactgactgatgctgatcaaagtcgcagtcagtcccttcaccagcagtacttttgtcagactangaagtccatcatggactagctttcccattncagtgatcttt

SEQ ID NO: 252001 - DNA, 444 bp, Glycine max
agcttcttaatcaaatcaagctattagattgtttcaaaaactatggattttttattctattaaacttatgtcataccttggttttctgctgcatagataaccaggaaattggttcaacaatatacttaaaattcatgtaacactagtataatatcatatctattacttggtaaaattaagcaagaaaagttaccatgtcaaactatttcccactagtttatgtcatttatcattgtgaggtaggcaggtatagttttttaaaatggaagttaatcaagctcagtctccaaagatctctgaggctcaccttttctgctcaaggttaatgatgagtctcagtttgattcagaaggatagagggaaatggagagatacttgcaaaggcactttaatgcctacgccagtaacaatgtattcaaagggtgtgatatcttgtgtctctgt

SEQ ID NO: 252002 - DNA, 264 bp, Glycine max
  unsure (1)..(264): unsure at all n locations
tgtgtcctttctttaaatattaacctggaaatgccaatcttatataactctttgcagagaatgcttaagtttatgaattgcgccatcatataattataagggagttaagcttttacattgatagtgaataaaaatgatcagtttaaagntcttgacaccatcatgctacttttatcaaaatgcatgattaatggtgatagtgtataactcagtggcatgaaaattaatcgcatttgtagataactagtccttatatgagtattg

SEQ ID NO: 252003 - DNA, 454 bp, Glycine max
  unsure (1)..(454): unsure at all n locations
agcttataaaaacaaaattgccttaatcttttcctaatatgcatgngaattangacgcatcaacaagaatcaagccaaggctattgtgcaagcaatcaatggggcaaaacacaccaaatgattataatgatggatggctcaaattctcacaaaggtaaaatcatcactttcaaattgagctttaataactatcatgacatgtagagaagaatcaaggatttcaagtcacaaaatgtcaagaacttttattttcaaaacaattacccatttcttgaacatatcctataattcaaagaaaaacatgcaaagtcgtacgtgcacatgaaattgacccaaaatattaaactgaaaatccgacgaaactaacaacattaacaaattaacacaactaacaaaacaagcaatacccaagaacactcccnccnnccccatacttaacaacacattgcctcat

SEQ ID NO: 252004 - DNA, 413 bp, Glycine max
  unsure (1)..(413): unsure at all n locations
tgaaagcctatttaacaaactctggcacacgtccctcaagtaatgacataccaaagactagaattgccattaaaagttggattattagcataatgtaggaacacacagattcttggttgtagagatgtaccatatccacgcattagcgaccgatccgttcttaatgctgctcttccaagtgacatttgtaacagattgaatggagttgacattgattcctacatgatcagagctcggatcccattcatttttgaagctgtcgaactcaaccgcaactaactgattnttcttagtggtgaatgcggattcattgctgaataggccaaggtacccaccagctgaattgttgagaggacagaatcaaatgggcaaagaagatggctaaccatcaccaaccgtgatgggcaatagct

SEQ ID NO: 252005 - DNA, 449 bp, Glycine max
  unsure (1)..(449): unsure at all n locations
gatccttaagtcacctgcggcatgcaagcttctaaagagttctacactattctattgttctccaagacgttctaaaaaattatacactttnttagaaagctntagaaatttctagagcctctccaattaaggagggatcccaacatattttacagtgactntaaattccttgaattctattttggtgttcaacccatctatttgttatgtgtatgtacatcttaagaaagtgataatcaattaacttcaaattactcttaaattttttctacatttgtagcaggaacatataacaaagttttggtacagaaataggccacgaaacattgtgcatggtagatttaacactcacatgggaggtttgctcgttttcttaaaggtaaatgagccagcatattatccattgtatcactactataaaaaatgctttntacgacaccgaatcaaca

SEQ ID NO: 252006 - DNA, 360 bp, Glycine max
  unsure (1)..(360): unsure at all n locations
agctttcanaacactgtgtatactgtgattaganatgatcttaagngnngagagatttatctgcctatatgactatcacaatttagtgtgcaaacttccaacaaatcttgttaatttgtttagagtcagtagtgacttggtaggacaaagaatattgggttcaaatcaagcttgcatgtgtaggagcctgaaatagtagtgaaaaatacttataattttgataagttagtaaaaacttggtgggtcatcaagaattggacatagtctcggttttgagacgaatcaatataattctctgcatgcttcctttatttctttaactgacaaaaagtttgaatttgctntaagatcttatgtctt

SEQ ID NO: 252007 - DNA, 414 bp, Glycine max
agctggagaggatgctgtaatgtgtgatataaatgagggagagaaagaggaagggggggagcacgaaattgaaggaagataaagggagagaagttgaactttgagttgtgtctcacaagactctcattcatcaaagttacaacaagtgttacacatgcgtttatttatagactaggtagcttccttgagaagctttcttgagaaaacttccttgagaagcttctttgagaaaacttccttgagaagctagagcttagctacacacacccctctcataactaagctcacctccttgagaagctttcttaagaagattccttaagaagctagagcttagctacacatacctctataatagctaagctcacctccttgagatgagaagctagagcttagctacacaccgcctataat

SEQ ID NO: 252008 - DNA, 455 bp, Glycine max
  unsure (1)..(455): unsure at all n locations
agctngnnctatttaatcagcacatacattatgttttatgttcttcgggaatnttccttgctgctgccattaagaattgaaaagaaaaacttttttaacctttttctattttctagtttttaaaacactttttaaacaggttttaaaattcaataggttttataagataaattgattaataagtaaaggaaattagttttgaaggcaacttttaaaacaaaaaggtgaaaagcaaatcaaataggctcttaattatctttagctcatctctagtacccgaatccaatatagaaattcagcattnttgttgcatcataaatgatatttaaaataaactattttttatgctttaaaaatgtaattataattccgatgtccatgttgntcttatgcaatgtgtgctaagtgccaaaatgattcttggtgaatgaaatcagggggatatgggaaaaaaa

SEQ ID NO: 252009 - DNA, 465 bp, Glycine max
  unsure (1)..(465): unsure at all n locations
agctngctaacccatggaagctcttattatctcccacactntnnggggggggccattcttggatggccttgattttctcagggtccacttggaccccatttctaccaactaaaaaacctaagataactatattatctacacaaaaggtacacttctctatatttgcatagagggtgtttttcctaaggattgaaagaacttgcctgagatatcctaagtgattatctaggctcctactgtacactaaaatatcatcaaaataaacaactacaaatctacctatgaaatcccttaagacatgatgcataagcctcataaaggtgcttggtacattagtgagcccaaaaggcatcactaaccattcatacaaaccaaacttggtcttaaagcggtttccactcatcacccttttcacctgattggtgataaccactttagacaattttgagagaattgcccatggac

SEQ ID NO: 252010 - DNA, 429 bp, Glycine max
  unsure (1)..(429): unsure at all n locations
agcttatgctttattgaagaatgtttatcatgncaagnngaagnatggacgtaacaatcttgcaaaaattggggcaaaagatgaattgagttacatcactgcttcgtctactgccaaacacatnttggattgttgatgtccttgttacttccagtttcaccttgaccaagatgtcatgaaccatgttgaaaaatctaaattgattcaaccccatgtcctgcataaaaattcgcaatacttcaattgtgtatcattcacatacatccatgcttttcattggttgcattgctcattgcattctttccttgaaaaaaataaaaaaataaaataataaaataaaataaaactgaacttaatcattgttatcaaaaagaaaagaacacgctttacggtgtccttaccgaacctgtgctagagctagagtaatgg

SEQ ID NO: 252011 - DNA, 423 bp, Glycine max
  unsure (1)..(423): unsure at all n locations
gatccttaagtcacctgcngcagcaagcttatactcanataggattttncttattgacatggccaggaggcctgtangcttctccatgcaactgggccttcaaaggtttgcttttattgttgtatgatgaaaaatgcccttcttttttgggatccttgaaaactcttggtctaaactttctcctttcaacataagctgttgtactggtcatgtcttttcccttctgatccatgtctggaaactgcttatcactgttgttggtttaatagtcaagggcatctgttttgaccaattagtcacaaatgttntatacttttccaagttatgccaatggatttctcgattaagtttaaaaccatgtngtgactccaatagtaaagaaaagattcactgatcggatcttgtggaaagatctccttaaca

SEQ ID NO: 252012 - DNA, 387 bp, Glycine max
gctaggagcttgttctgggctattattgcgtcttgtgatgtgagctcgattacactcttctttataagtgggtaggctcaatcacgaaggatgacatggtcactggctaccatattttcaatcaactccatagcttcatcaggtgtctttaatttgatcttcccaccagcgaagacatcaagtaattgcttcaaatggggtcgcaagccatcaatgaaggtattgagttgagctggcttgttgaacccatgggtgggagtctaccggagtaaaccatggaagcggtcaagagcttcactcagtgattcatcgggatattgatggaatgaagatatctcacccttcccttagtagtcttggactctagaaatatttcttcaaaaattc

SEQ ID NO: 252013 - DNA, 396 bp, Glycine max
gcaacatcccttactctaacacatgttagcttaagacggcgcaaactgttaactaaccatgctgtgttgagttcggcatcaaacaaggcacttaaaattcttgacttgagagattgcaggagcctcggggatgaagctctccaggccattggcactcttccaagactgaaaactttactattagatggctctgatataacagatgcaggacttttgtacttaagaccatctgttattaactcactgtatgcattgtcgcttcgagggtgcaagagacttacagataaatgcatcacagctctatttaatggctgctgtgagctggaattacgagaactggatctatctaatcttgctaacctctcagataatggagttctgctgctggcaaaagtc

SEQ ID NO: 252014 - DNA, 355 bp, Glycine max
  unsure (1)..(355): unsure at all n locations
tggcaaagctggccgggtatgaatacgagattcagcataagggcaacaataattatgtggttgattcacttcctaggctgccacgtcagcaactaatgcacatggcacttgatacttcatcctcagaatttctacagaaaattgagaagagttgagagcaagatgcanatttgcatgccttaatgtctcatttaacttggaagggaggtaatttgggacactacacttgggatggtcaacttttgaggaagaaaggatagtttatagtgggcaatgatgctgagttgaggcaacaattactggaatggatgtattctagccctcaaggagggcattcangggtgcaagcaacata

SEQ ID NO: 252015 - DNA, 328 bp, Glycine max
atctacagcccaagactcggaaaaggggggtcattcccaaacatcttctgtggtttttcaagaaggtgaaaaattagaagatttcagtgcaaatgaatctcatttggctaccgaacctgatcctccacagctcaattctgaaatcaatcagagaccaaaaagggtcactaaacctcctgaaagatatggttttgaagacatggctgcctatgcattacatgcagctgaagaaatagattcaaatgaaccagccacttaccaagaagctatcaatcatcctgaagctgaaaattggttgttagctatgaaagaggaaatggaatcttta

SEQ ID NO: 252016 - DNA, 382 bp, Glycine max
  unsure (1)..(382): unsure at all n locations
agctnggntctataaatccattgcactccaatgacanttttatctttaggtttctccgtgagctcccatgtttgatgtttttcaatcatatcaagcttctccttcattgcacttacccacttcgaatcagttgcagcttcattgtagtctacaggctccattataacaacattacatctttgataaatatcagagagagatctagttcctctaactggctggtcatccacatcttcttcgctctcttcctgaatttgaagcttctcactttccttgctccatttttcttcttcaaagaatagcacatctctgataacaataactntattactttgtggcaagaatattctataggcttttgatgttgagctatagcctacaa

SEQ ID NO: 252017 - DNA, 475 bp, Glycine max
  unsure (1)..(475): unsure at all n locations
agcttcataacattctataactgactccataattgtgaaaaactccttgcttcctctgatatccaagagacccacaaaggagacagctgcatagattggagccatgaggatgataatgataatagccttttgctctttcggattcttccaataaaagagatgctgagacagtaactgcgacgtgaaatgcatggaaagcatatcacaaaaggcagatcccagcacagtaatctgtgcagcattaagtgtacttatatctatcattttttcactgtctgagatgaaagcctataaatctcaaaacctgcgaaagaaattgagatgcctcacatcaaacaaaagggaattagagcatgaaacaataccctcagaaaggaaactgaaattaatactatcagctccacagntcaattcatactaataagaggtcactcaatttcgtcatcaagaccaaaccatgtgtgtttcatatcaa

SEQ ID NO: 252018 - DNA, 491 bp, Glycine max
  unsure (1)..(491): unsure at all n locations
ctcgaccgggatccttaagtcacctgcggcatgcaagctngnagaatggctagacatgatcatgtcagggtttggntnggntcaaggataaaagggatgccccacattatttccatgacacaaaaatgcaaaaatgatgatttggaaactttatgcaaaactggtcatgcatgcacctatgcggacactcaagtgtcaaatttttatggtcatgtgatgctagggctcaagattcatttcctctattttaatcaacccaatgtttccaaaatatgttcttttatcaatttgtgcattcatccgagtccatttcgggcgtccgggaaaatcttcacagcattcacccttcaggtgtatacacattttttcaaaagctagttacgatcagtgaattttccaaagaaaagtggaaatcgttcttttcaaacatgttggtcttcacttgacaacttattttncttttctaccttttcctacttaccctttttttc

SEQ ID NO: 252019 - DNA, 484 bp, Glycine max
  unsure (1)..(484): unsure at all n locations
gatccttaagtcacctgcggcatgcaagcttcaagaaaagatggcctcagcattttccttatttccagaagggaattctatcaatagacctccaatctttaatggagagggttaccactactggaaaacccgaatgcaaatttttatcgaggcaatagatctaaatatctgggaagccatagaaatagggccttatatacccaccacagtagaaagagtttcaatagatggtagttcatcaagtgaaagcataaccatagaaaaacctagagatagatggtctgaagaggatagaaaacgagtacaatacaacttaaaagccaaaaacataataacatctgctctaggaatggatgaatatttcagggtttcaaattgtaagagtgctaaggaaatgtgggacactcttcgattaacacatgaaggaactacnagatgttaaagatctangataaatgcactaactcatgagtatgaaattatt

SEQ ID NO: 252020 - DNA, 464 bp, Glycine max
  unsure (1)..(464): unsure at all n locations
agcttggccttatgtgttgataagtttatttatttnatnnnnatttaattttcaaggaaagaatgcaatgagcaatgcaaccaatgaatagcatggatgtatgcgaatgatgtacagttgaagattgcgaatttttacgcaggatatggggttgaatcaatttagattttcaacatggtccatgacatctttgtcaaggtgaaactggaagtaacaaggacatcaacaatcctaaatatgtttggcagtagacgaagcagtgatgtgactcgattcatcttttgccccaattttgcaagacggttacttccatattttaactngacttgatgaacctttttgtaaaagcatgagctgtggtcaaccctataatccaaggaatggcaattctgatcgccaatacttcaacaacatctcatanggatgaatgactcgggcatacttttagcttatgcacggaaaat

SEQ ID NO: 252021 - DNA, 409 bp, Glycine max
  unsure (1)..(409): unsure at all n locations
agcttgcaagatacagtcaccgcgtggtccatanatcgaaatgagaagagggcctttactagtttagaataatattcttcttctagctaacactctgcgttttaaattagaagactttgttttcattnttgcacgttcggtctttaattattgtacacacgtttcaaccaataaacagtattccttacatctcaaatttaaaattggaagaataaggatagcttttgcatcaaaactttatatttaaacttgtattagattgcaggatcacagacaatacttcgactttttnttcctgtcaaaatgagcaattttgcaaaattattcatcaatgcatgtctcttagaaaaatatttacttgcaggggtgattttgccatctagttaaacatcttagacatatatttacg

SEQ ID NO: 252022 - DNA, 313 bp, Glycine max
  unsure (1)..(313): unsure at all n locations
aaattcctaanatttcagtttgaggggcgggaaaaaaaaaaattctctcttccaaaatttgcgtccctcccgccaaagaaaatggtccaatcttatatagttgtgtggaggtaaccctaaattcaaaatatgcccctgcaacccaaatcttctgaaatcctaaactaagtttctgtgctaagtgctaaccctaattcgttatggcagatggagcggtatcaagagggaggtgacggacgctcttcggagacgcaaattgaggagataccgcaaagcccacaaaacgccctgaaccctaattcgtggaagacat

SEQ ID NO: 252023 - DNA, 397 bp, Glycine max
  unsure (1)..(397): unsure at all n locations
agctttaagtatgggtacattattattttctacatacttcaattntagtatatagatattgattgtgtctgagtaatgtcttatatgctcctaatgttgcacaagccttggttttttctcaattagttatgcaagtctaaccaagtttttttttttattaaggtctaaatgaaggaaatgcatcattgcgagttgcttactccatcaatctcttctcatgcctactcaattcagacttctacctcctttcgtcattggcatcaaagactcggtcatcccattcacctctcgtgtccttcattgtgcgcctcaagtccaacaaaatntctattcttgtctcatctggagtctttgaattaataagagtcataaattaccattcaatgaatcttctttg

SEQ ID NO: 252024 - DNA, 382 bp, Glycine max
  unsure (1)..(382): unsure at all n locations
agcttctcggctcatgctgggaacgcctctatttcaacacccgtgcagcctaaggcacccacccagagggaagctccccaagttccaactccgaacgcgactcgaccggccggtaattccaacacgacaaggaacttccctccgaggccgttgccggaattcaccccgctcccaatgacgtacgaagatcttctaccatccctcatcgccaatcatttggccgtggtaactcccggaagggtcctcgaaccccctttcccgaagtggtatgaccctaatgcaacttgcaagtaccatgggggtgccccggngcattccatcgaaaaatgcttggcccttaaatacaaggtccaacatctaatggatgccggatggctgactt

SEQ ID NO: 252025 - DNA, 511 bp, Glycine max
  unsure (1)..(511): unsure at all n locations
cccggatccttaagtcacctgcggcatgcaagcttgcattnggaatagcgaaagcnccactccatcattatgattagtacctgacatctcanacaaacaaatcaaacgtaacaagacaattatagttgttgtttgaatacctcacccactcaagtgtatcacacaattatggcttttctctaatgaaacactcttgccttttatcactctaattccccttgagttcttaggcaattcaagagattatggccacaacaaagaacaattcaccaatatgtgtaaggtaaggctagagagacaaggaaaaggttgaccaagaaaaaggctaacaatgtttttaggcacaaatgaaggaaataaaattcagaatntaggaattcaagtaacaatccttcatgcaaccaatatattaccttaaagagaatttttttaaagttcttcangcatgaaccattcagcctannattttttttttttaatttgttatacgaaatctgctcttttttttttt

SEQ ID NO: 252026 - DNA, 417 bp, Glycine max
  unsure (1)..(417): unsure at all n locations
aagctgctcaactatgtactgagcaattgcatgcacctactcattcctttgaatggacaaaaatggattctacataccctaaatctaatattttatgaatatcttctgaagcagtatacaagagtatttttatatagttattatagaaaaaaaaactatcttatgcaaaatactatcaacaaaataatgttttcttgatgtgtaaaatatgtttgctcagggcaagcataccatacgcacaataacagtggacctaagttcaaatatcatacccaaaggactagtcatgctcccgtaataatttaattcataatagaattaaacaattggttntaatctatagttgagaaatgtgttcaattactttgtcaaaaaacaatactctagatcaatcaaagatagtgcaatgaacttata

SEQ ID NO: 252027 - DNA, 469 bp, Glycine max
  unsure (1)..(469): unsure at all n locations
agctnganaggaaagagggagatagttattctatatccaatataatattcctatcaacatcataattggngttataagactcataacctaaatgcaagataactacactcattcctataataatcctttaacatcaccacatataattttcatccctatgctacttcaaatgcatctgttcttgatgagaaaagtctcattacttgaccagcaataaccattggcattttcttaatacatttccatgaccatgtcaggaactaagactataccaaacaaacataattttctagtggaactgatgttagaacaatgcttgctataaaaattcactcacagggggtagaaaatatatcagaagtcatcttaaataaatgcacaagagaacattnttaaagatactcatgccatangcgatcatcagtgctggaatttcctggaatatctaatgtatattatgaaaatctta

SEQ ID NO: 252028 - DNA, 479 bp, Glycine max
  unsure (1)..(479): unsure at all n locations
agtctaactgcacgcatgcgagctcgaangatgaattggatgtaaattcacactttgacattntagaaagagacccaacgcctattgaagagcccatcaagctacaactcggacccaaactcggacagtgtacgtagctcaacaaggacctcaccagccatgagtacagacacattgttgatgtcctacacaagaacgcggatctgttggcttggctgagcgagtaaaaaaagtagatgatgtattttaaagagatgagaattatgctaagaaaatactggcaaattattacattttatttctcattagtatttttaggcagcgtgtttctcaactttatgctgttgttcacactttattggcaaacattctctctagtcactgctataaagcatagccggcttgattcttgttgaataagatattccatttggatgcaacagacttatggagatcatttctttctacaagttgaaaac

SEQ ID NO: 252029 - DNA, 472 bp, Glycine max
  unsure (1)..(472): unsure at all n locations
gacccggatccttaagtcacctgagcatcaagcntttggtaaaaggcgtatgtagtacaatcatggccttcatcatgttctcgttaatacatttcattctaaaattcagagattcatgcaaagattattagtcacagctagtcgttcactcacaatttaaggtcacaccctcaccgattntggttcaagtttttctttctcaatcaatctgtctactgactaacaattctaaatgcaagttcacattcttgttctttctttgtctaacatacacatttgctcaaactcatgataagaaacacaaactccatcacaatcatgcattcaattcanaatgaaagcatacaaccattttcacaaaaagataaaagtgttttactgccatgtcatcgaanacaagtcaaactgttcaaaatgcttcaggagaagcaaactaactacccataaataaaactagcaaaaatgaattaat

SEQ ID NO: 252030 - DNA, 352 bp, Glycine max
  unsure (1)..(352): unsure at all n locations
agccttcataagtgaaatcaagtgcactcttctncctaagagtcctctcacgaggaggaggttgagccatgttctcaaaataaaaattattagtggaatgttcaaaatcaaaatcaccctcaacagaatgctcataatgctcacaatgcatagaatgactatgatgcacactatgtctaactaatctatgaaaggttttatctatttcaagaaccaagggttgtaaatcactctatcctcatgaacatataatgtgtttttcaacaagcacctaacaaggggggtataactacagctatactcaaacaatatcaaaatgagcctgaaatttgggaggaacaccctatactca

SEQ ID NO: 252031 - DNA, 473 bp, Glycine max
  unsure (1)..(473): unsure at all n locations
agctnctttactggagagggcctccccattatnggaacttgngccaagatcaaagtcaccggtaggacgaggccttgcaggagttggggcttaagcgagggctctttgtggtagggcagatgtccgttgttggacgggcaccgagttggaggagttttcggcaccggccgaaaagcttggatggtgttgggcatattgatgagtattgagaggggttgattgagggtttggccaaacaggagccgaggtcacggcatgagcgtccccttctttcctctttgccccagtcggcccggaccttctgttgcttgtgctggtaggggtgacgtattccaaatttcccctttttaggcctacctcgatcctcttgcccgcaaatactagatccgtaaagtagagggcatgtagcctactaactcctcaaagtagaacactgggagtgtgccactatcatgtggacatctcctttcatc

SEQ ID NO: 252032 - DNA, 493 bp, Glycine max
  unsure (1)..(493): unsure at all n locations
gatcttaagtcacctgcggcatgcaagcttaaaacatagaccttaactacaatctctaatgacttatttccattaacagaatgtgggcatgttgacaaaattatgtcaaaaaataattgtttataaagcatgacaacaaattatggttttttaaattcatgtaagagaaacttaaattaatagataaatgattaaatgcatttatatggctntaaaatggatcttcagttcttcacaaagtatataattgggcgaaaaaatgatttaaaatgtttggaaacagaataattatattttgtggaaaaaggggaagcggacagtagtaaactcacatgaatgtccttctcaccgcaacactctggtgtagatgtgtngtttgtttagatgacgaaaaagtaatctcttcatatgtaaaaaatatggtttacttcttctgcttgtttgaaaggaagaaaataatatattaagaanattatactatgagaattatatc

SEQ ID NO: 252033 - DNA, 415 bp, Glycine max
  unsure (1)..(415): unsure at all n locations
agctntaacctcatagtctctcacaatctttagatttgggagccaatccaatccttgtgtccggactctcagccacttatgatagccgccgatgatcccattactgcttcccctaagctctctgtcctttcttcacgccgcatcccatgccttgcaaactccttggagtacctttgcattggggtcactgaaaccccgtgtaatgaaaggcgtgatgcttttgtctaatggcgctcctctcatggggtagccaagctgtcttatggcgaggacatgattataatttatacaaccccttgttcccattaagggaacatgaagatagaatcttgattcttccttccttctagtgagggaaccaattaacagacgcccctctatgctagccaagagttggtcccaattcgtctttctt

SEQ ID NO: 252034 - DNA, 397 bp, Glycine max
  unsure (1)..(397): unsure at all n locations
agcttgaccaatgagttctatttccttgtctccgncgccttgaaggtcctcgccagattcccaatcgtctttatgcacggaatcaaaagctccgaatccgctttctctattatcttcaccacttgatcaacaacggctttgcaagcaagagagttgggcttatacgcggatttccttaattcagcatctttctctgccactgctgtaatctccatcacctgcatagccgaattgtactgcacagcctccgttcctttttcaagaagaacagcgaaacagagcagtgctcttgattcagtaatgctacgacaaattggcgagtttcctttcgctaatngccagagagccctcgctgccatttccttcatgttagccttagtcttaagatcctcatgat

SEQ ID NO: 252035 - DNA, 464 bp, Glycine max
  unsure (1)..(464): unsure at all n locations
ggctgcagcttngcattcatatcctgatgatgtttgttcatatgttctcaagactggactaatacatttgctgcccaagtttcatggtcttgcaggtgaagatcctcataaacatcttaaggagttccatattgcttgttccaccatgaagccccctgacgtccaaaaagatcatatctttctaaaggcttttcctcattctttggaggaagtggcaaaggattggctatactaccttgctcccaggtctattttcagctgggatgacctttagagggtgttcttggagaaattcttccctgcatctaggaccactgccatcagaaaagacatttcaggcatcagacaacttagtggagaaagcttgtatgagtactgggaaagattaagaaattggtgcaagctgcctcacaccagattttgacaactccttcttaatattttatgaggactcacacatggaa

SEQ ID NO: 252036 - DNA, 479 bp, Glycine max
  unsure (1)..(479): unsure at all n locations
agcttccatcaagtggtatcagaggacattatcttcaagcaggtgctctttaaacctccattaattntcagctttaccttctcctccattggtgnttcttcatttttctccatgtatctcctcacatgtcttgtgccaaatgttgttaacattattttttagaatttccaccgattaaacttgctatagatgctagatttgattntctatggttcaaatttcttgttcttgttcttgaaccatgaattgtgttaagtttaagttcctttgagttttgttttgctattttttgtgactgaaacctaaaccataaaattcttacaaaaaaattagattagaagaaaacctcaaaaatctagagtgacttgttcacctatttgtattttgtcatagaagtcatgtctagtcatgaaacttgtcacataagaatcattatgtngnngctaaatttattttcctagtttcttagtctaactcat

SEQ ID NO: 252037 - DNA, 270 bp, Glycine max
  unsure (1)..(270): unsure at all n locations
caacagctttncatccctaaaatgcgcccccatcttgcgacaatacatcttgagatggttcttatgacaagtcgtccctttgtacctgtcgaaatcaagtaccttgaattntggggggatgacgacgtccggtactaagcaaagatccgccatgtctgtgaacggatagtcgccaaagccttcaacaactctcaatctctcttcgaagagatcaagtttccttttttctatcgctgncgagggcggtccttctgaagacaaaaatattgg

SEQ ID NO: 252038 - DNA, 437 bp, Glycine max
  unsure (1)..(437): unsure at all n locations
agcttcaacatcagaccacttgcagggtgctggttctacatcacagnggattgatggggcctatgcaggttgaaagccttggaggaaagaggtatgcctatgtgggtgtggatgatttctccagatttacctgngtcaactttatcagagagaaatcagacacctttgcaactgtcaagcacttccacatctttggaagtccatgttacattttggcagatagagagcaaaggagaaagatggatcccaagagtgatgcaggaatattcctgggatactctacaaacagcagagcatatagagtattcaattccagaaccagaacagtgatggaatccatcaatgtggttgttgatgatctgtctccagcaagaaagaaggatgtcgaagaagatgtcagaacatcgggagacaatgtagcagatgcagctaaaagt

SEQ ID NO: 252039 - DNA, 352 bp, Glycine max
  unsure (1)..(352): unsure at all n locations
agcgagcagtatgtattgtatgtttaatttttagaacatatcaaacttcttaagagtcaattgggatctttcacataaccttaaaatcaatgtgattgaggttcgtgtcatgacttatatggttattagactatatcttaaactctatatttgttgtgaanaaaaaaatttagaaagggtgcaaaataaatgcttttggggtaaagacagtaatgcatttcagattcaactctttcttgtacattcaatatgtatgaatgtaaagggtgtcttctatagataaactcactaatgcgttctatattgaagtctcctaagctgacgcattctatctgtgtcaattgaaggacat

SEQ ID NO: 252040 - DNA, 496 bp, Glycine max
gtacccgggatcctcttagtcacctgcggcagcaagcttgaattgtggagagtatcttcataattgaataatatgaccattgtgtagattgatcttgtttcctgaaataagcaaatacttggcgtttctgtctgataggattaagactttccatatctgtcattcatagttcaatatgaccattagacatataaaaggaaataaaagatagattcatagatatgttccttttaaacaaaatcatatatgtggaagcaaggcttcatggggaatgtgattcaaatgtgttttgatgataacaatgatgacaacaaaagatgatgacaaaggtgatgaacaaaaagctcaaagatcaaagaacttctcaagtgaatcaagaacaagtcaagagttcaagaatcaaggagaattcaagactcaagaagaaatcctagaatcaagaatcaagattcaagatctcaagaatcaagatcaagattcaagactcaagattcaa

SEQ ID NO: 252041 - DNA, 409 bp, Glycine max
  unsure (1)..(409): unsure at all n locations
agcttagaacaataaactaggccttctcttaattgtctttgggcttggcgaccacgatcaacaaagtactttcgacacctactatatgttgacttgaccaacgctgttattggaatgctgcgacaatctttcaacaccttattcacacattctgataagttggttgtcatgtggccatatcgtcgtccagatgtatcgtaagccatgctccatttttcctttgagattcgatcaatccatcttgctatggatggactcaattgacgaaatttttctaagttttgatcaaacacatgcttgcaaggagtgtacgctgcatcaaatntgttatcatcaaaagttgtacgtagacatcaaactcaaattaaattaatgtataaaataaaccttacccaatttcttgaacatc

SEQ ID NO: 252042 - DNA, 469 bp, Glycine max
  unsure (1)..(469): unsure at all n locations
agctngaaccttgaatcttgatcttgtttcttgaaatcaaatttcctcttgaaccttgaagtgttcttgattcaatcttgagcatcttgaacttattctttgattcttgagatcgtcatctttgttagcaaggtaaaatcatagccaaaattgacaacacttggcaatttacccacgtctttgaaaaaaaaaatagatgtttcactagcaaaactaacattgaattgtcaactcacaatttcaatttaagtctgaaagtaataacgaatgtttgctgcaccaggtagatcaaagtcgaaattgacaacactttgatatttacccacgtctcggataaaacaatagaagtttcaccagtaaaactgacaatngaattaccaactcataatttaaattaagtatgaaagtaataatggacgtctggtgcaccangtagctgaatattatcacagtcgaacttgacaacact

SEQ ID NO: 252043 - DNA, 464 bp, Glycine max
  unsure (1)..(464): unsure at all n locations
agcttcgactcgattgtgattgttattgtttctctgacttaatgctagagtnttgtttggtgcaggtaaggagggagaagattagcgagagaatgaagtatttgcaagatttaataccgggttgcaacaaagttgcagggaaagctggaatgcttgatgaaattattaactatgttcagtctcttcaacgccaagttgaggttagagttagttacatgcttcaacttcattcctattcgttagttaattaaatattataccaaattcatttatttaggctattggaatgtgtcaggtcacttattttattgtatttatttctgcatacagttcttgtcaatgaaattagcggcttgtaacccaaggcttgacttcaacattgacgaactgtttgccaagaggaaggtcattgctgtgacacaattttcaccttttctctatataggatcaaggtttataaatgg

SEQ ID NO: 252044 - DNA, 423 bp, Glycine max
  unsure (1)..(423): unsure at all n locations
agcttggcacattggaaatgtgtttggtagaaaggaggagaaggaaatggcacttttccaaggctacacaaaaagaaaaggctgaaacactcaagtgtttttgctcacaggaaaggaagatttcctcatacaccagacgttgtattgaagatcgcaacggtcagatcatggacatctatcctatgaacctccagaccaaatttcaggaagatctaacggttaatgaaggcggggaagcgtttttaccgagacagcttcatgtagcttccttgagaagcttcattaagaggtttccttgagaagcttctttgagaagctttctcaagaggcttctttgagaagctaacgctttaactactaacacccttntaataactaaataaaataacacaacaaatataatcaaacatcaaatataattac

SEQ ID NO: 252045 - DNA, 418 bp, Glycine max
agcttcttaaaaacgtggcatttgttctcaatacacaatgcctggtacaccacaacaaaatggtgtatcagaaaggcgtaatataactttaatggatatggttaggagtatgttaatcaattcaactttactcgtatctttgtggatgtatgccttgaaaactgccatctatttgttgaacagggttcctagtaaggcagttccatagacacctttttgaactgtggacaaataggacacttagtataagacacctggatgtttggggttgccaggcagaaataagaatttataatctgcaagaaagaaaattggatgcaagaacaatcagtgaatattttattggttatctataaaagtcaaagggatatgtgtttaattgcctaatcatagtatgagaattgtgaaactggaatgc

SEQ ID NO: 252046 - DNA, 420 bp, Glycine max
  unsure (1)..(420): unsure at all n locations
tggactanntgcactactatagtgcttgatccttttatgttattataaataggtgtattaggtgaattnttgaaacaacacatcagacatattatatcagtgttcaaattttcagtacaaggtgcaaatatttttgctgaactgtggaattagtgaattactctgacttgaattattagtctgggtatttaacaactgcatgggactaatttgaattaatttcattttctgagggaattctcttgtcataaaactaatctactttagtatcttagattgttatgttttttatacaaaaaatctaagttgtccatgaatttaatggatggatatccaaatcgatcccatctatattgatcatattattattactattattagattagaatccgcctcacttgtcaccactaagaatactaa

SEQ ID NO: 252047 - DNA, 364 bp, Glycine max
atgttggatataagggctacctcatgtaatttcttatgtttatgccatcaaaatcattgaagacatgtgttatgacccctacaacaactcagggatatgaggattatgaagaaaggcgttaactacttggggacaaatgaatcccatactgaattggaaaattcaatgtaagctctaccactaaagattgagacactcacgagaactcaagctcaagtcctcattactgcaccttcattcccaacctatgattaaatgtacgattgtgcatgggccacaagaatgcattattggtgacaagctatttgcagccatggatgagatcaactttgttaggggaggagaattcttataatcagtaccc

SEQ ID NO: 252048 - DNA, 431 bp, Glycine max
  unsure (1)..(431): unsure at all n locations
actatnagaaactcaagcttatgnttttggtccctctaagttaacaatttttcttttttggttcacataagttcatttttctaattttagtactttgtaaattgatgcttttccaattttggttcgggtaagaatttctgctcatttttagtccttgcatatttatgttcttttttattttattttagtccctttaagattataattttttcatttatagtcccctataaatttgcatttatatggaccaaaattaaagaacataaacttacaagaactaaaattaaaaaaaaacttttacagaccaaatataaaaaatatgaaaggcaaaagttttgcctttagtaaataattaagaatgtgtgtacaattactctacaaaaataaaattcacgagcaactaataacaatgtaaggaattaacatatgag

SEQ ID NO: 252049 - DNA, 402 bp, Glycine max
  unsure (1)..(402): unsure at all n locations
ntaagtactgcgacggtttcctcttcagaaaagttcttttaataggatagttatctataggcataggatccttagttccttatatagttgcagagtccaccgtatatttgtctcctgccaaaagaaaattatgcttttaccttcttgctcgtgtgataatatagtaatagcaggaaaagagaaggattagtaatttaagtttactcattattcctcttttctattatctccttgaatctgtatgtgtaatcaaattatcaagtcaggcccttttgtctaattatagcctcttttgggcttcgttaattaggaggttggactagtgacatccataatggaagataaagatatatataggtcccaaaccagtggtggagactagagaagagagcaattgaattg

SEQ ID NO: 252050 - DNA, 417 bp, Glycine max
tatcatagattcattgttggaacgcctacatttttctcacttcaagttggtagccctggacatgaggaggggtgctggaaagtcatcttaattgtagtcacccttggcccaccttagttgccgcttcttccggctgccttgattgcagcgttgaaagggggtgtttagtcctacatggactagatatatgacttaaataaagctaataaagtttggacaatcctcaccttaaatagattgatatcctttctctcatctttcaacactatttctctctctctctctctctcttagattctcttaattctactaaaatcattttcagccacaatagatcatagtccttggtcaattgctctaaattcagatttgttgatgatcttgccaccacattctatttgttgctcctccatgtta

SEQ ID NO: 252051 - DNA, 415 bp, Glycine max
tgcaccaacacaggtatttctatggacctttttattcttttccacaacgaatgtagccatattggttgcgaatggcacctaaggggagttcaaaccaataacaggtcataatcaaaagtggcggcatatgataaatgttctgcacttgcaaatacaaaaaacccattgaatgcaacatggtctacctgcaaagaatgttgtgtcccagcatcgtccttcgtccgaaccgatgtttgcgcctcatcatgcgcattccttgtacacatgcaacaacgttgactaatgtcagacacacaacaaagaaagccagtataaggacctcagtgtttgcgatatttaatagcgacactcaccgtgtatcatgtctccccaacttgtcacagtccatgaatatgaaattcggatgcttgatgat

SEQ ID NO: 252052 - DNA, 420 bp, Glycine max
  unsure (1)..(420): unsure at all n locations
acctataaaactcagcttcgcaattatgttgtggcaaggatctttttggtctgagaagaggcaaatatgattatcctgttttgatgaataagaagcctggggcaaatggagagaataagaaggagggaggaactcatgctatgactatcgttcctacatggccaaaattcccaccagctcaacaatatcaatactcagccaatattagcccttctcattacgcaccaccctatcaacctagaacacacaatcattcacaaaggacacccctaaatcagccacaaaacctgtctgctgcacattcgataccaaacaccacccttaacacgaaccaaaacaccaaccagggaaggaatttttctagccaagggtcctcaacctncatttttccaacgatacaactcgaatgcaacatgtgct

SEQ ID NO: 252053 - DNA, 237 bp, Glycine max
gacacataaaactcagctttcaaagtgaaataggtgtagccatcttccttatagtcctctcatgaggcggagggggagccatgttctcagtatgaaaaaaagtagttgaatgctcaaaatcaaaatattcagaatcaccaacaacaaaatactcacaatgctcacaatgctcaaaatgcacaaaattatcaggatgcacactatgcctaactaatctatgaaagggtctatctattt

SEQ ID NO: 252054 - DNA, 357 bp, Glycine max
ggcaactgactttattgagcagcaccaaggcgggacggacacggcgaacgaaaggaaccagccaaaggcgaggctaaacgacagcctgaaaccactaacgaaaacgcccagacaacgagagagccaccagcccaagacggaacgcccatgacggagagagagatgaccacaattatggcagacacgcgacccacgttccaccaagaaaagctgagaggctacaagccagccaaccaggcggatcgcgacacgacggcaaaggaaggaaccgggctacaaaaggcacaacaacatgctgcaggaggccccaccacaaagaagacccccaaggcgccgagaaaaagaagaaagcccccc

SEQ ID NO: 252055 - DNA, 382 bp, Glycine max
ctgggatgattgatggggacccggtttttatatttaccaggatatgggctacgcgggagtacgtgagctcaaatggaggtgggcaacatgggatggtgggtttatgcgcgcattgtggatgtggaaaacttgttgtgcaccatctgccgaacgccacctagtaccacatgtgatgggtaccccataatcctacaagtttgagatgatgaagtgttgaaaggtgaaacttcctgcttttattgttgaccacagagtggtacctggagatatgtcgcgggggtcaggagaccttggggacgttacgtggggtgctattgcccaaaacaaacttgatcaatccgacccaacccggcatagtctgtcaggagaacctggatgtact

SEQ ID NO: 252056 - DNA, 335 bp, Glycine max
tattaatatgactaatgacgacactttattaattttttgatgaaagcatcatgcatcaatgactagtatgaaaatggggttgaacaattcttggaatttactgaacgaaatgcaccaattattgatggaaaatatttttgtccctgtgctaaaaggtggaaggggagatgattgtcaattaatgacataagatcacatcttatacatgaggggatcattcagaattataaaaattggatatgtcatggtgaattgtcaaacaattcaacaacgtctcacactgagcatgttgatgtaaacatcacacatcatatataggacatgatacgccatct

SEQ ID NO: 252057 - DNA, 407 bp, Glycine max
tggagaggatgcttcaatggaggaaaataagttggagagaaagagagaggggggagcacgaaattgaaagaataaaaaaaggagaaaaagggaactttgaagtatgtctcataagactctcattcatcaaagttacaacaagtgttacacatgcttctatttatagactaggtagcttccttgagaagccttcttgagaaaacttccttgagaagctcttttgagataacttccttgagaagctagagcttagctacacacacccctctcataactaagctcacctccttgagaagcgtccttaagaagattcctaaagaagctagagcttagctacacatacctctctaatagctaagctcacctccttgagatgagaagctagagcttagctacacacgccctat

SEQ ID NO: 252058 - DNA, 300 bp, Glycine max
ttgggagagatgttgtcacattggtcctttacgttggtgattatgaatcttgcaagaatttaatttttcaatgtcctttatttggttaaaattggaaagggatccaatctttatttaatagtgtgatcaaccttagctctatcaatgagcttctctcctccattactattggttgggccaaacatattcaaaacattgttttggagcaactactttttctgtttgggccatatggcattgcggaaacaacaggcacttcaataacaaaaccatcttcttccactcagctattgcattgat

SEQ ID NO: 252059 - DNA, 409 bp, Glycine max
  unsure (1)..(409): unsure at all n locations
tattnttcnaaagttgaggttttggtcgaatttatattattccttgggcttaagaattccaggggtttttgaaatatctgcaatacagcctggagaaagaataacccatctgaggaatccagtagggtgtgcccaaaatggaagctttattgccatggaacaaagtcaaaggatattaatgaagagagacaaattgaagggagaattgaaatctgacctgagtagtgagtactgagaaggatgttgtcgccgatcatgtatggagtaagtctcagaaatcataagagcgacttaaattagttttatcggggagacagcaagagcttcgcaaaaccaacctttttatccgacaataaagtctatactattttgtgagttttgaccttcttggttgataacagctaaaaaa

SEQ ID NO: 252060 - DNA, 421 bp, Glycine max
  unsure (1)..(421): unsure at all n locations
tttattntcactttatttcccataaatcttaaaatatgttttttagctgaagaagtctgtctttaagaaatttgtttgttggtacgtatatcatcatatagtaagatgatatttcattctaagttccaaactataagatgcaagtcaagaatgatttttaaccgtacaagtcagctggaatatgtaagagttcctaactacctcaaaaataaactgtcagaaattgtttctctacaaatagagaattttcatatgaattaatatcgttcatgtgcttcttctgaaagattatttgcataagaatgataatatgtaatatacattgattaatcacctgaccaacctgtttataaagccaaaaaattaccagtgagaatgatgtcactggaattgcttaattcacccataaaaatagtctttt

SEQ ID NO: 252061 - DNA, 105 bp, Glycine max
cttacccacatccaattcttaagggctatcctttttggaatggccacttctcaattgcacctggcacccccacacaaaactcttgcggaacaccaatcgaacttt

SEQ ID NO: 252062 - DNA, 423 bp, Glycine max
  unsure (1)..(423): unsure at all n locations
nttattttcactntatttcccataaatcttaatatatgttttttagctgaagaagtctgtctttaagaaatttgtttgttggtacgtatatcatcatatagtaagatgatatttcattctaagttccaaactataagatgcaagtcaagaatgatttttaaccgtacaagtcagctggaatatgtaagagttcctaactacctcaaaaataaactgtcagaaattgtttctctacaaatagagaattttcatatgaattaatatcgttcatgtgcttcttctgaaagattatttgcataagaatgataatatgtaatatacattgattaatcacctgaccaacctgtttataaagccaaaaaattaccagtgagaatgatgtcactggaattgcttaattcacccataaaaatagtctttttg

SEQ ID NO: 252063 - DNA, 421 bp, Glycine max
  unsure (1)..(421): unsure at all n locations
tcaacgattctgataatggtcgtggtggatatctttatgatcatagngagcttaattaaagaaaactatctttaggcatctaattaaagtaattatctttagagatctaattagaatatttatctaaagtgcacctaattaaaataattatctttagggatcatattagaatatctatctatagcgtgtctaattaaagtaattatctttagaagtctataaataagaagttggagtttgtacttgatggagtcaaaatttattatacattttatgaacatgagcttttgagagaataattgcactgagaataattaaggtctgaatctgtaagactcttcaatctcttttatttctaatgcaatattatatggtttttagttattatatgatcatgggtgattaaatttcttacaactcg

SEQ ID NO: 252064 - DNA, 225 bp, Glycine max
  unsure (1)..(225): unsure at all n locations
tgaaaccattngacttgtaatacatcaaaacatgaaaaaaaggtaacaatttactaaaacatgaagaaaacaataatgtggccacaatataacaattaaatgaaccaaacatgttgggaaactttgagaacggacattaacaaaacatggggaaaggcttcttttctaggaaatattgctcaacaaacattgacatttaagccatttaaaaaaaattaaaaaaaa

SEQ ID NO: 252065 - DNA, 419 bp, Glycine max
  unsure (1)..(419): unsure at all n locations
tggttcgaggtacttacccgttgaagatcgaataacgatgaagaacgaatgaagaacgtcgaagaacggtcgaaaccttcgtgaaattcttcacggaaaacgttacggaaacgtttcggaagcgcctcggcttagattttcttcacggaaacaatttttccaagcaaattcgaaagagagagaagtgcctaaggggctgaacccttttcttcttcacttcctcccctatttatagcaaaataggggaggtggttgccgcccagctcgcccaggcgagccaggttgcttcctccagaagcaacaaccttctggaggaatattctggagggcccaagtgggcctgggtgctatntgcacccccatttttactaagtacacctccctctgcctttttttggtgattctnttttcgaaagata

SEQ ID NO: 252066 - DNA, 417 bp, Glycine max
ttagtgcccttaattttgaagcaatatttgtcttttccatattttattccttgacatttcatttgccttgatacttcatggaactaaagttcttaagaagagtacttgtttccaccttaacgctttttgcaaagcgcttttcaatttcagcaaggaattctttggcactagttatatcatctgaaacagtacccttaaagatcttaggaatgatgcgcttaatgatcataagactcattgctcgctctctgtgtgatgctatttcgcaagtgtactgagtcgcacaaataatataaaacggtaagaacgagtatcgtatccacagggaatttgttccactcagacaatgtatattcagtgagcagacatttgtataaatcgaaagcaaagtaaatatcaagttggatttttgtgtgg

SEQ ID NO: 252067 - DNA, 393 bp, Glycine max
  unsure (1)..(393): unsure at all n locations
ccactgtccatcaccatccttacggtaaccaaatgaagttagtgcatcacgcacctatggcataagattgcttgacttgaacaaacggttcatctataagagaaatttgaaaatgacggataaaaacggttacccatctgaggatatggaagaggtgcattggcccataatgccttatgcattcggtacctaaccaagtgagcccaggcgatcttgcgaccagtatggatagtccacatcaaaactcaatcctcctcagaggcttgactcatattagacgaacggngaaccacacttctcatgataatatagngcatgatgcgactatctcaggttaatgactctgcagcaactttccgtcatattgagacacctacatatatatatatatac

SEQ ID NO: 252068 - DNA, 175 bp, Glycine max
gccctggtgtgtcatctcccctcaacgggaatctcttcttttgcacacgcgatataaatattgggggttataagaataacgatgccctcaaaaccctccactgagaaatcaagggctacatgggcattcgtgaggacatttatcaacagcgcatgaagaggctcgaagtttatga

SEQ ID NO: 252069 - DNA, 414 bp, Glycine max
tggaggagaacatcagtatttccttctcacttaagaactctttccagaggatcctccactcccacactagagaatgaagattccaacaaagcatcaatgggatctcttgcctgaattaaattacaggtaggaaaataggtaggctttttcacaatattagataaattaaaaacaactttctcatcacccatctaagagtgggcttaccttgcctaacctttacaactatgtcataagtattgaagaatatacatcttagtatgattgggacattcctatattcctccatatcgagcaccactaaatcatccagaaagacgaacttgtccaccttaaccagcacgtcctcaactatgcctttaggatagacaatagacacatgtcaccgagttgtagggtgatgtttttgagttg

SEQ ID NO: 252070 - DNA, 417 bp, Glycine max
  unsure (1)..(417): unsure at all n locations
ccagctcgacgccacatcgccgagangacatcataattttgaatcatctccacgggtctctattttttaaaaaaaaaccgaagcacagttcgtgaaaaccatctatatatatgacacatgccaccactctaaaaaatcacacattatctcccaacccaattttcagaacaaagtatgacatttttgggagaaacaagccatcaaatgattgtgaactccacattgggttttatttttccaaatggatcgattatttacaatgataggggtgtttattttcaaacttgcactccactacccatccaagtacctaacgcttgtgattttgaaacactacaagccagaatacactataccctacaactaaccgacaacaataattggatgaaatttagtatcgacacctcattcacatat

SEQ ID NO: 252071 - DNA, 168 bp, Glycine max
  unsure (1)..(168): unsure at all n locations
ngaatctttcttggttgggtacatgattatatgttatgctcccaaatactctcaagtgatcaactcttggcttcactccactccatgcttcttgtggtgttagatctttcacattctttgttggggagcgattggacaaataaccggcacattcaacaatttcggccc

SEQ ID NO: 252072 - DNA, 421 bp, Glycine max
tggatgttggttataggggctacctcatgtaatattttatgttgatgccatcaaaatcattgaagacatgtgttatgacccctacaacaactcaaggatatgaggattatgaagaaaggcgttaactagttggggacaaatgaatcccaaactgaattggaaaattcaatgtaagctctaccactaaagattgagacactcacgagaactcaagctcaagtcctcattactgcaccttcattcccaacctatgattaaatgtatgattgtgcatgggccaaaagaatgcattattggtgacaagctagttgcagccatggatgagatcaactttgttaggggaggaaaattcttataatcagtaccccaacaatttcaataaaggacaaggcttcaggcaaagtcaatgaatgtttatgtc

SEQ ID NO: 252073 - DNA, 503 bp, Glycine max
  unsure (1)..(503): unsure at all n locations
cttttatgaaatgaagacaaacttcttgttggttacttatcacncaactactcttgatttaagttccctttctatctattatgaatattacctttgcattatcctttctcgcgcttaattatattggttatagcttgatcacccatttgcatgtgaagtattatgggtagcattgagaagcattatttcttaatagacctgggaaaatgtatctaaataacttcatcactagggataggttgatagaatttaacctgttatacatctntattcttaatacaatttaactattctatctcgcaaagggatttgagagagaagatagataagttacgctctttcacttgagggatctatgttagagtatataaatcgatgccggtgtgaaattggaatatacgtaattagagaaaaatctttaatattacatcaagagtagctctagtaggctaaggtctcaccattcttatcttctgaatataacatctataatattgcctttc

SEQ ID NO: 252074 - DNA, 417 bp, Glycine max
tgtcacatgcagatgcttagccatttatatttttatgcaaaatatcttcatacattatcttcagaccgtgccgtttcataggatgcttcagttaatggtaatttttgctatagattctacttgatataaatttttgttcgataataataatattattatgaatgataatttttttttacataaatatttaactacgttgaaataatcccatgtgtttgggtgcagcatctgttaattacatgatatcatcagaaatattagtaacatactctttcacatatgcacactctattttattggttaaaatatattgaaaagtataaaattaggagaaataattattaaataatatatgtgacctcattcaatttgtgagttgtaataaattttaaccaataaatagtattttcaaaaaag

SEQ ID NO: 252075 - DNA, 412 bp, Glycine max
tcaaattcagagaggtagttgtttaccatggttcgctgctgcagtttacatagcagtccagtgggatcctcgtatgtggttgatgcgaatcgcgaatggagagcatgaagaaatgccgggcaagacgataattgaccattccggtgcatccattgaaaccatgctaatgcctaaccttccatatagaatgatgcgatcgtgagtctctcatgatctggtgttgtgtgatactcgaagaactgcgttatcttgaagatccagcctgtggcgtcagagccattgaatctcggcacatcaagcttcatccgatgcgacgctgtgtgtgatcctgatgccgaaaatgaagtcgcttctggttgtgcttgttgtggattatatctgttagcttcgagatgtgctaacctctctgata

SEQ ID NO: 252076 - DNA, 104 bp, Glycine max
  unsure (1)..(104): unsure at all n locations
ntagaagtgctagatagagggtactcctactagcttctaccgcctatataccaaactcatccaaattgaggtcaaaagtttcaaagggtaataggttgtcccac

SEQ ID NO: 252077 - DNA, 421 bp, Glycine max
  unsure (1)..(421): unsure at all n locations
tgaccagtccacataaggttgatttcttctttctttggctttgntcatctaatatcaataatattaggatccataatcaatttccattcaatcatatagtgtactgaataaaaactaacccgataaaagcataaagcgcgactttcagtcaatgaaatttgcgttagaccaatgaaatttgagtgaatgaaatgggtgattgaatttgcgtcactcatttgcagatcatggttaggaccagaggactagatcgtgccttaggtcaggttattgacagaggtgtcggcaaaggagatcgtgatgattccgatgatgctccgcagcgtcgacggcctactacatacgcacggaggcagcgagttgttgtgactgcggatcatgtcgatgagccagtcatccctttgccagatgttcaggatga

SEQ ID NO: 252078 - DNA, 315 bp, Glycine max
  unsure (1)..(315): unsure at all n locations
tcccgcggacaactctncatgtcacacaccaaatgacataccgaggaattttgtagtaaaaaccaaaactcctaatcttctcatagcgcttgcagagaagctaaatctgaattatgacgaggctgagagatggattgctcatctcatccggagctcaaagctagacgccaaaagtgactccaaaactggaacagatatcacggaacctaatcatctaaatgcgcaagttaacaatgatgaagcacaaaatagataagggcgcgtatagcttcctacagaaaagtaccattctgactcaatatgtacaccacattc

SEQ ID NO: 252079 - DNA, 396 bp, Glycine max
  unsure (1)..(396): unsure at all n locations
ggatcgtcttttaatttggtgcgaaacgattttctagggcctacaacaatcatggccaaaaggtgatgaagtcgtttctgaacatccactggaactagttgagtgcaaggccatccatatagaacgaggcgaccgtagtttgttcttcctccggagttccctggtagtcgaagaactgggagatcttaaagatccaacccaatgggtcatgaccattaaatcgagggatgtcaagcttcatgtgttgacctgnaggtgacggtgtggctaaggtgaactaaggagcgtggtgagctgtgataactggttgcacatggccgcaactttactggccagatcagaaagcttgtccgacagagaagaaatagcttcttcaattgtttccatgtcgaatgg

SEQ ID NO: 252080 - DNA, 352 bp, Glycine max
tgtagaatggctagacatgatacatgttatggtttggaccaaatcaaggataaaagggatgccccacattatttccatgacacagatgcaaaaatgattatttggaaactgtatgcgaaactggtcatgcatgcacctatgcacacactcaagtgtcaaatttttatggtcatgtgatgctagggctcaagatacatttcctctatattagtcaacccaatgtgttcaaaatatgttcttttatacatttgtgcattcatccaagtccatttccggcgtccgggaaaatttcacagcattcacccttcacgtgtgcacacatttgatttgcacaaactagctatgatcagtg

SEQ ID NO: 252081 - DNA, 420 bp, Glycine max
tgaaaagctaaagcatgtgagagacactgaaactattgtctcttgtcaaagacctgtactcatcaatatcatatccaaagaacgtgaatggctcaacaactcacgtgcctataagcaatttattggagcacatgtccttcaatataattgtgaggatgatagctgggaagagatttggaggggacacagttaatcaagaagacaatgaggcatggaggctaagaaacgctatcagagatgccacatatctatgtggtgtttttgtggcagcagacgctattccatcccttagttggattgatttccaagggtatgtgagtttcatgaagaggactaataaggaaatagaccttattcttgagaagtggctggaagaacatctaagaaagagaggtgaggagaaggacggtaaatgtgaaa

SEQ ID NO: 252082 - DNA, 429 bp, Glycine max
actaagcttgcatgttttaggtgagcctgatttcagttttggtgctcatgctttgcttaataaggattgtgagcttggacgtggaggatttggagcagtgtaccaaacagttcttagagatggacattcagttgccataaagaagctcacagtatcaagccttgtcaagtctcaagaagattttgaaagagaagtgaagaaattaggaaaaatcagacaccaaaacctcgttgaacttgagggttattattggactccatcactgcagctcctcatatatgagtatctctctggtggtagtctctataagcatctccatgaaggatctggtggaaatttcctctcatggaacgagaggtttaatgtgattctcggaaccgcaaaggccttggcacacttgcaccattccaacattattcactataacat

SEQ ID NO: 252083 - DNA, 420 bp, Glycine max
tttcactcgaaagcctctcatagactttctgagatgtttagggatgcccgaaatgaaaataaaaggccatattggattggagatcgtgtttggaatgatttgttatcacattgaaatgcacctgagtatcgttccaagtgtgcacaggccaaaaaaatagggcatctgaaaagggtgggtgtatgcacacaggtggttctatcagcttgcaggatcacgccattcgcttggtatgcaaattaaaattataatacatagttatttatacttgtttaatttgtcacttaatgtttattttataatgtttattaatagtcagaggagtttggtcgatctgtatatgtagatgagatctttcagcaaactcattttcgaaaggataatggtcaatttgtcgatgatagatctagaaagacacat

SEQ ID NO: 252084 - DNA, 416 bp, Glycine max
actaagcttaaattgaataaagcatcatactgctgtaatctattaccatatatgtgtaatcgattacacagtgcaaattttgaattcaaatttcaacaccggtggaaaacaattttgggccactagaaatcaatatattcctctggtaatcgattaccatagagtaaatctcttgaaaaagactttttaacttaaatttttggccaaaccttttgctacttcaattaggaattcccttcctatttaatatacccttcctaagactctagagactgtcttgatcatccatcttgaatatctttaatttctttgtcttgaataaagctttgagaaacatgtgatcctttggcatcatcaatacattcagcttgatcctttgtctacaatctccccctttgtgatgatgacaatccctg

SEQ ID NO: 252085 - DNA, 418 bp, Glycine max
tgccaaagtgaaggctcaagtttctgaagtcttggcgttatgatggaaaacattgaaaaggcaagacttatatacaaaatggcattgcttagagttctttaactgagttgatgtcaccattcatcaaatatgtagtactaatttggattaaatatttcattaacttttctcataggttcttgatcgtggagaaaagattgagatgcttgtggataagactgacaaccttcgctcacaggtctcattttcttctttatattttatttcttaaatatatttttaatctttaaaatatacatgattttttatttactcttttttatttttgttaaaatagtatctacaatattttcttttgtgttaattagttactgccaacgtcgttacctagctacttacttttaattactctattatc

SEQ ID NO: 252086 - DNA, 419 bp, Glycine max
ttatcagtggtgatcaagatggatcatgatgtttggggaatctcttgctgcaccagaagagctttcaagtttaaactgaaatagttctttcttcttcctgagcttctttgttcttatgttttggccttttggatattatgattgagatatcatcaggttgctgagtttttctatggttgcaaacctttctgcgaagtgatggtaggatgaattggatcaatcacgaaaacaaaagtaaacaaaaaaatatattggactattggagtaattacaaatgctagcaacacatcctttgacacatttttttgaacactctactactggctgaaatttattgaaattcactcaaattttggtgagtgccacttatcatataatgaatttctctcctaattttgtagttttcaataaatttctac

SEQ ID NO: 252087 - DNA, 409 bp, Glycine max
  unsure (1)..(409): unsure at all n locations
tgtccgattatggggtacacatcacatgttgttctatgtggaggtcaggcgatggtgcacaacaagttttgacgcattcacaaatcgcgcataaacccaccatcccctgttgcccacctccaactgagctcacgtactcccacgtagcccatatgctcggttctctcaacaccggggccccatcaatcctcccaagctttcgcaacatccaggtaatacaacattcagacagcgcaaactatcacagccaagaaaacagggcaaaggcagaaaactctgcccataacagcaaccaaaaccacagcttttctcacttaaagaccccagtaacaattgcttcgttccagttcgttaacgggtggatcgactcanaaattttactggaaatctctagtacataagcctacat

SEQ ID NO: 252088 - DNA, 376 bp, Glycine max
  unsure (1)..(376): unsure at all n locations
tgtgcttagagagagcttancctcttttttggttttttactaaaaaccaaattgattcttataaaggaagtcattcctttgtggcaaatcctccttcgacttatcgattctccgtggatcgcggcatcattatattcatcttcttcatcttatccatatttttggtttttctgttcttgagttcttggaaggtcaacaatggtggttcttgaatttgcatccaaacgatccaaactatgtgtccatggctgggattgcataactaacctacgcctaattctttttaaccaaccaataaagggtttactaatcaattttgattataataagtattatgtcatgtcattcttggcttacaagtattttctaggctact

SEQ ID NO: 252089 - DNA, 361 bp, Glycine max
tggtttggagaggtattagaattatgttttttttttatccttgaagctactctatgtagcttatatgttcatctttgatttgatatgaaaattacatcatatgtacgttttttaatgttcatctaaactctgtaaatcgatactcacaaatgtattaagtgaaagtgtaagggcctaagggggagtaattttaatcacacaacccaatatcaaaattagattttaatgaaataattctgatcatatatataatttattgttaaaattaacttttttcaccttatacatacacatacacctgaatgaatttgttctttatttataaaattgtgaataacttctgtaagtggacagatctaat

SEQ ID NO: 252090 - DNA, 410 bp, Glycine max
taaaactcagcttgatgatatattatttttcctttttgttttcagaaatgcaaagcaaaatgatggctgttgatgttgcagcaagagaaccagaaaagagtgtggtgatcaagtgaaacagcagaagtcttgacgatgcatgggcatggcgtaatatggacagaaaccaataaagggttcaccatatcctcgaagctattataggtgcagcagttacaaagggtgtttggcaaggaaacatgttgaaagaagccacttaaatcctgcggtttttctggtaacctacactgctgaacacagccatccacacccaactgcgagaaactctcttgctggaaccacaaggaagaacaattcccttggtccttctccaaccactcatcgttaccaaaagaatactaattgttgct

SEQ ID NO: 252091 - DNA, 357 bp, Glycine max
tggaaagaggggcctatgccgaactctttattatattttaaaatcaattgagttgtccaacagatataaactgcacctaacaaattgagacaaccgatatgagatttgagtattatcccatccatcctattcatgcccaatatatattagacttggtgcgtgaacaacagatgatgagttataagtcttgtatggataatcaaccgttgaataattattttaattaacttaacttaaaaatacttattatattgttaaatttaaccggtggccattcacgacctgcatgaatatgaatgcaggtcatccattttccaaatgaaactatgtatcaaaataaaaacaacattagagctg

SEQ ID NO: 252092 - DNA, 424 bp, Glycine max
  unsure (1)..(424): unsure at all n locations
tatagacaatctccaaaggcttagacaaaggagtattattgttgaagaatatagaaaacaaatggaactactccttttaagagctggacttagggaggaggaaagaacaagcacagctaggttacttagtgggcttaatatggaagtgagggataaggttgaactcctcccatatagggacctagatgggctagcccaacttcgtataagagtggagcaacaaattaaaagaaatccttcttcaaaatcttatggctttcactatccaacgaaggaccaagcccaaggaatttttagggctgcaccttcaaaacccaaggaagataagggtaagaccatagagaaattgttagtcgatgaatacgactaacttttgtgtaagaaacctgngtaaattgtataaactcctncaatttatggttat

SEQ ID NO: 252093 - DNA, 410 bp, Glycine max
  unsure (1)..(410): unsure at all n locations
tatgttatggtgcacctttataaaagttttcacttgttattgattgngncagacacaccccangagttggttaatgagaatagttaaagaagaagacattgatgattcttcaaattcattttgtcttgcctttccttaaggtggagcgtggtggtgctcctctcactaatacacctgagggtataagatattttggttaaattggtcccaaaccttcggcatcatcagtcttaatctttcaataattaatctaaacaaaagtagttatggccatgggtttttctctttgttattgatacaaataattattggtccaaacaataacaattgtataacctcaaaaaataatcgtttatattctatgcaaaactacaatttgttaaatattattcattattcgtaacattcat

SEQ ID NO: 252094 - DNA, 371 bp, Glycine max
acggaacaaacacaagcgaacgacaatgtaacaaccaccccacacacgagcatcggtcgtctctaagaaagcattctaaaccaaagacctacacaggcctctaggaaatcaagaaatcgtcgatacacaacccccacgatattatgaacagaagagaaagaaccaccgtgaacaaataaccacaatcacaagacatgttccatcgaaacccatgaggaggaccttgcgaccccaataatccaaaaacggacaggctaacaatgcacaagaagcagcaacaatcaatttaataatggcctttaaacatgcaaagcaaaactgactgcaataacataagcgagacaacggacgagaaaatgcaaacacaacct

SEQ ID NO: 252095 - DNA, 422 bp, Glycine max
  unsure (1)..(422): unsure at all n locations
ttggaattctccatgggaccaattccctaactataattatatacagtccccactgctactacaaaaaatttaatttccatcatcaccaatttcctaattgctctcttagctgagcatttttggaactgttcagcatgctatgtaattgatatctacaaaccactaaaatttcaactaaaacctcttgcaatggaaccatgatctactttccttttgttgtccttcttttgatttggggattttgtgaatgagcagcttcattcttaacagatttaggaccggatttcttgtcttttctgacaatcctctgggccaatgccttaagcggaactgtaacgtccaaaggaagaagcacctcttccaactccggccaatcaagatcnttcgagtcaccatcttcatagtgaaccctgtaccaccct

SEQ ID NO: 252096 - DNA, 354 bp, Glycine max
agacatatatatgggatggcttaaaaaagagccaaaattcatacagcttcaaaagaaaataatatcaaacaattggaccatactattaacactgagattttactattcacactgcatacattctttgagactgatgaatctgtttgaaatggaatgatcttggaggatattgtcatattgatacaatagaaattagaagacacattacctgtataaagcatcttatcccacttctgatccaggagtgcagatgtttcgggaatagccccttcaacaactcttatgtgagagttgtctagatattggtcgatcaaaattgcaagcagtgatgatgctgctggagaaatatctgat

SEQ ID NO: 252097 - DNA, 417 bp, Glycine max
  unsure (1)..(417): unsure at all n locations
tanagagaaagctttaatggaagaaaagtttgtttatatagagagggggcgggaggcacgaaattgaaggagaaaaagagggagagaagttgaactttgaagtgtttctcacaagtttctcattcatcaaagttatgacaagtgttacacatgtttctatttatagcctaggtcactaactaaatgaaagcttccttgagaaacttccttcagaagctagagcttagttacacacacccttctaatagctaagctcacttccttgagaagcttccttgagaagctagggcttacctacacacacccctctaatagttaagctaacctccttgagatgagaagctaaagcttagctacacacacccctctaatagctaagctcacccccatgccaaaatacatgaaaatacaaaaaag

SEQ ID NO: 252098 - DNA, 416 bp, Glycine max
  unsure (1)..(416): unsure at all n locations
ttgagggtgcgcaccccaccatcttttcatattttattaccgancatgtggctaccatcacgattatcggctccctttttgcacatgttctgtagttgcatcctatccggaaccatatcaaaattgtactgatactgcctaacaaaagcaaccattatgtcctttcaagaatggactcgggaagattccaagttagtgtaccaagtaacagctaccccagtaagactttcttggaaagaatgtattaacaattcctcatcttttgcgtattcccccatcttctgacaatacatctttagatggttcttgggacaagtagtccccttgtactttgtaaggtccagcaccttgaacatgggaggggtgatgatattgggttctaggaacaactcttttatggtagcaaaggcataatc

SEQ ID NO: 252099 - DNA, 353 bp, Glycine max
gatgatggtctatggaagcggatgggaaaagtgcattgcctgctttattacaatcacttgattcttcatccttgcactgtggcgaacaatgtgcttcacgcatagtcaaaacagcagttgaggatttctcctcaactggcattacattcaaactgggaatactaatcttttttgcagaatctgaatgattgatcctccttcccctaaatacgccccataagaaaaacaacatattccagcctgccaaaaaataggatcattagcagtctaaacgtgttaaaaagtgaatttaagaaaattattctttgagacgtcattgtcacaaacaacaatgctagagtcaccacctctac

SEQ ID NO: 252100 - DNA, 407 bp, Glycine max
ttgcggatttggtcttcgctggcgatatgattttgtgggtttgaaaagaggcaaatttaatcatcatgcttggacgaatgagaaaactggggcaaatgaagagggtgagaatgaaggagaaacccatgttgcgactgccgttcctacatggaaactcccccaccagctcaacaatatcattactcagccaatatcaacccttctcattacccaccacccagttatccataaaggccatccctaaatcaaccataaaaacccacctaccacacttccaatgacgaacaccacctttagcacaaaccaaaacacctaccaagaaatgaattttgcaaacgaaaaagcctatagaattcaccctaattccggtgtcttatgctgacttgctcccatatccactcgataat

SEQ ID NO: 252101 - DNA, 421 bp, Glycine max
tcttttggaccttgaacaagcaatcaactcctttttttttttcatgctatgtgctcgcgactggtccctttcttcccttcgcaacttgagttcactattgctaccccatagagctccgcgaaatttgttccggccatactcttccttgcgagccctcttggtctcttgttcaagggctcttgcggtaattgcattctcttcccgtaacccggcacactccttccgaacgtgtgtagcagccaacttgaacttctccttggcgagttttgcctttcctaactcgcttttgagagcttggacttcttcgtcctcttccggtgcttcaaaattctcttcgatgacgacttttaacttggcgagccaatctaaacctcgtatgcgaactttcagccattcgtggtatccaccaatgatgccatta

SEQ ID NO: 252102 - DNA, 420 bp, Glycine max
aaaactcaacttatcatggtcccctcccgacagttgagactattcttgctcctgaagcaatagatcaccatcccatcgtcacccctttgtccattctagactggaaatgggatacctctgttactcctgctgtttgcaaggtgcttgttcagtggacatgattacccccaaaagatgcttcctaggaaatatggcctgctttgaaggacacgtacaacctcgaggacaaggttattttcagaggcgcgagtgttgatagcaatatgcagtatgataccatagttgcagatagtaaaaccaatcacgaggaaatggaagtggcaaatagcagtacaacaaacagaccaaaacatattacaagcaggctcatttacctgaaagagttcgtttgatggcagcaagtctaacttggcttattct

SEQ ID NO: 252103 - DNA, 427 bp, Glycine max
aactcaagcttatagataatgctagagataaatatttgtttatttatttatttagaagataattataccttgtagataatgtctgaccttatagataattaatcaccttccaataaataaaatattcaaatacatgtgaatattaataagttaaagataatctgtttgttggggagcccggctgctgagggttgagcgtccaccctcatgtagtatggctaatatggaggattgacacttgtctctaggtgccaagtaagatgtcacctgtattttgtgggtcctagacaatacattttgcatatgattttacttaatatattttctatacttttttactaatgttaaggattattatttgttttataaatttgaaaaataataaaaagacttaaattgaaataaaaatattaaaatgtactaaaca

SEQ ID NO: 252104 - DNA, 415 bp, Glycine max
tcgctggagaagacctgatgtgaacctgactatttttgatcgcttgatacaggcagtagagttttttggatgacgccacttccagtgaaggaagataagtcagggtagatgccactttcggtgaaggaagataagtcagggtagacgccacaaggattaccttgataagtctgataattggttcaacaaggaacccagagagaaactctcaccaaattttataaaatgccaaaagtttttttattgaaaataaaaaccaatacttatagtgtatctgaacaaaaagataaaaatagacatgagccttctaaacagtttgggccaaaattacaataaataaaaattataactaaaaatatatttaacttgggcctttaaattagtttgggccatcagcaacaattaatagtcttga

SEQ ID NO: 252105 - DNA, 412 bp, Glycine max
acctaaaaactcacctttcaaagtttctggaatccaaccttgatttttgtgttattcatcttttcattctgttctccctctgccaaacagaattcgccaaggactaaccgcctgaattctttttgtgtctctcttctaccttttccgaaagaacaaaggactgccctcctgaattcttttgtgtctcccttctaccttgttcaagaattcaatacgacgcagtctgagaagcctttcgattcttccctttccctaatacaaaagtgttcaaaggactaaccgcctgagaacatttttgtatacccatctacaaagcatcactggtttaacagcctgagatctttgtttcaacacatcgcagggtacatcctttgtggtacaaggatagggtacatatacttgggttcgactg

SEQ ID NO: 252106 - DNA, 416 bp, Glycine max
  unsure (1)..(416): unsure at all n locations
tctatggaggctggatcatgagcttattgatgnctttcaatggngattttccaccatggagatgcagcggaagataaaggagaaaaggtgagaggaggcgccatgcactaaggaataagccatggaagaaggagctttaccaccaaaagagtgccttggataagaagcttagagaggaagcttcaaaggaggaaaagaaagagagagagatggggggaacatgaaattgaaagaggaaaagagggagagaagttgaactttgaagtgtgtctcacaagactctcattcatcaaagttacaacaactggtacacatgcttctatttatagcctacgtagcttccttgagaagctttgttcgtggccggcaagtgcaccagatcgcacaagtattataaaacgcgtaagaaccgagca

SEQ ID NO: 252107 - DNA, 415 bp, Glycine max
  unsure (1)..(415): unsure at all n locations
taaacattcaactntgagcgtctcgatatattttgtactcaatcagacattcgagtaaaacgttattatcgtttgaattggctcacaggttcaaaattcaatttcgagcgtctcgatatatgacggaactcaatcagacatccgactaaaaagttattgtcgtttgaatttgctcagaggttcaacattcaatttcgagcgtcccgatatattaagtcactcaatcggacatccgagtaaaaagttattgtcgtttgaattggctctgaggttcaacattcaatttcgagcgtctcgatatattatgggactcaatcagacatccgagtaaaaagttattgtcgtttgaataggctcataggttcaacaatcaatttctagcgtctcgatatattacgggactcaatcagacatc

SEQ ID NO: 252108 - DNA, 221 bp, Glycine max
ggaaaaacgagtttgcgagcaccgccctcaacgaagccaccggacccgacccccaacacacaaaaacaccaagggcgcccgggcgaacagacaagaaaacgccgccgccccgagaacacacaccgccgcaagccccgaaggggaacccacaaggaagggggaccccaaaccccccccccgacaaacgaccacggcgagacacatgccagccgcccaaaacg

SEQ ID NO: 252109 - DNA, 408 bp, Glycine max
ttaccgttggaatgttagagagatattattgtttttcttgaatgaaactttggaatgtttcaaagaaagttttgagatacttttgaggaataaatgatcacatgtttacatgtagaacttttgaccattatggaagctaaattcgtagcatggtttaacgctataattcaagctaattgattgcaaaacttcatttcagggcttgaaattgttaacattattcctaagctgttgaaaatttattgtgataaatctataacaatgtttttctaagaatgacaaatactctaaaggtgctaagcatgtgaaattaaagtactctgtcgtgaaagaagttcaaaaacaaagagtgacagtagaacatattaatacaaaccttatgataatcaaccttttaaaaatggatat

SEQ ID NO: 252110 - DNA, 414 bp, Glycine max
  unsure (1)..(414): unsure at all n locations
tgcatctttattgcacgtgtataatttcttttaccattattgnatgnatttcgcagtattgatatattcttagggtttcacacaaatacttaaccttgtcattgaccatggtaggaaattgacgcaccaactgctcgggaacaagtgtcacctaactttagaaggagattggccattctggtttcacccaccatcacaactgacattcatgaagttatgaagacccctgaaaagcgtttagttggtgcttccaacgttactctagaagttgaaaaccaacacacccagcaaaaaagaactctgacaagttctgaagtcctgcaatcgaaatcaaagcaaaccttatccccagcaacatcaacacgagaacattagaacattcccctcgtaaataactaaattcagcctctaaat

SEQ ID NO: 252111 - DNA, 415 bp, Glycine max
  unsure (1)..(415): unsure at all n locations
tgcttctacaaaagatcatcaagacttggttggtttattggcaatggttgggccctaatatgttacaagtgtgttagtaccacgcttaggatctcaagagatttgtttgttttgaagaactacacataatgggtaaataggttgtatttcttctttgtttgattacttttttttggcgtttgagaaggggaagactcacccctacaaccaacaactttcaagtattgacaatgttgaggacgttgatgcacatatgggcttggcataactcacagagggagtgggtatggctttgtgcagtaacatgaaatacaagttacacatgttgtacctagtacattttgtgccagtagagaatctggatgtcgtgctcattaccatagactacactntatcctgctatatctcgtgggga

SEQ ID NO: 252112 - DNA, 414 bp, Glycine max
tgtaatatatatatatatatatagatttttgtttgcatgctaaggcgtcacaacattagctatgatttcaattatgttgccacttcagtctatgcctatcagcagcagtacacaaatatatttgtgaaatgacaaaatttagatacaggttcctaggtgcttttaaatattatttttcgatcaaagttaaaatttcactttataacctacatgataaaagtttgcatcaaatgtaagcatatattacttaggtgaacctctaattttgattagagaataaaaagactttctaaattttgttcttttaagtaaagtcatttgttatactatttaaatactcgtccaagcagcacttctcgtgaaacgaaccaaaacatgccataaaaaatggcaattaattctcatcactaggaa

SEQ ID NO: 252113 - DNA, 411 bp, Glycine max
tgagcaggttagatttggaaggcaacaaattatttggagaaataccctcttcccttggtaatcttaaaaagcttcaattcttgtaagtatggcattctgtttgctaggttctacagatatataatgagtcttaagccttagcatgtatttttttttgtgcaatgtttaaaagtgtctgtttcttgtcctgcaaccagaacattaagtcaaaacaatctcagtgggactattcctgaatcacttgccagtcttccaatcttaatcaatgtgtatgtaaaataatggtttctataactttgctgtatttttttaagtatatttcattaatttagtatctgattgattattcaaacttctgttttgcagtctgctagattcaaataatctgagtggccaaatcccagagcagtt

SEQ ID NO: 252114 - DNA, 421 bp, Glycine max
  unsure (1)..(421): unsure at all n locations
ntacaattttcatatgataatgaccctcacaaattgatattataatcacatcaaacaatgaaaaaagagagggtgaaggacagaaacacagatgtcagcaacgcccgtgctgaaggaaccaccagttgcaggagtgtactgacaaccacaaatggtggaggcatggctggcaacaatggaaaacaatgacaattggcaccgacaaaaacatagatgtagacaatcaccacactggagcagagaactattaacatccaatacaaaaacagggtttcatgtgcaaagatgtttgtgttcaatggaagaaagagttatgtgcttcataatattttaattaatttttaatatttataatataagtatattcttttatgataggagtgtctggccaagagtaggtgttgtcatgtatactcactcg

SEQ ID NO: 252115 - DNA, 407 bp, Glycine max
ttactggctatcattaaaacaattgtgtgcatcttttctttataggtgaaacaccgtggaccaaatcagcctggggacatctggatgaattttgttggatctgatagacttggtaaaaagaaaattgctgtttctctagctgagctattgtatggtagccgtgaaagctttatttttgtggatctaagttctgaagaaatgaaaggatgctatgtgaaattcacagggaagactgtccttgattttatttgtaggggagtgttgcaagaaacccctgtctgggggtttccttgaaaaatgtgaaaaggcagatattctagctcaaaaatgtttgtttttagccatcaagacagggaaaatttcagacttacattgacgagaagttattgtataccattcaatggttg

SEQ ID NO: 252116 - DNA, 234 bp, Glycine max
aaaactcaacttcgatcctcagaatgtccttatttataacgattctatattgtatttgcccatcaattacaacttgctctagttgcttcagctaaagtaattgatgtacattctttctttcaaaacttgaatatgattgaaaatgttatgtgttctcgtaaacgcaatgattattgacaagtttcttatgttactaaaatcgcgcatttggtcgcaaagtggatttcaagacta

SEQ ID NO: 252117 - DNA, 427 bp, Glycine max
aaaactaagcttgaccaatgcttaaccactatggatagaaacttattatttaaaaataccaataaaccacaatatcctaaatttgtcttcaaggagaaataatctgaaacatattgtgaacaaaaacaatagaacaccaaacaaaacaacttcaagaatactaatatcttctaccaatcattttcttcaactaaaacattccaaaccttcataattgatgatgaatgttcatacatcaacaagggataatgtacaagaatatactaaataaggaagaaagcaaccatttccatagccaacacatgaaatttacatacaccatggacaacaaaaccaaaacaactacaagtaaatcttctaaacaagatgaaaagactaatttttaatcaatgcaagctgatgacaaactataccaaaggctagtctc

SEQ ID NO: 252118 - DNA, 417 bp, Glycine max
tgaagtcatttttatttatttaatgagagtttcttgttttaaagttctttttatcaaaaactagggactaaaaattttaatgaaaaaaagttaaaatcttaactagtcaaacttttatttaaaaattaaaaattgaattttttaaaaatttaaaatgttgaccagttaaactttaatttatgaagtataaatcgaattttgaaaaaaagtttatgaaataaaaacatagctaatcctttattctatccacacatgtataaattgatatgtgtgtgtgtgagtttcggtgctgtattccgtttcaatgtttgatctttttaattaatcatttctatacaaacttagatagaaaaatctttctgtgtgtgttaattgttagagtcatttttgctgtgtaaattgaaaaaataaacctga

SEQ ID NO: 252119 - DNA, 402 bp, Glycine max
tattatctcatccccatacatgtcgggtatctttttttccctgatgcaatcctatctcgcaaggacattggatagaacactccaaaaagattgggccagagatgcaagcaaaggtcctagggttctcatgagccttatggtagatttcgggctcatgggctaagtatgagtccacttatctatgtacatattaggttaatgttacattatttttgggccttgtatttaaggctccataatatatgtaaggtatcctaaaaatgtacgatctttcagcccttgtatttatgggcacctaactagattagtctttgtattaagaatagctttgtaatttcacatgcattaagtgaatatttgatgcgcgctgttggaaataaatctaattggatgcgaggagtc

SEQ ID NO: 252120 - DNA, 357 bp, Glycine max
  unsure (1)..(357): unsure at all n locations
tcaacatcanaccacttccagggtactggttcttctttatatggacttgatggggcctatgcaagttgaaagccttggaggaaaaaggtatgcctatgttgttgtggatgatttctccagatttacctgggtcaactttatcagagagaaatcagacacctttgcagtattcaaggagttgagtctaatacttcaaagagaaaaagactgtgtcatcaagagaattaagagtgaccctggtagaaagtttgaaaacagcaagtttactgaattctgcacatctgaaggcatcactcatgagttccttgcagccattacaccacagcaaaatggcatagttgaaatgaaaaacatgac

SEQ ID NO: 252121 - DNA, 251 bp, Glycine max
aagggaagcaaaagccaaagcattgattcatgtataagagagccaacgcattcgaataaactaacaactcagaatgtgcagaaagaaaatacttcacatctaccaagagactatcttggctctgggagaccacaaagccacaagaactacaccggggaaagatgggaatggtcaggggtggagactgggaattacgaaaccgcaaaacttcctaagcacaaattaagtgcggacacaagcattctaaagga

SEQ ID NO: 252122 - DNA, 414 bp, Glycine max
ttacatgttttcaccaatttcttattccgaattattaattgcaaatgataccactagtaaatagtaactacctgctgcaaacagataatatgaggactcattttgtacaatggaacacgaaggtagcaatttcaataattagagcaaccacataaactcctaattggcttaatgactcgaccaacaaagcaaagaaaacttgaaatgtgaatatgctaaggcttgttaatgcaaatgccgaagtcagactctcacaaacttctttttacaacctgtatataagactctaagcataaacatggcagagacagtttgcattacaaagaaaacaaatgaaagaaagtatccttattctgatatttgcacaacacagaaatgtgatagaacacaatacattggcagaaaatattcaaa

SEQ ID NO: 252123 - DNA, 420 bp, Glycine max
tcattctacacctaaaaaataggataagctagttgcacaaaagaaaaagcttcctgatcatgagggagctaaaaaaaattttcatgcaggtggaccttcttctagtagttctgacttgcaacagcctcatatccctcttccctttccacctagagcaattccaaacaaaaagatggaagaagtggataaggagatcttggagacctccaggagagcagaggtgaacatacctctgctagatgccctcaagaaaatttcaagatatgccaagtttctaaaggagttgtgcacccacaaaaggaagctcaaaggcaatggaaggattagcatgggcagaaatgtgtcagcattgataggtaaatcttttcctcacattcctaagaaatgtaaggacccaggtactttctgtataccttgcat

SEQ ID NO: 252124 - DNA, 341 bp, Glycine max
  unsure (1)..(341): unsure at all n locations
attccccactttttttttctttaatcctcnntcggcgcttggtccttcatgcgattctgagcccgttgtaagtgatattttaactgtttgatggcctcatcccattccaacagactccttcgaactgcttctaccctcactttacatggcagaaatctactcaacactggtggcttcctgccatagaccacctcaaaacgaggtagttccatggacacattgaaattggtattgtaccaatactttgctcacgacagcgaattcacccacatctggggctgatcaccacaaaagacctaagaaatgactcctcacaactgtttacaacctctgtacgaaca

SEQ ID NO: 252125 - DNA, 291 bp, Glycine max
taccagcctggactggtagaatagaaattgttttctgttcaagtcttgcgacgaaaaatggttttgccagcggtaggatccgcttgttgcagaagaaaacctgcgggtgaaagtatagagagtgcatgtgattctgaatagaaacatgtatagatcaaagaagcatgaatactcgatggtgagtgcaaaatattgctgctgaattgcatagatagcgctggtggaactcgaatagtttactaggtgacgaagacaaactattttggaaatgttggatgaaacttgaacatg

SEQ ID NO: 252126 - DNA, 409 bp, Glycine max
  unsure (1)..(409): unsure at all n locations
tagcacctggaacccggacgctccatcgacgttcttgtctatgttgggtagagggtatacgtctttagggcatgccttgttcagatcattgtagtcagtgcacattctctattttccattggcctttttgaccatgacgacattggcaagccaaatggaatacctgatttctctgatgaagtttgcattgaggagtttgatgactttatggcggtcttctcccatcttccttttcttatgagatattggtttggcctggggacaaatggaaagtttggggtaaattatgctacgatggattcccagcatgtcagacagcttccaggcaaacaaatctacattnttgtgtagcacgtcggtgatgtgccaatgctcatggctggaagggccctactaagccgtgtgcact

SEQ ID NO: 252127 - DNA, 404 bp, Glycine max
  unsure (1)..(404): unsure at all n locations
ntatacatacccagaaatactattactaaggttttattgaatatagttcatttttaaaaaattacctaacgtgacactatgtctgccacgtcatcattttagtacctactgtcaggttacatctgttaagcgatctacttacccatgcccaacataacatcgggctaaccagctggatcttttcgtgcatacccatggcgtgcaaactaatctataacgacctccagtcacacactcttctgatagttgccttcctcataaatatagaaattaatcggactcaccttctgagatgtcttttgaatgaccatacctagataataatgactatccgcatgacaaattattgaatgaaactgacagacgatatgttggaaggcgaacgaaaacatgagaactaacat

SEQ ID NO: 252128 - DNA, 421 bp, Glycine max
actcagcttgattcgcagatcaatccccagagcttgtttgttttttatgaggctgatgggtgagaagatttcaaatcctgagaaatatagagatgaggagcccaagctggagtttgaagatcccactttgtatcattatgctgtattctcagataatgtcatatctgtgtctgtggtggtgagatctgtggtgaagaatgcagtggaaccatggaagcatgttttccatgttgttacaaacaggatgaatgttggggcaatgaaggtttggtttaagatgaagcccattgaagggggtgcatttttagaggtgaaatcggtggaagaattcacattcttaaattcatcatatgtcccgatcttgaggcaacttgagtcatccaaaatgaagcagcggtacttggagaatcaagctgataat

SEQ ID NO: 252129 - DNA, 406 bp, Glycine max
tgtcaaatggagaaacacgcttttttatgctcttaactgagacgtaagtatgttgtctcgtcgagataaacgatagttatgttgaacgtaacttttatccaaacaaagccttagactttgaaacaaatgagtagctaggtgcagaacttacatcattgacaaagaaaatgcgattctttttgtaacttttgaagttataaacccatgagttacaaacgaagttaatggttccatggtttggaatgtcctcgagtttaacactgacgaggaaaaactcatcagtcataaagtttttgatgtaaaatgctcctggaattccaaaactagcatcccattcaaagttaatatcgaatgctttctgccttgctcccaacgttggcaaggtcggaagatgtttttcaaatag

SEQ ID NO: 252130 - DNA, 387 bp, Glycine max
ttcacaaatgtcttcacaaataatcatttctctgtttaaacctagcaagactacccatcatatctccccaaaccccatacccacgaaaaattaaaggagaaagaagtccacccaaacctgaaatttcgaagtcccactcgtagccacgcacttcacgactccaaaaatgctctcctttcgcgatttggagcagaaatgggcaccaaaagttgaagctttgtttggagcttcaatggagaatgagggagaaagaaaggcaacctgagggagagggagagagaacgcttctgcaatttttctgctgagtgaagagagagagagagttgctttttggtttttaaaagctttttcctcttttcttattaatttattcaagctatgccacat

SEQ ID NO: 252131 - DNA, 417 bp, Glycine max
ttctaagttttctgttttccaaaccctgttcttctgcagaaaacaaaagtgtgttatatcttttctttctcttctctctttgccaaaaagaattcaacaaggactaatcgcctgaattctttttgtgtctctcttctcccttttccaaaagaacaaaggactaaccgcttgaattcttttgtgtctcccttctcccttttcaaagaattcaaaaggacacagtctgataattcttttgattcttcccttccccttaaataaaagatttcaaaggactaaccgcctgagatatcttttgtttccctttacaaagattcaaaggactaaccgcctgagaattctttgtcttaacacattggagggtacatcctttgtggacaagtagagggtacatctacttggcttgttgtaactgag

SEQ ID NO: 252132 - DNA, 412 bp, Glycine max
  unsure (1)..(412): unsure at all n locations
tgaactgaggaagtgtggaaaggtgagacttcctacttttattcgttgaccacagagtggtacctggagatatgtcgcgggggtcaagagaccttggggacgtcaggtggggtgctattgcccaaaaccaagcttgaccaatcccgacccaacccgggcatagtcagtcagtgagaacctgtgatgtacctaaacaggcgagctcctggcagtcaaccgataaaagaacaaagaccacaaagcaagggggcttgtgtggtggctggcaagctgtgaatcttgtgtgatatatgggatatggcctctggtaatcgattaccaaaggtgggtaatctattacaaggcttaaaagtgaagacaggaagctacggtgacctctggtaatcgattaccaggcttaanaacgagatca

SEQ ID NO: 252133 - DNA, 416 bp, Glycine max
taacaaaaggcatgcaaagtgggtggaattcctatagcaattcccttatgttatcaaacataaaaagggaaaaggtaatattgtagtcaatgatctttctcggcgtcatgcattactttctatgcttgaaacaaaattgattggtcttgaatgtttgaaaagaatgtatgaaaatgatgaatcttttggagaaatttttaaaaattgtgaaaatttttcagaaaatggtttctttagacatgaaggctttcttttcaaagaaaacaaattgtgtgtgcctaaatgttctactagaaatttgcttgtttgtgaagcacatgaaggaggtttaatggggcattttggggtccaaaagactctagaaacattacaagaacatttttattggcctcatatgaaaaaggatgtgcagaaat

SEQ ID NO: 252134 - DNA, 405 bp, Glycine max
atactcaagcttcaatgaagcttacaatcaaggccttgttgtttagacaacgtttatcagatgttcacacatgtgcgcagacagaagttggataagaatcaaattggaattatatatgtgcaactatggtgatgccaattctcaagtgtacaggtctctaatttttgggtgggcttggtgctgataaaaagtaaagttgaatggtgattatatgaaggctcggtggtgggttactacttactagtgcctcttattttcttcataagtttaaggcgttaagcgttttattgttatatcggccttgagaatatatgtatttttggtttacattatgagtatgatcgattaatttactctctaaagtgagttggtgatcacttatttagaagatcactgctatttatt

SEQ ID NO: 252135 - DNA, 306 bp, Glycine max
cgcatgacattttttatcaacacagcagctcacgcgtgcgctgctcgttgcaacacatcctggaaatttacagcagcacgcaaacagtcttgtttagattgtttgagggcggcgccaccatatattcgattatgatattgatttccgtatggcagaaaagtatactagtgctgctggcttcttctcatgttactaaacattgatactcttagcatatgaaccatgctgctgtaatgaaaatacttactgtgaagcatacattgctcatctcgcatcacatcagcacaaacctacttgctgcagtac

SEQ ID NO: 252136 - DNA, 454 bp, Glycine max
  unsure (1)..(454): unsure at all n locations
aacacttctaatagaagaaatgggaggaaataatagaagaaaaaaaagaaatgaacttctcaagttaaaaatcattntaggagttttttagagagcttctacaaattcgcctatacatgagctaattttaactcatggagaagctcatttcattgtttcttcttattttattttcctagaagtgtttcatgaaagtttatccaagcatgcccttaaatcaaactaaatcatgaatagtttgatttgcactaaatttcatcgtataggttaccctttagtcccattaaattactctatcatgaagacctgttagcaatgcaggattctatattttttttacatgacacagacagacaggactatcataacatgctgacagtttggaaataaaaacataccttatcagtcccagtggattttgaactacgtgagtaacctgtcatcaatctggttg

SEQ ID NO: 252137 - DNA, 326 bp, Glycine max
  unsure (1)..(326): unsure at all n locations
ctgcttctacagtgctactattgtgatgatgaagaacactttcctcgtcgaatacntgactgatgtttctcgatgtcttctcttgaatcttcaatcttgagtcttgaatcttgatcttgatagttctcgaatcttgattcttacagactagaatcttgaagctattgtactcctgattctttagaacctgcttaactcttgattcttttgcatcatcaaaataatcttggaagtcattgcttccacacattatggtcatacttaacatccggttgctaaatatggtcttcttggcagcatccctggtgaaatacctactccaattg

SEQ ID NO: 252138 - DNA, 440 bp, Glycine max
  unsure (1)..(440): unsure at all n locations
actgaattgagtatggcacacgcattgcatgtatgatatgccttntataggcttgaaaagtgcgagataacgagctgtgttttctgcgttctctatataacgcgatgaactcgctaagagagaatgctaagctaagcgagttcatcaatactcattgtatataagctttatctgaagaactcgccaagcgcacttactgcgctaagcgagttcatcctttgaggataaacattcatcctcttgctgaactacctatggctaagcaagggtgaatcgctaatcctatgtaacttaaccaaatttcgtatcttaagccttgcgctaagccgactttacctgagctaagcgcatttcatcacggaaaactntatgctaagagagcttagcttcagctaagccgacatgttatgttgctcaaggcgtgcttaacgagctgtatc

SEQ ID NO: 252139 - DNA, 449 bp, Glycine max
  unsure (1)..(449): unsure at all n locations
agatggaccatttcaagtgcttgaaagaatcaatgacgatgcttacaaagttcagctacccagtgagtataatgttagttccaccttcaatgtatctgactcatctctttttgatgcagatggagaatccgatttgaggacaaatccttctcaagagggagagaatgatgaggacatgaccaatagcaagggcaaggatccacttgaaggacttggaggacctatgccaagggctagagtaaggaaagcaaaggaagctcttcaacaagtgttgtccatactatttgaatacaagcccaagcttcaaggacaaaagtccaaggttgtgagttgcataatggcccatatggaggaggacaaaatggcgctactttgtctcaattntagagtgtttaagttttctaaataatggtcgaatccatgtaaaagtggctgaccaaatatatgtt

SEQ ID NO: 252140 - DNA, 444 bp, Glycine max
ctgctgcatgctaccatttttgtaagggtggtcattttcttattcataagcttgtgatattattctactgggttgctgctacaaagccttcttgcatatttgttgtttgcaattgagagttcacttgattttaatgaaactgcatatgatgtgggggaaattgtccatattgcattggaggcacgattttgttaggtctatttatatttatgatctttataatctgcttctcacatgaatccagtttcaacctgtaattaagtgagatattgctctttgaaacctgaatgaatgctatatcacattccaacatcttcataaatttcttcaacttttcgagtttatatgacttccgttgttgtggaaaggatgtatgctgataaagaataaaaaaaaggtacaacgttatacacattaaaaataattgatgagaaaaaaaataat

SEQ ID NO: 252141 - DNA, 383 bp, Glycine max
ctattatcctgaaattgagagataatgattattattcacacaaaatgaaagtgctaagtatttactacctatatttaacaaaaagtaattacaacactacaaaataaccataaattggaggggtttgatacaatttacacaagttttatacacaaaagttagtcgtattcaccaactaataactctcccaaatttatagctttgcttgtcttcaagcaaataaagaacagttcactggtccccaagtgacaataacatgcagtgactatgtacaaaggtgtatacaacaaaaattaatgattgcatgataagagaatgaagcaaaatgccctcatcccttgtcttttacaatgcatgcagttatccaaagagaagaataaaat

SEQ ID NO: 252142 - DNA, 425 bp, Glycine max
  unsure (1)..(425): unsure at all n locations
taacatatggcatgccaagtatgtggaattcctatatcatttcccttatgttatcaaacataaaaagggaaaaggtaatattgtagtcgatgctctttctcggtgtcatgcattactttctatgcttgaaacaaaatttattggtcttgaatgtttgaaaagcatgtatgaaagtgatgaaacttttggtgaaatttttaaaaattgtgaaattttttcagaaaatggtttctttagacatgaaggctttcttttcaaagaaaacaagttgtgtgtgcctgaatgttctacaataaacttgcttgtttgtgacgcacatgaaagaggtctaatgggggcattttggggtccaaaagactctagaaacattacaagaacatgtttattggcctcatatgaaataagatgtgtanaaattgtgtgaa

SEQ ID NO: 252143 - DNA, 418 bp, Glycine max
tactcatgctgggcgtcaacggcggaatgaagaggcttatactccccgtagtcaccaccttcggatgaaccctggtgtcggaggttggggaagttgagcctggcgaagtcacctcggagcttgtacgcggccttgtcgtacgccagagcggcttcctcggcggtgtcgaatgttcccagccatagcctggtccggttcttcgggagtctaatctcagccacccacttcccccagtgcctctgtcgaacccctctgtatagcttcgtgggcttcggaggcatgcccacgtgcttcatagggatgggcttcggccctaggaagctcagcgtgttgctgtgattctggatctggatttgggcctggatctgagagatctgagatggggttaggtggttcaagcccacaagagatgtgggct

SEQ ID NO: 252144 - DNA, 397 bp, Glycine max
acttgcggatttatgctttgccggcaaaaggatcgatgtgggtatgagaagtggcaaatttgattatcttgctttgatgaatgacaaagctggggccaatgaagagaatgagaaggagggaggaactcatgctgcgattgccgttcctacatggccaaatttcccaccatctccacaatatcatatactcccccaatattagcctttctcattatccgccaccctatcaaccaagaaccctatatcatccacaaaggccacccctaaatcatccaattcctaacgccacccttatcagaaaccaaaacaccaacctatgaaggaattctgtggaattcatcccaattccggtgtcatatgctatcttgctcccatatctactcgataatgcattggt

SEQ ID NO: 252145 - DNA, 333 bp, Glycine max
atatagaattgaattaacctccacacacaactaaagtccaataaaatgattaataaaagacttatagagtcaaagcaaaccaactgagtcaaactttctatggcaaatttacgaaaggggattagttttaaaaactaattatcaaagagggtctctttttaaacaatttgcaaccagagtctattttttgatgggtaccgccattgaaattggcgataagtttggtggcgagtggagggtgccgcccgtgccacatgcgatacatccaggttggatccgccaactccattggcgttacgggcctgacaagggtgctcatcgcttcatcattgg

SEQ ID NO: 252146 - DNA, 337 bp, Glycine max
tatccactcgactaggtttgaattttacgataccttcaatcctatcacgcaacgtggcggacaataatgggcagtctaaattgattggccattattgccaatgcgaaaggtattctgtgcttcactatccatgttcactcattactgcagcttgtggttacgtgagcatgaactactaccaatatatagatgttgttacaccaatgaacacatcttaaaagcatactccgcacaatggtggcctcttgagaatgaaacggcaattacctcttctgatgaggcatggactactaatccctgacccaactacaattattgcgaaaggttggccataatc

SEQ ID NO: 252147 - DNA, 359 bp, Glycine max
  unsure (1)..(359): unsure at all n locations
ggtgtattatgatctcactttggtgctctaaatngtgggaatgtgctcaaatatgtggggcaattntggtttgttttcttgcttgattaagttgaattgggggtttgtatgagatggccctatgcctataatgcactttgaagtaatggggcatgccacattgtccccgttctcttgctattgacgcctaatcgcgcgcccaccaagtgttcggtgaaatgcctcaatggcattagcgcgtgattgttgtatggaaacaacccatggtgcatattggtttgcacatatttttgggacatgcattcattntcgaaagagctagagtaatagccccgcatatgtcctatgcctataaacta

SEQ ID NO: 252148 - DNA, 420 bp, Glycine max
atgccctatgtgatataaacatttttactttgaaaatatagtgaaaaggcaaaacaataaactctatgcgttggagaggcctaatctctcttatagtcccaattccaaatttcatcctaccccccaatgatttcctccactctctgcacaaccaattcacatgccttatgcctactactaatgccaacttgataattaattaagcaatttctctctcctaaacttgagcaagtgcattcaacctcctccttctacttaattttttgcttgataggctttgtgttctcatcatgtttttcctcctccttttcctcttcaataggagcttcaatagtgagtctagcatgttggctgatgagactagatggctcactagcttcaattgcatcaccaacaactgcccaagtcaagctatcatcg

SEQ ID NO: 252149 - DNA, 419 bp, Glycine max
tatacttgtccttcatttaattgtctttgttcttgacggccactctcatcataatactttcgacacctactgtacgttgatttgatcaatgctgttatgggaatgttgcgacaatcctttaaaaccttattgatacattctgagaggttggttgtcatgtggccatatcgacgtccttctctatcataagtcatcgtccatttttcctttgaaatgcgatcaatccatgttgttatggctggactcagttgaggaaatttttctaaattttgatcaaaatgtgcttgcaaggagtgtatgctgcataaaattatttatgaataaaaattttaagtatatatgaaaggttaataagcgcgaccatcaaatatgaaatcttacccaatttcttcaacatttctttttgtttggcattattg

SEQ ID NO: 252150 - DNA, 439 bp, Glycine max
  unsure (1)..(439): unsure at all n locations
gtgacgtgtaagagttgttggtaaatatttgtgttttaatttaaaatntataaatatatattaattctattttataaaataaaatatatattttagattttcttaagattttgttttaatgagtcaactagtttgttagatttgttttgacaactggaggttagtttccaacggtcatatttccaacggtcatattttgtttgttgcttaaggtgacctgtgcctatatattctctttcttcctttctaaaaaaaaacatgacagagctaccgtctcgtctctttctcccaaaattttctatttcttttattataaaataatttatttcttgagagtaagagcattggtgttcataaggtttggggatcctttcgctgcacacgatcagaatcaacgggttgtcgtatcttgngagaggaacgcaatcaaaatttctta

SEQ ID NO: 252151 - DNA, 354 bp, Glycine max
  unsure (1)..(354): unsure at all n locations
atgattacgcagcaatataaaacattagaagcggtaataactttatgcgtacatgaaaatattctctaagcacagatagnaaaaaaatgctccgggaactcaaatgatatccacacttgataatttttcgacaaaagttacactaataaaaatgcatcatttagacataactcccatcttaaattattaatccacatccgattatataatatgataatttagaaggcattgacacagctaagtgcaatatgaactagagtcggcaggttatccttttataactatcacttcgtgccttgatctataatgaaatactataaattaatattcctgatagtgtatgaaaaataatac

SEQ ID NO: 252152 - DNA, 433 bp, Glycine max
actcagcttatcctccttatgggagagacgtcaaacattctgtgtaagagtgagatagtgggatttctaattgacttgtgacttttggtttcttggtttgaaattcatttcctaagtgtgtttcatcttgctaatcttccgtcttgcgacatatgcgtgacaacccatttggggtaaaagctttgagaataacgcctgccacaagtacttggacccaaaagaaagttgccatgaaaggcaactaatcttgagagaagccagtggaatcagtaaaatggtttaggcacaacaaaattaaattcattggtacctgtaattgtgtgtttgtgctatagaatgcttctgtaatggttgtcttccataaatatctagataccaacattctcttttccaaactggatgctgtaatttctctacaactactcaagtttat

SEQ ID NO: 252153 - DNA, 493 bp, Glycine max
  unsure (1)..(493): unsure at all n locations
actcagcttaatgtcacttcctactagatagtggtagaatttaccatagtcgntgttagggttntatttcatgttagattcaacttataggacaagtgtaacccaatcatgatgtattaaccgaactatcgttcaggtcatctcccataagaataaaggagggatttcatgtaattatttaactaagaactagattattttattttttgtgattgtcacgaaataaataacataaaataaatcgcaataataattaaatgacaataaaataattaattaaagatagaaatactagacttggatgttgacgtcgatcttgatgaataaatgtctacgtttggacttggaattcgctcgatccaatgtaacttcaaaattctgtactcatttatcttgctcatccccaattcactaatgcattctaccctagttcttgcttggtcgtagattccaaactacttgcctgatacccaatccctatacataccaacac

SEQ ID NO: 252154 - DNA, 444 bp, Glycine max
  unsure (1)..(444): unsure at all n locations
actgagcatcgacgatgatgcatctgaagctgatgctgatatgcccccactggaggaggaggctgaagctgatgctgaaggcagcaaaatggaggaggttgattaaacttttatatcatgcggaacggagttggctatgttttttctctttttttcctttcggattgctctgacagtgtttaatggataattagctaattagctataatttcgtggttctatttgcgagttgttggatgtagctctttttttttaattggatttctggcgttttctgaaattcatgataattatctggatggctgtgctaacttgaacatgatcacatctttaatcgtgttaataaacataattaattcttttctaacttaataaacatgattttgttgctataaatgctatcggaagagatntttatgagaattgaggagtaattactattat

SEQ ID NO: 252155 - DNA, 439 bp, Glycine max
tatccattccatgagtatgggtatgtgggacccattttggtaattgaatattatagttcaacgcccgcattccaataaacaggtatttgtcatcctatactgaattgttggtccctattttcaatccttcttcttcttttgttatgttcacaaatctcaactacactctttttctgcctccaaaatgccaaacactcaccttcatgacgtggatatcatctactttcaactctattcttaaaccatatgttttggtcgtcaaaagaagagggataaatcaaatagaataagaatatctaaatttaaattatttaataggtcagaaatgatggaaggagcaagggagaagaaaaaaaaaatatggattcattgtgtgttatttcctcactcaatatgcaaaattatcaatacgttgtattgttaattactactacaatca

SEQ ID NO: 252156 - DNA, 333 bp, Glycine max
  unsure (1)..(333): unsure at all n locations
acggatccatgggtaagcatgtccttcccctaccctaaaaaaaaatactaatatagaanaataatttcttgagttgatatatatatatcgatttatttttctaataatagatcatatatatctacttttatacatgagactaataataaatatttttgttaaacttctaatttattaaataattatttattaaaatgtagatatttaaataattctgtataaaaaaattcgatccctctcctttaatatactccgaatccgtccctgattgtgagtctgaacattctgctcatgggaacccttctgaacctgaaaccagttcctttgatgctt

SEQ ID NO: 252157 - DNA, 404 bp, Glycine max
  unsure (1)..(404): unsure at all n locations
cgacatatcacttgctttacctcactcaacaactacatctatactaacaatttaattgcataatcaaaacacgaatacttgtctaataaatgcatcacaatcaactgtacgctactttgtcttaacgaaattatataatacataccattcactttctcttgcatctcattttgcaaacatccctctatgtatcttncattagattacttatactctatgatttattaaatatagagaattaaatgtgtgaataactgctgcacgaattctatattaaaacactactatactatgaaacatatatatccaatcgctcagtggcttggatatgaaagcgattctgataacatagataagtgctgccatccaaggaagcggaaacatgatgagaagaaaatgtgctg

SEQ ID NO: 252158 - DNA, 485 bp, Glycine max
  unsure (1)..(485): unsure at all n locations
tctgcatgtctanggttntctagagagagaaaggtccatgttctatagagtttgagagatnttgctgtgtgaagacctgcagagaatcgagctctaagaggaagccgtcctcagaacttgagatgagtttgtgagtgattgtgaggttttagaggtggagaagacatccccaccacttgtatttcttcaatccttcatctttctcttctctttgttgtaaaggaagcttcccagttatggagagctaaatcctctgttggttattccttgtaggtacctgatgtaaatacctgtatatctatttaatgatgttttgtgtgttcattgtgctatcagaacttcattctaccatgattntgccttgatcacgtagatgcatggtgttttatgatcattcaacaatggaaactggtctgattcttataacttgatatgacggggctagtttatcgtattatcacgaaggatcggtgtactgttaccta

SEQ ID NO: 252159 - DNA, 294 bp, Glycine max
atacaggtttaccatgaaaccctaccatcatctgctgttgacaccttgtgcgtatattctaagtgtatagccagtattcaagcttacaataatccacccttaccactccttcaacattcacggaagtccagtatccatcatatcaatcgatctcctttccttcacaaagagatcgataacatcatatctgtttccatattattacaagcccatggaatcatttcccattcacaataagagaactatcatcattgtcctttagcattaattcatgcgcaagctctatgtattgtc

SEQ ID NO: 252160 - DNA, 454 bp, Glycine max
  unsure (1)..(454): unsure at all n locations
tgacttcgaatcngaagaccaaacatcgattaatgtctatggatcaggatccaatggatttgtctccctttgaagattctttgtatccaccatcggtgattcttcgacaatagctgcaattaaagtaaaaaaatttaacttcatcttcgaaatgaatagagtaaagtgatagggatcttttttgttacatactttggtcaactatcagctcattggtttcgacaactgaaatgggaatagaaacatcagcaagagcttcaaatccaagttgctcttcaatagctagagggttttgttcattttcaagattcgaaaaatggacaagagtccaatccacctcaatggcattttcttcaattattggctccagaattgacattcctttcgatagggaagactcactatgactgtgagcatcttgtccctctagatcttctaccgttccagcattcgg

SEQ ID NO: 252161 - DNA, 486 bp, Glycine max
tctttgtgggttgatggtgtttgttgcgcagaatggcattatcactggctgacatgttctcaattagctcagttgcttcttctaaggtcttcagctttatttttccccctgcataagcatctaacagttgcttggtttgtggtctcagcccatctatgaacgtattcaattgaattggctcggaaaacacatgagtaggagttcttctcaataaacctctgaacctctccaatgccacactcagagattcatcagggaactgatgaaatgaagagatttcagctttcccctctgcagtcttggactctgggaattatttctttagaaaattttcaacaacttcttcccaggttttcaaactgttacccttaaatgagtgaagccacctcttggcctctcctgccaatgagaatgacaataggctgagtctaatagcttcatctggcacaccgacaatcttaacagtggtgcatatttcaatgaacg

SEQ ID NO: 252162 - DNA, 238 bp, Glycine max
ttgaggatgaatgattatgcatcctcccgatggtgtaccttcctagtcctattctttagtcgttgtgcgctatcacatcttatatgatgtgtgaataccctttctatcgtatatcgatcctttgtctaagtgtcaatcgagttcgctatagcaacaatgatcacaactctgatcatattacaaggtcacgtcatcacctatgatttaactctttagaatatgtatccaaaaatattgg

SEQ ID NO: 252163 - DNA, 504 bp, Glycine max
  unsure (1)..(504): unsure at all n locations
cggacattaaatactcagcttgctcatcggtatgcgagacggagaccaacatgctttctatatcgncagtaccaagaagagtatgtctagcctcgacccacgagcatataatcgcttacgagtatgctcaagtatacgcggaaaaagaggctagaggaagggtgatcgactctttacaccaagaggcaaccatgtggatggatcggtttgctcttaccttgaacgggagtcaagaacttccacgctggttatccaaggccaatgcgatggcagatacctactccgcccccgaagagattcatgggcttctcggctattgccagcatatgatagacttaatggcccacataattataaatcgctaggaaacttgtatggtctctcagaccttgactagatacgactgtcttcttgatataaaatgagttggtcccatggttctactccgtaaagcttgtgaaatcatatcactcctacatttcatctctagcatgcattttttct

SEQ ID NO: 252164 - DNA, 337 bp, Glycine max
  unsure (1)..(337): unsure at all n locations
cccacatttggataaagatgcgcgggcgnggtctttggggtnaaaggtgttgcctaagcaaaactatgtacttggtttcaatccatacacacccctacccgattttatccccactcccccatatctacaacaacactcctagacgtggcatcttcttatatgtaagataaatgattgcaagcactgaaaaaactgaatatatttcatgataccagtgtatcctcatgaaggatcccatgaactatacattgggcaacgaccgaatagaggaatatcaatttaccacgaataaattctgataatacgagtttaaaaactgtgttaaccatatcactaa

SEQ ID NO: 252165 - DNA, 413 bp, Glycine max
  unsure (1)..(413): unsure at all n locations
tgccaaccctttgagcaatctgttgaacaaagaagtatcatttcattntgatgaattgtgtctagaagcttttgatactttgaaacaaaaactgatttttgcacccataatcactgccccaaactagacacttgattttgaaataatgtgtgatgctagtgattgtgttgtaagagtagttttgggtcacaggaaaaataaagttttccatgtcatacattatgcaagcaaggtgttaaatgaagctcaaattaattatgcaacaactgagaaagaatcgcttgtggtagggtatggtttggaaaaaattagatcttatttgataagatctaagattatggtttgtactgatcatgttactatacaatatctgttggtcatagctaattctaaacttatgtttatccgttgga

SEQ ID NO: 252166 - DNA, 414 bp, Glycine max
  unsure (1)..(414): unsure at all n locations
tatctcatgtcagacaccctaatatcatcagttgcattctatcacagtttacttggtgccaacttaaagtggaattaaacaaggaatatacttaaagtgcataaaaaagttaaataatgctcataataggcaatcctagcttaaatcttaccctttccttgatgtcacccaaagttggcaagtacagcttatagaattcctctctgaatgcaaccactaacctaaataaagtttagaaaccagcaagaataagacaattagaatctgtttgattttgaataaatttaagggacaacaagatacatctactatattatagtattttcacttttaaaggactaaagacgaattattgaccataattgatatattatcattngtatatcactaactcgctcttacttaatctgtctc

SEQ ID NO: 252167 - DNA, 386 bp, Glycine max
  unsure (1)..(386): unsure at all n locations
cgctgcatggtgtgcttagtgagttcatatgttctangttttggttatgaatttcttggtttttgtgatgaacttgctaagccggcatgcctcgcttatcgagttcatgcatttgtgtgctttagttcttgaatttctaggttattttttacatgtcatgcctgggcttattgccatctacgctctaagccccagtgtcttttcagcacctcattcatgggcttatcgcgcactctcgcgctaagccctaatgctgctttaactcctatgagccttttcgttttttgcatgggcttatcgcgtactcttgccctataccctatagtttctttgtcttccacgcatgggcttattgatgcaatcctaccccccaagggcattggata

SEQ ID NO: 252168 - DNA, 454 bp, Glycine max
tctgctcaaataattgaacattccacactccctaatatattgacgtactgtaccaaaagtaaccaccttgcatgaactatattgtaaaagcatgtcaaacaatgaattaggcaaatgcacaactggcattcccagttgcatcagagccaaaccaaggtcttcacttttggtgaatttttcatcatgaagaaaggcttcacttggtgatacccatcttcctccattgtaattagaatacataactggagcattaccaatgtttttgtatatttgttgaaccaaaatattccatggctcttcaaatgaaccaatatgccacaaagagtagtaaatgtctgttggccctagcaattcttttataccaagtagcatatgcataatagcaggagctacaagatcttccagaagaagcctattccaggtagaacgaacttttccacttctgtccatatca

SEQ ID NO: 252169 - DNA, 464 bp, Glycine max
  unsure (1)..(464): unsure at all n locations
taagctatccnanacacttctaaagaaaaatgggaggaaataatataagaaanaaaagaaatgaacttctcaagttaaaaatcattttaggagttttttagagagcttctacaaattcgcctatacatgagctaattttaactcatggagaagctcatttcattttttcttcttattttattttcctagaagtgtttcaggaaagtttatccaagcatgcccttaaatcaaactaaatcatgaatagtttgatttgcactaaatttcatcgtataggttaccctttagtcccattaaattactctatcatgaagacctgttagcaatgcaggaatctantatttttgtacatgacacagacagacaggactatcataacatgctgacagtttggaaataaaaacataccttatcagtcccacgggaatttgcaactacgtgagtaacctgttcatcaatctggg

SEQ ID NO: 252170 - DNA, 459 bp, Glycine max
  unsure (1)..(459): unsure at all n locations
tcttgaaattcttgacaacactgtgatttatgaggttnttgggataaaaatggtcattgaccaatcccttttccatgacttaacctaattgtccagtgatggtgtaccatttgaaggtacactgaatggcgattggaagtttgatttctctgcacatgatgcccgccatttggtttgcaccaaccatgctgatatgaccggacgccttcttgccggttcattggcttttgaaagccgcatccttcattatcttattgtgcggattttacttccacgatcttccaaccttgcccaagtttctaaggaagatcttgttatcatgtgggcctttcatactgggcatcaacttgactggcacacttattcagatatcgcatgcataaggcattgcaattaaatgctcctttgcatatacacatcttgtactctctttttcgcatttcaaattctcttgttctg

SEQ ID NO: 252171 - DNA, 387 bp, Glycine max
actcctcgaacatattctaatactcatgcaccttttacattcaaaaccggaaacttatattcctatgcatgagtcatccttttggcactttagtctatcttctacaaactacccacacactcacaatgcgcacaatttgtttcgcatactaagttccacaatatcatgcgcaaatgccattgatgcatttcaccgaacacttggtgggcacatgtttaagcatgaaaatcaagggtatgggggcaatgtggcatgccccattatcttataatgcaccctatgcctaatgccaccccctacaacccctcaattcaacaaaaacaagcaacaattcaaggataaatccctcacgttttgagcaaacacatgcaacttagagcaccaaaa

SEQ ID NO: 252172 - DNA, 328 bp, Glycine max
  unsure (1)..(328): unsure at all n locations
actagttccgctcctgagtatgacagtcaccgctttatgagcgctgtacaccatcatcgcttcgaggccatcaagggatggtcgtttctccgggagcgacgtgtccagctcatggacgacgagtatactgatttccatgaggagatagggcgccggcggtggacatcactggttacccccatggccaagttcgatccataaatagtccttgagttntatgccaatgcttggccaacatatgatggcgtgcgtgacatgatgtcctgggtaaggggtcaatggatcccgttgatgccgacgctatcggccagctcctatgatatccgtt

SEQ ID NO: 252173 - DNA, 424 bp, Glycine max
  unsure (1)..(424): unsure at all n locations
tctattctgaatatcgaacgtctcgtgtacaacggtgttcaatcggacatcagagtaaaaagttattgtcgtttgattntgctcaaagcttctgttctgaatttggatcatctcgatatattacgggattcattcagatatccgagtaaaaagttattgttatttgattttgctcagagcttctgttctgaatttcgagtatcttgatatactacgggacacaatcggacatccgagtaaaaagcttttgttgtttgattttgctcagagcttccgttctgaaattcgagcgtctcgatatacttcgggacacaatcggacatttgagtaaaatgttattgtcgttagattatactcagagcttcttttctgaatgtcaagcatcttgatatactacgggacacatatggatatccgngtaaaa

SEQ ID NO: 252174 - DNA, 449 bp, Glycine max
tcatgatgatgaatcaagttgattcaagtagttttgatgatgacaaatttcccaagagaatgatttcaagattgagtcaacaagttcaagatcaagaataatttcaagtttcatgagaagaaatctagaagattcaagattcaagagaagtttgatttcaagattcatgaaaagatgaattcaagattcaaaagaagaaatcaagaagacttcacaagcaaagtattgaaaagatttttcaaaaaacaaacatagcacagttttgtttttcaaaagagtttttctcaaaattttctaagttactagaagttttactctctggtaattgattacgaattacctgtaatcgattactattggcaaagtttgatttcaaaagcttttaactgaatgtgcaacgctccaattgatgtttaatggtgaatcgatacaatatattggtatcgata

SEQ ID NO: 252175 - DNA, 383 bp, Glycine max
  unsure (1)..(383): unsure at all n locations
gtagatctcatcatccagatggtagttcctgctttatatctangattcaaaattaaccaaagttatgtccagataattaaattatcgaacagatcataaataagatatacaaaagcaattgttaagaagataaaaactccatggtactcacacggcatatttctagtgctgtttcatttgtaatcaaggtttaaaattgcatttacaacacctaaattgtaaaaacttgcaaacaaatgtttaattatatgaagccccctcaatttattccgaaaaataaaaatttataaaaaaaaagatgtatttcttctttatttcttaactctcaatgctctaaaaattgtctaatttcgccattgacaatggtgattttgctaacaatt

SEQ ID NO: 252176 - DNA, 375 bp, Glycine max
tgctatacttgaatactaaaagacttatgggattagcgtgtaggtgcatgctaagcttgagtttagagaaaacaaatagacaatggggaatcgtgtgtagtcgatgctaagcctgtgaaccataatacataaagccatgtgggcttatcgtgtattgctcgctaatcccatgcacatgaatacaaaaagacacttgggcttatcatgtatgtagtgctaagcccatgcacatgaaaatgaattgacttaagggcttagcgtgcaaccggtgctaatcccgagtacggaaatacgaaaaaactttggggcttatcgcacagtcagcactaagcccatgtagtcttaacacaaaacatatggcccgcttatcgcata

SEQ ID NO: 252177 - DNA, 447 bp, Glycine max
  unsure (1)..(447): unsure at all n locations
tgtgcattcaatatcctgatgagggtgttccatatgttctcaagactggactaatacatttgttgccaaagtttcatggtcttgcaggtgaagatccttaaaagcatcttaaggagctccatattatttgtttcaccatgaagccccctgatgtccaagaagatcatatctttctaaaggcttttcttcattctctggagggagtggcaaaagattggctatactaccttgctcccaggtctattttcagctgggatgaccttaagagggtgttcttggagaaattcttccctgcatctatgaccactgccataagaaaagacatttcatgcatcaggcaacttggtggagaaagcttgtatgagtactgngaaagattcaagaaattgtgtgcaagctgccctcaccaccagatntctgagcaacttcttcttcaatatttctatg

SEQ ID NO: 252178 - DNA, 443 bp, Glycine max
  unsure (1)..(443): unsure at all n locations
tatggngatatataacacctagatttttgaaataggttattaaaatattgtttgcaaaatatataatataattgcttaataaatagggaaaatgatgtattgtgtggattaaatgttgtgggacactagattttcactaactaagtggaaaaaaaaaataataaaacaaactttgaccataagtcaaagatgttggtcttggcaaattgatctagagggggtgaatagatctttttaaaatctttattaacttttcaaaagcctttgaaacttttcacaccttgtttttataagatcaatttaaaatcaatttatcattgtaattagattggaaaaccctcttagattatgtaatgcaagatcaattaaacaaagattgaatcacacatatctagttgtacgaatgtagttaaaaaatagaaagattaagaacacaaacaatt

SEQ ID NO: 252179 - DNA, 432 bp, Glycine max
  unsure (1)..(432): unsure at all n locations
gcttgacctactggagctagctatgcaattgattaagatttttaaacaattctagttgggcagtgagatcatgaacaaccgataggtctgaactgtaactttgtatgaaagaccgagagaggaatgttatcgtatatctgatcgatctctactccaagtaactgggcgcttctttgcttattatacagttaccagggaatgaaagtcttctatttattgacccggaactgcaaaattttctagaatgtcagtagggcccacaagttagaaaaacctatgacgtgtcagaataaatatatataccaattttcagtcttccagtactgtaaatagcattgaggaggagtaacaataatcacttaatgtgtgaatatatatttatacctatgagatagggcgggttatatatctcactcctaatanaaatgggat

SEQ ID NO: 252180 - DNA, 406 bp, Glycine max
  unsure (1)..(406): unsure at all n locations
atagatgtgtatctaatctatgatcccaacttcacaatatctatgaaccaattccccctggatcacgaatcccagccctgatgttgctagaccaggagtggagcggaatgtcaaatccttttttcacattttaaagccaggtccagcagaaataggatgtatcaatttaagaacataaatcatattcctatgataagtacatccagatcagagccagcttgaatgtattcatgcttcaatnttagccactttgcactacaatcactatgttcccatttggagctgtagtcttttaaaacaattccctcgtctcttataaaaggaagaaaagatatgcatgacatgaagcactacgacctaataagagggcgaatgtaacgaggaacataagaaagtagaggatcat

SEQ ID NO: 252181 - DNA, 473 bp, Glycine max
tggagcttctatggaggctggatgtgtaagcatctttgatgtcctttaatggtgatattccaccatggagatgcagcgaatgacaaacgatattatgtgagatgaggcgccatccactatggaataagccatggaagaatgagcttcaccaccaatatgagccttggataagaagcttggagatgatgcttctatggaagaaaagaaagatggagagaaagatagacgggggagcacgaaagataggcctctcattggaagtgtgttggggggtaggattgcatcagctgcgcacatcacatatgaaaactcgttttttttgcgttgtgactattcatgaccctgttccgcattacgcatcgacctcacacagattattaagatctacattaatgcggtgtctgggcatgttaatgaacagtgtgtaattgcacatattgcacatgttatcactgttttttgtgtcatgacta

SEQ ID NO: 252182 - DNA, 369 bp, Glycine max
  unsure (1)..(369): unsure at all n locations
atcttgaaattagtgacaacactgtgatttatgaggtctntgttataaaaatggtcatcgaccaatcccttttccatgacttaacctaattgtccagtgatggtgtaccatgtgaatgtacactgaatggcgattggaagtttgatttctctgcacatgatgcccgccatttggtttgcaccaaccatgctgatatgaccggacgccttcttgacggttcattggcttttgaaagccgcatccttcattatcttattgtgcggattttacttccacgatctttcaaccttgcccaggtttctaaagaagatcttgttatcatgagggcctttcatactgggcattaactngactgggcacacttagtca

SEQ ID NO: 252183 - DNA, 413 bp, Glycine max
  unsure (1)..(413): unsure at all n locations
tcacctgtcatagcatatggtgggactctaatgtctcatgtttatttgttccctcatttcacacttctgggggattactatgcttatggaataattctgtttttgaagtaaacagctgggtgaaaggcaacaacttcctaatgcttgcaagtagatggataaaggatgatcataggatatacattgttaatatatatgctccttgtgacctacaggggaagagagctttgtgggaagagttgaggcagctaagaatctctcacactgatggtctttggtgtttccttggggacttcaatagcattataagccaggaagatagaatatgcacatctcanagaatgggatatagctctgatatctctgaattcaataactcggatttctgatatggaactgcatgagatcatatc

SEQ ID NO: 252184 - DNA, 448 bp, Glycine max
gtcaagccttttaggctatacaagtgttgtctagtgttattgtgtggaacttcgataggtgtgaaagatgcatgttgtccagtgaggacatgcttttcatcttgcatgaagagttaggcatgcaggtgagtggagtccctgcatttgacaatgtttctctttttcgaccattggagaacacattgataaacaaacatttgtttgtcttttgctgcaaccgagtgtatcacacacacgttactatggcatatgtgtcacccatggagtgggcatgtaatggagatgcagtacatggatgagtgatgctgcatcatggtgcagaattttatggcgtcattcaccttccgccagttactgtagagtcatgcctccacttaaatggagtggatgtttgattttttatcttcgaccctgtgaatttttcttctctctgtcctgaaaaatttct

SEQ ID NO: 252185 - DNA, 331 bp, Glycine max
gcgagctcgcgtgttattttcagcgtctcgtatattatgcgcctgaatcgtgcatccgagtgatatgttatgaccatttcaattgctcgagagctgttgttgttccattccgatcgtctccatatgcgatgttcctgaatcggacactcgtgtgaaaagtgacgaccattggaatttctcgatagcctacgatgctcaatttcgagcgtctcaacatgtgatgagcctgaatcggacgaccgagggttaaggaatgaccattcgaatatcttcaaaaccttcattgttgaatttcgagggactcaattatgatgcgcctgaatcggacctc

SEQ ID NO: 252186 - DNA, 465 bp, Glycine max
gtgtaaccgattacacttatgtggtaatcgattacctgtgactgtttctgtaaaaatctaaagatgtaactcttcaaaaaggttttgactttttcaaatgggttttaagtttttctaaaagttataactcttctgaatgaccttcttgaccagacatgaagagtctataaaagcaaggctttgttttgcattttttttaaaaaaaaagtctttctaacaatcttttacaatctttacaagcctttaatctctttgaacttcttcttcttctttgtaccaaaagctttctgaagttttctggttttctaaaccttgaaaacttgtgctattcattcttttcattctcttctccctttgcaaaaaagaattcgccaaggactaaccgcctgaattctttttgtgtctctcttctcccttttcctaaagaacaaatgactaaccgcctgaattcttttgtgtctccct

SEQ ID NO: 252187 - DNA, 426 bp, Glycine max
  unsure (1)..(426): unsure at all n locations
taataaatctatatatggtttaaaacaagcttcctgtctgtggtaccttaagttttatgggataatttcttgatttggttttgatgaanaccccatggatcaatgcatataccacaaggtaagtgagagtaaaatatgtgttctcgttttatagatgatattttactcgtagccaatgattgaggtttgctacttgaggtgaaacaatttctttctaagaattttggcatgaaggatatgggtgatgtatcttatgtcatcggcattaagattcatagagatagatctcgaggtattttgggtctatcacaggaaacctatattaacaaaattctagagagatttcagatgaaagattgttcaccaagtgttgctcccatcgtgaagggtgataggtttatattgaaccaaagtccaaagaatgac

SEQ ID NO: 252188 - DNA, 392 bp, Glycine max
tactcaacgcttgatgcaacatatggagaggttaatgaaacaacgtgttgatgcgctccatgagaggttggatcaaatggagaatagagatcataataaagaagaaaggaggagaagagggaatgatggtgttcctagacaaaaccgaattgatggtattaaactcaacattcccccctttaaatgaaagaatgatccggaggcctacttggagtgggagatgaaaatagagcatgttttctcatgcaacatatatgatagggaccaatagatgaagcttgccgccatggagttttccgactatgctcttgtgtggtggaacaagctacataaggagagagcatgatatgaatagccaatggttgatacatggacggagatgaaaaagatca

SEQ ID NO: 252189 - DNA, 415 bp, Glycine max
ggcattaatttgtttgaggtggttccttattgtttcataaccaattaaccctcttgctatgggaatcttgatgatgctgcagcagcaataaatgactaatactactaccagatattgcttgaggaggatctcactactacacaactgtgctacaaggccaggagcaaaggaggttatttaattaactaaataattatgatattaatttgtgttctaaatattcaagacattggattaggtaattaccaagttacaagccacttttggatttacctttattaactctagtagctgataaatcatatatatcttcaacatggatgtggttgagtactacttcatggtccttgtgggaaatttcaatcaagtgcaagtgaaccacgcgttgaatgagacatcatagataatgatgcca

SEQ ID NO: 252190 - DNA, 431 bp, Glycine max
  unsure (1)..(431): unsure at all n locations
ggtggtggagctgcagtggagcaacaatgattacacttctgaccacttggtgacaaatgctctcatgccaatntaataaccaactcttctttatatacaagctattaggtgtagttgaatggatttatatttttaacaaaagttgtactttatttgcagttgaatggcttccatgtaagcttgtacccttgaatattaagagaaattatctaatacgcatgattcttttaatattattcagttattcaataatgactttaatcttcatatgcttgattnttttcttaattattttaattatntatgatgtaatatctgttttagatgtcacaagagatgtgacaactatatcttccattacagattccattagagagtatttcaagggtgggaatatcattgaagaggatattcatcgaagtcaattattc

SEQ ID NO: 252191 - DNA, 395 bp, Glycine max
tgttacaactattatctggagtgcatcatttatcttctatatattgttattgaatcacaacgaatataataaacgtagttatgtgtattttgttttattgtgtcactttctgttaaagaggggagttttaagttgatgtaatatattctaattcgagaaatatctctccccatgatgtatagaattttagaccatcgtgtcaagttcatttaattatgaacttgatcaggtacttgtttcaaatcacctttgcccccaaatttgctctgagatatcctgcctgatgaattattctaacacccaagttccaagccatactattgttcagctatgtatattaattttatactcttgactgagattgataatgtggttcattgttgttgtcgttatta

SEQ ID NO: 252192 - DNA, 424 bp, Glycine max
tctctactgcatttgcctaattggagggagaatgtctgaataatgtcgctcgggctctacaacggtttcaaggtcttttcctcatatgtgatgcactccctgtagttattgttaccaacagaaatctaacattgatgaatgcagtgaaaactatattccctgatgctaccaatttgttgtgcattctcacattgataagaatgtgaagacaaagtgaaaaaccctagttggtcaaaaaaatgcacgggattatcgcatgatgaagttggtggattgtccttttgagcatcaagtcgatgagtgccttaagaagtttgaaattgcttgctcaccatgaccaatgtttgttgactatgtaacacaacatggatgatcctcatataaaagacttgtaaatctggagaataatgtgatcacttatgaa

SEQ ID NO: 252193 - DNA, 452 bp, Glycine max
tatcgcgttcttctgttggatttaagctgaacgcgcgtgtttgatgcttatcgcattcttctgttggatcgcatgcttagcgcgcgcttctgttggatcactggctcatcgcgtgacgcgcgctcatcgcgtattgggctgagcctgcttcaatatttcttcttttcttcaattttctggccttgttgcttgttacacctccagtttttatatgtgcagccaaaattcaacaaaatatcaattatttaatatttaagcgcaaataactgctaaataattatttttaaagacaattttgccttattttctattatcaaaatacaattatgtagctgttatcaacatgctggaattatcaattggattttcctctgcatgatcaaatgagacttaataaaaatgcttgatgtgccgtgatccttaatgtgtgtagtacataaatcactattgat

SEQ ID NO: 252194 - DNA, 479 bp, Glycine max
agctcatgaagctgcctgggtgaaaacgttgttcagcgttcgttaaccgttggatcttctcgaaatttggtctgcaacttcacaagacactgttccatgatctgaccgttgggatctttgagaagatgtctggagtattctagaatcttcctttcccgagagcatctcttatttaagcatttcagcctttgctttcgtgtagcttaggaaaaacgccatttcttcttctttctttcttccaaagccatttctaaagttccaagtactttctccatcacccatagctaccattagccaccacaaaccatcgttgttctccacatcgagaggaacccttcaaccgaagcggaatcttccaacttggcttggtagttcagtagagaacgaaaccctaatctgacctttcgttttctttcgaggtaaccatggttctacgctggtttcttgttagtatcatcttggtcttgcatcttttctga

SEQ ID NO: 252195 - DNA, 433 bp, Glycine max
  unsure (1)..(433): unsure at all n locations
ttctggaggganacctgttactntacagagatcatggtcttttttttcgacaaaagtagatctcccagaggaattcaaggaaatttgcaacttgggaacattgaatcagagtcctgcaacaggagctcgtgtaaaatcaaatgaacaagcaattagaaaatctttcattgcaccaaacattgtacctctggacactcctgatggtaaagtctcagcaaaatcagaaaaagagaccatcaccttttcattgacaaaacctgtaatgctacttagaccagcttatgttataagagcatccacatgcagatttgatgttgatagggtttcagaagatgcgaattctggaactttctgtgatactgctattaaattatacagctcaaatgatcccattttccaccgaatctatgatctcataatgaagtaaagaatc

SEQ ID NO: 252196 - DNA, 442 bp, Glycine max
  unsure (1)..(442): unsure at all n locations
gcaaagcttactgttaaatgtgggacctattcttgtagaagtctccatagaggtcattgcctccctcgcccagtattatgatcagtcgttgaggtgcttcacctntggggacttccagctatcacctatggtagaagaatttgaagaaatcctatgatgtcctctagggggaaggaaaccatacctcttctcatggttatatccctcattagctataatttccaagatagtccaaatctcggcacatgaattataccacagatagcaagtcgaaaatgatgtggttggaattccgagaaaatatttggaggcaaaagcaagaatctatgctggttaagacgagtgggccccgttcatagatattctcacactgttgatcttcggaggagtcctctntccgaatgtggatgggttggtggacctagcagcgatcgacgctttt

SEQ ID NO: 252197 - DNA, 418 bp, Glycine max
ttgaccttacctttggctttcatcaaatgtgccttcttatctaagataatcccaaacaacttttcacactcatggtggacattacaagtatcatgtgatgtcgtttgacctctgtaatgctccgacaacatttcgagccactatgaatgacattttttgccctctgttgtgcaaaacggtgattgcattttctgatgatattttggtctatagtgctgaccatgatcttcacatatcccatctctcttaagtttttgaaagtttggctcatcattagtttttttttattaaacttgagaaatgtgtgttctatcagccttagttgtctacttaagccatgtcattttttgcgggtttagtggcccttattccttccaaggtccaggcgattcttaagtggccaattcctaagaatatt

SEQ ID NO: 252198 - DNA, 485 bp, Glycine max
  unsure (1)..(485): unsure at all n locations
cttgtaggattatggngtacccgtcatatgtggtactatgtggcgatcgggcgatggtgcaagtcgactctccacatccacaaatcatacataaatccaccatccccagttgcccaccttcaactgaactcacgtactcccacgtagcctttatccttgttcctctcaacaccgggtccccatcaatccctccaagcttccacaacatccaagatattcaacatccaaacatcatgaactatccaaaaccaagaaaacagggcaaaggcagaaaactcagcccaaaacacattccaataccacaactttccttactcaaataccccagtaacattctcttcgttccgattcgttaaccgttggattgactcgagaattgtactggatgtccctaatacatatatctacattttgaccgtngggatctgctagataatgtgcataacccaatatgtactacccttttacaaccagcaatacacaac

SEQ ID NO: 252199 - DNA, 396 bp, Glycine max
ataccttcatgactgtgttctatggcaaactaaactgttcaaggatataatcagattcatctgctcttacccttattctttgttttaatatattaatttgaattgtaatcagatttctaataaacttttcctatttatcatactttataacttgaactaactaatgcaataagaattatcgtttcttctcttaagctgcatggtattagagctgctatgactagacttatcattgcttctccctagcaaatgttgaagcagaacctgagttcaaacaaactcaagcataccatgaaggtgttatgactacactaaaaaagactgttataacacactccccctcaagctaaagctttatcttgttagaatacaataacttgaccaaaaatgcgattc

SEQ ID NO: 252200 - DNA, 319 bp, Glycine max
  unsure (1)..(319): unsure at all n locations
ttgatatcgaantatggtctaacgtgaaggngggtatttaaagaacattgtgtaaggttatgttgggcgatagctgaactgttcctgaatgggtggcatgaacatattggcaattcgaaagttttactatgattggattgattcgtctatgggagtgaaggttatgcaaggagcaggttacatgattcgtagcccctgaatctaatttccaggatgtggaaagcgcactgggagaaagtgacatacctgtgtctattggagtattgacggtgcatgatgaaattgaagcaacctgtttgggttgagtgggtgtcgtgtt

SEQ ID NO: 252201 - DNA, 465 bp, Glycine max
  unsure (1)..(465): unsure at all n locations
ngtcgtctatgatgtgtcaaatgttatgtgtggtggataatgatatactctcccaatctacctaatatcttataaaaagtactaaatgcaaaaaaaaaaaaaaacttgtttgaggaaaaaataaatatacttgatatcttagaaatataaaaagatttgatattttcttcaccttgtataaggattatgcatgtcttaacactaattcataccaaatagtgaattgcagatctagtcacaaatgatgtgcatcttttatatgcttttagtagaaactgatacctctaaatttatttcaaatccataaatgttattttgtatcttaaaattaactatggggctaaaaacaatgatatcatatttctgaaggatagaaataaaataatacaatgtacaggatcaaacctaaaatttgtaatcactattctatattccaacattattcacaaggaccaaagatagtga

SEQ ID NO: 252202 - DNA, 430 bp, Glycine max
  unsure (1)..(430): unsure at all n locations
acatggcaagttcatcatgcnttcatcatattgcttcacaaataactatcatgaagcagaaaactagcataactacccatcatatctcccaaaaccccatacccacgaaaatcaagagagaaacaagtccacccaaacctgatatttcgaagtctcacacgtagacacgcacttcacgactccgaaaatgccctcctttcgcgatttggagcataaatgggcaccaaaggttgaagctttgttggagcttcaatggagaatggaggagaacgaaaaagcaacgtgaggaagaaggagagagagcttttgaaaatgtggggctgagtgaggagagagagagtngctttttggtttaaaaaaaaaagctttttcctctgttcttattatttatttaagctatgccacatgtctccatttgagtggagcaaaa

SEQ ID NO: 252203 - DNA, 412 bp, Glycine max
cagtctgacgagggatcgaggtttagttatctatgctacaacatataacacaagagcatgattgattagagaaatatatttatatgcatcagcttgtttgttatatagacccaacatttctatctactgctgtcacttttactttgcattttatagtttttagcataaaagttagtttaaatattgtttgaaattatcaatcatacatgttctctcaacaatgcttcatttttgaacttaattcaggctaacattagttccctgtgtttgatcctcagattcatccgttttaatttttaaatacttgacaatccggtgcgctttccggcaaaccggatttcctttgaatatatttgaacgaagaaaaagtggaacaaaaagtaactacaggggatatccatcaaagtattta

SEQ ID NO: 252204 - DNA, 454 bp, Glycine max
  unsure (1)..(454): unsure at all n locations
atcatattggacttaacaggcgtacatctttatatttgaaactccatagtgtcatctcatcatttgtgtttgttgagaatagtatggatagatgcatataccacaaggtcagtgggagtaaaataatatttttagtcttatatgtggatgatatacttcttgcaaccaatgattttgggatgttacatgaagtgaaacaattcctttctaaaaatnttgacatgaaggatatgggtgaggcagcatatgtcattggcatagagatccatataaactgatatcaagggattctcgggctctctcaaaaggccaatactaacaaagttctagaaatatttcggatgaagattgttcacccaacatgacacctattgtgaaaggtgatagattcaatttgaatcaatgtcctaataataagcttcaaagggaacaaatgagatacattccatatgct

SEQ ID NO: 252205 - DNA, 416 bp, Glycine max
tcctattctataatatagaagcatgtgtaacacttgttgtaactttaatgaatgagagtcttgtgagacatacttcaaagttccacttctctcccttgtttattccttcaatttcgtgctcccccctctctctttctctccctctttcttttcctttattgaagcatccttccaagcttcttatccaaggctcatcttggtggtggaagctccttcttccatggcttattccctagtggatggcgcctcctctcacctcttctcctttgtcttccgctgcatctccatggtggaaaatcaccattaaaggacctcatcgaagctcaaagatccagcctccatataagccccacaagcaagcttccatcagaagcgatccacatgaagcatatcgtcatgaattattttcacgtcaa

SEQ ID NO: 252206 - DNA, 367 bp, Glycine max
  unsure (1)..(367): unsure at all n locations
tgatgcaactatgaaagttactgccctcaagctatcctgtcatgacatgatcgctcatgtgggtaatgctcgggctgccgtggaagaactaatatagttccttgtagctgattcattggaggaagtgaatangatacttgacaagttctacatggttcttattttgaggagcttacattcagacttcgatcatgtgcgtgatcaagtgcttgctggggaccaaattccatcaatggattctctcatcaccagacttctccgtgtgcctcatttactgaaggatgagaatcctactgatggagtggagacgtcagccatggctgcatctagagggagaggaagcggccgcaatattcgaggatgtcgc

SEQ ID NO: 252207 - DNA, 289 bp, Glycine max
ccttcaatcctataacgcaacgtggcggacaaaaaggggcagttaacttgaatgaccgttatcgtcaatgcggaaagaattttgcacttcactatccatgttcacacattattgttgcttgtggttacgtgagcatgaacttcttacaatatgtagatgttgtttacagaaatgaacacatcttataagcttactctgcacaatggtggcctcttgggaatgaatcggcaattcctccttctgatgacgcatggacacttatccctgatccatatacaattcatgcgaa

SEQ ID NO: 252208 - DNA, 79 bp, Glycine max
ttactaatcatgaccacacacgcaccacactctcttcacacacgcacacgctcccccccgtgggttttttttgtatttg

SEQ ID NO: 252209 - DNA, 399 bp, Glycine max
  unsure (1)..(399): unsure at all n locations
ttcactattttttaactttacatgcccaactcctttgagtggcatttgtattgatagtatcttgaatgctgcatcttancatatttgatatgtgtttagcattatgcatcatcatggttatgtatgaagaaattcttttaacttagataaatttctctagaggcaaaaactctctattttaatcgattatagatttgcataatcgattaaacaagttgtctgaagcttacagagttaagactcatattgatttaatcaatttcaatagaatttgaatcaattacactattgtttgagacaatgattgatttttcaagagtctctgtgttaatcgattattatgcggattattccattacttctctcttgttaagttgttcagacgtgaacaagaacact

SEQ ID NO: 252210 - DNA, 413 bp, Glycine max
tggaagcaaaggtggggcaatcctttatcagttttctaatggtgcgacttgaatggaaattttcaaggacatgctcctcttgtgaatcttctgatttaggcattgctgcaagagaagctactgcattgtggagggaatttatcttatcacctaaagctgggtgcattatgccctcataaccccctgttgcaacctgcttgtgcaattgaagttaccaaaactgcaatgctcggtgacaaatttaaagaacctgtgaaattataatatcaatatcatctttattacctcatataagacctctttgccaaaatttgactgaatcagttctcccacgctctcaatacatatatcaagaagactctgcattacaagttacaatctaacagcattttcagcacaacttcataattctc

SEQ ID NO: 252211 - DNA, 459 bp, Glycine max
  unsure (1)..(459): unsure at all n locations
aatatgaatgcacaaatctctctctcataaccctcttcatgtcttgccaattattaatcaacggccatctcatcctctcaacatcactcctcacttgattccaccgcactaaggcatatccctcaaactccatggaggccaatttgatctttttctcttcattgtagttgtagcaagcaaagactttctcaaccttcatctcccactcaagatacacttccgaatcacaagtccctttaaaagtagggatcttcaccttcactccctcaatcccttcctctctttgtccacctccatatcttctatgatttcttctctccctatacctctcattcctccatcctccctcatcctcttcataccgatcatcttctccatgagaagaattagatggtcgtacatctcttcctcacactatattgtcaatcctcacanataaagcttcactactcccatgta

SEQ ID NO: 252212 - DNA, 360 bp, Glycine max
actgcttgtaaggaatttttctgaagtcttccagataagctaaggcttatatcacataactatatctcaaaattaatgattgaatatctcacttaaaaataatattttttttttactgacacattgttcttgcacgttatttgttaatttactgatcataggccagtgatcaaaattctgattgagtggattacctgttcaaatttcaaaactttgattgagcctaatatcttaatatgatccttgtacattaattaattataaacttaaaagtattaaagtctgtataaatagatgcctgttgggatgtcatatttgctaaccggacaccgatactgacttgtcaacacattaatgtca

SEQ ID NO: 252213 - DNA, 409 bp, Glycine max
  unsure (1)..(409): unsure at all n locations
atttttctaccttctactccaagatcagtttcaattcatgtagagaaaggagaaaacaataacttttgttttttattgggaaataccgattgattctcttcctgcccgtgatatatttcaaagtttctattttcttatctcattttgtttagttaacaattcgatgtgatgctttgatcgtgggtggtgcttgtattgctcccaaactattctgaactggccgtaattgtaaatgcgagctttagttaattttaagtaaaaaggggtgagagaagatgtactgcatatgtgtttcgtggacatatagcttacaagagttaacatcttgaagcattaacgttaatttgtgttttcttggctgctntgtattgtcagaaacccaattttcatctatttattctgttattaa

SEQ ID NO: 252214 - DNA, 436 bp, Glycine max
  unsure (1)..(436): unsure at all n locations
tttagagtaatgtttaaaattcttccactggtaatcgattacaacgctgtggtaagtggtattcgattacaactttcaaatttcaaatttcaaattttctggaaaaacttttttaaaataattttgcttctggtaatcaattacaatgtctgataatcgattataatgcctggtagttgattactagtggaaaaatgcctttttcagaaaatgttaaaaatattttaaaaactatgttgtgaggccaaacctttgcaatcactaagagactcttttaacaaagatagactaagagttagctntcttcttgatctttgttttcttggtcttgattttgacttgaaataaaactcgtattgctgttatcttggaatcatcaaaaccttcatacacatacattcacacttcggtggtgagagagtcaaagatagaaccg

SEQ ID NO: 252215 - DNA, 470 bp, Glycine max
aaggttttcctctatgtctattattttattcaagctctgccacatgtccctatttgattggagcataaagggcccactttctctttttgactgtgacccatactcagtcacaaaagtgagaaaaatctgacctttgaaacgctaaaatcctgcctcggtttgcgtgccgtttctctgattctagtttctcgcgtttctctgcgtccgccggggccagttttcgaaagcaagcaatatatatatcaaaacgctcagaataaaaccccgagcgtggtttagaggttggtttcgttaacttttaagtcgcacgcaaaacgatgatgtttaaactaattaattaggaattaacccataacctcccagttatggatttctcttccttaattaatctaacccgcgtatcttgcccctactattcctacccttaccaagaacatatatgcatagacactggataatacttatatata

SEQ ID NO: 252216 - DNA, 426 bp, Glycine max
cgtcgatctagatgggatgaaccttttgttattactaatgtttttccccacggtgtagttgagattaaaaatgaaattaccagcaaagtcttcaaagtgaacggtcatcaactcaagctttttcatgagagctctcatgtgaaggaagagtttgtggcaaacctctctttggtctcgcctattttatgtgatgatgtgccttgaataacacttgaggagccttttcccttcttttatatgttgtctctttgtttgcatttcattgcatgctcacattgaagacaatgtgcacttcaagtgtgaggggaagggtttacaaaatctggttggtgttttctatttttgtatttggtggtattatttgtttctctattctatcttaatttatgcgttcgatttctctctgtttctatttaactatattgt

SEQ ID NO: 252217 - DNA, 307 bp, Glycine max
tcctgactcaccatataccttgacccattgttataatgccaatccttaccctcggaagcaaaaaaagaatagaggggaaatttccgatcaaagaataagagaaggaaaatttccaatgaaagcaaaaaagatatgaaggataattccccaatcatagagtgggagaaagcaaaaaaaggaaaagaaggaaaattccccaatcaaagagtgggagaaagcataaagaaaagaaaggaaaattcccaatcaaagaatgggagaaagtaaataggaagataaaaatgaaagaaagcttctgatcaatgat

SEQ ID NO: 252218 - DNA, 373 bp, Glycine max
tgtgaaaaaagactctatttattaccactatttatgaaggagaatcacaacctatgagatcattgattaccggggatgattcaagggcaatgtatagatccttgctggtttcaaaataaatagtggttccctggctgctgctattatcatggatttcatggcatgaatttgctttgaagtatttggtaatgagtgtacggatcaatatcttgtgcatgctggtggtataaatggataccaactgaagttgggtgcttctgagaagttgcatctaaaaaacattattacttagtgagaaatattataccaacaatgttgttcaaactttgtattgtttcctatacgttctgtcacctttcataaatgcttaatc

SEQ ID NO: 252219 - DNA, 389 bp, Glycine max
cttgacattcttaatttcttttgtcttatggtgttaacgtttcctttgatccacatgatgaaagtcagctctgagcactaggtgacaatagcaaactgtacttcactctctctttgcacaatagcagcctcatgtctagcgccatagttattagacaacggctaactgggatctctcaacggattaaagctttgaagtctatataaaaagctagaagatgttcatgttaaggttttcaaattacaagaaaacattctgagacaaaacgaacaagtactgtaacattgttagtccgttggatgaaagaaacttgagtgaattgagtgaatcttagctctgttgagttagagagtttcactgtatacgagcttactgtgtaaacacttcgt

SEQ ID NO: 252220 - DNA, 395 bp, Glycine max
acatcaagcaagttcatctcagagctcttatgctttcaatagaattcaaaagttggagaatttgcttgaaaaccttgtagttgtgcttaaagtgcgatttgcagaagatccacaaattaatcaagtcttagaagctatagatcaagaggtatgaatttataattctacttattcaacgatttaactatgatatgataatttacaaagaaaaaatattcttttaatttaggtacctacaaatggttctaccagtaaaaatcatcaaactacaaacaatcttaactagaggtgagttgaaatttagatggtgatgaagatgccagccaacgacaatatgttatttcaggaacgtgatttagatggtaatgaagatgtgagccggccgacaaatgttc

SEQ ID NO: 252221 - DNA, 385 bp, Glycine max
agatggaccatttcaagtgcttgttttattcaatgacaatgcttacaaagttgagctgcccgatgagtataatgttagttccaccttcaatgtctctgacttatctctttgtgatgcaaatggagaatccgatttgaggacaaatccttctcaagagggagagaatgatgaggacatgaacatgatcaatggcaaggatccatttgaaggacttggaggacctatgacaagggctatatcaaggaaagtcaaggaagctcttcaacaagtgttgtccatactatttgaatacaagcccaagtttcaaggagaaaagtccaaggttgtgagttgtatcatggcccaaatggatgaggactaaatggcaccactttgtctcaatttt

SEQ ID NO: 252222 - DNA, 437 bp, Glycine max
tataactattactttgttccggatgggttgacactgttccacctaaagataaagagactgtgacaaagagaagggttgctgtgattctaaacattaatgcatgggaagccatttgcacaattgatgacaatcttgatagacaacgccattggccattggccaacaaggactgataattcaaccattattgctacccatttactacctttatttccaaattaaagcatcagtttgtctgctcttaattcttttttttccttttcctttataccctttgggttttcttatgaatgaggacaatcatgatgttaactatgataaggagacacttttttatgtttgttacacttcgatgaagctttccatcagacaatttcaaagttaccaaaaatagtgtggtgataaagagagatttggctactaatgtgcccatactt

SEQ ID NO: 252223 - DNA, 470 bp, Glycine max
  unsure (1)..(470): unsure at all n locations
tgaagggttccactaatcaattctttgattacaaccatttattatctatgccacttctggctataacgagtactctctagattactcttggcactacccttaatttccccctaggattaagacccaagtattctttgtcactaagccacctagctntcacaaacaatagatgtttgaaagaaaatgtattcttatcacttaaagagtgcttacacaataagctcaaatacaatgaaacttgctaacttagcggagctaagattcactcaattcgttcaagtttctttcatccaataaatatgacaatgttacagcaatttgttcgttgtgactcanattattctcttatgatccaacaaccttaacacanacatcttcaagatttatatagactctagagcttcgatccattgagagatcctagctagcggttggctaatagacttgggcgcttacacgatgccattact

SEQ ID NO: 252224 - DNA, 471 bp, Glycine max
  unsure (1)..(471): unsure at all n locations
ctgcttgtggagcttttatggaggctggatacttgagcttcaatgaggtcctttaatggtgattntccaccatggagatgcagcggaagacaaaggagaagaggtgagaggaggcgtcatccactaaggaataagccatggaagaaggagcttcaccaccaagatgagccttggataagaagcttggagaggatgcttcaatggaggaaaagattgagggagagaaagagagaggggggagcacgaaattgaaggaagaaaaagggagagaatttgaactttgagttgtgtctcacaagactctcattcatcaaacttacaataagtgttacacatgtgtctatctatagactangtagcttccttgagaagccttcttgagaaaaattccttgagaagcttctttgagaaagcttccttgagaagctagagcttatctacacacacccctctaataactaacctcacctt

SEQ ID NO: 252225 - DNA, 373 bp, Glycine max
atatcacatgtcacactcgacacacaatgaaatggaccttatggttgatccaaaactcaaccatcgtttgcatgaatcatcagctgaatctcacgaaggttcactaatccgaggtgatgaaagcttttttccttcactgatcgggccacaaaactagttgcatgtacccctaatgatttgtagcacctaaacactagtttctaacccattgtttactctcataaaaagatgattcttactattaaacacacacacacacctatgcctatattaatactaaactgaatcatgtgtgcgcaccttaaaaacaatggtagaacttggaaaaaaaccagaagacagtcctaattcttttattactgaaaaattactc

SEQ ID NO: 252226 - DNA, 316 bp, Glycine max
ggctagacatgatacatgtcagggcctggtttttgttaacgatataacggatgccccacattatttccatgacacaaatgcacaaaatgatgacttggaaactttatgccaaactggttatgcatgcacctatgcggacactccagtgtcaaacttttatggccatgtgatgctaaggctcaagattcatttcctctattttacatcaacccaatgtttccaaaacatgttcttttatcaatttgtgcattcatccgagtccatttcgggcgtctatgataatcttcacagcattcacccttcaggtgtatacaca

SEQ ID NO: 252227 - DNA, 394 bp, Glycine max
  unsure (1)..(394): unsure at all n locations
agctngcantgaggttgcggctacataaatttctctgtgtcttctacgaatcacaagtttagattctaagagagcacaagtcctatactaatcccaatgatcttttcttgttttgtacaaatagccttctcactattcccttttcttaagtagctttcgacctttttgtaacagcacaagtaattcttattttctttttttttcagacatacaacttatttgttgggtgtgctgatgctcaaccctcttctttacattctaatagaccttcctccccccaaatttagagaaaattttccttgaaccatatgctctcctacaatctcaacaaggtattaagagataatcatttaaagtttagggttcacattcatgacaaatcaataagccttat

SEQ ID NO: 252228 - DNA, 400 bp, Glycine max
aaactagcatatgctggcgcagataaaggtcaatatgtgtctatagaaatgactgacatatatataagaccaacacaccaagatttccaatcataggaacctaagaactacaatggaataaacacgcgaataagccaagctcaatgcatactaactagagaatactttattggcataaataatcactgcctctaactaacaaaattcgtaccagcctagtagatcaaattaaatgggcatgtagccaatggaagacaagagtgaagattacaagcattactctactgatggaggcgaagtaactggggatgcaggctatatatcttgatctacattaaactataacacaacgctgacctttgcttatgaagagaagactgggtgtggctaggcttctact

SEQ ID NO: 252229 - DNA, 333 bp, Glycine max
aaacacaaggccgctgccaagagcaacgatccagggcccacaaaatcccccgaggacagacctatggcaaatatccccaccaaacgccccatgtcaaaggaggagacccccccaccccttcttcaaaacatcgggagacccgaggggtggcacactcaaccgggacatccccccgaaaatataaaagcccatgggtcccccgcaccagaaactaaataccaaccgcacagggagaaagggacgtgctggggccaaaagcaacaaaggcccagcccaactgcaaaagaatacgattgggcaacccctggccaacgcaaaccaacaacggagaga

SEQ ID NO: 252230 - DNA, 400 bp, Glycine max
  unsure (1)..(400): unsure at all n locations
tgcagcatgcaagctntgacgatgcgagacacactaattatcgtctgtcatatacaattcaataattttgggtgaaaaacacaaaacaaggacacttataaggtgcatgaaccagaccctaactctcgtcatcccccgaacattaatgggacccaatatctactatattagatttcacatagcgacactatataaaacgacttaagtttttctaacgatccgtttcaaacgcaatagattcccgtgtcattcaatgctttaagcaaaagagaagaaaataaacaccacaaatacataaaaatatgcactacatattagcggcgggcgaaaagaattatgctttcaagtataaattatgacggatctcaagtataaattatgctttcaagtataaattata

SEQ ID NO: 252231 - DNA, 412 bp, Glycine max
  unsure (1)..(412): unsure at all n locations
ntctccctcaattcatagttgtcaaaagagctctgacgtgtatagtcgcaatgggtatccaaacttcaaagggaagtgtgtccagcgtgtaatcaattggatacagcatgtccattttgtttaaagtccacgaggtttctaatatcttcgactctaatttgagctctacatgatgatgacaaatattcattctttaatgtgtaggattcttttggttattgagaattacagaatgggaatacaaaaaatcttgaaccaaaaggatctcacgcctaacatctttcttattaaagtcgtacagatacgggtgataatgtcattgaaattgtaagcagaatagcatctctctctacattgaagatattatatacacaatctttatactaccgctcaagaaaggatcttgttaact

SEQ ID NO: 252232 - DNA, 461 bp, Glycine max
  unsure (1)..(461): unsure at all n locations
atcctcttagtcacctgcggcatgccagctangcagatccatccatctattggtcttcaaaaaaggcttactctttcttaattcgaaagactgcataaatctagtaagtttacccaatagcatattaggccttatttctctagaatattcgagtctttccgactgttcaaaactgtataatattcatgtattagatgaaccatgggatgcaaagcaattgaagaagctctattcaggtgaagctcctattcattcccaatcagcattttcctattcaagagctcataaagattatgtcagttgttcattgccttcctagccaattttcccatggatgtacaaacttgatctaagtttatgtaatctaagtcaaatccctgacgctattgtgaaattatgttgcttatagagcctatgattaagtggaaacaatttttctacactgcctaactctaacgatc

SEQ ID NO: 252233 - DNA, 451 bp, Glycine max
tgtaaggatatcctacggtcttggtgggaaactaaatgctcttttatgttggctataaaacgaatcatctcaagtataatttataaaaacaattattaaaaaacaataattttattatatacatgacaattgaataataatgtttaaaaaatttagacagcatattctaagtatattcatataaatctactacatgcatgctattgaactcaaggtatatgtgaaagacacaaaaatatcttatgagaacaaggacatattttgtaacgaataattatttaatttaaaataaaataattcaaataatagttaattttacaaaaaaataaactaagttatctttaatcttagttaacatcatgacaatgaataagtgacttaattatttgaatgtaatatctcaatggtttcttattcaattgtgtgtctctggttctaatattaagagaat

SEQ ID NO: 252234 - DNA, 424 bp, Glycine max
  unsure (1)..(424): unsure at all n locations
tatgatnagaaattaaaatgcgtaagacaatccataacaggttgagatcttgcgttaatcaaggattcatgagttggattattaaaacattgttctgctgtaagttagtcaacttattaaaacattcattattttaacatagactaaccttgagagctaaagcacggtcaaagctttcaatagcattatcaggctcaccaaaattaaattgtgctctgccaagtgtgacccatgcctggaaggatcaagattaaaataaatgcatgattagaagactgtcaaatgaattagcattgctctacttggcatgaccattggtgattcaaaataaaactttggcatatttctcagtttagactatatgtcctacaaatacaatctgcanaggagttggtataccanatttaacacagagatagcatac

SEQ ID NO: 252235 - DNA, 348 bp, Glycine max
tacatttatattaatacaagaaagtattattttctcctaggaatctaagcttcgggtctgaatgataaaaggcatgaatattacgacatcgttgagagggtgttattagaaataaaatatggccgccccatgagagaaaccttgcacctaggtagcatggaaaatacctttccaacggctgtatatatgcaaaatttattacaaggaaatgcctcgcacaatgttgaataaaatgccttgcagaaagttgaataaaacgccttgcaaaatatgaatatatatagcatgagaatgccttgcataatatgaatatatataacatgaagcgccttacaaagtggtggatgg

SEQ ID NO: 252236 - DNA, 476 bp, Glycine max
  unsure (1)..(476): unsure at all n locations
ctataatactcaagcttgcctcanagagatctangaaggataaagcggctgaaggaaccagttccgctcccgaatatgacagccaccgtcttaggagtgctgagcaccaacagcgcttcgaggccatcaagggatggtcatttccccgggagcgacgtgtccagctcacggacgacgagtataccgacttccaggaggagatagttcaccggcggtgggcatcactggttacccccatggccaagttcgacccagacatagtccttaaatattatgctaatgcttggcctacagaggagggcgtgcgagatatgcgatcctgggtgaggggtcagtggatcccgttcgatgcggatgctctcagccagttcttgggataccctctattgctggaggagggccaggaatgcgagtatgaccacaggaggaatctgtctgatgggttcgatgaggaggccatcacccacctgctatgt

SEQ ID NO: 252237 - DNA, 319 bp, Glycine max
  unsure (1)..(319): unsure at all n locations
agcttctcgatatataatgccttctgttcgttctaccatctgaaaaggaatgaccatctgaatctttcgagagccttcgtngatcaatgtctagcgctatgatatatattgcgccagaaacggacttccgggtgataacttctgaccatctgagaatctcgacggctccagtaggtcagattgaagcttggcgatatattatgcgccttaatcggacttccgagtgaaacgttatgaccatttgaacttctcgagagcgtccgttgttcaattgcgagcgcttccatgtattatgcgcttgaatcggacttccgtgtga

SEQ ID NO: 252238 - DNA, 331 bp, Glycine max
gaaataacgaaccgacattatcccagggaatgataacacactttatggctgagtgtgccgaaattgtggcacccaaagttaaccccgacaaccgacaagtcagacatcattaggtctcccctaaagatgatgcgctagcgttgcaatagggcccttattacaactcgaactacacctaccacaagcccttatagtgtatcaaaccagagcatatatatgggcaaccaactatacaacgatggcgccgttattttgacatactaagcactacaaatatgaacagagcggagcacttcacctactcatttgggacgatacactacaccttgac

SEQ ID NO: 252239 - DNA, 370 bp, Glycine max
  unsure (1)..(370): unsure at all n locations
ngaatcaacttggatccaagcaaatggttgtcggacttcctttgttcattgnactangaaaaaataagtgaagtgtgcttagctaccaaacaacctagaaattacttcaagagcaatcaaccaatgagagcaacaaaagtgctagtgatggcgcattctgatgtatgtgtaaggtgtcttcactacgaggtaaacgatacttcatctcatttattgatgaattcagcataatgatgtggttgtatctaattaaaactaagagtgaggaactatagatcttgcatagatntaaagtgatggttgagaaacaaagtgaataatccttgaaggtgttaagaactgacagaggaggagagtataccttacatga

SEQ ID NO: 252240 - DNA, 458 bp, Glycine max
  unsure (1)..(458): unsure at all n locations
agcttggaactgaacgctgtgggaagatattattgatgaacaagcacttgggtctgaatgagtacaagttcctcctcaaggccattgtcaactctggcattggtgaggaaacttatgccccaagaaacgtcatcgagggtcgtgaggcaaatccaacattggatgatggtgtcacagaaatggaggagtttttccatggcagcattgaaaagctttttgaaaggtcaggaatttccccctcacagattgatgtgctagtggtgaatgtttctatgttcgctgttgttccttccttgacttcaagaatcattaaccactacaagatgagggaggacataaaggcctacaacctcactgggatggggtgcagtgctagcctcatttccttggacatcataaggaacantttcaagtcacaaaagaacaagtgtgctcttttggtgacttccgagtctcta

SEQ ID NO: 252241 - DNA, 389 bp, Glycine max
  unsure (1)..(389): unsure at all n locations
tgtcaaacaacanaaacatattgcaaattattgaaaatacactaagattaataaaacaaacccagagaaagtaattaaacaccatttgccttataattccatgattgttaataaaagttttcctttttatttatttataatataatgcttaaaataaattatctaaatgattgaaattttatttatgattgtttgtcgggttgtgacatcaattgtcaggtaggtgacaaatataatcgatcataactcttagattcttatactcttaagtggaataagttgtatcctaattattaattgcatattttaatatagcgcgaagaacttgatccaacaattgatatcaaaataaaggtttgataacttgatttccctgagataattataat

SEQ ID NO: 252242 - DNA, 405 bp, Glycine max
cgaagatggcaaggaaacatccgatgaagaagagctcacactacacgcctcaagccttgtgttcctgaatgtattagaaggaacaactcctaatcccatgcatcgcactctcccagagggctctaaccctaacactctaccaacaacatcaagaggagaaacttcagatccatcaactatgctttgagtcaatcctacttcaatttgttcctacaaacatgtaatataaggaattacaaaattcttaagattaagcacaatccttgaaaacaatgttactaaagaaaaacataccgctatagtctttgctgcttcatttacaaatgacccatctttcctttcatgagttccaaatataattatccacgacttggtagcttcccagattctaacatctaatataaa

SEQ ID NO: 252243 - DNA, 497 bp, Glycine max
  unsure (1)..(497): unsure at all n locations
agctntganagtcaaaggcatattgggttggtggaaaatgaccagaatataatttatttggtataatcgaactgaaacaagtttgtaaaccttttgctgaagaagaatcgatttaacgagcatacataatatattccaactatgatggaacatcacattcttataaatagttccagaataattaaattacctaacagtaacagtttcataaacttattgaacacatttaaacttattctatatatatggctatttgaccggcgtcaggttataggcaggtgctttagtacctaattatgtttgggttatgatatgaaaataatgtacaaggtgaaagatatacacagacaactaatatattataagagagtatataaatgggagtcacgcccacaattanataatagaatcacgatatataaaatgaanatgagaaggtatgattctataattattttaagatgacatatactgttatcgaatgagactaatcacgt

SEQ ID NO: 252244 - DNA, 208 bp, Glycine max
ccgagaaaaaaaaggaacccaccaaaaagaagaatcaagagaaaaagaagaagatcccccaaacgggaagaaagaggaagaatccgcccgaagggaagaaaagagaagacccaccaaaggcccccttaaaacacaaatcggccacactgttcccccccaacaaaaaccaagaaacccgaaacagccaacccaaccgagagaccccaac

SEQ ID NO: 252245 - DNA, 419 bp, Glycine max
  unsure (1)..(419): unsure at all n locations
agctnatcaaaatntgagagaggacactcttaagtctttcaaaatattataaacaacttcaaggaagacatgaagaaaagatagataatccttcaataatttccactcaatcatgtgatgtctttgaaagtctaaagttaaagaccacaaacgttcaccttgagaatgaggaaatttgtaaagaaagatctattctaatggaagacctttataagttgaaaaatcaactagaaagcttacaaaatgagtataccacactcaataaattttatggttacctaaatgaagaaaagtgtaatctatttaaagaatgttcacaagttcataagaattatgaaaacttgaaggcgagtatgcataacttatgggttgaatgtgaaagatataataanagcctaaaattctcaaatgataaactt

SEQ ID NO: 252246 - DNA, 500 bp, Glycine max
  unsure (1)..(500): unsure at all n locations
ctagcttctctctcgtatccttgttgaaccaatctcaggcttatcaatgtaatcctttcggcgtccaccataacttatcttccctctctggaagtggcataatctaaaactctgtaacatgtatcaagcgatccgctcctagtaaggatcacatcacaaattcaacaattattgacaatacactttctaatataaaaatctaaagaaggataatgcctactactatactacaaattgtgctgataaatatntttatatatatacatttgtgcttacactaatcaatcaatatttgaattttttattacataaaacactaatttgctaatataatttgtcactagataacactctaccacaatagagtcaaccacaactgtacatgcaacagactatacatnggccaatntttgtcaatttgagttataagtttcttttcaacagggtttataacaaatggattatgacatccaaatacaattatgttgttttgttattta

SEQ ID NO: 252247 - DNA, 291 bp, Glycine max
tttctctctctcgaaatagctgaggaaaataatgttcgtgaagacaatccaagtcgaggcgcctccgtatcgcttccgtgagtaattacgccaacaatctacaccatttttcaagaaacatctggcgctcttcattttcgtccctcttcaacgcggaagtacctcaaaccaagcctttcaattcattcttcgtacccgcggcggaccacatctggttcacagattttttaataccgcctacatttacaccttatacaccctgtagaggcgcctaaaccatttattcaaacc

SEQ ID NO: 252248 - DNA, 479 bp, Glycine max
  unsure (1)..(479): unsure at all n locations
actcacgtatgttaagaatcacgatttgtgtaatgatatcctatcacatgtccttctttcatttctgtcaagtnggacagacacaactacctactggaagccctattttgttgctgactagagggagtaaatttgatgatggcttcaatctcgggacaatgaattgtcttatgcaattatgactgacggttccaacaagagcaatcttgcttatgaagaatgataaaccgatgatcaacaactttggttgttgcttaacaccatgactgaaactcanatcacaagtttcacaacattcacaagggatcattgtagattgaggaatatatgatcaagatgaaaaccttgacacaagcttaaattctcaagatcccaatctcaacttttgagttgatcatacaaacttttgcgggaatggatgttgacttgttgagtatacactcaatattgtcgtccattatctaacanagaanacatga

SEQ ID NO: 252249 - DNA, 456 bp, Glycine max
  unsure (1)..(456): unsure at all n locations
tagcttcagaccaaagcagcacanattttatttattcaaaacccctcaatttaatggatgttcaaggtttgagaaatgaaattgagaatgaggtaaatttggtgcaaactctcacctcacacaagtctataacatcaatttaaacttgctcaaactggatttactcctaaaattccaccaaatcaaaatttgactcctcaacacccaattttaccctagaaatgactctttgttcactttgggcatttgtttttctctctagcacagcccaaactttctcataagtcctaaatgacatttcaagctaggattaactcactgtaacctccaaataccactaaatccagatttggccttccaactctcacaaactcactcttttttttttcactcataacaccatatttgtactttctaaccctaggttaactttacccttcatccctagcacgtttc

SEQ ID NO: 252250 - DNA, 371 bp, Glycine max
agcttcttatcccaggctcatcttggtggttaatctccttcttccatggcttattccttaatggatggcgcctcctctcacctattatcctttgtcttccgctgcatctccatggtggaaaatcaccattaaaggaccctattgaagctcatagatccacccgtcatataagccccacaagcaagcttccatcaagtggtaatcaaagcacatgagcttcaagtaggcgctccttaacctccattaattatttttctttaccttctcttccatcgctgattcttcattctactccatgtatctcctcacatgtcttgtcctatatgttgtgaacatgattctttacagtttccaccgattaaacttgctat

SEQ ID NO: 252251 - DNA, 488 bp, Glycine max
  unsure (1)..(488): unsure at all n locations
ggctctaaatntacattgatgtttatgggaagagggtgtatgctattnttgttttaagagtagtgtcccactggtaaaactaactttccaaatgtttgccttctcacgaaatggccccaaggaagcttgcctcanagaggtctaggaaggacaaggcagccgaaggaactagttccgctccggagtatgacagtcaccgctttaatagcgccgtacaccagcagcgcttctaggccatcaagggatggtcgtttctccgggagcgacgcgtccagctcaagacgttaaagaagcgctactaggaggcaacctagtaccttttaaatntctgcctgctatttgatcactttttatagtaagacgcacctagttgctcatgatcctgngaatttaaataaaacacgcgcaagctcggaaggtagtcataccttacaaaacatatatatgtatngttacgtagtgaacatacgctagatatacatgtatgt

SEQ ID NO: 252252 - DNA, 301 bp, Glycine max
  unsure (1)..(301): unsure at all n locations
agctnttatggaggctggacctctgatcttaatgaggaccttccatggcgatcttcaacaatcgagatgcagcgaaagatttaggatactatgagagaggaggcatcatccacaagggaataagccacggaaggaggagcttcaccactaagagggctccttggataagaaccttacaaaggcagcttctctggaggacaacaataacagagaggcggggggggctcgaaattgaaggagaaaaagaggaccacatatcgaaattagaagtgtgtctcacaagacttttattcctcaaact

SEQ ID NO: 252253 - DNA, 71 bp, Glycine max
aaaaacctgcacaaaacaaagacccatcgaggcaaaccgaagaaagtgagaaaccacacccacaaccccca

SEQ ID NO: 252254 - DNA, 431 bp, Glycine max
  unsure (1)..(431): unsure at all n locations
nntctattctaatttgaaatccatgaaggtaccctaatgtctgtttttatgggattaagatggtcattgaccaatccctattttttgacttaacaaaattgcctagtgaaggtgtaccttttgagggtgcactgattgatgaatggaaatttgatttctctatgcatgatgtatgccagttggtttgcaccaaccaagcggatatgaccggaaggcttcttgccggttcattggcttttgaaagtcgcatcctccattatcttatagttcgcaatttgcttcctagatcttcaaaccttgcctaggtttctgaagaagacctcattgtcatgtgggcctttcataaaggtctacaaatcgattgngcacatcttgttagatatcgcatgcataaggcattgcgattgaatgccccattaccttatcctcat

SEQ ID NO: 252255 - DNA, 323 bp, Glycine max
tctcataagactctcattcatcaaagcttcaacaagttgtacacatgcttttatttatagaccaggtagcctccttgagaagctttcttgagaaaactttcttgagaagcttctttgagaaaactttcttgagaagctagagcttaactacacacacccccctcataactaagctcacctccttgagaatctttcttaagaagaatccgaaagaagctagaagctagctacacatacctctctaataactaagctcacctccttgaaatgagaagctagagcttatcttcacaccctctataaaacttagctcacccccctga

SEQ ID NO: 252256 - DNA, 491 bp, Glycine max
  unsure (1)..(491): unsure at all n locations
acctataatactcaagcttcaccttctggtcctcctcatagttgnggcatgagaaaacttgtctctatttcatctcccactccaagtaggcctccggatcattctttcctttaaatggaggaatgttgagtttaataccatcaattcggttttgtctaagaacaccatcattccctcttctcctcctttcttcttcattatgatctctattctccatttgatccaacctctcatggagcgcatcatctcgttgtttcattaacctctccatatgttgcatcaaagctggcatttggaattgcgaaagccccactccatcattaggattagtacctgacatctcanacaaacaaatcaaacgtaacaagacaattatagttgctggttgaatacctcacccactcaagtgtatcacacaattatggctnttctctaatgaaacactcttgccttttaccactctaattccncttgagttcttaagcaattca

SEQ ID NO: 252257 - DNA, 409 bp, Glycine max
agcttgtggttttgctgacagctattcatggtgttgtaatttgactgatagaggagcataaacaaaataattttgcatttaaagagcttgaaaagagggcagttcagcttcaatcctatagtgcaaatataatccatattccatgtcagaatcctctggctaccatgagaaccaaggaccgtgttgaaaagcctgctaaggtggaaacttgagagcaaaggtggaggcagagaatacaaaacatgagaaatcatatcagtgtagcatggacaacgacactaaaactgaataacctgcaaatggattccacttgcctgcatgttcaaggggtagaggggttttcaagtgtgtgcatggtgctttataagtcagttaacaacaaaggcaaagttactgaacaggagaatgg

SEQ ID NO: 252258 - DNA, 229 bp, Glycine max
accagcactctgcggtacggtggtacgtgctctctacgagtactgccaagagagagagcatatcgtgcattggtccttagactcttatacgatcgaattggcgctatattggcgcttgaagtaatcactaggcgactgaagggtcctgaataatctgtcatactttccgcgccttttgtgggttgccctaggacaataccttagagaactctacatccaacatgggctc

SEQ ID NO: 252259 - DNA, 438 bp, Glycine max
gcttctcatatatatgcgccgaacttttttttttgaatagtatgaccattggaatttctagagagctttctgtgttcaatatcaagctactcgatatattatgggcttgaatcggacttccgtttaaaaagttatgaccatatgaatttctcgagagcatgcgttgttcaatttcgagcgcttcgatatattattgcgccctaatcgaacttctgtgtgacaagttatgaccatttgaatttcttgagagcttccgatgttcaatttccagcgtctggaaatattatgcgcctgaattggacttccgtgtgacaagttatgaccatctgaatttctcgagagcatccggtcttatatttcgagcgcctcgatatatatgggcctgaatcgacttccgtgataagtatgacatttaattctgagacatccggttaattc

SEQ ID NO: 252260 - DNA, 333 bp, Glycine max
  unsure (1)..(333): unsure at all n locations
tactagcttctcgatatattatgcgcctgattagagtttcgtgagatatgttatgaccattggaacttctcgagagcttccgatgttctatttcgagcgcctcgatatattatgcacccgaatcggacttccgtgtgacatgttctgaccatnttaaacgatcgagagtttctgatgttcaatttcaagcttctcgatatattatgtggctgaatcggacttccgtttgacaagttatgaccatttgaatttttcctgagccttggctgttcaattaccagacgctcaatatattatgctcctgcatcggacatttgtgtgacgagttattac

SEQ ID NO: 252261 - DNA, 255 bp, Glycine max
gctcagacgggactaaagaacgcagagcaccgaaaaaacagaaaaacttattctgagtcaaaaaaccggaaaggagcgccgaaaggaacgaaccgcagcaacgatacacttaatggaatcaaaccgaggtgccgaaatagaaacatagaatgaaaatcgcctgagaagggaccaaataactttatggaggcaaagggcccggaaacagaaccgagggaaaaggagccggggaatcaagaaaaaaattatgggggc

SEQ ID NO: 252262 - DNA, 468 bp, Glycine max
ccgcataactttaactgggatgttctattaaatcctataatatatcgagacgctcgaaaatgaaaacaaaagctcgtagcagattcacacgacaataactttttacttggatgttcgaatgaatctcgtactatatcgagatgctcgaaattgaaaacataagcatgtagctaatgccaaccacaatatctgttaactctgatgtccgattgagtctcgtattatatcgagacgctcaaaactgaaaacagaagctttaagcaaattcaaacgacaataactcgttactcggatgtccgaatgaatctcgtaacatatcgagatgctcgaaattgagaatagaagctcgtaccaatgaaaaccacataacgttaaactccgatatccgattgagtcccgtaatatatcaacattctttatattgaatacagaatctctaagcacattcatacgacataaacttttact

SEQ ID NO: 252263 - DNA, 432 bp, Glycine max
tgagcagcaagctctgaattcatactttataatctactctatatatttataggaaaaattaattaaacaccacactgataaatttaatatatcagacaaactatggacaagtgaagttctattaattacacaaatattagtgcaccttgttgcctatatcctatccacaaaatgaataaatctagttttaatagtttatttctataaagacttctatacattgtagattgttggactatataatctgtgagactgcatatcttggattatattacatatcaaccttcaattgtcccaaagaatacaaaagtcttgcattaagaatggtaataatgcttatttcatttgaatgttgtctaaataatatactaacaaaattaattgacattctttaccgattatataatacattttctcgcacaccttatgatt

SEQ ID NO: 252264 - DNA, 434 bp, Glycine max
tcatatttctaacggagaggctatagacttaaacatttgggaagccatagaagtaagactttatgtacccaccatggtggcttgaaatgcaacactataaaaacctatagaagaatggactgaagatgaaagaaaattagtgcggtacaatttagaggctaaaaacatcattacttctgccctacgaatggataaatattttatggtttcaaattgaatgagtgctaacgatatgtgggacactctacaagttacacatgagggcacaactgatgttaaacgatctacgataaatactctaacttatgagtatgaattgtttatgatgaagactaatgaaagtatacaagatatgcaaaaagattccacatatgttaatcatcttgatcattacgagaatatctccaatgaggatctcataaataaagtgttaa

SEQ ID NO: 252265 - DNA, 440 bp, Glycine max
  unsure (1)..(440): unsure at all n locations
tgagctgcagcttgccctgaacgcctatgaattcttgtgactgatttaccacattaggcacaagagaagaagattctaatctaaatgacttgattcccataacacaatcaaaacccatgtaaaaactataaagtaatgtcatatataccatctggtaagggaataatgattgaattttattcacaagaaatacaacccccaacatgtttgatagcctggtatcttcctttctgaaaacccactaataactgcctaaccccccctgttgttactccataatttattctgcaataactgcttaaggcagttacatatggtcctatatcactacagatacagttacgaataaccctttgtgcctcaactagggttcgatacatcacaacacagacagaccatngaacaatggatgttcatcattaaacaacaacagagacata

SEQ ID NO: 252266 - DNA, 445 bp, Glycine max
aatggctatagcatcatttctggcgctaaattgctgggagttggaaaccatcttctcaattaaatttctggcttcagcaggagtcatgtctccaaaggctccaccactggcagcatctatcatacttctctccatattactaagcccttcataaaaatattggagaagcagctgctctaaaatatgatggtgagggcaactggcagcatctatcatacttctctcccagtattcatacaggctctctccactgagttgtctaatacctgagatatccttcctgatggctgtggtcctggaagcagggaaaattttttctaagaatactctcttaaggtcatcccacctcgtgatggaccctggagcaaggtaatacagccagtcctttgccactctctctaatgaatgaagaaaagcctctagacatatgtgatcctcttggaca

SEQ ID NO: 252267 - DNA, 434 bp, Glycine max
ggatcttaagcgactgagctgcagcttgttaaaagagacatctgtattttatatttagttaaattagcccaaactcacgagacatcggtgtttggtatttttgtcctcagtatagaacacaaaaataattttaaatagagaaaaactctaattgcatcaagtatctcagtagaaggacccaacgcttttatttatttgttttcacactcaatagcttacctttaatgttcctctgattagaataaaaaatacctttgttttcaattcatgacacttaattatttttacaaacacttgcattctgaatgacacttttcaaactgaaacaagttccctgagtgtgatactcagttcatttccgtttaattatttacttgacgactcggtgcacttgccagttatatttcacatccacaaaaaataagtagaagtct

SEQ ID NO: 252268 - DNA, 350 bp, Glycine max
catgaagcttacatctacttccaatacccatatctgaatcttcactttaatacaactgggatatttttctgcgctaataatgtttgcgatcctgatatatatccacaatttcgctttgactgttgataaaaaatatcttggcttttactccttgatatatgaaaagttttgcttcttatccttatcattagaatgtggatattaacttaactctataagacccgaaaataaaatctccacggataagcaattctaacattcggccaaggaaatgccatcacagatcgagataaaaacgacacatatcaaacagatttaacggtctaacaaggtctatttcggaaaagaaa

SEQ ID NO: 252269 - DNA, 308 bp, Glycine max
  unsure (1)..(308): unsure at all n locations
ttgtgtcactctcgagaagggatagggttttattataanggaacaccactcattttcttaanatatctatctaatctctgatgcaatcctccctacgaagagaccagtcactagagtcatgagccagaggctccaagacgattggactacagctgctgaagaaggccctagggttctcatgaacctcatggtagatttttgagcccatgggccaatgttgggtccaattatctttgtacatattagactaagatgtcattatatttggtccctatatttatggatccatattgtacgtagggtaccct

SEQ ID NO: 252270 - DNA, 468 bp, Glycine max
cggatcttaagtcacctgaggctgcagctggttaacccctaacccaggtatgacattcttgatcgccaatactttgacaacattttacagagatgaaagactcgggaatacgtatgctatgcatggaaaatgtaattatgagattgagatgccttgagaaacatcatattctagttaaccaggcattaggtaccatgctcaatcattttgttttgtagtttgttatttattttttgaaatgggtttatgatcccaacatggttggctcatggtacctaacacatgcaactaataatgcagcgcgaattctcacactttctttttttgttttggttgcagaggaaaacgcaggatcatgcatgagcaaagatgaaaacaaaaggtatgctgtttgtagaaaaacaaagatgttgaatgcatgtgcatgatgatgcaatgactcatgcaaaatgttgatgtggaatatga

SEQ ID NO: 252271 - DNA, 350 bp, Glycine max
attttgtatttttgtatgcgataccataagaagaccattcataagaatatattaggcctaatgtattcgtaatcaaaactcttaaagaaaataaccatctacacttatcatagatataaagttataaccatttaataattcagactacttgctaccaatggctgcatttgacacacactttcaatataagatggcagttataatatgactcaaagtggattatggttaacaaattaggatgagaacatacacatatatattttcttaatcatgtcgaagaaacaatatatttagctttaaaaactacctcatcattcacaaggccatgaatagaaaccctacacactgcc

SEQ ID NO: 252272 - DNA, 381 bp, Glycine max
  unsure (1)..(381): unsure at all n locations
tggaaaacattcactaaacaatgtgattgattacactcttgatttaatcgattaagtgggcttgatcactnttgggaacactttcacgaatgatgtaatcgattactatatcctcgcaatcgatttaaccagaaactcgataaacaatcatgatctcaatctgagttgtgtaattgactatgaatatatgagaatcgattaaactagagacatgatttctctacaagttatcacagacttatgtaatcgattatacgcatgtgtgaatcgattaaaccaatgagttatatagcacatatgacttttcttattatagatactatctgtctatttctatatgatgatgcctgatgtgcacacacattgactaaggataataat

SEQ ID NO: 252273 - DNA, 456 bp, Glycine max
  unsure (1)..(456): unsure at all n locations
tgcatgcntatataataataataacatatttattatattcctcacttagttagatacctatttgatttcacacaaataagagataacacgagaaattgaatcttcctattattataaacatgtaatatatcttcttatgaccaaaatggtatctagagaaacaaattatattatcttttattaaaataaattagatgaatactgataaaaaataaatattttttctttatattttattactctataaattcttttattggttatgtgtaaggaatgtgttaagattgtgttcatccaacaatatctcttacttttcagctaattgtgatcaatatatagtgctttctgtttagcttataaaacacataagcttcataatttctggtggcgatatatcttatagtctctataaagctaaaatgcacacgggatatatttaattatgaaccttgatct

SEQ ID NO: 252274 - DNA, 428 bp, Glycine max
  unsure (1)..(428): unsure at all n locations
acccttggtggttgttattggagcacaacctgaagatagaaaagaaccatatagatatagacatctttgcactggatttcatattttaaggaatgcgacaatgagaaaatgacaggactatgacacaaaggatggtactactctgataccaagttatagtatttacgataatatagatactaacatagattgatattatgcattacaatgtaatacaaaacactaactcacaggtctttttcatactaataattacatcaattactagtgtgtaaagctctggtgcattcatacaataacactactagcactaattaaatatggnggtaccacgaaatataatgaaatcacgaaataactctcaattagatgacttattgattccacggtatattctaaagatcacaatagatattcaatattaaaag

SEQ ID NO: 252275 - DNA, 311 bp, Glycine max
  unsure (1)..(311): unsure at all n locations
tgaatgatttcgcgattgagtcaacgagttcacgatccacattaatttcacgttccctgagaagaaatccagaaactccgaatctgagaagccgatttcggattcgagagaagatgattaagattctgaaaaaatcagacacttcccacggaagtattgaaaagatttttcaacaaacgagcatagccacttttgtttttacaacaaaagtttttcccacaattttctatgttaccagagctnttactctctggtatcacttaccagttcctatatcgataccaggggccagtttgattcaaagctttact

SEQ ID NO: 252276 - DNA, 404 bp, Glycine max
  unsure (1)..(404): unsure at all n locations
agcttcgacattcaataatcgagcggtttctatatattatctggactganatcagacactccgagtaataatgttatgtgtagtcttgaagcttgctcaagagcttcaacattcctatagtcgagcagttctgatatattacgggactaaatcagacatcagagtaaaaagttattgtcgtttgattatctcagagctttggcattcaagtccgagcgcttcgatttattacgggactcaattagacatccgattataaaagtattgtcgntgaatttgtcagggcttcggaataaatcttcagcgccttaatttattacggaactcagccaaaatctcgagtaaaagtattgtcgtgtgatttggtcaaagcttaagattcaagtccagcgtcttgattactc

SEQ ID NO: 252277 - DNA, 458 bp, Glycine max
agcttcaagaaaaggctaaactccactctcttttctgatttcaggcttaaatatgtggctttgttcgtgcttgcgcacttagcgcaactctgaactgcttagcgcgcattagtgaatattggcttatcgcgtgcttttctcactcagcggatggactgaagtggtgcgcttaacaggatgaaccttcgcttagtgcaaatgcattgctcatccttcttctacattcttcctcgcccttagcgaagcaatggtgcgctcagcagatggctcgctaagccagtagattggcttagcaagagggtgaaaatcaacacttcacaaacttgcctaattgacctgaaattgagagaaaatgattattaaacacacaaaatggaagtactaagtatttattacctatctttaacaaaaagtaattacaacactacataataaccataaattggaggagtgtgata

SEQ ID NO: 252278 - DNA, 416 bp, Glycine max
tgtgggtttaagataaagaaatacgcttataaaattatgaaaatagatgatagaaggataagagagataacacaacaatggagatggtattgcaaataacataaataataaatgcaatgaaattgggttcagaagctctctctagcttgcttacccaaaccctgttaatgaactcctcttataagagtgtgtaggtaacaaaataaaaaatgattacaatcggataaaatagttacaaaatagaacattgttaatgaaccatctaaacaaactagacaatgcataggtagactagattggatgcgcctctagaataaagacagataacaacccagagggctagactataaaatacacataatgtcatttagtcacctctttcaatgtcgtccactcctgcttccatgaatgggtct

SEQ ID NO: 252279 - DNA, 438 bp, Glycine max
ttaagtcaccgcggctgcaagctggaacggaaaagcctcgtaatcttctagggtcgttggatctatatgctacattcatattccagacgtgaagaggcacaagcttgaagacaagactatacgaggtatcttccttgggtatagcaatatctctaagggctaccgtgtctacaacttacaaactaagaaactcgtcatcagacgagatgttgaagttgatgagtacacttcttggaattgggatgaagaaaaagtggagaagaaagttcttatacccgctcaactacctcaagaagaagctaaggaagaagacccaggtgaaccaccttcacctccaccacaacaacaggatctagatctatcatcaccagagtctactccaagacgagtaagatcctttggtgacatatatgaaacctataactttggccatacttg

SEQ ID NO: 252280 - DNA, 431 bp, Glycine max
actagcttttatctgttgcgatgacctacagattggtcctgttaatcccatgcttggagggttcgtccggggtagcctgataggtacctccaagttgaaagtttcctctagaattgtaatgcgattggccgctaggggtgtgtaatgctcgcacctggacacttttgggagagattgatgtttgtctagcttatgccttctatctgactatgagtcagtcttggtgcctgcttcatgcttgtcgcgattctgtccagcttgtctgacttcattcttgaactcgaacacttcttccatttggatgtagcccttggttcgtttgcataattcgtccatgctaccatgggaactcaaacttgtctgaccatagggcaagaagcatggaatgcaatgctacctttgggttaagatattgaatctggacgacaaca

SEQ ID NO: 252281 - DNA, 432 bp, Glycine max
  unsure (1)..(432): unsure at all n locations
agcttacatcaactacgtccactaaagaattggttttgtggaatggctnatgtcggtgtccattgtccttaaagctcttgtttgtggagcaccttctgatctccactgttccatacggaaaatcattactaacaacacaaggaccacttcacttatacctcaacttaccactcatgagtcctagcctagatatattcaataacactttttgcccccaccatgatgttcctcttaattatcatgctatcatggaacttcttggtcttttctttgtagaactcggcattctcatatgcttctacgcagatctcatctaaatcacttagttgcaactttattttctcaccattttgatccatagagaatttgcaggtccttcattgcccaagtttgctttgtgctaaattctcactggaagatgacatgcctttc

SEQ ID NO: 252282 - DNA, 455 bp, Glycine max
catactcgctctctcgcctatgacaattttagggccttcttggtctttgtccaaggcgcttgtggtggccatattgatgccttttagttcatcatactcccttcacactttgatgcgcgctgactcgaacatcttttagactgctcgggcttgctcaagctctgctcttatggcctggacctctttactatcttcttgtgtgcagactctcaaccacttatgattgcctgcgatgacccccttactgctttccctaagctctttgccttcctttgcgcagcatcccatctcttgcggactccatgaagcaccctcgccgttgggtcgccgaaactccgtgtgaaaaaggcgtgatgggcttctctatggagtggcagctgtctatggtgtgacatgatataattaaacaacccttgttccattaggggacattgaaatacctccatgggacaaac

SEQ ID NO: 252283 - DNA, 501 bp, Glycine max
  unsure (1)..(501): unsure at all n locations
gctttaggcccagtccttactgattacatagccatgaaattcatctacaatgtctagcttattgagntagtgggggatcgagactcgtctctgcaaatgatatcaccttctcagttacgaaggctggtggacacaggtaacaccagtaccttcttccacattaaaatggaaccttctttggagacaccaataaatataacccacccattaccggccgtccaacaactcctttccaaatacgcttctctcttccagcctctatcaactctacccccatcgcgagccaccgaccacagcattacccttcttcctaactccaccccagtcaatgttaaaccctatcgttaccctcacttccaaaaacaagagatagaaacccaagttgccgccatgctcagacaaggccatattcagcatagctcaagtccattctcatctccggtcctactagtntaaaagcgcgatggatcgtggcgctcttgtgtggattatagggctctc

SEQ ID NO: 252284 - DNA, 456 bp, Glycine max
gctgagctcactgttgctaccccacaaactccactttatttgtctcggccatgctcttccttgcgagccctcttggattcttgttcaagggctcttgcggtagctgcattttcttctcgtaactcggcacactctttctggacggctgtagcgactaacttgaattttttcttggcaagtcttgcttttcctagttctggttttagagctcggacttcttcatcctcttccggagcttcgaagttcccctcattgataactttcaatttggagagccaatctaacccccgtgtacgaactttcaaccattcatgataaccaccgatgatgccattacggatgcccctaagttctttatcttttcttaacgggctttcccacgccttgtggtctcttatgataatcttgaaactttgcgcgccaaacttctcataatgaaaggagagaggttctctt

SEQ ID NO: 252285 - DNA, 498 bp, Glycine max
  unsure (1)..(498): unsure at all n locations
agagaagtggctcaagtaccttagagaagaattacctactgtggccttcaagtgtagtacacaacaacaaagatcaaacttaagtgattgtcttggtgctgatactctcatcaaattgttgaaaaattactcacgaagtcatgaggtagcagaactgttttggaacacaaataccccctgtaattcatgtagtttctcttctagtcttatgtgatatctgttgcttatccattaattttgttatttctgtaattgtctgtttgatattagatcattcattgaaggtcttcacatttattttgcttccttgtattgatagatcaagaagtcgatcactgtgggtttgattggcttgcccaatgttggtaagagtagtcttattaatagcttatagagggtccatgttgtcaattgtggttctactcctgngttaacaagatcaatgcangaggttcatttggacaacaatgttaagttgctggatagcctggtgttgta

SEQ ID NO: 252286 - DNA, 457 bp, Glycine max
agcttgaagggaatggaggattttgtatagtttactttagcgcagctggcaccactggagcaacatgacattgaggaatttttaaaagtcgaagaacttgattgtacaacattagccattgaagagaagttatggatgagcattgatgaacttctataggagaacctagacttctggactaaattcagtacttttttttttactgggatacaaaaatctgaaaccactataaaagatttgtcgattaaggtatcaagaattgtggaaaaatggaaattatcaaaaggcagtagtatcgcaaaatattcgttgaaataatgatgcgagaccactttataagaaccatgcagagattctaaatacgctaacaatgtggttggaaaatagtgcattgttgaaggaagaacattaatgtagattctcttccttgtgtgaaatccaataagagataactatg

SEQ ID NO: 252287 - DNA, 476 bp, Glycine max
  unsure (1)..(476): unsure at all n locations
ttaagtcacctgcngcatgcaagctttataagcactactaggccttatctctattcatgtgggattaaacacacccttttgatactgcaattaaggcgagatagaggtgactgccattaaatattaatgtgacttaccaacggatactaattgaataattcttatgaacattgactctctgttcatctgagtaaaaatggagtggaaggcaataaagtgtaggtagataggatagaagtatcaaattttgttcgtttgttgtgataagggcttgggtattatgaggtgtctatgtcccacatcaagtaatatgggatatgcttggtggagtacttaattggtttgggtcaacccccttgacaactagcttttaagggagagtttcccaagtgggtgcttattaattagtatacaaataggctgaattgaaagaccgagtcaagtatcgtagagtgtcatctgctgagacactgact

SEQ ID NO: 252288 - DNA, 441 bp, Glycine max
  unsure (1)..(441): unsure at all n locations
tatattttatcataatatctaatgtgaattctgattttctaaaactgaatattaccctaaaagtaaaataataagagacagaggaagtagaaaaaataaaaagaggaagtagtttttccgttatttacattatttgtgtatgtatttaaggctactcttttcaattattaattntctgttcccgtgctatgcaacctaccttagataaattattgtatgggaaattattgtatgggaatcggatagagactccgattgagggaacacacaaaacaataagataatataaattatagcttaattaagttnttttatatattaagtttagtctatctttaaaacattatctaacattcttttttacctagatgttttaaaaaacttacatctaattctttacttattctgtaggcatattcgtctaatgatgatgtaatacac

SEQ ID NO: 252289 - DNA, 407 bp, Glycine max
  unsure (1)..(407): unsure at all n locations
agcttgttggctgtgattgacaaaggtgtgttattactacgtctgtctccgcatgctatcatgcgctgagtcttaaagatagcaaaagaatgtttatacggataaccacttaggtatttccgcctgccccctaacttcacgagttagtctcgacagaggttgtctgcgcggaaaaccacctaaatctccgcgtgtgaacaatcttgttggccgcgattgacaaagggtgcagaagacgacgttagtttctgcatgctatcatgcgttgactgttagcgacagcaaaagaatgtttatactaataaccacttgggtatttctgccggcccctatttcacgacttanaccgacagagtttgaaacgtggaagacgacgtaatctccgaattgaacgagcttgttggcgc

SEQ ID NO: 252290 - DNA, 385 bp, Glycine max
  unsure (1)..(385): unsure at all n locations
aactacaatctcagcttgcgacacactgcagtgagcaacaaattaacctttccaaccttaggcaaccgttgtgggacaaatccttngatctctaaatacatcaaccaatatacgttccatttgcaaattccatgtagaataacctcttgcttcctcattatttttacctaaaactcttcttttagccgtcattatttcattagatgactccattgaagtcaatgtcacttattcaacctgcacataacaaatcttacatatgacctactttattcatttgactagtccactgcacaatcatagaaaatatttcaagcacagcttttatgcattagcccagtacatataagtctatattcaatagagaagtacaatagcaactaag

SEQ ID NO: 252291 - DNA, 328 bp, Glycine max
ccttttttgtttgtttacaaagacaaaggacatataatctacattccttggtatggagatgatattattattactgtgacctctaatgtgctggttcagcaactcaccaccaagcttcattctgaattttctcttaaacaattgaggaagctcgactattttcttggtataaaaaacaagattgtggctgatgggtctattctactgacttaaagcacatatatcaaagatttgcttcagaaaaccacaatggtagaagcacaatctatttctttccctattactgctaattgcaagttatccaaagctggcttggattttataatga

SEQ ID NO: 252292 - DNA, 495 bp, Glycine max
  unsure (1)..(495): unsure at all n locations
acactataaactcaagcttggntatctgcttcttcactacatcaagaatcatcgagtttgtatttttctgtggctggcctactggcttagctccatcctctanatttatttgacgcatacatgtggatgggctaatactacgaatgcccgccagggtccaacctatagccttcttatgcttcttgagaactgacaacaacttctactcttgctcatcagcaagggaggcagatataatcactggaaaactcttgctatcatccaagtaagcgtattttaaatatgatggcacaggcttcaattctggtgtggtcggctggacagcggcagaatgagatggtttctcaccctttacctcatacagaacgtcagaggtatgtgtacttcctgaaacatgggtagacctatctgactctataaaatcaatctcaagaggtaaacaccaccaccagacatgctatcatatcactctcaaagcactctcagattacttct

SEQ ID NO: 252293 - DNA, 403 bp, Glycine max
agctttgagggtgtgtaacccaccatttttttattttataacaccgggcacgtgtctactatcattgtgataatctctttctctgttcttgggggtgctacttgagttgccaagcctctccatctttgggcgtgttctttgaaagatctgtccccccttttgcacatgttctgtaggtgcatcctattcgaagacattatactgacactgcctaacgaaggccaccactaggtccttccaagaatggactcgggaaggttccaagttagtgtaccaggtaacagctacccactaagactttcttggaatgaatgtatcagtaattccttatcttttgcgcatgcccccatcttccgatatacatctttagatgggtcttggggcaagtagtcccctttgtctt

SEQ ID NO: 252294 - DNA, 518 bp, Glycine max
  unsure (1)..(518): unsure at all n locations
tattacgtgaactataatactcaagctctgaataatagtctaacataatgccttgcacgaatcccaatgctgctatttaaaaagagtcactcanagtcactgggccctattacaatactctggcccacaacgaaatatacactaaaccacataaaataaaattgcaaaatttcctaattagaaattaactaaggtaaacgctgctttatttgccttgttcaagtccacaaccaaaatccggattaagcccaatgtttcattaattcctgaaattagattaaaaacatcaaattagctaaatgagcccaaataataaaactgcctaactaattgacaattaagaccaatcagtaattaaaatggtgccaaacagggtttagacaatagaagaatatgatggcacatcaaaaccccccatacttagctctttgcactcctgngcagaatgaaacaaatagcanaatccaaggatatcanagagagacaaacgaanacattcacatatttctcaatgaaca

SEQ ID NO: 252295 - DNA, 64 bp, Glycine max
cacagagccaaaaaaaatttagccaccggccacacaccacaacagaacaacagaaccaccagag

SEQ ID NO: 252296 - DNA, 229 bp, Glycine max
tgaaccataattggagcaagagggggaaagaacaatacataatgggaataaatagcctattaaatgctacaatatgcatcctctgctcataacttactccctataattataaaaatatcaaatcacgacactaaatatataaatatagtgataaacatagcccacgttcataataaggcatgttatggggtagactaaactgccacgcaataataataatccaaaaata

SEQ ID NO: 252297 - DNA, 410 bp, Glycine max
  unsure (1)..(410): unsure at all n locations
ctgttggggttgatcggcactccatataattggctcatgcctatgatcaaagcacgaaatcccaaggccctgttggacttcttcgggtccactgggtgtccaggaggcgtgctccctgcaaactgatacatagcatttgagatcaactgggcaatatgtacactcacctaactcaggatggtgttgactagctgatactctggtagggggaggtctaagttatggtcgctagggagaatgttgctaagcaacaacgtcatccaaattcgcgtgagggtggtcatgctagtgcgcatgatccgcatccatctccctactacgctccaggaaaaattctgctccggaacgcacaacaattggctgataacctcctcattgaagcctgangctngcttctcttctgctaaact

SEQ ID NO: 252298 - DNA, 458 bp, Glycine max
  unsure (1)..(458): unsure at all n locations
gatccttaagtcacctgccgcatgcaagcttctagccaaatggactaaccttgaattattttcttgatagcccttaagagccttgtttccctttccttggtttgaagctcactacaagccttatatgaaaaaccatgatatcaccattaccttaaggaattttggagcttctgaattgtattgggaataaatgcggggggtnttttggtcattggataacttggtttgttggctattcttcctgaatattttgggccctacttgaagtccatcggttattggttaaatgttggacatgcttgaatgaaatgggagttttaaggctatattgtataaaaaaatattgtcaaaaaaagaaaagaaaaaaaaaccctttaggttgggactaaactttattggcaaaaataagaaacactgggcctacctttagtgaaatttacctcactcctttattcttt

SEQ ID NO: 252299 - DNA, 468 bp, Glycine max
  unsure (1)..(468): unsure at all n locations
gcttcacgttgctcattgactccatcatgctgctaagaaagatatatatctgtatggtgatctgctgaaaaacatagaccacatactcttgccacaggtgcacatgcagatctctgattcatggcaagctgagttactacagttgaccacaagcatcacagcttatcccctcacagctcttttattcttcaagtacgattgaaggaatgaaatctcgtcgacccacctncatcgtacctccctctataggacaattagcatcactttcttgcactgaattgtgggagttgtaaccatcttcttatcaaattggagcctcagcaggagtcatatcaccaagagctccaccacttgcaggcatcaatcatactcctctcatgtcgtagccctaaaaaaatgaaaagagtgtaaaaactgtgtgagaagttgccacaatttgaactttcagactctcaaccttcactagtg

SEQ ID NO: 252300 - DNA, 293 bp, Glycine max
  unsure (1)..(293): unsure at all n locations
ttatttctataaggacctcatatctagtctaggtctgagagaccatacnagattccaaacgaattctaaatatgtgggccatggagtctatcatatgctgacagtagccgagaagcccatgaatctctcaggtggcggagtaagtgatcgccatcccctcggccttggctaacaatcggggaagttcttgactcccgttcaaggtaagagcaaaccgacccattcacattggatgcgctcttggagtaaagagactatcacccttaccctaaccatttttccgcgaaacttgg

SEQ ID NO: 252301 - DNA, 393 bp, Glycine max
  unsure (1)..(393): unsure at all n locations
agcttgtaaaatggctagacatgatacatgtcatgtctttggtttgtttcaaaggtaataagggatgccccacattatttccatgacacaaactgcaaaatgatgatttggaaactttatgctaaactggtcatgcatgcatctatgcggacactctaatgtcaaatttatatgtgcatgtgatgctagggcccaggaatcatctcctctattttatatcaacccaatgatgccaaaatatgatcttttatccatttgtgcattcatccaaatccatttcgggcgtccgggaaaatttcacagcattcacccttcagggttacacacatttnttttcccanaaactacctatgattagcgaatttttcttcaaagaaaagttggaagtcatct

SEQ ID NO: 252302 - DNA, 415 bp, Glycine max
  unsure (1)..(415): unsure at all n locations
aactagctaagatgcgcagtattatcccttgagatgatgcgatttttggttatcagaattgccattccttggattatagggntgaaccaagctcatcaagtcaagttgaaatatggaagtaaccgtcttgcaaaattggggcaaaagatgaatcgagtcacatcattgcttcgtctactgccgaacatatttaggattattgatgtcctcgttacttccagttccaccttgacaaagatttcatggaccatgttgaaaatctaaattgattcaaccccatatcttgcgtaaaaattcgcaatacttcaactgtacatcattcgcatacatccatgcttttcattggttgcattgctcattgcattctttccttgaanaataaaataaaatacaataaaatgaacttaatcattgt

SEQ ID NO: 252303 - DNA, 262 bp, Glycine max
actcttacctcacacaagttcataacatcaatctacacttgcccaaactggatttacacctaaaattccaccctaatcaacattagattcttcaacacccaattttgccctagaaaaggctcttggaacactatggacatatgtatatctctctaacacagcctaacctctctcacatgtcctatatgaaatttcaagctagcataaactcactctaaccctcaatttacaacaaaagttcaacttaacccttccaactcta

SEQ ID NO: 252304 - DNA, 339 bp, Glycine max
catgagatacatgaacaatgctcagcaagtcgcagtggtaaacctaatcaagagaccactattttgtaattaacccacacctaatataacgagctaggggcaaaaaagggaagctatctaggctagaaccttaatacaagtcaccgttgataaacactcaccattgctggagccacataacatgatgtaatcttacaccctatatcaccctctttctatatagactcgattaaatcattagcggataaactaaactccgttgagactctcttgcttgggagtacaacgatcgcaacaatgcttgaacctaggaacttgggcggacaacctaccccactc

SEQ ID NO: 252305 - DNA, 374 bp, Glycine max
  unsure (1)..(374): unsure at all n locations
tgcagaatgactactntcttcaaaaagagaatgtatctctttatgaatccataatctctaacgcaaatgaactgagattgatgaaaattatacacccacttgcaagtgcttacttttccatgatatccaaaagtaagcttcctgaaacagatactgcaactcacccagataaagatatactgataaatcatgacaattggtgtggagctcaaacagacatggaacaacataaagcgacctatgctttatgagctntctttgacagtttgtgcaagtatgcacgttatatcaaggttgaagtgtggcgcatactaaaaaatactgatgttaataatcctgcacatgtcatatgctctctgagtcttgatacggat

SEQ ID NO: 252306 - DNA, 483 bp, Glycine max
  unsure (1)..(483): unsure at all n locations
gtcacagtagacccttgaaggaggnacaaattcccttcttggttcccttcattaccacagacttcccttgtcctctgatcttcataactccatcttcaaaccaacaagaaaaactctttgaatccatggcatcaacaaatataagatttttcttaagctgtgaacatgatgaacttcagttaaggttctaacaataccatcatgcattctgatttgtataaaacctatactgatagacttacaaggagcattgttacctacaaagacgtttccactagactttttctcatatgtaacaaaccaatgttngtgtagacatctatgataagaacaactggagtccaatacctatttatcaaaatgttgtgtatagtggtcatcaacagtcagaaccatatcgcttcccatgaggagtcattctgagaagagcaacaaccacatctntatttgtttctttgatagtctcgcttcaatgaccggtct

SEQ ID NO: 252307 - DNA, 315 bp, Glycine max
tttgtatacaagaaatgtcttctcatttccccaactatgcctaccaaatgataaatgtaatatgtcaaaccaaactaccaaaggtatcccaacatgaaaattaacaaatatggcatccatttgaagacagacacacactaatagattgaaacacaagtcaacctgttttgaattcacttctagggcctctttgggcttgtcacctctcactttcaactgcaactacagccaagccccttgtctgactctctgcgatattattcaaagaataaatataatatttaaaattatgacactaagataatttattatatt

SEQ ID NO: 252308 - DNA, 412 bp, Glycine max
  unsure (1)..(412): unsure at all n locations
acactataatactcaagcttaagctcggcctgagttgaacacctaagacatgagcttggttattatggccttngnttaaggctcggctcgacttatataaaagtttggcttggtctacgagcctatttaaaagtctgcttaaagacgtctttgattaattaattattttaaaacctagtgaaatactaactaataaaagaaacttataaaatttcctataactaatgtacaaatccaaaaataattgatgaacaaaatcatatcgaatttaagtcgtttaagcacacagtatataaaaaaaaaagagtataatattaaaaaatgtatggaatagagctaatcttgagaaaatgaatattattctacgtgaacagtgtgcatgaacagtaatacaaactggaattctaatatc

SEQ ID NO: 252309 - DNA, 395 bp, Glycine max
acctgcggcatgcaagcttcgtacacaaagatcttgtgtgttttttgtatgcctatgcaaaaaaccacagtttcttggtgttccaagaacacacacacacacattataagaggcattccaaaagggttttagtatcctcagatatgccaaaacttgccaaaagttatatggttaaaacaaataaacaaatcacataatgggaatgctatggctatagaaagacaaagaaacaattgagggtggtattcctttttcattcttttatatgaaaaaaataaattataatataaaaataaaataaatgaaacagaatctacagagaataaaggtttgataggcaacaactcaaacattccttccacataacaaggtggagtgaaactaactaagatacc

SEQ ID NO: 252310 - DNA, 383 bp, Glycine max
ttttttttagaaaaccatccgtagagagttgaaaaaccaattcatcttttcgcacccagaatacaatatgaaaagaaatatgtactatttcaaaaaaatattttaaaagaaaaaggcaaaaatggactatcgaaagggtacaaagaaagtgcaggggttcaaaacattcccaccaggggatgcctctggggaaagacagacactatttggttggatgccccaatcactctctacataattggtcactcaccaggtcccttcaaatcactccacccaccaataaaaggtaattgctgctaatgaccgaaacaacctccacccaacctcccccaccaaaacaaacttgctggatgctttaatgcccaaatccaaccttatcactt

SEQ ID NO: 252311 - DNA, 243 bp, Glycine max
tggactcttcacactgttctcttctcacatattatcaacagccgcatcccaagtgtcatcctcatttccactggctcctcctttatcttacgcgaagctccagaaattaactcagaaagggccttgtcttcttcaccacgctttagctaaccagccaaataggccttcacagacacctcattctttgtctcagctccaacaccacacaggctaactccagtgactttgtacttcacatgacta

SEQ ID NO: 252312 - DNA, 466 bp, Glycine max
  unsure (1)..(466): unsure at all n locations
actagcttcaaaaaggccaactccctctaaatctgatttcaggcttaaataggtggctatgtntgtgctcgcgcgcttagcacaattctgaaccgcttagcgcgcattagtgaatttcggcttagtgtggacttttctcactcagcaaatggactgaagcggtgcgcttatcgggatggctcttcgctcagcgaacatgcacagatcatgcttcttccagattcttcctcgcgctcagccgaggagtgttgcactcagaggatggctcgctaagccgacaggttggcttagcgagagggtgaaaatcagcactatacaaactcgcctaattaacctgaaattgagagaaaataattattaaacatacaaaatggaagtactaagtatatattacctatctttgcccacaagtaattacaacactacaaaatgaccataaattggaggagtaagaacaagttacatg

SEQ ID NO: 252313 - DNA, 373 bp, Glycine max
  unsure (1)..(373): unsure at all n locations
agcctgagatgaggaagtgttgaagggtgtttctttctgcttatattgncgaccacagagaggtaccttggagatatgtcgcgggggtcaagagaccttggggacgccaggtggggtgctattgcccaataccaagctagaccaatcccgacccaacccgggcatagtcggtcattgaaaacctgtgatgtacctaatcaggcgagctcctggcagtcaacatataataggagaacaagaccactaagcaaggaggcttgtggtggctggccagctgtgaattttgtgtaatatgtggatggcggcccttggtaatcgattacaaggcctataattgaggacaggaggctaagatggtctcaggtatctatac

SEQ ID NO: 252314 - DNA, 437 bp, Glycine max
  unsure (1)..(437): unsure at all n locations
agctntcgcctgatatatgtataattatttctcttcatttctctcttcggggactcanaattctggaattcatagaactatttttaatgcatgtcagggacgtaccttatcaactatctagcgaccagaggacccgagttacagccattngtcgctgcttctttgatccaacttttgtgtcgagtcacaaagttcggatggtttgatgatgatcgattccgggacctggttaaagaatccatgaacttcttgagtcaggtgattaaaagtgattgtttaatttgtatgcaatgcggtattttacatccaaggatgatttgccggacccgaataaaacataggcttaagtgtggttggtggcattacgttacagccatttcctatgtatgctgtgcaagagaaagaaaatatagcacgcctacatactctggaatata

SEQ ID NO: 252315 - DNA, 467 bp, Glycine max
  unsure (1)..(467): unsure at all n locations
ctccacaactgacttagagaataaattttgtaggactgtttatataaagacccaattgaagacaaacataagtntaagaacccaattaaaaaaattcagatacttaattaaaataattggtccctccaaattaaatattcttagtccctcaatctcaaaaaaataatttgttagtctcttctgacttattttttgcaatttggatgaacacttgcggtgatttttaaccataggagggattataaaacacattttccaaatttgatgagttaaaataatgtaaactttattttgagaaataaaaatacaatgtccccaaatctaagagataaaaaatatttaaatttaataaaaaataatcaaatagtctcaaaatctgcaaaataatttaacctcaaataaagacatcattatcttatccctttntgtgtttcacttcgtgttctttgggtctttctttcattatc

SEQ ID NO: 252316 - DNA, 408 bp, Glycine max
ggaccttaagcgactgcagctcagctaaagaatgaacaatactttgtctaaagtctccgaatgatcggtacactattccccaattcctgaaaaagatagacccaggacattcaacataccttgattatagggaatagtaagtttgacaacgccatgctagatataggagcttctgtcagcgttatgcctctatctattataaatctctatctctaggtcccttgcaggcaactgaagtggtaattcattaatctaatagaagtgttgcctatcctgttggttacatagaaaatggcttaaataaagctggagaactgatattccctgtggatatttatattctgaaaatggaagatggattttctcaaggatcagtacccatcattctaggcagaccctctatgaaaa

SEQ ID NO: 252317 - DNA, 339 bp, Glycine max
  unsure (1)..(339): unsure at all n locations
agcttttctcctactcgctacagttattgttctgtccagtaccttgaaagtctcatcacgcttatttatatgctctttgcgggtgagggctttagggaggctctttaccctattgtcctattggacacagtatgtggggatcataaccttgggcccctgataaaggcaagggaactgaacatatgcagctnttactgtgattattggcttattcattaaaactaaacctcaaaggngaaagttatactgccctgtgacaattcacgagagaaccagttgaacatgcgttctggaggactgggtatgcttttttattaccgggtattatgcacacaattg

SEQ ID NO: 252318 - DNA, 412 bp, Glycine max
tatgacaccacacacacgctgcattgatttatatctctatttctatggtcactcgtgagacacccataacactcacctcataaagaaaagaatacgatgtcaccaacatcatcatggaacgtgtcttgcccgtattatgccttatcactcttacattcacaatccagggatgaccatcatctggtcaagcaaatacatggaactgaataacaagacaataatgtatgagaagacgataaccgtacatacctaccttcttatgtggaatcacagaattgacagagatgagacaagagaacaagacttatacggcgtacaaaattgcctctagataccaaggagtttttagcaagataagaacagatagcaagtggaattccattccatatacgattaaaaaccatttgtattt

SEQ ID NO: 252319 - DNA, 394 bp, Glycine max
  unsure (1)..(394): unsure at all n locations
tataagtcgaccgcagcatgcaagcnttaacagaagaacaaaggttcatttatttcaaaatggcgaaccaattacaagatattggcaatcaattaccaacgtgtctgaacccggaaattcaaattcaattgtgaagagacacactctctcagaaaactgctctgtgtaatccattacaacgattcggtaatcgattaccagtgacaagcttcgaacaaaaaacaaaagatgaaactcttccaacggtgttcagattattctaaaggggataactcctttaaaggattccttgaccagagttgaagagtctatataagcacgaccatgatttgcatgtaaaaaaataaaaaccctacaacacttaccacctttacagacacattttcacataatc

SEQ ID NO: 252320 - DNA, 405 bp, Glycine max
gacgcagcagccacccaaagataccattactaattatattatattattccaatgcggactgctatgacatgacacccacaaccctgtctttcctcggcacagaccctacccaatactcgtgacacgacgccagaaacctggtttaaagcaaaccagattattagtaccatccccgcctttgcataagaaaaaaagggcgcaaaggggtgccccaaccattcaccggacgctcaaaaaaaccactagcccacatgtttaccctagtcacaaaagaaggggaatataatataaccaagggagtaaggtggctccaaccaaaacaagccggacccccaacaacacagagcatgccgtgacaaaagcccacgcctcaaaccatactcaaatagggcggggcacaataat

SEQ ID NO: 252321 - DNA, 338 bp, Glycine max
gctgaagaaatttcatggcccacgcgaacgagatgctagcctgggcgagtttatgtctagaaaattctaagatatgaccattttacccctttccttatggctatttgtttttggatctgacaatcaactaccaaaccctgagtgaccctttggacttgtgctgcaactggtgccaaacacctaaattcaattagcaatgatcaaaacatcatatctgaatgataaaagtattatacccagatgaaattagggtctgacaatgccaaatcaaacaacatttatacatctcttgcctttctcttctttcttaaaggtgtcagggtacaagtcacacaaac

SEQ ID NO: 252322 - DNA, 381 bp, Glycine max
  unsure (1)..(381): unsure at all n locations
cccagctggccttgaatcagaaatttgtacctgttgcaagggtttgtggtttgtgctcctctgctgaccaccatacagacctttgcccttccatgcagcaacctggagcaattgagcagcctgaagcttatttctgtgcatgtgaaacttcactctactccagaagaaggtgatgacaaaaatttacctaacaatttctgtgcaggtgaatcttcttccacaggtaattctgatttgcagaagcagcacattccccctcttccattccctccaagagcagtttccaacaaaanaatggaagaggcagagaaagagatcttggaaacctttagaaaagtagaggtaaacatacctctgttggatgcaataaagcacactaca

SEQ ID NO: 252323 - DNA, 435 bp, Glycine max
  unsure (1)..(435): unsure at all n locations
acactatacaactcaagcttgttcttgattntttctaagatctttaacaagtctttaacaatatacttgtccttcattcaacagtctatgggtttggcggccatgctcaacacagtactttcgacacctactgtacattgatttgatcaatgctgttatgggaatgttgcgacaattcttcaaaaccttattgatacattctaagaggttgcgtgtcatgtgaccatattgacgcccttctctatcataagtcatcggccatttttccttcgaaatgcgatcaatccatgttgctatggctggactcagctgacgaaatttgtctaaattttgataaaaaaaatgtgcttgcaacgagtgtaggttgcataaaactagttatcaataacaattttaagtatatataatacttaaatacacatgaccatcagatat

SEQ ID NO: 252324 - DNA, 415 bp, Glycine max
  unsure (1)..(415): unsure at all n locations
agccttatgatatctaacttatattttatagtttcagactagcaaaatgactactgccactgaacaagttacttcatgtttagaattttgcattttatataatcaacatatgaaagattggtaaaatattgtaatttcctgacattaaccccacttgtgggttgaagcaccctcgactaagatatggttgccctatgaattaggctaccttatatntagtgatattacaattaataaatggcagaaaacaagcagctaactgtatatcaccatgctctaacatatattgaagctaccttattatcgctaccttatatcctatgcataactctatatcaccatgctctaacatatatcgatgctttaacatttattttatgcttttactcaagcagaaactcccattttacgggat

SEQ ID NO: 252325 - DNA, 192 bp, Glycine max
acaagttggcttcttcctcactatcctcatataacgatgaattgtccaagccctcccaagcgctcatgaggcttctcttattgaacttgaaaaaattcttactcttaacctttgactatccgaagacaaaacatattgacttgaaggggcctggactcttgactaataacaaagaataaacatttctacctt

SEQ ID NO: 252326 - DNA, 457 bp, Glycine max
  unsure (1)..(457): unsure at all n locations
agcttaggttaaaaactcatccaaactcttttgtttatcaagcatcaaagcaagtttgatacacaatattaaaatagtcttcgtccttacaaagatctttttaactaattgaaattctttaaaaaatttgattaattcagttaatgacatcttgtattgttcttcacacttatacttttaaattaatcatctctttatccacttagctgattaacgattaactaagaaataagtggcttaatgaagctactaagttaagcttctggattattctaattcaaagacgttgatttcgtaaaggataaacatcattgtatactaccatacatgggatccataattgggacttacaactccaacgactctcaattcacttatcacattaaaataatgcctanagcaaaaatgatctctgatccaagtcggatgatgaaaaacagaattgttagaatgagtt

SEQ ID NO: 252327 - DNA, 386 bp, Glycine max
  unsure (1)..(386): unsure at all n locations
aactcgctcgagttaagctagcctaatgagggagcatggtntagtactttatgctacagcatagaacaaangagcatgattgattagagaaatattcttatatgcatcagcttgcttggtagaaagacccaacacttgtacctactgctgtcaagcttacttacttgcgtttttactgcttttagcctagacctagcttaattctattctagaccatcaattatcaatattttgttccccatgccttatttctgaatttaatcctgactaatactagctccctgagttcgatactcggattcatgcattttaattttaaatacttgatgatccgatgcgctttccggcgaatcggatttcccttatacatatttgtataaagaaaa

SEQ ID NO: 252328 - DNA, 341 bp, Glycine max
  unsure (1)..(341): unsure at all n locations
aagcctaggcctcatttcgcatttgtttgggcgcttccatagcacataatacgttaagggcatgcattccatgggctcgcacaccgtntgctagatgcgagacacgaattattacggcacgagcatgacttcctgaaagtgggcatcgcacctgtaaaaaggtggagaggaaaaatgtttctagctacaacctgactaaagccattatacttaataaaatacctcacttatggaactaatcacataatacaccatagaatagcttttgcatgcgtgcatcaaaactcgaccatactgttcgtatccccaccaacttaatgtacacagtaaaaaccttctct

SEQ ID NO: 252329 - DNA, 363 bp, Glycine max
  unsure (1)..(363): unsure at all n locations
ccgctccacccagtgaaactttattttattgcgcccatanaacgacaacgcctctagcgaagtcatcacagatattgcgcctgtaatgcaaagcgtgaagcatggttacgaatgaacatctaaacaattctatttgcaacttagttggcctctacaccacatcagcattacacccagaataagaaactccgggtctctaagatagtgaattctttagtgcagaacagcattcataatccaatacaagacagaaataatgattcctatatgttccatcaaccaacctgaatctcaaaaaagtagtcaagggatctatccgaactgtaaccatctttgttagcctggatggaacttaaaatcaag

SEQ ID NO: 252330 - DNA, 360 bp, Glycine max
catatgacactagtgcgacttctattgataatattatcacctatgcgagcgcaaacacaccaatacaagatacttccgacacgttcaaattgtcgaaaattctctcacaacagatagaataaagaattagtgaggtgttcaaacttactatattctcagtcacttctgatatgtctcgatatatacatacgttaacagatttacagagagaggcggatcatcccattatttgcattattgcgtgatttaataattttgataagctatacatactctatgactatgatcgtatcattaccaccctgatccagagtcaactaatgcaatcattgacattatatcaaataaaccacttggcga

SEQ ID NO: 252331 - DNA, 361 bp, Glycine max
ccttcgaagcaatatccatatgcaatcccttcgctatctctcccttcatggctgcgtaaaactaaaagatttctctgtgatctcaaagaatctggttaagttgaatttataactaactagtatcaacaattgccttatctattggatctcaaagcatgcttaagatgctacgtctagcatacacttatattgagaccttgccaacaagcatcaagcatcttacaaggctgcgacatctataacttcgatattgcgcggggcttcggactctaccagagcttcccccatcacttgatacactatatgcccgccaatgcgctgcattggagactagaatgttcccttctattcctcaacaaag

SEQ ID NO: 252332 - DNA, 459 bp, Glycine max
  unsure (1)..(459): unsure at all n locations
acactatacaannactancttatcatatataaattcttatattacaataatctgttaatatatttgtaattcttcttttaaaatatatatttatatatatgtctttatgtctgtgcatgcatatgtgcatgagagtgtatgttcgtaagtgcgtgtatatatatatatgttaaaaaattaaaatacaaaaaattaaattaaaaactaacaaatttgaaacatattttaaaacatatatttatactgaaaataaatacattaaatctttatatactaaaattatataagaacaacttaacttatatataattaaaattatttaagtaattgtaaagtataggtacgcataaatttggattattatttatccatgtctctgtaataagcaaatagaataaaaaataatgtattttatcggcagatgcatgtacccattgaagttagtcgttgactttatga

SEQ ID NO: 252333 - DNA, 419 bp, Glycine max
cacctgcggcatgcaagcttagggtgagttctgcttaccattcatatactgtcggtcaaaccgagcgcaccatccaatccttagaggacctcttgagagcctgtgtgttagagcagaggggtagttgggatattttcttacccttgatagagtttacatacaacaatagttttcactccagtataggtatggcgccttacgaggcattgtatggtagaagatgtacgacacctctatgttgggtagattacagtgagagcattgccttaggacctgaggtagttcagcagaccacagaaaaggtcatgttaattcaagataggatgagagcagcccaaagtaggcataagagctactatgataaaagaagaaaggatctttgatttgctgtatgtgatcatgtatttctgagagtcact

SEQ ID NO: 252334 - DNA, 474 bp, Glycine max
  unsure (1)..(474): unsure at all n locations
tataagaaccaaaatgcctcaatcatttccacatatgcatgttatttaggacgcatcaacaagaatcaagccaaggctattgtgctagcaatcaatggggctaaacacaccaaatgattatgatgatggatggctcaaattctcacaaaggtaaaatcatcactttcaaattgagctttccaaactatcatgacatgtagagaagaatcaaggatttcaagtcacaaaatgtcaagaacttttattttcaaaacaattacccatttcttgaacatatcctataattcaaagaagaacatgcaaagtcgtacgtgcacacaaaattgacccacaatattaaactaanaatccgacgaaactaacaacattaacatattaacacaactaacatattatcaaaaccaacaaaactagcagaaccaaagaacactcctccccatacttagacaacacattgttnctcatgtagcacaa

SEQ ID NO: 252335 - DNA, 454 bp, Glycine max
agctttcccattcatggatcgtattattttaatttgaggcaaccacaaagaaatgcttgcattgatcaattctttaaagttgactcaaagtcaagcaatgccgtaaattgggggatgaagtaaagctggggagtgaccattgttgactcattggtaagtgtaccaaatcgttacaagtagtaaagttctcggaagtccgagtgtctaatccacatggacttttgttgtacttagattaatgcaaaccctttttataagcatgagattagaaatttataatttaacataaaagataatgatatttgatacgataagatgaacgacttaactattataataaaagaagaagattaagttcacgaatgataatgttgggaactgacttgctaacctgcctaggatggatgagtttatgatatttcttacacattatgtgatttatcgcaccacatta

SEQ ID NO: 252336 - DNA, 352 bp, Glycine max
cacattcgttctcttctctaattaatgttatgtatgacagaaataatccacttagctgagagatgagccctaactaaatgctgctgaaggcactcatatggacatggaggtcactattgtctataaagaataccctaagcaacctgtagaccatggtttatagcaaacttgacttactatgtaccaatctgaccacggattgtcttgaaacacctgagcattatgcgatttccataaggactatgcaggcatctcgaacaaaagaccatgtatcccaattgcattgttcttgatccacatagagagcgacatcatgctgaagatgcattattatcatgatccatgctgacgt

SEQ ID NO: 252337 - DNA, 375 bp, Glycine max
  unsure (1)..(375): unsure at all n locations
aaaggcggtgggagggacaacaatagtttatagttcttccccaccctgtacctcccctttatatgacccttcttgaccccttttatgctcaagatacacactcaaaaaaattatttcgntgtcgttagttgggggtgaaaacctaaatcctaacggtttctacattttctaccttcaatcaaacatattattctgctggtgggcaaaggcttcaaacaggtaatataactttaattttgataatattgctactccacaataatttatttaatacgaacaaattatatttaatttttactatacgacaaagtttcttttaagttaataagcagatacatttgacgcacactataagtgtttaatttttatactcat

SEQ ID NO: 252338 - DNA, 467 bp, Glycine max
ggtatgctaccagcttcagcaatggcgacatatgatggaattcttcatactctaagcattaaatgtcaacaaatgaaaactaaatagaatacaacatccatagtccaaccttgtgctcttgtgcaacagagagattccataatccttcagcagcctcttcagccactagcatgttcattgaccgtgcctacccagcaagaatctcaatcccaccctcttctgcaacagctttggccacattggcattgacggacaaaattagaatggcctacgcaaattagaaaagtgggaggacaaatacacattgattgcgtcagattattcttaactcggatttctagaggaatatgcatgtaacaggcatcaaatattaagagtacctccacaaaatgcagatatcacattttctgagcaaagtacaagtaaaagtgactagaaatgatcaggttgcccaaatatatacacaa

SEQ ID NO: 252339 - DNA, 275 bp, Glycine max
cccattttatttttacttctggagaaaagaaattgtggctctcacctctatccatccacaccaccaaatccacattctggatcttaccttcaaccttcatggtgtgagacttacccatgcttgccaatacccccatcaacttacattccacctccacttcttcttaatgttcacgcgtgaattcttcatacttagaaataacacctacctctccaagggttcatcttctcctatgattagaacccttacaactcgatctggacatttatgcaacg

SEQ ID NO: 252340 - DNA, 430 bp, Glycine max
aacttcttagttacagatgatgtttatgagtttgtggctacctcatgcactcctctaatgactatagcatcatttctggcgctaaactactagggttggaagccatctttttaattaaatttctggcttcagtaggggtcatgtctccaagggctccaccactggcagcatctatcatacttctctccatgttattgagtctttcataaaatattggagaagaagctactcccaaatctgatggtgagggcaactggcacatagttttttaaatccctcccagaattcatataggctctcctcactgagtggtctaatacctgaaatatactctctgatggccgcggacctggaagcatgatatttcttttaagaatactctcttgaggtcatcccaactcgtgatggacctctgaacaaggtaatataa

SEQ ID NO: 252341 - DNA, 467 bp, Glycine max
  unsure (1)..(467): unsure at all n locations
cctgcggcatgcaagctcgtcatgacctggatgtgggaaaagtctttttattgtatttnatacataaatatccacatgggcattaaatgtaatatttgcgtcccataattagtaagaagttttaacacggcccaacatgtacgtggggtaacattccacgtaggagttaggacaaggatgctatgctcgatcgtagattattttcctttaccggtattaccggtaagataagattttcaacaaatgtaaaacgacatgttatacgtcaacatctccatcacattcaacttccacagtctagaggccttctaatgttaatgttaaataatataaaatatttccacaccaaaacaaatattaatgttctctcttttaattcatgatcattggtgtatgttacatgcttacccatattctctccacgtntattaaagtgaccgttcaaaatataatatgttcatggataa

SEQ ID NO: 252342 - DNA, 395 bp, Glycine max
  unsure (1)..(395): unsure at all n locations
cctgctgcatgcaagctatctcggggccattgactgcgaaggttatttttcttaaagttagntttaccaagaaatgctactcttaaaacaaaaatggcacacaacctcctccaataaacacaaacatcaatgtaaatttagagcaaactcatggacatacttccttatgaacatacactcgcacaagatattcttctacctaaaaaaatgcacccatgcgcaatcaaggcacctttgatacctagacttatttatgtgtacttccaaggtgagtttgctacctacatcacatgcactatcttggctaaattacatacatgcatactcaaagcatcttggctaccaaaaattgacacgtgcacattctgtattttaataccttgcatatacaaact

SEQ ID NO: 252343 - DNA, 449 bp, Glycine max
  unsure (1)..(449): unsure at all n locations
agcttgccgacgcatggaagctcctaatatctcccacacattgtgttgtgggccattcttggatggcctcgatattctcacggtccacttggaccccatttttaccaactacaaatcctaagaaaactatattatctacaataaaagtacacttctctatatcngcatacagggcgtttttcctaacgactgaaagaacttgcctgagatgttctaagtgatcatctaggctcctactgttcactaaaatatcatcaaaataaacaactacaaatctactctatgatactccttaagacatgatgcataagcctcataaaggtgcttggtgcattagtgagcccaaaaggcatcactagccattcatacaaaccatacttggtcttgaaagcggtatttcactcactacccttattcatcctgatttggngatacccacttttaagatc

SEQ ID NO: 252344 - DNA, 349 bp, Glycine max
tcctggtatggacataattcacctctactctacttgagattggtatgactcaatgtgaagctgatcactcattatttttccttcattctaaggctagactatgcctctatctcattgtatatggtgataacatcgtcatcactggcgatgagtccgcatgtatcctacccctcaaatctaaccttcatagtcacttttagactaaggacttgggccccctcaagtacttccttggcatcaaagttgctcaatcctcatctggaaatgttatttcctaacaagattattcctgagtcatactgccatggatcctaatatgaagcttcttctcaaggagggggagccattc

SEQ ID NO: 252345 - DNA, 415 bp, Glycine max
  unsure (1)..(415): unsure at all n locations
cacctgagctgcaagcttctcactcgctaagtgagatctgtatattataaatacgttcttcagcgtgaaaaacacgnatttcctcttctcctcctctccaaacaccacccaaaccctaacaccttcttctccaccacccacgactattggtggccaccacgagccgtcgttgcttgccgctgaaaccccacaccaagaggaactttttaatcggagcagaatcctcataacctacctcaaggattcgatagagaaaactccctcaatccttccttttgtagcttctctgaggtaatcttgacttataagcctttctcttagataatttgagtttctcttagtgtctcttgtgttgtgggtactttaataggggggttttacacttccttcgaaaaccctcgtaaatgagacattg

SEQ ID NO: 252346 - DNA, 441 bp, Glycine max
ttctgatggaagtggtcctatatgcaaggaataatttctccaagaacaccctcttaaggtcatcccagctgaaaatggacctgcgagcaaggtagtataaccaatcttttgccactccctctagagaatgaggaaaagcctttagaaagatatgatcttcctggacatcagggggcttcatggtggaacaaacaatatggaactccttaagatgcttatgaggatcttcacctgcaagaccatgaaactcgtgcaacaaatgtattagtccagtcttaagaacatatggaacaccctcatcaggatattgaatgcacaagctttcataagtgaaattaggtgcatccatctctcttagagtcttctacgaggtggaggttgagccatgttctcagtatgaaaattaatagccgaatgctcacaatcagaatattcataatc

SEQ ID NO: 252347 - DNA, 146 bp, Glycine max
gagatggaagatcttggggaagcctcttttgtattatgaatcacaatactaatagatccgctctcaggtattcaaagttgtccaaaagagttatttcgataagggcctaaatagattcatcctgaaatattattaactaaaaaata

SEQ ID NO: 252348 - DNA, 309 bp, Glycine max
cctgcggcatgcaagcttgtcgctggagctgacccatctactgttttatctcctttagactggtggtccctaagctcttgaccttgacttgatagaacctccttttaagcgaaggtgtttgacttgatcccatgttttactaaagtgaaacataatcggtgcgaatcaaaactctgacatctatcatgggtggaatggatgaatgcatgaaaaaatgcatatgatacaaatgcaatttatgaatacgggagcccgggaaattatctgcttcttagatacaacgtcttggggtagcaaagtgcccaacgt

SEQ ID NO: 252349 - DNA, 109 bp, Glycine max
tttctttttatgagcgattgtgctatatacatgcatactcaaggcatcttgctacctaaacgtacatatatatgtcttgtaaggcatctctgctatatacatgcatatc

SEQ ID NO: 252350 - DNA, 373 bp, Glycine max
aatagtaagtgtcatgaatctctgacataagcttgaaccaattaacattgtttgaatgacaactgttgtagttggacaacaatcacatagtttgtccacaatggtatgctttatgttcctattggttataaatttggcatgcttttgttccctattggtatagctttggtgctacaatgttcaacttggagtccacaagaggaggatctccatatggcgctggagtttttgctggagatggtacaagacaagcaagtgaaatggagctggagcttgcagagtatcatggcgtgtttatatgaaattagcccattaaagctagattgaattatgtgattaataatccattaaaccctcctagttacgtccacat

SEQ ID NO: 252351 - DNA, 404 bp, Glycine max
tcaatcaatagacctccaatctttaatggagagggtaccactactggaaaacccgaatgcaaatttttattgaggcaatagacttaaatattcgggaagccatagaaatagggccttatatccccaccacagtagaaagaattacaatagatggaagcacatcaagtgaaagcataacaattgaaaaacctacagatatatggtctgaagaggatagaagacgagtacaatacaatttaaaagccaaaaacataataacatctgccctgggaatggatgaatatttcagggttgcaaattgaataaggctaaggaaatgtgggacactctacaattaacacatgaatgaactacagatgttaaaagatcgaggataatcacattaacacatgaatatgaactat

SEQ ID NO: 252352 - DNA, 350 bp, Glycine max
  unsure (1)..(350): unsure at all n locations
tagcttgtatacaacactgcggctgtttcattctatgttgaccttntccaacctccatcgcccttgtggcccaaaatcctttgatctctcagtacatcagccaatacaagttcatgtccaaatttcatggaaaataacttcttgtttcctcgttatatttctctaaaacctttctctcgctcgccaatttattattagaagactccattgaagttaatgtcacttattcctgcacataacagatattatatacaacctactctattcatttgattagtccactgcacaatcatagaagatatttcaagcaaagttcttatgcaatagccaagtacataaaaagtctatct

SEQ ID NO: 252353 - DNA, 251 bp, Glycine max
tatgttaagcagaaatatgagtaaagactaagccatgtacacagcggattcttggttatatagacaagtacgtattgtatacacataattagaagagattcagtttctctatatcagatatcaaaacctatcacatcattatacagtagagtcctgattctcaacactcccctctatctagagctttggtaaagaaaattcattccaaactaataaataagaacataaaattgagcttcacccaaaaacaa

SEQ ID NO: 252354 - DNA, 361 bp, Glycine max
  unsure (1)..(361): unsure at all n locations
cataaacgatcatttgcagtaaaaaatagtgaccatgagcatataattgatcatgcccaagttaaagcataatccaatatgcgcctttacacggttcatgccacgagactcatgaggcttaagcaaggaattgatttggaatgtaaaaaatctcaataaaatattgcgcattttcggtgcatttacctcattnttaagtaaaagagaatgcgttgggtccatgtaaatatgatcactttcatcttcaatgcaggtcaactaacaaacatgtgatttacccttttcactcacttttactttgacctctccactttcacctcacacgaacaaagacctaagagtgtgatgaaaaatatatata

SEQ ID NO: 252355 - DNA, 360 bp, Glycine max
  unsure (1)..(360): unsure at all n locations
tcagtaatcagtataggctaaaagagaagagctctcaagtcatgtgggagtggctaacagtgccgaaacttcatagtggttaacaacttcctggctcagcaagcgcatagcagctccctgagagaatttcctagcaaacaaaaagcaaggaacggatgtggaattcgtatgacaccattctatccggtactcagtctcgtaataaacaatggtgatgccctgttaaaaaaaaagtgaaaaagccacgagacagaactacgtgcattaaaacatgtaattatcactttaacaaaactctcaaaaaaaagataaagagnaaaacttatgcggaaacataagcagacaaaatctatcttcaac

SEQ ID NO: 252356 - DNA, 383 bp, Glycine max
agcataccaagcccgcatgtgaaaagaagtacatcttatcactggtactttctcctattacctcacttaaaaaattaagaggctagataatggtctcgaaaaagttcgagatacagaccaatgacaacatacaaaaccttttacgttgaagagaatcacatattgctatagcccacatttgactcgaggataaatatataattgtatacttctctgaaaccagaacttatatgtctcctagttcccatttattctctatctattatattcgctccttcctgatttcaaattcttgcttgattcttgaacactgagccgaataagaagaccttgaagactgatgtgacgcgaattgaaatgcatcaccatgccatgataaagac

SEQ ID NO: 252357 - DNA, 459 bp, Glycine max
catgcaactaccttggcaaacctctcctttaattttttatgcatctctcaagatgaacttccccagcagcagcaagaacatgctctccccttccagacacggtgacctcaacaaacggatctgctcgattcaaaagcctcaagcctttgagcaatgcacccacatcagcaggatcagacggctcaattgcaactctcaaagttggagcaacttggaatgccatactcaaaaaaggccaacagttcttagtagaagaaagagtaacactcttcaatatatgctgcccaaggcctgcaatggcaacaatattccctgccctggcagatgtcactactttcaaccctcgccccatcatcaaatacagggatttcaactcagcctcctgtatatgcttcagcatcgactcccctttcaccggatcatacaatgcagaaagcacaaaaattctttgctcagcat

SEQ ID NO: 252358 - DNA, 466 bp, Glycine max
  unsure (1)..(466): unsure at all n locations
ctcaagctnacttactggcacttagccctgcctgcacgagtgtgaactaatatgaattttacatcnaatgtggatgcttgtaatatagggtgaacaaaaatcgatttcgttaaagaatccaaatcaaattggttttagaaaatcggctcagaactggttctgaagcgaattgtatttagaaaatcggttctgaactgaaagttggcttataaccgaactggttttagaaaattggttttgaatactctttaaattggtttagaacttttcaaataaaatttgatttatgtgaaaatcagttcgattaatcaaaccgattttataaaaaaaataattcagttaatcaagctggttttgtataaaaagtacagatttttttttcaaatcagttcaggtaaaaaccggtttggtttatggttgaaccagcgttctttttcttttttttgcataccccgtaactctgtta

SEQ ID NO: 252359 - DNA, 425 bp, Glycine max
agcttaaaatgatactccctcaactaacttatgtatatactctataggcagcttaattatatatgcaacctaattaattgtaagagacaacttatgggttagtatagctttaatgtacacgctaaaggagggacctcgatgattatttttggtaaagatagaaaaatgtacttaatctgggacctttcctaatttctgatatatttaaagtatagtaggaggacatgtatggatatgtgcgcttttttctgaacagataactttttaaggagtccaacgtttggggccacattgaaaatgcttttctttgcttgttttgggggacttacaaatcaaaaaaagtttgcagttttatatatgtgggccatatgccattattgcactatgtaatgaaaatcattggccatagttagcagatggtatac

SEQ ID NO: 252360 - DNA, 390 bp, Glycine max
tggactctacatttgttgccaagtccatggtcttgcaagatgaacatcctcataagcatcttaatgcgttccatattgtcttgatccaccatgaagccccttgatgtccaagaatatcatatctttctaaaggcttgttctcattctctagagggagtggcaaaagattggctctactaccttgctcccaggtccatttctagcatggatgaccttaagagggtgatcttggagaaattcttccctgcatctatgaccactgccattagaacagacactttatgcatcacgaaacttattggataaagcttgtctgagtattgggaaagattaagaaattgtgtgcaagctatcctcaccaccatatttctgagcaactccttcttcata

SEQ ID NO: 252361 - DNA, 469 bp, Glycine max
  unsure (1)..(469): unsure at all n locations
gatctctgagtcacctgcggcatgcaagcttgtagaatggctagacatgatacatgtcatggtttggtttggttcaaggataaaaagggatgccccacattatttccatgacacaaatgcaaaaatgacgatttggaaattttatgcaaaactggttatgcatgcacctatgcggacactcaagtgtcaaatttttatggtcatgtgatgctagggctcaggattcattttctctattttagtcaacccaacgtttccaaaatatgttcttttatcaatttgtgcattcatccgagtccattttgggcgtctgggaaaatcttcacagcattcacccttcaggtgtatacacattttttcaaaaactagttatgatcagtgaatttttccaaagaaaagttggaagtcatctcttttcaaaagcatgttggttnttcagcttgacaacttatattttcttttttctcct

SEQ ID NO: 252362 - DNA, 464 bp, Glycine max
  unsure (1)..(464): unsure at all n locations
tttatgtgaagctgtccaatagtttcctacccanaatatcttaactctaatgtagatataacatgtataaactgaattatactagcaaaggaatggtaagagatgttaaagttatatttatcaattatcaagactaagtacattatctcaaatcacaccttcttgcttattcttatagggaaatgatcattttatggcaacataagtaattgaagccgtaaaggatacacctctactgccaattcagtctgggaaagacctgaactaaataactttccttgccaatgtaggtcaccgccatacctagtcaaggggaacaaagttaggcaactcattaaagcctagttaaagggttagtcatctaagtttgtgtaatatatcattaatataatatatcacttattacattttagatgaactatatatgaccagtgtgacaagtaaacaatctcaccatctaaata

SEQ ID NO: 252363 - DNA, 380 bp, Glycine max
  unsure (1)..(380): unsure at all n locations
agcttattgcagcaaataacatgtgcgatatactttttctgtatatcctcctgagtggtgaatntgatatgaaagatctaggggctgccaagaaaatcttaggaatggagatctatagggacaaaactcacaaaaggttatctttgtctcaaaaggattacattcagaagatacttgtgaggtttgaaatggctgattctaaacctattggtactcctatttcagaaaaaagagaagttgtctgctatgataaaggttcaagctcaagctgatcaagactatatgtcaaaggttccatactcaagtgttgttggcagtctcatgtatgtcatggtctgcaacagacctgaccttgcttatgtttgtagcatggtcagcaa

SEQ ID NO: 252364 - DNA, 462 bp, Glycine max
taactcaaatagtctacattgataaaataattatttttattatgtgtttaaacacattgacatcaagagcactcaagtttatcaatcaattctcataaggacatcaattggtacatagaacacaataatattgcattcataatcataaagaaaaattataattcaattaacatcctaaaataaacccaaatttagttctctatggatccctacacatgttctcactaactcccaattgtgaataactcatcccttacctctgagcggactcacgtgtcttcagccagcgatagtaacatttctagcggttccttgagattctttcatttattcctctgactgctccgatagaattcccaaacgtcagagagacggagaagagattgaaaccttcactttgactgtcttcatgtgattcctttttctccctccacgaatattatctcaagaatcccaatggtg

SEQ ID NO: 252365 - DNA, 362 bp, Glycine max
  unsure (1)..(362): unsure at all n locations
acgcatgagtgggctgctctaatttttcaacccttttccaagtctcttacagggtaattctacaaaaaatacacccaaaacactataaattaagtaactttaactaaacaaaaatntaaaagaaactaaatgtctaatattttaccacaaaaaaaggcaataaagaatattaaataattactatataatttagatattcaaattacttaancataacaattatcaactctcaaatcagttgggcggctaattaatgatttaaaaaatcactttggatattaatctttttaccgtcgatcaagaattcattaaagttgtcttatttcagtagcgcgggcgcattttattattactctaatttc

SEQ ID NO: 252366 - DNA, 385 bp, Glycine max
ttttatgcttcagttcgcctagattgatgtggtgatcttatgataactggactctagcggagtttaattggctatcggtcaggcactataatagatttatatgcatgtatactattaagtcaaaatttagagaatgcaacaatacacagtttatgatttggtggctacacagtgtccaattaattatttacatttcatagttgatactctctcttggtaattgtttttattttcaacatgtacatgtcaatgccatacacagattggaacttggacactttggaatcgacgttgtgaatgtagttcctggagccatcacttccaatattgcaaataatgcccttgccaattacaatcgaatgcctgaatggaagttattcaagcc

SEQ ID NO: 252367 - DNA, 491 bp, Glycine max
tcgacccggatccttaagtcacctgcggcatgaagcttgaggaatatggggtacccatcacatgtggtactaggtggcggtcgggcgatggtgcaaaacaagttttccacatccacaatgcgcgcataaacccaccatcccctgttgcccacctccaactgagctcacgtactcccacgtagcccatatcctcgtttctctcaacaccgggtccccatcaatcctcccaagcttccacaacatccaagcaaaacaacattcaaacagcacaagctatcacagccaagcaaaacagagcaaaggcagaaaactctgccaaaacaccaaccaaatcacagcttttctcacttaaagaccccagtaacaattccttcgatccaattcgttaaccgttggatcgaactccaaaatttactggaagtctatagtacataagcctacatttgtgaccgtgggatctactagaaaacatccagaactcattctgcact

SEQ ID NO: 252368 - DNA, 460 bp, Glycine max
  unsure (1)..(460): unsure at all n locations
tcaggctgttcaatcgcttcagataggtgcacagaagggttaaggtctgtgttgtggtcggtaaaggagcataaaccacagagtctggcgacaggtacaaatttttgattcatggccaattgggttaccaagttaaccaaggcatcaagtttaccttcaagcttcttagtctccgctgatgaagatgaatttgtggctactttatgcactcctctaatgacaatagcatcacttttggcactaaattgctgggattttgaagccatcttctcaattaaatttctcgcttcagcaggggtcatgtctccaagggctccaccactggcagcatctatcatacttctctccatgttactgagtccttcataanaatattggagaagaagctgctaatacatctggtggtgaggacaactggcacataatttcttacatctctcccagcattcatatacgctct

SEQ ID NO: 252369 - DNA, 410 bp, Glycine max
  unsure (1)..(410): unsure at all n locations
agcttctcaggaggtgagcttattttgttatgggtgtgtgtagctaagctctaccttctcaaggaagtattctcaaagaagcttctcaaggatgttttctcaagaaagcttctcacggaagctacctattctataaatagaagcatgtgtaacactctgttgtaactctgatgaatgagagtcttgtgagacacaactcanagttcaacttctctccctttttcttccttcaatttcgtgctcccccctctctctttctctccctctttcttttcctccattgaagcatccttcccaagcttcttatccaaggctcatcttggtggtgaggctccttcttccatggcttatttcctagaggatggcgccctctctcacctcttctccttatgcttgcgctgcatctccat

SEQ ID NO: 252370 - DNA, 374 bp, Glycine max
  unsure (1)..(374): unsure at all n locations
tagatcatgcatccgagtcaaacgntattgctgtccgattatgcacgggcattccatttcaacttttaatcgtcacgatatattacaggcctcaatcagacatgcgagtcaaaactttattccgtcagaattcacccgagtctctcatgtttaactttgagcgtcgcgaccggatacttggcttattccaagatccggaggaaatgttatggccgtgtgtatgtgggatgggcttcaatattatcctaagagcatctcgatatattatgagcttcaatagggaatcctagccaaagttatggctgtccgaatctgcgtggtcagtccatttcaactttcgagggcgatgatatactatgggcctccatcggaca

SEQ ID NO: 252371 - DNA, 451 bp, Glycine max
  unsure (1)..(451): unsure at all n locations
agcttattaatttgtcatgaattgaaccttgttctttaaatgataatctcctaataccctgtttagattctaggagtgcatatggttcaaggcaaatttactctaaatttgggggaggaaagtcaattataatgaaaagaaaaaggttaagcatcaacacacacaacaaataagttgtatgttaaaaagaaggaagaaaaagaaaatacgttgtgctgttacaaaaaggtcgaaagcaacttaataaaaagggaatagtgagaaggctatttatgcaaaacaagaaaagatcattgtgattagtctaggactggtactctcttagaatctaaacttttgaatcctacaanaaccagtgaattntttgtagccacaacctcactacaagcctgagaaaagtcttctgattcggtttatatatttttgacttgatgacatgagatgaaatgca

SEQ ID NO: 252372 - DNA, 399 bp, Glycine max
catgatacatgtcttgtttcagattttatcaagggttaaagggatgccccacattattcccatgacacaaatgcaaaaatgactatttggaaacttcatgcgaaactggtcatgcatgcacctatgtggacactcaagtgtcaaatttttatggtcatgtgatgctagggctcacgattcattcgctctatattaatcaacccaatgtgtccaaaatatgttcttttatccatttgtgcattcatccgagtccattctgggcgtctggggaaatttcacagcgttcacccttcgggtgtacacacacattatttttaaaaaaccagctatgatcggcgaattttccacagaagagcttgaagtcatttcttttcaaaagcatgttggttcttcacctaa

SEQ ID NO: 252373 - DNA, 441 bp, Glycine max
  unsure (1)..(441): unsure at all n locations
agcttgctcttatccttggttaattggctttgttgcattanaggctgaggcacttttgatgttttcttttcccattctgggttctgtaataaagcctttgcaattggaaggtgaccattttgttttggttgatgtgtttcataatagctttaatttagttttttattcagtcttttaaataacaattttaaattatatatcattcttaaaaataagagaattctttaatgtattattcttcacataattatatgttttcttcattttacgagacacatcttttaacttgttacattaaatcagattaatacttttttattaattaaatattcaatcaaatcatatatttacttattttttaattaaattaaactgaaccagacattttcaattttttatgtgaacaattagactaattatatgataataattaaagtttta

SEQ ID NO: 252374 - DNA, 464 bp, Glycine max
  unsure (1)..(464): unsure at all n locations
actaagcttttagcatacggactaaagacggggatctttgtacattctgtcctacggntattgaaggaggaactggagnggatgatgataggatgtcctccgttctagctctatttctcgatgccatctgtaactaaaaagaactcaaaattccttagaccaaaattgttcaagtttaacaacagaaataaagtccaaaattaacaataagcgcttagcgggatacagctcgctcagcgcgccctcagaaacataacatactgacttagttgcagccaagcttgcttagcccaatagttgccgtgacgaaatgtgcttagctcaggtagactcggcttagcgcgaggctttcaacacaaaattttctaagttaccttggcttagcgaatcagcctcgcttacccaccagtatctcaacaggaggatgagtgttcatcctccaagatgaactcgcttagcgcgat

SEQ ID NO: 252375 - DNA, 405 bp, Glycine max
  unsure (1)..(405): unsure at all n locations
agcttgtgggagtttatgattgtgantttgccggagatattgatgatagaaaaagtacttccggatttgtattttttatgggtgatcgtgtttttacatggagttctaagaagcaaggcattgtgacactttctacttgtgaagccgagtatgtagctgcaacttcttgcacatgtcatgccatttggctaagaagatcgttggaggaacttcagttgttgcaaaaggaaagcacaaagatctatgttgataatagatctgcacaagagcttgccaagaatccggtgttccatgaacgaagtaagcatatagatacaaggtatcatttcattagagagttcattacaaagaaagaagtagaatcgacacatgtgaaaacttaagatcaagttgcggatattttca

SEQ ID NO: 252376 - DNA, 441 bp, Glycine max
  unsure (1)..(441): unsure at all n locations
agctttcaacatagattatttgatgcttctttctttaaaantgtgggttcaccctttataatcacctttctgccatcaatcttgaggaccaacgttagttgttcaaagttggctctaatctctcctaagcttgctaaccactccatacttaaaaccatatctacacctctgaggccaaacaagaagaattgttgctgtaccgatacttcttgcactttcaggggaacttctctacatactcccttgcatttaattttgtgtccatctcgaacttctaccacgtatgaaggagtgtcatccacctttaattataatttttccaccaattccttggaaataaagttatgggtggcaccgcaatctatcaatactttgactgtgtgatcatcaatatttccccaaacttttaaggatcgtcgagaagaaatcccacaatactat

SEQ ID NO: 252377 - DNA, 360 bp, Glycine max
tttaacgcgtacacagggaaataattatatattaagaggtgactacgtgctaccgaccgatgtgtctctattggcgggtaactcacctactttacacgcctttgaaaaaatataatttacttaaaaacaaatgtaactcaccgtccaatattttgcattttttaacggaataaagaaattagcaaatatctactcgatcattcaaaatttcctcgaaaaactatacgaatcatgtgttgttattttatacacacgcacaatcaagttttctatttgaaatattacatgaaatatagagcaaataatggtcaatgatgatttttccccttatcaacgtaaatgaatatatataaagaatat

SEQ ID NO: 252378 - DNA, 406 bp, Glycine max
aatatcaactcaactcgaccaagtgaactaactgtgttttctcctgaaacaataataaagaagcttatctgtttctagtcacaaacacacactagatgaataggacatgaactgtcagaatggatggacgactttctgttcgcaaagaacatggttgagaaactaaacctgcaacagaatacaaacatgagttatgactagactagctatgtacacaagctacaagagtacttaccaaagaactgtaactatatgttccctcggcgacccccaaactcatcgtttgttatatgttcaagaatccacaccactgctccaaaaaaaaaggaaaaaaatgcagtgacaccccatctgtggagtaaatggtcacaagaaagcccaagtatttgacttcaattttttcact

SEQ ID NO: 252379 - DNA, 469 bp, Glycine max
  unsure (1)..(469): unsure at all n locations
gctcnnactgcctcaggactcagaatcaatntctcanagaattgtcttgggaaaattgcgatgtcagaaagttggaaggaggatgctgctangtacttacattgtanggtattggtcataccaattctatatttgggcctcccgaatgggacaaatccaagacggtccgacacatgggatcctatagtcaagacatgtgagagaaaactggcaaaatggaagcaaaagctattatcttttgggggtagggtaacactcataaagtcagtcctaaattctattcctatatatttcttatcttttttcagggctccaaacaaaattctggacaaactggtgtggattcagtagcaattcctgtggggtgaaggtatggaggtgaagaagatagcatgggcaaagtgggagtcggcgtgcctaccacaggagaaaggtggattatggatcatggatcttggaagttaactat

SEQ ID NO: 252380 - DNA, 396 bp, Glycine max
  unsure (1)..(396): unsure at all n locations
catgcagctttaagacacattgagtaaaatttttttttttgtgaagaagcttaagattttgttctcggggttgaagccgcgccacaaaatctcgtggaagagaatgcacttgtagatgtgaaagttgtggtcagtagctgaggcgaacagctgaagtcatggttgaaggaaaattggagcaaggtggaggagtgggaatcaagggtttagtcgtgcgggaaaatctcacggaaatggttgtgatagtaaatgcaaaagtgattgtaaaaacaaaatacacattttacaagacataaaacaaaaaaaaaaattaccatagccaaaataagaaatatattaaattatagggacaaaanaaatatttaagcccaaatatcctatattagtggtatagac

SEQ ID NO: 252381 - DNA, 456 bp, Glycine max
ataataagataactaagctataagttagggttcttttttctaaatcccaagtattatctactagatgtaatcatgtttaaacccaataaaactatggacaacaaaattctccttgagtgtttaatgcaattacataccagaactcaaacctaatatatttgattaagctgaaataacccagctaagttgacccatgcgctccatggtcataagttaggttaaataactatttaaacacataactaacacagaatataaacttgaatggagattttttaaagcaaaaaaaaaaaaaatctaaaatatacgtttggcgtcgatgcctctctacgttagctgttgcttcattatttgtggactaacattcttgagagtgtcctagaactcaatttggaattatggaatacttttgtgggttcttgatgtataataattgaaaagggtggttaaaccttt

SEQ ID NO: 252382 - DNA, 443 bp, Glycine max
  unsure (1)..(443): unsure at all n locations
atgcaacttttttggaccctgaacaaacaactttactttncttcaaaaccatgctatgtgctcgcgactggtccctctcttcccttcgcagcctgaggtcactattgctaccccaaaaaagctctgcgaaaattattccggccatattcttcttgcgagccctcttgggctctttgtcaagggctcccgcggtaattgcattctcttcccgaacccggacactccttccgaatgtgtgtagcggccaacttgaacttctccttggcaaagtttgcctttcctaactcgcttttgagagcttggacttcttcgtcctcttccggtgcttcaaaactctcttcgctgatgacttttaacttggcgagccaatctaaacctcgtatatgaactctcagccattcgtggtacccaccaatgatgccattacgaatgcccctaagctc

SEQ ID NO: 252383 - DNA, 464 bp, Glycine max
ctcagcttagcggatatgaatggcgctaagctaaatcaaatccagattatatcgctttattatccgcttagccaacagattatgtgctcatccccatggcccacaattctgaccgcaatgaatagcgcttggcgacattgggtcttacttagccaaggtgaagccaacactcatcgatcagtctgtcgtttattggaattaaactcaaattgattttggcttatcctaaccttggctagcttagcgaaaataatcaacctcaggtgttatggtggtgcgctaagcgcttgaactcgtggcttagtgcatgagtgattatgcgcttatcaagaagcaggcgcttatcgaaaggactaattttcaaaaagattcttttctttctagttataacttagtcctttcccaaaaaaattaaacccttatttcatattcaagagaggtcatatgctcatgtaagattatca

SEQ ID NO: 252384 - DNA, 447 bp, Glycine max
  unsure (1)..(447): unsure at all n locations
agcttcaacattcaatatcgagcgtttctatatattacgggattgaatcagacatccgagtaaaaagttaatgtagtttgaagttgctcagaacttcaccattcaatatcgagtgtttcgatatattacgggactaaatcagacatcagagtaaaaagttaatgtcgtttgaattatcttagagctgcggtattccatttcgagcgtctcgatatattacgggagtcaatcagacatccgagtaaaaagttactgtcgtttgaatttgctcagagcttcgataatcaatttcgagtgtctcaatacattacgcgactcagtcagacaaccgagtaaaaagttattgtcgtttgaatttgctcanagcttcggtattcaatttcgagcgtctcgacatattacgggactcaatcagacattcgagtaaaaagttattgttgtttgaat

SEQ ID NO: 252385 - DNA, 456 bp, Glycine max
  unsure (1)..(456): unsure at all n locations
ctgagcanattcaaacgacaataaagttttactcggatgttcgattgagtctcgtaatatatcgagaagctcgaaatggaataccaaagctctgagcaaattcaaacgacaataactttttactcggatgtcttattgagtcccataatttatcggaacgctcgaaatagaataccgaagctctgagcaaattcaaacgacaataacctttttactcggaagtcggattgagtcccgttatatatccagacgctcgaaattgaatgttgaagctctgagcaaattcaaacgacaataacctttttactcatatgtcggatagagtcccgtaatatattgagacgctcgatatggaataccgaagctctgagcatattcaaacgacaataactttttactcggatgttcgagtgagtcccgtaatatatcgaaacgctcgaatatgaatgttgaagc

SEQ ID NO: 252386 - DNA, 432 bp, Glycine max
agcttgtaggattatggggtacccatcatatgtggtactaggtggcggtcgggcgatggtgcacaacaagttttccacatccacaatgcgcgcataaacccaccatcccctgttgcccacctccaactaagctcacgtactcccacgtagcccatatcctcgtttctctcaacatcgggtccccatcaatcctcccaagcttccacaacatccaagcaaaacaaaattcaaacagcacaagctatcacagccaagtaaaacagggcaaaggcagaaaactctgctcaacacaccaaccaaaatcacagcttttctcactcaaagaccccagtaacaattccttcgatccaattcgttaaccgttggatcgaactccaaaatttactggaagtctatagtacataagcctacattgtgaccgttgggatctat

SEQ ID NO: 252387 - DNA, 467 bp, Glycine max
  unsure (1)..(467): unsure at all n locations
cactatgacactcagcttgatcggacatccggtgaaagttatgatcatttgtatatctcgagagcttccgatgtttaatctcgagcgtatcgatatattataagcctgaatcggacatccgtgtgaaaagttatgaccatttgaatttctcaagagcttccgttgttcaattttgagcgtctcgataagtgatttgcctgaatcggacatccgtgtgaaacgttataccatctgaaattctcaagagcttccgttgttcaattttgagcctctcgacatattatgcgcccgaatcggacattcgggcgaaaagtgatgaccatttgaatttcccgagaggttccgatgcttcatttcgagccgatcgatatattattagcctaaatcggacattcgtgtgacaagtatgaccatntggatttctaaagagccttcgttgttcaattctgagcctcttatattatatg

SEQ ID NO: 252388 - DNA, 445 bp, Glycine max
gcttcccaccatatgcttgaactttgttttctactggcttatcatcaacactagcacctagctttaatccaaactcaactgggcttttagctaagttgcattcttccatcttatatcgtttaagaacttccaatgcatacttcttttgatgcatcaccagtcctccattcttgtgaatgaatgaactcaattcctaagaaataagacatgactcctaggtctatcatatcaaattcctgttgtagctgcttcttgacagtttgaatcacaacttcattactgcctgtgattaaaaggtcatccacgtataggcatagtatgattatgtctccattctcttccttgacatacactccatactccaccttacatatctcaaatccagggggctggtgtacatagacttcttccttaagtaatacattgaggaaggctgatttacatc

SEQ ID NO: 252389 - DNA, 110 bp, Glycine max
agtttaatgaagactttattggaaaaggtagccctctagaacaagaagaccggtaaatcttaacttccatgctaaatgatggcataaagaatgtaatctgagacacaata

SEQ ID NO: 252390 - DNA, 466 bp, Glycine max
tctccgaccggatcttaagcacctgggctgcaactgtatcataccaagtttattatttttaacagcttagaaattgaattaaatttcaaagcctgtaatcgattatagcttgtgtgtaattgattgccagacattaaaattcaaatttcaagactgaagagtcacaactcttcaaaagctaactgcataatcgattaccacatttatgtaatcgattaccagtagggaattttcgaaaataacttccaagagtcacaattgttcaagaaatttttgaatggtcatcaaaggcctataaataggtgacttaggacacacaattacctagagagtttttctgaacaaaattgtcttatcctctcaaaacaaaaatgtcttatcactctcaaaatatttcttggccaaacactcgaaaattcaataaggaatcttgagcgatcttcacatttgaatatccttctcttaa

SEQ ID NO: 252391 - DNA, 417 bp, Glycine max
  unsure (1)..(417): unsure at all n locations
tcttgtntcaatgttgcgttcaacgagattagttcgctacacggcttttccagggtctctgataccctcaaggaactctacgtgtccaaaaacgaagttgccaagattgaggagatcgagcacttccatcagctgcagcttcttgaacttggctccaataaattatgggtaaattgtcgtgatgggttgaagtaaggttgtgaaccctgttgtgtcactgttgaaacttgaaacccctctcctcctttgtttcttcaatgccgtggtggaagaagaatagagagtcttagtctccgctatgttccgcagaatcttgcacactttcagcctgcgcccactatgtaacaacgcgcgttctcaccactcgccgccacgccctcaatgtctctccacccccttccttcctaatcccacgat

SEQ ID NO: 252392 - DNA, 441 bp, Glycine max
agcttgaaggtaaactagatgcctttgtttatctggtaacccaactggccatgaataaaaaatctgcacctgtcatcaaactctgtgggttatgctcctctgccgaacaccacacagacctttgcccttgtatgctgcaacttggagcaattgaacagcctgaagcttatgctgcaaacatctacaatagacctccgcaacctcagcagcaaaatcagccacaacagaacaattatgacctctccagcaataggtacaatcccgggtggaggaatcatcccaacctttgatggtcgagtccttcacaacagcaaccacaacaacaacaaccttatttttagaatgctgctggccaaagcagaccatatgttcctccaccaatccaacaacaacaacaacaacaacagctgcaacaacaacaacaaccccagaaaaaaaaac

SEQ ID NO: 252393 - DNA, 394 bp, Glycine max
  unsure (1)..(394): unsure at all n locations
catagtgctctaaaatcgcgacactgtgcttagcactttcctcgcgcttagcgtgagttagtgggttagggcttagcaccctcatgtgttgagcctaattaaagatgccctctgcgcttagcgacaagatctcacgcttagtgcacgaccttgaaatgagtgatctgccaaattctctatcgcgctaagtgcgctgaagctacgcttagtgtgatgctcgcacttagccttcatggtgggctgagcccagctgccattttcaacacttcaagaattggcctcttgtaacctgaaatttgcacaaattttatcattaattccaattgagaatactctaaagacaactgtacaaataaaacaagatntctttacaaattcctatganaataactat

SEQ ID NO: 252394 - DNA, 388 bp, Glycine max
attcccgagggaggccgggcgattctgagcttacaattgctcgtccacttcttcgtgtgaagtgagcgccatgaatttcataaccacaactggtgataagatcatgttaactataatctgaaatattatatttctgactcctaatctacatgcgtgtgaatgcaacttgatttctgcaaatgaattttgaatctcttttttatattcaattcatcatttcattttttgagtgaataatgacatgcggatactagaacaccaacattgatatatcttacgtgcaatgcctaactgatttcactgcattcaacgatgatggatcttgaagagagttctcgaacagaaggaaatgaccttgatttgctcaagaatagccttaatattgata

SEQ ID NO: 252395 - DNA, 405 bp, Glycine max
  unsure (1)..(405): unsure at all n locations
agcttctatgccaaaggtcttaccttgtattaattcctttgatagcccttttgagccttgtttccctttccttgttttgaagctcactacaagccttatgtgaaaaaccatgatatcaccgtatccttaaggaattttggagctttggaattgttttgggaataagtgtgggggggttttgtttcattggataacatgttttgttggctatgcttcatgatgtattttgggccacacttgatgtacattgtatattggttaatgttggacatgttgaatgagatgttgtttctcanaggctacagagcataaaaaaaatcaaaaaacaaaaagaaaagcaataaagttgagtgaataagatcttaaatggcataagaatgatgagactcttggttctactcttta

SEQ ID NO: 252396 - DNA, 364 bp, Glycine max
tcctgactcaccataatcctcgacccattgttataacgtcaatcctgaccctagtgagcgaaatacagaaggaaaggatatttcctatctaaggaagaaaaaagaggagaggaaattcccaatcacagatactgaaatgaatacgagaggaaattcccaatcaaagagtgggagacagacaataaagagaaagaacagtcccaaccaacgaatgggagaaaaagaaaaaagaaaagaaagaaaagtcccaaccaatgaatgggagaaagtaaaaaaggaaggatagaaagttcctgatcaaagaaacacaaacaaatgtgcatgaaggtcttttgaccatacaatatctgaacaatacagaatt

SEQ ID NO: 252397 - DNA, 56 bp, Glycine max
  unsure (1)..(56): unsure at all n locations
acacactcagcatactataatatagtcatgagcacagntcaattttctgtctgttt

SEQ ID NO: 252398 - DNA, 405 bp, Glycine max
  unsure (1)..(405): unsure at all n locations
agctttttgaataagcctcttaatgaagctttttgttgaagctacatgaagctgccttggtataaatgctgcccagccttcgttaaccgttagatcttctcgaaatttggtctgcagcttcacaacactcttgtccacgatctgaccgttgggatctttgagatgctgtctggagtgtgcttgaagcttccattcccgagagcatttcttatttaagcacttcagcctttgctttcgtgtagcttaggaagaacgntatttcttcttctttctttcttccaaagccatttctaaagtcccaagaactttctccatcacccacatccaccattagccaccacaaaccattgttgttctctgttgaaactccacaacaagaggaacctcgtcgatggagcggaatct

SEQ ID NO: 252399 - DNA, 452 bp, Glycine max
  unsure (1)..(452): unsure at all n locations
gataataaattatcctcacattatataacanattattcataagncatcaaaacataaatcatttgtctaagtcacttgcatctagaaatcctaattttcttctaatggggtagaaaaaatctttggttagtggttttgtgaagatgtctacaagttggtttttagtatctacaaattttaaaaatacagtcacctttttcctaagactaaatgctaattgactaccaacacttaccaagatgagtttttgttaatatagaaggttctatcatatcaaaataattttatttggaatacaatataataattttgaaaagcatcataaaaaaattgatcaatcaatcaagtaattcaaacatatcaaacaagaattatacaaggattgaaggatatagatcacaggcattatcaaacattcagatttgttaaagataatttaaaaacttagaaag

SEQ ID NO: 252400 - DNA, 412 bp, Glycine max
  unsure (1)..(412): unsure at all n locations
atttactttgattatgattttcatgtatttctaaaatatttatttagtataattatatattagaggatatgtatataaatatttaaaaatatataaaaaatcgtatcaaaattaatatatattcaaatgattttatattcacacatgtcttgcattatgttaatttatgcaaacattttttaaaattattatctttataaggatattcgcattngcataagacatatatataattttaataagaaatattaataataaaaaatatattacattttgtaattattagttttaaactgcctgngaaatacatctagaaagcctactaattcttgaatacccaactctcactctctgctgcagttcttattccttctacaagcgatgaaggcagagacattntattatggcaaaa

SEQ ID NO: 252401 - DNA, 395 bp, Glycine max
catcatttctggcgcttaacttgtgggagttggaagccatcttctcaattaaatttctggcttcagcaagattcatgtctccaatggctccaccactggcaacatctatcatacatctctccatattgctgagtccttcataaaaatattggggaagaagctgctccgaaatctgatggtgagggcaactggcacatagtttcttaaatcgctcccattattcatacaagctctctccactgagttgtctaatacctgagatatctttccttatggctgtggtcccagaagcaaggaaaattttttctaagaatactctctcaaggtcatcccaactcgtgatggaccttggtacaaggtataacaccagtcctctgccactccctctaatgaat

SEQ ID NO: 252402 - DNA, 446 bp, Glycine max
  unsure (1)..(446): unsure at all n locations
agctnntatgaagtttctgggtttccaaaccttgttaacttgngctattcatcttttcattctcttctccctttgccaaaaagaattcgccaaggactaactgcctgaattctttttggggctctcttctctctcttccaaaagaacaagggactaaccgcctgaattcttttgtgtctcccttctcccctgtcaaagaattcaaaatgacacagtctgagaattcttttgattcttcccattccctaatacaaaagcgttcaaaggtttaactgcctgagaattcttttgtatccccattcacaaagtatcaaaggtttaacagcctgagatctttgtcttaacacattggagggtacatcctttgtggaaaaagtagagggacatctacttgggtttgactgagaacaagagagggtacatctcttgtggatcagttctagttg

SEQ ID NO: 252403 - DNA, 414 bp, Glycine max
  unsure (1)..(414): unsure at all n locations
agtcacctgaggcatgcaagctntaagaccaacaattgcattgaactctaattttatatgagggaaaattattataaaaaaaaagagatgaaaatgaattaaaacacaaaatggcttaagttagagtaggattctcttatgtgaagatacctatggtctctaaaaaaattaaaaagaattaattgaactttgtcttttttgtacatgtcaaacaatttggaatgtcatgtgcactggaaactcaatgtgggtaagcatatggagcagagaaatatcgaaaatttagtgttcaaatatacactactattgtctctcttactatagcatgtcttcctctgactcttttgtgggtctacttggagaaatactcattttcttggccaagacctttgatttacaacacactgaaatttg

SEQ ID NO: 252404 - DNA, 416 bp, Glycine max
  unsure (1)..(416): unsure at all n locations
attaatggagntgacaagaatatctttatactgatcaacacatgcactgtggtcaaggatgcatgggagatcctgaaaaccactcatgaaggaacctccaaagtgaagatgtccagattgcaactattggccacaaaattcgaaaatctgaagatgaaggaggaagagtgttttcatgacttccacatgaacattcttgaaattgccaatgcttgcactgccttgggagaaagaatgacagatgaaaagctggtgagaaagatcctcagatccttgcctaagagatttgacatgaaagtcactgcaatagaggaggcccaagacatttgcaacatgagagtagatgaactcattggttcccttcaaacctttgagctatgactctcggataggactganaagaagagcaagaatct

SEQ ID NO: 252405 - DNA, 465 bp, Glycine max
  unsure (1)..(465): unsure at all n locations
ttaagtcacctgcggcatgcaagcttnttggtacaatgaagaagaagaagttaaagagattcaggacttgtaaaagattgattgaataagtgtaaaaagtgtattgaaaagcaaatcaaagccttgcatttatagactcttcatgtctggccaagaggaccatttagaagagttataacttttagaaaaacttaaaaccaatttgaaaaagtcaaaaaccttttgaagagttacatcttttgatttattcagaaatagttaccggtaatcgattaccaaatcagtgtaatcgattacacaaggcttttatgtgaaaggatgtgactcttcatatttgaatttgaatttcaacgttcaaaggcactggtaatcgatggccaaaatattgtaatcgattatagctttttgaaatcaattggaacgttgaaattcatttgaaaactttnntcaaaacaatttgctact

SEQ ID NO: 252406 - DNA, 437 bp, Glycine max
  unsure (1)..(437): unsure at all n locations
ngagatgaggaagtgttgaagggtgaaacttcctgctttattgttgaccacatagtggtacctggagatatgtcgcgggggtcatgagaccttgtggacgtcaggtggggtgctattgcccaaaaccaagcttgaccaatcccgacccaacccgggcatagtcggtcagtgagaacctgtgatgtacctaaacaggcgagctcctggcagtcaacagataaaaggaacaaagaccacaaagcaaggaggcttgtggtggctggccagctgtgaaacttgattgatatgtgagatatggtctctggtaatcgattaccaaggtgggtaatcgattacaaggcttaaaaatgaagacaggagactaggatggtctctggtaatcgattaccaaggggtgtaatcgattaccaggcttgaaaacgaggtcagaaagctaa

SEQ ID NO: 252407 - DNA, 439 bp, Glycine max
  unsure (1)..(439): unsure at all n locations
agcttctaaagatgtcaatnggaattattattttacaacatnttatccatttaaagttgacttttgtcacgttatttttacaagagggaactttaaaatggtttaggtctttagggtgcttatatcacgatgtagtctgtatgtttgcatcaggtattgttaccggacttatacctttaatgtatttgtcacttcgaagatggccagcgtattttcaatctcatatggcaaaataaattatgtaatcatttagataatttttttgaaaagcatgagaactatttaactagttacttgaatgctctttatatttccagagatttgctctttctgcagtggaactcaatggtgcaatctatgccattggcggatttgatggaaatgattacttaagggtaatattataactngattttgggttcagttttttagatcatta

SEQ ID NO: 252408 - DNA, 463 bp, Glycine max
  unsure (1)..(463): unsure at all n locations
ctaagcttgaagggacaaccacatttctagtgcctgtgtctcttctaacaaattctttcttcctacacttgtactgaccgctcctttcacacttaattaacacaaatgaagatnttcctctactaccagtatatgtatcagacctcataattactgcaacaaaaccgttttcatgggcaaccattcgagcccactgcaaaacgtcatctcaggttgcaaatacttacaacgcaaccctgacatattactttntacacaaatcatacattaaaccaaacaactgaaactgatcaacatgattacctgagaagtattaaaagagtctgaacaatcaacatgtcctttattcacaccacaatgttgttcatcttcaaaatccatatcaacttctttagacattgtattgtcatacgcccattaattntcatccatcttaattcaaactataactatcacctatttc

SEQ ID NO: 252409 - DNA, 448 bp, Glycine max
  unsure (1)..(448): unsure at all n locations
agcttctatataagctgaaccattttatctttaaacacaagttgagttttattcagacaattagagtttatctcttttatcttagtgagagtgattctcctaaattcttgagtgattcaagaacaccctggctgtatcaaaggactttcacaacctttgtgtgttgccctcgctggaaagagtgattctttccttcctatcatctccacccttgttctttcaaaccacaattccagaaaatccacctctgcccaaaattatctcgtgaccataactcccattttacacactcaaattaagtgattcttgagcctaaattgaatttcaaaacgagacctttcacctcgttttggaatcacctcatttggagccctgtagcttccgttattgtcatttctatatttctgtccagccaccacttaacctacngtttaccatcccattcatc

SEQ ID NO: 252410 - DNA, 380 bp, Glycine max
tctcgatatattatgcacctgaatcagacttccatttgataagttatgaccaattgaatgtctggagagcttccgttgtgcaatttcgagcgtctcgatatattatgcacctgaatcagacttccgtttgaaaagttatgaccatttgaatttatggagagctttcgttgtgcaattccgagcgtcttgatatattatgcgcctgaattggacttccgcgtgatatgttatgaccatttgaatttctcgacagcttgcattgttaatttcgagcggctctatatattatgcgcctgaatctgactttcgtgtcgtaaggtatgaccatttgagattctccagaaccttcgttggttaaattcatgcctctttatatttat

SEQ ID NO: 252411 - DNA, 453 bp, Glycine max
  unsure (1)..(453): unsure at all n locations
agcttgtctcagcgtttatgcgatatattatttcatgttagccatcatcagcaggtaccaagaagaattagatctagccatggcccacgagcacaaagtggcggacgagtttgcccgagtgtacgcggaaaaggaggctaggggaagggtgattgatgtgccatcattttcttctatttcttaaaccctttttttatcattttaattactgattagtcttaattgtcaaattaattaggtagttttattatttgggctcatttagctaatttgatgtttttaatctaatttcaggaattaatgaaccattgggcttaatctggattttggttgtggacttgaagagggaaaataaagcagcgcttaccttagttaatttctaattaggagattgcaattntattntatgtggttcagtgtttatttcgttttgggccagaatattgtaatagg

SEQ ID NO: 252412 - DNA, 430 bp, Glycine max
tctcccctatcttgctataaataggggaagaagtgaagattataagggttcagccccttagacacttctctctctttcggatttgctgaggaaaattattttcgtgaagaaaatccaagccgaggcacttccgtaacgtttccgtaacatttatgtgagtaattacgcgaagattctcgaccgttcttcaagatccatcgttcgttcttcgttttcttcagtcttcaacgggtaagtacctcaaaccaagctttgcaattcattatatgtacccgtggtggtccacattgtgtttcatgtatttttattctcgtttttgtttactttttatacccccttttgacgtgcttaagccatttatttaagtcgtttctcgcctaatctaaaaataaaataaatatccaccgaatcgttgaattgttcatccata

SEQ ID NO: 252413 - DNA, 428 bp, Glycine max
  unsure (1)..(428): unsure at all n locations
tagcttatcctcctttattgctctatagacttatggagaaattgaggaaggccaaaaaggatgtcaatattgctacttcagttaagccacagatgacatgtgttgaatatgaaggtggaggaagatggataaacagaaaataatctagagaatttagagaatgaaacgtctttcatattcaaaagagagtagtacatagnttctgcatgtcattcatatatgtagactcttgatagacactaaatgcatttaaacatgagatgcaagaaaaaactatttcctaagtacattaaattccattattctgaacaacacataactactggtgtcttaactattaatttgtaccctctatattctgctttatttggggatggatatgagagtggttgcttttcctgggctgggaatgttagataaaagacttc

SEQ ID NO: 252414 - DNA, 435 bp, Glycine max
  unsure (1)..(435): unsure at all n locations
tactaagctttttcatgggcacataacaggctttatcaaagttttttctcacatccagngccatttcctgcgactatgctactaacccttatgtgaggggaccaagctatgcacctgctggaccaagttatcaaccacccataacaacaactccatcaccctcaaatgttaattatgctcccaattttctcccaagtagtggtggcatggcacctagttaatttaacatgccatcatcatcatcatctggggcaggtcctatgccaaagggtcctccaagatttgcaattggggcaagtgccggatcatcggccgctggggctgtaaattttggtgataacatcatgtcatgattcgatgttggagatcccactcttaccaatttaacctgatcctcttctcttaactataatataacaggtttgtaactattat

SEQ ID NO: 252415 - DNA, 379 bp, Glycine max
gcttcatcaagggtttttatccattatcttcagtggtgctccttaaacctccattaatttgttgctttaccttctcttccatagtgttttcttcatttttctacatgtatctcctcacatgtcttgttctaaatgttgttaacatgattctttagagtttgcaccgattaaacttgctatagaagttagatttgattttctatggttcaaattacttgttcttgttcttgaaccatgaattgtgttgagttcaggatccttcgacttagtctcgtattttttgtgtctgaaacctaaaccataaaattcttactaaaatattatagtattagaaaacctcaaaatcctagagggactcgttcacctattgtagttttgt

SEQ ID NO: 252416 - DNA, 426 bp, Glycine max
  unsure (1)..(426): unsure at all n locations
ntattcaagacatagttatttaagatattcaagatgaattatcaacacaagtctctagtcttagaaagggtttattaaataagaggggaattccaattgaagtagcaaaaggtttggccaagaaatttaagttaaaaagtcttttacaagaaatttactctctggtaatcgatcaccacacgatgtcatcgattaccagtggccaaaactgatttacaacagctattaaaatttgaattcaaaaacttgcactgtgtaatcgattacacatatatggtaatcgattaccaacaggtattgaacgttttactcaaattttaagcttgtatcgatacacatatcttgcatcgattaccaagcagaattcaaatatattctaacagcaccatttttatgctgttttgaatggcatcaaagccttttttt

SEQ ID NO: 252417 - DNA, 453 bp, Glycine max
  unsure (1)..(453): unsure at all n locations
taacctgttaacagcagccttaatgtngaacatcaggctttttccgaaagaacaaaaccaaaatacaatattgtctcgtggacacaaaacaagaagttgccaatgtgccctgaaagtcaacaaaataaaattattttacttttaatgcaaagacattgataacagtctcatggattcacttactgattcaagtaaggtcctaagcaaacttctcgatgtgattccttgacccagttggcgatgtactattcacattatgtatgtttgtcctttgcacagngtattgtctggggctcaagaaaaccataaactggagccaatcctctgcttgtactacaatcattcataaacctatttcatgcacggtaaacaatattgttagccatatattgtaaggaaaatttacttagacttacantaacgataaataattacttacatcatccacagatg

SEQ ID NO: 252418 - DNA, 476 bp, Glycine max
ctcagcttaatggcttagtgaggatggagaggtgcaagtaaggaatcatgtggagttggatatttccattggaaagaacaatgataaggtgctttgtgatgttgttcctatggaggccagccacttactcttggggagaccatggaaatttgataagagggctaacatgttggtttcaccaacaagatctctttcacgtatcaaggaaaaaagatagtgctcaaaacattgagtccacaagaagtgtgtgaggatcaaagaaaaatgagagagaaaattcttcaagaaaatagagaaaaagaaaaagagagccaaacacttgagagttcaaaaagtgaagacaaaaagagggaaacacaagagaggaaaaagatgagtgaaacacttatagtgatggagaaatttctagctacaaaaagaaaggtcaaatgggtgtttcattcaaaacaacctctatacttgttgatttgcaaaaa

SEQ ID NO: 252419 - DNA, 445 bp, Glycine max
  unsure (1)..(445): unsure at all n locations
agcttattatatggcacanatccaggtggttgagtcatgtaaacatcttcctcaagaatgccattgagaaaagcattgttgacatcaagctgttgaagaggccagttgtatgaaatagcaagagaaaagatcaacctaatagtcacaaatttttatttgttttgattggactaggagttaagacaacaagatcccaacccgagaatcaacaagaccaacttgagagagagagagagagagaatgagagagagcaagagagggagagaaagagagagaatgtgggtgaatgagagaaacaaagtgagggtgagagagggatcctaacacaactacgctgaaaataggcatggccaacaatctgcgaagacattgacagtatgacaacgggatcatggaaggggaaaatggagagatgcaccggatgtatgctctntctacttcata

SEQ ID NO: 252420 - DNA, 470 bp, Glycine max
tggaaataccaaccaatatggaggtccaagtactaaaagtattcattgactctaagttgataatcaaccaattgaatggagaataccaagtcaaaaaactgatcctgcaaaaatacgtcaacaaaattggggtaattaaagaatattcaaaaggctggaattcatctacattccaagagaggaaaatgaaagaaaaaattcactctcaaaattatccaacataaaggaacatgtaggaatggaaaacatagttcgccaaacaattcacacttcgaggtttgtcatgatgatagaaaatcaagaaatttggatgactccaattctagagtacatacaaattggcgtcaacctagaagaataaaagaaaagatagaaattgcaaagaagaatcaccaaattttgtataatagatggcaagctctacaaaagaggattcacttggccattattaaaatgcttaagagcagcgg

SEQ ID NO: 252421 - DNA, 449 bp, Glycine max
  unsure (1)..(449): unsure at all n locations
agcttgtattttaaaatgttntaaaaatacttttatttaatatttgaatttttattccttcattaatatatatgcgagggggagagggtgtgacaacacacatgcacacctgcttacatacgtgtgtattcatactctctcttctattcttctaactcatatacttactcgagggtcgaagtcctttgttttgtaggtcccccctcttgtccttttaacaaaggttactctcaaccgacgtgcgaagtctaagagtccactttagccacgtccaccctgacgtctgtcaactctaaattttgataagtatagatattctacaaatttgttcgatattgtaattaaatttaggatcgcgcatgattttatccttgatttatatttttattcaattatctccttttacaagataaataagagcacatcattgtattcaatacataaatata

SEQ ID NO: 252422 - DNA, 436 bp, Glycine max
  unsure (1)..(436): unsure at all n locations
taagaacataccatgtatgaaaaaacatgcttatttttatgtntattngangaataattcttataacctgatgacagatttgtttgagaagcgagagctaaccactaaaatcactaggagaggaaggaaattaattaatttcgggtgctctcaaatcttgagtgttaattaaaagttaaaaaaagttattaatactgataagtcatatataagtgccatatgacatgctccttacaatttttttgaaatgtattcattaaaattttgaaagtaatctcatgtaacacttattacaatttacaaggctaaacaacattttttttctaggatacgtctgatgataataataagtgttttaatctctaggcttattctccaattctgcacctttctaatatcaggttgncattatttcatgattcgttctatttatatt

SEQ ID NO: 252423 - DNA, 443 bp, Glycine max
  unsure (1)..(443): unsure at all n locations
agcttgagttcaacttgtttagnatgtatattttngattattttcattccctttatcaaatctctcagagtattttttaagtntaataatttggtatttttacactagaataacgtgaaaatagaattacaattttaaaagtaaaagaagtaattaagcctataccttttgtatgcaacattttcatttcttttaaatgaaattttactatctatatgaagggaaagtagcactaggccttttgtctcaactctcaagtctaaagttgtgccaattaatccctaaactttaactaatgtcccatatattctttcatcaatatgtcattctagattcttacatcaagacaccattaatgcactaccgggagttgatcttaattgtccatcaatattctatactaaatctagacagacccttgatagattatttcacacatatgc

SEQ ID NO: 252424 - DNA, 475 bp, Glycine max
  unsure (1)..(475): unsure at all n locations
cagcttgtgcgaatcanatcactcctgcattntatctctagcatgcantttttctttctttacccactcctcacngttggttntttagggaaaaacaccataactaaacgcgccactatgcatccctatcgcaccagatccaaatctataacgatgggtgatcaagaggagacacaggaacagatgaaagccgacatgtcgactctgaaagaacaaatggcttccatgatggaagccattgttaggaatgaggcagctcatggagaaaaacgtggccaccgctgccgctgtcagttcggctgccgaagcagacccaactctcttggcaaccgcgcaccatcctccctcaaacatagtatgacgaggaagggacacactgaggcacgatggcaaccctcatctgggatacaaccgagcggcttacccttatggattgccgcccaactactcaccacccgtcctgcaagacgatgcg

SEQ ID NO: 252425 - DNA, 416 bp, Glycine max
  unsure (1)..(416): unsure at all n locations
agcttccaatcatggacttaccctttctattttgaacgcnctatgtcagcacccgattatgtttcccacttttttttctgacacgcggataatgataattgaagaatgcattgttgtcatgatggacattcctcttgttttgaaatcatagaagtaacctagagacaacacctattaagttggttttgtccagcttcggaactgccatgaaaatggtttgatgccgatatttccgattgggaaattgccatgacaaacctggatatggaggtatcaagactctgggtcctctgtgtctcagtctaaatagggcctactctccctgtcttcgctaactaagtcagccacgtgaccaaatactatatactcacatacatggtgtgtattattgacatgattggtgcactactattgac

SEQ ID NO: 252426 - DNA, 456 bp, Glycine max
  unsure (1)..(456): unsure at all n locations
tacaattgtttgcaaacaaagggaaattatttttattcttttttccacctgncactctaatttaaaagtaatactagtacttcagaaaaagagcaactaatcaagaaaatgctattatttaaaagatgctatttatgtggaaataattaaacacatgccaaacattgttcagaataattaatatatattcggtgaatactaaattaattagtaaaactaacaaattattgagcaaaatatggcgtgtgctgtgatggtaatgaatgcatgcacaaagggaaatgagatctgattcagttcatttgcagggaatggtgtgtgcaaatcacaacagttcagttctccgtcactgtcacaattgaaggaacatggtacatggttgctccaacaacctgcaactatgatgatacaaccgtccttgatgtccctatagngactttatctattaacttattg

SEQ ID NO: 252427 - DNA, 438 bp, Glycine max
agcttgccgtgagaagatgcggatgtagtgactcattgaaaggcatgcatgcttttaaatattaaatttatagttaatgtcatgtcagagtacatacaagctgcgtatttagcttttcatgtagctattgcataatgaatgtgtactcttcccattaatttctggttacttgagttagatgcatcatgcatgtgtacagaatttacaactctgtcaactgagatcattgttaggcatatgacttcttttttgataaattaggcatatgacttctatgagtgcaaggtgataccaactttcataaattgtcaattgtactcgtaccatttctttcataactttctattgtgatgtcaaaagtggtattagtttctagctacttaagatgactaggtatatacaatacttgtgtaacaatcacatcctcaaattttgtat

SEQ ID NO: 252428 - DNA, 433 bp, Glycine max
ggacgctaatatgcgtactctatggcatttttgttggctttgtaacgacatatatatcgtatttaaggtgtcttgaattatgaagcatgctccacatgtttcatttagtcatgatatcttctatatccaaggtgcctcaatttgtgtcccagatataaaaacttgtcatgttatttaaaatatttactcggatttttttgttcaaatagcccttaacagttccccttgaaagtcaaaatgctatcctattttcttctatcatctcttgctttaaagctgggctgagtttattagttcaattgattgagagcatttgtatgagtgttataaattttttacaatcatgttcatctcaacagtttaaaaagactggacagttctaatatcgccttattttcttccatcggcatcatcacgttgcataattaacttc

SEQ ID NO: 252429 - DNA, 442 bp, Glycine max
tgcggctgcagcttctcgggccatatctgtttattttaaatttggaaagttagttttaccagtgggatactattcttaaaacaaaaatgacgtacaacctccttccataaatacaaacatcaatgtaaatttagagcaagcttatgcgcatatttccttacaaatgttctcttgcacaagacattctattaaccgaaaaaaatgcacccatatacaatcaaggcagcttcgttacctagattattttcacgtacttccaaggtgtatttgttacttacatcacacacctccttggctaaattcacatacatgcatactcaaagcattttgtggtaccaaaaattgcacatgtgcacatcttggtatttctaatacctatacatacacaaacttcatgatgaatcttgactatctacacaataaggtgctacatcttatgctc

SEQ ID NO: 252430 - DNA, 449 bp, Glycine max
  unsure (1)..(449): unsure at all n locations
ctttcttcctttcttataataggggttgtttgttatatctaaaacgnncaaccctcctggcatctgagattcacttaaaattatctgagaaaaattgtttccgtgaagaaaatccaagccgaggtgcttactgaacgctttcgtgacgtttccgtgggtgatttctcgaagattatcaaccgctcttcgtccttcttcggtctttaatgcagaagttcctgaattcgaatttttcaatacattctatgtacccttagcggtcctcatttgtttcgcgcgcttttatttttcattcatttacttgtcggacacccttttgacgtgcgttattcatttatttaagtcatatttctaactaataaaaaataaaatatatattgccccgggcattcttattattacatcctttaatttctgttaaaagaattctaccgtctggcatcccgaac

SEQ ID NO: 252431 - DNA, 449 bp, Glycine max
  unsure (1)..(449): unsure at all n locations
agcttccatcactttccttngttgattcttcatgaaatgaatttcttgagtgttttcttcaatagggatgcattggcctgtctcatgagcttcaccacacatggtacaacctgtgacctgcaaaatagaagaatgtgtaggttgtccaattgataatttagttggcatcttaccaagtgtttctgttaggatctcaagttgcttagatagcaacttgttatgtgccaacaaagcatcgtgtgatgttagctccaataggctcttctttgtgggttgatgggttctattcctcggaatggcatgatcactggctgacatgttctctatgaactcaattggattgtggtctcagcccatctatgaacatattcagttggattggctcggagaatccatgggtaggagttcttctcagtaagtctttgtatctctctaatgcctcacttaag

SEQ ID NO: 252432 - DNA, 440 bp, Glycine max
  unsure (1)..(440): unsure at all n locations
tgtagaatggctagacatgatacatgtcatggcttggtttggttcaaggataaaagggatgccccacattatttccatgacacaaatgcaaaaatgatgatttggaaacttcatgcaaaacttgtcatgcatgcatctatgcggacactcaaatgtcaaatttttatggtcatgtgatgctagggctcacgattcatttcctctatttttaatcaacccaatgtttccaaaatatgttcttttatcaatttgtgcattcatccgagtccatttcgggcgtccgggaaatttcacagcattcacccttcaggcgtagacacatttcccaaaaattggttatggtcacatgaatttttcacagaanagttggaaatcgtctcttttcataagcatgtcatttntagctagacaacttaaatttctttttttctccctcttct

SEQ ID NO: 252433 - DNA, 284 bp, Glycine max
  unsure (1)..(284): unsure at all n locations
agctttaagaacaaannnnnntctctctttttctctcaaccgntcttcattcttcntcctcttttcacttctgggcttccaaattcttgcacaaaaatttgtgccctttccattggtgatgaacaatggaggcttaacacttaatcaatcaaaggatccactcccagccanggctgaaaattggaggttttggttagaatttctaaactttctgaaaggcatctttttcttcaatcctattttngatgttcatgagaatgattatgctcccgataataaatgga

SEQ ID NO: 252434 - DNA, 421 bp, Glycine max
tctagtctttaattctgttgacatcttgttctagatagtttatgatcagaaatgtaccctgcacaaaattgtgaaaagattctattgcggttaacatattttatcatgaatgctttataggaaagacttcacaacatatgcggatgtgtgttttagagaatttggtgacagagttaggtattggactacggtgaatgaggccaatgtttatgcagcttttggctatgatgttggaatgttaccacctcagcggtgttctccctcccctatatttaactgctccagaggaaattccacaactgagccatatttggtagcccatcatatgttgttagcacatgcttcagctgttacgttgtataggaagaaatatcacgtataaattatctaacaaatgcaccactctattatgtcattcatt

SEQ ID NO: 252435 - DNA, 345 bp, Glycine max
atctgagccaaaggagcagcacggattggcgagcagccaaccaagaaataccgaaaaaaggtttatgacctgacagacaaaagaggccaactcatataaactaataagcacgacaagagaacagtattccaaataatggcaacccattaaactgagtgcactagattatactagaaaatataaaaggggaagagaattcatgcatcggaaacctataaccgaataaagcaacccaaaaatattgaaaaacactattaacatctcctgaatttggagctcgccaagggccacaccttaaaaagaaaggaggctagtgaaattccgagcacatgcatacgcacacgc

SEQ ID NO: 252436 - DNA, 363 bp, Glycine max
tattttagcccattttatagtcccttaattgaactgtcttctgtgagctaatagaaagacctactatagcacaatggcagttcataataactctatcttcacagaatacattgacatgtttacaatgtctaatggttattatagaactcacctactttgcaggagttgataggtgagtgatcggccactgggtcttgaattaaccttaaaagctctccatgaccaccttttgatccgatactgaactattgcagcaactccgctacaaaaattattgaatatctcaaaatagggaaagaatcaataatataaggatggattatggagttatattacaactatgattagagaaaactacccgtc

SEQ ID NO: 252437 - DNA, 436 bp, Glycine max
  unsure (1)..(436): unsure at all n locations
cagctntggggctgagtacctatataacattcaccagggttttagttatacgagtattttcgaagaggagaaaaattctaggattttagaattccagtttttacagttcatgcgaactgttcacgtagaataaaattcgttttctacaatttcgtttctgctccaatctacaatttcgttttctactgattaatggaaggctaagtctccagcgtttctttctcttgaggatcaagcacagctctctttgaggttttgttattactattgaatattgatcagtttttcctcttcaccaattactctttatttgttgctattaatccatgcatgcttagtgcttgattaattgtctctgcgctctaattacgttcatgcttaatgatcnagttcattcatgaattaatggtgtatatgttgcttaatcacataatga

SEQ ID NO: 252438 - DNA, 282 bp, Glycine max
gatgtcctcctccgttaaagagagattggggaagcgtgctccttgactatgaagcacgttgattcgagaaattgtgatgattacaagagacgttgacgctacccccatggattgatttcaggatcgctttaccagtgatcaagatcaggagtaattccaagctttgtgtaaagaaatcggcaatattcgatagtccagagaagtctgatattaatatgcgtgagaagatttattccagagtccagagatgatatctgtatacttcccactagattattgaaa

SEQ ID NO: 252439 - DNA, 455 bp, Glycine max
  unsure (1)..(455): unsure at all n locations
agctngtccaaatngacagtaaagaaaggtatttttatcatcaatcatggcaaggtttgtgtgaaagtggagataacataagttgtagtatgacttcaataatgattctggaggtagtttaatacaatgggtacatgccatgagctatgcatgacgtanaaatcattgaaagacgcattacggaagacaacaagtgaaaacatacgtgcctacactattttgagatgcagaaaccaaaaataatgaagatcaatacgatgctacaatatgttgatgcactgtcatggaggactctcttcatgtaacaaatgtatttggattataagggagttaagtcttacattaacatcaaagccttgaaaaggaaaaaaagtcgtttatgtttgcaatggtccctaaactctcatttttacttggacatagcatattagtagcttggacatacatacttatta

SEQ ID NO: 252440 - DNA, 462 bp, Glycine max
  unsure (1)..(462): unsure at all n locations
ggtactatagctgcacttaatcgtggctgtggttattttatgcatatgcaacggagtagaagggggtaaagacaatatattactacaattatatgaacagaaaaccattgcacgcaatcaccattataggatttgtgattcattatgaatcacagtagcatgaccgaaaataaaatagccgctgtgtaaaataacataacaattgtctcaaatacatgaaaaaagaaatactcctacgccatcattagccgtttntacttattgccgtctttaaaaaaaatgttgcccatttttttcgaattgtggtgatcatgtcgatgtccaacggtgtgtcattagcaaaccactgcaagtattcataattgtaagttagtactgcaaatataaaaattcagttccaattgcactgaagtttatgcataccatggaccagtcactctttatgtcgctggctatgatgtt

SEQ ID NO: 252441 - DNA, 329 bp, Glycine max
gtaactgctatccgtgacaattttccgtgtggtgagttttgcgaaagatttacaacgcgttcttcgtcggttcggcgttcgtctttcgtcgttcgtcgttcgttcttcgtcgttcttcagtcttcaacaggtaagttcccgaaatcgaactcttcgatacattgtatgtacccttagtggtcctcatttgtttcgcgtgcttttattttcatttcatttacttttcgtaccctcttttgacgtgctttagtcatttatttaagtcattttctgccctaatcaaaaataaaataaatttccaccgatcattctgattgtaacatccttta

SEQ ID NO: 252442 - DNA, 405 bp, Glycine max
tgacgggaggctggaagggcccacgtgttccccattgattggtttgcgtttattgataatattcttctcaattatgatctgcttccttgggtcttgcctgactcttgagattgtaactgtatcccttcttactcttttattcttttgtttcccattggatgatctctccactattgttggtgcaacatctttatgggccccacttgcagtatcatgagcatttaaagtgatcggattaatcttctctttcttctcatttagatgagattggcactgatttttaggattcccatctttattccccctggctcgattcttgctggttttgttatggggtttgcgctaactacgagccactccccatgcaaacatcctcttcattataggcaacactttgctataatt

SEQ ID NO: 252443 - DNA, 450 bp, Glycine max
  unsure (1)..(450): unsure at all n locations
agcttggccaaaactaggtaataaaagatgttttggttcatattccattaagnccatgcaaagattagataacactataacaatcatgaagctctcataaaaaaattacctctttgatttatggcagatactttactatcaagcaaacatgataaataaaattagaaagacacccatgaaagatgaagacacacttgagaattttcattctagtaactaatttgttagaagatttgtaatgctagatcttcccacaaccaatctttcctgaaaaaccattaatgatctaccattcttatttcaaaaatattaaggttaacttttatgaaccataatcatggatcatgttattcgaaagaaaatntataccatcatcaagaaggagaatgatactttaataatgatacttcaaattgtaccatcaacagggcaattttaagtttggaatga

SEQ ID NO: 252444 - DNA, 454 bp, Glycine max
  unsure (1)..(454): unsure at all n locations
tgattcgcttgctcttgcaccatagctagttgttattnttatgtttngattctacatcaaactccatggagaagagtttaagaaatacctatatccatggagttcgatcaaacaaacacagttgtttttcttcacaactttgcatgaaaggttttttatgcgagaccaacaccggtttaaagatttctttggtatctcaatccgatcagattatggaagtttaatataacttacgntcccatctctcttcatttcattgatattttgactttaccaaatagaacctttgagtggtaaatatatcattgtgaatcaatttagaacagttctttgatatatcattgctattgcattgccatgaccttactcttttctatgaattaattctgtgtacaaataaaacacgagagggcaacaacataattaaacatatctctcatgtctaaacatgcct

SEQ ID NO: 252445 - DNA, 432 bp, Glycine max
  unsure (1)..(432): unsure at all n locations
angctaanaagagtcaggatcacctcttattttttctaaatttacaatagatgggcatgctggtagaatttcatttatcacatccatgactgagcatttttgtgctggntgcaatagattgcgactactagctgatggaaactttaaagtctgtttatttggtccttcagaggtaagttacactcaaatcatcaaagttcagtatattatgcattccacttaaatttggtgatggcaattgggctagaatctgtgatgttgcataaatttggtgaatctgtgagactacagttgaagacaataattgcaggctttctaaattcatatgggtaaatgaattttataattangtgatgtgggtgaagaatctgggattaaggactcgctttttacgcctataattgtnttggagagtaaaacatgactattgtt

SEQ ID NO: 252446 - DNA, 398 bp, Glycine max
  unsure (1)..(398): unsure at all n locations
actcaatcttatggtcatgttaaaccaatgcttggtggaacnnacacattcattgtcatgtttgatcnctacccacgtaatgggggtgcaagggcaaaagtggcatgcactaacatttcactaaggaccaaaggggaacatgtgggagattgggagcatttgacattaaagataagcaacttccatggagaattatggaaggcttatttctcacaacatactaagggtcaatgggaggatgcatctgagcttgagttccaaaacggtaatagacctgtggcttattcttcattgcatggccatgccttgttcccaaaacctggcctatatatgcaagggatgagagggttatgtgtaaggaatgatgcatcacacagtgatgcagtcatgtgatatgc

SEQ ID NO: 252447 - DNA, 443 bp, Glycine max
  unsure (1)..(443): unsure at all n locations
agctncaacggggtgtttgggttgatgtgnggttattccattcactgcatatcgnagctttccattaattatggctntagaatttgccaacacaagtgtcctttgaacagggatggttccatagtggaatgagccctgaggatttggtcgagctgcatttgctgtcaaattcagtcttcaaaacaacacaatagaacacagtcagagccaatgatcacaagatccccaattatttttttttttgtttataggtaagaatcaaaaaattcataaaactgatacacattactgaattaactaagaaaatatgttctatttaccttttaatttaaattnttaaaaattataaacttagaaatgtcatatttccatttcattttattttttatattaaatatataaataaagtaacaaacgtatatctttttactattttatataaa

SEQ ID NO: 252448 - DNA, 470 bp, Glycine max
actaagcttaaaaaataagaataagtagtattatatacgattgttagtatatatttccattgagctggcatatatgtactagttggatatgaaaatgtaatcgcatataatgtttgaattcatattacatattgaacacatttctatttttagattaccatatggtattaaaatgcttattaagtagaactaaattgataaagttaataactaatttaaaaacatttttcataaaagaaaaaataattaaattataaatcaactaaacaagtcatgcaagccttggagttttcaatcaagccaacctcgagtcatactttgaataaatgagtcaagttcgacctttcagttagacttgtttaaataaatgagccaagtttagtttttgcaaagctaagactacaatactcaagctcgactaaattttcatctgctactgccaaagagatgctgatgccatatgatatatt

SEQ ID NO: 252449 - DNA, 397 bp, Glycine max
  unsure (1)..(397): unsure at all n locations
ttcttgtgttatctccataattgatgttactagccttttagcctctggtattggatgatgaaccttcttttctcccatgcttccttatgacctgtgaggtagtgagtcttgatgtacttacttgttaactctcattttgaaatttatttgttatgctgtataaagaatagacaaatgttaattgcattgttatttgaaatatgtaacagtttctatccatttatgactatgagggcgcttattcattgctttgataattntcttgcagaaattttttcttccagggaggttcatatttggaccagatgtgagatcactggcattgacaattattcttatcgttgctcctgtcgcagatatctgtgctttgttgccacaaactgatggatgcatttct

SEQ ID NO: 252450 - DNA, 372 bp, Glycine max
  unsure (1)..(372): unsure at all n locations
tccttgcaattactccttatgcaccctacaaagtagtcttttctttgtnaccatagatcaatgcgaccttaattgaattgaaatcgaaatctatcatcatgaaattagaaattaacttgtcattaaattgataaacttggaaacttaattaataaatattatcttatctgtaggaattaaataccacatcatatatttattatattctcacatgaagttcaatcatgtacactaaacatccgtattagttaatacatgattaatcactcactgaagttgattaatttaacacgcaaatttgatatgttggaactggtgattctatatcataatttatttttgggtcgcggctaaaaagacttccttgaatac

SEQ ID NO: 252451 - DNA, 425 bp, Glycine max
  unsure (1)..(425): unsure at all n locations
agcttcttaatttcagatgatgcatatggtgttgtatctacctcatgcactcctctaatgactatggcatcatttctggcgctaaactgctgggagttggaggccatcttctcaattaaatttctggcttcagcaggagtcatgtctccaagggctccaccactggcagcatctatcatacttctctccatattactaagtccttcataaaaatattggagaagaagctgttctgaaatctgatggtgggggcaactggcacatagtttcttaaatctctcccagtactcatacaggctctctccactgagttatctaatacctgagatatccttcctgatggctgtggtcctggaagcagggaaaaaattntctaagaatactctcttaaggtcatcccanctcgtgatggaccttggagcaag

SEQ ID NO: 252452 - DNA, 481 bp, Glycine max
  unsure (1)..(481): unsure at all n locations
acgcgatactatagacaactcaagctnataaatatatttacatgtatcaaatatatatattatttataataacaattataataaatgtatcattagataaatatttatttaaatatatatatatatatatatatatatatatatatatatatatatatatatatataagcacatataataattaaatgtactaaaaacattaacatgaatatactaaaatataaatgtgagtttaataatatatatatatatagaagtaattttacatgtatatatataatttgagtgattaaatgcattaaatataaaataataagaacatgctaaatatatccttagataaaaataaaatatatatgtataatatatgtacataacaaccaagaagttatatacatatatacatatatcctanatgcattccaacgaagccatgataacccaacagtgagagacgaaagttggatctcacgcactacac

SEQ ID NO: 252453 - DNA, 373 bp, Glycine max
atcgtggtcatattgacccaaattcatactgtcaatgcaatactacaatgccagtggattaagtctaatactttgagaagagctctgctctgagaactagaactctgcctctcataagttttctttatgtcactttgcattttctcaatcggaaaaacattttgtgtgttgggttttatcaccgcttttgtttattagctggaaatcagttttagtgcttaatattagagttatgtgtttatttcatttccatttgctctctttcatcttttacattggttatgagattaaagttatgctgtgcgctctcttattatcctagttaagctgttctgataggtgattatgctaattccaatatgagctgaacatc

SEQ ID NO: 252454 - DNA, 425 bp, Glycine max
  unsure (1)..(425): unsure at all n locations
ctcagcttgcggatatccctggccgancactattttcataatttctaatgacgncaacagcaatacaagattcacggttggtatatctcataggaataggtgcagctataggctgttttctactcatgcccagaaacaccaattacatgagaaacctgtggtggttgccagataccaccttcctccttggtttaggtgggtgcccggtatctctgcattgtatttattcgatatgacgtgtgcttctcatctgaatgtactataaagtatactgattttttcagaggtttggtattgtttttggttggttgagtttcagtgttgctccaatgatggactggacagaccatcactattggactctatcgcgcctcatatctaaacatgctttgctgacaccgagatgcttgcattgaaacaatgtt

SEQ ID NO: 252455 - DNA, 437 bp, Glycine max
  unsure (1)..(437): unsure at all n locations
agcttcttcagtccctctggtatctatttatgctacacagntaacaaacacaagtcaatgacaggcaacactctntttgcaacaattgttgttaataataataaacaaaaaaggaactactcttttctaaaaaacggttgtacaagatgtgtctgccaagcaaggaaggtgttaagggcctactccactaagtgaatctctttattgggtatagggatgcaaacatcaatatctcaaacttcatcaatacctatgttcaccaaatatttgcgcaaaaggatgtggtgcacgattattgaccccttataaactctttcaagggcaactaggcagggagaattgtcatcatgatacaacccacacttgtctaatgcatccgagtctgggtcatgctctgagggatcaacacaacttccctttatcctgacatggacact

SEQ ID NO: 252456 - DNA, 406 bp, Glycine max
  unsure (1)..(406): unsure at all n locations
cgcgttctataaaactcagctactcttcaaggactgaattgcccttaataanatttcagcacatgtataatgngacattttccatccttctcccaatctcgatgatgctgtgctttcattgtattaaagctaactcttttatccaacacattcacaatgaaaatatttttcctcattgaatctcatgcactaagtttcttgtctgaaacatgaatatttgagaacaagtcataatattcccctagtgagaatcccacttttagggctccttgtaccacttatttatagataactccttttcaattaatgcaaaggtggctacctactttgtgagcatacttcatagaagaacaaacaatgtttacttatacgacggactgtaatttatgaaacttgatctatgatg

SEQ ID NO: 252457 - DNA, 443 bp, Glycine max
agcttctcaatgtaatcagaagtaggactacaagaatgagggttatttagaagttggaaatacaatcatgtttttttaggttaaagtgaaaatatcagaagctgtatatctcagaggcatgatgctaaggataacttgagtcaaggggtacatatcaaaagctacatgtggcttaaggatcattgaaagatgcattgcaattggaacatgaagacagacgtgtcttgcactccaaaagcccacactagtcaagatgcataagttctaggacaacattggtcctaatgttattgttctttgtgatccttgacatagtctaagtcataggaactgaaatgagacaattgtcatagccgaaaaaaaccaacaaccaatagtagaagaaagatgttagaaagtagtaatcaactttctcaagaatactggatgcataaataatctct

SEQ ID NO: 252458 - DNA, 452 bp, Glycine max
gcttgttagtgtgtgtctaaatgtctaaaatataagaaaaattatgtaataatgtttatttgaagaaaattttatcagtgaatataaaatattttgaatatgaattttgtagtatttttttaattagattaggttgatgttaatgatttattagtgtgctaataattgatgaacgtttcaactttcatttaaaaaaatttgtagatcatatttatttgaagaaattattttgagtacgaaatttattttaatataaagttgtagtatttttttagttagattacgttcatttttctgtgtgttaaaaattgataaaccttgaagttggaagtgttcattgatgatgtttcgtgcttcatgtatcatatttaatttaatacattcgtagtaattttgtaattacctatcttcatttcgaagttattattggtaagaattaattattttactac

SEQ ID NO: 252459 - DNA, 447 bp, Glycine max
agcttctttgggaccttgaacaggcaactaactcctctttcaaaaccatgctatgtgctcgcgactggtccctttcttcctttcgcaacttgagttcactattgctaccccatagagctccgcgaaatttgttccggccatactcttccctgcgagccctcttggtctcttgttcgagggctcttgcggtaattgcattctcttcccgtaacccggcacactccttccgaacgtgtgtagcggccaacttgaacttctccttggcaagttttgcctttcctaactcgcttttgagagcttggacttcttcgtcctcttccggtgcttcaaaactctcttcgctgacgacttttaacttggcgagccaatctaaacctcgtatatgaactttcagccattcgtggtacccaccaatgatgccattacgaatgcctctaagctcttgat

SEQ ID NO: 252460 - DNA, 397 bp, Glycine max
cgagcgtctcaatatattatcggcctgagtcatacatccgaactcagaggtatggctgatgcgcttagccttgcgctacgatgtttaattttcaacatctcgatatgttatgcgcctgagtcgggcatctgagtgaagaggtatgccatatgagataaccgagagctccgctggtcgatttcccaccggcacgattataatagcctgaaggcgacaacctcgccctaggatgtgggacgtaagagcatacctgtgcctgaatgtttaaatttgaccctctagagcaatgtagcacccgactgccacaactgagggaaaagatgtgccatatgagacagccgtgagacgacgcggtgcatatttaaccaacgaggcattatattgtcttgtatcggac

SEQ ID NO: 252461 - DNA, 432 bp, Glycine max
  unsure (1)..(432): unsure at all n locations
agcttcaagatgagcagtcatccttgcagcccataattcgtactcttcaccatcaaaaattggtggtgaacctgctgtgtatgatgtttctccctccattgtgatttctctcaactcatagatcccttaaagctaagagctctagataccaatttgtttttttttttaataagagtaggcagaaatattaaacaataaaagggagcataaagaaagaaattgagactgcaaaggcttactttattctgatatgaagtaacgtatttaaaagcatggaaaagatagcaactgctaacaaaaagataacatcactaacagaaagataacaccactaacaaatcatgcctagagaataggatcaaaactgctttatcctatcagtcaacatgacttttattnttttcttaaaaatagcataaaaatcttatctac

SEQ ID NO: 252462 - DNA, 381 bp, Glycine max
  unsure (1)..(381): unsure at all n locations
cctttaataaaaantattacacctccttatcttttcagtatataacgcttctgaggagaataggtgatgttgatgaactaccaagagcctaggaaaatacgagtgaactctttcctttgagccttgcaatgtggcgccaatggatcaatgatgagctttctctcaattggtccttcactccattcatctttatcttgattttcttttctttttccactcctattaggcatgatttctttcttgacctactttcgctttctttaccatgcagactcgatgcttcctctagaattctcaagctttaccaacgaggggtgtttgattattttggtggtatatatgttacttattatatttcaattcccttttttggcctttcct

SEQ ID NO: 252463 - DNA, 460 bp, Glycine max
  unsure (1)..(460): unsure at all n locations
agcttatgngtatgtcctagatttgtgagttattttaccttaaggaaggtaaaggtaccaggacaaaaagggtataggcagccagataagttatatacacattatctgtatataaggctccaagataattcaagagactccatagatttcatggaaaattatttcagtgtttgatgcacagctcaagaaagaatatactttttcccggggtagccaaaggtgaaaagcagccttaaggtgctagggggtgtaactccttcagacaagaggtggcaaaaagcacacgccttattgtacaaagtagagcatctacttcaaatgggagttctgtgtcttgcgcccaaccaatgcaagacctactcttttgcatattgcaaaccattcacatcaggagaatggaaagacttggctacaataccagttaacgtagaggtaagtccactcttgataaccaggatat

SEQ ID NO: 252464 - DNA, 429 bp, Glycine max
ttaatggaccgtacggtatgtgctctatccaaatgcttgttctattcttatatagctgatattggatgaaactggttatcaagtgtctgttcccatattcaatttcactataataatctctattatatcctctgccagcttagttttactgccattttctaaagtgaaatgtaatatttatcttcttgtaagtttgtatatttccttggattgtaaaattgattctttttggcaatggtctctcttcagcttatatctctggatatgggagcacttattgctggagcgaagtaccggcgagaattcgaggataagctgatagctgtactaaaagaagtgacagactctgatggtcagactatccttttcattgacgagattcatacacgtcgccggggcaagtagtaagcttcaaactctaccattttc

SEQ ID NO: 252465 - DNA, 461 bp, Glycine max
  unsure (1)..(461): unsure at all n locations
agctngtaattatttgttggtataatttgtcttgtttcattangctcttaatgtctttagaggttacttcctcgttgacatcataagccagccaatagaagaagattttcaagatctcttgtttgaagcaatcaattccatacctgacccccaagaaaagaaggtttttctggaaaaactcaagaaaacattagaggtaaaacctagacaaaaggattttatcacaaacaacaaatttgatgtaagtaacatactcaagagattagaaaattcttcaaccaaaccaacgacaatccaagatctccaaacagagataaacaatctaaaaagaaaggtaaaagaatttcgtcaacaacaagaaattcatcagatcattctttctcagcttgagggagatagtgattctgagagtgccaacaacagtgaggaaaaccaaccagataatttagaagatgatatgt

SEQ ID NO: 252466 - DNA, 463 bp, Glycine max
  unsure (1)..(463): unsure at all n locations
actcagctataaaacaaatgccttatcatttccaatatgatgttaattatgtctcatcaacaagaatcaagccaaggctattgtgcaagcaatcaatggggcaaaacataccaaatgattataatgatggatggctcaaattctcacaaaggtaaaatcatcactttcaaattgagctttcaaaactatcatgacatgtagagaagaatcaaggatttcaagtcacaaaatgtcaagaacttttattttcaaaacaattgcccatttttttgaacatatcctataattcaaagaaaaacatgcaaagtcatacgtgcacacgaaattgacccaaaatattaaactgaaaatccgacgaaactaacaacattaacaaattaacacaactaacaaattaacaaaaccaacaaaactagcaaaaccaaagaacactccccnccccccccaatacttatacaacaca

SEQ ID NO: 252467 - DNA, 439 bp, Glycine max
  unsure (1)..(439): unsure at all n locations
catgcaagcttttatgtgaaaggatgtgactctttatatttgaatttgaattncaacgntcacaggcactagtaatcgattaccaaaactttgtaatcgattacaactttttgaaattaattggaacgttgtaaattcaatttgaaaactttttcaaaacaattttgctactggtaatcgattacaacaatctgataatcgattaccagagagtaaaaactctttggtaaacatgttttgagaaaaatcatgtgcaactcaatttttgagaaaanttttttcatacttatcttgattaagccttctcttgattcatgaatcttgagtcttgaatcttgatgttgattctctagatcttgaaccttgaatcttgattcttgactctaaactttcttcttaagtcttgaattcttcttgactcttatcttgaactcttgaa

SEQ ID NO: 252468 - DNA, 424 bp, Glycine max
  unsure (1)..(424): unsure at all n locations
cttctacatttggaagctgataacaagcccatgagacattctcatagaagattgaatttctaatgaaagaagaagtatgaaaagaagtgctcaagttgctacaggcagggctcatctatccaatttcggacagttcatgggttagtcctgttcaagctgttcccaaaaagggaggtatgacagtagtcaagaatgaaagagatgagctaattcctacaagaacagtcaccgaatggagaatgtgtattgattacaggaagcttaatgaagccacaaggaaagatcattacccgcttccttcatggatcaaatgcttgagagacttgtagggcaatctttctactgtttcttggatggatacttangctacaattgaattgcagtagatcctcatgacctataaaagacaactttcacatgccct

SEQ ID NO: 252469 - DNA, 402 bp, Glycine max
  unsure (1)..(402): unsure at all n locations
aaaaaaaatncaggcacatcaacattatttagactcttttttttttcgattgataagactatgtttttcattcaataactgagtaatatagctagtgattattacctagagattattggtaatggaagtaataatgattattaaaaaaaatcattttagccaagacgctactgcacatcaatggagaatccaaaaggactttatttgttcacaaatgcggataaaatataaaaacaatattcaatcgtattatctctgttaattaaatttcttacagctgtctatatttttacctaatattaacgacattttaatgactattaagaaataaggaatcaattaattctttaaaatactgacatctcttntaaaacacttaaagaataaagatgtatagaataa

SEQ ID NO: 252470 - DNA, 393 bp, Glycine max
gaacttatgggttttgaatatctattgtcggtgaaaacgccctcttaagggggacacatggagaggagcattcttcgcctcatgcatacgcgtaaggttttggctcctttgaagagctcctactttggagggcttatttagataaatcttctcacttctggttggagttgacgttggcaacctatgaaagagattttggtcaactttggaggttcatgttaatatggaataaaaaatgagaactcaaaacttttcagtttcttatgacaagaacacaaatacttgtttgtttgctttctctgtaaggtatgggaacggtttcagttggtattgtaacaacaatcaatatattttcacctttcataccataattgggacaaataattcgtcatt

SEQ ID NO: 252471 - DNA, 418 bp, Glycine max
agctcatggtccctatatatcgcactgggttgtttagcgtgtgtctcgcccatatactacactgttagcacggcttatcacagagcattcgactcatgattatcatacggtagcccatcttcatcgggactagggcttctttttgtcgtcaatagcattatcttcatggcactgggtttcgtcattggctacccagttgcttcagcttcaggtaaaaattattttcaaatttaatgataagcccttttatttagttcaattttgataaggacaaaacttagaaatgattccttgtgtatttttagtgtcgttctccggtcagatatagcgtctcgccctcgaaaacttatgttaatatataatggaaacatttatcttggggattattgaggtgaaactccaattctatttagagaat

SEQ ID NO: 252472 - DNA, 474 bp, Glycine max
  unsure (1)..(474): unsure at all n locations
ctatacacactaagcttgaatatatatctcctcctctctctgaattcgagaagtatttataatgtttatattaacaactcgttacatgaactcatgaaggaagatcacttcaaaccttcaaatctttcagcactgccattacgtttgaattttaaatattatagaactgtcaggctaaccctaaactagttgacttttaaatattaaaagatagtttattgaatgtaccaaaaaacaagaggaaaaatatccggtattatattgacaagctggcaaaatattggttgtcctctgcttcgttggaccaagtcaacgtcgatgggggcggccaaggggaatcctgaattcgctacatggtaataacgagaggggaacgaatcttctaatgtgatttttttttttnttaccaaagaaatgcatatatggacccaatgtgtttgtcaatgagttagctttggtaggagaaagtagttc

SEQ ID NO: 252473 - DNA, 375 bp, Glycine max
cacagcagcaccaaacgaccaaccatgacctcgcacgtgccctacctctgtgtgcaaaacaacatttacacgccctcttctgccagtgacagcacacggtcaacccatcttagccatgtatcgaaagtataggtggcccccccattatgcccttaccccaggttttggggaccattccaacaataggggacaatgcctctgttctaaccccgtttactagacaataaggcattccttcgttctagaggaactatattgtgttctcaccaatggctacacctaccacacctagggcagaggctccaattgtctccaaacatgtgctctctaataaaaacggggatggtgtaaacagaggcatcctgaacactgatg

SEQ ID NO: 252474 - DNA, 449 bp, Glycine max
  unsure (1)..(449): unsure at all n locations
tcatccttagatccctcttgttggactatatctcaacttatatagctcatgaaagctcagactaatttagtctaagctttgtcctcagatctctcttattgaactagacttagaccaaacaacattattgtaacaacatatttaaaaccaaaacttaatccgcagatctctcttgtaagactaagtttcaattctgcttcattcaagttctaaggcagcaatacatttcccaatgctaaaatcacctaaccaggcacacaaatggttgatcagaccaagagcatacaaaatttaagcactgaaagaagcattgaacacaagaaacacaatcaattagatattaaaataattacatcagttgttctttagaaatccncaacaagggtgtgtagcaagccattacaaaaaaatccctaacaataatgagattgcaaaacctacgtatctct

SEQ ID NO: 252475 - DNA, 444 bp, Glycine max
agcttatgggcaggtacggacattttctatgttcatgatccattgatcatcatcccatgtcttgctaaagacgttaaagaagcgctcctaggaggtagcctagtatctctaattttgctcttttaaattcttgctttatacttgtttgttttcttgaattatatcctgaattcacctgagtttatatgccactataggattttagaaaaaaaatatatacataacaatgaataaacacaatcctgcaaaaagatttttttttttgcaaaaaaaaattaaattcgctcgcctgggcaagcgtaactgatggaagttttaaaaaaagggggggtgaagccattttcacccatttcttccccaaaactctaaaccaccaacaagcttataggagtcatccttggcagcagccccaagcctccattgtgcacttttgctttcattttt

SEQ ID NO: 252476 - DNA, 454 bp, Glycine max
  unsure (1)..(454): unsure at all n locations
tctatcacaganatctccaaatagaatatttatcctatttttcccaagttaatattaagacaatctcaattagcaaactaaacagcttttcaacagaagacaagtgcctcgaggattataataatgagtaatcctttgtattctaattctaatttcaaaattacataagcatcaaaattttgaggcataaaaattcaaattatagaacaaaaacgaaaaatctttatgtcgcaaaattataagaataaatataaagaattcaatctagtctcaatatatattcataaatttcaaaactaattgggtttatcatttagtttttaacctctctcaaattggtctaagaccttgaagatgaagaaaatagttgattgatgaatgagagttgtaacatatgatctattttattagtagaatctcaattctgcagcaatgggattcttttgaaccaatc

SEQ ID NO: 252477 - DNA, 410 bp, Glycine max
tcttgactttatggcatgagattaagtgtaaagactggacctcttgctagttgttattgatgaaaagcttaaacacttgtgcttgagtgaaacagtagtcgtgagactgtgggttaagctactttccttgatatcgggcttatccctaactcccattaattgtacaggatacattatattcttataacatcaggcacctaataggaagaccaacacgttgtctacttgtctttacacatcattactcacatgattttcctttttaatagttagtttacatacctattcatagtccacacatatcttttcatacaatacacctattcactgaatatagctttaccaagtaacacaagttccccgagagttcgatacttcggtcttaccattttatactacttgtgcgagct

SEQ ID NO: 252478 - DNA, 416 bp, Glycine max
tcttccagaacatggggagccattggaagatctgaaattattaatcatctggtgggcaaacttaattacctcactatcactagactagacatcactttttgcagtcgatgtacttagtcagtttctgaaagacccgactggtactcattggaatactacaatgcgcatacttcgatatatcaagaatataccaggtcatggatttttatacgaagacaaaggcaatgccaaagttgtttgttactgtgatgctgattaggtaggatcactatcatacaggaggtccacttttgaatatcgtgtctttattggagggaacttgatctcatggagatgaaagaagtagaaaattgtggctaggtccattcccgaagctgagtattatgccttggcaataactacatgcaagatcacat

SEQ ID NO: 252479 - DNA, 433 bp, Glycine max
agcttaaacattcaatttcgagcttctctatatattatgggactcaatcagacatccgagtaaaaagttattgtcgtttgaatttgctcaaagcttaaacattcaatttcgaatgtctcgatatattacgggactcaatcaaacatacgagaaaaatgttattgtcgtttgaatttgctctgagcttcaacattcaatttcgagcgtctcgttatatcacgggacttaatcagacatccgagtaaaaagttattgtcgtttgaatttgctcagagcttaaacattcaatttcgaatgtctcgatatattacgggactcaatcaaacatacgagaaaaatgttattgtcgtttgaatatgctctgagcttcaacattcaatttcgagcgtctcgatatattatgggactcaatcagacatccgagtaaaaagtt

SEQ ID NO: 252480 - DNA, 436 bp, Glycine max
  unsure (1)..(436): unsure at all n locations
ntgagccaaaatcctgactcaccataaaccttgacccattgtgagaatgccaatccttaccctcggaagcaaaaaaaaagaagagaaggaaaatttccaatcaaaggaaaaaggagaaggaaaatttccaatcaaaggaaaggaaattcccaatcaaagagtgggagaaagcaaaaagaaaagaaagaaaattcccaatcaaagaatgggagaaagaaaaaaagagaagtaaaaaagaagaaagctcctggtcaaagaaaccagaagaaatgtgccgagaggtccttggactagacgatatctgaacaatacagaattgtcaccaaatgaacaaaagaaagaaaaggaaaccatgacctaaaagtggtcttctccctttgattaccaaccaaaatcctgtgcgctagcgactttttcgccccgcactaaacaaaaa

SEQ ID NO: 252481 - DNA, 446 bp, Glycine max
  unsure (1)..(446): unsure at all n locations
agctttgatcctatcatcaaaccctttgattgtcttggtatacctctgaaggcacttatcctgcatcctgtccaatgccacaaccaaagggtaactaattgcaaaccctagctccaatcgttgcaacattttaccagctcaaccaatcaatacacgaatagagggcaatttcacacattaacacagaaaangaaatatatatataatatatatatgtgtgtgcgtgtgtgtgtgtgcgtgtgtgtgtgtgcgtcaccaaaaaggatatggatgtgagtgattattgtgtcttgtttgttaaggaataatatttatggtgatggccccacacaagcttcttttcaatttgtataagagcacttcaaagacatagcccacttgcacttcatgcgtttagtaattcaatcatagagctccaatttttaagctgttgggtgaagaaagaa

SEQ ID NO: 252482 - DNA, 382 bp, Glycine max
aaaaatcaatggctggaggtgtatttatgcaacaggccatggtagcaatagcattacttagagcaaagataaaacagcatatcatataaacaaattaattttcacagtacacaaatcaaacagatgaaacaacacttgattcttcttagatagggtttggaagtaaacagactagaacaggatgaaacataaaatagcaattgtgttctatgtgggtttcttttaaaaagagaataaaaacaaatgtcctattttattttgtttagtgtgcaatcactgccttatcttattcttgtcacaccaaagctattgttcagacagagacctatatcttattctctaccctcaaccaacccacaatacaaatcaatgcagtagcaca

SEQ ID NO: 252483 - DNA, 412 bp, Glycine max
  unsure (1)..(412): unsure at all n locations
agctnttgctaaagaattattgtatttgaaaacactcatgcatacacatgtacatgcatatttgttatcttgtgacagggacaagatcattttatgcaatggtcaaataccgcgccaaatccaagacatagatgaatcgaggtaagtggtaacgtgaccatgatttgcagcgcaatgtcatttcctgctttcagatacttggggaaaggcacgaatggatgcaaggcccatgatcaacagatcactgtcccgcgtccagctccggagaatcaagaagcgctactgggaggtagcctagtatcctttaaattcctacctattattattgttgtttctttaagatgatgatcggatgcctaacttaccctaggggtttcgagtaaacgaacaccgacccatagagagcgcgtat

SEQ ID NO: 252484 - DNA, 402 bp, Glycine max
  unsure (1)..(402): unsure at all n locations
ctagcacgtngaggatgttttagcatttttctttctttttttttatccgttggaagctaagctgttgcagcatgctgagattattttttttctgtttttatgttaccattttggcacattatggctgttttgttgctgcacgtttttgtccttggactgtggcccttatatattgtgttgactgctgataaataatgcacgtaacacagcacacacaaagcagtaaaagcgcgtatccagttttgcctaaccttaaaaaaggaagaaaagctcatttctctttctcagcacacaaaagcagtataagcacgtatcgagtnttgcctatccttaaaaagggagaaaagcccgtatgtctttcttgaaaatacttctgcatggtattgaaaaaataatctgggt

SEQ ID NO: 252485 - DNA, 443 bp, Glycine max
  unsure (1)..(443): unsure at all n locations
agcttcaggctattcaattgctttagattgttgcacagaagggcaaaggtctatgtggtggtcggcaaaggagcataaaccacagagtctggcgacagatgcagaatttttattcatggccagttgggttaccaggttaaccaaggcatctantttaccttcaagcttcttagtctcacctgatgaagatgaattcgtggctactttatgcactcctctaatgacaatagcatcattgctggaagtttgaagccatcttctcaattaaattttttgcttcagcaggggtcatctctccaagggctccaccactggcagcatctgtcatacttctctccatgttactgagtcccttcataaaatattggaggagaagctgctcaaaaatctggtggtgaggacaactgacacatagtttctttaatctctcccagtattcatat

SEQ ID NO: 252486 - DNA, 221 bp, Glycine max
cattccacaagaagtttaaaaaaggaagggatcccatcggatgcatcatgagaggaaatcattctaaaagtcaaattattggtgatcccgcagatcatgttcaaacaagattattacttataacacaagggcatactgcattgatttctaaaatgaagccctaacacattgatgatgcaatgttagatgacaactaagctaaagcaattcaagaggagctt

SEQ ID NO: 252487 - DNA, 464 bp, Glycine max
  unsure (1)..(464): unsure at all n locations
ttaagtcacctgcggcatcaagcttataagagactaaaataaggattatagttaccgaatgtttgngggaaagaagggtctggtgctcgccttctttggtatagtcctgcatctagatgtatccactttgatctaggaccatggtccacactctatactactccataataacaaggtcattgcttgcgaaatttgtataagatttttaatttgtaaaaatcagttcctttagaacaagagcatgattaattccgtgtaacaaattgtgttagttagtgggagaaggctttcttgttgttgatgtggttctgatttattatgatgaaataaactgcttctcctgcaccttagctaatgatagtggtaggtttattggctaaacttaggtttgtggtgcattngagggactntggcgatgtatttgttttcccaaatacaagtataatggaggcatctatggtgac

SEQ ID NO: 252488 - DNA, 461 bp, Glycine max
gagtagaaacatgggaaccaactcatttatttcatatagaaagtcatatctagtcaaggtctgagagaccatacaagtttcctaacgaattctaattatgtgggccattaagtctatcatatgctgacaatagccgagaagcccatgaatctcttcgggggcggagtaggtgtctgccatcgccttggccttggctaacaagcggggaagttcttgactcccgttcaaggtaagagcaaatcgatccatccacatggttgcctcttggtgtaaagagtctatcacccttcctctagcctctttttccgcgtatacttgagcatactcgtctgcgatcctatgctcgtgggccgtggctagacctaactcttcttggtacttggcgatgatagctagcatgttggtctccgtctcgcataaacgctgagacaagcttcttttggaccttgaacaagcaacta

SEQ ID NO: 252489 - DNA, 440 bp, Glycine max
  unsure (1)..(440): unsure at all n locations
gcatgcagctctgagattgataattgaacttctattgtgtgatgaacnctacattacaaagtatctaactctgatcatagccattgtatgtaattgcttttaggcacggctgtcgaatcttgtcaaattgatgatatattattacacaaaagtgattcttatatacttgtattagtatgaccataccagattttgatgctctaccacatgtctattctgtcaacaccttgtgtggaataaattttccttaattgaactaatctagtttaattcatagttacgtatttggttatttatttttgtcattttgcttctgaaacttagttgtgcttttttctctttgttttccagctcagttgaacattcatggaagaaatccagagatttgcttgataagattggtagacacggagatctaactggctatagagtatcttgtc

SEQ ID NO: 252490 - DNA, 335 bp, Glycine max
atattagaccttaatatcaacgcctgcgagatgcttcatcatatctatgatgacgccctgctttcatatacttatctgtggagagatctatcgttctctatacataaaaaaacggaccgatcgagcgggagagatcctccttgcgctcaaagtgagactgagataaaaactactacttgcaaccccacaacctctattgcttaacaacttaatcaactgatcgctttcttgatgttctcaactcgaatccatctgtatcagtgactcacacgctttctacccacccaattactaatattgagactaataatatttatagattgcattgcattaag

SEQ ID NO: 252491 - DNA, 466 bp, Glycine max
  unsure (1)..(466): unsure at all n locations
ttaagncacctgcggcattgcaagctttgttcaattctcaattgcgatccttgatggcatatattntgcttccgatcgaacacaatgaattcaaagattttgatattcaaacctgtaggcgaagggggattcttcatcatggtgaatattacaaataccctgcataccgatttgatattttggatccagttgagtttcaacatgcaggcaattcaattttgttatgtttagacttcaatgcaaatctcgttgatcatgtgtaattgtgagaagaaacttgtcgacaatggtattattgtgcctcactctctatcgggaaggggttaggggttatggatttgtgagggatactttgtgaattgaaagatagatacacatcgacaacttaatgatgtgtcattatttcattgatgngggccaaagtgagacatgaatgtgagactacatatttaaatccctgtacact

SEQ ID NO: 252492 - DNA, 454 bp, Glycine max
  unsure (1)..(454): unsure at all n locations
tcatgatgatgaatcaagtcgattcaagtagttntgatgatgactaagatgatgacaaaaagccaaagaatgatttcaagattcagtcaccaagttcaagatcaagtttaatttcaagtttcatgagaagaaatcaagaagattcatgaatcaagagaagtttgatttcaagattcaagtgaagaagaattcacgattcaagataagaaatcaagaagacttcacaggggaagtattgaaaagatttttctaaaaacaaacatagcacaattttgtttttcaaaagagtttttctcaaaattttctaagttaccagagcttatactctctgataatcgattaccagtggaaaagtttgatttcaaaagcttttaactgaatttggaacattccaattggtttttaaatggtgtaatcgattacaatatattggtaatcgattaccaatgtatct

SEQ ID NO: 252493 - DNA, 404 bp, Glycine max
  unsure (1)..(404): unsure at all n locations
tcttaagncactgcagctcagctctaactttattaaaatgaactctttaccacttgttagacaagtggcctcaaatatcttaagaaaggggggttgaattaagatattacaaactatntccccaattaaaattctatcaagttataaattcccttaataatgaacttcttaaatattgattcaaatagaacaatttgaatatgaatataaaacaataataaataaaggagtttaagggaagagaaagtgcaaactcagatttatactggttcggccacacccttgtgcctacgtccagtccccaagcaacccgcttgagagttccactatcttgtaaattccttttacaagttctaaacacacaaggaaaatccttcctttgggtttagaattngtttacaaca

SEQ ID NO: 252494 - DNA, 450 bp, Glycine max
tggacgttggagttatccatccgctgtcctaattcttgttttctggaacttctatgcttttgattttgacatgatagaaccttttcttaaaagtgagtgtttgattcgatcccatgctttttgctagaatgaaaaactctgttgatcaatacttcgacaccctatcatggaggaaatatgatgaatgcatgagggaatgcttatgttatgcatggcacaaatgcattttacagacaaaagaacccagaagatcatctcatcttactcacaaacatttgggcatcatggttcatttgcagtccttaccatggttccctatgcatgcatttaagaatgtgatgcggaccttccgatttcccatgacaaaatgacgagataaatgcaatgcatgagtcatgacacaatacatgcgtgagagcacgtggttgatagcatgaaaagaaacatact

SEQ ID NO: 252495 - DNA, 453 bp, Glycine max
  unsure (1)..(453): unsure at all n locations
agctngacagacctgcanaccttggatctttaatgtttccaccctcgacatcgaacaacacttgtccacgcttaggggctcgataaactcgtgacccttctacttgtcaaggctaccatcctcaacattagacaacacttagccacgcttgggggcttgataaacttgtgacccttctacttgtcaaggctactgccctcgacactagataacctccattgacattagacaacctcttttgcccacaagctggctcagagattgnggggcttatgtacagtccaggtcccacaaaatacatgtgacaagtgacatggcactccaataacacatcaacccttcatgtcagccctggcataagagtatagacacctcgcccttggcagtcaggctatttggctgtcgataatgttacaacctccttattatgtttcaagtactcaattatctata

SEQ ID NO: 252496 - DNA, 459 bp, Glycine max
  unsure (1)..(459): unsure at all n locations
tatgctgcanacatntataatagacctcctcagtagctataccaacaactttataataattatgacctttcaagcaacaaatacaatctaggttggaggaatcatccaaatctgtgatggacaagtcctccacaacaacaacagcctgtccctcccttccagactgttgttggtccaagcaagccatatgttcctcctccaatgcagcaacagcaacaacaacaacaacaaagacaacaagcagctaaggccccttctcaaccttccttataggagttagtaaggcaaatgaccttccagaatatgctatttcagcaagagacaagagcctccattcagaatatgacaaattagatggggcagatggctactcagctgaaccaagctcagtcccagaattctgacaaattgccttcacagactgtgcagaatctgataaatgtgagtgtcatcaccttg

SEQ ID NO: 252497 - DNA, 381 bp, Glycine max
atccttaagtcaccgcggctgcaactgtataagacgcattttcgtgtttttggcctgccatcgggaattacgatggccagatgtgcggtatctccactacactacactctttgtttgctctcacagttgaaaagtgagttttcattgatgtggtctgttgtctcatatatgcaacatttgtttaagaaaacaaaaaaaacatgcatagttgttttcctcattattacacctgttgttgaccccatacatggcagggggaagatgttactggaaagtatgtattggccttcactaaatgtcataaggccatcttcaaactgagtgaggtgtcggcttttatggaagccagttattatactaaagtgattaaagagctattgg

SEQ ID NO: 252498 - DNA, 367 bp, Glycine max
ctgatgccgactctatcatgcccacaatattatgctgacttctgtataagagctgcgggagaagggtatatggcagagctcctactccatgaatgcactaccttcctagaaggaagtccatactaggcttctactgtatcaccattagaagaggaggttgcactatactgtctacaggaacatatacttgaatgggtcgcgaacaataggccggataccctcataattaagaacacactgatgggggcggatcaagcagtgacctgatatccgaccttgttaatgataaatcgagggattatgatgacagtcgctcctccatcaatgacctgtttgatgattcacacggtctcaactcttgctgtga

SEQ ID NO: 252499 - DNA, 436 bp, Glycine max
  unsure (1)..(436): unsure at all n locations
agcttaaagtatgcccgagncattcatccttatgagatgttngtgaagtattggcgatcagaattgccattccttggattatagggttgaaccaagctcatgcttttacaaaaaggttcatcaagccaagttgaaatatggaagtaaccgtcttgcaaaattggggcaaaagatgaatcaagtcacatcactgcttcgtctactgccaaacatatttaggattattgatgtccttgttacttccagtttcaccttgacaaagatgtcatggaccatgttgaaaatctaaattgattcaaccccatatcctgcgtaaaaattcgcaatacttcaactgtacatcattcgcatacatccatgcttttcattggttgcattgctcattgcattctttccttgaaaaataaaataaaataaaataaaatgaacttaatca

SEQ ID NO: 252500 - DNA, 453 bp, Glycine max
  unsure (1)..(453): unsure at all n locations
ttgtgtaaattcatttaaagattagaatagctctcanaacaccttgattatcttgacaganaagtctacgtgttaagattgtctatccatatgtaagatgattaagtgttagtcattgtgcaatcaagcaaacaaatcttcttattcgcgttagagcagatagtgactttgtaggacaaagaatattgattataacaagcttgagttaaggagctagaagtggaagtgataaatacttgtaacttattgaagttagtggaacttggtagtttaccaagaattggaagtagtcttggtgcttgagatggactagtataatttcctatgtctcatcttgtttattttctcttttgtgctttaaactgacccagggttcgaatntgattctttcattcgaaaatctctaattattttacatgatctagaactattatccaaatcattttgtaaaat

SEQ ID NO: 252501 - DNA, 442 bp, Glycine max
  unsure (1)..(442): unsure at all n locations
agcttcttatcaaggcacattcttggtggtgaaactccttcttccatggcttattccatagtggatggggcctcccctctcctcttctcctttgccttccgctgcatctccatggtggaaaagcaccattgaaggacctcattgaagctcaaagatccagcctccatagaagctccacaagcaagcttccatcaagtggtaatcagagcacaagagcttcaagtaggtgctccttaaacctccattgactttcagttttaccttctcctccattgttgtttcctcatttttctcaatgtatctcctcacatgtcttgtgctaaatgtttttaacatgattctttagaatttccaccgattaatcttgatatagaagctagatttgattntctatggntcaaatttctgttcatgttcttgaaccatgagtagtgttgagttt

SEQ ID NO: 252502 - DNA, 373 bp, Glycine max
  unsure (1)..(373): unsure at all n locations
tgcttgtggagctnttatggaggctggatctttgagctttaatgaggtccttcaatggtgattntacaccatggagatgtagcggaaggcaaaggagaataggagaggggaggcaccatctactagggaataagccaaggaagagggagcttcaccaccaagaattgccttgtataagaagcttgaagaggatgctttaatggaggaaaagaaagagagaaggggggggggggggagcacgaatttgaaggactaaaagagggagagaagtggaactttgaagcgtatctcataagactctcatagtggtacacatgcttctatttatagactaggttgctcacttgagaatcttcttaatataacttccttg

SEQ ID NO: 252503 - DNA, 443 bp, Glycine max
  unsure (1)..(443): unsure at all n locations
agcttgatcaaaacaattatctaatcattccaatccactcaaatcatacaattgctcattcaaataattatcaaacactcatttcataccaaacaatccattgcatatcattttcaatcaattcattgttcaaacacgcttttggtacaagcaaacaactcaaagtgctgaaatttaaaataactaaaatataaagcaaactaaatactaataaactaaaatgttcatgctttgcagaaattaaactaaacacaatttaaacatcctgctcatcttgtggctgatcttcattatgatctagtgttggagctgctgatgaatcctggataggctgctctggctccgtgactggtgtagatggctgggtctcctcaggaactggtgcangagatggcttaagtatttgatctatggaagtcccctccttctgagccatgtgtgca

SEQ ID NO: 252504 - DNA, 444 bp, Glycine max
  unsure (1)..(444): unsure at all n locations
ntcttgaganaacttccttgagaagcttctttgagaaaacttccttgagaagctagagcttagctacacacacccctctcataactaagctcacctccttgagaagcttccttaagaagattcgtaaagaagctagagcttagctacacatacctctctaatagctaagctcacctccttgagatgagaagctagagcttagctacacaccccctataatagctaagctcacccccatgacaaaaaacatgaaaataaaaaaaagtccttattataaagacaactcaaaatgccccgaaatacaaggctaaaaccctatactactagaatggccaaaatacaaggccttgacgaaggaaaaacctattctaatatttacaaagataagcaggctcatacttagcccatgggctcgaaatctaccctaaggctcatgagaaccct

SEQ ID NO: 252505 - DNA, 392 bp, Glycine max
  unsure (1)..(392): unsure at all n locations
agctngcccgctagaatgtcaccgttcatgcacagagaaaaaagaggcaagttgggaccgactcttatcaagcaaagaaggagcgtctgtcaactggttcccccaatggaaagaaggaagaaccggggttcttatttcgtgcggaggatttccaaatattcccttgatggggacaaggggttgcatcagttacaatcccgttcttgctataagacaacttggctaccctatgagaggggcaccactagaggaagagctcgcacctattattgcacgagatttcaataacaccaatgtggaggcacttcaaaaggtctgcaaggcatgggagatggtgcaaaagaagaacaaggaactcagaggcagtaacaacgggcccatcggcggtactg

SEQ ID NO: 252506 - DNA, 406 bp, Glycine max
  unsure (1)..(406): unsure at all n locations
ttcttctcttccttttttactttctcccattctttggttgggaattttctttcttttctttttgctttctcccactctttgattgaggaattttccttcttttcctttttttgctttctcccactctttgattggggaattttccttcatttcttttttgctttcattggaaattttccttctctttttctttgattggaaatatcccctctattcttttttgcttccgagggtaaggattggcattctcaccctgcgtcaaggtttatggtgagtcaagattttggctcaaagcttgtagaatggctagacatgatacatgtcanggtttggtttggttcaaggataaaagggatgccccacattattccatgacacanattgcaaaatgatgatttggaaactt

SEQ ID NO: 252507 - DNA, 476 bp, Glycine max
  unsure (1)..(476): unsure at all n locations
tcgacccgggatctctnagtcacctgcagctgcagcttaagttgtggttttgttcactaatgcttangattcatntttcctatttaaaatcaacccagtgtttcctatntaaatcttgttttattgttaaagctatctctagaatattttccattggatttaatgatgaaatctattcaatttcaagttaaatgaggctaaatctttaagtgctaaaagtggtagttgcgctcagctcaccatttgggctcagcgcgcatccatcactaggtgcagcttcagcgcgcttagtgcgacaaaagaatctggcagagcatcaatatcaaggccacgcgctaagtgcgagattagtgcgctaagcgtagcggttgtcttcagccaggctcagcgcatgactagtgctaagctcatatccacttactcgcgctaagcgcaagggtggcgctaagcgcaatgtcacgaattcagagcctatt

SEQ ID NO: 252508 - DNA, 436 bp, Glycine max
aaatacttgcttgagcaaaatcattatcaccatataccttgacccattgtgagaatgccaatccttaccctcggaagcaaaaaacgaagagaaggaaaatttccaatcaaaggaaaaaggagaagggaaatttccaatcaaagaggaagcaaaaaaagggagagaaggaaaatttccaatcaaaggaaaaaagagaggaaaggatattcccaatcaaagagtgggagaaagtaaaaaaggaagagagaaaaggaaagaaagctcctgatcaaggatcgaaagaaaacagaagaaatatgcataaaggtctttggaccagacaatatctgaacatatacagaattgtcaccaaatgaacaaaaaaagaaggaaaggaaaccatgacctaaagtagtcttcttcctccgattaccaaccaaaatcctgtgcgtcggtg

SEQ ID NO: 252509 - DNA, 308 bp, Glycine max
agcttacacaagaaagtctgacgttaatgacattgaccaagtttggcaaggacatcgttcagagaagatacagtagcaacatagtacttctctgcttcgaaacttggctagatttgggaaaattcacatagaatcagtcaaaagcatgagtctgcaaacttagctagtcactactacaaaaagtagttgtaacatcggcttattaacattggttttatacaaaatcgatgttaagttaaacgcagtgacatatttgtaaataaagtatccttcttaacatcggttttccaaaaaaccagggtaaaagc

SEQ ID NO: 252510 - DNA, 434 bp, Glycine max
  unsure (1)..(434): unsure at all n locations
tttgctaaagaattattgcgtttgacactactcatgctcatgcattntttttatcttatcttgtgaatcgaaagacaggggcaggatcgctttaagcgatggtcaaataccgcgccaaatccaagatagagatgaaccgaggtaagtggtagcgtagtcacgttttgctacgcaatgccatttcctgctttcaggtgctcgggaatgggtacgagtagacgctaggcccgtgatcagcagatcgtcgtcccacgtccggttccggacgatcaagaagcactactaggaggcagcctagtatcctttaaatttcggcctattattattgttatttctctaagatgatgaatggatatgcctaacttatccttagggggtcgaagcaacgagcacccgcccataaagaacacattatttcttctgcaaaaaaaaat

SEQ ID NO: 252511 - DNA, 383 bp, Glycine max
agaggggggaaaatatactcccacgtagaatttatgatgtcatataaaaaaagagatagaaattaatacaagatgttgatggttattaaaaataaagtaagggttatgattacatatttaaaataaaaagtgatttatgtgtgtagctattcaaaaataaggaaagaaaaaggtgtttgtttatgatatttcgttttcatgtaaatttggttttgatcttatcgcacggatggatgagttttgatgattcggatgggtgttggaacgtaaggttctctttggcctactagtctaggtaactgattatttatttctcaaggatttcactataagaagaaaatttatcacatctttattcttatatataacaaatcttataatat

SEQ ID NO: 252512 - DNA, 435 bp, Glycine max
  unsure (1)..(435): unsure at all n locations
tctatntcgataccctctgaaatcgctttctctggtaagttgtaccatttttatttttcttatggcgaggtgtttgtctgcggaatccttcttggagaagaaatgcagaatagggtacccttcttcttcttgtcttctttctcactcgtgctgctacttctcttgcaactttcttctgctcagatgccaggtatgtaccctcttctttgcttttgcttacttcaagttccttttctattcttcaattggtttccataaagattgagttttttctgctctagcaccgttttctgcattgggtgttttgttttaatgtttgtccttgtgctctgtaacacctgttctctggcattgtgctcttggttatttcatattgcttctcctcttctcttttctctctctcaatgaattttttttcatgttgagccctttagt

SEQ ID NO: 252513 - DNA, 457 bp, Glycine max
agcttttaaaaaatcaagaattttagggtctactttattatgtcggcaaacttcatgatgaaatttgaactttaaaaactacatttgccaaaattgtcaatggaaaaaataatctttacaaacaattaaggtacaatagaagttcttcaaacaaatttggaaatggatatgatggaaaatctacgttcatgataagaacaatgttgtctgttatttctgtggtaagattggacatatgacatccaagtgtagatatcaacctagaagggtataaccaataccattatggataacacaaaagtacccaaaaagatttggatacctaagaaaaaattattcctgttgcatatgcctttgatagtaggaagtatatgcccttcatggtacctggatagtggttgctcatggaacatgatagtaaaaaaatgtatattccaatgtctaactccctatcatt

SEQ ID NO: 252514 - DNA, 447 bp, Glycine max
tcatgatgatgaatcaagattgattcagggagtttgatgataacaaagttgatgacaaaaagcccaagagaatgagttcaagattgagtcaagaacacttcaagaatcaagagaaatttgatttcaagattcaagaatcaagtttcaagattcaagtttcaagattcaagaataatcaagttgaagattctagaatcaagaaaagactcaatcaagataagtactaaaatgttttttcaaaacattgagtagcacatgaatttttcacaaaaccttttaccaaagagtttttactctctggtaatcgattaccagtagcaaagatttttttcaaaatagatttcaactgaatttacaacgttccaattgatttcaaaatggtgtaatcgattacaatgatttggtaatcgattaccagtgatatgttttgaacaaaagtcaaaagat

SEQ ID NO: 252515 - DNA, 416 bp, Glycine max
agcttgagtacttggaagaggctctcactattcttaattggagagttcgtatttataaagcgaaaccacctaataacagatggtaactctaaaaaaacagccccaaaaaacaaagactattcttcgggaaatgatagcattctagtgaacttgagcactgagaatctattagatgctacacattgtggactattttgtatgtagaattagttgaggtaatttggggatttttgaaatgttacaggttttatgactttttgtcaacttcccaacttaacctattggcttggtaccacttgtttgacacaaattatacaaggtggccggaatagaactgtgtaaaaactaactaaatcgtacaggagaggccaatagcctgatatttcgttcaatttttcggttatttgatgacactc

SEQ ID NO: 252516 - DNA, 468 bp, Glycine max
  unsure (1)..(468): unsure at all n locations
aaccaccgtaaggtagaagcaataaaatcatggacaatttgtcttggctttntcagcgtgagtgggctagattggatatagatcgccatcacaattgattttgaatggaggatatgatgtgttcccttacgtaaccaaggcttaaagaagatgaattattttcttgtaccacatatgataataggtggaggttaaatttaatgggtatattggaagcaatggttaatgaccatgagaaagaaaaaaaaagatttggttgttaagctaatggctttgtgataccatattaaaagaaaatttaactaagaatttattcaagtttaattgtgaaggtacgagatatttttttttttcaaccaagtaccaaaaaaaaattcagcttcattttactacatgtcattagtcgtcttccattaagtgaggacacagcagatacaaaatgtcacatcattacgagacacctcattt

SEQ ID NO: 252517 - DNA, 413 bp, Glycine max
  unsure (1)..(413): unsure at all n locations
cactgatgactgatgcgtgtctgccatgaagnttcattactgttgtaatagccccattaataattcatatgtaagcgtccgttgtcctacgcaaaaatcaaattaaaatagtccgcatgcatgcactctgaacgaaatgttgattagagttagttaccatcaggtatggggagcacatgctgattgccaaagcctccctatttttcctgtcatagagtttatgcgcgaggatagatgtgagattcaaaactaagcttttaggccgtaattatttcttatattgaattgaaccgtataaccgattcttttttccaataanaatctatgtatacatgtatgtgtcatgtgtcaacgtgtaggaatggccaagactggagaagtttatggtattgttcattcatgaaagaaaatga

SEQ ID NO: 252518 - DNA, 423 bp, Glycine max
tatacactactcaagcttaacactaccttcaatacttgtgctgaaggttatggggcatcattagctgttgtagcttcagggtcagttgaccttttcaatgatatattggctctgccatcactgattgcaacaatcattatacgtccaacgtcaccacttttctccgcatttaagtccaactttaacagcctaaatattttcataaataagaaattaataagcctaaaaagacttagctaaaccaattaaaatgtgacccggaagtcatttatggacaaaattccatatctgacacgtgaaagatgaaactagtatcaggaggaattttatatgaaattatataaagaattctcaatcagaaaatactgcaccaccaaaagatcaaaactgatattatccatcccttctcgagtctatgtgcgt

SEQ ID NO: 252519 - DNA, 360 bp, Glycine max
ctatgatcatgaacaactaggtgtgtcctactatgactggagaaacacaggtgatcaaataacaagcagagatttaaaaggtactaggttgcctcctagtagtgcttctttaacgtcttgagctggacgcatgatgacttgtcggtcacggacctagtactttgcttatctttggctttggacttggtcacctgctggtcgaccatgggtcgtaagcaacacactaacttttgtgcggatgagctgagggactttggaggtggcggcggagcgtctattgcccgctgccggccatccctaagctgatgtggtgtcttgccctgcgcctgcctgggggtgcagtacttcttgatgaaagcc

SEQ ID NO: 252520 - DNA, 443 bp, Glycine max
  unsure (1)..(443): unsure at all n locations
gtttcttggtgggttgatgggttctatcacgcacaatggcatgatcactggttgacatattctcaattagctcagttgcttcttccggggtcttcaactttatttttccccctgtagaagaatctagtagtttcttggtttgtggtctcagcccatctatgaacatattcaattgaattggcttgaaaaacccatgggtaggagttcttctcaataaacttctgaacctctccaactcttcattcagagattcatcagggaactgatgaaatgaagagattgcggctntcccctccgcagtcttggactcttggaagtatttctttagaaacttttcaacaacttcttcccgggtgtgcaaactactacccttaaatgagtgaggccacctcttggcttctccttgccatgagaatgagaatangctgagtctaatagcttca

SEQ ID NO: 252521 - DNA, 452 bp, Glycine max
  unsure (1)..(452): unsure at all n locations
agcttgatttgtgagttgantttttcctttatttcactttggntattagncaattcaattaaggaaaattccaaaaaaaaacgtccaattgatttttttgattattttattcaaagatacttcgattattctattgttattttgcctcttttggttttaaacgtggttacgacatgaaagatcagttggattttattttaacagagattaaacgatattacaactcaaatgatcggtggaaattcattttatggtttattagaagagaaaatgacttaaataaatggttaaagcacgtcaaaagggggtacggaaaacaaacgaaataaaaataaaagcacgtgaaacaagtggagaccactaagggtacgtagaatgcattgaaagattcaatttcaggaacttaccgattgaagaccgaagaacgacgaagaacgaacgaagaacgatga

SEQ ID NO: 252522 - DNA, 442 bp, Glycine max
  unsure (1)..(442): unsure at all n locations
ggtcttgtgncagaatagggcacacaatttttgtacagcttttacacactntatagaacttccagggcacaaaattccacagcaaccatagtgcctatttagggaatagagccctagaagcagcaaagaggagcagcttgtgcattgaagcctaggttttgtcatttgagagagattattgagtagaaagtgagtgtgagatgctgagaagaggaggaggaggaatcccccttcttgtgtaacgaactatcattctctgcttttaatctcatttattgttagggtttctttgtaatggctggctaaacaccctagttggggatttctaatgaacaactgatgtaaatacataatatctaattcattgtgttttctgtgttcaatgcatcattcaatgcttgatgtttgtatgctcttggtctgtcacccatttgcatgcata

SEQ ID NO: 252523 - DNA, 451 bp, Glycine max
  unsure (1)..(451): unsure at all n locations
agctngcacacactggacatgttgtatctttgtattcttcaaaaggaagtctctgctctaaacaatttgcatgataaacatggccacacactaaaactgccacagctgaaagttcacaagacattgaactccccaaaaaattatntttttgacttagtagttgttcacaaatcccacaaaccatctttgctatatttggtgatattgcatccatccctaaggaatttgactgaattctctctggcctgagaaacactttctctctatactctggggaaaaaaaattaaaagctcataagaaaagcatgaataatcaactttccaaggtgaaaaaaatagtgacaaaataggttctaaaaatataatataaagtatacctttaaattaaatgctctcanaataccacaaaagcattataatacgagacacgttcatcgcacattaatttttt

SEQ ID NO: 252524 - DNA, 462 bp, Glycine max
  unsure (1)..(462): unsure at all n locations
acctatnatactaagcttgtatggatatataattgcatcgaattattgatatctttttctaatgtcacacttgcatatatgcatatgtatatatttgaactagtgttactgcggatacatgcgttgcgatggatgattgggttgtgaaccccactgtccacactgccttggacgacattcttccatgcgtggaaaatgctactgccgtggaaacccttctactaatccagaccctcacatataccattgttgacgcatttgaccaaattatttccaatctcacatatgtaaatgcagttgctaatttcattaatcggtcccctcgtccctattctctgaatccatatattgtcaacttccatctcgcagtgtatccattggaagtctattcttaacgccatcgtggtattacttaacattatgaatctttcaaatcgtacaatatatatagccgatgaccta

SEQ ID NO: 252525 - DNA, 435 bp, Glycine max
  unsure (1)..(435): unsure at all n locations
agcttgtatcgagtgggagaggtgtatgttgatatgataaaattagatcaatctgatgataaataatagtggttcattatacaacacttgtttgggtgattcaccctagaattcgccacaacttgatctaattcttaaaaagttcacatctatatatgtaaattagtctctaatggtgataagtttatcctatgtcatcaacatgtaaattattttatcttttagaatcaaatagttgcacgatcacccaataataaacgagatttaaagaaaattttaagagaatttttttactttttaaattttaaatatgttggattttttttctaacatatgattttttttatcaatgtctatatgaggcatttttttacttttaaatactaataaaanacattttttattggtggacttaaagcgtaagctttactgcat

SEQ ID NO: 252526 - DNA, 428 bp, Glycine max
tgtaatcgattacacatatactgtaatcgattaccaaatcatattttcagaaaatattctcaatagtcacatctttttatgtggttcttgaatggctatcaaaggcctatatatatgtgacttgagacacgaatttgctaagagtttttcagaacaaaaaggtcttatcctcttataaagcaaaatcgttttatcctcttacaaattccttggccaaattacttgtgattcaataaggaattatttgagtgctcaaattgttcaatctatctctttcaagagagatttcttcttttcttcttcttcattctgaaaagggattaagagaccgagggtctcttgttgtgaaagaattctaaacacaaaggaagggttgtccttgtgctgttagaacttgtaaaaggaatttacaagatagtagaactctc

SEQ ID NO: 252527 - DNA, 321 bp, Glycine max
agcttgaaatatattctatgtactaacatagcatcgccaggggacatcgagtctcactgactaggtgacaaataccaagatgaagaggaaaattaacattgccaacaaacccaatatcatcatgatctggccctttgcgctagccttcttcatagaccattgccacttttgtctgatatcataaacaatgacgcacgcttcaaccttcacattcaatattcataaataccccccttatattattactatttaaagacagcaatccaccggatagataaaaaccctttaatgagaaaatggaaactataagcagaaactcac

SEQ ID NO: 252528 - DNA, 398 bp, Glycine max
atcttaaaccgttgagctcaatcattatttgcttattatttccacgaacctaactaatcagaacaacgtccatttgatggactttatctcattcattgtagcctctatggaattaggatgaaccttgaacactaacttgccaacttctctccagggaagaacataaaatctcgttaaaacaaaatcactaaccaaacctctcatttcttcttgttgtgaaaagtgaaaacgtaaaacacaacaaccaacaaaattccaattaacagaataatatttggggaaagtcgaccgtcacaaatggaaggagctagaaaagtaaagagtagagaggaattatgtttatgaggttaccttgtggttgttcgtcgtcatgagaagatgaagggagatcgagataa

SEQ ID NO: 252529 - DNA, 435 bp, Glycine max
agctttcttaagaagattcctatttaagcttgagcttagctacacacacatctctaatagctaagctcacctccttgagatgagaagctagagcttagctacacaccccctataatagctaagctcacccccatgacaaaaaaagatgaaaatacaaaaaaaaagtccttactacaaagactactcaaaatgccccgaaatacaaggctaaagccctatactactagaatggccaaaatacaaggcccaaacgaaggaaaaacctattctaatatttacaaagataagcgggctcatacttagcccatgggctcaaaatataccctaaggctcatgagaaccctagggccttcccttggatctctagcccaatctacttggagtcttctacccaatgcccttgcgggataggagtgcatcattccctccaccttg

SEQ ID NO: 252530 - DNA, 443 bp, Glycine max
  unsure (1)..(443): unsure at all n locations
ctncgttcatatttgtttcatataattacattaatctatataatgttctagcgatttgcctatcaattttctaagcatcattgttaatcacctaatagttataactgatatatctatagagaggaagaatattttagtgaaaatattttaataaataacttgcgtattgtttcgtttaaaaaaaatcttaagcattttattttatcattttaaaatggggagagtattaaataaaagtattagaaaatgcaggtgcataggcaaatacggaattggcaagcaagaaatgaacaaggacataccaactgccaccaatatacgaaatatgtcccacccagcaagcaattgcaccttttccatttgttacaatgttgctccatttcatccttcgatcatttcaacaaccaagtctatgttactacgtaaaagattgaaaacaaaat

SEQ ID NO: 252531 - DNA, 440 bp, Glycine max
agaccggatcttagcactgagctgcacttaactcacgtctttagtttttataggagccaaccatccttgtgttcggactctcaaccacttatgatagccgccgatgatcccattactgcttcccctaagctctgtgtcctttcttcacgccgcataccatgccttgcgaactccttggagtaccctcgcgtttgtggtcactgaaaccccatgcgatgaaaggcatgatgctttcatctgatggcacttctctcatggggtagccaagctgtcttatggcgaggacgggattataattaatacaaccccttgttcccatcaagagaacatttggacatccttcgcatgaagatagaatcctgattcttccttccttctagcgaggaaaccaattaacagacgcccctccatgctagccaagagtggtgccaattcgcctt

SEQ ID NO: 252532 - DNA, 429 bp, Glycine max
  unsure (1)..(429): unsure at all n locations
gttgcaaacgcaccactcaagtatagtattattcacctttataatcattatgtattcattctgaatctattcattttgtcaaaacttaaaaagcattgaggaatatacgtgtgcattgtgtatacatcaaaatcaatcagaagatgggtatccattgagactaatatatcaaatattggaagttgtacaatgaaaccaagataaaaggaagcagagacatggattacattgaatttgacttatatttatctcagaagatgagcaaaagcagntatcttttgcaaacaattacattcttcaataataacaaatccatgtaaatgtcataacattggcatgtatacttcaaaccccaccaagcagtcatgtgcaatgcgtacaaatctaaattgtcaattctgttcattttcccagcttttactttaaatc

SEQ ID NO: 252533 - DNA, 362 bp, Glycine max
gaacatgagcgcgagactattgaaatgcaaaacaaacccttgcgtttatagactcttcatgtctgggcaagaagaccatttagaagagttataactttgagaaaaacttaaaaccaatccgaaaaagtcacaaccattttgaagaggacatcttttgattatcaaaaatagcactggtaatcgataccaataagtgaatcgattacacgagcttttgagtgaaggatgtgactttacatttaatgtgaatccaacattcaaggccctgtatcgattccaaacttgtaaccaaacagcctttgagaagatgaacgtcgaattcatttgaaacttttctactcttttgtctggtatcgatacac

SEQ ID NO: 252534 - DNA, 366 bp, Glycine max
  unsure (1)..(366): unsure at all n locations
gctttctaatattcacaagaaacgcataactcttcatntgaatgcnattcctacatgaacacaatgcttatagacacaacgaatcaagaagtttaagataatatcaaaataaatgtagcacatatttcaacagactattattttaatgcatcttgcatttgattaggcgtaggtatagacactaacactatgctcatgcaagaattactcctcataccaagtcaaaaggagaccctgttcgctcctaaatatctcatagtcccacatgttgttaccactctttctaggattcctaaatcatgagcaaagatccatagtaattgtagcacataatgtatatgctaaaacgagacacttacagtttca

SEQ ID NO: 252535 - DNA, 317 bp, Glycine max
tgcaactctcctttttcataatgggtttatttttaaaaaaggtcaccctttagccttttctttcaattgctgagaaatattccggaaaaaatcagccgagcgcttcgacgttccggaaaataccgaaattttcacgttttagatcatcgtcgcttgtttcttagcttcacggtagtcctcaaccacttttattttattgaccggggggcacattgttatgtattatttcgttcattgcttttcccctttgactctaaccattattaactttccgctaactaaaaaaatacttcccgacgtgattgatcgcatcattg

SEQ ID NO: 252536 - DNA, 353 bp, Glycine max
  unsure (1)..(353): unsure at all n locations
tgagatgaggaagtgttgaagggtgaaacttcctgcttttattcttttaccacagagntggacctggagatatgtcgcgggggtcaggagaccttggggacgtcaggtggggtgctattgcccaaaaccaagcttgaccaatcccgacccaacccgggcatagtcgctcagtgagaacctgtgatgtacctaaacaggcgagctcctggcagtcaacagataaaaggaacaaagaccacaaagcaaggaggcttgtggtggctggccagctgtgaattttgtgtgatatatgggttgtggcctctggtaatcgattaccaagggtgggtaatcgattacaagggcttaaaatg

SEQ ID NO: 252537 - DNA, 444 bp, Glycine max
actagaacccctttaaataatttctttaccctatcacacactacctaatgcaaaaaaaaacaatttaaaatgactgggttgccttaccacatgcgctcggttaacgctaatagcttgacgcaaaatcctattattcctggatcaacccaggtttccacgctcagaaccttgttcttcaatcttttcgcatacatcacattcacctatatacaacattttggtccggaaaatctttctcttcatggaacatatcatagctgattctgtggttttctagactcatttccaacttgttcttccccatgtccaccacacagcttgtagtgacataaatggaccttccaaaatgacaggaatatccgcatctttcttcatctccaatacaacaaaatcagtatgaaggatgagatgcttgacccgaccagcatgtcttcatcactcata

SEQ ID NO: 252538 - DNA, 259 bp, Glycine max
  unsure (1)..(259): unsure at all n locations
gcttgactctctctctgtagagttntgaagattcatacgttgttcttttcatttctttctatttcaaaagttgaatcttcctgtgctccctggatgccttctcatcaaaatttatgaaattcacagcccaatatgctttctattccatttcaactggtaaatgtcatgcttttccatacaccacatgaaaaggtgataagccaattggtgtcttgcatgcatntctgttagcccatagtgcatgtttcaatttgattga

SEQ ID NO: 252539 - DNA, 389 bp, Glycine max
  unsure (1)..(389): unsure at all n locations
tctntgagaaaacttccttgagaagctagagctttttactcatcactctgaanncngatactgaggacagatgtcgtacaggatgtcacgacatcgcgcttcaaaacatgcagattatatatgacagtatgaacagattaaccaagtaaataacacaagagaattgttaacccagttcggtgcaacgtcacctacatctgagggctaccaagccagggaggagatccactaaaatagtattagttcgaagatctaacagccactgtatacaaccttctcacctaaccactacccgtgcaacttctacctaagagccactcttagatatgagaacccctctcactccctctcaatcactcacccgtgtgtacaaacaaaataaagataca

SEQ ID NO: 252540 - DNA, 444 bp, Glycine max
  unsure (1)..(444): unsure at all n locations
aaactaagcttgatcaatgcnacccaatactttagctttttatctattgtgntccgtaatatatcaagaccctcgaaattgaattcaaaagctcttagccaattaaaacgacaataactttctaaacggatgtccgattgggtcacataatatatcgagacgctcgaaactgacaacagaagctgggagaaaattcaaacgacaatgactgttaacttggaactcccattgagtcccgcaatatatcgagatgtttccaaattgaatgtagatgctgtgagaaaatactaacgataatacatcttacccgatggtcgattgaatccccaatattcaagacgccaaaaatgaacacgaagctcgtacaacttaacgaactacttaacatgagaggcccgaaaatcagacctcgtattaaacggactcgttcaatccaacacatac

SEQ ID NO: 252541 - DNA, 299 bp, Glycine max
  unsure (1)..(299): unsure at all n locations
agagaaagaagtccacccaaaccttgaatttcgaagtcccacacgtagagacgcgcttcacgactccgaaaatgccctcctttcgcgatttggagcacaaatgggcactaaaggttgaagctttgttgggcaacaatggtggatgagagaaaagaacaagaacgctgcgtgagagagagagnctctgaattctcttttggctgagtgaggagagaagaacagctttggttttaaaaacaaaggggttttctcttttcctattaatttatttaagctacgccacgtgtctccatttgagt

SEQ ID NO: 252542 - DNA, 353 bp, Glycine max
  unsure (1)..(353): unsure at all n locations
tacccttattcattacagttaatttcctatacttcatctcattaattaagcaaattgatgaactccatgtggagcttgtaggcattgaatcttcttcataaatgaagtcctttgcttcttgaagatcaatgacacaggaatggacaatgaacaaagatgattggagacaccacttgaaggagaagatgagttaagaacaagctcaccatcataggaagtactggatagagctngaacgttagacaagatgagtggagggagaacgagagaatgaacaccacatattatgcctcaatgaagtctaactttgaatgtaattctcaatgataaaggtaaaaaatgacacacaagtt

SEQ ID NO: 252543 - DNA, 372 bp, Glycine max
  unsure (1)..(372): unsure at all n locations
cgcacatcgttcgcgtgtatgatatccactcgacaaggtttgaagtagaggagaccttcaatcctataacgcaacgtggcggacaaaaatgggcagttaacttgaatggccattactgtcaatgcggaaggtattctgcgcttcactatccatgttcacacattattgcagcttgtggttacgtgagcatgaactactaccaatatatagatgttgtttacaccaatgagcacatcttanaagcatactccgcacagtggtggcctcttgagaatgaagcggcaattccttcttctaatgaggcatggacactaatccctgacccaactacaattcgtgcgataggtcggccaaatcaacaggataagaatg

SEQ ID NO: 252544 - DNA, 325 bp, Glycine max
  unsure (1)..(325): unsure at all n locations
tagtgccaccggtgatgctcctttaacgatccatccntttatcttagtcttgcaggggctcttcaatatcttactttcactcagcctgatatatcttatgccgngcagcagatttgtcttcatatgcatgctccgacaaatgagcatatgagtgctctcaagcgtatcatatgctaccttcagggtactttatcccatggtttgcatttgtacaaatccaccattgatagactaatctcttatacagatgctgattgnggtgggtgtnctgacacccatcgttccacttctgggtattgtgttttcctcggagataatccgatat

SEQ ID NO: 252545 - DNA, 326 bp, Glycine max
acgcgaatcctgcactggatatatgatcaccgcgatccttgcttagcttaatacataggagttggtacgcaaataataggcacactcctcatctcataactactttggatactacatataaaatattatccttttctaatatgggaaactctccatttatagtcattcgttttatattttcctgattcaactcctcttctcttctattctattcaatccctaaatggaaagttcttctgacataaaagtatatatccattgctgcagcctacccccaatgccttgtaaagaatcttctttactatcataaatacatgccattttat

SEQ ID NO: 252546 - DNA, 345 bp, Glycine max
tcaaacttagcaatcatcatctcaaccactttttattacaactccatcatcatcattcaaacttgcaaggtaaacacattgaatactgcacaaattataagttgtagataggatatgatgtgctggacatcagattgctggttcataaaaggccaacgaatatcagattttttgtttttccattctcagctgaggccaactacaaaaccgccgacttaatactaataagattaaaaagtcagtccccttgagaacattaacacacctactgagtatacccccaactttaagcgtcctaattttttcatctcttaaatcttccaattactgcttatttttccagat

SEQ ID NO: 252547 - DNA, 441 bp, Glycine max
  unsure (1)..(441): unsure at all n locations
ntgtgaagaagtaaaatgcagcatagatgtttttgttattgtctaggaacctgaagtgagataagacctccaccaccaacggtagtcctcgctacacaactggaagtagcagagaactattgtgatctcagcacaagtaacaatgaggatgaggaacacaatgaagaggaaaccaaatatataataaaattgatgcaaccagatagatgtgagaatgaagaaaagctcaatgaagacagcaccaaatgggagtatgcctcctattagaatagagaagagtgagttcatgtaccaaggctgctctgggatctgcctggctatcttgttggtctttacaggatcctcagtcactggctgtttataaccaaaatgaccaccaagacacacaagtggaactgagatgcaaaccatanaaaacaaaacaaacattgtccaatggac

SEQ ID NO: 252548 - DNA, 437 bp, Glycine max
  unsure (1)..(437): unsure at all n locations
acgtcaaagcactggtaatccattaccaaaacattgtgaacgattaccattttttgaaattaattggaacgttgtaaattcaatttgaaaacttttttcaaaacaattttgctactggtaatcgattacaacaatctggtaatcgattaccagagagtaaaaaactctttggtaaacatgttatgagaaaaatcatgtgctactcaatttttgagaaaatttttcatacttatcttgattaagccttctcttgattcttgaatcttgatcttgattcttgagatcttgaaccttgaatcttgattcttgactcttaattntcctcttgagtcttgaattcttcttgattctatcttgaactcttgaattgntcttgattcactttgagtgttctttgatgatcttttgagcttttgcatcatctcttgtatcaatat

SEQ ID NO: 252549 - DNA, 389 bp, Glycine max
  unsure (1)..(389): unsure at all n locations
ttgtccttcgttaattgtctatggcttagttatctctatcaacaaagnactcncgacacctactatatgttgatgtcaccaacattgttatcggtatattgcggcaatccttcaacaccttatttatacattcagagaggttggctgtcatgtggccatatcgatgtccttctttatcattagccatggtccattattcctttgaaatgcgatcaatccatgttgctatggctggactcagttgactaaacttttctaaattatggtcaaaaatatgcttgcaaggagtgtatcctgcatgatattagttagcaacaacaatcttaagtatacatgacacttacattaacggcaccatgatatatgaaatcttatccaatttcttcaac

SEQ ID NO: 252550 - DNA, 410 bp, Glycine max
  unsure (1)..(410): unsure at all n locations
cctcgtggctgaccacctgagtaggattgagcgtgcgtctgaggactcacctatttgggataattttccagatgaccatttgtacattctgtataagatttttgattccttccccactccttggtttactaatattgggaattatttggctgcttctgtttttcctcccttagcatctaaagctcaaactgataaaattaagagtgatgcgaagcattatatttaagatgacccctatttgtggaagttgtgcacggactangttattaggagatgtattccagaccatgagattgacttggtcctgcaattctgtcatttttccgcaccaagtggccatcttggcatacagaggacagctcgcaaggtgcttgactgtggtttctatttggccaccatcttcaaggatg

SEQ ID NO: 252551 - DNA, 448 bp, Glycine max
  unsure (1)..(448): unsure at all n locations
ntgcggatntggtcttcaccggcgaaaggatcaaagtgggtcttgtattgatgtaatctgatcatcttgctttgatgaatgcaaaaactggggtaaatgaagaggatgagaatgagggagaaacccttgctatgactgccattcctacacggtcaaattttgcataagcctaacaatgtcattactcagccaataatagtccctctcacccatatcatggaggagttctgggacattccatcgagcactgtatgaccttgaagcgtaaggtgcaaagtctaattgatgtgcgctggctaaaatttgatgagaatcgcttatgaatcctaacattgacaagtgacaccacacatgggacaattttgaagctgttgtagatgtccatatgactcacangatttcaagttatccatattataaccacagttcatgctaataaatgataatt

SEQ ID NO: 252552 - DNA, 299 bp, Glycine max
aacaaagaacgtcctataaatattgcggtgaaataatgcacaaatatcaaacatcaacataatactatttattatataatatatatcacggtgtacacttagacacagatggactccaaccgctagcaatgtcattcaaacttccagttcattcaaaacaacttattacacaaattattatgcaaatattgaggtaatgacgtaattataatattactaccactgcatgtctggctcctctgtaatgtcaccatgctcatgctccgcacccaggatatccgtctgccggctgaggacac

SEQ ID NO: 252553 - DNA, 441 bp, Glycine max
  unsure (1)..(441): unsure at all n locations
gaaaaaagagtaacctaaaaagttaggcttacacagtcttaagactcattttcacccaatattaaatattaatacagtattttatgtagtcactagtcagtcaccacttgtatattttgatatngcagttacgttatgtttgggccagctttcacgcattctgattgatcggttacctctctagtctggctgaaatcaagtcattcatgtcgatatcagagaatctncatggatatcttgaagcttggtgttaagcaatnggagcagtgaagatcaaatctatgatttgtgcaactagcacgcataacttgttcatccaccactaaacactctccttttgggtcaacttccaaatttctttttccaaacccatgcaactcattggtttcgcatgtgaatcattcacaattaggagtggtcatgatctngtccgtcacacta

SEQ ID NO: 252554 - DNA, 314 bp, Glycine max
  unsure (1)..(314): unsure at all n locations
tccaggtttaagtagattagttgctaaacacattgtcttgatatgccttanatcaaagcaccagcagaagcatgtgaaggttgtgttgcaagaaaataacataggaattccttcaatgtgtttttgcctcctagagctaaagaaccactggaagtagtttgttatgatgtatatggtccaattgaaccttgtacatatggtggaaatttatattntttaatctttgtagatgagttcacaagaaagttgtaggtttatccaatcaaaaggaagagtgaggtgtttgcttatttntcaaaaattaaggcatatgc

SEQ ID NO: 252555 - DNA, 375 bp, Glycine max
gcttgtaatcgattacatcatttatgttatctattaccagacacaaaaaattcaaatttcaagtctgaagagtcacaactcttcagaaactaactgtgtaatcgattaccacatttatgtaattgattaccagtaaggaattttcaaaaataactcctaagagtcacaactgttcaagaagtttttgaatggccatcataggcctataaataggtgacttgggatatgaaattccttagagtgtttttgaacaacatagtcttatcctcttaaaaccaaattgtcttatcactctcagaatattcctttggcaaaatacttgcaaatacaataaagaatcttgatcgaacttaattgtaatatccttctttaaat

SEQ ID NO: 252556 - DNA, 370 bp, Glycine max
  unsure (1)..(370): unsure at all n locations
tgcctcatagaggtccaggaaggacaaggctgcctaatgatcnatttccgctccggagtacgacagtcaccgctttaggagcgctgtacaccatcagcgcttctaagccatcaagggatggtcgtttctccgggagcgacgcgtccagctcagggacgacgagtatactgattttcaggaggaaatagggcgccggcggtgggcaccactggttactcctatggccaagtttgatccagaaatagtccttgaattttatgccaatgcttggccaacagaggagggcgtgcgtgacatgagatcctgtgttaggggtcagtggatcccgttcgatgccgacgctatcagccagctcctgggatatccgatg

SEQ ID NO: 252557 - DNA, 355 bp, Glycine max
  unsure (1)..(355): unsure at all n locations
agctntgaattcattctatgcacccttatgtgttcattcttgcnttgnatgtttacatcttcattcttctactttaggtactctttntctttgttntaagcgagtttcaaccgatcgtttaagtcgtaacctcacttaattaatctttaaatgaatttcaaccgatcgtttgtgttggaatctcatttaattgccattaaaataaaaatcgactgatcgttcatgtcgtaacctcggttaaatcaaaaaataataaaataataaaataagtgccaaaaaataataaaatttgaccgatcgttcatgttgtaacctcaggcacacaaacaccaacactttttgcacacacggtgag

SEQ ID NO: 252558 - DNA, 354 bp, Glycine max
tcaggctgctcaattgctccaggttgctgcatggtatgtcttatgttgtatgggggtcagcagaggagcacaaaccacaaacccttgcgacaggtacatatttctgattcaaggccagctgggttaccaagttaaccaatgcatccagtttgccttcaagcttcttagtctcagatgatgcagctgagtttgtagctacctcatgcactcctctaatgactatggcatcatttctggcactaaactgctgggagttggaagccatcttctcacattaaattttggcttcagcaggagtcatgtctccaagggctccaccactggcagcatctatcatacttctcttcatattac

SEQ ID NO: 252559 - DNA, 265 bp, Glycine max
ccccaggtaaatgccacattcttcttcaccagctcatagagaggtgatgcaattgtagaaaaattaggaacgaaccttctatagaagcttgttaacccatggaagctcctaatatcttccacactttttggggtgggccattcttggatggccttgatttctcagggtccacttggaccccatttctaccaactacataacctaagaaaactatattatttacacaataggtacacttttctatatttgcataaaggtgtttttc

SEQ ID NO: 252560 - DNA, 459 bp, Glycine max
  unsure (1)..(459): unsure at all n locations
tatctctcttcaaatcgtttacgtattattctttccttatttgcatctatagcggattcctcgggtgttttcactgaaacatatcttatggttcaggtagtttccactactataaaaaaagactttctaagacagacaaaaataggatactacgacggttgttgtctgtcgtataagcccacatcgtggaaagttaaacctttcaacgacgaatcaaaaaacaccatcttagaaagggagcaattttcaaagacagtgcttacgtcagcactgtccttgaatcaaatattatttttaattattgatatttntctgaatgatatcccatcacaaaanatatacataattaacaataatttatattagcatgatttgtattaatattaatagtaaaattattattcaaataatatctaatgatagataaatcaaataagaggtcaccaatatttatattaa

SEQ ID NO: 252561 - DNA, 363 bp, Glycine max
  unsure (1)..(363): unsure at all n locations
ctgcagctataancntcatttttatttttgttttagacttctaaaccttgcaaagctctagatggtatttcattcacggttctccttgtctcgtttctcacattctaatactttgctcaaatttaaacattatttgtcccaagtaaacttaccagccaagtgttgaaatatgaataagtgttataaaatatctctagctagaataaaggcagtcaaacaaagtaaaataaagttttattcaactgtatactaactacaagaggacagatccttattcttgcagatgagtcagtggaggactctgtatctcactctgactcaagggccctaactacccttctactcattcgggacatacaggga

SEQ ID NO: 252562 - DNA, 382 bp, Glycine max
  unsure (1)..(382): unsure at all n locations
actcagcttgatacttttaattgcagcaatatatatttctgttctgtatcttgatnccaaaggaatatattgcagtatgttttttgaggaattgtgtatgcaccattgcctcgagagatatatatgacttacccaatagctactntgacaatcataagactatcatctttgtaattaaagcatgagcctaaccagattcatactgctccagaagcaagtgtgttaacgttctagaatcaaatacacaattatgagaataaacaattgaattatgaatctaggcttttcttttatcaaaaatgtagtattaattgtagattttgtagcgggaataaatttggattttcttcttcacttttacaccatgtctcaaaaatgtact

SEQ ID NO: 252563 - DNA, 463 bp, Glycine max
agcttggttcccaatgctctgtttaggctcttacatttatctagaggtaaacctaggatctctatcagacactatgctagatggcacaccatgtaatctaacaatctcactaatatacagggaggtcaacttctctaaggaaaatcttatattaatgggaataaagtgagcagacttggtcagtctatcaacaataacccagatagaatctaaacctttgagggttctaggtagtcctacaacaaaatccatggaaatgctgccccacttctactagggtatctccaagggttgtaacttccctgaaagtctctgatgttctatcttagccttctaacagactaaacatgcatacacaaactcactaacgtctcttgtagaaacaagcttcatgaagatgaatcaagttgattcaagtagtttcgatgatgacaaaaagcccaagagactgatttcaagattg

SEQ ID NO: 252564 - DNA, 463 bp, Glycine max
  unsure (1)..(463): unsure at all n locations
tgaaggcaaactggatgcgttggtcaacttggtaacccagttggtcttgaatcagaaatatgtacctgtcccaagggtttgtggtttgtgctcctctgctgaccaccatacagacctttgcccttccatgcagcaacctggagcaattgagcagcctgaagcttatgctgcaaatatttacaatagacctcctcaacctcagcagcaaaatcaaccacagcagagcaattatgacctttccagcaacagatacaaccctggatggaggaatcaccctaacctcagatggtccagccctcagcaacaacaacagcagcctgctccttccttccaaaatgctgntggcctaagcagaccatacattcctccaccaatccaacaacagcaacaaccccagatacagccaacagttgaggccccttcacaacacttcctcgaagaacttgtgaggcanatgactatg

SEQ ID NO: 252565 - DNA, 461 bp, Glycine max
  unsure (1)..(461): unsure at all n locations
ngaacttcaattgtactcctgtacactccttaactagcattctctatgtgtattactgctactaatacaaaatagatatagctacccagaattcttgttttagggatttgttccccctcccttttgagctgatagagatctgtgggcactgggcagaatgaaacagatcatgagttccttttaaataattgggaggcagggctagaatttgattaaggggaatgcaaatgtgataggatccagcaatcaacaataggtaggcctttccaggtttatacctagaggcccaaaactcttaagcccaacatgcctgttggcagaaattagaagttaaggcgaaggttgttatagagaaagtagttacagagagagaaaggggaatctgttaatacgagccaggttatcaaacttggagtctattgaactcatggcacaacttaactcgagactcgaagatctac

SEQ ID NO: 252566 - DNA, 348 bp, Glycine max
gcttgaatcaattacagatcatccttgtctataaaaccttgtcttctctctctttgcgcagaccctcattcctccccttctccttaacagagcccaacctccctaaaacttcaaatcctcataactttcttgtgtcttaaccaaattacttcatacaaagcccaatcttcttctttttcaatgctctacagagcccaccgattaaaattagctgaaacaaccttcaatggaagaatcttcgaacaaaacaaaagggatcctgctcaacaccaccactgaaagccatcaccgccatagaacctttggtgacccaccagcacccatttctccttctctttcatcttccca

SEQ ID NO: 252567 - DNA, 445 bp, Glycine max
agcttcggggtcgtggaactactgactgttttgattcgtggcgcttgtcacggaactcatgaggaagctcggggagaccaagcccaatttgaagtcaagtgttgttgctgtttttatcgccaatgaagagaattctgcgataactggtgttggtgtggatgcacttgtcaaagatggcctcctcaataaactcaaggatggccctctgttagtctttctttcttatatatatctcttgcatttgtaaattaagagttaaagaaatgtgtcagtagcaattgtaatgcttctgctcaggtattggattgacacggcggataaacaaccatgcgttgggactggtggtatgataccttggaaacttcacgtcaccgggaggctctttcatagtggattagctcataaagtatgctcttacgttattcactacaattcatgttcttat

SEQ ID NO: 252568 - DNA, 452 bp, Glycine max
  unsure (1)..(452): unsure at all n locations
ctaagccttggttaaaaggagactgttgagatactgactatttgttgtttaatacatttggattatgtttaaacatcgcaagctacacagataagatgtagccactgatttgtgcacttttaaatgctcaatagtgcttttaaacatactcaattcaactgaattaatatatatagtttttcttaagttagttaggagactttaaggcagttgggaaacactttgtgatatacaaaactctctctgtccttgagaaaaaggattactctcatcaaattgttaatggagatcatttctttctgtactctcttaattggtctttattcctntacaggtattactgaatccttatcttggagaaagaggaatctcgtgtttcaatttatttcatctcaattaatggtttatcatcatttgagtgaatnttatggtttaatgttatctttgattga

SEQ ID NO: 252569 - DNA, 462 bp, Glycine max
  unsure (1)..(462): unsure at all n locations
gcttctggggggacaatctgacttgctntccaatctgacattcttcatttattctgtcttcttctattttcagattgggaatgcctctaacagcacctttgtcaatgattttcttcatgcctcttaagtgcagatgtccaaatctatgatgccatcatttgacttcatcttctttggaggatagacatgtggaagaataactggtttcttgaagtgtccataagtaacagatgtcctttgatctgctgcccttcattagaacttcactctttctatttgtcaccaagcattctgactttgtgaagtttacattgaatccttcatcacacaactgactgatgctgatcaagttttgcagcagtcccttcaccagcagtactttgtcagactaagaagccatcatgactagctttccatccagtgatcttctttatagcatcttcaatgtacatactagtgagc

SEQ ID NO: 252570 - DNA, 379 bp, Glycine max
  unsure (1)..(379): unsure at all n locations
agctngcattgtgttggagtgtacatccactttttaagtatttgacgaagagaaaattttcaatagaaacaacctatccaaatattgattcccagatttctaagatgtagataaaagtataaaaaaacaaaaacattgtttagatttttaacgtgtacaatatttatatataattggttaaaaatttttacttgattattggggcatcttttgattaataggaaaaaatctactatgtaaacacaactttgtagtttgttattgaattaaaaatattgggcccattctcataatgttgctctgaattgagttaaaaaaaatatcgtttggatatacctgaagttgtgtttgctgtggatccgtgctggtacatttggat

SEQ ID NO: 252571 - DNA, 240 bp, Glycine max
tctggctccttaggatttgagaaatgtgtggatgaatactatattctatttgggcccgaatggacgctcgtgtctcccatatattctgagataagaatgtatgcgctaactatggggtagaattactctattatgttggaagataaactgtgaatttggtagacgtgtacaaggggagatacttgggattgcatggacagagaaatacaggtaacctttcgtatttggattgacaaccct

SEQ ID NO: 252572 - DNA, 273 bp, Glycine max
  unsure (1)..(273): unsure at all n locations
agtgcaagcagatggtttgctcatgccaacaaccatctatgttgtaagcatctctggaggaagaagcttgttatggtatgtaatgatatcataattctcgaacgatatgatcaataaactctgaaatctctaccgagaattgaagcagacaggccactaagatttctaggaggaattgtcgataagatggattttgttctcaaaagtcactctaatacttcagaacgngatcttgatgaaacagcatgcacataaacagcaaagaggaaagaa

SEQ ID NO: 252573 - DNA, 335 bp, Glycine max
  unsure (1)..(335): unsure at all n locations
gctcaactaaccccaaaagagtgtttttgaacattttttatcaaanccccttcagcttgtaaaaaaacctccttctccatactttaattagcttcatacagaccttttctcgaacaagatggaaaacttgagtcttggacctaccaatagtaataggaaagccctggtatgccatggaactctccattccttaactccaagcggcctgtgtagttcatggtgacctgtactaagcacgtttcggctacaagaaagctcctatttgttgaggctgacatgttgtctaaaagctaattcatattccctgacgatagaagaaagatggttagcctctt

SEQ ID NO: 252574 - DNA, 226 bp, Glycine max
gcacacggacacatgaaactagctttttcaggcctgctgggggaaaatttttttctgcctcctgggggaactctcttctgactatcctgggagagccttctcctttttctttcttcctgcactctggtgaacacattgaggctttgagccaaatccgctctttagctttagcacttttaagggtttaacattactaattgggccctaactcttatttacttacttc

SEQ ID NO: 252575 - DNA, 476 bp, Glycine max
  unsure (1)..(476): unsure at all n locations
atgcaagctttgatccataatcccaacttatttttattctttttcaggtgagaatgcaatccttgccctccgnaaacaaaaagaacgataaataaataagaaaaatttccaatcaaagagtgggagaaagcaataaaggaatgaaaattcccgatcaatgatcggataaaaacacaagatacatccagaaaggtctttggaccatacaatatctgaatagtacaaaattgtcaccatagtaacaaaaaagaaaggaaaccacgacccaaagtggccttctccctttgattgccaatcaaaatcttgtgcactagcgactttctcgccccggactaaacaaaaacagaaaaggagaaggctaaacattcaagccaaaatttccacctaanaacattcccaaataagcctattgaccatgacacgcatgtaattttgatttgataggatgtgatttgcaatcaagcatacatatctat

SEQ ID NO: 252576 - DNA, 287 bp, Glycine max
  unsure (1)..(287): unsure at all n locations
ctcagcttaaagcatacctcntagaggtctgtcaagttgttttattttatgatnctctttggaagcttccaaaaagaaaaaaagtaaaaagctcttttattgtccaaaacattgttttcacttctaaggcttaaaactcctacaccttgacacgtttggaccaactatgactacattcctttctggatgcagatatggtctggtcatacccgatgattacactagatggacatgggtcacgttcattactcacaaggatgagtctttccataccttctataaattct

SEQ ID NO: 252577 - DNA, 295 bp, Glycine max
  unsure (1)..(295): unsure at all n locations
cggacaaaatcagccttaaatgcaagggttgggcactgtgcgcttgagactcatggcatagcgcataaacagagatgcgcttagcgtgaggcttgcgcttagcgaaaggactaattttcagaaaaaagtcttctaagttatttttcagtcctnttnttccaaagaaaaactgaaacctttctgttaagcattcaaagataggatgatatactcctatgtacagatcatacaacaagttccaaatgattaaatgcatgataaaacaagataacaaaaattaaaactgggttgcctc

SEQ ID NO: 252578 - DNA, 333 bp, Glycine max
tgaccacagagcggtacctggagatatgtcgcgggggtcaagagacctcggggacgtcatgtggggtgctattgcccaaaaccaagcttgaccaatcccgacccaacccgggcatagtcggtcagtgagaacctgtgatgtacctaagcaggcgagctcctggcagtcaacagataaaaggaaaacaagaccacaaagcaaggaggcttgtggtggctggccagctgtgaatattgtgtaatatgtggattgtggcctctggtaatcgattaccaaggtggggtaatcgattacaacgcttaaatatgaagacagggggctaagatggtctct

SEQ ID NO: 252579 - DNA, 306 bp, Glycine max
  unsure (1)..(306): unsure at all n locations
aagaaaggactatattcaaaatatcttatatataagaaaaattgtggtagcttcattgaggaaaagatgacagaaaattaaggtgtgttagacaccgtaaaagaaggccatgggaggcaccaatgagaagagtaggccgcctggtctttattctagtgaaaaggagaagagagagccaagatggactttggaggaatttgtcangggagatctcatgataaacaatattcttgaaagcttggcttttaccaaactgaatggtgttgtatgattcatgtagccgagtcgaccttacctagtgggata

SEQ ID NO: 252580 - DNA, 386 bp, Glycine max
  unsure (1)..(386): unsure at all n locations
atgantttaccgagagagagtgacctaacttactagtttctagtctgtcttgtcatgtactcctagacgtccgaagaaatttttcattgacatgataccacattgcataatgattgagtcttaatgtatctgttgcataatgcttatgtaatgatcattatgacttgttacgtgatggtgggtagtgaattgtgtgaacgtgagatgttgtgttatacttgatatggttcttctaaacacgtgattaatgtgaatgtgtgaaatgtgattaaatccttatgacaagtgatgttacgcaatgagtgataaaatgatgtacattgtgctaagtttagtctggtatacttatgttatatatatgagatgncatatgtctctacctattt

SEQ ID NO: 252581 - DNA, 410 bp, Glycine max
  unsure (1)..(410): unsure at all n locations
acctggntcaagcacgactttctttctgcttttgtggcttgccttgcatagctcgcatttttcttttcaatttgaaccttcacttgctcatgcaacttcttcacatactcagctntagcctgtgcatccttatgcttaaacatagcaatgttaggcataggcaacaaatcaagaggagtcaaaggattaaatccatacactatctcaaatggtgaacaattagttgtgctatggacagcccgattataagcaaactcaacatgaggcaaacaggcttcccaagatttaaaattttctttaaaacagtcctaagcagtgtgcctaaagtcctatngactacctcangttgaccatcagtttgtgggtgacaagtagtagaatacaacaatttagtaccaatcttaccccac

SEQ ID NO: 252582 - DNA, 438 bp, Glycine max
  unsure (1)..(438): unsure at all n locations
gcatgttctgaaatttaaattttatatcttgtgacttggcaacctatgcttccgcagttctggntatagtaaatcctatcacaatcagggagggatttctagtaatctaatttgaagttggaattcgatgatctgcaggctctgaatataatgatcaacaacagttggtcttaaccattggtttcttcaactttaccaaaaaaaaagcggaaatataaaatattaacagtttttttatacaaatatattataatacacccagccaaatacgtattaagggtttgttacttttgtagggtgacatttctgttataaagattgaatttcccctttatcagatcagtccaaattaaatgtgaaaaggccaacatatttcgattattggcttttatgaaaggacttcagtcatacacattgccacattgacaaaattaaaca

SEQ ID NO: 252583 - DNA, 285 bp, Glycine max
  unsure (1)..(285): unsure at all n locations
atacaaaacaacaaactcatcataaaatacaaaaaggtcgaaccttttggcttgaagaatcgaacagcttcgtatacaaaaccacaaactcatgataaaatacaaaaagatcggaccttttggcttgaaataccatcgtacaggccgagccaagccgaaaacgaanaacaaaaatgatgaagaaagacaatgaaaaatggaaaccatggagatgaaatccatacgagagagaattcagaggtcacaatggatatggaaatcggaaaattgcaaggcatgaacact

SEQ ID NO: 252584 - DNA, 395 bp, Glycine max
  unsure (1)..(395): unsure at all n locations
gcaatgcagtagaagggggtaaagacaatatattactacaattatatgaacagaaaaccattgcacgcaatcaccattataggatttgtgattcattatgaatcacaggagcatgaccgaaaatataacagccgctgtgaaaataacataacaattgtctcaaatacaggagaaaagagatactcctacgccatcattagccggttntacttattgccgtcttttaaaaaaatggtgcccatttttttcgaattggggtgatgatgtcgaagtccaacggtgtgtcattagcaaaccactgcaagtattcataattgaagttagtactgcanatataanaattcagtccaattgactgaagttatgcataccatggaccagcactcttatgcgct

SEQ ID NO: 252585 - DNA, 431 bp, Glycine max
  unsure (1)..(431): unsure at all n locations
tggcaatactgtataatctgagtatggacagtgagaaccattcatttcttgggctgctggagcagngcaggtcttaaaaagaattgttctaactaatagaacacactgngaacgagctcttcttttactcaggactttgcaaccgtgatgagttcaagggtgtaaatcttgaaacagattcctcgttgtataatgcactttttttttggtacaattgtataatctacttaatttatgtgtaaaagaaaatctttacccttgtaagttattttataatgcaatacacaaaagtctataatcaatattctatccaaacaagttccctttcaaatatcacattcaatttcaagtatcaaatttaagacctgatacttaatatcaatttcagttccctttcaatattctatcaacagttatattagcatgtatca

SEQ ID NO: 252586 - DNA, 391 bp, Glycine max
atagctcttatcatattaattctctgagacatgtcccacaacaagacgttaatgaataagcataataaggaatgccatcaatatgatcgcaaaatgccacctcaaacacaacaacagtgacataccttcttcattcaacatgtcatatggaccaggaaagaaaaacacatttatttaacaatcaaggcacacttaacattacaggacaaccaaagccaacctaaaatcctaaaatgccaaccctaaaacaatctctaaattgagcaaacctaaaccttaaacatctaacttccaacttcagaatctcaagaccaaacttccaaaaaatcaaagctcaaaccccaccttagaacccacaaacatatttcttactacatcacagaccaataga

SEQ ID NO: 252587 - DNA, 342 bp, Glycine max
  unsure (1)..(342): unsure at all n locations
tatctccacatgccctgaatgcaagaccccagccattcattgtcactgctcgttctggcagtctcccaatggtaaaccacacatttctctccttgtcatacttcttaacctccatgtcagcataatcagcagcatacaattcatcatttacaacagcaaccagaggtggtgcctcagctgttgcaggcatctcaggacccctactactacgtccggnggacatgttaggaatctcagtccatgtcctagtctgtaaattgtactcctctccacatgtgaggagcttagagtcactccccccaatcccccctataacataaaactttccatccataaataccc

SEQ ID NO: 252588 - DNA, 461 bp, Glycine max
  unsure (1)..(461): unsure at all n locations
ctcaagcttaaccttgtgcttgaaggctacatactgctcgatagattaccccagaacaacaccattataggcgtaggttgcattgggattgtaccattgaggaaaatgaggttgatagacttttcccgggctcacaacaaccatttggttgctgagcaaagatggtagcaggtcggcataaggcattggtatggggtgaactccgcgggttttctttctgggaagttcctccttggttttgtgttagttttggggttgggatcgggtgtttaggtgtcatgaggcatgtaaagcataaaggacaagcacaaagtgtgactatatgatgtggcaatggggtgtagcaagaaaatggctcacctcccctctaaaattaattggatggngctctccaatcaattaaattatttctacacacacatcaatactacttatactgtgaatacaaactaccctataca

SEQ ID NO: 252589 - DNA, 451 bp, Glycine max
  unsure (1)..(451): unsure at all n locations
gcttatcttataatcaagcatccaattcactgatgtttgtatatngaacaacactctcataantttattctgttcgatattgcccttccaaacttattcgttcttcccttcgacacagacacatataagcaaaatgcattatttaaagtaaattattgttatctaaacctctgccgatcctatataataatattgcatatgcatttcttgaaatggaattttatacacatataattaagtgataagccatcatgtttaatttgtcaatcaagcatatgaactaaattattattctttagaaactaattatgaatactaattaatgaagatgattgcttagtggggaagcatacatgatgcactaactgatgaagtatgacccacanattaatatataacacaattcacaaagtcaaattaatagagctagttgatcatattaaacacaaaa

SEQ ID NO: 252590 - DNA, 430 bp, Glycine max
  unsure (1)..(430): unsure at all n locations
tgtcggngaagagagaagagaagaagctntntgctaatgtgacacagtgagaaaaagagagaatgcttccgggaagaaaaaaaatgctttttatttttttaactgaagggcaaaattgacctttcattgaattgctgggtgcaccagcaatattgctgggtgcacctagcatatcccctattctaggtaccaactgacacaaacctattggactagattggttccatgtaatcgatatgggcttattgggctagtctggaataattaccacctaagttggtagtttatgttgacatgaagtgttgaactttttatgcacctccaacatcttgaaatgcttcactttatccaattattgttttgtatatgggctgaagtatgaatcaattgagttattgtagttaccaataaagttagactaaatggtcga

SEQ ID NO: 252591 - DNA, 483 bp, Glycine max
  unsure (1)..(483): unsure at all n locations
acctgcggcattgcaagctcttcagtcccttggtacctatatattcttacagttaataaacacaagtcaatgacaggccacactttttttgcaacaatatttgttaataataataaacaanaaaggaaataccttttttaaaaaacggttttacaagatgtgtccgccaagcaaggaaggtgttaagggcctactccactaagtgaatctctttagtgggtatagggatgcanacaataatatctcaaacttcatcaatacctatgttcaccaaatttttgcgcaaaaggatgtggtgcacgattattgacctcttataaactctttcaagggcaactaggcagggagaattgcatcaggatacaacccacacttgtctaatgcatccgtgtctgggtcatgctctgagggatcaacacaactttcctttatcctgacatggacactagaaggagctacctcangctcaacaggaggtacaat

SEQ ID NO: 252592 - DNA, 379 bp, Glycine max
gacactatgaaactcagctactcttaagggacatgaattgcaccacatagattttcttttcacatgaataatgggaatttttccatccttctcccaatctcgatgatgctttgctttcattggattaaagttaactcttttatccaacactattacaatgaaaatatttttcctcattgaatctcatgtactaagtttcttgtctgaaacatgaatatttgagaacaagtcataatattcccctattgagaatcccacttttagggctccttgtaccacttatttttagataactccttctcaattaatgcaaaggtggctacctacctttgaagcatacttcataaaaaaacaaacaatttttacttataccagggac

SEQ ID NO: 252593 - DNA, 351 bp, Glycine max
agcttctacttatgtggcagggcgggctttctttatctttttgtctccaacgcgagctttaaccactgttctttcttcccgcaatgcttcttttcatgtccgcctgagtgggcttataacctaaaccatacttcccacgatttccttgggtatttatcaagctagttatgccaccgttgtctttgcctaaacccatttcgggttcataacccgtccccaacataactcgggccatcattactgctgcatcggacagacaaggttgcccagagagggagtccacggaggaaatgctgaccaccttcaaagactggaaagcgggttctaacgattcttttgcggcttccacat

SEQ ID NO: 252594 - DNA, 212 bp, Glycine max
  unsure (1)..(212): unsure at all n locations
aaaagttatgaccatttcaatttcacgagggcttccgttgttcaatattgagcgtctctatatattatgcgcccgaatcggatntccttgtgaaacgntatgactatataaatttctcgagagcttacattgttcaatntctagcgtctcgatatattatgcgcctatatctcacatccgagttaaaagatatgaccatntgaatttctcaa

SEQ ID NO: 252595 - DNA, 430 bp, Glycine max
  unsure (1)..(430): unsure at all n locations
tgcaagcttctacatgtntattgtgttttctanagagttatataggtccaagntccagagagttatagagatttttgctgtgtgaagaacttgcagaagaatcgagcttcgaagggggaccgtcattctttgagagctctgacantgtattttgtgaagtgatttgtgagggctctaagagggngtgaggagacactcctcaccaccttgtattttctttaatccttcatcttctcttctcttttgttgaaaggaagcttcccagttatggagagctaaatcctctgttggttcttccttgtaggtacttgatgtaaatacctgtatatctatttaatgatgtcttatgtgttcactgtgctatcagaacttcattctaccatggttttgccttgatgatgaaatgcatgtgttttagaacattcaacag

SEQ ID NO: 252596 - DNA, 433 bp, Glycine max
tccatcaatctacacaatttacactaagtctactatcacacattataaaggtttgggtggtctcttggagactcccaatccacccctaagaatgtctaaacataagaattgcaataaaaaaaattcagcactcaattgttttattacaagaaaattacaaagcaattaaggtcttcaaatttgtcttcagtgcttgtttgttttcttaagtgtttaactcaaaatttggtgaggctttggttatttcaaatccaatggtgctcctatgagtctagatgcttatgtgttattaatatttatattatttattatttgccatataaataattattcttcattatctttgtttgaatattctttaataagaatagacattattgcgtatagatagttgattgataatttgataaatttgttggtgatgatattattg

SEQ ID NO: 252597 - DNA, 440 bp, Glycine max
ctaagcttaggttgctattgactccaatggtgcaagaagacttatattttatggtgatctgcagaagaacatagaccacatactcttgcacaggtgcatatttctgattcaaggcaagctgagttactaggttgaccaaggcatcaagtattccctcaagctttatattttcagctgatgaagatgaatccgcggccacctcatggactcctctaaggacaatagcatcatttcttgcactaaattgttgggagttggaagccatcttctcaatcaaattcctagcctcagcaggggtcatatcactaagagctccaccacttgcagcatcaatcatactcctctccatgatgctaagtccctcatagaaatattgaagaacgagttgctcatatatctggtggtgaggacagctttcacacaatttcttgaatctttcc

SEQ ID NO: 252598 - DNA, 324 bp, Glycine max
  unsure (1)..(324): unsure at all n locations
caaagggcttcttattcaagctaaggctgtagatattgccctaaagtagaattagttacgacaggatcgacaataaatttggctttgattaacccatccaacaacaaataaatntgtgttgttcatcaatcaaagaatcataatccctaaaacataatccacactatgtcgacagagtgagaaatcgaataaaaagaaggttgttaatctagttgttggatatgtagagaaacttcccaagaaaagaaagcagtgctaaaataatttcgacaatcaatattaagcgccttgcacctaanaactgattcacctaacttcaacatg

SEQ ID NO: 252599 - DNA, 346 bp, Glycine max
cctcatgcacctccctaatgaccatggcatcatttttggcacttaactgctgggagaaggaggccatcttctcaataaaaaatctggcctcaacaagagtcatgtctccaaaggctccaccactggcaacatctatcatacctctctccatattaccgagtccttaataaaatatagagaaaaaactgttctgaaatctgatggtggcggcaaccggcacataacttcttaaatctctcccagtactcatacaggctctctccactgagttgcctaaaacctgagaaatccctcctgatggctgtggtcctggaaccaaggaaaatttttcaaaaatactctctta

SEQ ID NO: 252600 - DNA, 399 bp, Glycine max
  unsure (1)..(399): unsure at all n locations
tactcagcttctatgaaggtttgttcctaatatctctacaactgcatctcctcttttgagccgatgaagaagaatgtggcatttacctgtggtgaaaaacaagagcaagcctttgcttttctcaaagaaaagcttactaaggcacctgtgttatctccgaataaaagtggagaatggaggataggcgaacagcgctaggcaatcaattcggggggttccagactcgatggtggaggacacatgaacagagctaggcaatcaattcatgggtctccgaataatatttgttggcaggaccaaatggtccaccgcgttttttcacctaaaaaggcaaacatgctttttgcaagaanacataatcattcgcgcgagcaccatatcttatagaaacaatatacc

SEQ ID NO: 252601 - DNA, 153 bp, Glycine max
taactaagctgccaaaaattcaacatgcagctttttttattatgccatgccagtgacaaggatagctcccccaagtttgattacgggaacgtgggggtgaggagtatcctcattctgtgattctcaagcttgatggccttctatggacaagcc

SEQ ID NO: 252602 - DNA, 311 bp, Glycine max
gtgggatcctctcacccacacaccctcttttttgttcatagggatgcgaacaaagtatctaagtacctggcttctttagcttccctttttgaggatagacgttcggattgaggaagctttccctcaaattctttcccttgctaatgatgacttacgacctctagccactttccagctcattatatcgcttacttcaagaacaaaatgaatcgacaatatccatcctttgatgagtgaatgagatacaacatggaaaaattattattataacgagaatttatattattctccttctctctatctgagtgaaa

SEQ ID NO: 252603 - DNA, 331 bp, Glycine max
  unsure (1)..(331): unsure at all n locations
atgggccacgctcttcaatggcatatacgctagcccctccatgactggctagtgggtaggatctaacgatggggcccccctcttggaatgatggccaaccggcattaaataggggtagcacctcatatttgaacggcaggcaggagtcaatgttatgtcagggggctccactatggtatgacacttggcatncgagttgtacccctagaggtatggtggctggaagacctctccgtgtatggccaccaccaaattattttccaataatgaaggccacaactcggagtatgccatgggaataggaaagaaatcatttctcggggggtggcgg

SEQ ID NO: 252604 - DNA, 278 bp, Glycine max
cacagagaggaaccgggatatatttcgcggtggtcatgagaccttgcggacgtctagcggtgtgctattgcccaaaaccaagcttgacctatcccgaaccaacccgggcatagtcagtcagtgagaacctgcgatgtacctaaactggcaagcttctgtcagtcaacagatcaaaagaacaaagaccactaagcaatgaggcttgtgtggtggctggacaactgtgaatcctgtgtgatatattggctatggcctctggtatcaattactaagggtgc

SEQ ID NO: 252605 - DNA, 227 bp, Glycine max
  unsure (1)..(227): unsure at all n locations
caggttaacgataactcccctgtgctttttcttcccttctatatggtgcaaaggcattgatccagtcattgttgatgagttggaatatgaggtcgcaattatactgcgccagttggagatgtattttncccctgctttctttgacatcatgaataacatgactgtgcatctggtcaaaaaatcaaatgtgtggccttgttattacggtggatgatcccggtgacgat

SEQ ID NO: 252606 - DNA, 322 bp, Glycine max
  unsure (1)..(322): unsure at all n locations
tgaagctctgtacctcttgttttacatttggcttcacatatcttatgaaggcggggttgaattaagatattcccaactgtttcccctaattaaaaatctatttcacttgttactcaagttatgaattcccttaatgacaatcttcttaaatatttattctaatgaaacaatctgaatatgaatataaagcantaataaactaaggagattaanggaagagaaaatganactcagtntatactggttcggcacacccttgtcctacgttcagtccccancaacccgcttgagagttcactatctttgtaatcctttacaagtc

SEQ ID NO: 252607 - DNA, 399 bp, Glycine max
  unsure (1)..(399): unsure at all n locations
cgtagcccaccatcttttcatagtagagtatctataatgngnctaccatcacgatcatcgnctccctatccatcattgggggtaccacctgggccgccagatccctccaccttttgggcgtgttctttgaaagatccagccccctttttgcaaatgttctgtagttgcatcctatctggaaccatatcaaaattgtactgatactgcctaacaaaggcaaccattangtccttccaagaatggactcgggaagattccaagttagtgtaccaggtaacagctaccccagtaagactntcttggaagggaatgtattagcaatcctcatcttttgcatatttccccatcttctgacaatacatctttagatggttcttgggacaagagtcccctcgtact

SEQ ID NO: 252608 - DNA, 379 bp, Glycine max
  unsure (1)..(379): unsure at all n locations
tgtcggttgccttgtatnggaggatgtctntatattcttctattgacaaaatattntgttggatcttggtctctagttattaggcatgacaatgggacccaaacccaaggggcccaccccggacctgccccgcttttaacggtgaaaacccgagttgaccacggtcggggtcaagtattccctgatagccaaagtcgggtttggggttgtagatgggattattaatacccgcccctaaacccgatccgctaataattaatttacaaaaatatcattacatatatataacacactaaaacatgaaactattgaattgaaatttatgttagtgttggaatggattttatgttggcatgtacaatctaaaaatatggtataa

SEQ ID NO: 252609 - DNA, 383 bp, Glycine max
tagatagaataaacattgaagtttagtacctcctacctttgtttctacaattcagataagctatttattagtatcaccttttctccaatggtatggctgttgattctgaaatgtgtttctttgcaaaacttcaagagcaaagaaaatgataattacagaaagggtttactgtaattgtgtgttgtatcacacatgtatactcttatttataattgaataacagtacagtttatggaaacataatcaagactatcaatgacaataatccctaattatcagctaatggtaattccctaattatagtaatcaaatcatatcttcaaaaacaatattgactgttcattctaaaacataagcatatgaactaaattcatatctttcct

SEQ ID NO: 252610 - DNA, 380 bp, Glycine max
  unsure (1)..(380): unsure at all n locations
tanacattcaactntgagcgtctcgtatattacgggacttattcttacattctattanaaagntattgccgtttgaattggctcataggttcaaaattcaatctctagcgtctcgatatatttccggactcattcagacatccgagttaaatcgtattgtcgcttgagttggcttaaaggttcaacattctatttctagcgttcctatatattaccgtactgaattggacattcgagtaaaccttattgccgtttcaactgctcttatcttaacattcattttcatcgtcttatatattaaaggactaatcatacatcttattcaaatgtcattgtcgcttgaattgtctcatatgtctaccattaatttctagcgtctc

SEQ ID NO: 252611 - DNA, 407 bp, Glycine max
  unsure (1)..(407): unsure at all n locations
acaacaaaccgccncacggccaccctttatttttcatatctacaggcgaagaccgaaccaactcacatgcaaccctaacatcgtcatagaggagtcaattacctctcaccccatcacgacaagcaaggtacaagagttagcagcacaatgcatgagcataaaatctcctgtaacaaacgattacattccaacactcaagcgataattaaatatgaaatggataaccgtgacaccttgattatcaatagtcacacacaaactcttgtatcccctaatctataagcatcatctaggctctccctcggtgtctacttatgacaacatcaaaccaaatgcaaatttcattgataacaccaccatcctcacaaatgggcagcaccacatggattcaactctagatgaggcca

SEQ ID NO: 252612 - DNA, 443 bp, Glycine max
  unsure (1)..(443): unsure at all n locations
gagtttgngagggagtcgtatgaacgcgcctatgataagtctgggaaattgaacaccaaatcaccgcaactcagaatagagtttgcagcttgcaagatgagtttggtgtaggcacagttatagaagacaatgatgctagagcgttgatggcaaccacagctttaaaatcatgccaagagaccctggacaagttgaaagagatacangcacaatcatctaaagatgctatagaggagcaccaaagggttaagaaagctcatgagatgtttgagacccttaaagaccaattcatggctaaatatacgagtcaacaagaccaagatgacgtggacaagtctgagagtgtaggaacagataaataatgcatagatgaagagatggatcacttcgagcaagagaagcatgacgtggcgatgtngagagagagatcaaacaaagttgat

SEQ ID NO: 252613 - DNA, 377 bp, Glycine max
  unsure (1)..(377): unsure at all n locations
nngttgttgtgtcaaatccctaatgtgntctctatttgtttaaatttccttcttgcttaactcctctcttaacttgtaatatttgaaatttcccccaataccacaactctttntcttcacaagggctgtttctaagttattaacaatttgaagattcttcataatattctctttaccgtcgtgtttcggatcaacgtatatttaatcaccgtaatgcactcttttacggccgaattaaatattcttcctatatacaattaactcgtttggatattctactaaaaggaatttaaaagttaaggattttaagaaagaatttagttagctacaaataatatttcaattccatctcagaaaaagacttataaatttcactc

SEQ ID NO: 252614 - DNA, 396 bp, Glycine max
ttgtcagcgcgggtgaatgtgttattttatgtcaccatgatacatgaagaaactcccaggagctatcaaattgggtgtgatcgtgccctccgaagttcgaattggggaactagcgaattgtcaaacaacccataatttccgtggcaaacacaatgtaattcgttagtcctaaccttatcgctaggcctaggctttaggaattttcctccctgtttgggcttgacttttgttaccataaatatatgaatatacaatccttcttcatttgttcttgccctttcatccattctcattctgctgcatgcttatttatgttgcgattaaatggtacaaatttgacaatgagttctatgaaggtaatgataccgaggacccagacatcaattatgagcaact

SEQ ID NO: 252615 - DNA, 353 bp, Glycine max
  unsure (1)..(353): unsure at all n locations
tgacacaacactctgagcataaaagagtgtgttcttttttataatgtatataggtgtatggcaattagaatatattacatgttcttgtatgtngacatgggtaataagatactttctacacatgcgcgtgtgcataaatggattacatgagtttggtctaaatcagaggggctagcacgacatttttgcgttaatataagcattatcttgtaaaactaacttctaaatgtttgttctcgcaggaaatggccccgaggaaacttgcctcacagagatccaggaaagattaagcggccgaaagaactatttctgctcccgagtatgatagtcaccgctttaggagcgctgaacac

SEQ ID NO: 252616 - DNA, 312 bp, Glycine max
tgagaggggaaatccgccgagcgcgttgagagctttagaagagacggaaggaacttgacaggcaagctgatgctttggaaatccaataagaaatcaattaagaaaatcttgaagaaaagactgctactacaaacttgtttgacatgcttaagaaaagcattcctacagagtctgacagaaaaaccaagtcacttcctcatgtgggtagagtaaaggacgatcttacttccgaacttatagagctgggatggtctgatatggatctacataatgaagacataaagccctcaaacctgatgttagagggtgaat

SEQ ID NO: 252617 - DNA, 340 bp, Glycine max
tgctatgacaaccttcttatgtatgcattgtgatgctcatatcttttttatgcacatgccaaatctatgacatcatattacataatgtaaagaggaacggaatatgagactcaacatacaaatttctatttatattggtttaccccaaccttggactacgtccaatcctcacccttcaagatgagattttttactaacacaaccaacaacgtgtctgaccagtttactgttggattgttacaactcctagccacctgtcgaacttctaaactagcaaactgcttgaccaacaatctactcttatttcaccatgcttaccacctattggacttttaacatc

SEQ ID NO: 252618 - DNA, 343 bp, Glycine max
  unsure (1)..(343): unsure at all n locations
agcttcgataatcaatatcgagcgncttattttattacnggtctcagtcaaacaaccgagtgaaaagttttgtcgttngaatttgctgagagcttccataatcaatttcgagcgtcttgatatattacgggactcaatcagacatccaagtaaaaagttattggcgtttgaatttgctcaaagattcgataaacaatttcaagccgtttgatatattacggcactcagtcagacatccgagtaaaaagttattttacgttcgaatntgctcaaagcttcggtctcaatttcgagcgtctcgacatattatgggactcaatcagatattcgagtaaaaaagtga

SEQ ID NO: 252619 - DNA, 258 bp, Glycine max
  unsure (1)..(258): unsure at all n locations
ctgagcanattctaacgacaataactgtgtactcttatgtctgtctgagtccacgaatatatcaagacgctcgaaattgattatcgaagctctgagcaaattctaacgacaataacattttacttggatgtctgaatgagtcccgcaatatatcgagatgctctaaatggaataccgaagctctgagcaaattcaaacgataacaactgtttacttggatgtctgattgagtcatctaatatatcgagatgctagaaa

SEQ ID NO: 252620 - DNA, 395 bp, Glycine max
  unsure (1)..(395): unsure at all n locations
agcttgaggttattactctagttatgaagttgttggatgaggggtttggtctgaaagagcttaaatccttgtgtttcgttggtgcctaaaataggtattactaggcaccaaatccctatgataggtggtatgatgaatgtgtcgagtggtgccacattcttttgtaaaatcactcatgcacctaaattcttcatgatttgtgtacatagggactcattggtaggttgtcttatttttagttcaatgcacacctaggtgctcatgtgggacaccttacgtttgtcgtaattntttggtagaaataatcaacatgaaaataaagaacaaggtatgtttattccattacttccctagctcttaatagtgatcaaggcttccctggacctaaagaaaaa

SEQ ID NO: 252621 - DNA, 376 bp, Glycine max
  unsure (1)..(376): unsure at all n locations
tctagtcaaggtcgtgagagaccatacaagtttcctaacgatntctaattatgtgggccattaagtctatcatatgctgacaatagtcgagaagcccatgaatctcttccgcggcggagtaagtgtctgccatcgccttggccttggctaacaatcggtgaagttcttgactcccgttcaaggtaagagcaaaccgatccatccacatggttgcctcttggtgtaagagtcgatacccttcctctacctctttttcgcgtatacttggcatattcgtcccaatcctatgctcggggccgggtagactaactttctggtcttggcatatagctacatgtggctctgctccataacctgaacagctctttgacttgac

SEQ ID NO: 252622 - DNA, 319 bp, Glycine max
tctctctagtctaaatccaagatcaagagatagatatcacctagtttgtctttgtttaaagaatcctatattggttaaaaaggttcgtcctaagataacatgactattcaggtgatgataaagagtttaaaaatgttttatcagtgctaaaatatttattttttcactggttatcgactatcacacattgacaccgatttaccagagacagaatacataaaggcttcttcataaagaagttttctcttttgaatttgaatttaaatgttgaatcgattaccaggcttgtattgattctatagaccgatatataaacctt

SEQ ID NO: 252623 - DNA, 340 bp, Glycine max
tagtcagattatccaacatgaagtgcatatgcacgtaaaaaatctatatacatatttaggcatataactgggcataaggccaagcattggcttagtaatcaattaggcaaaaattggatttagatatggatggtttcttggttctgctataagaggtggtgggatatatcaatcaactctctttcttatcatatggaccctaataaatctatgaagatttgataaaatatgtaatggaaacttaaatcttctaatgaagtaaggaaaacatagactagtgaaaataaactcctatataatagatacatgatcttctaatagagattcgtcacattcacct

SEQ ID NO: 252624 - DNA, 448 bp, Glycine max
  unsure (1)..(448): unsure at all n locations
tgagcacattctcaaggatgagagaatgcagttggatgcttatttctngaatgaaagtattttggttctccaaatgataatattggctattgtatttggaataagaatctctcacaatcaaacgattaaaaagtttgagcatataagaacttagaagcctcatactaaaccaacaagatatggtgtggttgagagataatcttgtcccttaagcaagttatcagaaatttaatctctatccatgcgtatgaaaaaacatttgtcataagaaattagtcctttaaatgtatgtcagtacctcaaataattcgtccttcgctgagagccaagggataccccatgttcaacaaataaaaaggctcaaactaattggaatgataagtcaaattctatggtacacactaacaacttatgctcataaacttggttatgtattacaaccgtcaca

SEQ ID NO: 252625 - DNA, 199 bp, Glycine max
  unsure (1)..(199): unsure at all n locations
cgacacacnnacagccacggatacttccccggcaccaggagaccccccaccacctgcaacgcgaccaggggaaccctaagacatgaccaaacccccaaaaccaaacacccaggacaaccagcctagaaccaagaggacagataagggggaaaaccactcaagagaccaaaaccaagatcccaaaaccagacaccacaaa

SEQ ID NO: 252626 - DNA, 387 bp, Glycine max
ggacacttaaaactaagctcaacctagaggagacggaccattccaagtgttggagaatatcatttactctgcctacaagattgacttgcctagtgagtataatgtaagtgccactctcaatgtggctgatctatctctctttgatgcagatggaggagccttggatttgaggacaaatccttttctagaaggagggagtgatgaggacataaccaagggcaaggaccatgaagcacttgaaggtgccatgaccagaggcagacttaaacaagcccaacacgtcatagagacaaggctgcgcatttgtattgctgccattgatgatgattgaaggcccaagcggagaaagatgaaggcccacaggcagaggcactaccaagactacta

SEQ ID NO: 252627 - DNA, 436 bp, Glycine max
  unsure (1)..(436): unsure at all n locations
agctntaacctcatcgtctctcacagtctttatatttgggagccaatccagtccttgtgttcggactctcagccacttatgatagccgccgatgatcccattactgcttcccctaagctctctgtcctttcttcatgccgcatcccatgccttgcgaactccttggagtaccctcgcgttgtggtcactgaaacctcgtgcgatgaaaggcgtgatgctttcgtctgatggcactcctctcatgggacatccttcgcatgaagatagaatcctgattcttccttccttctagcgagggaaccatttaacagacgcccctccatgctagccaagaagtggtgcacaacaaacaattcttgcgccgctctattcacatccccggacgaacgtgtcatacatggccataatggcgacaactggctttccttgcatgatg

SEQ ID NO: 252628 - DNA, 341 bp, Glycine max
  unsure (1)..(341): unsure at all n locations
ntganatagcttctggcctgagaacaattnttcttagttctcactcggagcaattggtcaatctaaatagtggatcgaaatttctgctgatttcttgaactgtggtccactacaacttcctttctgctatctaagactgcctatacgtgtcaatctgagaaggaaggtggtgtgggaacctattatcaacaaattcgaggctagattaaacaaatggaggcagagaagtatatcaatggctggcagaatcaccctaactaatgttgtcttaacagctctgcccttgttctacatgtcttttttcagggctccttcagcagtgattaacaagctcactacca

SEQ ID NO: 252629 - DNA, 373 bp, Glycine max
taagaactaatatagaaacgctgacgtgccatatgacaaaagatcacacaaacttgtgatttaataacattaaaatctatgaactagtaagtaaaggaaaatacaaatgtaaaaatattattatggaaaccgctgcttttaagtcattgggtaagaatattaacaacgatcttttgtaaagacattatatttgaaaagttaccactgcaccattatcggattctttaatgaatatttttatttaaattaatcaatactcatgtaacattcgttagaagaattcgcaagtattttatattacaatttctttcttggaatatttacttttaggagaaagacagataacaatttacagtccatatttgttaaaaat

SEQ ID NO: 252630 - DNA, 304 bp, Glycine max
  unsure (1)..(304): unsure at all n locations
tctncttacatgcagatcaagtaaaatgcatattatcatttgatcttatgtggacttcatatgtaccccagattgattgataactaagtatctcttttcatctctgttaggtataatgaagttgaaccatcaaacatagtttccaaaaagaggcattaccaagcttcatccataatggataatacaaaactatcacctttatcggaacatttaaagagaatgagacttgttactgaacatactgaccaagttttcctctacttcctagcttgattccttgcttaaataaaagagacacgtgtga

SEQ ID NO: 252631 - DNA, 482 bp, Glycine max
agcttcaagaataatggtctcaacaaatcttttatttctagaatgaaattcaatcaatagacctccaatctttaatggagagggttaccactactggaaaacccgaatgcaaatttttattgaggcaatagacttaaacatttgggaagccataaaaataaggccttatatacccaccacagtagaaagaaccacaatagatggaagcacaacaagtggaagcacaataatagaaaaacctagagatagatggtctgaagagtatagaagacgagtaaaatataatttaaaagccaaaaacataattacatctgccctaggaatggatgaatatttcagggtttcaaattgtaagagtgctaaggaagtgtgggacactctacaagtaacacatgaaggcacaatagaatgtaaaagatctaggataaacacattaactcatgaatatgaactatttaggatgaatgcaaatgaaagccttc

SEQ ID NO: 252632 - DNA, 439 bp, Glycine max
  unsure (1)..(439): unsure at all n locations
ttcacgtggttactaattcttntaacacttattgatggtggtagttggttcttcttaaatatgggcaaattaatgttagtagtacccatagcttatataggtaccaccatattccatgtgattatgtattgagtacttgtgactcaaaaatgcttggctcacatggcttttcttaatactttatttatatgtttggttaaagttaactataaaaagatttttacattaattaagtaagaattgaaataacaaatatcacactagaacgaagttgaatagtgttgtgaataaaatgtgaataggttaaattattatttanggtctctaaattattntcaatgttcaattaggtcttctaattattaaagatcttaaattggatcctctcattatttaacatgattcacttgattatttcatcaataattataacatcact

SEQ ID NO: 252633 - DNA, 336 bp, Glycine max
ttaagtcacctgcagctgcagcttggaacatgttcttatatttatatttatcaccttgtgggcaggggcacttatgtctgcagtttcatttatagtaaatcttatattacaatgagaggatttctagtaaactaatttaaagttggtatctaatgatctgcacgctctgaacataatgatcaacaacagttgggcttagccattggtttctcgaactctaccccaaaaaatagaaaatataaatacagttttttatacaatatatgacaataacccaatctcaatacgtattaatgcctgtacgtcttcccagttattagccaggcaaccgattga

SEQ ID NO: 252634 - DNA, 263 bp, Glycine max
tatgagatggagtcagattatctcgagttttttctagctcatgctcttctgaaccctctgcttagttgtgttgaagggtaataccaatcagttgttaatctctctatattgtcttcttttgggctgtataatctttgttgtaattaaaaaaattgcacatatatttattgcaacctacatcacgacgagataatgaaagaaataaaataaatctattttctaaggaaaccagagggaattgtcaccaaagttcattaaggaaa

SEQ ID NO: 252635 - DNA, 320 bp, Glycine max
  unsure (1)..(320): unsure at all n locations
gtaatgcatgggactaaacacggaaatttgtaagtccttcaagggtccactatgctaggctttatctcaattgtttacaagctcagagccatgcatcaaatggctcatgcaatgataattctttgtggcatctacattcgggccacatgagtgaaaaaggactataaatttctagcaagcaaggcttatttggaaatcataaggttgaaacctctttcatattggtagcactatgtctatgggaagcattattggacaaaactcacagtggtngtgcacactacaaatgccacattggactatgtctattatgactgcta

SEQ ID NO: 252636 - DNA, 254 bp, Glycine max
acttaaagccctttttttacaatttttcctcgcaagccaaatatttcgggattggattgcacacctgcctctgatccaactggaaatggaagggaggacccccggatttaccaaaacatatgtaaccttacggttaaaactttaagtgggcctagtttaagtttcctttgaacgccttggttttgtttacattataacaagatctatttactgtcctgccctcccatctatcattgaagttaatcttttcggaa

SEQ ID NO: 252637 - DNA, 319 bp, Glycine max
  unsure (1)..(319): unsure at all n locations
ccttgctaacccacggaagctcttaacatctcccacacttntttgtgcgggccattctcggatgacgtcgattttctcatggtccactcggaccccatttctacctactaccaacccttagaaaactatatattctacacaaaaggtacacttctctatatttgcatacaaggtcgttttcctaacgactgaaaaacttgcttgaaatgtcctaagtgatcaactaggcttctattgttcactcaacatatcattacaatacacaactaccaaatctacctatgaaattcacttaaacatgatgcatcagccctcataa

SEQ ID NO: 252638 - DNA, 214 bp, Glycine max
  unsure (1)..(214): unsure at all n locations
ccaactncattatacgcacagctctcaaaattggcatttttaatttttttgcctcacagagtatgtacctctacctttaaagtcgcaaatctttcttgctctacattatgtggaactgtctggaggatggaaaggggaagtgctctctaccataaaataccgggaaaaattcacctgccaaaattgtagaaattttgctcaccttttctgaata

SEQ ID NO: 252639 - DNA, 436 bp, Glycine max
  unsure (1)..(436): unsure at all n locations
gacactagaagaactatggtaattgaaaactagacttgtaatgatgcaaatctaattatgtatgcctgtacctataatatcatagatgtagcttcggaatggaaaaacattttggaggttgatatgatgttcanttttttggtgtaaggtgcccctattataggaaaaagcggtacaaccactaaacagagaagcgtcacttcaaaatagcatatggcagaaatcacaactccaacaatgcaagttgcacagcttgaggtgaagtgacccaaccgtgagtaagaaattcacttgggctttagccatagaacgttgtgaatgaagaaaggttaaacttgtagccaaaaaagaaagtgcattactggacaatgacttctgtaaaattcatagtttatttgtagacttttaaatagaattctaaggtggaactatacat

SEQ ID NO: 252640 - DNA, 344 bp, Glycine max
  unsure (1)..(344): unsure at all n locations
acaattcaagagagcttaagacttattntgattcacaaatccagccacaactcagcaccacaactcaacttcatcaaaggcatcatgtaggaaacttagaaaaaaaaaagttcaacaacaagactacttctaggaattgatttagaacatgttatgaactaaataacatgcatgaattagactcaaaattaaaaagataggcttagaatgacaagaatacatgaacaaatgtatttagaattcaatcaacaaaataaaaattcaacacaaacttataacataatgtgacagttactatgactaaacatgactctaagacaacatggataaagngagtacactta

SEQ ID NO: 252641 - DNA, 452 bp, Glycine max
  unsure (1)..(452): unsure at all n locations
cacctcaagngactgagctgcagctagccagcacttatattattttttcctccaacgggaactactcatccatttatattctctactccaaccacatgacatgattaatgtgtgctacaatattcctttccaacaaatcctaattataaacaagatgaatattgcactgagatataatgatatatatgtgaaggcacaatttaccaagtgatagcataatttgatatgcagataaagcatgttggaaataattaacacctctgcttataacataaaattagtaaaagattggcggaacaaaactgttggctagggaagaattataaatatctgatccttgaaactttactgaacaaaaatacatttcaggacaaagttaataatacccgcttaagactcacaactttggagaagtgaactaattttctttgaagttcttgtttgcaggccct

SEQ ID NO: 252642 - DNA, 338 bp, Glycine max
aaaaactcagcttgaagtttgtgcaagtctttttttttttgttgttcaaactcttactatgggtcggactctggccagtatgtgtttcacatcgctgaatttatctccaggacaatcatctccctggcatacagtaagctcttgtaggtggctttgaatattgtgattcatactatggagttcgtatttgcataatcatattatatcacgtcataatctattatcgtggtgggtaacaatattaaaatatatatattgttcgatatagataataattgtggatcacaacacaacatatgtacagaacacgagtcttaaatattgttgattcattaaat

SEQ ID NO: 252643 - DNA, 393 bp, Glycine max
ctaattactctacaattgccttttctctcaacgaagaggtgaacaagaatgtggcatttacctcgggtgtaaaacatgagcaagcctatgcttttctcagagataatcttactagggcacctgttctatctcttcctaacttttctaacacttttgagctagaatgtgatgtctcttggagtgggaagttggagcctgtatatgtcacaagggtgggcaccattatctgcatattttatgtgaaaagacttcataagtgccggccctcaagctaccccaccctatgataataaggcttatgcctcaataagagccctctaacttggaacttacctgttccaggaattgcattatagtgacataacactaacgcattaatgcaaggcagtaaca

SEQ ID NO: 252644 - DNA, 305 bp, Glycine max
  unsure (1)..(305): unsure at all n locations
caatggtacatacaatgaattgaatagttgatttcgggaacttaccgtgtgaagacgctagaactacgaaaaacgaacgaaggatggtggaaaatcttcactacttcacccacggaaacgtctacaacgagttacggaaagcgcctcngctaggattttctttacggaaacgaattttctcactaatttcaagtgatcctcagataccaagagggttgattgctcttgttcttccctcctccccctatttatttggaaaagaggaaaagcttgccacccagctcgccaggcgagctgtggctact

SEQ ID NO: 252645 - DNA, 66 bp, Glycine max
acccgacctaaaaacccggacaccggaccatgttttctttatgtaacctaaggggccaaaaccccc

SEQ ID NO: 252646 - DNA, 369 bp, Glycine max
  unsure (1)..(369): unsure at all n locations
caaattngattatcctgctttgatgaatangaagcctgcggaaaatggagaaaataagaaggagggaggaacccatgttgtgactgtcgttcctacatgaaccaaatttccaccagctcaacaatattaatacttagccaatatcagcccttctcattacccaccaccctatcatccaagaacacccaatcattcacaaaggtcacccctaaatcagccccataacctgcctactgcacatccgataccaaacaccacccttgtcacgaacaaaaacaccaaccacgggagggaagtttcagaaaagaagcctgtagaatcaccccatttcgggggtgatgctaactactccatattactcataatgca

SEQ ID NO: 252647 - DNA, 399 bp, Glycine max
taagtcacctgagcatgcagctttaaaatattatttagctcatgttcacatgacccaatcccatttctatgtgtggcccgctttgccagccgtggcgtctggaaattgagaatcacctccaatacaagccgatcatggcccaaaatgcaacacaccacaattcatatcatcagcaacttgaattgatcatatcatacaactcattatcacaaatcataagaacctactaccatgatgggcatatatttcaatttaatacaagagttttgatcatgcttggaacatgaagaataaaaaacaattctttataatgctagtgagagaccaatacggtaggattggcgaagagcaccaaggactgagttctaggtgatcaaattgattctttgaaataatatc

SEQ ID NO: 252648 - DNA, 357 bp, Glycine max
gcatttgatttagttaagggtttggctctgatacccaatgttagactaaaccttctaacttgtgataatacaaactactaaagaaacaccaggtattaacacaatgcgaaaaatacagatcagatcatacctccaaccattgccatgaagagtttcttggttttgattctttcaagctctctctctctttctctctctagatggcgtatcagactgaatatcaaagggatgagcttatggaccaaatccatgtgctatatataggaattctaccatcaagaatgcattaagagccattaccactcattattggcagttacaaatcaatagtggccattaccacccattaacagccat

SEQ ID NO: 252649 - DNA, 357 bp, Glycine max
tcatcttaattttaagtttcctcttattctaaaaccacttttttctgagaaggatttatagttttcttctcacctaaacctagcatactctaagggtcaacctcatctactaaaatgcataacaaaaccctttacacacaaggtgattcccaagtggtctataacaaccttaagatacttcacatactccaacctaactctaaacacactaaagtgtctataatcgaaatcactacaagagctatcccaggtaagaagatcattcatgcatccatgacacacatggatccatctataagactaatctgtcactagaaccacacagcctaggagcctggacatctaaacttctgatca

SEQ ID NO: 252650 - DNA, 267 bp, Glycine max
  unsure (1)..(267): unsure at all n locations
atgtacactcttaatgatctgatgaatggagaagggactntggtggtgttgccatgactctgtgcaaataaaacaaacttaaaattaacatcaattgcaagtatacaaaagtaataaactgtaaatatgcaaattaaaaaaaattgattacatattatgtaatatcataaacattgcttttatataacgcagttacgtaggaatgttctcccataagccttcatcatgatcattacgatttgtatgtacatcatcaacttcatgttc

SEQ ID NO: 252651 - DNA, 455 bp, Glycine max
tactcagagaagcttaaagagattaatagaaacacttaatctatactggttcactcaacctgaagtacgtccaattctcctttacaaaataataaagggatccactaattaaagtgtgattacaaactagtatactgatttgtcactcctagctgtataagtattctctatgccattattggcagaacccttagacttcctctgaagctaagaatacttaagtattgtgttgacactaagccactcctggatttcacaaacatatagtttaaaaaatcacaaattctaacacttaaagaatgcgtttacaatcaagtatgaatcagtacaagaactctgctaagtaaaggataaactatataagcatttgtgttcactcaggagtatctatattgagttctttttcgctctgactcaatgtgtgaatgttgttccctaaccatgaatgaaacttt

SEQ ID NO: 252652 - DNA, 387 bp, Glycine max
  unsure (1)..(387): unsure at all n locations
tcaccgctatttgctatgatgactccccgaggagatcggtgttggtacgaccatgtcctcccggtttccgactatgaaattggcgagtggaggaatgcccatacgtttacgcgacatgcataatgtaaccttttgtagctttaaaactctacagttgggcctaagctttatagtntcactttgttaaggcattatgtcttttgttcttgaagttataatacaaagatctttcttcatctgtttcggcgcctctacccattctcattcatttgcatgtttatttctttacgcttaatacgccatatccgacaacgagtccctcgattgtactaatacccgggacccggctgtccatttctagcaagaagcgggtcagatggagagtga

SEQ ID NO: 252653 - DNA, 514 bp, Glycine max
  unsure (1)..(514): unsure at all n locations
cttaagacactgagcatgcatctttccttttgacaaataccctaatcaattatattcatcttgggcccattttaccacaatctctcgtaattgggagagaaatgttcatctaaagcatacaagtccctaatgttatcaaatcctaatatttgagctcctagagagcacaacaatgtgtgtctcctagagagggcatcaactaccacatttgtctttccctctttgaatttgataacatatggaaatttctctaggtactctacccattatgtatgccttttgtttaacttgctttgccctctaatgtactgaagtgatcgatgatcactatgaatgaaaaattccttggaaacaaggtaatgttccctagtttagagggctcttattaaggcatacactctttatcataagtggggtagttgagggtggcactattgaatctttcactaaaataagcaatanggtgcccaccttgtacaatacaactcaactctactcagaggattgcatctac

SEQ ID NO: 252654 - DNA, 439 bp, Glycine max
gcttataaactagtgaacatatgctcaatttatctatcttgaaactaaccgacccaataatgactatcgtatcaagagtgaatcctctcaatatataaagtaacacttaccaccattattgctcctctggtgcatgaactttattggacaatctaccctgattgaactcaaaaatgtgctattatcctcccatatatcaaaggtgtaacctgtacactcttatactatgtcgacatttcaaggttcatgtctcacacaataaaaaaattcggtcttttaccttacctctatatgatgtgatatgaaccatcacttcttcttttcacaccctgaatcaactcatgttaatgggggcatcagtcgaagaagcatgtataacatataaatcataacatcttatataaatctgcaaaacgaaaaccaataacatttacgcaac

SEQ ID NO: 252655 - DNA, 457 bp, Glycine max
  unsure (1)..(457): unsure at all n locations
aggtgtccatcaccccttcattcaatggcctctctagggtcgaaaggagacaattatgaatgaggcanattcgaagcatactctcacctaacaccagtccataacatccatttagacttgttcaaactggatgtacacctaaaatctctccgaatcaaaatttgacactgcaacacccaaatttgccctagaaatggctctttgttcactgtgtgcatatattgttctctctagcacaggccaagctttctcataagtcctaaatgacatttcaagctagtattaactcactttaaccttcatttaccacagaattcagacttatgcctttcaccctcaaagtctcactcttgtttattccactcataacatcacattctcactctatacactaggtagtcctacccttctacctaacagattgcatgagcaatttctcatatatacatacaaacat

SEQ ID NO: 252656 - DNA, 432 bp, Glycine max
ggtctctgtcagttctacggagtacctgtcacctccatcatgggcatcataccccctactaatcgagctttcatcaagaagtactgcgtctccaggcacgcgcatggcgaatacaccacatcatcctgtggatggctgtgcatgggcaactaacgctccgccatctactctatatgttacctctgctcatccacaaaaaggtttgagtattgcctacaccacatggccgaccattatgcgaccaagtccatagccaatagttagctaatttctatgtcattgaccgacaagtcataatgcgtccagctcatgacgtttatgaagcgctactaggaggcaacctagtacctcttgaatctatgcttgttatttgatcaccttttataatatgacgcacctatgtgctcatgatcctgtgaatttaaataaaac

SEQ ID NO: 252657 - DNA, 265 bp, Glycine max
  unsure (1)..(265): unsure at all n locations
tgtgtctaccatcacgattatcgtctcccttcttgcacatattctgtagttgcatcctatccggaaccatatcagaatagtactgatactgcctaacgaatgcaaccattatgtccttccaagtatggactcgggaaggttccaagttagtgtaccatgttacaactaccccagtaagactctcttggaagaaatgtattagcagttcctcatctttgcgtatgcccttatcttccgacaatacatctntggatggttcttgggg

SEQ ID NO: 252658 - DNA, 428 bp, Glycine max
  unsure (1)..(428): unsure at all n locations
agcttgccaacaagactagaagactatgatatgtttcctgatagtacaatagaagatgatggtgaattggttcatctagcactagtgggagaagtagaacctgtcaccttccaagaagcaattaanaaggaagtatgattagaagctatgagagaagagttgaaagccatggagaggaacaagacatgggagctggctagtctaccaaatggcaaaacagctataaaggtcaaatgggtttttaagaacaagctcacaccagatgggagtattgctaaacacaaagtcaggctagtggcaagggctntatgcagaaagaagttatgattcaaagaatctttgcccagtggtaggtttgaactggagggtgaaattgtttgacaagtggaaaggggaaacttggcaatggatgtaagctgctttctaat

SEQ ID NO: 252659 - DNA, 418 bp, Glycine max
attgctgctcctccaactgcattattctgcttctcatccattgcttcttgtcccaagcactcttacctacatcttggaacacaccactcacctcatcactcagttgttgcatcaactgtggtgacataaatacccctcctactttccttgccctctttctcattgaccttccatcattctcatcctcaatatcttcatgtccatgccccacatgaccccttgaaccaccttctcccgaatcatcttcgtcctcgtccgaatcatcctctgagtcatcatcatactcggagtcatcatcaccctcttccccatttcccacttttaacattctcaatacctcaacacctgagccccccaaattcccaacctctgatgaatgataacatcgttgttgctgatgttgatgctgctgctgatg

SEQ ID NO: 252660 - DNA, 392 bp, Glycine max
tgatgtcttattgagccacgttatatatcgagacgctcgaaatttaaaacagaagctctgagcaaattcaaacgaccataaactttttactctcgatggtccaccttgatgtcccatatatatatcggagacgcctcgaaattctaaaatagatactctgagcaaactcaaacgacaataacatcttactcagatgtccgactgagtcccgtaacatattgagacactgcaaattgaaaacagaagctctgagcaaattcaaacgacaataacctcttactcggatgtgctattgagccccgtaatatattgagacactcagaattgataacagaagatccgagcaaattttaacgacaataacattttactcgaatgtcctattgagtcct

SEQ ID NO: 252661 - DNA, 324 bp, Glycine max
tcacatgtggtactatgtgtgtgtctgtcgatggtgcacaacaagttgtgcacatacacaatgcgcgcataaacccaccattccctgttgcccaacttcaactgagctcacgtactcccacgtatcccataatctcgttttctcaacaccgggtccccatcaatcctcccaagacttcccaacatcaaagtaatacaacattcacacagcacaatctatcacagccaatcataacagggcaaatgcagaaaactctgctgtaaacaccaaccaaaatcacaacttttctcacttaaagaccccaagaacaattccttcgatcca

SEQ ID NO: 252662 - DNA, 426 bp, Glycine max
ctgcaaggatgatgttatgagatacttcttgttattttctatctatctgtcaagggagttacactatgtcccatgttataccctttacatggcatcttaaaaatatgatgtaccgtatgataagtcattcaatactcttttctaattgaatacaactattttcactttcgtcaatatccttctattacggtaatgcgaagcgatgaattaattaatagggttttgttttcttacaaaaggtgattaatattgaatgagtttattaataaacctacaatattatttatttgtaactcttgtgtttgcgaagtcggaccttcatattttgcaacttaacctttattcataaaaatataataatttgtagtaattaaataacaattatgtgtgttattaaataactaacggtgtaatagtaatttttga

SEQ ID NO: 252663 - DNA, 418 bp, Glycine max
aatatgcatgtgaattaggaagcatcaacaagaatcaagccaaggctatttgtgcagcaatcaatgtggcaaaacacaccaaaagattatgatgatggatggctcaaattctcacaaaggtaaacttatcactttcaaattgagctttcaaaactatcatgacatgtagaggaaaaacaagaacttcaaatcacaaaatgtcaagagacttttattttcaaaacagttacccatttcttgaacatatcctataattcaaagaaaaatatgcaaagttgtacatgcaaacataattgacctataatattaaactagaaacccaacaaaactaacaaaactaacaaatttaacacaaacaaaactagcataaccaagaccaaagaacactcccctcatactgatacaacacattgtcctc

SEQ ID NO: 252664 - DNA, 425 bp, Glycine max
ataattggtctaaatatctaatatttacacaaatatctcaaaatcccattgaagattcaaagaccctaattatggtcgccattaacggtttaaactaatggtccactatataaccatatctttaaatggtcctcgaataatccatcatattattattcaaataaattattaacgcctcctattaaagactcacatttattgttcaaataaattatcatgtctgtaacgacattgttgacaatcccaaactaaaagagtagattacaatattatcccctataatttcttgaaatacacatagtactcctaatttttacacctacactaaaccccgatccttgttggaagaactatatattgacaacctgtacaaattatattatacccccttatatgtttgcaaaattatataccatgtatcctat

SEQ ID NO: 252665 - DNA, 383 bp, Glycine max
tcgtgctaacccatggaagctcctaatatctcccacatcttttgttgtgggccattcttggatgcccttgattttctaatggtccactatgaccccatttctaccaactacaaaccctaagaaaactatattatctacacaaaaggtacacttctctatatttgcatataaggtgtttttcctaatgactgaaagaacttgcctgagatgtcctaattgatcatctatgctcctactgtacactataatatcatcataataaacaactacatatctacctatgaaatcccttatgacatgatgcataagtctcataaaggtgcttggtgcattattgagcccaaaaagcatcactagccattcatacaaaccaaacttggtct

SEQ ID NO: 252666 - DNA, 378 bp, Glycine max
acccacaacctaccaaataatccctatccaattcctcaagcaccccaattataatacacccttccaacagcaccggcttattaggctcttcaaaattcaacacaaactcctcgaccgaaattcctctcttccgaaccacattatccctctccaaccactcaggcttcatttcgaggttagcacagagccaactctggaagagataatccgagtaaaagtctctaactttgaaacccccaagagcaacagcgaagttatcaaatgaagggtaacaagcagaaacataagtggatttccaagaccctttgtactgaaacccaccgagaagattctccaacacgagaattctccaaaggggttcatggttggtgaacacat

SEQ ID NO: 252667 - DNA, 473 bp, Glycine max
  unsure (1)..(473): unsure at all n locations
cactgctttcgatggtgttgcattgagaattgttttctgtttctaccctttaacatcatctatacttgtttcatttgtattttctttcattatgaataaatatacacaagattaaataatttcttcttggtataaggctagacatattgagtgaaaacaggaatttggaatataacactcaattatagtcatagacctaaagatgtccttggcttgtttagttttgtaattgaccagctctatacattctagtactggcagcaccagatcagaatttaaaatctgagtgctattggggctatatctgatcgggcttgaatgttgacttcactgagttggatttgtattcactttaactagcttaaaactaacattctttcccttgttgcatatagtagtaatgttaagtgaatatgcnttatataaatctatgcagagtgttgtagaatagaatcaattgcagtttgatatgc

SEQ ID NO: 252668 - DNA, 424 bp, Glycine max
ctatatatattcatacttgcttttattccttttcatagcgaaataacaattttcaattcttgtgtctccttggtattgactctcgagatcgcagatgcactctaacatgcaattatgcctttatttttctgttctatctcaagtgcacatatagttctgcaacttccattgtcattgcactttgtgtggtttcccaatggtcacttattatttttgattcgaatcgaattccaattaatgataatttgtgaagaaaatgtatgttctaagaataataaaattaaataatgttaactatgttttttaatgaatatgaaattagttgtttttattataatcgaatagaatagtatcctttgtaattgcaaagatgaaaataacagttccaatgatgattgattattattgctggattgacatgcat

SEQ ID NO: 252669 - DNA, 495 bp, Glycine max
  unsure (1)..(495): unsure at all n locations
agcttttatcatgccgccagaatgactcttattcacttacataaatatntctatcttgtggaagtgtagtccaataatgagtggattcattcatactacaatttgtctaccttagttaaactaaaatttgaatatagcatgattgggatagattcagaaaggatctattgaagattaatcgctactagaatggtgaagagcttgccttatatagaaagattcacacctctagctttcaataccccataaagattgacaatggtcaaatattgaatgcactgatcccaatgaagatctgctcctccataagctataaaaggcaactcatctcaacattncaaagtgatcaagccaagatatgaaaggaaatacaattggatatcattncgagagaaactctaagctaagagagttcattctttacctagcaaagctttggtatgagattaagtnncttattgtaatacattgtggagtgtagaaatcttgatctat

SEQ ID NO: 252670 - DNA, 463 bp, Glycine max
agtggatgtgacaccacttacccttacatttattctttcaagaataagagatccacatattaattaaaagtactcttaaaacatctttttaaacaagtctttcataggggaaaaaagatcacattcagtttcctttacaacatattcaaactttgccaaataaacaattaaatattctcgactcatacaaagtcgtctaaacttcatacaattaatatagaacctatatcctaatgtcacatcctatcaaagcgttgtgttcttgtgtcctctatcatgaggttcttcatagtcatccacctattcatctactcccccgaacacatgttcatgatcatcacatgatccaaacacaacaacacacagggagtgagttatcacattcctagctaatagagaaacacgacaactaaatatacatattatataaatgagataccactttgctaaacatagctcacgt

SEQ ID NO: 252671 - DNA, 441 bp, Glycine max
cttccttattctcacccacccctccaccttccatttatctagatctcctacctccattgatgccgactcatagaattccaacattccttattgtccgtacaatttcttaaatcaaaaaggttttcaaaaaagtaaatgtttctatatcataatttcttttcgcatccctttgttaagcactccccactttttgtttgtcaaattttatttcaatcatgtcctctgacacatgattatttcgaaactatcttacatactattggaaatgaatttttggaagggtacacattcccaaaaattaaattgtagaagtgttatattttgttatcattttcgacaactaaattctggaagtgataaccttagtcacctcccacacactatgggatccttctctttcatcttttatgttcacgtaaggggatacaagatcccttgacg

SEQ ID NO: 252672 - DNA, 131 bp, Glycine max
tggattgcctgggaacaaggggaaacccctataaacggctgtgacccagaatgaggtgaactaaccttaaattgggtaaaaatcggtcagttactttttgattatttatgggcccttggggataaaacgcc

SEQ ID NO: 252673 - DNA, 398 bp, Glycine max
  unsure (1)..(398): unsure at all n locations
tttttgtctttttccacccaactctatacaatcaaaatttgtgttggatggtccggactcacatatttatgtattacaattcatagcatttatcaaattncattccaagtcatagaataatatttacatttatttatgtgttgcattcaaacacttccaagcaaatatgttacatatacatatttattgctaccaataatgtattagtattcacattaatttaatccttaaacatcaactctcaatccttaatgacattaataataatataaacaaaatgagcaagtgaaattgaaaatatgcaaaaggagttgcatatacaatttccaaaaattcttctcttccctgaaaggaacgcgtgcggcacagcttttcatgattgaaatgaactgacataa

SEQ ID NO: 252674 - DNA, 480 bp, Glycine max
  unsure (1)..(480): unsure at all n locations
tgcttgtgaagcttctatggaagatggatacttgatctttatggtgattttccaccatggagatgtagcagatgatatatgagaatagatgagaggatgtgtcatcgacgagggattaagccatggaataatgagcttcaccaccaataatgcgccttggataatatacttaaagagaaagattcaatggatgaaaagaaagatgatatatgatccattatagcttgtatgcctatgatcttcttatcaatggattcctctgcttcttggaagatgaatggcagtggaatggagaatgaagagagagatgaaatgccactttaatgagaagatgagtctataagaagctcaccaccatatgaggccatggattggaggaagaatgagatgaatgatnggagaggaagtaatagcacaatatgtgtgctttatataactctgaatctgaagttaatttcatattatcaagtcaataatgcc

SEQ ID NO: 252675 - DNA, 439 bp, Glycine max
  unsure (1)..(439): unsure at all n locations
catgatacatgtcatggtttggttnggntcaaggataaaaagggatgccccacattatttccatgacacaaaatgcaaaanaatgatgatttggaaactttatgcaaaactggtcatgcatgcacctatgcggacactcaagtgtcaaaattttatggtcatgtgatgctagggctcaagattcatttcctctattttaatcaacccaatgtttccaaaatatgttcttttatcaatttgtgcattcatccgagtccatttcgggcgtccggtgaaatttcacagcattcacccttcaggtgtagacacattttccaaaaattggttatgatcaatgaactttnttttggaaatcgtctcttttcaaaaagcatgtcgtttttagctagacaacttatnttctttntttctccttcttttttttttatcattttatcat

SEQ ID NO: 252676 - DNA, 459 bp, Glycine max
tcttctacttatgtggcatggcgggtttccttcactttcttgtttccaacgcgagctctgaccactgttcttccttcccgcgatgcttcttttcatgtccgtctgagtgggcttatagcctaaaccatacttcccacgattcccttgggtttttatcatgctagttatgccgccattgtctttgcctaaacccatcccgggttcatacccgttccccaacataactcgggccatcattaccgccgcatcggacatacaaggttgcccatagagggagtccaccgatgaaatgctgaccacctcaaaagactggaaagcggtttctaacgattcttctgcggcttccaatggaggatgggcagcttactaagatatcttcctcgcctgacacgatgaccaagtgcccctccactacgaatttcagcttttggtggagtgtagaaaggcacaactccactg

SEQ ID NO: 252677 - DNA, 396 bp, Glycine max
tactcagcttaagtttagcatgataacgagtagattttcgtatatcatgtgccaattaaaggggtgcaagatgatttttgttttcccacttctctcttcggctgaatctcttggaccataagaaacctgttttcagttggggagtacacacagagagatagggccatgcatggcgagtttcttatttgaaaattggcattgagctgggaagcctgatattctacgctaactttgtgactataaacatgaagcctctctgcacaatcgctccaatacctcaccctttcatgtcaaaaatatgtggagtattttcacatattgaaggcttttgaagcctcccttcgatcatcattgatcaattaaccaaagactcaatgattgtgagaaaaccaatca

SEQ ID NO: 252678 - DNA, 452 bp, Glycine max
atcctcttagtcacctgcggcatgcaacttggcatgagagcgagaatgctagtggttttatagttcttggaggaccctaatatgggagggttagaaattaagataaaaaattgagaaagtggaaatagttaatttaaggggtgaaatgagagaactacagataaaatgagattgtgcatgttgttgttgcgagcgatgacttggagcctggagacggcgtcctcattgacgacagcgtcggcgaccttgatgggatgatacttttctacccatggaacgttgtaggcattgcttgatgatgacaatgacatgcttctgccaacagtgaacaaagggtttcaagtttcagaccagagcggagaataaacgttctaaagcccataccctatttgcctaaaaccacttcaaagggtcatcacttcttatttcaaacggatgttctctactggttc

SEQ ID NO: 252679 - DNA, 482 bp, Glycine max
tatcttacctatgtatctcccagttgtctgtgcaaagattctatatattaaaaacatgaagttctaattcaagatgttttctttgttgcatgggcataatgcaatcactctatgtctagcaatgattttattaagatgtccctacctttgagttcaactcaaaattatcttctctcgagcgactaatctctaaaactgatgcatataaaaccttcaatgtatttctactaaggattaccctctttctagcgccatacccctaaagatgatgcaaggatgaagcatataatacatttgttggcattttatgcctgccaagccctaactaaaggggtttagcctttcattgtcatgagagacttttacactttatggggttgatatggatggaagaagatggatggatagaggaagaaaagaggataatggacatatatagaaagttgggtttccatgttggagatagttaggcttatgatgta

SEQ ID NO: 252680 - DNA, 427 bp, Glycine max
  unsure (1)..(427): unsure at all n locations
ctgcagcttatacaagatnttataatgttcgtggtggatatcaccatgactgtagtgagcttaattaaagaaactatctttaagcgtctaattaaaataattatctttagggatctaataacaatatttatctatggtgcaactaattaaagtaattatctttagagatcatattagaatatctatctatagtgcgcctaattaaagtaattatctttagagatcatattagaatacctatctatggtgtgcccaattaaagtaattatctntaggagtctatagataagaagttacagttatactttgggaattcaaattgaatatacttctacaaacaagaagcttttagaggagaattgcaccaagaacaattgagtccaaatctgtaaggggtttcaatctcttttatttctgatgcaatatt

SEQ ID NO: 252681 - DNA, 418 bp, Glycine max
  unsure (1)..(418): unsure at all n locations
ttaatcttgataagtttntaaggcttaatgaatactctgatattgatggtcttgatttattttcagaattgaaagtactaaaagaagtgttaagagaagaatatatcacaccaatagaagtattgagttatattaaaactttatattcttttccaaatgtttacattgcatataaaattttattgacaatctctgcaacagttgctactgttcanagaagtgtttcaaaattaaaattgcttaaatcatatctaaaatcaataatgttacacgatagattgaatggagtagctattttatctattaaaagtgaagtggtagaattgtgtgattataaaactctcataaatgattgtgcagctaanaaagttagaagattaatataaaaatcgatattttatataatatacgtaatctc

SEQ ID NO: 252682 - DNA, 488 bp, Glycine max
  unsure (1)..(488): unsure at all n locations
agcttcagacaaggcaattcataatctatgtatctaanacccatcaatntagtggatnttcaaggtttgagaagtgaaaatgagaatggggtacatttggagtaaactctcatctcaaacaagtctataacattaatttaaacttgctcatactggttntacagcgaaaactccaccgattcaaaatttgacccttcaacacccatattaccctagaaatggcttttgctttcacctttgtcactcatttttctcatttgctctgcccaagctttcccacaagtcctaattgacattttaaactaggattaactcactttagcctccaattaccactaaccccaaatttagcttttcaaactgtcaaaacctcacacttttccactcacatcactatcattctcacatttaaccctangttatactctcccatcatctctaccaggtttctaccaacaatttcagcacacanacatcacaaagcatca

SEQ ID NO: 252683 - DNA, 414 bp, Glycine max
  unsure (1)..(414): unsure at all n locations
atgggtataccaccaactgcttgcccttcattggcatatccgatgcaatgctcaaagtcggctatattgtggtgggtaaattcatgtgtcttccccatgggttgagagacatgtgcataatcagattgagggtgttggctctcaatgagtatgggagtggagttattgacattctcactgggagtgtacgccacattgggtggtgtatagttggaaagcaagccatatcgcgggaaggcatgcttgttttgaatgtgcacataatgggggctgcccgtatttccctaatctttgcctaccatatctganggtggatgattcatttggttgatgccatatgggcgcgtcatgttcaccttatcatcatcgctggttcggcaactacaaccgattggcttcattattttcttatgc

SEQ ID NO: 252684 - DNA, 319 bp, Glycine max
  unsure (1)..(319): unsure at all n locations
gagaatgccaatccttacccttggtagcaantaaagaagagaatgatatattccaatcaaaggaaaggaaattcccattctatagtgggagaaagctaaaagataatatagaatattcccaatcatagaatgggaaaatgaaataatgagaagttanaatgaagaaagctcctggtcaaagaaaccagaatatatgtgccgagaggtccttggaccagacgatatctgaacaatacagaattgtcaccatatgaacaaaagatagaaaaggaaacctcgacctatattggtcttccccctttaattgccaaccaataac

SEQ ID NO: 252685 - DNA, 292 bp, Glycine max
  unsure (1)..(292): unsure at all n locations
ttactaagtacaccccctgcctttttttggtgattctcttttcgtaaaggtaccgaaacttacgaatntcgtaacgatacttgttttctttccgtaatgttacggaaacttgcggattacataatcattcttttgttttacttacggaacctcactaattgtgcaacgatgcttccatttgatttccagtgtgtcacggaaccttacggattgtgcatcaatattttcttttgttttccggcatgtcccggaatttcacatattgcctaatgatgggtgccaagcacctcac

SEQ ID NO: 252686 - DNA, 523 bp, Glycine max
  unsure (1)..(523): unsure at all n locations
ttaagtcacctgggctgcaacctganatacattgcggctgcagcattctatgctgtccttttccaacctccatcacccttgttgcccaaattcctttgatctctaagtacatcagcccatacacgttccatttccaaattccatgtaaaataacttcttgtttcctcattattttttcctataacttttcttttatcccgtcatttttcattagatgactccattgaagttaatgtcacttattcaacctgcacataacaaatagtagatatgacctactntattcatttgactagtccactgcacaatcatatataatatttcaagcatagtttttatgcaatagcaaagtacataaaagtctatcttcaatagacaagtacaatagtaacaaagcacacaaatgttgttagcaatagcaaattacatttaataaagaactatccctaagcaaagtttctcctaacttgatagttagcaaacatactcatagctaatgtatctcgaaatcttgtccattcct

SEQ ID NO: 252687 - DNA, 501 bp, Glycine max
  unsure (1)..(501): unsure at all n locations
tgatgcatgcaagcttcaacctgatcgctatgcacagcttattctttgttattcgtgacctattgtcgccaagcgcaattccttacggccataattgaggtcaatgatactaagcgccggtcatggcagctaagcgagattcattgcggcaatgtacgcgctaagcgagtccttatcaactaaaggcatgctcctctgtacttaagatagcatcatttagctaagccagccagagtctggcttagcgagagttacaacttttctaatctgcagacctcgctaagcggacttaccctcgcgctaagccaagtctctgttaaaaaaaatgaatttgaatttgaaacatcggttaagcacgcatatccgctaagcgagccctgttaagaaaccaaatgtctctctatctcgcctagcgcagcttcccgctaagcgaaagtatcaaanaactggctaagtgagtgaacacgcagttactcacatttgcagaatctgaaacttcgc

SEQ ID NO: 252688 - DNA, 386 bp, Glycine max
agcaataagttgagcctcatccatttttgttttctgttgaaagtctcttatgtatttactctgagttagatgaatatagccatcaatttgagtcttgacttcatatcccacaaaatagtccagcttcccaagttgtttaagtgaaaaattagaatgaagtttgataataatattgctggactaagttgatagaactaccattgtttattatgtcttcaacatacaccataagataaatgatatgagaggtatctttgaaaacaaagagagatgggtcacacttgcttgcagaataaccaagatgcatgagagtagattttatcctgtcaaaccactgttttggtgcttgcttatgcccatattgagccttattcagtttacaaact

SEQ ID NO: 252689 - DNA, 369 bp, Glycine max
  unsure (1)..(369): unsure at all n locations
ccatacatgtttccttcgatgagtctaatgccattcttccgaggaaggattntttagatgatatttcagattccttataatatacacatattcatggaaatgactctaaagaataagatgaaggaagcaatgaggattctcaagataatggagttagaggaaataatgaacttccaagagaatggaaagcctcaagagatcatcccctcgacaacattattggtgatatatcaaaaggggtaacaactagacattctcttaaagatttatgcaataatatggcttttgtatctatgattgaacctaaaaatataaaagaagccatagtagatgataactggatcattgccatgcaagaagaactgaatc

SEQ ID NO: 252690 - DNA, 473 bp, Glycine max
  unsure (1)..(473): unsure at all n locations
attttgccagctgcatcataatgggaaacaacttgttgttgtttagtctttgcctcttggcatngattgcatcaactcatgctcaacttcagcttggtttttatgctaataatngcccaaaagcagagcagattgttttgaaatttgttcatgaccatatccataatgcttcatcactaccaactgcattaataagaatgcactttcatgactgttttgtaagggtacgtgcttcaatctttaagcttctgtcatttttacttaacaaatacaatgttattgttagattaaggttaaggagctaactaagatgaagcacttcagggatgagatgcatcagtccttctgaacttaacaaccaatcatgctgataagaatgctcctccaaatctcatagtaagggctttgacttcattgacagaatatagagcctacttgatactgaatgccctggtgtggtcctttgtgctgaa

SEQ ID NO: 252691 - DNA, 397 bp, Glycine max
  unsure (1)..(397): unsure at all n locations
ttcttacggaaggccttcttcccgaagctttctacagaagaacttcttcccgaagcttcttacggaataacttcttccgtaagtnttttagtttaatcttttttagcttttgtttacatttgtgaaaaaattaacatttatgaatattattaatactttaaattcctgcatttcatatttttgaaattgtggataacttggttaattaggcataataatttaggtataatattaaataatttaggtataataacttgattttgctggacgagcaaaatgtctaattagttgttagttatagtttaatatattttaattggtaattagggcgcaaaattggtatttgttcgaagtattttttttgtaaaattagatgttccgcaaaattattattatt

SEQ ID NO: 252692 - DNA, 403 bp, Glycine max
tctagaattacatgtaaaatagatatggcaaaatatgttggtaaggaagctttccactcaagagtgtaagtacatccattccatgttcttatgatcaaaaaaatgctttcatgtgatatagctgatagtgtttaatctggaatcatacgtgcatctggaaagtcacatggaacatgtgctatagtcaccattgttcaggttctttttcttgtgtgttgtaaggagaacaacaaccatcatgcacaaaaagatctttgtcgtgctaagtttaaattccctattcatcaaaagatcatagttagctggtgtcagaccctaatttcatttgtggacaatcatttgcaaacatctggattcttgctatccgaattgagctgcttaacactacttgtctcgtaatctg

SEQ ID NO: 252693 - DNA, 327 bp, Glycine max
ataaaaaaaaagaaggattatgttctagctcggacctaacacgagcacactacatatgaaattatttttgttcgatcaaaaatattatattcccaattaaggatataatatgtaataaacagctaaaattacttatggaagaaaactaactatcttaagaaagatgatcatccaatagcatgctatcaagcacattctggctaactgaggcatatattggaacatgtacccatatactttctattttaccctgcaatcattaagtaaaatactttgccgagtaaaggcaagtaatgagtgagtttattataatttttttcaaaaata

SEQ ID NO: 252694 - DNA, 464 bp, Glycine max
tcacgttgtatgattagctaaaagtcgtattaattaatattctgattattttataggtcatgccaatcacctgtgtatgcttacaaatattgttccaagatattatctgagtcgcccctatacaaaatgcattacccaaaatacatagtctttcagcatcatatatatatatatatatatatatatatattgatataaactagatgtgaatgcattgaatttatctacttttacatatactgggatataacgttacgtatgcaacgaattgataggagcatacatgcaaccctatatgatatgaacacacaagctataacggatgcgggattttgttatagttacaaaaacaaagacaacaactggtaattaaaaatcacagacaaaagtttcagatatatctaaatataaatttaaatgggtggtgaactaatgaagacgaccacatcaaatggtggtgatca

SEQ ID NO: 252695 - DNA, 465 bp, Glycine max
  unsure (1)..(465): unsure at all n locations
agctntatgctgaggagagagagagatagagtttgtgaaattattaaagtgcgccctgctctgtaatgatgaaatgcaagatgttgatttgggtattatttgatttgtcactcatggagaagaaaaatggctctgtctcttggtgtaatttcagggccttgtttatgatagaaatgacaccttatttgagtcaactggtctttatgggaaggtaatattactcatcttttcctccatttcctttntctttctctgttttttaaaattatttttattggctttttgccttccattnttctaattcacagtcgtattgtgatgaagaagtttgtgtattcttgaattttaaagcatcagtcacctgccatcatttacctcaatgtgttcaaaaataattataaaatttacttgagggttattcttgatgcactgctatagtttgctaccttgtaacctggtgatcat

SEQ ID NO: 252696 - DNA, 425 bp, Glycine max
taatgaggcaaccatgatagatcattgtcccttgcctttcatggatcatatgctggagcgattatcatgacagtccttctactgtttcttagacgggtattcatgatacaatcagatagcagttgaccctaatgactatgataatacaacatttacatgcctttttggtgtttttgcctatataaagatgccatttgggttatgtaatgcacctgccactttccaaatgtgcatgctatccatctttgcggacatcataaagaagtgcatagaagtcttgatggacaatttcttagtgcttggtttatcctttgattgctgcctgacgaatttatagatggtgctgcgaagatgtgtcgagaccaatctggtactaaactgggagaagtgtcacttcatggttcgagaggggatagtcttgggcc

SEQ ID NO: 252697 - DNA, 439 bp, Glycine max
  unsure (1)..(439): unsure at all n locations
agctttgtaccataatcccaacttatcattatccttgatccagggtgagaatgtacatccttgccctcggagaacccanagtatgaaatcatacttagattatctcccaatcctagagtgggagaaagcataaatggaaagatatttcccgatctatgttcggaagaaacataaatacatcctataggttttgacctacatattgaaagtcataatgtcccaagtaacaaaaaagaaagaaacccgacccaatgtggcttctcccttgattgccatcaaaatcttggcactactactttctcccccgcactaacataacagaaaagagatgcaaaacctcaagcaaaattccactataacattccaaataatctatgacatgatacctgatcttgattatagaggattgaaatcagcatactatttggtcgaatagata

SEQ ID NO: 252698 - DNA, 358 bp, Glycine max
ctctttgtgaagccttccaaatatgaataaaagaaaaagttcttttatgccataaacattgtttccacttctatgcctttaaaactcctacaccttgacacgtttggaccaactatgactacatccctttctgtatgcagatatggtctggtcataccggatgattacactatatggacatgggtcatgttcataactcacaatgatgagtctttcgataccttctataaattctataaaaagattcataatgaaataggtacttgtatctctctaatcaaaagtgatcatgggggagagtttgaatatgatctctttgatatattctgtgaagaaatggataacaccataatttttc

SEQ ID NO: 252699 - DNA, 377 bp, Glycine max
ctccacttcattatctgatttcaagcttaaataggtgtctttgttcgtgctcgtgtgcttagcgcacttctgaaccgcttatcgcgtgtcataccctaatttcgttcggggaccattgtttgatggcatgcaacctttgcttgaccgcttcgaggtacttggcacccattgttgcacaatacgtgaagttccataacgtgccagaagtcaaaagaaagcattggtgcacgatccgtgaagttccgtaacatgccgaaaatcaaaaggaagcattgttacacaatccgtgaggttctgtaacattccgaatgccacaaaggggatgattacgtaatccgtaaggttccataaacattacggaagggaaacaagtatcg

SEQ ID NO: 252700 - DNA, 432 bp, Glycine max
  unsure (1)..(432): unsure at all n locations
ggaagaggatgctttaatggaggaaaagaaagagagatagtgggagcacgaaattgaaggaataaaagagggaaagaagtggaactttgaagtgtatctcataagactntcattcatcaaagttacaacaagtgttacacatgcttctatttatagactagatagcttccttgagaagctttcttaagaaaacttccttaagaagctgtcttaagaaaacttccttgagaagcttctctgagaaaacttccttgagaagctagagtgtagctacacacacccatctaaaaactaagctcacctccttgagaagcttccttgagaagctagagcttatctacacacccctattatatcttagctcacccccatgacatataaacatgataatacaaaaatatatcctactacatagactactcataatgccct

SEQ ID NO: 252701 - DNA, 397 bp, Glycine max
  unsure (1)..(397): unsure at all n locations
ttgaatcacgaatagaaataatgcagactttcacaactatctatgggagaactagcttcatatattctaattataacattctacaaccatttctctctttctttctctcccagatattctaaatgaataacaaataaaaggaaatcagatgcagttactgtacaagtacactgtatatacacatgcagacacatttagaaaatgcaacaaattttgtaaatatagcaagcaacaaataaacattgtattattgtatcacacatctgttaatatgtatcataattctgccgnnggccaaaatacagaaatataaccatgtagctgtattcaacagttataaacataaagtttcttcccatttgtctcaactctctttttaaacaagccaacctatatg

SEQ ID NO: 252702 - DNA, 438 bp, Glycine max
ttctacggctatataatgccgtaattattaaccaatcttaacatctaatcattggaattacaactgtgttatccatttactatagtattcatttacaacccatcccatcatatatattatgtttggtgtctattatataatattaaagaataattttaaaagtcatatgataattatttattatcgaatgatgaacttaaattatgttacattatttaagcatgattattaaatactagatatttgtttatgatgttatatattaaataaagtgatacgatcaaacttgattgtatttcatgaattcgattaattcaatgaattaattaacaaaaaaatatgtataaaatgctacacgcacacgattcattgaattacactacaagataaataacatatgcatacggacgaaaataatcactagatgttaaaatacat

SEQ ID NO: 252703 - DNA, 454 bp, Glycine max
  unsure (1)..(454): unsure at all n locations
ctcgacccggatccttaagcacctgctgcatgcaagcttgcacttcttcgctttcctcatggactttatctnctntcctacttaagccttttagctntgggagccaagttatcccttgtgtgctagacttcaaccacttttgattgccgccgatgactccattgctacttcccctaagctctttatctttcctttccactatattccatgctttacaaattctctaaagtatctttgcattggtttcattgaaacctcatgcgatgaaaggcacgatgatatccttcgacggtgcacctctcatagggtagcctagttgtcttatggccagcatgggaatctttcacacgagcataacactcctgcccctctttttttccatcgggtactcagaaaaaagagatggcttccttcctcctagcaggcatcctaagatcccttcgaactcttctat

SEQ ID NO: 252704 - DNA, 315 bp, Glycine max
aaatgagacctaagcgctcgtgccataatgctcctgagtgtgtattatcaattctacgcttagtaccacaacaattctggtttaaaggattcaccataggaagctacactatcaagtaaatatagattatcattaaccaagagtgaatcagttccaacaatatctgaattaaaggtaacctatcacattgtttcaaatgaacacaaatacccaattatccaaataaaaactgaaccaaatttcgtctaaatgacagacaacaaaagtgtcttcatatccaattaaaaccatactaatataatctaagtgcctata

SEQ ID NO: 252705 - DNA, 451 bp, Glycine max
  unsure (1)..(451): unsure at all n locations
tgcatcaggtatgatcacttgntacatcaaataatgaaacaatactaataggaaccaccttaatttagaggatggcatgatattctctggaagagtaataacaacacactctgtaacacactgcttctaacatactctatgattggaaactacacaaatgagagtgaggctcattaaataagaagcaagaccgacaatttttttttaatttccaataaattttagctaataataaacagtatgttcgaaccagtgtgttagagattatgttgctagcatttctcttttccggaatatgtaatcactaattagtatctctttatcattatttngagtggatctcaactaaggagagagcagcatagtggtcttagcatatgctttcttatgacaacagagttggcagtagtctcagtgatgctggtgacctcatgtttgatgtcacttgtta

SEQ ID NO: 252706 - DNA, 443 bp, Glycine max
taatgcataagcctacctactttgtgctgatattatatttttataataaaaatgcgggcagcaaggatgaattataggtgtgacaccatatcatgaaccaacttttacaaaagcttaagaagatatcgggataattaagttttgataaattactccttataaaacaatccaactaagcaagacgaattataacagaaacgagcaagccaggagcataaatttatggttgtagtgtatagtacatatcatgcccagatttctgcaaattatcaatccaacatggagcagtatctgtcaaagattatgctaaagataccaacatatcatgtaaaacaaatgttattattcccttatttccttctttacactatatgagaataattcattcaacagtgagcaagcagtgctgagactgatcagatatatatttatatatgcttcat

SEQ ID NO: 252707 - DNA, 444 bp, Glycine max
  unsure (1)..(444): unsure at all n locations
attagtacctgacatctcaaacaaacaaatcaaacgtaatatgacaattatagttgttgtttgaatacctcacccactcaagtgtatcacacaattatggcttttctctaatgaaacactcttgccttttaccactctaattccncttgagttcttaggcaattcaagagattatggccacaacaaagaacaattcaccaatatgtgtaaggtaaggctagagagacaaggaataggttaaccaagataaaggctaacaatgtttttaggcacaaatgaaggaaataaaattcagaatntaggaattcaagtaacaatccttcatgcaaccacatatataccttaaagagattnnttttaatagtcttcaagcatgaaccattcaacccaatttttttttttttaattgttgatatacacaatctgctttttttttttttttta

SEQ ID NO: 252708 - DNA, 474 bp, Glycine max
caacggaagctgtcgatatattcaaatggtctttacttatcacacggaagatcgattcatgcgcataatatattgagacgctcgaaattgaacaacggaagctctcgagaaattgaaatggtcataacttttcaaacggtagtccgattaaggtgcataatatatcgagaagattgaaattgaacaacggaagctctggagaaattcaaatggtcctaacttatcacacggatgtccgattcatgggcataatataccgagacgctcgaaattgaacaacagaagctctcgagaacttcaaatggtcataactcttcacacagatgtccgattccggtgggtagtatatcgagaatgtcggaattgaacaacggaagctctcgataaattcaaatggtcataactgttcaaacggtagtccgattaatgtgcataatatatcgagatgattgaattgaacaacggaagcagttg

SEQ ID NO: 252709 - DNA, 387 bp, Glycine max
  unsure (1)..(387): unsure at all n locations
tgataaaagggatgccccacattatttccatgacacaaatgcaaaaatgatgatttggaaactctatgcaaaactggtcatgcatgcacctatgtggacactcaagtgtcaaatttttatggtcatgtgatgctaatgctcatgattcatttcctctattttaaatcaacccaatgtttgcaaaatatgttcttttaacaatntgtgcattcacccgagtacatttcgggcgtccgggaaatatttcacagcgttcacccttcatgtgtacacattgtttcaaaaactagttatgatcaatgaatnttctgtttcaaagaacacgtggaagtcatctcttttcaaaagcatgtnggtttttcagctagacaacttatttttcttttt

SEQ ID NO: 252710 - DNA, 409 bp, Glycine max
  unsure (1)..(409): unsure at all n locations
cctcacttcagttagtgattctatctcattctgaaagctctggcgattcactgctggaatgtcatcaaaatctgatatgttgagccttttaacagcaacaacttgacctgtgagtatattgtgctccaaagctggtctcattgcagagatttgggttntctgatttctctccaaagctggtttcttttttccaaaggggtttctaaaatgtgaatgtttgagcctctttgtaagagggatggtgtcgttcctatgtgttcgtttgtccaattttccttgagccaatgcttgatcctgtgaccctttgcactggccagacctatgagaggtgcagcatcctcaaatggttcagttngggccacttcacttgctccaccacaatgcaagagctntgggatgattccctcac

SEQ ID NO: 252711 - DNA, 492 bp, Glycine max
  unsure (1)..(492): unsure at all n locations
tcaatattccacaattgtatagaagctagatgttaanaagattaactctgaaatatagaatattgatgtagatccttttgaaatttttactcggataataattagtcatcaatagttggttgtcaactttctagcaaagaaaatcaacatgcattttttgttatgagaccatgaaaatgatgaataagatgagaaacaaatgtgacaatataaagaaaaatgagtgtttgacagaaaaaaataaaagaaaatcggaaaaatcctacccacaccactcggtggttttgattcctagaatataaaacatcaaaccaaaatcatgtatcactccttctttcctattcctgatatagcaaacccaaaaatcaaaatcatagagtacgaggaaaggagataatgaaagtgacataggatgggaaacgaatgacaatatacgatcttacccacaccactctgtcttcctatgtctaaaataaataaatagaaaccaac

SEQ ID NO: 252712 - DNA, 442 bp, Glycine max
  unsure (1)..(442): unsure at all n locations
ctggataactaacttacatactctgaaccgagtacaatactcatatcttctgactaaatatcaaattgggtgtctattttaggagctgtgtctctgtatatctctctctcacgagaaatggttaagcaagaaataattaatttgtctcattcacaatataactactgaaggaagagatgctctttcggttgtccccctcaaataattagagaatatatctcaggatttaattgcaaatcataatgtgaactgngtgacttatcttctgattacaatgtggaatgtacaaagactaggtccctgaatatgagctatgctgaatcgctgatgcctgtaatatagcttttgttgattcaatttcagcttatttaatctaagaatatattgtgattgtaatgtcctaattataaatacanttttactttatttgctacaatctgat

SEQ ID NO: 252713 - DNA, 480 bp, Glycine max
tcaatctcttgtaaactaaataacattcatggtactgtttgttttattctgagaccaaatttcaatatcaattcgatttcacattatgaaatgaggtcatgacttggagggttaacactttatttttatttatttagttggctccatttttttaaaacttcaatgtattcttttatatgtttaaagtgagtcaaaattgtcacattaaatttatgtacatgaaaattataaactcctaattgaagttcgatccataaaggtcataaatattataaaaattgtgagaaaaataaattaacatgaaaattgattaatgtaataccaattttttttatagtagcaagttaaacattgggtgtattttaagaaatttgcctttatgatttgctatcttactcctaataagtgagtgtaagttaatccaacatgcatttgctaaccttcatctatttgatctttataagaaataatgtaacaaat

SEQ ID NO: 252714 - DNA, 443 bp, Glycine max
gtcgtctgaaggatgattggtagttataaagcgccgatgcctactgtagacttgttttctcccatgtttaagttgtatgtaacttgtgttttcttcacagatggggcatgcatgatgacccttaacactgtaaccactgagattcccatatgctggaaagtcattaatcatacaaaaaagcattgcacgcatttcgaacgtctccttgcaaaacgcatcatacactacaaccccctcgtcccccaactttctcagatcttcaaccaacggacttagataaacatcaatgtcatttcctggctgtcttgggcccgatatcatcatagacaacatcatgtattttcgcttcatgcacaaccaaggaggcaaattgtaaattactggcagaactgggcatgaaatggtgtgagtgcttaaagtgccatatggattcattccatcac

SEQ ID NO: 252715 - DNA, 475 bp, Glycine max
  unsure (1)..(475): unsure at all n locations
tttctataaatagggggagaagtgaagtattaaatggttcagccacttatgcacttctctctctctcgaaatagctgagaaaaattagttccgtgaagaaaatccaagccgatgcgcttctgttacgtttccgtaacgtttccgtgagtgatttcgcgaaagttttcgaccgttcttcgacgttcttatttcgttcttcatcgttcttcagtcttcaacgggtaagtacctcaaaccaagctttttaattcattctatgtacccgtggtggtccacattntgtttcatgtatttttattctcgttttcatttactttttatacccccttttgacgtgcttaagctatttatttaagtcattcctcgcttaatctaanaataaaataaatttccactgatcgtttgaattgtatcatccgttaatttcggttataatgaattccgaccgttcggtcgtgctgtaaccacgttggaa

SEQ ID NO: 252716 - DNA, 403 bp, Glycine max
  unsure (1)..(403): unsure at all n locations
agctggtcttaaacccgatattctttgtcgtatcaagtcactactggntctaaacaaatcaacaagatttgttggaagtttgcacaaataagttgtgatcgtctatcttatagatagataaatcactcaacaattttagtcttttatctaaaggtatataaagggttttgaaagcttagtatctatggaaaggcttatagaaagcttcacaagaaagaataaaagaatatgttcgcatagatgattcgtaacttattttttcaaagtttcttttatatataactttcatcttcaagtatccattntctcacaaagattagattcttcattatgttcttcatatgaaagcttgagttcgttggagtatttaatgcttgcactagatgcatgtcctttttcatgc

SEQ ID NO: 252717 - DNA, 465 bp, Glycine max
  unsure (1)..(465): unsure at all n locations
gcttttttacaacaaagagaagagaaaggtgaaggattgtagatatacaagtggtggagatgtctcctccacctctataacctcacaatcactcacatactcatctcaagttctcaagacagcttcttcttcaagctcgattctctataagtcttcacatagcaaaatctctcaaactctctggaacttggacctttctctctctataaaaccctagacatacagaagctttaagaaaaggtccaaactccatttcaaaatctgatttcaggcttaaatcggtggctntgttcgtgcttgcacgcttatcgcaattctgaaccgcttagccctcattagtagatttcggctaagcgcgtgcttttctcgcttatcggatggactgaagcggtgcgcttcgctggatgacccttcgcttattgcatatgcacaactcatccttctttcatattcttcctcgcgctc

SEQ ID NO: 252718 - DNA, 464 bp, Glycine max
  unsure (1)..(464): unsure at all n locations
agcttccaagaatgaaggcactcatggtattttgcgtttttcaaccctaagtcaccgttggttgtgtttttggntccatttggccttattgctcactccatacaagtaagtacaccacccttcaatggcattatgcattgtttttgtgaaatataacctatggaacgaattggtatacatgtgattgacattgttaagtgtgtacgcagtttcatgggggggagaataattgccccaaatataccttatgcctaagaacccaagctgtgtgttttgagtgcaagaatgcatgaaaatgagagcatttggtgagggctgcaacatgatggtttcttcgcacctatatgatgagaaagtgtttagttaccatgtatatgcgtatatagaataactagcaagatgcaagcaccttttaaacaagccgacatgtggatatgtagcaagtgcttgccatgtcattatgt

SEQ ID NO: 252719 - DNA, 413 bp, Glycine max
  unsure (1)..(413): unsure at all n locations
atgcacattttatctatatacatatgtttgttgcttgcttgaatcttgatttcaggtattgtattgtcatcatcaataagggggagattgtagatgcaattggctttgatgttttgatgatgatcatgatgatgtgttgcaattgatgcaaatgggcttttcaagattaaaattcaagacaatacttcaagattacatggcacaacatcaagatgatcactagaatattangaagggaattcctaattgaattagcaaatgtctggccaagtgatttaaaataaatagtgtttttcaaaggttgtactctctggtaatcgattaccagaagatgttatcgattaccattggccatatacgttttataacagctataaaaattngaattcgaatatttagactatgtaatcgat

SEQ ID NO: 252720 - DNA, 433 bp, Glycine max
  unsure (1)..(433): unsure at all n locations
agcttgtactacggagtaaacatatttagattatgttagtggagagtaaattacaagcaatcataaccatgtgcaaaagatttggtctttaataataataagcttataacctctcatttgtaagctaccgtcaaaaaaatccctttcaagtcttgtaccgtagattcattattgggacatggaagcatgggcgcacaccatatggtaataaacaaaatccttagcaatcccaaggataatcttagcattattatcatttatgggtaattaatgtataaaccatagcaaccacatataccaaagctatgccattgccaatttgcaaatgttaaccctaataaaaaaatttctttctctttntatccgccagccctaataaagattcaagaaccacacttttgttggtcaacaagaaccacatttaaacaatgag

SEQ ID NO: 252721 - DNA, 208 bp, Glycine max
  unsure (1)..(208): unsure at all n locations
tttttattcttctcaatgaaatgtgcctcctcttatatgaatatatataatcatgatgacattactgtgantatttcgaatcccattctaatttcagattttttaataaagggcccaagtttaaattctgagtatgaaaaatattattaaaagaataaattttattataaataatcaattatatttatcaacttagggtatcatgatc

SEQ ID NO: 252722 - DNA, 433 bp, Glycine max
  unsure (1)..(433): unsure at all n locations
tctgctatcgggcttgtagctcccctagtccttatacgaagtcattgaggtacttgggcctgtgtgtagtgcgttttggtcttgtcattgcctctactatttgtagtcatgatttcttcnttggtggaattattgtctgatgctgttatctgtgtgatatctggtactgctgttagtgtgttgctatcatctgcatggtttttttttgtcgggaaaaatatataaatatttaattctgtaaatagtgatgaagtaccagaggtactctgtacatagataggatcccatagatatnggtccttagaaaaaactaatacagtttaattaggaaccatattatagcttatacatctggtatagccccaataataatctaccctccagtgataccaaaagcctttgtcatgtagcattcgatctgctatgatgcatg

SEQ ID NO: 252723 - DNA, 455 bp, Glycine max
  unsure (1)..(455): unsure at all n locations
taccttgaattataattgtatcacttgcaacctttgtgagctgtattacattttcaaaattgaaccctgaacttaaatgaatatctccagataccttgtttagattctaagagagcagatagttcaaggaaaattaccccaaaatttgggggagttgattangatgtaaagtaaaagggtaagcattaacacacacaacaaataagttgtgtgttaaaaaaaatagcagtaaaagaaaatgtgtgttgttgtaataaggtcaaagacaaattaaagtgaaaggctggtaagaaagataattgtattgaaagaaatatttggatgagtctangatttgtgctctcttataatctaagcctttgaatcctagaaaaaccaattatttttgttgtcaaacctcactacaagcctataaaagtccttctaattctatttatgcatttctgacttgatga

SEQ ID NO: 252724 - DNA, 433 bp, Glycine max
agcttgtctcagcgtttatgcgagacagagaccaacatgctagctatcatcgccaagtaccaagaagagttaggtctagccgcggcccacgagcatatgattgcggacgaatatgcccaggtatacgcggaaaaagaggctagaggaagggtgatcgactctttacaccaagaggcaaccatgtggatggatccggttgctcttaccttgaacgggagtcaagaacttccccgattgtagacaaggccaaggcgatggcagacacctactccgcccccgaagagattcatgggcttctcggctatggtcagcatatgatagacttaatggcccacataattagaaatcgttaggaaacttgtatggtctctaagaacttgactagatacgacttcctttttgaaataaaatggagtggcccatgtttctactc

SEQ ID NO: 252725 - DNA, 477 bp, Glycine max
  unsure (1)..(477): unsure at all n locations
tgcttgtggttgtccttaagactttataatgattgaagattgtttaattagcaactggaactcaagtaattgtatagttntatgtcattagaaaatataaagggggtgtaacattgcattatcagtaagtctcaaattgtatttaagtcaagtaacatgcagatcaaggaattaaacagtgtgcggtagagctaaaacgtgcctaaaacaagctacttttacattgtgaaagaataaaaatgcaattgctcttaaaaatgcaaatacataatctggaattctgcattaactcccagataaagacctctatggtgtcaatcatccaaatgcctatgccagcaaaataactaactttaacttctagaataaaggagaaggaaacaaagatacaacacatatcacaatatggagttttaatagtacaagagaaatctcactaattataactgcatcagtaagtgatcacatgaatgattc

SEQ ID NO: 252726 - DNA, 441 bp, Glycine max
  unsure (1)..(441): unsure at all n locations
gcttttcaattcattctatgaacccgnggtggtccacattgcgtntcacgtatnttcattctcgttntcatttaacttttataccgccttttgacgtgcttaagccatttatttaagtcattcttcgcttaatgtaaaaataaaataaatttccaccgatcgtttgaattgtatcatccggtaatttttgttaaaatgaattccgaccgttcggtcgtgccgtaaccatgttggaaatcaaaaaagaggtaaaataataatataataaccaaaaaatatttctttagtaaagtaaagcggaaaatcaatcggacgttttctctttgggagttctcattcttaattgaattgactaaataactaaagtgaaactaaggctaaaatcaactcgcctagtcaagcttggccacaaaaatnagggtttgaaaatttatcatttca

SEQ ID NO: 252727 - DNA, 411 bp, Glycine max
  unsure (1)..(411): unsure at all n locations
catgatacatgtcagggtttgggttgtctcattgattaaanggatgccccacattatttccatgacacaaatgcaaaaatgatgattcggaaattttatgcaaaactggtcatgcatgcacctatatggacgctcaagtgtcaaattttnatggtcatgtgatgctatggctcatgattcattccctctattctaaatcaacccaatgtttccaaaatatgttcttttatcaatttgtgcattcatcctagtccatttagggcgtacggtgaaanttcacatcattcacccttcaagtgtagacacatttttcataaatagtgtatgatcaatgaatttttgtaaagaatagttggaaatcatctcttttaaaagcatgtcggctgttacataaacaactatttctttttt

SEQ ID NO: 252728 - DNA, 376 bp, Glycine max
  unsure (1)..(376): unsure at all n locations
gagctcagctgtgcaaacgctaacttggaggatcaattcatcctcataaccctttcttccacctttcgaatgccgacctcgaaaacccaatatgtnttcctttcaaatactatgaacaaaatcaagaacttcttctgctatgtacctttcaacaataggtgcttcaagacattgaagattctttgtatacccttttaagatcttcatgtattgctcaaccgggtacatccaccgcaaataaatgggaccacaacatttgatttcccttactagatgaataattaagcgaaccatgatgtcgaaacgcgaatgaggaaaatacatctccaactgacacaatatagtggcagcctcgtgttcagctcattaacttgaa

SEQ ID NO: 252729 - DNA, 448 bp, Glycine max
agcttcattggaggaaaagaatgagagagagattttttatgtgggagcccaaatttaggacgaaaagaatgagtgaagttgaactctgatgtttgtctcacatgactcccattcatcatagtttcacatgtgttacacatgcctttatttatagcctatgtagcttccttgacaaacttgccttgataaagcattcttgagaaacttccttaagaatctagaactgtactatacacacccctttaataactaagctcacctgcgtgagaaacttcttggaaaagaatcctaaagaagctagagcttatctacacacacccctctaatagctaagcttacctccttaagaagagaagtcatagtctatctacacacaccctctattatatctaagctcacccctttgccaaaatacatgataatacaaaatatatgtccctactacaaa

SEQ ID NO: 252730 - DNA, 411 bp, Glycine max
  unsure (1)..(411): unsure at all n locations
ctgagctgcgcttgaacaactttaactcaatgattattctcctgatagacccaagtggtttagatagaaaacatgaaatagggacttgttgtaagaatatgggctgccccatgattggcactttgcacctaagtaatgtgggagatgcttttcaatggtgtgtagatatgtgtgtaaatatatatggcataaaaatatgtatatatgtgaatatatggcatgaaaataccttgcaaagtgaatgaatagtaaataatgcatttcacaaatgtatatctgtggataggtagcgtaaaaataccttctaaaatatgtatatntatggataggtagcataagaagcctttcaaaaaaaatgtacccatgccataaatgacacaagaatgcttccaaatgatatatgatgggaat

SEQ ID NO: 252731 - DNA, 396 bp, Glycine max
  unsure (1)..(396): unsure at all n locations
cttagcacctctctctctctcataattgctgtggaaattattctgtgaaaaaatccaagccgtatgcgcttccgtacgttttcgtgagttatttacgcgaagattctcgaccagtcttcaagattcatcggtcgttcttcgtttctttcatcttcaacgggttagtacctcataccgatgttttcaattcattctatgtacccgtggtggtccacattttgtttcatgtatttntattctcgttttatttgctttttatacccacttttgacgtgcttaagccatgtatttaagtcatgtctcgcttaatctaaaaataaaataaatttccaccaatcgtttgaattgtatcatccgttaattgcggttataatgaattccgaccgttcggtcgtg

SEQ ID NO: 252732 - DNA, 238 bp, Glycine max
aaaaaaaaaaagaatgtcgactcaacccaacacggcgcacgccgcaaccacacatgattttcaacctcagccgttggaatatgcagggaaataacacacccctgaggacaaaaagcatgcgagacaaagacgagagagtaaaggacagcacacaaagatgaaatagacgagcgtagagagcaaacaggaaaaagagaccaagagatctgccgaaaaacccttgaactgaaaaaacaac

SEQ ID NO: 252733 - DNA, 66 bp, Glycine max
gcttctcaatctgtccactaaacatatctgatatccagagatgtgttattctttgaaatatattcg

SEQ ID NO: 252734 - DNA, 388 bp, Glycine max
  unsure (1)..(388): unsure at all n locations
tggagtttatggaaaaagtgggttggcaaaataagattctgatctcacagcattctgtatgggtcctctcttcatgttccaaccataaaagatagaccaagctggcaagatgtgaaagttcgaatacatggaattttatacttataatccatatgtattatcatattatgtattcataagagtttgttacatgtgaggaaaatgtgttgattcatgtgaggaaaattgagatatgcatggacttggggaaaccatctaaacagatgttacacattctgcagatctgatgcaactattagaattcggatgatggagagcaaggcatatgatgagatgaatggcagngagtggcatgtacctatactgtgcatgacagctgatgtgatcc

SEQ ID NO: 252735 - DNA, 475 bp, Glycine max
  unsure (1)..(475): unsure at all n locations
tctatcataattaacttatgcagtttgttatgaaatgcaactaaaagagtgtaatagcaaattttggatttacagctggcaaaatctggatacttctaatttaaatagtaatgacatatgtacctatagacatggattggtaagattgataagaaacttcatatcaaatatgttgcgagcaatagaagtagcattcattcattgataataatattaccctcggcttctttaaaatcatatcttgtataatacttacaaacttaacgacattacatgatgaatacatgacagccatatttgtttcttcttgtatacatgcggaactggataccagattntgcttgatatatataataaattgacttaaattaaattaaactcaggctatttagctcgatacatgtgttgatcaataaggagattaatatcaagtatgttgtgacgaacaagaatataattcattcattgataaaat

SEQ ID NO: 252736 - DNA, 431 bp, Glycine max
  unsure (1)..(431): unsure at all n locations
agcttgtaggattatggngtacccatcacatgtggtactaggtggcggncgggtgatggtgcacaacaagtttttccacatccacaaagcgcgcataaacccaccatcccctgttgcccacctccaactgagctcacgtactcccacgtagcccatatcttcgtttctctcaacaccgggtccccatcaatcctcccaagctttcctcaacatccaggtaaaacaacattcaaaccgcacaaactatcacagccaagaaaacagggtaaaggcagaaaactctgcccaaaacaccaaccaaaatcacagcttttctcacttaaagaccccagtaacaattccttcgttcccgttcgttaactgttggattgactcgaaaattttactggaagtctctagtacataagcctacattntgaccgttgggatct

SEQ ID NO: 252737 - DNA, 426 bp, Glycine max
  unsure (1)..(426): unsure at all n locations
tgacgcatcatctagaatcaagccaatgctattgtgcatgcattcaatgtggcataacacaccaaatgattataatgatggatggctcanattctcacaaaggttaaatcatcactgttaaattgagctttcaaaactatcatgacatgtagagaagaatcaaggatttcaagtcacaaaatgtcaagaacttttattttcaaaacaattacccatttcttgaacatatcctgtaattcaaagaataacatgcatagtcgtacgtgcacatgatattgacccataatattaaactgaaaatccgacgaaactaacatcattaacaaanttacacaactaacatattatctaaaccaacataactagaataaccatttaacactcccgcgcatacttaaacaacacattgtcctcaatgtatcacaa

SEQ ID NO: 252738 - DNA, 290 bp, Glycine max
atgagatgtatcatagtagtaactctttgcaatatacaaataaatcttcaaacgatcaggccgaaatatatgacagataaactttcgacaattctattttgagacatacaaatagattgggagatatttaattgtgtaacaatacaactaaactcgcagtatagaacactattgaatgaaaatttaatatgtatacatataacataataagaagatgcggatagcaattaaggctacttaacacaaacgaggtgcggcccaaatatgagaaacatcatctcgttcgggac

SEQ ID NO: 252739 - DNA, 351 bp, Glycine max
  unsure (1)..(351): unsure at all n locations
agcttcaaagcttaatcttcatggtgcttcctctatttctaacactcctcattatagtatagctcgaagcctttgtttttagcagcataacaaacagggagatgtggacacaccttgtcaacaactatcttaacatcagtggccctggatatgtacagactaggagtgtatgaaatagcttgatctcttacatacatctaagcatgaaggtttccaagagataaacgttcttcctgggttaaattaaaattagctggatgcactggcaagagctntgtaataggcgtctgtaaatgcacattcttctgaaattcactttntggaggtttcacattgatgcaatcctacccc

SEQ ID NO: 252740 - DNA, 390 bp, Glycine max
  unsure (1)..(390): unsure at all n locations
ccgttgtagatcgaagaacgatgtatatcgaatgatgaacgtcgaagaacggttgaaaccgttgcgaaattcttcatggaaaacgttacggatacgtttccgaagcgcctcggcttattatttcctcacagtaacaatttttccaagcatattctaaagatagagaagtgcctaatgtgctcaacccttttcttcttcacttcctcccctatttatagcataatatgggagatgctngccgcccagctcgcccatgcgatctaggttgcttcctccataaacaacatccttctggatgaatattctggagggcccaaatgggccttgttgctttttgcacccccatttttactaagtacacccctaccttctttttgggattcttttttc

SEQ ID NO: 252741 - DNA, 409 bp, Glycine max
agcttgcttggggggcttctaaagaggctggttctttgagcttcaatgagggccgttaatggtgattttccaccatggagatgcagcggaagacaaaggagaagaggtgaaaggaggcaccatccactagggaataagccatggaagatagagcttcaccaccaagatgagccttggataataagattggagagggcgcttcaatggaggaaaagaaagagggagagaaagagagagaggggagaacgaaattgaaggaaaaaaagggagagaagttgaactttgagttgtgtctcacaagactctcattcatcaaagttacaacaagtgttacacatgcttctatttttagactaggtagcttccttgagaagctctcttaagaaaaacttcttgagaagcttctttg

SEQ ID NO: 252742 - DNA, 56 bp, Glycine max
acggacacataatactcagcttctagccaatggacttacatggaatatggcgtttt

SEQ ID NO: 252743 - DNA, 280 bp, Glycine max
  unsure (1)..(280): unsure at all n locations
atcaccctcattaagaactagctcttttcttnctctattgcctttcggtgaatacacatttngttggttctctattatggtcttaaccctctcatgcaacttctttacaaattctgacctagattccccttctttatgtataaaagatatgtccagtgggaggggaatgaggtctaacggtgttaggggattgaacccatagacaacctcataaggggactgcttggtggttctatgaacccccctgttgtacgataattctacatgaggaagatactca

SEQ ID NO: 252744 - DNA, 445 bp, Glycine max
  unsure (1)..(445): unsure at all n locations
acgtgacacatataatactaagcttctcaggaggtgagcttantttttagatgggtgtgtgtatctaagctctagcttctcaaggaagttttctcatagaagcttctcaaggaagtgttcttataaaagcttctcaaggaaactacctagtctatatatagaagcatgtgtaacacttgttgtaactttgatgaatgagagtcttgtgagacacaactcatagttcaacttctctccctttttcttccttcaatttcgtgctcccacctctctatttctctccctctttcttttcctccattgaagcatcctctccaagcttcttatccaaggctcatcttggtggtgaagctccttcttccatggcttattccctattggatggcgccgtctcttacctcttctcctttgtcttccgcttcatctccatggtggaaaatcacca

SEQ ID NO: 252745 - DNA, 398 bp, Glycine max
  unsure (1)..(398): unsure at all n locations
tgcgtttgagattctataattccatgtttttgtagcaactgtacagagtacctgcataataattattgccttattaggaaaatgaaagttaaaaagcaaagattaatgaaagttgaacaagaccaatgtttccaagataagcatctacactagaaattacattaaatgcatgcatttgacaataatacactaacaacatataggtaagcatgtaataatacataggcagattatttttttataagaaaacaggttaggtttggacgcatgaaattgttcaaatatacagtgagccctttacattgaagcgagaatntgtaagatgaatcattgaacctgttacttttggttggacccatattaaanaataaagaaaaaagcactagctaaagagtatg

SEQ ID NO: 252746 - DNA, 446 bp, Glycine max
  unsure (1)..(446): unsure at all n locations
tctgttatgatccattttgagcataccctgaaattaatgcattccatgatactgtttctcgacagttaagctcctcaaaaatcttggctgattcttgaatgcactcaaacttggcatacatggtaatgaagctgttggagacagtttgttccgacaaaaagcatctttntatgcatagcccatgaatcgttagaccttctgtcactaaattcctgattgttacagcatgtattaatcctataaatgtaacatcatttggatacacgccattaactctcatggcattgaagagagacactgcatcttcttcgtcaatagaaatcattgtcgtccaagacactacattccgattactaatgctctcaaaaacaagctttgcatctttatggacctcacattttgaataagttgacatcaaaacattgcatactgtacatgtgttcata

SEQ ID NO: 252747 - DNA, 314 bp, Glycine max
ctctaccaaacctcacggggtttttttttccggaaaaccgagggagggccatgaacaactcactctatcaccactacaactcatggtaaaaaacaccagcgaaggaccccattgaagctcaaacatcccaccggcatacaaacacccaagcaagctgcgatcataatgtccaaggcccactaactcgaacaaattacaagaaatattgcactgacacttttggctcttacatactacactatccaccaaggtacacaaaccggatgataagaccaccaagcacaacagacgcaaacaaaaaaaagaatgaaacc

SEQ ID NO: 252748 - DNA, 367 bp, Glycine max
agtctagtcgaatctccaaggctagtcaaacccaaggtccatcctctgtgagtctggttgaatctctaaggctcatcaaacccaaggttcgcctttggtgattctcgtcgaatctccaaggctcgtcaaacccaaggtccccccttaatgagtcttgccaaattcaggacgaacgcatccctggttgaaactttagaggctcgacaaacccaaggtccacccttggtgagcctctctgttaccaaatttcgtctctacatgaacctaagacacactcttggtaaattcattcctatgaaactataatgggcctagtcaagggttatattaaacacttgttagttaacgtaccacccaagtaaatccc

SEQ ID NO: 252749 - DNA, 416 bp, Glycine max
ctcttaccatgtttgtattccattttgtgggatcagacgcatatctccatagcaaacatatagttactttcggtgcgttgcaatggggaaatcaggtaaaacatgcatcacaaatgacagttcatacatgcattgtactaactatacctcaatgttagaaattaactagatgagtaccaataacattttttttaacacaattctcaattaatttatacggtgtggaatcatctacgtaaataacacattttttaatagtgtcaaggccatgtccatgtccatgagaatgccataagtgtaagatgtggattttgcatgggacccaattttctcatcttcagatctacaattcaaatggcaaatattgtaacctttcaagatgaatatatgttgctcattcatgaaagttacttttt

SEQ ID NO: 252750 - DNA, 420 bp, Glycine max
taaaagaggaagagaagtggaactttgaagtgtgtctcataagactttcattcatcaaagttacaacaagtgttacacatgcttctatttatatactaggtagcttccttgagaagctttcttaagataacttacttgagaagctagagcttagctactcacacccatctaataactaagctcacctccttgagaagcttccttgagaagctagagcttatctacacacacccctctaataactaagctcacgtccttgagaagagaagctagagcttagctacacacccctataatagctaagctcacccccatgacaaaatacatgataatacaaaaaaaaagtccctactacaaagactactcaaaatgccctgaaatacaaggctaaaaccctatactactagaatggccaaatac

SEQ ID NO: 252751 - DNA, 447 bp, Glycine max
  unsure (1)..(447): unsure at all n locations
gctatgatccttcacattccataaagatgaaggttgccttctaaaggaaggagagaagcctggcctatctacaaggacatggactacaattggatagggtccccatttgtcacattatggaaagttntgttagcgcaagatggatgcgcaatgattatgttgcggtgattgacgattgaacccctcaagactgaccaaattgggtgcatccatgtcctcctggctttgaattgaggaatnggcaaattgttgaacaacccaagattttcatgacatattcaatgtaatccaatagttccaatcctattgctgggcctaaactttatggtctgcttcctgttaggcatatctctttctttaatggtcccatatatatattacacaaccttttcatgtgatgtgttccctctcgcactttgatctatattcattcgtctgcatatttat

SEQ ID NO: 252752 - DNA, 406 bp, Glycine max
  unsure (1)..(406): unsure at all n locations
catgcaagctncctcgggccatntcctgcgaaagcatacattttttatgtntattaaaccaagaaatgctactctaaaaacgaaaatagcatacaacctcctccaataaacacaaacatcaatggtaatttatagcatactcatgcacatactntctacaaacattcactcgcacaaaatattctgctaactaaaaaaaaaatgcacccatgcacaatcaaggcaccttcgttacctatatcacttatatgcacttccaaggtgtatctgctacctacatcacatgcatgtcctttgctaaatttacatacatacatactcaaggcactctggctaccaaaaattgcatacgtgcacattcaagtatttctaatacctatactattatagcgtggcttatagctga

SEQ ID NO: 252753 - DNA, 322 bp, Glycine max
atccttacctctgtagcgaatagtatatataggtaatttccaatccaagatatagcaaataagaaaagaatgaaatttcccaatcatatgattgggtgatagataaaagatgagaaagaatattcccaaccaatgaatgggagaaagtgaaaaagaataaagctcctggtcaaagaaaccataataaatgtgcttagatgtctttggaccacacaatatctgaacaatacataattgtcaccaaatgaacaaaagaaagaaaaggataccatgacctaaatgtggtcttcttccttttattgccaatcagaatcagtgcgct

SEQ ID NO: 252754 - DNA, 368 bp, Glycine max
  unsure (1)..(368): unsure at all n locations
tgtaagccaccattntcattgtatattatgggtaatgggnctatcatcacgattatcatctccctttccatcattgggggtgccacttgggctgccaaatccctccaccttcgggcgtattctttgaaagatccgcgccccccttttttgcacatgttctgtaattgcatcctatccgaagccattatactgacattgtctaacgaaggcaaccattatgtccctctaagcatggctcgggaaggttccaagttggtgtaccaggtaatagctaccccagtaagactttcttggaaggaatgtatcaacaattcctcatcttttgcgtatgcccccatcttccgacaatacatncttagatggttctt

SEQ ID NO: 252755 - DNA, 327 bp, Glycine max
ctaatcttgatgtgaacccctgttttcaaataaagggtttgttctttgccttcgctcatgtttaacaaggaaagctggatgcataggctgtataatgtgatttcattggctatcctgaaagaatttaagggtacaatctgtggaaactgttaccgggtgatacaaaatgtatcatcatcatggatgtgaccctttgatgatagcataatggcattgctatttttggtacagatagatatcaactctaatggtgagagtaccaatgttgaggtggaacactcttagattttatatcatggcatcgttatatattgatcacactgttca

SEQ ID NO: 252756 - DNA, 462 bp, Glycine max
  unsure (1)..(462): unsure at all n locations
ngcttatgatatgtatacctcctttctttttatatgtcattcagaactctntgccttgggtgttgattagggttctactgcaacgcttgatgatgcaaaagtagctgctgaattcaagaggcttgctcaggcatttgttgtcggagctacttcgcattgttcgacattaccccttactgctctggttgttcaggtagctgcccttctactcccaagtttcttttggaagacattgtatngtatgtcaagttctagtttttatacacgtgcatatctatgtaatataaattggaatgataatgatgnttctgttccagcgtttgctaggtagtaactattttattatccctctctctctctcccagcatcagtaggttaggttcattaaaaaagatccataccattaccacttatctcanatgtcctcattgttcataacatatcanactatcaattctaatg

SEQ ID NO: 252757 - DNA, 147 bp, Glycine max
cggaccttagatactaagcgtgtcttgattttaaagttcttaacaccttaatcattattttgccgtcataaattgtcttggggttgccgatcacgatctacaaagttacttctacacctactatatgttgatctcaccaacattatc

SEQ ID NO: 252758 - DNA, 413 bp, Glycine max
  unsure (1)..(413): unsure at all n locations
cacaactatatattaattgaggcattgtttcttacttttcaatctttttatgaaaaaacatcatattactctggctgaattttaaaaataatgaatgataataaggtatcccaaaaatataaacaatataattatctaaatatttagatacctcatttaacctatgttaatattaaaggaggaaaataactctttttntatagtttgaaacatttccctaatttattgagtgaacaaaaatgataatagcagaaacaattaaaaatatccttttttaataatccaaataaagggttaaagtgcaagtaaagagattttacacaanaagtaaaaaaaatatctacccaaataatatattaaataaatacaattcttttaaagaaatattctttataaaaattaaaacataaaaa

SEQ ID NO: 252759 - DNA, 393 bp, Glycine max
  unsure (1)..(393): unsure at all n locations
catatctcttaattcactgtcataacttattagtttaattaaacatcattattttcagcttaatgttttgtatgccaagtttcgttagaaactcttcaaaatgctccctaatctcataatctaagtaaccatgttcctcttgttattttacttacttttcttcctgttattgagatcacttggctgcgaataatttattgttaaaccctaaagattttatcaataaaaaaatggtttaaacctaaatgaagaaaaattatgcactcagaaatgaatcttccattgatgatatgtgaagtccaaggaggaggccattctgaatcgaagtttgtttttttttttantaatttcttttgggtcctcaattcgaagatatgtgtatcacttttctca

SEQ ID NO: 252760 - DNA, 503 bp, Glycine max
  unsure (1)..(503): unsure at all n locations
gcaagcttgagtttcagggaagaagtcagagttctacatttctaanaaaatcaatgagtttcagatatataccaacattgaaagctgcataatgtacgtgaaacaaagtctatatacatatataaggcatatatccaggtaggaccaaaacatttggcttagttaatctaattaaagtaagaaatatgattattagtatattggattgggtttcttgtgtttttgctataaggaggttgttggggattatcagtccaaactctctatttggtaattcaaaatagacacacaataaaatgtatggacatatgaagatagaggaaatgatataaataatgttaatgtgaacttcttaattaatgtaagtaaaggaaaaacataacaatgtatctttcctaattaagaggatttctcaacaatctcaccctaaatgaggatgtaatacaatatgatggtttcctttctctcatgtctatcatgttacatgttactttggtatacaa

SEQ ID NO: 252761 - DNA, 292 bp, Glycine max
  unsure (1)..(292): unsure at all n locations
tgtcgagttcataagatatgtgcgtataacataacgtctttatttatccacgtaatttntctcttaagggaatgactgaataatgttcattttagtgtttcagcatatatagatattaagtctatgacgatgggaggagtgaacttatagaaatgacataaatcgtcttcaatatttcaaatttcgaagaactaatatatatcatccacgaaattctagcatgtaattttattctttgtttacagttggctatgatacaccacatgcgtatatgatcatttacccgtgtttt

SEQ ID NO: 252762 - DNA, 372 bp, Glycine max
  unsure (1)..(372): unsure at all n locations
agctttaatcctttcattcttagtttctctgatgtaaccttgactnttatgcatttttcctagttagttagagcttatcttagtatcctttgtgtttttggtactggaataggatatttttacacttcctttgaaaatacattgaaaatgagacattgtaaaagttacatttttataaaattgatgttatttttgtgaccttcgttaaacctcgatcacattagcgtgatcggaatttcaaaatgacttatctttgtagtagaactcgaaacaccccttaaccccttttattttgattagggtatttgaccctaaatgttgatattaaccttgtttttgaaacctatactaaattatcttcgatttggatat

SEQ ID NO: 252763 - DNA, 395 bp, Glycine max
tgccttctacttccataaagaagtgtgacattttcactgttgtattgtgtgccgaacccatatgctccatattacacatacaaaacatgctgggctattcatgagcaccaaatctgcatgatttatggaagaccagactctgagttcatgaagtggaagtggaagccaaacggatgtgacctacctgtgttcaaccccttccaattcctatagattatgatgggaaaatccatggcatttgttggtgactcagttggcagaaatcagatgcagtccatgatttgccttttatcaaaggtaagtctctcttctgcctaattacttagatgaaaattagatgctctcatggttataaagtttcgagttatattgttaacttttacgagttcatttat

SEQ ID NO: 252764 - DNA, 474 bp, Glycine max
  unsure (1)..(474): unsure at all n locations
aaaattgccttaatcattttcaaatatgcatgnngaatangacgcatcaacaagaatcaagccaaggctattgtgcaagcaatcaatggggcaaaacacaccaaatgattataatgatggatggctcacattctcacaaaggtaaaatcatcactttcaaattgagctttcaaaactatcatgacatgtagagaagaatcaaggatttcaagtcacaaaatgtcaagaacttttattttcaaaacaattacccatttcttgaacatatcctataattcaaagaanaacatgcaaagtcatacgtgcacatgaaattgacccaaaatattaaactgataatccgacgaaactaacaacattaacatattaacacaactaacaaattaacaaaaccaacaaaactagcanaaccaaagaacactcctcnncccccccatacttaaacaacacatngtcctcaatgtagcacaatta

SEQ ID NO: 252765 - DNA, 398 bp, Glycine max
gatagtcaccgctttatgagtgctgtacaccatcagcgcttcgaggccatcaatggatggtcgtttctctgggagcgacgcgtccatctcatggacgactagtatactgatttccatgaagaaatatggcgccggcggtgggcaccactggttactcctatggccaagtttgatccataaatattccttgagttttatgccaatgcttgtccaacatatgatggcgtgcgtgacatgagatcctgtgtaaggggtcaatggatcccgtttgatgccgacgctatcatccaactcctatgatatccgctggtgttggaagatggccaagaatgtgagtatggccagaggaggaaccggtctgatgggttcgatgaggaggccatctcccatctgctatg

SEQ ID NO: 252766 - DNA, 429 bp, Glycine max
  unsure (1)..(429): unsure at all n locations
gtganaagtgttggtttccatctcctcgctaagccaatctgttggcatatcgagcgtccgctaagcgcaacattcctgagctaagtgcgaggaagactatgaaagaagatgagctatacaagttcgctaagtgcaccgcttcatctcactaagcgcaccgctttagttcatctgctaaacgagaaagacacgttaagccaaaaatcactaatgtgcgctaatgggtccatatgtacgaacaaggccacctatttaagcctgaaatcagattttgtgaagagagtttggactgggattcagagctttgcatgtctagggtttctagagagcgaaagggccaagtttcaaagagttttgagagatnttgttgtgtgaagatctgcatagaccagagcttgaagcatgaacccgtttgagagcttgagatga

SEQ ID NO: 252767 - DNA, 370 bp, Glycine max
  unsure (1)..(370): unsure at all n locations
gtttgtcatttcaatttctcactaagtaaaatggatcattntcaaggtccaacgccttataatgatcacctcttaaagtaaaaaagaatcacttgataaaaaagaactacgtaggtctgatttcctcatcgcaattgaggaatacgtaggagcaaagggaaacacccttgtcgaccacaaaaagaaaaaaatatgaaaagggtataaaggatataaggacatataagggaacataaaaaccaaagtcacgtttgcacattcgattaaaggctgccgtcccttgngacggacgtatggtgtgctaataccttccccgtgcgtaaataaaactcccgaacccttcacttaaaagttcgtagatcgcgtcttt

SEQ ID NO: 252768 - DNA, 290 bp, Glycine max
tgaatctgtcataaaagacctatcctctgccaaagttattaacatctctatcacaaatggtatgacccgttacggacaaatctttgtagcgcccgatcttctgatgcgatataaagacccatatgggaaggcgaaagtgggcacgaaatagatcgacaaggcaagccgtattctggatgatgatgtcccggccgggatgtttgctaatggagaggaagacttcggcagataaataatatccgtagaagatacaaatgtgttccttcatatcatccagtaaagcgaagtca

SEQ ID NO: 252769 - DNA, 407 bp, Glycine max
  unsure (1)..(407): unsure at all n locations
tttaaaaacaacatttattgtaggtgaaatgcttggaccaatgggatngcaaggcctaatccttatcttcttgatttaagcacttaaatgaccataatatgactaattagcaacgtggacaacccttgaggtgttctccacgagctcagggatgccttatatggcttcttgcacttttccaaaactaactatataaggacaaagttgagtcttgccaaaaattgtaaaaactgtttctgctaaaattgtgaaatcttatcctaatcttctaaattagtgtgctaacttcctaaatttagtatgctaacctctcttgggatatntgtactcagagtgaacctggcacatatgtcactcatacaaagacaaattacattgcaactcaatgcacagtgcaattcttgcac

SEQ ID NO: 252770 - DNA, 364 bp, Glycine max
tttatactaacttgtataaaatcgtaacttattttattgcaactttatgtgttttgttcatcaaagtattggcagatggtcagcaaatattgttataatattcttaatgtttgaaagcgcacattctacacaatgatggttattacgagttcataacatcaactaagagataaagaggtgagaagatatgtaagatataaattatgcgtgtatattagtgaaaatttagtgtcaactcagttatatgataattttcatgacatgcacgaaagatgtttcatcaattcgatggattaataagttatttacatttgtgataatgaatttatgaatatctgttatgatatatatatatatatatata

SEQ ID NO: 252771 - DNA, 290 bp, Glycine max
aatgcacaaccaggtctcgcttttataaactcttcatgtctagtcaagaaaaccatttgaagagttatgaccttgagaaaaacctgataaccattggaagagttacatcttctgatttttgttcaaaacttgtcactggtaatcgattacacaaaactctttatgaaaggatgtgactcttcacaattgattttgaatttcaacgctcacatacactgtgaatcgattaccagattatgataatcgattacactatttataaatcaatctgaacgttgcaatttcactta

SEQ ID NO: 252772 - DNA, 435 bp, Glycine max
  unsure (1)..(435): unsure at all n locations
aaaatcaaatgatgtaactcttctaatgggttcatggtttgctaaggctataactctcccaatggttggcattgactatacatgaagagtctataatagcaagaccctgacttgcatttcgataactgtttgacttatctttgtaacaattctttggaacagctgttgagaaacctttgctgacttattattcctcttcctctttctttggaaataagctctgcttaagtnttgttggttttccaaaccctgaaaacaaaagtgtgttattcatctttgtctttctcttctccctttaccaaaaagaattcgccaaggactaaccgcctgaattctgtttatggctctcttctcccttctcaaaagaacaaatgactaacgcgcagaattcttttgtgtgctccttctgccttttaaaagaatgcaaaacgacat

SEQ ID NO: 252773 - DNA, 429 bp, Glycine max
  unsure (1)..(429): unsure at all n locations
aacatggaagaacgattagctgttcactggtgcgctatatgatggcaatgcgcgcgcggttgcgacgattcaaagttatttatttattattatttgtatganaagtaggctcaaagaaatcagtcaatatatgggctgcaagtgcaagtgaaactttacggtgggtttacttgtgcagaagagaaanaaatagaagaaaaataagaaaaaatatttgaattaaaatagagaaaaagaggtgagatccaacataattntaaatagtaattttaatccccgtaaattgttgacaaattcattcctaaaagattaagatttaaaatctagtttctgaaaatgtaaaaaaagataactaaattatttgggtgtaatcttgtttgtaagaaaatagctcatgttgacaaaggaatgaatttattatataattga

SEQ ID NO: 252774 - DNA, 401 bp, Glycine max
  unsure (1)..(401): unsure at all n locations
gcatattgngctttgtagttttaaatattgatgaggctctatcagggtaaaagatgaagctgcaactcttggagttggaagaaatgagactgaatgcatatgagtcttccaagctgtacaaagaaaaagtgaaggcttatcatgacaaaaagctgcttaagaaaaactttcgaccgggtcaacaagttctgttattcaattcaagattaaagttatgtccaggcaagttaaaatctaaatggtctggaccattcaccatcaatgatgtcaagccttatatatcagtggaattatttgaccctcattcagaaactcatgatataagctggacagttaatggccagagactgaagctataccatgatggaatattgagagattgaccaccattctacaattac

SEQ ID NO: 252775 - DNA, 427 bp, Glycine max
  unsure (1)..(427): unsure at all n locations
aagtcacctgcggcattgcaagctattgcagntntctgaacttgcttcttctcaggtaggtctgntgcacttcatgttggttntatttgtttcttaattggctaggtttcttattatgacacactcctttatctttgtatgaattgagaagtaaccattatacatgtgaaaaattattaattaatgtgattacttacctaatcaaaatataaaaaataaattgaaaaaaaagtcaattatcggcagggaggattataaacttcctagagagaataaattcccaaattttaaatcttttcctcactgagtattttctgagtgatagaacattgaagtgtaactcattccagatttagttgttgaaccagctggcatgtttaatgttgtaacctgtttattttaaaatctgcctaaccaggcataattt

SEQ ID NO: 252776 - DNA, 347 bp, Glycine max
ttttttggctcaattagattcttcacaaaaaattggcgacccaaactgtaccatcctgatcacgttcatatttggtcatcttatcccctaatgtaataatgttttctatcaaagaacaatattgaaaatatgcgaaatcatccttaaatgaaagacatcttatgaattatttcaagaagttgaattatataatgacacaacataatactattgattaaaattaaacaatattaaaattcacaattttgtataatagtacagattgtggttgtgtcacgttcttcatgttcaaatccaatacctatagccctgaaccgactttgggtttggtgttttaaaatccaaac

SEQ ID NO: 252777 - DNA, 498 bp, Glycine max
  unsure (1)..(498): unsure at all n locations
gcttctagccaaatggacttaccttgatattattcctttgatagcccttttgagccttgtttccctttccttagtttgaagctcactacaagccttaaatgaaaaaccatgatatcaccatatctntaaggatattaggagctttggaatttgtttgtgaataagtgtggngggttttttgtttcattggataacttgttttgttggctatgcttcatgatgtattntgggccatacttgatgtacanttgatattggttaaatgttggacatgctgaatgaaatngtgtttctcaaaggctatagagtaaaaaaaataaataaataaataaataaatttcgaaaaaaaagaagatcaagaaaagcaataaagttgagtgaataagatcttanatggcacaagaatgatgaaactcttggttctactctntatgtctaacttttaatcttacttctttgtattttcttacttttttctaaatatgcacttattcccca

SEQ ID NO: 252778 - DNA, 480 bp, Glycine max
gagatgatgaaatgtttaatggtgaaacctcctgcttttattgttgaccacataatggtacctggagatatgtctcgggggtcaagataccttgtggacgtcatgtggtgtgctattgcccaaaaccaatctggacctatcccgacccaacccgggcatattcggtcagtgagaacctgtgatgtacctaatcatgcgatctcctgtcagtcaacagattatcggatatcattaccacatatcatggtggcttgtggtggctggccaactgtgaatcttgtgtgatatgtggattatgacctctggtaatcgattaccaagggtgggttatcaattacaaggcttaaaaatgaagacaggaggcttagatggtctctggtaatcgattaccaaggtgtgtaatcgtataccaggcttgaaaaactatatcaagggactaagggaacctctggtaatcgattaccagcctgtgtatctatt

SEQ ID NO: 252779 - DNA, 519 bp, Glycine max
  unsure (1)..(519): unsure at all n locations
tcttaagtcacctgagctgcagcttttctaagcttttctacaacctttttctccnnccttggcaacatcaaaaagccaaagaacccggaaatcaacacagttntaacaaaggagtagcaagatataagcatcagagtattaaatacaataagccaaactcacaaacaagatataatcaaaccagaatccaaataactgaaaatgtcaacaaccacaaaacatccaagactgaaatttaaaatccacaagataaataagcaaagtacttagcataataatgtaaattctaagaaactaanagccaaaatacacggcttataaaagataaataatcagagtctaaaagctaagaagacggaggaggtggtggaagatcgaaactctgacgaatgtatccgacatcctcttcaagctgtgtaagacgaatgtccataccggcanagcgtgaatctaacgagtcatagcggtcaccaacatacgaacgaagacccccgtaattcgagaggacttattcatgag

SEQ ID NO: 252780 - DNA, 478 bp, Glycine max
attctgattatagatatgtgaacattgaaatgaatttactgctcagataaagatacttgattgaaattgttactcatatggattaagctgttaacagccttatttctctaataatgtgaattttcacctattatctatcacctgcagaacccctgagtggttgaataaagtatttgcagcaatcaccaagagtgagatgaatggccctgtatttcgctcttttattgatctacgagatgcaggttagctacataaatattccgcttttctcttgtccttatacatgcttttaaagtttagctatgccaatccatatgtgtcttatcatttgcttcaaggttactttgaatttgatcaatattcctgtgtagacttttctttaagacatggtgaaacgtattgttgtgatggcatctaaatatcgttggtcctttaactcatactaaggttaactatatttgcttgcccttgaatgctc

SEQ ID NO: 252781 - DNA, 394 bp, Glycine max
  unsure (1)..(394): unsure at all n locations
agctngacatgtgtccaatnntgtgtgtttttgatcatntccgcatcacacttccacctctgttggttgctccacgtattgctccacatgtctttttttttcatccttcatcccgagccttctcactttccattatatctttccatttctctttctcccgtgctttctagagctagtgctttgggaggagtagcgattcgacggttgaagttattaatccattatttattttttcaatcgtgagagaagagaacaggacgacgaataagaagaatccaacagcactcccatctgtgtgtctgcatatcagaagggagggctatcaaactaaggttcttttgttttccttccttattatgcattctctctctctctctctctctctcntctttta

SEQ ID NO: 252782 - DNA, 472 bp, Glycine max
gctagtatgggtgcacttctcaagatgttctttactttaaagacccaactgaaagttatgattgagttccaggaacctggtgaaaaattaatgtatatttcatggaccaaatttataatttaacaaagatgaaatcttattggaaataagtatattatatatcatattttaccaggcttcaccagtgaaaaaatctgacccaacataaaattctagatcatccacaatgtatttttcaaaatgttttcgtttttattaaaatatagatacactaatattactggaatgctgctgccacataatctcattcgttaacaacttgatgaaaatgaatttcatagatagatagatggataaaggatacctcgtattgtcttgttaagaagataatgaaacttttcatgatgttgatcgattatgcactgataagtaatggccaaaatatgaatattactataaatacgattatata

SEQ ID NO: 252783 - DNA, 438 bp, Glycine max
  unsure (1)..(438): unsure at all n locations
acccctcaatntagtggattttcaaggttggagaagtgaaaataagaatggggtaattttggagcaaactctcatctcacacaagtctataacattgatataaacttgctcaaactggttttacgactaanaatccaccgaatcaaaatttgacccctcaacacccaatttaccctagaaatggctcttgctttcaccttagtcactcattggccccatttgctcaacccaagctttcccacaagtcctaaatggcattttaaactaggattaactcactttaacctccaattaccgctaaatccagatttagcttttcaaaccctcaaagcctcacacttgttcattcatatcactaccattctcactgtttaaccctagggtaactctaccctccatctctatcagttntctaccaacgatttcagcacacaagca

SEQ ID NO: 252784 - DNA, 261 bp, Glycine max
cattacgtgacacttaaatctcagcttcatcactgggctgctagttttggaatccctgatgccttgatgggaagcttgggaagatttggggtgaaaaaaatatacccacgctccttcacaatgtttgaacggtccccatcttgaacggccttttaatatataggcttttaatagaaaccattgatatcaaaatgatggctagtactccttccccgttacttgatgtatcaactacatatactataatttatggattaaaga

SEQ ID NO: 252785 - DNA, 370 bp, Glycine max
  unsure (1)..(370): unsure at all n locations
ttgaggttcaaatttctcaacaatcatatcanaattctacttcggccataattgcattaatttgagatgtagctcataatacattccttttaagcatgtgctaaaggtgactaatttcctttttacaatccttgcttcttagttccaattttctggatgcatatcttgtatcttcattgatacatttgcaatttttgctgatctctgtgatgtgtttatagatatttttcaagttgctatcccatttatcctttngttgtagtattggtattggaactgagggctatcattgataaggggtgtccaatgcatgattctccaccattgtcatagtgttcatgaacacatcagaagaacataaattctaagc

SEQ ID NO: 252786 - DNA, 468 bp, Glycine max
catgcgtgaaaaataataggctttgtatacaccaagatgttatatttatttgaataagtatctaaccaatattaacatacatctcgatatacaataaacaaattatgactattggaatgtgtgaaatagaatacgaatactcgagcgcgacaatatcagtgtttccgttactttagtatatgattgttaaaacatacttccaaaaatgactttctaatcgatatatgtctatgcggaaagaatttatatatgttttaacatatgaaaaggtagaattgacaataagataataaagagtacgtaggggtttacaatgagggtgataagggaaatactatgtgcacccagcaatattgctgatgcacccagcaaattattgaaactaccattgtgccgtttaagattaaattattaaaaacgcgaattatcctccggaagacactgtgtgttcgaatagcttcatcttct

SEQ ID NO: 252787 - DNA, 386 bp, Glycine max
  unsure (1)..(386): unsure at all n locations
gcttatcaaggaagctatctagtctataattagaagcatgcataacacttgttggaactntgatgaatgaaagtcttatgagatacacttcaaagttccacttctctccctcttttattccttcaatattgagctccctccttctctctttcttgtcctccattaaagcatcctcttcaagcttcttatccatgganaattttggtggtgaagctccttcttccttggcttattccctagtggatggtgcctcccctctcctcttctccttttccttctgtcgcaacgtgccctcttgggcgagcgagggcgaggctcacgggtgcgctttccaaaggaggaaagatgcgcggattcgccaccaacgtttatttgtggaaacgtca

SEQ ID NO: 252788 - DNA, 409 bp, Glycine max
tatatggggatatgtatctgttatgtgtgtatctctcacagatataattgatgacaaagatctgagtgatgatggtgttggtagatctgatgacaatcacagtgaagacgacagtgatgttggttgcatgcatggagctgaatacgaacatgaaactaatatatgtgatttgacaaggagcacacaaatgttctgcattgcggcagtgaagaacatgctcttgatttctatactagatatgccagatgtcatgggtctgatgtgagaaaatatgacatacttcgagatttgaatgggaatgttataaaacattggttttcttgtcatataaaaggtttgagaaaaaagaaacacttcacgagggtcgattgaataagagaccatatatcattcatacttattgtgaagc

SEQ ID NO: 252789 - DNA, 423 bp, Glycine max
tttaataagggccttcaatggtgatttctagccacggagttgtagcataagatataggagaatatgtgaaaggatgcaccatctactagagaataagccatggaaggaaaagcttcaccccaagagagtgccttatataataagcctacagaggaagcttctatggaggaaaagaacgagggagagagggagagaatggcgtgggaactgaaggagtttacggagagaagctgaactttgaagtgtgtctcataagtttcacattcatcaaatgtatcacaagtgttacacatacttctatttatagcataggtagcttccttgagaagctatggttacacccctccaagagctaagctcacctcccctctcaaaatacatgaaaatacaataaatgtccctactacaaagactacttcaaat

SEQ ID NO: 252790 - DNA, 470 bp, Glycine max
  unsure (1)..(470): unsure at all n locations
gctctttaanatgccattatggtatgtntggattgtgcttgttcacaacagactttacttatgtggtgttaatgtttaggagaattcacaagaataacttatgatatgtgcataagttgttttcagattatttaaataagctttttagaattgcttatgaacacaacgtatatttaaaaacaacttatacataagtgcttattaccctgttttctcttcaatgatagaacaacttatacataatgcttatatgagaagcatttattctacaagtgcttaattaagttggttatccaaatataccctatactactttgactacactgatatgttcttgtatttcttttctgtcttactgtctattataagatgctacgattttcaatctcttatatctggttgctgttgttcttctttctgatattataagaaacttagacatgttttccctcttatgatatatttacata

SEQ ID NO: 252791 - DNA, 229 bp, Glycine max
  unsure (1)..(229): unsure at all n locations
aatggaatcgccatgaaaggcttattgctcctgtctttgatgattggcagctgatattgtgccgcgggaggtaattctgattggattaactcaccatccttcacttgccaatntgatatgacatttggtgtgggatcacctatgatgtctctgttccaagggtaatctatatccttcctgatggcatatgcatgaaaccaatcatagaanaggacattaatcttgactc

SEQ ID NO: 252792 - DNA, 412 bp, Glycine max
ttaagtcaccgcggctgcagctttgactgactgacctgggaagattatatttttcttggcattgaagttctgcaaaaaccagatgggattttcgtgtgtcaaaggaaaatgccactgatatcttgaagaaatttgcaatggttgagagcaaacctgtgaaaagtcccattgttccaagtttcaagattaacaaagatgttgagggtgtagctgtggatgacacttcaagcaaattgttggaagtttaatgtatcttacagctacaaggccagatataatgtttagtgtgagcttaagtagcaggtagtcaaaaccaactcagttgcatttacaagctgctaaaagaatattaaggtacttaaatggaactaccagttatgggattttctataagaagggaggggaataaaac

SEQ ID NO: 252793 - DNA, 458 bp, Glycine max
  unsure (1)..(458): unsure at all n locations
cgtcgtcacagtcaattgcatgtgttccagcatgctctgaatttactgtgcgtcggntaatacatcgacgacgtagcgataccaaagctcaagatacttgtgaatgacgcgaggttcgtattcctccacgcccattgatttcagcatagacttcacaatctttgcgtnccttggcattgacgactcttcctctttgtcacccatgcctctctctactgcaccggttcaaaaacaagaagcagttgaaacccaacggtgcccggagtctccgtgaacggtgtctgacggagttaattcccaaacccgacgctgtctgattcatagtttctgattgtcagaagaatgaaagggcacaaaaactctgactttgccattgtgccttatcataccccacagttcttattgacccaagggaatccaccgggtgttctatgctgttactccctgcatcttctttt

SEQ ID NO: 252794 - DNA, 341 bp, Glycine max
  unsure (1)..(341): unsure at all n locations
tactcagcttgcctcaagtccttgtgacttcacattttcaatgttctcatgtcaataaaactggtaatggctcatgtgtgtccatgatatgacataattgggcaaaactatgggcatattttcacattgtgttntgctcgtgggtttatatgtatcacgtgatcattcccaataaatgctagttcatttacgttgacatgccatcgcaacttgagagtgaggtaaacaacatccttcttggaacttgaagatcatgcgaacttgtcaagacaatgtagaagaatacttgtgatacaaatgcatataccatgagaagatgcgacacaaaatcaactttggag

SEQ ID NO: 252795 - DNA, 404 bp, Glycine max
  unsure (1)..(404): unsure at all n locations
ttctactttggcttgcacacctctacatataaaatactcgaccacattattatgcataaacttatccaaagcagttatgagcatattttgtgtacctttgaaaatcttatttactacctctaacaaataaattgtcatatgagcatatctatgcccaccttgatcatgtgcaaatattcatctttctttggaaattcactgaatccaatgcataatttctgcattaatctcatgaaatctttaagtctccattcatattggcacaaacatattctataacctacagaaatgtgaaaaataaattcatatacgttgtggcatgtgttgaccaactnttacatataaacaaaaagagcagcaataatctaatgtgatcaactcttgtgtctaactttgattattga

SEQ ID NO: 252796 - DNA, 452 bp, Glycine max
  unsure (1)..(452): unsure at all n locations
agcttcagntacggtggctctacgtccatttttgtttatngataactcagntgcaacaatcatgaaaattaaaaacacaattaaagaactcaccttngtacttcaaatgctccttagctcttcttccttcccttactctgtgtgctctcatatgactagtatcttggtggttctcttccgtgattcttgttgcccaattgcaccctatcttcttggtccaatggtcaatntatgtgtgttgagcaattctgtaaaaatgcaatgacgtgtgtctgtttataccagcaaaagacaaactgtaatttctttttagaatcattaaaagtgcacatgtattgggtctntcattntatctattacatttcctatcatatttattactttcccttctctaatattttctctccataaatacatttaagacttggttggagtaacananagaaaataat

SEQ ID NO: 252797 - DNA, 486 bp, Glycine max
cacttaatatatgctcctgggaatgaactgatgcatgtcttcatattctgttcatgtggacccaatgttaccaaccaagtcgtgcctataatcatatatgtcccatcaactggaataatatacactggtacagttagtttgtgcccttgtatcatcactggtaactcattaatgaccccttcatctgtcagatactggccattgcccactaaaactttaaaacctggtgctggttgtactagtaacttcatgaattgtgcaattctatgttgaatgaagttattagaacttcttccatcaactaaaacctgcaccaaaacttttccaattggaccttgaaacctcaatgttccaacactatttgaaccattcagcgcatttaatgacaagtgatgcttatcgtgctcactttccactgatgcttcacccttgtctggtggtactacaccactttctctgtcctcagaattctctgtatcaataaat

SEQ ID NO: 252798 - DNA, 326 bp, Glycine max
  unsure (1)..(326): unsure at all n locations
agcttcaattctgaatttcgagtgtctcgatattctatgggacacaatcggacgtctgagtaagaagttattgtcggttgaatatgcatagagcttttgttttcaattttgagcgtcccgatatattacgagaggtaatcggacctccgagtaaaaagttgttgttggtagaatttgctcaaaacttcttttctgactttcgagcgtctcaatatactacgggacacaatcgcaaatcagagtaaaaagctattggcatttgatcttgctcacagcttttgttctgaatttcgngcgtctagatatactacgggacacaatcggac

SEQ ID NO: 252799 - DNA, 478 bp, Glycine max
  unsure (1)..(478): unsure at all n locations
gtgagcataatcaaacgataataactctttactcgtatgttctattgtgtcccgtagtatatcgagacgctcgatattcagaacagaagctcttataaaaataaatcgacaataactttttacttggttgtccgattgtgtccgtagtatatcgagatacttgaaattcagaatagaggcgttgagcgaaatcaaacgataataactttgtactcggatgtccgattgtgttccgttttatattgagaccctcgaaatttataacagaagttgtgagctaaatcaatcgacaataacattttactcggatgtccgattgtctcctgttgtatatcgagatgttcgatattcagaatagaagctgtgagcaaaatctaatgacaataaccttgtactccgatgtncgattgtgtgtcggcagttatcgagacgctcgatactataacaaatgtctgacataatcaatcgacataacttt

SEQ ID NO: 252800 - DNA, 324 bp, Glycine max
atcaatataaagatatgacaatttagagagcgatccaagactttctaatggatctccactgaatttatttaaagagagagagagagatttttaatctatctcccttaagttgcggagattacccaagaaagtctgaatcgttccttcaagttgattacgtgataaatcaagcttaacaagagaagtcaaatttcccgaagaagttggaatgggtccttcaagttgattatatgacaaatcaagttcaacaagagaagtcaaattttccggggcatcataaatagtcccatgcaagttgctggaacttatgtccaaagacttgag

SEQ ID NO: 252801 - DNA, 458 bp, Glycine max
gacggagtttggagcatcatggaacaatttcactcttatttgtgtcccaattggcgtcctaatattcggctgtcctatttggatgtgacatcatggcagttaagtcccaactctccatcgtggattcattcacaaaacaaacttcaatatgttggactgtctaacacggggattttagattctattcccacctggttctgggaaacaccttctcagattgtgtatgtaaacctctcttataatcatatccatggtgagattgagactacattaaagaatccaatatctatccaaactattgatctaagctcaaatcacttgtgtggtaaattaccctatctttcaagtgatgtgtttcagttagatctttcaagcaattcattctctgaatccatgaatgactttttatgtaagcatcaagacgggccagtgcaattagaatttctgaatcttgcatc

SEQ ID NO: 252802 - DNA, 158 bp, Glycine max
gcatcaactgggaaatagaatacttccttttttcaacagcgcatgaggtttcttataccccattcatggagaaatgcttaaaccaacaaaacaactcccatctgaagcaagaatggaaggttatttgaggacataaccaaaagtaggtaaatggggtt

SEQ ID NO: 252803 - DNA, 252 bp, Glycine max
gcctcaagggtaaagctacttactttcttacttctttcaaccgccaaaaaaaaaagcatccactaaaaaagcatatagtccatacaataatatgaacctatatcctaatgtacatccatcagagcgggggcccgtgccctacatgaagtgctcaaatcatccctatcattgctccccgacacaggcaagatctgaaggaccaaaccaacacacacgggaggagtatcacatccgagcgaagagaacaaaaca

SEQ ID NO: 252804 - DNA, 379 bp, Glycine max
  unsure (1)..(379): unsure at all n locations
ggatccttaagtcacctgctgcatgcaagcttctacttatgtggcagggcgggctttcttcactntcttgcctcaaccgcgagctttgaccaccactntttctttccgcgatgctcctctttatatctgcctgagtgggtttatagcctaaaccatacttcccacgatttcctttggcatntatcaagctagttatgccgctgttgtctttgcctaaacccattccgggttcgtaaccgtttcccaacataactcgggccatcattactgttgcatcgggcaggcaaggctgcccaaagaaggagtccacggaggaaatgctgaccacctcaaaagactggaaagcggtttctaacgattcttctgcggcttccacata

SEQ ID NO: 252805 - DNA, 434 bp, Glycine max
gtgatgatatggtcttaccgacaaaggatcaagttggtctgaaaagaggccaatctgatcatcttgctttgattaatgcaaaaaataaaaaaaagctggggcaaataaagagggtgaggatgaaggagaagcccatgctgtgactgccattcctatacagccaagtttcccaccaacccaacaatgtcgttacttatccaataaccaaccttctccttacccaccgcccagttatccacgaatgccatccctaaaacaaccacaaagtctgtctaccgcactcccaatgacgaacaccacctttagcacaaaccataaacaccaaccaagaaatgaattgtgcagcgagaaagcctgtataattcaccccaattccagtgtcctatgctgacttgctcccatatctatgtgataattcaatggtagccataacc

SEQ ID NO: 252806 - DNA, 433 bp, Glycine max
tctgcttcatgatagatatatgcgaatgacattgttgatagcatgttgaactcgccatgtctggatgagttaagcttacccattcagctttagggtttctatgatgatgctcgtgatgtttatgtgctgaaattgcttatggaaaactgttagagatgaacggtatagttaacctacggttagaaagtgagaatgtgatgttatgagtggaaaaagagcgaggctcttagagttggaaagttatatctggattctgtggtaaatggaggttaagatgagttaattctaacttgaaaagccatttatgacttatgacaaagtttggattgtgctagagagaaaaacacatgaccaaagtgaacagagagccatttctatggtaaagttgcgggctgaagagtcaaattttgattccgtgacatttatgcataca

SEQ ID NO: 252807 - DNA, 355 bp, Glycine max
  unsure (1)..(355): unsure at all n locations
gaaatgagaaaaaattacactcccaagccnncctgatctgtgacctgaaacccnaanggggaaaagnaaaaaaggaaatttgaaaattataaaaaaagggggaggagaaaaggaaaagaaaggggaggagaaggaaggaaaaaaaaaaaaaagagggagagaaaaagaggggaaaaagaggagggaaaagaaaatggagagagaaaagaaaaggaggaaaagaaaaaaaaggggaaaggaaaaggagagaaaaaaaaagaaaaaaaagaaaagaggaagggaaaaagaaaagaaaggggaaaaaggaagaaaaaagaaaagagaagggaaaaaaagaagaaaaagaaggaaaaaa

SEQ ID NO: 252808 - DNA, 187 bp, Glycine max
tgagggatttgtgtatagtgtcattagtcgtgctcaacaccaacagtggattcccagttgtctatagtgagatctgcaaattataaatacgttattcagcgtgaaaaacacgatacacacgcctccctctctcaaaactccaccaaaccaccctagatactcttgctctaccacccacgaccaccgg

SEQ ID NO: 252809 - DNA, 269 bp, Glycine max
  unsure (1)..(269): unsure at all n locations
aaaaaaaaattaatatatacanaacagagggggggaaaaaaaaaaacccccccccacaaagggaaaaaaaggagaggaggaaggggaaacagganaaggaaaggaagagaaagagaaaaaagggggggaaaggagggagaaaaaaaaagaaagagaaaagaaacgagaaaaagaaggaagaggaaagaaaaaaaagagaagagagaggaagggaaaaagaaagaaaaggaaaggagaagagaagagaaaagagaaggggaaaggaaaag

SEQ ID NO: 252810 - DNA, 131 bp, Glycine max
ttttttaaaccctaaacgactgatttaatacagtaccacaagtttgaggggcatatttaccaatcgcgaaaagctatcctaataacatctcctaacaaatcgcgaaaaacttatcaagataaacaactcat

SEQ ID NO: 252811 - DNA, 466 bp, Glycine max
tcctgcgaaggcaaacatttggaaagtatgttttacctatatatgctaccctcaaaacagacatggcatacaaccccctccatataataccaacatctatgtataattagagcaagcttatgcgcacacttatttacgaacgatcacttgcgcaagacattcttataactaagagaaatgcacccatatacaatcaatgcaccttcgttacctagattattcacatgtacttccaaggtgtatttgttacctacatcacacacatttcctttgctaaattcacatacatgcatactctaagcactttggctatcatacatcgcatacgtgcacatcttggtattctcatacctatacatacacaaacttcatgatgaatcttgactatctacacaataacggtgtacatttcatgctctgttcaagtgtttctactacctaacagccgatgcatattgaagtatat

SEQ ID NO: 252812 - DNA, 140 bp, Glycine max
aatgtggaggatctttataagttcacacccctccctcagctaattgcaccgcttgttattttcacaccacctgtttactaaatacactcccgctttgctttatatattttgctgattctctttccgccacgctacggaac

SEQ ID NO: 252813 - DNA, 187 bp, Glycine max
taaatttggtattagatgcttgggaatgggggggaagagtgttgtatgatggaataattttgggttgggggaacatgccgttggaaggcatccatatggttttcctctctctactttatatgccacgttctagtgcctgcagagacaattcctttttgacaatgatcttatgggaaacaatcgaagt

SEQ ID NO: 252814 - DNA, 284 bp, Glycine max
aaaaagggggggagggaaaaaaaccaccccgcccccaaaggaagagaggaggaaagaggaaaaggggagaagagaagaggaaaaagaaaaggggagagggagaagaaaaaagggcggggaaggagaaaagaaaaaggagaggaggaggagaagaaaagaggggaaaaggagaaaggaaaagggggggagaaaggaaagaggaaggaaggggagggaggaggagaaaagaaaaggaggggaaaaggggaagggaagaagaagaagggaaaggagaaggagaaaag

SEQ ID NO: 252815 - DNA, 419 bp, Glycine max
ggaacttaaaactcagctgctctgattacactgatgttgttttattggacggtgttgtatgccatcttcgctgtataggctgcacattcttgggacaaacttactctccaaatgctatccttctcacgaatggtcacgaggaagcttgtcttacagaggtccatgaaggacaaggcggccgaaagaactatatccgtctcgagtacaacagttaccgatttaggagcgctgcacaccaacatcgcttctaggccatctaaggatggtcgtttctccgggagcgacgcgttcatctcatggacgacgagtatactaatctccacgagaaaattaggcgccggctgtggacatcacttggtactcccatggccaagtacgatccagaaatatgcctagagttttatgccaatgcttgccaa

SEQ ID NO: 252816 - DNA, 353 bp, Glycine max
gcagctgaggtaaatataccagtggacttcttatctaacaatgccacccagggatatacgacacatcttggcgaacaaagttaggttcacgataactcgcctgtgcttattcttctatgctatatgtagcaagaggatcgatatattaatgtttgatgaattggaaaatgaggccgtaattatatttggccaggttggagatgtatttacaccctgctctctttgacattatgattcacttgattgtgcgtctggtcagagaaaacaaatgctgtggtcctgtttatctatggtggatgtacccgggtgagcgatacatgaagatcttaaaatggtatacaaatgaatctata

SEQ ID NO: 252817 - DNA, 385 bp, Glycine max
tattccctagtggatggcgcctcctctatcctcttgttctttgactatcgctgcatctccatgggggaaaatcaccattaaaggacctcattgaagctcaaagatccagcctccatagaagccccacaagcaagcttccctcacatgcttcctatagtaggcatgacttctgcaagagcctaagtgaagaacttagtgactattatggaggaaggtataggtcacatcccagacctcactctcatagcagagaaaaggagagaaagcctcaagaggctaaaattaacctcccatacttccatgggaaagacaatgtagaggcttatttagatagggaaatgaaggttgagcaactctttgcttgtcgtcataagagtgaggaaag

SEQ ID NO: 252818 - DNA, 335 bp, Glycine max
accagcacaatgtggcggacgagtatagcctgagtgtacgcggaaaaggagggctaaggaagggtgatcgacttgtacataaaaggcacaatgtggatggaccgatttgctctttctttgaacgggagtcaagaacttccccgaatgctaaccaaggccaaagcaatggcggacacctactccgctcccgaagagatccacggacttctcagctattgtcagcatatgatagacttaatggcccatataattagaaaccgctaggaaagttgtaatgtcactcaaatcttgactatgcataactttctgaataaaatgagactatcccgcatttt

SEQ ID NO: 252819 - DNA, 357 bp, Glycine max
  unsure (1)..(357): unsure at all n locations
cctaaacttatctacaacatattgttttttttttttaaaaaccatgggtgttataagttacaaaaaatacatgagcacctgtgggtttgcatgctgatgccggtggatattaaacatgtggggggggtaaggggctactacatgcatccctggactaaaagaaccttgtctattttgtaactctgccttttggaggacttttgaggtgtatctataaaccatatgaatgtctagttccacattcctttgtgatgtcctatattgtgaaaaagaggaatgaactaaaaaacctagaggggggctgaatttggttctaaactacatcnaacttatataataagaggaaagaaatacttt

SEQ ID NO: 252820 - DNA, 253 bp, Glycine max
aggcgcttttccccgactaatatttcctatgatgatgagctacatgggccaacagcaaatcatcagtccaataaataactcaatcaccagctacatcaatcgtcattcccaaaaactatacatatgaagcatgcccgatgcagacagcacaatctcagtacctccatgaaccaaaatacctaactctatataagtaaataacataacaccaaagtcaaaaacaaaaggcatataccagaggtgatgagtgaag

SEQ ID NO: 252821 - DNA, 450 bp, Glycine max
  unsure (1)..(450): unsure at all n locations
aactcgcccaggcgagctcgggtgcttcctggataatcttctataatgcccaaatgggccttgttgctattngcacccccctatatactaaatacaccctttgcctttgtttatgattctttttccggaacgttacagaaacttacgaattacgtaacgatacttgttctctcttcgtaatgttatgaaaccttaccgatcacgtaattatccctntattttggcttccaggatgttacagaactttacagattgcgcactaacacttccttttaacttccggcatgtcacggaatatcacagattgtgctacaatgctatcttttgacttctggcatgtcttgaaacttcatgaattgcctaaagatgggtgccaagtacctctaagtggtcaaacgagggtcgcatctcacaacggatggtcccctgatgaaattatggtatgacaga

SEQ ID NO: 252822 - DNA, 370 bp, Glycine max
ttgaattctaataagaacactactcgatcatattctatactcatgcacctcttacatgcaaaaccagacacttagattcctaggcatgagtcatccttttggcacttgaatctagcttctacaaactacccacacactcacaatgcgcacaatgtatttcgcaagctaaattccacataatcatgcgcaaatgccattgaggaatttcaccgaacactatggtgggcgcctgtttaagcatgataatcaatggaatggtggcattgtggcatgccccattatctcagaacgcaccctaggtctatggccatcccctacaacccctcaattcaacaaaaacaagcaataattctaggataaatccctcacg

SEQ ID NO: 252823 - DNA, 305 bp, Glycine max
gtccccaatttaaaagaagatcagcatcactccttgtgcatcctaattgccgggactttgttgaaacatcgacttttggtctggaggctgccccaatatgaattgtgaaatcagacatgccgaaaccaaaatattatgccattcgaagttccggacaacggaatcaatggagctcgttgatattatatggattcgatcattcgtaagcaaaaaggataatatgtatccgcagggtcggacatactgaagaaacagttcgtacgaattctaagtccgaacttacaaaaaaataccaaaaagtaggg

SEQ ID NO: 252824 - DNA, 411 bp, Glycine max
  unsure (1)..(411): unsure at all n locations
aatgcccccanaatgaccattttgcccccattntgagtattttgctcatttacttctgaaacgtcacaaaacgctatgcattgcacagtaattggtgttaaacagctcaactcggttggcaaaaatccaaatattgacaaacaatcatccccggacgaaattagggtatgacagttccctctctttacttatcttttaatggagataaaagggaaggaaagataagacactaatttcgttcgagtactacctatctactccattttgaatggcatttttttgctatatgttcacattatattcacatatatgtacatacacttgagagaaaacttcatgctatacatttacaaacatttacattcatttgaaaagcaattccatgtcatgcattcacgcttatatacattc

SEQ ID NO: 252825 - DNA, 249 bp, Glycine max
  unsure (1)..(249): unsure at all n locations
aatatctatctttcaaaatcttggagggcaattaggcatttgttctggattttattcacgatcctgacatgttagtgtatcgtggttgagctccaaatataagttcaacaaggtttgctggtacattcattagaaaaatagatcagacgcctagagtaatttatgaagcttgaatgatgatgaaaagaaaggtaggcactaaaaggganacaaataagtattaagctcacctgtgagaaaatctatgac

SEQ ID NO: 252826 - DNA, 352 bp, Glycine max
  unsure (1)..(352): unsure at all n locations
gaatgaagctcttgtccacttgttggacaagnggtctcagatatcttaagaagggggggtgagataaaatattacaacttattttcccaattaaaaattctatttaactttctatttaagttataaattcccttaataatgaatttcttacatattgattccaatagaacactttgaatatgaatataaagccattattaataaaggagtttaagggaagagaaaatgcaaactcagatttatactggttcggccacacccttgtgcctatgtccagtccccaagcaatccgcttgagagttcactatcttgtaaattccttttacaagttctaaacacacagggacaaccc

SEQ ID NO: 252827 - DNA, 297 bp, Glycine max
  unsure (1)..(297): unsure at all n locations
ataactaacttagttagctaatcagcttgttaattaggtacgtagctagttagttactagcactctatatattagtgttagatagttagttaaaaactaaacttcatgttggagaaagcactacactataatttcattttgtacaaaacttgttgtgcaagcattgtcttttctctcaaatttatttttcattcttctttatctcttcaatcctatattcactttttatgattggaattatgtttaggattgaaaatggattangttatggattcatttcctaacttcgaaaaataa

SEQ ID NO: 252828 - DNA, 417 bp, Glycine max
  unsure (1)..(417): unsure at all n locations
atccaatctccggtgtgagtccgaagattaagcaacttaacacgaatgcgaggggaagccctatcacacgattagctaaacctctcaaatatctgttaaagtattcgttaatagatccacgctatgaaagtgtgaaaaaagctcactttggatcattcataaaatgacngcgcgaacatggactctatagcttgcagaaagccggaccaagacgtgatgaatccattgtggaacatccactggtaccaactcaaagcggcatcgacgagatagaacgaatctacacgaatcctttcttcttccngtgtgntttggaatcaaatagttgtgtattttgaatatccatcctagtggatccctgctatcgaaccttggatgtcaacttaaccggctgctttgctgactgaacactgactt

SEQ ID NO: 252829 - DNA, 290 bp, Glycine max
ttttttgtgtaaaatcaatattcttttttgaactgctgatttattggcttatggccaatttgtagaataaaatgttgtgatggacaaaattttggattattttataaacattgaaagattatacaattaaaattatcaaaataattaaattgtaatatttaataaaaaggtaagataaataatttgtttataaactatcaagaatttttttaaagataaaaattttttttagatgatacttttttttgttaatcttggtgaaaaaataccataattggttatcccatatt

SEQ ID NO: 252830 - DNA, 334 bp, Glycine max
gtctctctgccttcaatgaagacacggtccggatagaaacgatcttggattgcagttctctcagcaaggaattcatgtgttgaaaagatttggaacttgattcccttgccattgtgagatcaatatttctttatggcctcacagttttccacggacacgggtttctccccacaatcttgtcactctaggatacataatgaatcatgcgtgctgcactcttccagtacgttaaattcgcggccttaccggctccaagaccgcgagtttttgtccgtgtgttgacagaaacatacactatttctgactatagacatgtgtctcacattagtgctga

SEQ ID NO: 252831 - DNA, 428 bp, Glycine max
  unsure (1)..(428): unsure at all n locations
tgcaagcttatggatggaacacttacttgtttggttatgaacaaaagcgcanaacggaatctataaatgcggataaggatgaccctagggctgcaaactcgtcaatcctcggggtatggcttttgaaaggggggaaaagaagtttttgaatgcaaaaacgcccccctttcgtcattcttataatttggtgcagggggggctcgcccagacgagctaacttgcacatttttttttttttgaggggaacattaaccatgtcccctcccttctcatggattagcatcttgcctaacttgaacttacttaggttagaattaggcgttgattacttatattttttactttttaaaacaaacaaaaagtaaaagaaagctgcataatacaaaggatacggggctgccttgtacgacattttttgttgtttccac

SEQ ID NO: 252832 - DNA, 257 bp, Glycine max
cgacacgcttcttatttttagattccgaaccactccacatatatatgtatgtgccatgacagttgctcctgcgaccacgcttttctggtaacttaaaagacattatctattgaattacttttaacgggaaatatggaggcatatgtcattagctcactcatagtataactgagacagaatatgaaacggtaaatatacctgtatatctatgtattatatatgaaataatcgattaatgtacccaataattatatgaa

SEQ ID NO: 252833 - DNA, 372 bp, Glycine max
gaatgctctttatttacacacatactctgttaaagtatccctgataactattgaccaacaaaggtggatggtagcactctgcagttgcaatatgtggaggatactaaaacggttgtacccgtgatgataatgctatatatgtttttaagcggtgcctattaaagaaatgtttttatgtgggagaagagtgttggctcaatgtctatatacatgagtgattataggcttttagcatgtaaaaatgtctttacacagcaaatacattattctttaattgggagagggagagaatctattgatacaaatggttaatactcaaaaagtatatttattttttatcattgacatgtgactgatgattttattatacat

SEQ ID NO: 252834 - DNA, 226 bp, Glycine max
acttcccaaaacagctatctttttgtggaatccatatagaacctttgaacatttgtccaattctgacatatttacgtttctacctttctttggctaaatatctccctgactttatttaacaggcgctgaaagaagacccttttgtaattgctgagaactgcaccaacgctggaatctaaccagatcttccagccatagatgatatcaagtgaactctacattggac

SEQ ID NO: 252835 - DNA, 426 bp, Glycine max
  unsure (1)..(426): unsure at all n locations
ctgataacaaaaggtgacaaatatttctattcttttgagagctnggattcttccacaacaatctgaattctgtcctaaatcacaagataaaaactcactatgaacccctttcttattatagccacatgccttgattctccaattatctcagtcctgaactagctaactaactaactatggtggttacctaatacatgatctcccctcatccattgttactaaccgtgatcaatgtgactaagagtagttcttttggaggagttgtttcataaggcaagtacccaactccggataaacactgcttatcatcattaaacaaactggcagccgaagtggaaattgtataaaaataaaataaaaatgaaagaaaataatacgaagagatgcgccgctttaataaatacaaataacagtacaaaaaattaa

SEQ ID NO: 252836 - DNA, 369 bp, Glycine max
taaccctttgaccctcataagaatagctcttttcttcctctattgcccttatgtgaatacacaccttgttggatcattatttggttcttaaccctttcatgccacttttttacaaactctgacctagaattcccttctttatgtataaaataaaatgtctagtgggaggggaatgaagtctaatggtgttaggggattgaacccatagacaactctaaaaggggattgcttggtggttctatgaacccccatgttgtgggcaaattctacatgatgaagatactcattccaagacttatggtttccttgcagaagaacccttaatagggtggataaagacctattcactacctttgtttccccttcagt

SEQ ID NO: 252837 - DNA, 361 bp, Glycine max
ttttttaagaaacctcacaacattccatgatgttaaaaaataaaaaaaattattactgtaataaacccccaacccttcgatgaattaaaatgtaaattattggggttcctactaaaagtagactgtattggcagctagacatcaataaagcacaaatctatcttattaaaaggaaggtgttcaattaaactgctgacaccgtaactccataatgtcatttattggagaacacaaccctaaacattcatattcttatgacttaaaatgtgcatcacataaatacaactttttaaatcaatttcagccttaactggcttcttacacaccatggattgatcaccataatatataatgttattac

SEQ ID NO: 252838 - DNA, 462 bp, Glycine max
  unsure (1)..(462): unsure at all n locations
gctttcaaatgggtaaaaggctcacattctctttcttctacatcatattcaaacttgtccaaataaataataaagtcatctcgactcanagaaagtcatataagtctcagacaattaatatagaacctatatcctaatgtcacatcctatcagagcgtggtgttcccgtgtcctctagcatgagattcttcatagtcatccacctattcatctgctcccccgaacacaagttcaagatcatcacaggatccaaacacaacaacacacagggagtgagttatcacattcctagctaatagagaaacaagacaattaaatatacatattatataaatgagataccacttgcttaaacatagctcacgtaacttcaccacttcgtcattcaaaattcactttttaattatcaatcacattacacaagaatcacacacttcgatcaagatataataacacatcaat

SEQ ID NO: 252839 - DNA, 401 bp, Glycine max
  unsure (1)..(401): unsure at all n locations
gtattatattctttaagctaatagaatgtattttctaatttaaagaanaagcttaaaaatcactaatttattttctttaatgcattaagattgttcattttcatttctttttccaacttttgtttctataattaaaagatgatagcaattcttctatttgcagaaatgacttatatgtgaaggtgtcaaacatcaaaattcaaggtgtggggcataaatatatatgcctaagatcacattattatgtaatcaattctaatttttataataaagtattatgtttctttattatatttacactatttgataagatagttatttcgataaagtcctttataattgagattatgaaaatgagacacacgtctcttataatcttaatctaaaatggtttttatcat

SEQ ID NO: 252840 - DNA, 309 bp, Glycine max
atccatatacgctgtactttcataacctcctgagaacaacgactgaaaattcagactcttgtccgaaacgtgttaaaatcaatgataaggtgaccaccctaaatttcaatgcaactacttaacaggaagggtacaacaatgttaaaacaaaacttaccggaccactctaggtcttacttaccgcgtttagacattgtgattatgtcactatcaaatcacagcggatggtattataatgtgacaagggcagacaaaaaattgtcttttcaaacgtctttatgacaccccatgcatgccatcttttccgag

SEQ ID NO: 252841 - DNA, 406 bp, Glycine max
cgctgcagcttaatactcaaggagctgttgatggtatcttgatctgtatcagagttcaataaaacctctttgtttgacccgctatcaatgctggaccttgaactataacacacacggttagccatataagttgttgaggatgactctgatgaagaccactcactgatagagctagcaggtgaaatactagaagaaagctttgtggctgacatcaagcttgaaagactagaaattctaggttcagctttatttcttgaagcaactcttgaaggtgttttgacaaccgagcaacacgaggttggcttataacttctttttaagaaccaagaaatgatttacctatatcgtcagataaactgttaccggaagatgtggagataatgatctagtcctgggtgatcctgta

SEQ ID NO: 252842 - DNA, 364 bp, Glycine max
  unsure (1)..(364): unsure at all n locations
tattacttttaaaattaattttaccgtctacctatgtaattcaagtctatattaataattaacaaaataaaagtctaatttcaataataaatttaaagcagctagatnacatcattttaagtttttcccttctagtaaatgccaacaataaattagaagcgtctacatacataattcagctcaagttcaaattgggctacaacaaagatacttcgtgcctaattacaccagctggaaaatgcaaaatgcttagccaatctgtaaacttctagagatggtgaaatcatcccataacaggatatatgtagactgacttgngtgaaaaagctatatnttcagagcttaatatactatacaacatgac

SEQ ID NO: 252843 - DNA, 262 bp, Glycine max
tagctactataatgcttattatgttaatattaataatatttttagtttattcatcagatttcttaatgaaaaatactcataaatgcgtttgaagtgaaagcccatagttctatattacaatatctacaagataaatctatttatcatttgagaataaaatatttgtatatcgattataatgtatgaccacaattttatataatatattagtagattctggggtcaaataatttataaccaaaattaatattgattactaata

SEQ ID NO: 252844 - DNA, 460 bp, Glycine max
  unsure (1)..(460): unsure at all n locations
tatgtggtatataagcattaggcacaggtaacgtactatgccttcaccagtgtaaaggtttcattaaaatggctgtgtttcgtgttggtaatggagaatcaagtttttggtttgggacctctgtgatctgctataaggttccctatgtgcctattcatgattaaatggatattggacattctagtcccttgcctactcttggttaatatctctcaacacaccaattctggaatgcattatgtcaattntattaattaatgggaaggctaaggattagctcaattctttatctcataaggcttcgattattgatcacattttaaaagcttcatcatgatgcaagttgtggtttatatgtacagctagactgatgtgcatttatttttcaaattaaaataaagaattcaagctgtctagaattgtgaatgctagtatatattttgctgcatgaaatacacat

SEQ ID NO: 252845 - DNA, 405 bp, Glycine max
  unsure (1)..(405): unsure at all n locations
aatcgtagctttagaagagacaatgaacatgcagtgaaatatacaaaaaactgaaataaaaaaatgcatacaaatgccaaaagaggtaaaaagaaaatgcagaagaagacagggagggaaaacaaacttgtaatctatccaacatactatgatttgtggcttttgtcttgcaaaggaagaagaatactcaaccacggtcaaataagactgaggaacacaaaaaaaatcaatcttttgtaccgacagaacccaaaaatcaaaaggagaaatgaaatacatcacaaacctgtcctccaaatgccagagactatntgttgtcttcgttggtgctgttggtcacaaagatactcaatgctacagatctgaacccaaaatgcaagaaaatcaagagaaagcaacgtcgga

SEQ ID NO: 252846 - DNA, 464 bp, Glycine max
  unsure (1)..(464): unsure at all n locations
agcttgcttgtggggcttctatggaggctggatctttgtttcttaatgaggtcctttaatggtgattttccaccatggagatgcagcggaagacaaaggagaagaggtgagaggaggcgccatctactatggaataagccatggaagaaggagattcaccaccaagatgagccttggataagaagcttggagaggatgctttaatggaagaaaagaaagagggaaagaaagagagaggggggaacacaaaattgaagggaaaaaaagggagagaagttgaactttgagttgtgtctcacaagactctcattcatcaaagttacaacaagtgttacacatgtttctatttatagactaggtagcttccttgagaagctttcttgagaaaacttccttgagaagcttctttgagaaaacttccttgagaagctagagcttagctacgcacacncctctaataacta

SEQ ID NO: 252847 - DNA, 454 bp, Glycine max
  unsure (1)..(454): unsure at all n locations
ccctattctcctataaatagggggaggagtgaagaagaatgatgttcttctctcctggtatctgagattcacttaaaactcgtgagaaaaatcggttctgtgaagaaaatccaagccgatgcgcttccgtaacgtttccgtgggtgatttcacgaagatttcaaccgttcttcgacggtcttcgttcgttcttcatcgttctttcggcttcaacccggaagttcctgaaattgaactnttcaattcattctatgtacccttagtggtcctcatttggtttcacgtgctcttattttcatttcatttactttccgtacccccttttgacgtgctgtagtcatttacttaagtcattntcttgcctaatcaaaaataaaataaanttccactgatcatttgaattgtaatatccgttaatttctattaaaataaaatccgactggtcgatcatgcc

SEQ ID NO: 252848 - DNA, 375 bp, Glycine max
  unsure (1)..(375): unsure at all n locations
ttctcaaagaagcttctccaggaaagtttctcaagaaagcttcttcaggaagctacctagtctataaataaaaacatgtataacacttgttgtaactttgatgaatgagagtcttgtgagacacaactcaaagttcaacttctctccctttttcttccttcaatatagttctcccccctctctctttctctccctctttcttttcctccattgaagcatcctctccaagcttcttatccaaggctcatcttagtggngaagctccttcttccatggcttattccctagnggatggcgccgcctcttacctcttctcctttgtcttccgctgcatctcgagggtggaaaatcaccattaaaggacctcattgaagc

SEQ ID NO: 252849 - DNA, 390 bp, Glycine max
  unsure (1)..(390): unsure at all n locations
attctcaacagtcacatctnntttattgggtcttgaatggctatcaaaaggcctatatatatgtgacttgagacacgaattngccaagagttttgaagaaccaaaaggtcttatcctcttaacaagcaaaatttgtttatcctcttacaaattccttggccaaacacttgtgattcaataaggaattatttgagtgctcaaattgttcaatctatctctttcaagagagaattcttcttctcttcttctttattctgaaaagggattaagagaccgagggtctcttgttgtgaaaggattctaaacacanaggaaggattttccttgtgtgttagaacttgtaaaggaattacaagaagtgaactctcagcgggtgcttgggactgacgt

SEQ ID NO: 252850 - DNA, 439 bp, Glycine max
  unsure (1)..(439): unsure at all n locations
gcagcttatcccacaaaatgcaaacaactggttagtctttattgattataggaggctaaatcacgtaaccaaaaaagaacactttcccttgcctttcattgaacaaatgcttgagcgcttggcagggaagtctcaatactgtttcttgatgggtttttttttgggtatttacaaattcatattgctcctgaggatcaaaaaaagaccatattcacctgtccctttggcacttttgcctataaaaggatgccctttggcctatgcaacgcccctggtaccttcctgcggtgtatgcttagcattttcagtgatttttaaagagctgcatagaggtgttatggataanttactgttatggatcctccttgatgcatgttggacaattggagagttttaatagatgcttgaaactacttggctgattttaaaatgcactcat

SEQ ID NO: 252851 - DNA, 373 bp, Glycine max
aataagtgacatgggcccattgctgttatgttaaaaaatatacctaatagttaatgtatccttgttggggatgttgatgacattgttgatgcaggatctagtatggcagaaattaaccagtttgagcagcagttggcagaaaactctgaaatgaatgatcttggtccagcttaacaaatccttggtatgagaattcttataaacagatcagaagggaatttgaagcctgtctcaggagatatatatacacaagttgcttgacatgttttaccttggagattctacgaccaggaatacctctttgggatctcatgtgaagtttcaaagaagcaatctttgagacagatgaagaaaaatgtacatgtcaagagta

SEQ ID NO: 252852 - DNA, 421 bp, Glycine max
  unsure (1)..(421): unsure at all n locations
gcggactataccttcgaccaaacacgatcgtgtttttgtctcagcccggattaatgcatgctgcaacaccggctccgcttccctcactatactggaggcggttgccgtggctttatcctctatagttttctggagttttaacatgacctccgagatggaagccatttggtcttttaaagccgatagatcggccttcatctgttcctgcacgccctcttcattatnccattttctggatcgagtgttataggggtgccttggtgttttcttagttatgatgaaattcctaaagaaataaacaatggtgagtatgccaccaaaacatgaatatgaaaatgaatgatcggagcactcggatccaccccaaggtttttaaataacatgatgagttcagaacttctcatttataataagaaaaagc

SEQ ID NO: 252853 - DNA, 277 bp, Glycine max
tttttttctaattttctgcactttttttctgtcccccaaccctggtcttggaagatttttatggaacttaaaatggcattattattgtgtactaatttatgattataaattttacataattgttatctttgtagacatgcctctcttcacacgtgttcttctttgtaaggtctaactgaaccgaatatttctgttattaatagaaagaattagtgatataatattagtatgtttaatatagataattagttagcattgaaatattcttaattaaaaa

SEQ ID NO: 252854 - DNA, 397 bp, Glycine max
tatgggcacttttctttcaaagaattatttggtctagcgcctttactgatttgagcttagcaagtttgacttatctataaacaacattccatttctattcttggcttaaggttttccaaaccaatatcaacatgttcatgttcaaacaaatcaaacagtacaatacaaaccaaacaatgtagcataatcaaatttcaaagcaatatcaacatcaaacaattacagcataattggaaacttatttcattattctttcgtattctacttcaacctacaaccctcaaaactaaccctaaatcctaataacaaacatttttcataagataaaacctatttggcatctttttttaaattaaaataagggaatacggatcaagttgatccgtatgaagcacta

SEQ ID NO: 252855 - DNA, 448 bp, Glycine max
  unsure (1)..(448): unsure at all n locations
tctgaaaactcacatnctgggagtttcaaccttgttttgatggnaatatatatttttgagtacatgtgacgaatgcctcttacacaataattaaattaatactaagatttctcttcaagatcaaatctagtaattcatgtggcctatacttaacaaaacaaatgctccacaaaattttatcaagtcaaagcatttttttagacaacttcccaatatagtgatataaatatacagattctagttttctttttttgggatagaatttgtagaattaataggcgcgcaaataattaaaagcatgtcatttaaatgctgctcattttttaaattcttaaaactatagttgttaataaaaaaacaaaataaattgaaattattttatcatcattttaataatttgcttttaaattgataattataagtccatattctattttgtaaatacatc

SEQ ID NO: 252856 - DNA, 444 bp, Glycine max
  unsure (1)..(444): unsure at all n locations
nacttcatccttagatccctcttgttggactatactcagcttaaatagcttatgaaagtttagactaatttagcctaagctttgtcctcggatccctctttgtggactaaacttagaccaaacaacattattgtaacaacatttttaaaaccaaaacttaatccgcagatccctcatttaagactaagtttcaatcctgcttcattcaagttctaaggcaacaatacattttccaatgctaaagtcacctaaccatgcacataaatggttgatcaaaccaagagcatacaaaatttaagcattgaacacaagaaacacaatcaattagatattaagggaattacattagtttgtctttagaaatccccaacaatggtggttagccagctattacagaaaaaccctacaataatgagataagagtagagataactgctcctacac

SEQ ID NO: 252857 - DNA, 337 bp, Glycine max
  unsure (1)..(337): unsure at all n locations
cacaaaagcctgatcgattatagaaacatccttatatgcatcaactggtctgttacaaagacccaacacttctacctactggtggcaattttacttacttgcanttttactatttttatcctagacctaggttaatttttgtttaaaccatcaattatcaatgtttctttcaacaatgccttatttatgaatttaacccaatcttagactagtttccctgagttcgatactcagattcatccgttttaaattttaaatacttgacgatccggtgcgctttctggaaaaccagaattcccttgaatatatttgtacgaagaanaagtggaacaaaaag

SEQ ID NO: 252858 - DNA, 240 bp, Glycine max
ctatgctgtatacatatacaatagaccttctgtcctcaacattttaatcaaccacaacagaacaattgtgacctctgcagcgacagatacaaccctggatggaggaatcaccctaatcacagatggtctagcccttaacaacaacagcagcagcctactgctttcttccaaatgctgctggcccaaacaaaccatacattcctccaccaatccaacaacagcgatggccccagaaacaac

SEQ ID NO: 252859 - DNA, 239 bp, Glycine max
aacccttaaaatctaaagctacaattaaagttctctaccctagaggtaacacctgaaaaagagaaaaaggatcaaggaacttacttggatggggtatgattgatgcttcaaagttaaaaatgcacaaagaaagtacaaatgccaaatgtgcaaattttggagagtgagaatatagatgcgagggttttgtaatcctggcaatgtgagtgtaactgttgttcactcacttacgcaatttt

SEQ ID NO: 252860 - DNA, 259 bp, Glycine max
  unsure (1)..(259): unsure at all n locations
atatctggggttcgttcaatgtaattactntttatacaccataaatatctcttatgaagaatattctgctccggttagatatgaccacgtggatgaataaggagctataattcaacattccgtatcttatattatccataagtaattaaattatggtaataaagaataaattgatccgtagtgataaattttaaaaaatcaataagataacttatttacctaattttaatcatctggttaatccttttgcaatccttat

SEQ ID NO: 252861 - DNA, 380 bp, Glycine max
tttactttgaatttcctaatttcaaaaaaaagaccaactgttcaattcaaactatttgatagccatcacattgctaaagcagaagaactcacagggtgagccttgctttccctatagggcactgaactatgcgcctaattgtagggataacatgacacgctctcaacaagtgtgggcctgcggccctatgtatagctgaaatcacgggtcacacccatttaaaaaagaaatgtcatttgcacactctttcttacatattttctttaaagtaaaatttgatggaatacctgtgaatctccttcttatttaatgaaccctactcaaaagtgttggatttcaataaattttaaccaagataatccatcaatttcatccttaaa

SEQ ID NO: 252862 - DNA, 471 bp, Glycine max
  unsure (1)..(471): unsure at all n locations
tgcaagctttcttgcacccaccccttctgcatgaggtcttgctctngcttcttaatctccttagtctcttggggattatttttgtaagttggtctattaggcaatgatgctcctggaaggaggtcaatttgatgttctatgcctcttgaaggtggcattccatgaggaatctccttgggaaagacatctttaaattcttgcaataagagttcaacactaggagaaacagaaatagttaactcattaaaattaacagtagaaattttactgtctttgcaatacaatagatagagtggttcattagcaagtaacactttcctcacttcacccgcctttgcaaaacaattaaatnttctctcgtgtgtatcactttttctctcatgtgtatcactctttctctcaggtgcatcactcttctttttcctattcctctgtggngcctcactcttttctttctcttgtgctctcttt

SEQ ID NO: 252863 - DNA, 387 bp, Glycine max
  unsure (1)..(387): unsure at all n locations
acacaagtcttgcacttgccacattggtacaactccctccatcaatgatcaccatgcaaactttgccattgatcaaacatctaatgtggaaaatgttttctctttgactttcctccatagacttcaattattggccaagtaaccgcctaatcatcaacaattctccctccagtgttttctccacttcctcctcatcatcctcactctcttctcccttttcaacttcggactcactaatgtactctccatctctaagaatcatggctttcttgttagggaactcatatgcataatgttccaagccttggcaccgaaaacacttcacatcctggctcttttntaagattgtcatggaatttggaggagtttgatggataggtgctgatt

SEQ ID NO: 252864 - DNA, 380 bp, Glycine max
  unsure (1)..(380): unsure at all n locations
gcttcttatgtatacccatgtgctcttgactgattagtagcatgccaccttttgactagacagatcaccaagtttaatcttatacaaatttcattgtctcttagtagagtccttgttctggatgatacacatatcctaggtaaaagtgacattgtatccattgtcacataattgacttatgctcagcagattatgcttcaatcctttaacaagtaaaacattatctataggagggtatggaggaatgcatgctttacctactctaattattagacctttatgattccctccgaaagtgatcaccccgggcttaggaattggaacatagactnttcatctatcatgtgttgtgagtagccattggccaggtaccatgattg

SEQ ID NO: 252865 - DNA, 417 bp, Glycine max
  unsure (1)..(417): unsure at all n locations
aatactaatattattattatttttactttaaagaatagctagtcattgaaattttctcccccccccttttttcttaaaatttatattattatctatatagcgtttcctacacacacacacacacatatatatgtataggtatataattgtacatttatttctggcaaatcaagaagctaatttgtgcacaaaatcactctagaatagccttaacatgagtccanaacaacatttaagcacaaatttaaatcctcttacttgcttanaattaataagaaatggtggtgacttaaactccacaagttacttgcccatcaacaactcaaatgacttttctcaattcanacaacaaccctatgtaaattaccaatttgagttgatatcatcctaagctaagtgactatacatgttcacact

SEQ ID NO: 252866 - DNA, 467 bp, Glycine max
tcgtcggacttaattacgctgctcactggtattagtggggtataacttaatgtgatgatggggataagtacctggacccaagagattgcttgcctttgtctatctaatttgagttttagtgcctcttctgttatgcttctttcattatctggagaaaaatcatctggattggatttatatagcaagtcaacaatcattcgcgcaatattcaggctagcatgaagagttaggaactcctctactacaggctgcgggttttggtccttatcagaattactaagctctgcatatacactgccagaaacatcacaaagtatcaacattacttcattggtatgagtataaaccacttagtttttgcatatcctctagaggtgccaaaatatacctataccagtactatatattgagaaacactaatgatgggaagtactaatctgacattgagtagttcatagtaaagttgt

SEQ ID NO: 252867 - DNA, 447 bp, Glycine max
tatgtcttcgtgcagatgatgctcgtttttcgagctaactctgcttttatttttgtttgtgcacgaatatgttgcacaattctaactctcctctgggcttgcactggttttattgtaattcctagcattaccaacaagctaggcatattcaactatgacttactaaacataggtgaattaataacaagcctaaatttaaagggactaggctatcttctattatcgcttctttaacgtcttgagctgaacgcgggaagatgatctgttgaacatgggcctaacacctgctcgtacctgcgcctaagtctttgaatacaggaaatggcactacccaatagaatacgaccatgctaccaattatccttttttacctttgccgtgaaatcggcatggtagtagccaaatctttgtttatacctcgactcacaggatgacaaaatgcatatg

SEQ ID NO: 252868 - DNA, 417 bp, Glycine max
  unsure (1)..(417): unsure at all n locations
ggcctatatggccaaagtccaacangaagaanaaacacaaagacaaaggcagcctagacacaagcatcatcgccttgctccgcagcaccctgcccttcattagcaacctcctcctctgcatcaatctcctcctcatcaagtaggacaccatttttcacatccttgaagggatcgaagaaacccaagtcaaggtcctttgcaaagaaaacagcctgcctaacaacattctgaaagtctttctcatgttgctccgcggcctcctccttgtacagaattagctcttcctcgagctccttgttggcttccctctctttggcatcccgcatcttggacttcccgaatctggactccgactccctaagacaaacctctaactcagcaactctcttggcagctcatccttctcagccgcatact

SEQ ID NO: 252869 - DNA, 469 bp, Glycine max
  unsure (1)..(469): unsure at all n locations
acgatgttcaagaagcacgtgttcccaggattcttgtttaccaatggcaaagcaatagctaacaacgtagtggcagtagaaggaaaggccacaaatgaccaaacacagcaccaagaatcccaagaaattggttcgttttcacctgagcagtacaaggccctgttagctgtaatacaacaaccatgtgatggaaactcagcatcaactaagtcacaggttgcttccatttcatcttgttcaaatcacgatacaacaggtaccattctttcttacgaaaaagcaaattccacctcctggatattagattcaggagctactgatcatgtgtctttntccttaacaaactttcactcatatcaccagattaaccccatcacagttagaataccaaatggccaatttgtctatgcaactcactcgggcacagtccaactttctgcactcatcatattaaaagatgttctataca

SEQ ID NO: 252870 - DNA, 335 bp, Glycine max
acatattttgtctatcgtcatctattcgacacactacccggggcgttgccagatattgttttttacataaattaaactggcatcctttttacattctggtgtaacaccatactctctataatgtgagaagaggaagaggaaattgccgccagaggaagtgaatgtgagacgggcttaaatcatctcacaactagttccgcaccatcttagaatgagtatgtgagaagtctaactaacccccaaatctagctaagagcgatgagggccccactcatatagttccgaagccatttagatagttaatggagaagcaactcacccctaaactagttaag

SEQ ID NO: 252871 - DNA, 239 bp, Glycine max
actcgtacaccatactttcttataacctccgtgatgccaaaatttaacctattactctatttaatatatgcatgcagcttgatgccattcctcctccaacgttctttctgccaccctgctctctatcaatcaacacaacagcgtcactgatcattaatcccactgcacgcaatggcgccgcatttccaaaactgatgtgccactggtaaccaaatcctcgatgattcagcaactttggc

SEQ ID NO: 252872 - DNA, 289 bp, Glycine max
tgcacttataacacttcgagctttttcttgaagacaccctgtcgtgttaatacttgggctgacacagccctctatcataagaagggggcccttcttttgctgacacgagcgttaagctaagctactttagctacaatgaagagcgttattcctatacaactgaattaaaatgctgacagacattaacttcttttatgctttggcacaagtttactaaccgggcgtacttatctgagatcagtacgtcatgtttctaaggaccaggctaaccttgtttttagatgaagtg

SEQ ID NO: 252873 - DNA, 329 bp, Glycine max
tctcttccaaaatttcatttgaaaaacattatttacatcacactgttgatgtggccagccataattgacagctacggtgagaagccatctcactgttattgggctttatcacaggtgagaatgcttctgtatattctgtttccatactgctgatggaattccttggccactaatctggccttgtatttactgactgtaccatcaagattctctttaattctgaaaacgcacttacaaccaatgtgaactctgttatgaggcagataaacaagagtccaagactgttgttgatgagggcatcatactcacctttatggcagctaccatat

SEQ ID NO: 252874 - DNA, 423 bp, Glycine max
agcttttcgattcattctatgtacccgtggtgttccacattgtgtttcgcgtatttttattctcgtttcatttactctttatacccccttttgacgtgcttaagccattttatttaagtcatttctcgcttaacctaaaaataaaataaatttccaccgatcgtttgaattgtattatccgataacttcggttaaaatgaattctgaccgttcggtcgtgccgtaaccacgttggaaatcaaaaagaggttaagtaataatataataataaaaaaaacgtcttttagtaaaataaagcgaaaaatcaatcggacattctctctttgggatttctcattcttaattgaattgactaataactaaagtgaaactaaggctaaaatcaactcgcctagtcaagctcgtccataaaaataggttttt

SEQ ID NO: 252875 - DNA, 437 bp, Glycine max
  unsure (1)..(437): unsure at all n locations
gcaagcttgtttatgagttgatattagctgtggtttcacttgactattnttcaactcattaaaaaagaactatcgaagtaaatggccgggtgaaacttattttttgatgattaaccgaggttacagcacaaacgatcggttgaattttattttaaaggtgattaaatgagattacaacacaaacgatcgattgaaattcattcatacatggattaagtgagattaaggcttagatgatcagtcaaaactcgattaaaacaaagaaagagattaccgattgttgaagaatgaagataaagacatgctaagcaagaatggacccctaagggtgcatataatgaattcaaagctttaaaatagaaagctaaccggtctaagaacgaagaacgatgaataaaggacgaataatggcgaagaatgatcacggaattgatcac

SEQ ID NO: 252876 - DNA, 361 bp, Glycine max
  unsure (1)..(361): unsure at all n locations
cttttacgctttattctcttccacagtaagtgcaatttcccttggttatttgtctctccattgatgtgattnggtgctttagttgctcatcttttgcaaaattcgtgaagcaattcgcatttgaatccatgcttggtattgtgagttgaaggtttgtgtgacgaggcattaagcctatgttgtattctgaagcaatggggcatgccacattgtccccattctcttgcaanttgtgtgcaaacgtgcgctccccatgtgctcggtgaaatgccccaatgatatatgaatatgattttcaaaattgggatggtgggaactatttatatatgtagagacagcataggagattcataataggtgc

SEQ ID NO: 252877 - DNA, 445 bp, Glycine max
gcaatcttatcatggcagagtaacccattgttaattaatattatttgccacgcacagactggtccaatagggtcaattaacttacgccatatatgtattgatgattacataaagtaactcaaaattcatatcatttgaaaaagaagttggaatctacagctatagcaaaaaaaaaaaatggatgaagtaatctccacaagaatctgccagtcaattaggttcattaatcgatctctactactcttgttaagcgtcttgaacatttagaattatttttattctcaacgctcttttggagaagttctgtctcatatagaatagtgcgtaattcagcttactgaaataaaagaaatatgagatagaggatacaacttatatttgttatacaacatcggatactaacatattcgaaactaatatgctacgtaggcacatttcatgatga

SEQ ID NO: 252878 - DNA, 173 bp, Glycine max
aacccaggggggaacttttcccctagtttaccaataaatcatgactctcaattacgaatgatcgatttaagaaaggtacactaaacatcttgcgtagagctaatataaaataagatctggaggccaacattggagcgataacatcaagcttttattacccaaaatggaagtag

SEQ ID NO: 252879 - DNA, 266 bp, Glycine max
acgttgcatctgtgcattcatcgcatccactaacagacgttgagcgccgtccaactgatggtactcgtcaccaccaccacctgcttcagccataattcaacaggaaaaaaaaaatgtgcaataaaaattattaagggttcaggacctcacaacactctactcacgtctcttagatggtagaacactcgtgtttaatgctctcaataggcttttgtgtaatggattccctcttgcctttaccactccgggttcctcttaagttcctg

SEQ ID NO: 252880 - DNA, 277 bp, Glycine max
  unsure (1)..(277): unsure at all n locations
acttaatgccattaaccctaggaattaaaaaaacttaatggctgagtgtaactganatngtggcaaccaaaagtcaaccccaacagccaacaagtcagccaccatttggtcttccaaaaggctgatgcctatgttgccaattgggcccttattacaacttgaactaaacctaactaaagcccttctatttgattaacccaaaatatatttttggtcagccaactttacaaggattgggccattatttatacaaacttaacactctaaaattgaaaca

SEQ ID NO: 252881 - DNA, 192 bp, Glycine max
ccccttccattctgggggtttttttttaaaagaaaaatgttgtcttattgacggggatatttcttacaaaacttttgcaaccatggggacggaaaaggtggtaatgtttcaattacaaaatcacgtatattggattaatcccggataataggtttgcgaaaaaactgtggaggacattcataaacatctgaa

SEQ ID NO: 252882 - DNA, 371 bp, Glycine max
  unsure (1)..(371): unsure at all n locations
ccacgaacataaaatcgcggacgagtatgctcaagtatacgccggaaaagaggctagaggaagggtgatcgactctttacaccaagaggcaaccatgtggatggatcggttngctcttaccttgaacgggagtcaagaacttccccgcttgttagccaaggccaaggcgatggcagacacctactccgcccccgaagagaatcatgggcttctcggctattgtcagcatatgatagacttaatggcccacataattaaaaatcgttaggatacttgtatggtctctcagaccttgactagatacgactttctttatggaataaaatgaagtggtcccatgtttctactccaaaaagcttgtgcgaatcaaa

SEQ ID NO: 252883 - DNA, 387 bp, Glycine max
tagtctggtcgataagtattggtatttaactgtcaattaagaatgtttctacgtaagcatatatccaagtggtctggaccattcatcatcaaagaaattatgccacatggagcaatgatattggaagacccaaccaccaaaaggacattggccgtgaatggttcaagaggattatcacttgtgtccaactgcaagaggcttgaaccataaaaaagacgtccagctataaagacgttaaaaagcactcctgtgaggcaacctagtatttctaaaccctacttcttaaaaatattctttctgtctaagttcatactcatgttatttaaatattcgttgtttgaactatttctacattaagaatatcatttttaggaatatcattcttat

SEQ ID NO: 252884 - DNA, 452 bp, Glycine max
  unsure (1)..(452): unsure at all n locations
cttatccttaacttcaacatggataatttgttgttattgttgaaaaacgcattngagagaaattatgatatctaatgatcatggctgatatctatctcattatacaattgagtttgaaacctttcataagagttaaagattttactaaaaggcaattgcttatttccaacactagcttattgctccaaattgagcctttcaaaagcataacatccaccaaactaaaccatatatcatcatgactaacatttgaattttgacaagtcaaatatctaaggaattaaattaagaaaatcgaacagtcatgaagattgcacttcgcaagttactacatacaattcccataaacaatttagtgaatggaagcaagtgtaattgaccaacaaattcacatgcaagacagtaatatcctaacttgtgttcaacctcatcaggacactaaatctactgac

SEQ ID NO: 252885 - DNA, 65 bp, Glycine max
caattaaaaacccaaccaaagacaaaacggccacttttctcgccacgcaaagggggagatagaaa

SEQ ID NO: 252886 - DNA, 253 bp, Glycine max
atatccttttatttgatcatccaaaaaacaaaacatctggataatctaaagacactttagtttagaggaaattccttccctggcaagagcaatgcttcagtgaacagctgataattctctattataaatacacctttgtcatatttggagcacaaactttatttctttatgattcaccttttgcataaaaactaaaatttccttaaaatatagccacatagcaccatatttagtcttgtaaacagatatggaa

SEQ ID NO: 252887 - DNA, 399 bp, Glycine max
  unsure (1)..(399): unsure at all n locations
gctgggnatgaatgacattcattctccagtttgaggggggatattaaccttctctcccattntctgttgtaacccgtttcagttaaaatgtaactggttgttcagttagttatgaactaactcttgtatataacatgtatccattattgaattgataattagagagagagaagcattcatttcatgttctttttcaagcacctttcctgctgcccattgctacattttttgttgtcaaagttaaaaaaatgtagaatatattttctgaaaaattaatttgtgtaaaatttaaagagccttagtttgtatgatttacacacaattgaattctaatgaggatattatgcctaagtctaactaatatgatatggacatcaggttttatggttgagaaatcaa

SEQ ID NO: 252888 - DNA, 393 bp, Glycine max
  unsure (1)..(393): unsure at all n locations
tacatacagacatgtgtgggcccattcatacatcttcatggaatggtcaacaatattttatatcattcatagacgattactctagatatgcatactcgtttcttatacatgagaattcacaatctcttgatgtgttcaaaaaaattaaagttgaagttgaaaatcaactcaacaaaagaataaattgtgtcatatctgaccatggtggtaaatactatcgcagatatgacggttcaagtgaaaaatgtttggggcctcttgccaagtgcctagaggaaacataactcttatgacgaaacataactcttaatgatatagtaagaaacatgagttgtcattctaacttaccaaantcacttttgngagaggaacttaagaatacaacttacatta

SEQ ID NO: 252889 - DNA, 458 bp, Glycine max
catgcaagcttcatgtctcgttgaacttccttatctttttatcctgcaaaggatacatgtcagacacctttatatacatcaaatcaaattgtcctaaatcaaaaacctgaggatgtcttactttcttccaataagtctcttgacatcaaagatgaccctttctgggttgacagctgccagattcttggcagcctccccaatgagtctctcactgtcggtgaaagcaacccaagaaggggtgatacggttaccttggtcattggctatgatttcaacatggccgttcttgtaaacaccaacacatgaataggtcgttccaagatcaatcccaatgaccgtccccaacttggtggctttcttcttagcaatggaaatcccaaatatacatcctgcgatgaactctctcaaggataattacaattgaaacctcaactacataaagttatgacaaactgact

SEQ ID NO: 252890 - DNA, 213 bp, Glycine max
gtaccatttggtttctacccgcgtgagcaacgttttcagtctgtgaaagccgcctgcattgtgagtgtgtccggagccgtagccctgaacagctacgagacaattgcgttggtgcctactaaattttagcctaccataacatgttggagcataacgtttggttttttttaaatggttcttaaagaagtgtaattaggaccttatgaacaccca

SEQ ID NO: 252891 - DNA, 429 bp, Glycine max
aattgtttattataaggcattcatatgctttcaccctacaacataagctttcgagacagttgttggttcatgacaatgtcaaactaataatcttaaacagtgatcaaagactcttcattaatgaattatggactttcccccctcaacaaatacacgtaatattaatttgtacctatgcttatcctttttatgagtgtttgggtgagcgttgacaaatcttattttggatgaaattcatttgggtaacttaaattgatttacgtttggatgttttattctaaaagcaagttaatatcaagactcattataaattttttgatctaactcataagctacccggaattgcttcaacctagaatcaattctggacccaaaatcaattcttcaatgtgaaaccaaacatgtgaatatttatctcaatcacattat

SEQ ID NO: 252892 - DNA, 277 bp, Glycine max
atttatgggcacttactaagaccctctatgctctggaaaaaccttctgctgattattccttaatggcattatagaaggatacaagctgtaacccatgtggcctacatgcgtacaacttaaagaatactgacgatattctatatcaaagaaactcatgatatgaaatcagcagaatcttgtgcgctcaacgagcatctatggctggctttgtaagctctggccttcatcactgggcctgtgctatcaaaacctctcagtggatgaccgatcattgctt

SEQ ID NO: 252893 - DNA, 364 bp, Glycine max
  unsure (1)..(364): unsure at all n locations
ttcttacatggctgattctataagggatggagccttctttcacctcttttccattttcttgcgctgcatctccatgggggaaaatcaccattaaaggaccccattgaagctcacagatccagcctccatagaagccccacaagcaagcttccatcacatgagccaaccgtgttgggatcataaacccactttacttaaanaacaaatgattgaacagggtacctaatgcatggttaactaagaaaagatgtttttcaagatctcaatctctaattacatttgccatgcatagcttaagtatgcttgagtcattcatctctatgaaatgttgttgaagtattggcgatcagaattgccattcctt

SEQ ID NO: 252894 - DNA, 258 bp, Glycine max
atgcctcccaatacttatcctatttggaaaactatcccaaatagaaaatatgaaatcattttggaatactttatgaatagaaattttaacctattcatatataatctaaaatatagcttctatcctgaatattatccggaatgggaacattttaaatggtattctggataaagagggtaaattaaatttaaccttggggggggaccaaaaaaaggcacgagaaatgccttataacatacgagaggtccggatgggcat

SEQ ID NO: 252895 - DNA, 408 bp, Glycine max
gaatttaaacacataaaaagatttgtggtttgtttgctcactgactaaatcttaattgtattacagacgaatatgaaatctaagcaagcacttagtcttttctatcaaagtgttttgaaagctctttcgaactatacaagaatatatagagagatcttcacaaaacaaatttaaatgttagcgcacaggttcgtaacccatgtctttaaaacttttgttatttataggcattcatcttcaagtatttgttgtctctaaacaaatagatttcttcacttgagcttgcatatgatgtttatggtcgttggggcattgcattaaatgcacgtacttctttatgccagaaaaccactcttattcactttcatgtagaataattcagcagacaccatttcctttgcgtcaaag

SEQ ID NO: 252896 - DNA, 93 bp, Glycine max
ttcagtgctcagatgccagactgctaaagcaaagacagacaagacatcgtcattacacccgttaaccttccacccttagctaaggagatttcg

SEQ ID NO: 252897 - DNA, 381 bp, Glycine max
catgcaacatataggtgtatggatccacataagcaatgccaacctttatgtatattcaaaacaagtcaaatgcgtgaacattataaggaccatgtatagcaatgaaatgtagatatactcatatacatacaatatcaactgcaggagtttggggagggactcgctgctctgaagtgccattgtaattgtttcaaaagctagtccaactgccaattaaaatcactaactgatcatgatataatcaacatgcacactgaatccgcagaaatcttatttaaagtgagagttaaacaagtcaagacaacctttgaaggaggcgaagaatgacttggaaacctaagcctccatttttcttcaatataacatttcaatataagcaat

SEQ ID NO: 252898 - DNA, 310 bp, Glycine max
attcatggcgaaactccctccactaaaatatcggtattttgactaaatccaaaagttttctgcctataccttgggacaagtaacctttatgcagggtttgataacatacctatccactctcccaagtgtccccacaacatcacataaaacatacctggaccctaccagaccacacaccatggtgaacccccacattatatccccaaaggtgtacaccatattacatcaccaaggtgaagtcaagagtgaatagggacatacatggacagtcaccatcaggactacttggacttacacattaggtttacct

SEQ ID NO: 252899 - DNA, 407 bp, Glycine max
ctgaaattgcaagaatttttttttttagcccaaatttttttgatgttaaaaatatcaagaaaattaatctccgcttactgtaactatgtttaggtttgtgactaaaaaactattcgccgaaaaaatatttatgttccggtaaagaaaaatgttgcgagtaaaaaattattagggttaattaataagtaattctctggataatttgagaatgtttaaattaaaaaattataattgagacttttttttttttatcaagaatacagttacatatttttaaatttgagagatctaattatacttaaataatatcacgtcagaagtcaacttgttcacactacacttttaattgaaatttcaaagcagtttatgatagtaataaactgtatatgctctttaacctttcaaaa

SEQ ID NO: 252900 - DNA, 306 bp, Glycine max
atgttcactttgattttttgcctgcgggactaaactgattataaccatctttattaaccaaaagggggatgcatatatttttggtaaattttaattgtttaacaattcttaagtataagctcattaattaattctaaacttatttataaaactataattaataatatttacacaagaaaaaaaccctacatttaattaaccaatctaacttttatattatataacacaaattgtgatttaattaacattatacttaaaacactaatttataatataatagttaatttataattttatgtaatacac

SEQ ID NO: 252901 - DNA, 222 bp, Glycine max
agaatgatacacggtttccttccaactcttctaaacaaatatatttatttttggcatcaaatccttcaatttttagaaattatatgggtatataatagtacacataatctataaaaatattttttgctaagaatccttagacttcatgctattttcaacagtaagttcattgaataacacatgaattcccaaaaatccataattttataaattccgctataa

SEQ ID NO: 252902 - DNA, 391 bp, Glycine max
tatgcatggcaattaatattatttacattatttgtgcatggcagaaatatagatttgatttgagaaatctatgaagggctgtgcacaaaatgagatgcaattgccaaacagtgtacaatcaacagaacctattgattggtttaatcctgagggttggaccagtcaacctgatgaatctatcttggaaagtgtttctgttcaatctcagaatcagcaacaaggaggaggatctttgcatgtcttgccaccaccactagatggatttcgaattcaaacagattggtgtaatatgaatttctgaatggctaacattcagtaaactttgagtttgatggtcttaatgcttagtttatgagtaacttttaggcatttatgtgcttgaaagtacttt

SEQ ID NO: 252903 - DNA, 249 bp, Glycine max
tctgtttggatcattaaatgataggacgacctggatatatacagagactggaccatataaacgaataaaagtgtttaacttatcgataatggttcatgaggctggtgctttcattcattcctgactattaccagcaatcccttgtaaattttgggtttggattatggcaggagtttgactgggatgaatccactaaaagatcatggaccccggatggctgtctcattggtatgataatgctatttgtta

SEQ ID NO: 252904 - DNA, 434 bp, Glycine max
  unsure (1)..(434): unsure at all n locations
tacattaatatgatctttgatacataatgaatactaattntgtctaaattaccaacatgaacgaataaaaaacttaaatgcataagagaaacagaacacaccaaaataaaacgatatgaagaggaacacaaggtgtgaagttcaggagctctactagagagaagacagattagataaaaacctaatgcacgggatgaggaagaagaggagcatcacaagggttaggggtgtgaatttgggagagactagagggtaggagagaaatataagggatattccctacaaagggacatgggtagtataggagtntaaaaaacacaagtggtgtcaagagaataaaggagcatgtcaaatcagtggacccatgaattaaatcaagttttgatagtatatataaacagtgaaacactgctntctgttgcattacatgtact

SEQ ID NO: 252905 - DNA, 385 bp, Glycine max
tgatattgattctatatgatgaatgatggtggaagggatcaaattcctgttgtcatttaaggtctaatactatgccaataacatactctcccataagcttaagctgattggtggaagaacttgagtctatatgtttaacgcatgacattattttttactctgtttctggtatttatgacattatgattttgggattctctctcattttctctaatctatctgcctttatcctttttccctctgcctcaactcggttattctatctctgcttgacatgtattttgtttttttctaggacttacctttggcagtaagacaatcagcaacaatttgatatctaaggctaagtctgctgtaccaaagagttcaacactaatgaaaccta

SEQ ID NO: 252906 - DNA, 450 bp, Glycine max
gagcatttaacttatatgttccaactattttttatcttgttagagtagtcttgaaaggtttagaaaaggttggtttatgtatctgaacatttcttctttctttatttttgtacttttccttcttcttttttttttttgcttcctttgtaagctacatggcaccctcctctaggtgtttctcatattctagaggaggtgtgtaagttaaagaaggctctttatattctcaaacaaactccacggacttggtttgagaagttctccattgtcattgcatctcttaactttcattctagagattatgattttgccttgtttagaccactcttcatgggtggattatactctgtttatatgttgatgacatgattatcaagggatgatgtggatcaaatctgactattagctatagcttttgacctattgataagtgcttgatccaataacttg

SEQ ID NO: 252907 - DNA, 330 bp, Glycine max
tatgctaacctctctattatgtctttgcaatttagcaatattgtctacattggctaaggtgtttattggtgcttccaagagagattaaacttttgtcattgattggttgatgctttgcttcgagaatatatagaaatatgcactatgtagtttggcacaccattcgttggtgtcttggagacctcaccacagtattatcttttgtatggtgcgaacaatttctcatgattgctagcacaagtaaaaatcttatcatggtagtgactattatatagttcgtatttacgtcctaacaccctttttctattcttggtgcatagatcctagtct

SEQ ID NO: 252908 - DNA, 432 bp, Glycine max
attaaccacttcaaaaccattctatatgtattaatattgatagaaacttctcaagaagcaatataagcattagaaaattgaagctaatttcatggctgcagcaagtttcattaacagtacgctattctggtttggtttcacaactacaacgcaatgaaaaggacttgcaatcagacatggtgtttgttggtaaatggaataagtggaaacaaaagcttacatagcgccccttcaaaccacgtctgagtgatgctgtattgttacaaggctgtgtataaacgctatatggatcgatgtttccctgctccacagatgcaactctgagagcctgcatgcattgcactgatggatgctgagaggacccaaaattgcaggcaatttttagcatcctatacgtggaatctgaaaccaaaccatgggtccaccaatatt

SEQ ID NO: 252909 - DNA, 385 bp, Glycine max
caaaggtctgtatggtggtcagcagaggagcacaaaccacaaacccttgcgacaggtacaatattctgattcaaggccagctgggttaccaagttaaccaatgcatccagtatgccttcaagcttcttattttcagatgatgcagatggggttgtagctacctcatgcactcctctaatgactatggcatcatttctggcgctaaactgttgagagttggaggccatcttctcaattaaaatttctggcttcagcaggagtcatgtctccaagggctccaccactggcagcatctatcatacttctttccatattactggagccttcataaaaatattggagaaaaaactgttctgaaatctgatggtgagggcaactggcacat

SEQ ID NO: 252910 - DNA, 245 bp, Glycine max
aattattaagggaagggtatctatatagagttaccactacggatacattgatattttgttaacttgttatacatctctattcttaatgcaatttactatattaacctttgcaaacggatttgtgagagaaaataaataaattacgttctttcgtgtgggggagcaaagttagagttagagtatactactagatgtaggtgtaaattaaaataattattaatagagaaatatcattaacattacat

SEQ ID NO: 252911 - DNA, 441 bp, Glycine max
  unsure (1)..(441): unsure at all n locations
agcttctttgcactnttccattntgaatttcttaattagtttgggacattactttgtttgacataggaagttgccatgtttcatttgcttgactcgaagtccaaggaagaaggacaattctcccatcatagacatctcaaattctttttgcataaaggtggaaaattccttacacaaagcttcattaatagcaccaaagattatgtcttcaacataaatttgcacaatcaacaactcattatttgatctcttgataaacaatgttttgtcaacttgacctcttacaaaagatttcctaattaggaaattgctcaatctttcaaaccaagatgtaggttcttgttttaaacaataccgagccattttcagcttgtaaacatgattagatgttngaagtctacaaaacctagaggttggtctacatatatctcttcttcaatg

SEQ ID NO: 252912 - DNA, 307 bp, Glycine max
  unsure (1)..(307): unsure at all n locations
ctttcaatgtccgaacataataatacattggagcaccttcaaattgaagtacccttaataacctgtactttgtaggcatactcttcaccaaagattctgacaattcttattactgaaaacatgaaatgatcgaatgttcgagctttcaacacctcccgtcaaattggtggaaccagatgctattgttaggtgacgaatcatcccacttttggccaagttccacgctcactagcagatgacanaagcttaaatcttgattttctcacggatcatttcacgactacgtatgaaccgacacctttaattt

SEQ ID NO: 252913 - DNA, 337 bp, Glycine max
gaatttcactgttttgcgctcaagattttcacttatgaagacctgggtgatcattctaaaaagcgtcatcatttttcctgaaatgttttcatggactttataccagatattacttcttatatatattgcttggttcggggatactttattatgggttaatagattgtaggtaacaacaggctagtttctatgcactgctagtatatattttcttacactgtccacctataaataatgatggttagtatgaccttttagatagtcatgataaaagtcaacacatttatctcattgaaaatatgtgaccgataaaaagtttaaaattcctttaagtgca

SEQ ID NO: 252914 - DNA, 357 bp, Glycine max
  unsure (1)..(357): unsure at all n locations
tctcttggcggtttatcttcttcttccatggcctattccctagtggatggcacctcctctcacctcttctattttatctctcgctggaactccatggctgaaaatcatcaattgagggccttattgatgctcacaaaaccatctttcatagaagcttctcaagcaagctttcataaaaaatacacaaatttcttgttgctaggtatggatctatggattatcggagttagatactccaatgcaaaatcaaacctttttgtcattcaaacactaaatttatggaaaaacttatctatgtcatctttgtctanattaagaaggaaacccctccatataccggaccaagtgatgataggg

SEQ ID NO: 252915 - DNA, 195 bp, Glycine max
gacactttttttgactctatacctaatccatcataatttatttgagaatatcccttacaatgaatacgctttggaaatacagaaaatattggacctcccattcgaaaataaagaattagttataattgatacgattgctactccatcggaacattattatcttctacaatcatttcttaagctacttatataata

SEQ ID NO: 252916 - DNA, 372 bp, Glycine max
  unsure (1)..(372): unsure at all n locations
ataaatcagaaatctacatctgcacctgttactggtgcaagagtctgtggtctatgttcttctgctgatcaccatacagatccttgtccttctttgcaacaatctggagtcaatgagcaacctgaagcctatgctgcaaacatttataatagaactcctcaccagaaaaaccaacaacagcagaataattatgatctttcaagaaatagatacaatccaggttggaggaatcatccaaatctgagatgggaaaatacttcacaacaacaacagcctgtccctcccttccagaatgttgctggtccaagcaggccatatgttcctccttcaatgcagcagcagcaacaacaacaacaaagacaacangcaact

SEQ ID NO: 252917 - DNA, 436 bp, Glycine max
  unsure (1)..(436): unsure at all n locations
tgagctagtgaagaagaatgtggcatttacctggggtgaaaagccagagcaagcccttgctttgctcaaagaanagcttactaaggcacctgttctagctcttcctgacttttctaaaacctttgagctagaatgtgatgcctctggagtgggagttggagctggtttgttgcaaggtgggcaccctattgcttattttagtgaaaaacttcatggtgcgacccttaactaccccacctatgataaagagctctatgccttaataagagcactccgaacttgggaacattacccttgttccaagggaattggcattcatagtgatcatcaatcacttaagttcattagagggcanagcaagttaaacaaaaggcatgcaaaatgggtagagtacctagagcaatttccatatgttatcaaatacaaaaaggggaaa

SEQ ID NO: 252918 - DNA, 289 bp, Glycine max
cacttagcccaggttcaccgtacttatcgcaaaggagaatctggcctagcatcgatatcaaaatctcgcactattcgcgagatcagtgcgctaatcgcagcaggtgccttcagtcaggctaagctcgagactggcgcttagcccaacttcacctactggcgctaaacgcgagggcggcgctaatcgcatcattccgatttgagggcctatttaaagactggtttgtgcagaattatggtacaacttttacatattttacaacaccttttatgacagcttctacagaatg

SEQ ID NO: 252919 - DNA, 408 bp, Glycine max
cacattgttttctacattacagggctaacaacatactaactaaacaacaaactaacaataatcaacagcagcagtaacacaaaatcaaaacgaaatcctctaaggtcatctatcctagggttcaaaaattaaaaataacaagagaagaacgaagacttacttggattgcagaggatgaagtgaaaaaggcaagaagcaaagagcaagcggtagagcataaatgagaaaatgattgcagaggatgaagtggtgcacttataggatgtatgaaaatgtaactgccctaaggcagtcatgcttttcttttgcagttacgatctgctcgctagcacgagtgactcgctaggcgagcactctgtgacctttaaatattcataatttaaattcatgtgcttagcaagactgact

SEQ ID NO: 252920 - DNA, 365 bp, Glycine max
tagctaacaatctattgatacacgagtgtgctattatacgttgaagtaaacataaagctgccctttgttcaaggtttatgtcccttcttgcttataaaatccaatggaatgccaaatgtttcatctgaatggcttacactaatcgcaacaagtttgggattagttgatcaaactattctcggttggtaaactcattatactctgatactaaataatatttattgcaaacccaaactttgtctatcctgctaacatacctatatagacctggctttagttattttctgtgatgtggtgagcgcagaactttaccttcatcaactgcatggacgcttatcacatacccatagtaacaagcttaccag

SEQ ID NO: 252921 - DNA, 457 bp, Glycine max
  unsure (1)..(457): unsure at all n locations
agctnngggctgttgcataacaaggcacacatattttttttattgacagaacgcagctcctttgattccaaatttactcccaacctccaaatctgcaacaatgaaaccaattctattgtcaccatccccatgatgagtatcctgtatgagcttctcaagcatcctaggcatggtttttacaacagcatcatattgttttccgggctcctttctgtcatcatcgggtcctaaaccatcggggactgagaccaacttcattagtgattcatcatcatcaagcttatattgttgttgctcatccaccatgatggaactcaccactcgcttgtggttgaagtctgtgttcacaaaaatgactctgcatccatgctcaattaacttttgtgagaggctcattatgggattgacacgcccttgacctggaaatggaaaactagcacggttggaacgctcatgt

SEQ ID NO: 252922 - DNA, 276 bp, Glycine max
tttatgacaataccatttccagtcttaaagggtgatatgaatatcaatatgttaaagcgattgcctaatattaaggtagtattgatgagttacgcgttgacctaatattccattattgatgatttgtaatagaaataaccagttggatatatagcccgcagggaatttgaaaaatatgagagactaatttgagcacgtattttataaacaattgttgaatttctttaaatgtaatgtataattactcttaatctatgccatttaattatgataaaa

SEQ ID NO: 252923 - DNA, 381 bp, Glycine max
agtttacaagaaatataacaatcattacaaacaagggccacacaacacttttcatggcacgagtgtcaacatgcactttataaaataatcatattggggtcatgctattttatgacacatacgtatttgcacacataaaaattttgtgtgaaacattttacaacacctatccatgtacatatttttttgacaaaccttttcaatgctacatcctatatatatacacacatttttttggaaggcttcttttgttacctactcacaaatacacatattttgaaaaacactcttacgctacccatccaacactttgtaaggcacttcatgctatatatattcatattatgcaaggcattttcatgctatatgtattcatatttt

SEQ ID NO: 252924 - DNA, 451 bp, Glycine max
  unsure (1)..(451): unsure at all n locations
agcttgaggactntattatatgtttcctcgttatgtttttgcaaaaggtttcatatgatgaggcaacaaaatctgctttttcaaatggaaagttttcttccggcatgaaaatagtttgtagatactacaaagtattttaaaccttggtgtgagttagactaatatagatacactatagtatttgatgatacactgcaagtgaaatggtcatccatttattgttctattaatgcactcacaatgtctttacatgattagctgaagatttttctatatgatttgttcttctagactacgccttgtcactgttatatcctcaaagatatctttgatactctntcaatccacttttaagacttgatgatcacttctttctcttaaaaagtaatgatgaggaggatcaccatgagcactggaatggatctatgagtagaatgtagtcaaacatcct

SEQ ID NO: 252925 - DNA, 378 bp, Glycine max
  unsure (1)..(378): unsure at all n locations
tgacaaaggggaatggaggtaaaagttgacaggttgatgtctacggaaacaagagaaaagtaaagaagcaaacacaggccgtattttgataaagtttgagttattagtaaggccacaaaagagatacgtcaggatatattttanaggaatttccaagccaagaggacaatgccttgatgcaccatagaagtaatgcataaaagaagaccaaagagggattaaatgaatgaccaaagcctcaaggataaatagatagagcataatatcatcatttcaaatattacacggtaatattaaggggntcanaaggaccattcaattcacatgataatctaacacaataaagaaaaaannataaaaactatactatctttaagt

SEQ ID NO: 252926 - DNA, 448 bp, Glycine max
  unsure (1)..(448): unsure at all n locations
tctgcacgcatgcaagcttgtaatcaactacatcatttgtgtaatttattacgagacacaaaaatcatatttcaagtctaatgagtcacaactcttcagaaactaactgtttaatcgactatcacatttatgtaatcgattaccagtaagaaatttttgaaaataaatccaaagagtcacaattgttcaagaagtttttgaatggccatcaaaggcctataaataggtgacttgggatacaaaattccttaaagtttttctgaacaacattgtcttatcctctcaaaaccaaattgtcttatcactctcaaaatattcattggccaaaatacttgcaaattcaataagaaatcttgatcgatcttcaatnttaatatccttctcttaaagagagaaaattcttcttcttcttattcanagagatctgtttaagagactgaggttctct

SEQ ID NO: 252927 - DNA, 283 bp, Glycine max
agctgttgaagaagtttaattttttgatgtgaaacccggttctactccttatgactcatccatcaagcttaagaaaaatttgggtaaaggaatttcttcacataaatattctcaaattatcggttctttggtgcatttgacaaacttctctatgcctgacatttgatatgccgttggtagattaggaagggatactaataatcctgatcattctcattggattgccttataaagaatttttagatacttaaaaggaaccatcaaatattgcattcattattca

SEQ ID NO: 252928 - DNA, 316 bp, Glycine max
ctcggttaccaacttaaccaatgcattcagcttgccttcaacttcttattttcagatgatgcacatgggtttgtagctacctcatgcactcctctaaagactatggcatcattactggcgctaaactgctaagagttggaagccatcttctctattaaatatctggcttcagcatgagtcatgtctccaagggcgtcatcactggatgaaactatcatactcctctccatattaacgaatccttcatacaaaatatgagaaaaagctgttttaaatctgatggtggggcaacaggcacatacctcctaacttctcc

SEQ ID NO: 252929 - DNA, 465 bp, Glycine max
  unsure (1)..(465): unsure at all n locations
atgcaagctctacaaccatnttctctgattcagacctgtgttttgtgccaaattctggaggattcctcaatgccaaatactcatttcgacctcgtcttaccccaccaccattttcccaaactcatatttcctccactcaaccatcccactcatctctgcttccagccccgcccaaaacccatttccgtcatctcactctagcccagttagttgaatggtgcaataaaggactctgctttagcaagagccaccattgcaaggctcattntttcttaattgtggcagatgatgttatcttttccaatttggtcatttctgcttctcttgcttctgacactatggaggatgaaccagattcagaccctaatcttgacctcggnggcttttccactcactctattgctcatatcaatctcaatgcattattggatagctggctcctacaactcttcgtgttntcggcac

SEQ ID NO: 252930 - DNA, 466 bp, Glycine max
  unsure (1)..(466): unsure at all n locations
tctcatcattattcaacttatttcatggtttcctttaagtagtctcactgacagacatgcaatgtgattaaaaagcttaattgtattcgtgagtatgttcgccttgttgtcatggtttgatctatccttttaacggaggctcactggtatgaacgatttatttaccttgtcctttgtttgtactccattcctctatgagctgtcttcttcagaaaaagagtatgttgatacttactcttttatctattnttcattagaactccttcattctcatgtgtatataagtatattcctcatctcaatctttctctgttattgcatgtcatgctcttctttcatatataacgaagcatctgaaaagacaacattccttgcagcttactgatcatgaccttacgttggaagcagcatgggctcaattatttgttgaccacaaaggaaaatattgtgatagccctgagtcttt

SEQ ID NO: 252931 - DNA, 363 bp, Glycine max
gtgcttgtaagaatcaatgacaatgcttacaaagttgagctgcccggtgagtataatgttagttccaccttcaatgtctctgatttatctctttttgatgccgatggagaatccgatttgaggacaaatccttctcaaaagggagagaatgatgaggacatgttcaagagcaagggcaaggatccacttgaaggacttggaggacctatgacaagggctagagcaaggaaagccaaagaagctcttcaacaagtgctgtccatactatttgaataccagcccaagtttcaaggagaaaagtccaaggttgtgagttgtatcatggcccaaatggaggaggactaaatgacaccactttgtctc

SEQ ID NO: 252932 - DNA, 480 bp, Glycine max
  unsure (1)..(480): unsure at all n locations
tactcagctttccctatttgctataatagggggagaagtgaagaggttaatggttcagccctttaggcacttctctctctctcgaatatgctgaggaaaattatttccgtgaagaaaatccaagctgaggcgcttccgtaacgtttccgtaacgtttccgtgagtaattacgcgaagattctcgaccgttcttcaagattcatcgntcgttcttcgttttcttcagtcttcaacgggtaagtacctcaaaccaagcttttcaattcattctatgtacccgtggtggtccacattttgtttcatgtatttttattctcgttttcatttactttttatacccccttttgacgtgcttaagccatttatttaagtcatttctcgcttaatctaanaataaaataaatttccaccgatcgtttgaattggatcattccgtaattttggttaaaatgaattccaaccgctcggtcgtgccgtacc

SEQ ID NO: 252933 - DNA, 455 bp, Glycine max
agcttataggctacatgccagctaactttgcgaatctcgtcttcgccggagaaaggattgaatctggactacgaaaaggcaagttcgaatatgcttccaatgtggcccccaacaacaacagaagagccccagtagtgggcgcgaggaaaaaggaaggagacgcccacgcggtcaccaccgccccgacgtggatgaaagcaccccaaaatatccaaatctcataccagcccaatcccccaaatcttttaatccgagccgggaattccctcccgactcaagtaaaaggaccacccgcagcagaaagagcgccggtccaatgcacagctccagccgctcctccgccagttaataatacagcccccggcgcgagctataaatatgcacaacacccgcccccgaaagataacttctctcctattcccatggcatactctgagttatggccttcattattg

SEQ ID NO: 252934 - DNA, 429 bp, Glycine max
  unsure (1)..(429): unsure at all n locations
ngctctanantacatagatgtttgtatttatgggaggaggttatatgcctattttgctttaagagtagtgtcccactggtaaaattaactttccaaatgtttgccttcgcaagaatggccccgaggaagcttgcctcaaagaggtccaggaaagacaaggcggccgaaggaactagttccgctccggagtacgacagtcaccgctttaagagcgctgtacaccagcagcgtttcgaagccatcaagggatggtcgtttctccgggagcgacgcgttcagctcatggacgacgagtatactgattttcatgaggaaatatggcgccggcggtgggcaccactggttactcctatggccaagtttgatccacaaatagtccttgagttttatgccaatgcttggccaacagaggaaggcgtgcgtgacatg

SEQ ID NO: 252935 - DNA, 399 bp, Glycine max
  unsure (1)..(399): unsure at all n locations
gcaagcttgactttcaagtttcaacccatccatatctttgttgcccatctaatcctaccattaccatgcaaacaaatagaaccctacatactccaatgttgacccataacaggaatcactacatattataatttaaaaaaaaaaaaaaaacataccctcagtaacagcatctgtgcttgaagcttgtccgggttgcggcttccggtccttgtcatcttcctgttctacaaaggaaaatgaaaaatcaaacaaaacataagcaactaaaccaaaagcaacaaataacacaaattacaccaacaacgaaaaaaattcaaaaacctagaaaatgaatggctcaatcaaacacaatgtcgcaaaaaaagaaaagaangaaagaataaaagaaaagccgaacct

SEQ ID NO: 252936 - DNA, 449 bp, Glycine max
agaggatgcttcaatggatgacaagaaagagggttatattgatagagggggggagcacgtcattgacggaagaaattgagagagaagttgtactttgtgttgtgtctcacaagactctcattcatcaaaggtacaacaagtgttacacatatttctatttatagactaggtagcttccttgagaagctttgttgagaaaacttccttgagaagcttcttgagataaattccttgagaagctagagcttatctacacacacccctctcataactaagctcacctccttgagaagctctcttaagaagattcctaaagaagctagagcttagctacagatacctctctaatagctaaattcaccttcttgagatgagaagctagagcttagctacacaccccctataatagctaagctcacccccatgacagattacatgatattacaaaa

SEQ ID NO: 252937 - DNA, 459 bp, Glycine max
  unsure (1)..(459): unsure at all n locations
agcttcttgacttcaaacctatgcttaatcctattattaagctngtgccccagaaaagcaggagaaagcgtaactcctcaatgacccgccccatcttctctatcaagtactccatcttcttctccaaagaggtgtgattatactgcagtatctcgggctgcttcttgctcatagcaacaatgtcttcacaccaacacccataattcaagaacaaactaatgaccttctgcatgttcccacagattgtcctattagcagacctaatcgccattgccaagtcctttgacctatacctatagccaatcttcaccagcaacaccagcttataagcgatgttttcattgaatgaaatgctcagaaacgtgggccctctaatcaagaacttgaagatctcatcagaatccaacccacattcctggagaaactagtatctaagacgcagtttcctctctctgctag

SEQ ID NO: 252938 - DNA, 373 bp, Glycine max
cattttgcgaatgacgttacacaattatctatcccacacacaagaaccgcattatatcaatcaatggtgtagcgcacgaaaacgaatctttggctgatttcacattgaagcgtgagaatcatctctgttaaggattcttccctatactatgtgatcttaacaaaaaatatccaattctagagaccacggtcaaagcttactatacatcattatttggaccacctatctcatcataccttttgtatcctaagggtccatgcgcatcttcggaatcataaatatgtaattctttgaattaaatatacgcataaaattggtctactgaacctctatgggattttctctcctaaatgtgcttcacactgtctcttta

SEQ ID NO: 252939 - DNA, 461 bp, Glycine max
  unsure (1)..(461): unsure at all n locations
agcttctttgagnaaacttccttgagaagctagagcttagctacacgcacccctctcataactaagctcacctccttgagaagcttccttaagaagaattctaaagaagctagagcttagctacacatacctttctaatagctaagctcacctccttgagatgagaagctagagcttagctacacaccccatataatagctaagctcacccccatgaaaaaatacatgaaaatacaaaaaattccctaagacaaagactactcaaaatgcctcgaaatacaagactaaaaccctatactactagaatggcaaaaaatacaaggcccaaacgaaggaaaaacctattctaatatttacaaagataagcgggctcatacttagcccatggactcgaaatctaccctaaggctcatgagaatcctagggtcttcccttggatctctgacccaatctacatggag

SEQ ID NO: 252940 - DNA, 380 bp, Glycine max
tctcgatatattatgcgcctgaatcggacatccgttggtttagttatgaccatttgaatttctcgagagctttcgttgttcaattacgagcgtctcgatatattatgcacctgaatcggactttcgtgtgacaagttatgactaattgaatttctcgagagcattcgttgttgaatatcgagcgtttcgatatatgttgcgcctgaatctgacttccatgtgacaagttatgaccattggaatttctcgacagcttcagatgttcattatcgagcttctcgatatataatgcgcctgaatctaacattcgtgtgacatgtttttaccatttgaatctctccagagctttcgatttcaattcatacttctcgataagggat

SEQ ID NO: 252941 - DNA, 480 bp, Glycine max
  unsure (1)..(480): unsure at all n locations
cgggatcctctaagncacctgcggctgcagctgaaagggctcggagggcattgttttatagggcgcataatgggattcaagtgcctggagcaaagcaggccatgtggtgaggaatccattacggaacatccattggtaccaagagagagtggcaccttccacgtaaaagccgacaacagtaagtttctcctaatctagaatgttttgataataaaaaaactgagttattttgaaaatccatcccataagatcactaccgtcaaaatgagggacttctagtttcatatgtggccatgagctactggttggggtgggtggtgttggagatgacggtatcggcgtaagggcaacaagacattccagtagggaatccatcttggcattcatgtcgcgttgggcttgggaaagggtagtttggttctgcgagagtgagtgatggctctgtgtaaagttggctacaacctcgtcgagtcggtcaat

SEQ ID NO: 252942 - DNA, 385 bp, Glycine max
  unsure (1)..(385): unsure at all n locations
tggctaaactttnnattgacttttcctctctgtaaaagagttgatcctaacactccttattcaaaaaaatgttttaaataaaacgttgctgtaactttgttcattaaagttcatgggattgtacagactatttattgtggctgctactcctactattatagttcctcctcctaccgtcgttgctaattctactgctacttaacgactatgttagaacccttttttattttgaaatcttttactagaacgttattaaagggaattcttacttaaagattatgttagaaccttttccatattgaatttttttgcacaattattgaaggcattaacaattcatcctttgtggtatatatgcagaacaagacccatgtatatgaatata

SEQ ID NO: 252943 - DNA, 448 bp, Glycine max
  unsure (1)..(448): unsure at all n locations
agcttcattcttggtcctcccgttaatcggatggaccaggctacactctcgatggacacagtatcaggtatagttcatagcttattcgtaatgtaaaaaaaatttacattatcaattaatggatgtaaatgtttataacctcttcagtaatataatttaagtcatttgaattttattgatgaataatttataaatatgtttattagcattcttttgagtcttattatctcagttaacttttcggccgacatatttaattcacctatttttttttcttttttttattataaaaaaacgcctaaaattcctctaaatagattaatagaataaaatgagtaatttaagtagttcataaaaaaaatcaataactgatattccaactcatcaaaacatgaaacaagtgaaattaaactgcggaatagtgaaacccggtactttntaataacat

SEQ ID NO: 252944 - DNA, 465 bp, Glycine max
  unsure (1)..(465): unsure at all n locations
ttatctcacacaagaaagcctagatgatagctcggaattgataataccacattcggttgccgacaagatggaatgcttagtcagaggaaagcattggtctgtttgctcgagagtaatgaaaggaagtgcttcctctgtaccattcatgcactgaaacatatactgcnatagtgggatgatgatatgttgcttcaagaatgcaacccacaagatattgttggtcacacagagaattggtgtcatactgagtgagaaaaggctttggattttctaatacaatgatcacttttccaaatataaaagggcaaccacttgtatcttgtgaagactgtcttgtacgtaaacaacacatagtgtctcttcaaagaactgatgatgcctanaggagaaagcaaattctatatcttgttcactcagatgtttgcttaacatctaaaaagtcccttggtggtgcccaatactttg

SEQ ID NO: 252945 - DNA, 377 bp, Glycine max
aggactacctacaggctgcacacaacacagagagtgcaacggagcacaaaactccacaaaaggctcaactatcaagggagctcacccatttgcctaacatccacaccgactacggcggaaaatacgagttaaagagaggtccataacctgagaagaagagaaaaggactaaactagcaatgcggcaatcaaacaccccacactctatcttctgcactcctgagttaaatcaaaagaaagactcggaaagccaaataaaacaatcaacccaactgaaagaaggtatgaacaatacacacatcattttcaaaggaccctaacaatgcacaaaaacgagagacacggaacaaggaagaaaggccctaaaggaacatgcaa

SEQ ID NO: 252946 - DNA, 352 bp, Glycine max
tctttaagttatgtgtatattgcataatgactttactctttatctaacctcttgcaagagacacttacctacttacactctttcttaaccattaaaagatgaccttcttcttggggctagataacttctctagatacttccccttttgcttcttcactttcactagacgaaagagaagtagtagccacatcttggctactatataagtcatggctcctcataatcatgattttctaggaggagcattgagaagtaatgtgtcctcttccaagacatataaagcactttattgagctagtcttctctatcatactagccttaagaggatgattattattgtcttaccctaatc

SEQ ID NO: 252947 - DNA, 438 bp, Glycine max
  unsure (1)..(438): unsure at all n locations
gggagcacggagctgttcactaggaggaaggtgttattagtgtatctttgtattgccctacgtatgggagctagtttatgtttcatgtaccttgcttatgttttgtaaagcacataagtgccaagagctttgtataagttttatgtatctttaagttttagttttcacatatataactttgattntcttatatgctaaattttcataatttagtaatataagaaggaaaaagataatatcctctaggtgttacatatgaaatttctttgtgtgtggaaaagtacttgaattgaagtacctttgtgaatgaatagtgtgcatggaatgtgattgttttttggaatgttgagtancatgaaagtaaatatatggaaatgactgaatattataagagagtgaagtcattagagttatgactaaatgaaagaaaggaagaga

SEQ ID NO: 252948 - DNA, 398 bp, Glycine max
  unsure (1)..(398): unsure at all n locations
cgatcaaatgcttcctcttgctccttccccaaacaaaatcttctaagctgcaacaatggtgaaaaagatctcaacttgctcgtcaaattttctatgaatcgcttaaagaaactgatcttccttattaacctttgcagctccaatttattcttggtaggggaggcttctaggactgccttgctctttgtcttgtcgacttcaatttctttcctatgcagcaagaaacctaggaagtggcttgttattatcctaaagacacgtttttcaagattcattttcaattccttttgaatgcccgtgccaagtctattaagcattggtcaaactcagccaatntaacaatcccatcatcaatgtatacttccatagccatgctaatcaaatcatgaaatatcaaa

SEQ ID NO: 252949 - DNA, 440 bp, Glycine max
  unsure (1)..(440): unsure at all n locations
caatcaattttattatgttctttaaacatgccagacaaanatgattgccataaaataaatgagattagagaagagagaatgcgcacctagttttatactggttcggcaaagtccgtgcttacttccaatactcaagcaacccgcttgagattttcctttctctttggaaattcctttacaacttctgaaccacacagggacaactcatcccttgtgttaaggaattcttacaacttaagagaccctcagtcccttaatcaatctctttgaatgagaagaaagaaagaagaattctctcttgaagaaaaggatattacaattgaagttcatggagaaactcttaatggatttgcaagtgtttgcctaagaagtttctttgagagagcatntggcaatgaagttagatgtgccatcattttcttctatttcttaaacccttt

SEQ ID NO: 252950 - DNA, 439 bp, Glycine max
  unsure (1)..(439): unsure at all n locations
tgtgtgcactgattaccatatgggtaatctgtcctataagaatattatgtggtctaatctcatgaataggtaaatgcaatcattgcctcctaccttgagctaataactatctagtatgttgnnttggtctcttctggggttgaataggcactggatgtcctatcaaatatatggtttttttttgtttatcaaatggcgaattacacgagatgatatttatccatgtcctatccaatatatgaattttttatcaaatggcccattacacgaaataatatcatccaattgctccgggttccaactaatcacgaaataattatttaattgaaacatgaacccaataaagtattttatagagaaattaacaagtgttacactaagcaacaaaggattaaattattgataaaagaattaacaaatggaatactaagcataaact

SEQ ID NO: 252951 - DNA, 354 bp, Glycine max
ccacgctgtaaagattagagcaccccacacagaccttacacaagggctatgctggatatgactaggatgtcaaaagagtcaactgaaagttgaaaactatgaatcaaattgtcaacacaactcaaattcctcaaccaacagaaaaaatccttagtcccatatcagacagaatcttataaagaaacaaatagaaaatcttgggttgagccaaaagaaatgaatttggaaactgccgatctatgtgggaattaattcataagaaaatccccgtggcgaataaaccgcgaacaggtgaaacagctgagaaagaagccaaaaaatttgtcaatgggcacagccctcatagggaaaaag

SEQ ID NO: 252952 - DNA, 461 bp, Glycine max
  unsure (1)..(461): unsure at all n locations
agctntaggtgaattcatgagataaattctatataaagaacgatcttaactcgcgacggaaagcataaaaacatagaattaaagagcaaagttttagaaatactaggttgcctccttggagcgcttctttaacgtctttanctggatgcggggttgtggtcggggctttgccatctcatcctccctaccttatttccttgatcgtgagtaactctgatcatggacctagcacctgttggcacctgccctaatgctttgacaatgaaagtgttaacatgcaaatgtgaaaaaatactatgcgatgctcgtatcacctttccacttgcccctagacttacccaagttggtgtggtgctgaccatcacccaaaatgactcttcattcattntcccatttgcaagatactttgatgataagatgcagatgcatgcatgtttatgatcaaacattaaagataataa

SEQ ID NO: 252953 - DNA, 466 bp, Glycine max
  unsure (1)..(466): unsure at all n locations
ggacctagtcattntataaagtatgaggctgagctctttctttaagtctgagctcaccaatctagattgctatgtcatgaagagattttatagactccaagaatgctgctctagtctggaacttgatgagaagccacttacaaatgcagttcaccatgaagttgggcgatactatcagaccttgaacaatacgtgctttactaaagaaaactccctcagcatggtctgcacatggaaaatggaactctttgntgtgtcagatcgcaccttctcttttgtggtattccttccattctatagattcttattcacacagattaatcttcttaacaatctcccttgtggctttggtcttcaaactttggcttgaaccttcaattgaataatcttctctttttggctntgacatgtcttatgtcgagagcgcgttcatagttgattttctgtttcatcaaaactcttttat

SEQ ID NO: 252954 - DNA, 455 bp, Glycine max
  unsure (1)..(455): unsure at all n locations
agcttccacaacatccaagcaattcaacatctaaatatcatgaactatccaaaaccaataaaatagggcaaaggcataaaactctgcccaaaacacattccaataccacaactttccttactcaaataccccagtaacattctcttcgttccaattcgttaaccgttggatcaactcgagaattttactggaggtccctaatacataaatctacattttgaccgttgggatctgctagtaaatgtccagaacccaatatgcactaccctttccacaaccagcaatgcataagcattttctgcacaagcacaaaattctgctgcacatttcaacaacaaaattctgcataatagtgcagattttcgaaatcactcttgccctcatccaattntgcccaaattggatcctacaagtcctaaatcaagtataaatcatatctaaatcaaagacaagct

SEQ ID NO: 252955 - DNA, 465 bp, Glycine max
  unsure (1)..(465): unsure at all n locations
tgttcatgaccatcttcaaatgtgagggccaccactttttatccaccttataaattacattgcacgagctagatggtctatattgcttgatagacatgggttaaactaccttcaggattaaaatcaggttcatgtgattcaaaagcttaatggaagagaggttcaataaagcttccttaacacgaagaanaatagaagacctaacagtatctcattgggataaaaaaaataggggattcaaatcgtctggccctagagctntaagggctctgatgctgaagacaaccgatttactctcctcattaagggggtcattttgaatgagagcaagatcttcttttgagaagttggggaaagctccaccatacaaccagacatagattggatcctcatccttaaacaaacctgaaaagaaatccttaatgtntctcttaatagttggtaagtcatgcaactcagacccat

SEQ ID NO: 252956 - DNA, 459 bp, Glycine max
  unsure (1)..(459): unsure at all n locations
agctntgcaagctagatctgcagattatatattcattattcagcatgaaaacacgattttcacacctccctctcaaaactccaccaaaccaccctataaaatcctcctccaccacccacgaccaccggtggccgtcacgagctgttgttacttgctgttgaaccaccatatggagagaaatgttttaaacggagtggaatcctcagaatccatctcaaggatttggtggagaacaagctctcaattgaaaaaaatgtatcttttaaaaaacagttacaaaaaaacttttgtatgaatcgtatcacaaacacatatatgaatagaatgtaatcaatatttaatcaagccttccttaaacatgatccttcattaacatcctttctttcacaaatataaaacttgaatctttatgaaatttttttattaatacttgaatgagagaaaaaggttagaacaaga

SEQ ID NO: 252957 - DNA, 373 bp, Glycine max
  unsure (1)..(373): unsure at all n locations
gtcttcgccttcagaggactacatctctcttgccatcagagggatacacgccttcaccattagaggactacacgtnctcgccatcacaagactacatgtcctcaccatcagagggcaacacgccctaacctctatcggactacacgtcctcgccttcagaggacttctcgtcctcacctttagagggctaccagccttcacctttagaggactacacgtcctcgcaattagggggctacacgccctcaccttcagaggacttaacgtcctcgccatcagagggcagtacgccctcaccttcataggactaaacgtcctcgccatgagagggctacacgccatcacccttagaggactacatgtccttcccatc

SEQ ID NO: 252958 - DNA, 437 bp, Glycine max
gggatccaacggctgataattctattgcacggcgcattagttgttatactatcacaccttagtctttgtcatctttgagtaactttacaatttgagcctcattaaaaggatccctatacagttgtatgagcatgaaatcataggagaagttgtacaagatgttggtcttgttttgcaagggttctcgtgagcaaaccaatttgagaaagagtgtcccacagaggttatagaagcctataaaaatattgctttgtggttcccattcttagagtgagggtcattgaaggatgatacatcccgttccttctccaacccccttttctgttcgcataccaccctataaatttgaaatcaccatactcatgttgtgttgtgatagcgccatctctccgaacgcctttttgttgcaaatgagttcatctctcatggaatctaca

SEQ ID NO: 252959 - DNA, 458 bp, Glycine max
catgcaagctttgcatttaagactttcttattatgttttaaaactaagcatgaaagaaaggagaagaatgtcttgattatgaggacaaaatatactctagaatataaaagtaactcatcagaacataattataacagcagaagctaccacgaattgtattcttttgatgtctctggtcaaatccatccctatttccctccaagaccattattttgtgggtttttttagcacatggtgaggataattcctttgcttctcttctatagtgaattctatggtcaaccatcaactaaattataggtggcgcaccaatgtgtgaccagtatagtagtcttttatagaactattacctctaaattagattgttgtgattgctgtaaaacgatgtgacatacctatgttgctattcagctgaagcatgataggcacgtttttttcttcaacacattgaaacttta

SEQ ID NO: 252960 - DNA, 449 bp, Glycine max
tattaattagtgcggtcacattcaaaaccgtcgtcgtggttctttttttttaggttggcacaaactctttgactatgtcaccaatgttgaagttacggaccttacggtgcaacttggtatcacacactcatgatctcggcggcaactatcacgttttcacgtcaaagttcttacacagctatagttgcaacgacacaaagaacatgtgcatttccatagcttagaagtcgatgttgcaagagataatataaacaacaaaactaagattaagatgaacgacgtaaaaataaagaacgttaactgtgagatccataacttacctgtcatgttagaattaatattttattaacccttgaactggaaagtatgctatgaagtctatctctggccaattggagcactcgaaagttctggtcaaataacgtttaattgattattcccctcgccct

SEQ ID NO: 252961 - DNA, 437 bp, Glycine max
  unsure (1)..(437): unsure at all n locations
agctntgtaccttatgcttgaaggccacgcactgctatatagaatgccccaaaacaccaccgtgataggcacgggttgcattgggattgtaccatctggggaagagagattgatagaccttctcgaggttcaccacaaccatctggttgctgatcaaagatggtagtaggtcagcataaggcattggtatcggggtgaacttcgagggctttcttttcaagaaattcctcctcgggtttatgtttgtgttgggatttgtgtttccagtgggtcaagactatgcgagaaatgaattttatgggggaggcctttgtggttgagtgggcaatctttgttgttcgggcgtcggattgggaggggttccgatgtcggctgaataacttggttgacgcgaggaatattggtaggtggggttgtgaggggtttgttgggatttt

SEQ ID NO: 252962 - DNA, 464 bp, Glycine max
  unsure (1)..(464): unsure at all n locations
ttcgattcattctatgcacccatagtggtccacattgtgtttcgtgcanttttattctcgttntgtttactttttataccccctgttgacgtgcttaagccattttacttaagtcatttctcgcttaacttaaaaataaaataaatttccaccgaacgtttgaattgtattatccattaacttcggttaaaataaattccgaccgttcggtcgtgccgtaaccacgttggaaatcaaaaagaggtaaaaaataatataaataatcgaaaaacatcttttagtaaaataaagcggaaaatcaatcggacgttttctctttgggatttctcattcttaatcgaattgattaataactaaagtgaaactaaaggctaaaatcaattcgcctagtcaagctcgtccataaaaataggctttttaagtttggcatttcatttcctcactaagtaaaatggagtcatttt

SEQ ID NO: 252963 - DNA, 461 bp, Glycine max
tgaggaagtgtagaatggtgaaacttcctgcttttattgttgaccacagagtggtacctcgagatatgtcgcgggggtcaggagaccttggggacgtcaggtggggtgctattgcccaaaaccaagcttgaccaatcccgacccaacccgggcataatcggtcagtgagaatctgtgatgtacctaaacaggcgaagctcctgcagtcaacagataaaatgaacaaagaccacaaagcaaggaggcttgtggtggctggccagctgtgaattttgtgtggtatgtggattatggcctctggtaatcgattactaagggtgggtaatcgattaccacgggttgtaatcgattaccaggcttgaaaacgaagtcaggatactcaaggagcctctggtaatcgattaccagcctgtgtaatcgattacacagagggatgggtcactggtaatcgattaccacgt

SEQ ID NO: 252964 - DNA, 466 bp, Glycine max
  unsure (1)..(466): unsure at all n locations
agcttagagaggaagctttcctggaagaaaagatttatatagagagagggaaagagagaggggggagcactaaattgaaggaagaaaaaagggagagaagttgaactctgaagtgtggctcacaagactcttattcatcaaagttacaaaaagtggtacacatgcttctatttttagcctaagtagcttccttgagaaacttttttgagaagcttctttaagaagcttccttgagaagctagatcttagctatacacatcccctaataactaagctcaactccttgagaagcttccttgagaagattcctagagaagctagagcttagctacatacacctctctaatagctaagctcatctccttgagatgagaagctagagcttagctacacactccctataatagctaagctcaccccaatgacaaaatacatganaatacaaaaaagtccctactacaaaaac

SEQ ID NO: 252965 - DNA, 438 bp, Glycine max
taatggaccgattcaggcatgatccgataggtcatgggctctttgacccgacctcgacatgtagatcccactttactgcgttattagtgttttgtaggttgaatccaatagatcaatccgatcatattctaattatatttttatcatatcttaataatatcttatttccgaaatcaatgaagaaatttttttattagatcttcccatgattaaagaaatactgtataatctaccctcactataaaaaaagagagatctaacggcgattatgtttggccttacccacaattttaacctcctgtaaacacatttcctgcggttctctttccattagaaaagctttcatgacaaacgctttacactttactagcggcttttaccagtcctcgaaggcgcaaatatttcctccattctttaattaaacccctggtaactacc

SEQ ID NO: 252966 - DNA, 473 bp, Glycine max
  unsure (1)..(473): unsure at all n locations
aactaatnggaaatacaaatagtcctatgggttagatatatggactnttgagttcactattactatttcgtacgatacacttgcccgtgtatgagcctaacatattttatgtatcaagtttctggtgtcagttcctagaactaggtgctaaattcccaattagcttaattttgttaaaccaaatagttttgttcatataaattattttattctttatgtactcatttttctaatatttattcttttattttctattgcacttgatcttctcctctatatatattgcatgctaaccatgtcccaaaattcaccattgcggtacgaacctgatattaacaagctaatctgtgaagtttttgcagatattcgtgaagagagagaaagagcattggtagctaatctcgctttgacccttatggattacctcacccctaccattgtggacaccaatcccatcttattgcccgagctac

SEQ ID NO: 252967 - DNA, 429 bp, Glycine max
tggtcttattatttatgagtatatatagagcagtatatgatgtcatcctttaaagactctggcttcaacaattaactagaatcgtgattgacgattgtaaattttaggtggattcacagtgaatttaaatattcttaatggtcttagctattatcctttcccttactccatcctacatttttcttctgccgttggaaaactgcccacctaaataatctgtgtatgaaagagttgactatgtggaaatagaatggtttgctgttaaagttgacgatatttgctatgatctttttgtcatttctgattgagattttcctgatgcagattccattatatgtggcaaccaagatggcatcaatcaggaaatcttcattctttgttccatcaacagatggctatgccaaagcaggtgtgaaatggataggctat

SEQ ID NO: 252968 - DNA, 441 bp, Glycine max
ctttccttccccctaatgtgtccttatggcatttcttattctgtttagtatcctagtagttaattaacctgttgcaacatgttaggagtcatttcagctgtttttggttataccattcaaattcttttctgtattcagtgctatgaatctgtaaattctgttatatggtactcttttggtgctttttaataacttatgtatacactgcaggaaggtgatgtaattgcttatcgattgattgagttaacagcatcttggactccggaactttcctcctttagggtgcatatcaactatcaagtctgcttttggattacattattaaaaaaaattgcatcagaagttcaatacgaattacatctatgtccttgcaggttgggaaaatatctcggtatgatgctaaatcaaataggatttggctggaaccagttttagaatacc

SEQ ID NO: 252969 - DNA, 465 bp, Glycine max
  unsure (1)..(465): unsure at all n locations
tccttaagtcacctgaggcatgcaagctngagatgaggaagtgttgaaaggtgaaactttctgcttttattattgaccatagagtggtacctggagatatgtcgcgggggtcaggagaccttggggacgtcaggtggggtgctattgcccaaaaccaagcttgaccaatcccgacccaacccgggcatagtcggtcagtgagaacctgcgatgtacctaagcaggcgagctcctggtagtcaacagataaaaggaaaacaagaccacaaagcaaggaggcttgtggtggctggccagctgtgaattttgtgtgatatgtggagtatggcctttggtaatcgattaccaagggtgggtaatcgattacaaggcttaaaaatgaagacaggaggctaagatggtctctggtaaatcgataccacggngtgtaatcgattaccaggcttgaaaacgaagtcaggaaac

SEQ ID NO: 252970 - DNA, 486 bp, Glycine max
  unsure (1)..(486): unsure at all n locations
ttaaatctaagcttagtcaacagaataatccgaanatgtcaaagaattgggtgttgaaaaagcataacaagactctctgtgattggtttaaagatacaatctttgccgatgagaatgcttcagaatcattaagaaagctagcagatgggcctaaaagaaatcttataacctggcaaggatacgacataaacaggtattcattttacacaaaagcacaagatgacaaaagtacaatgcagaacagcggggtcaccctaagggctgaatctcaacactttgcaagtgtcaatgacgccaatccctgtgtagcttccatcccttactttgggatcattgatgaaatttgggagcttaactatgtngaaattacggtattgtgtttcaaatgtaaatgggttgacagcaacaccggtgtgcgcaccgatgatatangatttacgttggtagacctaaagaaacttgtgtaccacaatgaccctttcatca

SEQ ID NO: 252971 - DNA, 413 bp, Glycine max
ctagatagtggggatgtgctcaaatatgtggggcaatcttggtttcttttcttgcttgattgggttggattgagggtttgtatgagatggccctaggcctataatgcattttggagcaatggggcatgccacattgtccccattctcttgctattaatgcctaaacgtgcgcccaccaagtgttcggtgaaatgcctcaatggcatttacgcatgattttgtagggaaacaacctatgggacaatttggtttacgcatgtttgctgtctttggagcatgtactcagtttcataaggactagaatgattgccccccatacaccctaggcctaggaaccgaagcttgtttttggatgcgagagaacacgagaatgggtgcatattaggtgaagctaccctttttggccagcaatc

SEQ ID NO: 252972 - DNA, 454 bp, Glycine max
  unsure (1)..(454): unsure at all n locations
ctggagaggatgcttcaatggaggataagaaagagggttagcttgatagaggggggagcacgaaattgaaggaagaaaaagggagagaagctcaactttgagttgtgtctcacaagactctcattcatcaaagttacaacaagtgttacacatgtttctatttatagactaagtagctnccttgagaagctttcttgagaaaacctccttgagaagcttctttgagaaaacttccttgagaagcttctttgagaaaacttccttgagaagctagagcttagctacacacacccctctaataactaagctcacctccttgagaagcttcctagaaaagattcctaaagaagctagagcttagctacacacacctctctaatagctaagctcacctccttgagacgagaagaaaaaataatcagaaaaatgatttatataataagcaatataatta

SEQ ID NO: 252973 - DNA, 449 bp, Glycine max
agctggacaagccagcttgtttaactaacaatattaatattaataataataataataataataactttattttatcaaatcttatcttatctagattttattttatccagattttattccatctagattttatttcgtccagattttatttcatcaaatcttatcttatcttgtcgagattttattttgttttgtttatggtcttggacttaaaatagatttgtgagctttggggctgaggacctatataacaacaccaaggttttagtttagggagttttttttcggagaggagaataattctaggattttagaattctagtttttattactgttcatgcatacttttcacgtagaataaaattcattttctgcaatttcgtttcggcttcaatctacagtttcgtttctactgattaatggaatgctaagtctccagcattgttttc

SEQ ID NO: 252974 - DNA, 457 bp, Glycine max
  unsure (1)..(457): unsure at all n locations
ntcagattatgatgtttggtatcttctactcttggccagcctatnttttattttatatcttccagacctatgctttaagaatgttattatagtcaattggtcaccgtgtgaatagtgatgaagtctaggtgcttcaaatagggaatttatcattgtgaacttgaaacttctgcatctagaatttggcttgtgtaattgcacaatggatatggctatactgcccagatcttctcaataattattgtttaatccaagagatattgccttcttgatcttgttatgtcttaatacttttttaattaaatgaatttaagcatggattagtgcttttgtataaatatagatgaaaattataatcattaattggattcaacacaagatataaaatgtaaaataattctttgtattggattcattaattggtgatattatagttggggttttagtgggttgaatg

SEQ ID NO: 252975 - DNA, 478 bp, Glycine max
  unsure (1)..(478): unsure at all n locations
ggatcttaagcacctgagctgcagctgtgattgtaaaaaaaagaaatatatttataagagaatccttaaggtttacacttgcacatttgagaagcaaactcattcgaccaggagctcatggaaggtgctcaaagacaattgtgatagtagggtacatctagtgttagtcactcatgtagactctctagggttcccatgtcatcaagaatcagcaggatcgatagatccatggcatccctctaagatcttaaatcaagagagtttcacttggtcatataccaaagtgtaacaacccattgccatctttcaatggtgcacgtggtcggtccaaaagccttacatttccttgctgtggaaaataatcgaagttttttttttaaaaaacaaaaagaaagggacaaaccctangatcaataanttagttgaatggataaatgtcaaatggctcaactgccatcatccaaaattgtcaagtgat

SEQ ID NO: 252976 - DNA, 465 bp, Glycine max
  unsure (1)..(465): unsure at all n locations
tgcccgcttctttcataatntacggaaaagttacggttgttatatgacttgcttttcttcttttatctcttccttcccacccatattaagtgaaatatgcttatttagggttatgggaattttacggaagcactacgggtgtcccggaagccccgaaagcccattttttaacaaaacgggggaggtggttgccaccttaagcaagaaaatgcccagaaacctggcccaaatttgaaaattactatttgcaccccccattttacaaaatacaccccttttgccccttttttccataacattacggaacctcacgaattacgtaacgatacttgttttctttccgtaatgtcacaaaactttgcggattacgcaaccatcccctcttcggcttatggaatgttacggaactttatcgattgcgcaataatggttcctttcaactcccaacatgtcgcgaaacttcac

SEQ ID NO: 252977 - DNA, 453 bp, Glycine max
  unsure (1)..(453): unsure at all n locations
agctntaaaatttgaattanaacgttcagaaactgctggtaatcgattaccatatatgtgtaatcgattacacagtgcaaattttgaattcaaattttaatagttgttgtaaatcagttttggccactggtaatcgattaccagagagtaaatttgttgaaaaagactttttaacttaaatttcttggccaaactttttgctacttcaattggaattcccttcctatttaatataccctttctaagactctagagactgtcttgatcatccatcttaaatatctttaatttctttgtcttgaattaaagctttgagacgcatgtgaaactttggcatcatcaaaacattcagcttgatcctttgtctacaatctcccccttnttgatgatgacaatccctgaaatcaagacaagctatatacaagatgatagcacgttcacacaacccttact

SEQ ID NO: 252978 - DNA, 428 bp, Glycine max
  unsure (1)..(428): unsure at all n locations
ntgatgatatggtcttcaccgaagaaaggatcaaagtgggtctaataacaggcaaatctggtcatcatgctttgataaatgcaaaaaaaaataaaaaaaaaactagggcaaatgaagagggtgagaatgagggagaagcccatgctgtgactgccattcctatacagccaagtttcccaccaacccaacaatgtcattactcagccaataaacaaaccttctccttacccaccgcccagttatcgacaaagaccatccctaaatcaaccacaaagtatgtctatcgcacttccaatgacgaacatcacctttagcacaatccaaaaacacccgctaagaaatgagttttgcagcgaaaaaaaaacctgtagaattcacccaaattccgatgtcctatgttgactngctcccatgttcactcgataatg

SEQ ID NO: 252979 - DNA, 461 bp, Glycine max
  unsure (1)..(461): unsure at all n locations
agcttatcgccatctttaatggcggcacctatcttctcgccattgcagatggcggaacaaccatcccgccaatgccacttgcgggatccataaaaaacagaccccctacgttaaaactttgcaaacagaccctgaatggtaaatagtttttaaaactaaccccttacagtaaatntgcctagctttggtccctttccagactgattcaggtctgctcataggaaccaaatgtctacctaaccccatcatgtatctctagtacctctggtactcttatatatatacttatttttgctgagccaaaaaaaatattgttaacaggccaggcttgtacagcaaacctagttgattcaaaatgcagcactaatgtgttcttgaactccaacaatctctgaaaacaaaactgaagaaaaacagggaacctagctgtgtcgaatagagtacacaatcacatatgtatg

SEQ ID NO: 252980 - DNA, 472 bp, Glycine max
  unsure (1)..(472): unsure at all n locations
ctacatcttattgcttgaactgcgtacatgattaacatatactacaaatttatactaacttggaagtccacaagcagcctgaggttaacaagttgttacaccacaaaagggcaccccaaccccaagtcccaaaccatattccaaaaaatgaagaataaaaaaaaggaacaaccttgcttctagcagagaggattgaactgaaagctttggcattcttcctagtagatatttccttttccttttttcccttcacaattggcttttcttttgattcatcatcaaagctaatcacaattacttcaagtttttctttggcttcttagctgcttccacctttctagcaagaacagaattcccaacactagcacgaaggttcctattaaaaaagaaaagagctgaattaggccaaagaaaatagaagaanattatcttaaaagataaaaatttccaataacaatacacataaaaaaat

SEQ ID NO: 252981 - DNA, 449 bp, Glycine max
  unsure (1)..(449): unsure at all n locations
taagcttgggatggtcaatgtcatcattataagcggatcaatgacctctgtatcagactttggaggtggttntgctggagacacaactacctgttcatgaaacaaagttaaatagcctaatttgaggcacacttaaagaattaatttaaaaagaagaaacatatagtaaggataataagtacctactgtgataaagacttgaccaaatgatgcaatcctaccccgcaagggcattggatagaagactccaagtagattaggctagagatccaagggaaggccctagggttcttataagccttatggtagatttcgagcccatgggctaagtatgagcccgcttatctntgtaaatattagaataagtttttccttctgttgggactngtatnttggtcattctagtagtatagggtattagccttgtatttcggagcattttgagtagt

SEQ ID NO: 252982 - DNA, 464 bp, Glycine max
  unsure (1)..(464): unsure at all n locations
tccttgtactcaaagactgccatagctgtcttttaccttctaaatcacagggggcataaatattagccacaaccactctctgcatctcagccatccaaaccccttccagcaaaatcagaccctgttctgatagtctaaaatcaacctggaaattgttattattccagatacataacctctatggctatttctgatatgcaanccaatttagatctgttgataaggtagttctatctcaagcacgactaagcaagagtgaatatagaagaaattaacatgactaagcataatcacaagctcccacaaatgcaagagtgaatatagaagaaagtcagcaagtaatttgagtataagagtccaaactagatagagggaaggaaatggatgcaagacaaaatcaaatatattatttataatgtcatttagcctttttttatttaattttcttaacactaaattatgct

SEQ ID NO: 252983 - DNA, 455 bp, Glycine max
  unsure (1)..(455): unsure at all n locations
agcttagtctgtagagtaaacttaccacaaatatcaagttcttcaaattttgtggatatagttgccattatatccttgatgctcacctcgggctcagataacccttggtctgaaaatatgagtctcctccaaaacatatggattgaatccagtgggatgcaaccatcaacatatttggatagctcacaagtacaaggaagaccatgtgtggttctcatcacacaatcataaggggaaggattcttgccaacatagtgaacacgctcaaattcagcagcaatctgatttaaaacacaccttgaaaccatttgaagaagcctcttgtataaggtttttttgaagacatgtccaacgacatgtatacttgtttcanatgatagctctaatttcgagtactgaggcgtcatcatgttgctcttggaattccagacactacataagtctcctaagcaatc

SEQ ID NO: 252984 - DNA, 485 bp, Glycine max
  unsure (1)..(485): unsure at all n locations
attacgtgacactatcaatactcagctnttctatattnggaggaagcatgatccgccgaatgttcatttgcttacatcaaaggcttccaacaagacagaacttgcaaagaagggggggtacactaaactcactgtatgtgctttttgccaccctcacgaagagacaatggaacatgttctcttgcacttgaacttgttccaaccaggtgtggctgagtgagtgttctgtatttccacaatccgctttatgccttggaatttgatcttataactctgtcgggggggcaatacagtggaatattttgaagatgagaaatactatggttttatgcaggaggaattcgatcttcactggttaatacaagatattattttaataacgtggcaagctcagccacaactatgcttgtcgggagcactatgtgggtacgtggaaatgcaacttatattgctgcatgaatacttgctttttcctttcatatatt

SEQ ID NO: 252985 - DNA, 397 bp, Glycine max
catatcaaagaattaggttcttctgtcatgtctctgagcatctctaaagcatgctcaagcaaaccagccttgctcaataggtcaaccatgcatccatagtgttcaacttgaggtgcgatacacatatcctgtaccatgctcataaaccagcgacgaccctcttctataaatcctgcatgtgtgcaagcagtcaggatactaatgaatgtaactgcgtttggccggattctcttcctctgcatttcaccaaacattcttagcgcttcttccacatacccgtgtgttgcaagcccatcaatgatacaattcccacaaaacaggtttctagtttgcaatttgaagaacaccaaaagggccatatcgatgctcccacatgttgcatacatatcaatccatg

SEQ ID NO: 252986 - DNA, 463 bp, Glycine max
agcttgagtatctcaaataggggaaaccctctttctatatccattatcccattctcctcctctatccatccctcttcttctttcatccacatcaacccctaaagtataaagtctctcattaatgagaggctaaacccccattgttgggagcctggcagaccaacttcttataatgtaactcttcctcactatctctttaatgcaattctaatttttattgttcttttttgtgcctttttgtcgctgattatggtttgatcacctatactcatgcattgcttaagaagtaatgcattggaaaatagttttttttctaaagaactgggaaagggcatctcaaggaaatcattgttagaaatagagtgatgtttgtttagcctatttcatgcatctttaatcttaatgtgatttactattttatctttgtaaaggaatttaagagagaaaatagataaattaggct

SEQ ID NO: 252987 - DNA, 467 bp, Glycine max
  unsure (1)..(467): unsure at all n locations
ggcacttcttcacttttctcaagaatttcagcctttntcccacttatacttnttttctttgggagccaagttatcccttgcgttctagacttcaaccacttgtgatagccgctgatgacatcttctacttcccctaagctccttatcttttcttaccactctattccacgctttatagagtagcctaactgtcttatagagtagcctaactgtcttatggctagcacggggttataattaatacaacccctcgtccctatcaaagggacattngggaatccctcacacgagcataacactcttgcccctccttccttccaccgtgggaaccatctgatggacgctcccatcatacctgccaagagttctccccaatttgctttacccttttcggagcacatgcaatgactttgtaaggacaaacagatctaccttcatgataaaagatgtgggatgccaaccataca

SEQ ID NO: 252988 - DNA, 461 bp, Glycine max
  unsure (1)..(461): unsure at all n locations
agcttatttaagtgattntgtcatagaaaccactttacctagtgatgtacaagatacatctggttgtgaggaggtcaaaggattactagatgaaaaggtatttagttgatgaaagattattcttaaaggattttccagacttggaagaaagggtgaagtccctaacgacaactcttgaagattcagaagaagagcataagtaaatgcttaaataaaagctcttacttcaaaaataatgcactcttgctaataatgagcttgacaagttgaaaaagaagaactcagatctttgaaaaaaatgtcaacatcataaaaagatatcttctgatttaaactataagcttaaaggatgtgaggtcttgaaggaactacctcttaagattgaanaactctataaggagatagaaaccttaagagataacctaggaaaatttatgggtggcatgaaactcttaataaaa

SEQ ID NO: 252989 - DNA, 445 bp, Glycine max
  unsure (1)..(445): unsure at all n locations
tttggtatttgtagggtttgttataatcttgtttatgggtaatgttgtctctagaacatttccattggatttaatgatgaaatatgtgcattttcaggtgaaaaagaggctaagttttgaattgcaaaatgtagcagtggggctaagctcagtagttgggctaagcgcatatccaccgctaagcgcggcttcaccgcgcttagcgcaaaggagaatctggcagagcatcagcatcaaagccgtgccctaatcgtgatatcagtgcgctaagagcagcaagtgcctttagccatgctaagcttgagactatgcgctaagcccaattcacttgctcgcactaagcgcgagggtggcactaagcgcagcgtcgcgatttcagagcctatttaaagcctgtcttgtgtagaattagggaacaacttttacagcttntacagcttctaca

SEQ ID NO: 252990 - DNA, 455 bp, Glycine max
gcttctccctatttgctataataggggaagaagtgaagaagaaaagggttcagccccttaggcacttctctctctttcgaatttgctgaggaaaattatttccgtgaagaaaatctaagccgaggcgcttccgtaacgtttccgtgagtaattacgcgaagattctcgaccgttcttcaagatccatcattcgttcttcgttttcttcagtcttcaacgggtaagtacctcaaaccaagcttttgaattcattatatgtacccgtggtggtccacattttgtttcatgtatttttattctcgttttcatttactttttatacccccttttgacgtgcttaagccatttatttaagtcttttctcgcttaatctaaataaaataaatttccaccgatcgtttgaatcgcatcatcccgttaatttggttaaaatgaatttcgaccgttcggtcgta

SEQ ID NO: 252991 - DNA, 453 bp, Glycine max
  unsure (1)..(453): unsure at all n locations
ctttcgattcattctatgcacccgtagtggtccacattgtgtttcgtgcatatttattctcattntgtttactttttataccccctgttgacgtgcttaagccattttacnttaagtcgttctcgcttaacttaaaaataaaataaatttccaccgaacgtttgaattgtattatccattaactttggttaaaataaattccgaccgttcggtcgtgccgtaaccacgttggaaatcaaaaagaggtaaaaaataatataataatcaaaaagacatcttttagtaaaataaagcggaaaatcaatcggacgttttctctttgggatttctcattcttaatcgaattgattaataactaaagtgaaactaaaggctagaatcaatccacctagtcaagctcgtccacaaaaattggcttttgaagttcgtcatttcattntcttactaagtaaa

SEQ ID NO: 252992 - DNA, 450 bp, Glycine max
  unsure (1)..(450): unsure at all n locations
agacaccacgtgggaacaatgggacactctacgaacctcgtacaaccttgggcaaggttttttttccaagagggggaattaatagcaattgtataatacccaaagctagcaatagcatgatgcccaacaacaaactcaaaagggtcatcaggaacccacctatctcaacgactacgcatgaaccagcccaagtgggacaagcacaacaacaattttgttattacaataatatccattatgttataatcaaaaccagtgaattctgttattagaatcatgcatcaggtccactattgaccttagattagagatccagtcttagtataagtgtagaagattagcaatagaaatggacaaaaaaagtttatncgttaccttcttccttcttgcattccttttcttcttagtagctatcagaataatcagttatctcatagtttgtgagtgttg

SEQ ID NO: 252993 - DNA, 450 bp, Glycine max
  unsure (1)..(450): unsure at all n locations
gcttaatggaggaaaagaaagaaggagagatatagagaatgtgggagcaaaaaattgaaggaataaaagagggagagaagtggaactttgaagtgtgtctcataagactttcattcatcaaagttacaacaagtgttacacatgcttctatttatagactatgtagcttccttgaaaagctttattgagaaaactgcctcgagaaacttctttgaaaaaacttccttgggaagctagagcttagctacacacacccctttcataactaagctcacattcttgagaagattactaaagaagctagagcttagctacacacacctttctaatagctaagctcacctccttgagatgagaagctagagcttagctacacacccnctataatagctaagctcacccccatgacaaaatacatgaaactacaanaaaaatccctactacaaagac

SEQ ID NO: 252994 - DNA, 468 bp, Glycine max
  unsure (1)..(468): unsure at all n locations
gcatgcaagcttggcttcgtgtcgtagcttcagctagatgaataggaagacaagtcctgcaataacagataatggaaaagcatgactcatatgagcaatgtaccttaaacataatcatgatggaagttaaaggtctatgaattgaatatgataatgtacatctttaacgttatcctgctcaatcaattgagctaaacttcctttaagttaaaacattntaatgcgtcaacattctattaaaagagagtataaaatctttatattaacatggatcaagttcaaagtttaaactcttgtttaaatgaaaaatgtcttcacatataaatatgttttcaatgcctcattggtaactttattcatgggtgttagtttaaatgaaaaatttcttcatatataaataaattntcaacacctccctggtaactatattcatgagtgttttaaaatggcagtgcttgagtttttttt

SEQ ID NO: 252995 - DNA, 276 bp, Glycine max
  unsure (1)..(276): unsure at all n locations
atgtcatatactgacctgctaccatccttgatcaccaaccagatggctgtagtgaaccccgagaagatctacctgtctccctctccctcgatggtacaaccccaatgcaacctgcacctatcacgagggtgtcccangacattcaatagagcaatgtgtggccttcaaacacaaggtacagagtttgattgacgctgggtggctaacatttcaagaggacagcccgaatgtaaggactaatttcctcaccagtcatggaggctcgatggttaatgc

SEQ ID NO: 252996 - DNA, 464 bp, Glycine max
  unsure (1)..(464): unsure at all n locations
agcttataagaaacaaagtgcctaaatcatttccaaatatgcatgtgaattaggaatcatcaacaagaatcaagccaaggctattgtgcaaacaatcaatggggcaaaacacaccaaaagattatgatgatggatggctcgaattctcacaaaggtaaacttatcactttcaaattgagctttcaaaactatcatgacatgtaaaggaaaaacaaggatttcaagtcacaaaatgtcaagagacttttatttttagaacaattacccattacttgaacatatcctataattcaaagacaaacatgcaaatttaacacaacaaaactaacaaaattaaactagaacccaacaaaattaaactaatttaacacaactatcaaaaccaaaaccaaagaaaactcccccccatacttaaacaacacattgtcctcaatgtaacacaattaanatattaaaagcaatta

SEQ ID NO: 252997 - DNA, 443 bp, Glycine max
  unsure (1)..(443): unsure at all n locations
tcaagctaaggccagattctcgtgcatgcagaggcttcttcaagattaactccaaactctctttttcaaatctgatttcaggcttaaatagctggccttgttcgtgctcgtgcgcttaacgcacgtatggaccacttagcgcatgnttagtgaatttggctcagcgtgcttctctcacttttaccaatttgcctaattaacctgaaattgagagaaattgattattaaacacacaaaacaaaagtataaattatctattacctatatttatcaaaaagtacttataatattacaaaacaaccataaattggaaaagtttgatacaaaatacacaggttttatacacaaaagttagtcatattcatcgactaacacccttccccgaaaccctccccaatgcccctaagctcctcctccaccaccacttatcctcgatggctcca

SEQ ID NO: 252998 - DNA, 450 bp, Glycine max
agctcgctgaaaaaatggattggctaactcttatttatgaatcttctcactacaactcttcggttttgtcctatgcgaagaattctcattatagcttgctcctcaactgcaggagtccaccatggatcctacatttaacacaaaaagttaacacagaacaaatgaagttgtgcacaggatagaaaggaattaggcatagcataccataatgaaaacatttgaggctgcagttaagctcaaacccacaccaccagcttttagtgacattaacaaaacctgaaacaatgcgattggaataaaaaacagtgattcagtgataatatttttcaactaaacaagttaaatggttcaaattaactttgcttacccttttctctcttggctcattgaattcatccagaactttctccctctagttctgaagcaacttcccatgatatcttcaaaaac

SEQ ID NO: 252999 - DNA, 432 bp, Glycine max
ctgaccttcgataaggctttcatcagatactcatactttctttactttcacaatattgcatttcgcacccagcatggtaactatgagtacagagtgatgctattcggcctttataatgcgttgatgatgtttttgactacaatgatgagcttctcaaactattcatgggtaaatttgtcgcgatgttctttgatgacatacttctttataacccttcctttgatagtcaccttacacaattagaatctatatcttgtactttattgcaaggccaattcttttcacaattttccaagtgtctatttgctcaacagaatttatagtaactcggtcatattgtggcccacggtggagtgtcccttgaaccctccaaaatctaagctatatttgatggcctgttacacatccactacttcttttcgtggtttctta

SEQ ID NO: 253000 - DNA, 456 bp, Glycine max
  unsure (1)..(456): unsure at all n locations
agctntaaatattttattacatgttattcattatgaatgtaagacataatgaaggatttctatagatattctattacttagatttcaatgagacttatctctagaaaattgcttttgatcattaagattttatgaaattgtggattcatggtaggtgcatccacagtcaagcatagtaaggattttgcaagacatagtgaagctggttgggctctacactatgcaacataatggtgattgtaagttgtgccatgctaattaagagtaaccttagcacgtgtcacaaccaggctggggcaggtaccccactcccatatatgatgctagatatcaccactcatcatatcccattaacttcctaaaggatcatgactgactaatgcccaaacatttttctattataggatctaatttagttctcttttgtaatatccttcactgtggaactgatacatg

SEQ ID NO: 253001 - DNA, 454 bp, Glycine max
tcttcacatagtccgccttgcttgaccttctttatgcttattaacaaaaacattaggcataggcaaaagatcaagaggagttagtgggttaaaaccataaacaacttcaaaaggagaacaattagtggtgctatgaacagctctattgtaagcaaattcaacatggggtaaacaagcttcccaagtttttaagttcttcctcaaaactgtcctaagcaaagttcccaaagtcctattaacaacttccgtttgcccatcggtttgtgggtgacaagtggttgaaaataacaatttagtgcccaacttgctccacaaagtcctccaaaaatgacttatgaacttagagtccctatcactaacaatgctccttggcagaccatggagtctcacattctccttgaaaaacaaatcaggcacatgggaagcatcatcaactcttttacatggaataaaa

SEQ ID NO: 253002 - DNA, 452 bp, Glycine max
  unsure (1)..(452): unsure at all n locations
agcttccgttttaaatttcgaccatctcgatatattaccggactcatccggatatccatttataaagttattgtcaattcaattttctcagagcttcggatcttaattgtgagcgtctcattatattacgggactcattcagacatccgagtaaaaatttgttgtcgtttgaatttgatacgagcttcagttttcaatttggagcatctatcgataaattatgacactctctcgggcatccgagtaaaaagttattgttgtatgaattttctaaaagtttccgttttcaattttgagcgtctcgatatattacgggactcaatcagacatccgagtaaaaagttattgtcgtttgaatttgatatgagcttccgtttcaatttggagcatctctccaanattatgacactctctcggcatccaagtaaaaagtattgtcgttgaatttctaa

SEQ ID NO: 253003 - DNA, 455 bp, Glycine max
  unsure (1)..(455): unsure at all n locations
ctgagaattntcanatgagaataactttntactcagatgtccgattgagtcccgcaatatatatcaagacgctcgaaattgaggaaagaagctctgagcaaattcaaatgacaataactntttactcggatgtcagattgaattcggtaatatatcgagacactcgaaattgtgatccgaggcgctgagaaacttcaaacgacattaactttatacacggatgtccaattgagtcccgtaatatatctagatgctcccaattgaaaacggaagctcatagaaaattcaaacaacaataaaattatcaaatgatgtccaactgagtcccgtaatatatcgagccgcaacgaattgaaaacggaagatcgtaccaaattcaaacgacaataactttctactcggatgtctgattgagtcccgtaatatatcgagatgctccaaatcaaaacggaagc

SEQ ID NO: 253004 - DNA, 451 bp, Glycine max
  unsure (1)..(451): unsure at all n locations
agctntggtggattggtcttcaccgacaaaaggatcgaagcgggtctgaaaagaggcaaatttgatcatcctactttgatgagtgagaaagctggggcaatgaagaggatgagaatgagggagaaacccttgctatgactgccattcctacacggtcaaatttcccatcagcccaacaatgtcatcgctcaaccaatatcggcccttctcattacccatcacccaattatccacaaaagccatccctaaatcaaccacaaaacccacctaccacacaaccaatgctaaacaccacctttagcactaaccaaaacaccaaccaaggaaggaattttgcagcaaaaagcctgtagaattcaccccaattctggtgtcatatgctaacttgctcccatatctacttgataatgcaatggtagccataacccctgctaggtttcctcaacctcca

SEQ ID NO: 253005 - DNA, 444 bp, Glycine max
  unsure (1)..(444): unsure at all n locations
tatttaccattccctttagccaaattgcttcctcaactacttcagctagtgccatgtattctgcttgagttgttgaaagagcaacaactgattgttgatttgctttccaactgattgcagttccaaacaaagtaaacacatatccagttaaggatttccttgtgtctacatttcctgcaaaatctgcatctacatagcctgtgaatgctgcctcgtgtgctatcttcttgtaccttaatccaactttcaaagctccatttagataccttagtgtccacttcaaagcctcccagtatgcactgccaggatctcccatgaacctgcttattatacttattgcatgagccaagtcaggtctgctgcaaaccattccatacattatgcttccaacaccactgacatanggtgtttgatccatnttagacctttcttcagctgtctctg

SEQ ID NO: 253006 - DNA, 457 bp, Glycine max
agcttaaaaccttcagacaaataatctcttttattttcttttctaccaaaaccctgaattcgtttccatatgaacattcaagattaactgaagtttcaatcttgtcataaaaatcaatagaaaacggatatgacaacttaatctttcttggcataataacaaaatacaaatgcattagaatacaacaaatgtatgtaactcagcgaatctgcctcaaattcacattgaaaagtctttttttatatgattgatcatatttaggaacaaatgcataaaaattcatattattaaaaaaatcataaaaatttattaaaaaaagatagatataacttttaaaataatttacaaaaatcaaccaatatttaattagatgatgcctttcatttaaattcagaagacaaatactaacgcgtgggaagaatgaagagtctgtagaggtttggaattaacagggccg

SEQ ID NO: 253007 - DNA, 444 bp, Glycine max
  unsure (1)..(444): unsure at all n locations
ctaaaaagattatatgaagcacgcattagtatttgtatgcatattatactacattaactcactactatttactattntataatgtttttaatcataacattggtgaaaaaatatattaattgtatttatgattagttattatcgaaaaatttaattgattattcttagtagaatttttccttttaatcatgtttaatttattcataaaatttaaattaaactttatttaataggattgaatccaattttatttgaaccaaggaataattgatagaatgtttacattttgaaaaattgaaaactatgcaaattctattttacaattttcttatttcaaccgacatgtatataataaacctaacatatttgtccgtgtttagtttttaatccgtaaattgattcacagagagaaataaagtcttgtaaaaatagaaactctttttg

SEQ ID NO: 253008 - DNA, 382 bp, Glycine max
ctaacagatcgctctcaaggaatcctaaggttgtcacaagagagttatacggataagggcctaaataaactccacatgaaagataggaaaccaagacatacctccgtagccaaaggagacaaacttagtctacacaatgccccagcaatgaccctgaaagaacaaagctgcaaaagagtccttatgcgtcagtagtaggaagtctaatgtacgctcaagattgcacttctcccgacataacatttgtagctggagttggaggtacatatttgggtaatcctgtaatgcagcatccgaaagcagcaaaacatgtattgtgctacttaaagagaacaaaaggatgcctgctctcttattagaaatatgagaatctatagatcat

SEQ ID NO: 253009 - DNA, 440 bp, Glycine max
  unsure (1)..(440): unsure at all n locations
caagcctgatcctattaacactcataagacatgtttctttaaatctaacgaacacatctattcgaaaatatggtccttgatacgatcaaacacgacggacaacaacaattgctctctcgatccaataaaatccatgaatctatctatgatggcatactagaaattttgttgaagtagataagcaccttatcttaattgaaatcacacataagttgaccaaacacctaacaactccaaataaaaaataatgaagtatatggaagataaattcgaaaagggtacaattttcgccaaagaaattcctaatatatggatatagaaccgaatgtttgaacattttattctatgaaaaaaaaaacaatntaatgagataattgataacgaacatataaagtttcctaaaataatcattagaactgattatttcttacacataataa

SEQ ID NO: 253010 - DNA, 414 bp, Glycine max
  unsure (1)..(414): unsure at all n locations
aacttcactccacggtttatccttcactatattttaaagtgcaaaaactatataaaattaattggtgtttaaaaaatacaaatgaagcagcaacntcacagcacaattgaggatagcatgaaagcaacctattatgaaagacaagtcgtttctttaaattgacactgcacgatcaatctatgataactattgagataaatatatccaaagagtgcatagagacatatatatgagcgatgagttgtgtgctttatgctcattagggctttgcataaaagaagatcgcagttatttgtaaaaacaagcagagtatacgaaaattgacaaaaatgggctctgatgagatgcatgaagggattgataaaagtaaaacatgttattgtcctacggaacggagaaaatggaaagagagga

SEQ ID NO: 253011 - DNA, 487 bp, Glycine max
  unsure (1)..(487): unsure at all n locations
cgtgaccttnatactaagctttaacaattatgattttcggaaatgctccttgcttggtctaatgctcatcgaatatttcatcanttttttttcttcagccaaaaaagaattcgtattggtttttacgaaacaaagtcatgataccgagttattaccatttcattttcaaaaatcatttttaagataagtgttaagacatctaatacatttgatagttatttatttatttttactattagttgattgaataatatggttggttgagtatgttatataactttaaatacgggtatttaatatttttaaacttattgaacatagtttacataactaatgtttaaaaaaaactatatgatgtatgaaaattaataatcttaaacaacttcaccacatctctctaacaatacaattaagtgtcggcagtgaactcagtttgaaaacttgagttgtttcaagtgtcaacttttgcgggcttcgccaatcacat

SEQ ID NO: 253012 - DNA, 470 bp, Glycine max
gaccataaatactagctgctgtggagaagaattcttctataatgaaggttatttgaacaccctgagattccacagaaccttaattcccttcatataaagtgatataaaacattaaaacacacacacaaaccacaatacaaaaactatattacctgccatgcaaatcgttttccattcatatcaatcttaaaatctgtcataaagtgatacaagtaattctagaaactctataagatatagcaaaatatgtcaataacagacaagtgatctcaccatcatggtaaaattgaagaataggtgatgaaggatcaatcatcaaatccctatatttttcaggaagtgcacttgaactgttacaagaacttaaccagcatcagcacatgatgcatgatataatagatctgacgacaggagagatgaacaaaccttgaagcatgtatggtctccattaactgatcaaatggtttaaa

SEQ ID NO: 253013 - DNA, 299 bp, Glycine max
  unsure (1)..(299): unsure at all n locations
atacagactaactcactataccgtgatgtaatatatgaatcccagcttacttttatggctaatatccctaaacatggggatagaaatataatgtcggaaaagctctattcttacaattttttaaagggggaatgtnttaagcctgaagatggcttatcttgaagcttcaaactttgtaacccaaaataaataaagaattatagtactccgggtaattttattaatattgatcagcaatcctatctggatgcatatntcgctcctaattatttacttaaatatactactccgggtaaaga

SEQ ID NO: 253014 - DNA, 457 bp, Glycine max
agcttcagtcataagcaaatcactcgtctgttctatatgattccttcaggcctaagtaaacaagctcgcctgggcaagttccccctacactagatggctttttctataaatagtcattcaagaagaagagaaaacacgatactagcctaaaattagtagaaaaacgtataagaagaatgagaggaggaaaagtggaaccgaagtgctgcaaagttatgaccgtgaatcacttccttcataatttctcttgttagtcttgtgccctgcacaatgatcaattagtttttctaaaggattggatataatctttgtacccttatgtatctcttttgatcatatatatgtattaatcttttctagtcattgttggtaatttctttctactcttaatgtctgattctatttgatgactagtgtcatgaaattggatttaagtaagactggaaagtaatcttat

SEQ ID NO: 253015 - DNA, 427 bp, Glycine max
tactcagctttggagttccagagccaattcgtcctcttctttagtccattcttcttctggcttcaattcatcagtgggctttccttctgtgtccagcatcttgggatgttcccagcctttgatgacagctttccaggttctgctatccagtgatttgaggaaggccaccattcttgctctccagtattcatagttgcttccatcaaaaattggtgagctgttcactggtcctccttctttctccatgttcatcagaatttatctccccagatctcactctgtgatttcgagtgttggctctgataccaattgaaattctgataccaggggacagatgtcgtacaggatgtcacgacatcacgcttcagaacatgcagattgtatgtgtccgtatgaacagattaaacaagtaaataacacaagagaa

SEQ ID NO: 253016 - DNA, 452 bp, Glycine max
agcttgaaggcaaactggatgcgctggtcatcttggtaacccagctggccttgaatcagaaatctgtacctgtcgcaagggtttgtggtttgtgctcctctgctgaccaccatacagacctttgcccttccatgcagcaacctggagcaattgagcagcctaaagcttatgctgcaaatatttacaatagacctcctcaacctcagcagcaaaatctaccacagcagagcaattatgacctttccagcaacagatacaaccctggatggaggaatcaccctaacctcagatggtccagccctcagcaacaacaacagcagcctgctccttccttccaaaatgctgctggcccaagcagaccatacattcctccaccaatccaacaacagcaacaaccccagaaacagccaacagttgaggcccctccacaaccttccctcgaagaacttgtg

SEQ ID NO: 253017 - DNA, 446 bp, Glycine max
  unsure (1)..(446): unsure at all n locations
ngaacgagaactagatgccttggtcaacctagtaactcagtttgtcttgaatcagaaatctacacctgttgcaagagtttgtgatttgtgttcttctgcagatcaccatacagatctctatccttctttacaacaatctgaagtcaatgagcaacctagaacttatgctacaaacatttataatagacctcctcagcagcaaaaccaacaacaacagaataattatgacctttcaagcaatagatacaatccaggttggaggaatcatccaaatctgagatggacaagtcctccacaacaacaatagtttgtccctcctttctagaatgttgctggtccaagcaagccatatgttcctccttcaatacagcaacaacagcagtcacaacaaagacaacaagcaactgaggctcctgctcaaccttccttagaagagntagtgagac

SEQ ID NO: 253018 - DNA, 455 bp, Glycine max
agcttggtaaacactatttgtgtctcattattgtacaacaaaccacacaagagttatagctttagtagtaagagtatttgcatattagtctggagatggaacgcgacacactaacatgcttttatttaggacctttttgctcataaaaaagtgcccaatttcatatgctttgtcctggagtgccaaacaagattgtgtgacagattgtactaaggttgtaatagtagatctttggagtctgaaaaaactcagaagagattgaatccataggatttcagatgcagtactcagcctcaattctggactaggccgctaaattttgtttcttgagccactataaaattaaattcgggttaagatatatacaagcacctaaagaggaccttttatcaatcatctattaatgaggcctagtttgcatcacataatgcaataagagatggtcgttaagtatg

SEQ ID NO: 253019 - DNA, 466 bp, Glycine max
  unsure (1)..(466): unsure at all n locations
acacataaaactcagctgatcnacaaaccaaactggatgggtgattgctttgtcatcatgaccatttccaaaccaaccattgtctcgattcattcccttgcaccatattccctttcaaactcattggattntcactcatggaaaccctttgagatgccccctaccttgttatcaacatcaccaaagcattaatcaatgacaataataaaaaattgagaaccaagttgaatgaacttgtgaacaaaggaagggtggcaacgccattccaacagaccacgacgtgggagttgtcacaattagagacagcatggaacagacaaagaaggatgagggtttgatattggccagttgcaaaatggtgaggattcactgaggatgcctcaaggcacataagttgtcttcatcatcacgtctccatggagatgccactgtcattgccatcggtgacaccatagtcagatctggt

SEQ ID NO: 253020 - DNA, 454 bp, Glycine max
  unsure (1)..(454): unsure at all n locations
agcttcctgatcatgagggagctaacaaaaattttcatgcaggtggaccttcttctagtagttctgacttgcagcagcctcttatccctcttccatttccacctagagcaattccaaacaaaaagatggaagaagtggataaggagatcttggagacctttaggaaagtagaggtgaacatacctctgctagatgccatcaagcaaattccaagatatgccaagtttctaaaggagttgtccacccacaaaaggaggctcaagggaaatgaaaggattagcatgggtgttgtaaatttgaatttgagtctggttctgattttctgggtgttgtaaatttgaatttgagtctggttctgattttctaggtgttgtacctcttgatgttgattntttagagtcagaatgcactaaccatgttgcaggaagtacatatacttctgacttactttatg

SEQ ID NO: 253021 - DNA, 455 bp, Glycine max
tcggaagaaagtgatgaggtacaagccctaaaggcaaagcttgaaagagcccgggtagtcaaagagaagttcaagtccatagccatcaaagtctgaagagagtatgatgaactaagggacgtcaatatggccaccgatgaagccatggaatgagaaaccaagaaggcccgaaaggaagaacacgaccaaaacaagttttgaggggctttatagggcagcaatagtgagctcaaacttcgaagaggtgaaaggaatcatcatgggtcaaaggcatgatctggaaggacgagctaaaggcttgccttatgtcgagaagaaatttgtcccaacagttaaagtgagactgaagggaatatgtgggccatcatcgatgagtgcaaagagaagctaaatctatcagcgactcacgagcaaaggctagaggatgagtacgccaagatatcagcagaaaggga

SEQ ID NO: 253022 - DNA, 457 bp, Glycine max
  unsure (1)..(457): unsure at all n locations
agcttgtgttttaaccttttaggaaagttttattttgttacctttgatttcatattgagggtgtgtggttggcatgtagggtancatcaaccatagatgctgttttgctttcacatgcggatacacttcaccttggagcccttccatatgccatgaagcggcttggactctctgccccggtttattcaacggagcctatctacatattgggcctcctcactatgtatgaccagtacctctcatgaaaggagaaattccatgctggtttgtttgattttttgttgtaggaggaagattttttgtgctcggtggtttgtaggataggaccggaactataagtactatcgtcggattcagaaacaggaagtaaaggaagcgttgaaaagaatgagtaatggtaaggcggtggtggcagacaacatacctatngaagtgtggaaaactcttggagatagag

SEQ ID NO: 253023 - DNA, 459 bp, Glycine max
  unsure (1)..(459): unsure at all n locations
taaatgaaaaaacaccaaactaagtgaacgaaaaatatatttattctttaaaagttactcttagttctctaactttatactcaatggacactgattagcatttaagataaataaccaaagtactccataaagttacactccatttgggntaaaggaaaaaaatgagagaagaaagataaatttaaaatttaaattgagaaaaaaatgagagaaaaaaatatttaatttttgtttctactggtcaacatatatcttctttttcttctctctttctattcaacaatataataggtaatgtttggtttaaataaataaaatatatgtgaaagctaattaagattaaaaaaccaaattaaaatagaatataaaaatatgaaattcacaccaattgtaaaattgtcatctcaaatacatccaaatataaattaatcaaacactaccttaaaangtacatcctca

SEQ ID NO: 253024 - DNA, 446 bp, Glycine max
  unsure (1)..(446): unsure at all n locations
agcttctggtttcaatttcgagcgtctcgatatattaccggactcaatcagacatccgagtataaagttattgtcatttgaattttgtgagagcttctatattcaattccgagcgtctttaattattaaatgactcaatcggacatttgagtgcaaagttactttcgcttgaatttgctcagagcttctgttttcaattttgagcgtctagatatattacgggactcaatcggacatccgagtaaaaatttattgtcatttgaatttggtaagagctcctgcattcaattttgagcgtctcaaattataaaatgactcaatcggacatccgagtcaaaagttattgtcatttgaatttgcttagagcttctgcattcaattttgagcgtctcanattataaaatgactcaatcggacattcgagtcaaaagttattgtcatttgaa

SEQ ID NO: 253025 - DNA, 465 bp, Glycine max
  unsure (1)..(465): unsure at all n locations
ntgagcaaattcaaacgaataataaattttactggatagtcctgttgagtcctgtagtatatcgagacgcacganattgataatagaaacactaagcaaattctatcgacaataactttttactcgaatgtccgattgagtcccgtaatatattgagacgctcgaaattgaaaatacaagctctaagcaaattgaaaccaaaataacctttttctcggatgtccgattgagtcccgtaatatatcgagacactcaaaattgaatacagaagctctgagcaaattcaaacgacaataacttttgacttggatgtccaattgaatcatttattaattcaagatgctcgaaattgaatacagaagctctcagcaaattcaaacgaccataactttttactcggcagtccgattgactcccgtagtatatcaagaatgcatgaaatgaacatagaaactctgagcaaat

SEQ ID NO: 253026 - DNA, 451 bp, Glycine max
  unsure (1)..(451): unsure at all n locations
agctnttgaagctggaatcatttatcctatctctgacagccaaagggtgagtctcgtccaggtagtcccgaagaagaccggcctcacagtgatcaaaaataagaaggaggagctgattcctactcgggtgcagaacagttggagagtctgcattgactataggaggctgaaccaagttaccaaaaaggaccattttcccctgccattcattgaccagatgcttgagcgcctgacaggtaaatctcactactgtttccttgatggtttttctggttatatgcaaattactattgctcctgaggatcaggaaaagaccacattcacctgccccttcggcactttttcctataggaggatgcctttcggcctgtgcaatgcccctggtaccttccagcggtgcatgattagtattttcattgacttcttagaaattcgcatagatgtgttcatg

SEQ ID NO: 253027 - DNA, 459 bp, Glycine max
  unsure (1)..(459): unsure at all n locations
ttcatgatntaaaagaaatagatctagattggtgatttatggagagctaacttcccatgctcctaaattacatgtaaatggaggctactctataaacaagcaagaagacaacaataagaagggataaactcctccgcacctcaacttgcacacgaaaaaaaatgaagaatgagtggcttgaagctctaaaactcaaggaaccaagcaaacaaagcaataactctttttctcttctcctccaaaagtctaaccagagacgaaaacaaaaatggcagtagtttatgctcaaatggagtggatttggagtgttaaacaagaatataacaagccaatatttagggaattcaagcactcattggtccctgaggctgatagtgcagttcaagcttcctttagcatgttttacttttgaaattntaaccatagattgctaaagtagaattaggcataagtggcaac

SEQ ID NO: 253028 - DNA, 421 bp, Glycine max
agatcttagagtcgctcatagcttatttatccatataagccatcgcatcactcacccaatactacgaccagcccttgagatgcttcacgttctgagacttccaattagtaccaaccatttgaggatattctacgatgtcctctctggggaagaaaacatatctttctccgggtgtctcccctctttgagcacatttgtaactgtggtcaaggattcagtcagaggtttggaccgcataaaacagactctgaacggcatatcgggcctaccacggaggtacctacaagacaaggcgaggggcttggccaatcgaggagatcgggtcccgtttatggatgtgttagctttgctaacttttggggttgtcctcttctcaaatgtatatggtgtggtggacctatcagcaatcgacgcttttctt

SEQ ID NO: 253029 - DNA, 449 bp, Glycine max
  unsure (1)..(449): unsure at all n locations
atcttatcaaaatttccctccctttatgattctgagaattggactggntcctgcttactttcttgaaaaccatttgtgttcattgagtggagtttttatgtgtgttaactttatgatgaaatgttctttgagtattgatgtgctaactttactcagcatcccttcttattctggttttagacttttagcaatgtatttgaaattcttcttttaaattcacatatcacacatcacagcatcaacacccttcatttgaagaggtattgtttatatgagtgagtgatgaatgctgattatgtgccgataaaattattcttaatttcttatcttatttgatctcttgaaaactcctccagatctttaaaaagtgacatatcaaagttattgctcctacaagttgtatggtgttttaactcgtatggcctttacaaaatatataatcctactat

SEQ ID NO: 253030 - DNA, 475 bp, Glycine max
  unsure (1)..(475): unsure at all n locations
ntgaccttcaatttcgttgatggaatatgaaatgagctttggtctgttgtgctgagtgtttcatcaatgattctttnggtgatgtacatacacatgctagtgaaattaatgattcttttggcaatgtatacacacacgctagtgaaattgtccaccatttagatgtggatgcttctataatgaaaaattgattttcttcactattatttagttaaagaatcaaatataaacatctatcttttggctacatcactacaacgagttttcaattgctcagactctaaaagctcaatcatattaactgtttaagataatttaataggacatgctccgtataaaacataccacataacgagttgagtgtgntagacacttgagacatcaattaaaacaagcatggagacagacaaatgtatacaagatttagttacaacttacaatatcaaccggactgcataaatgaagtaagattact

SEQ ID NO: 253031 - DNA, 473 bp, Glycine max
cctgaggcatgcaagcttgaactcgtaagaaagatggtggcctatttcgtttattgccagagttctacattcagtacgaaccacacggccccatgaagacacaattcatggttgactctttggaagaatttggttgaaatgacacaaccaccctatactggtggaccctttatgttgacggtgcgtccaacataagaggaagcggggtagggatcatccttgaaggcccacacaatatcacactagagcaagccctcaagctcaacttcagagcctcaaataaaaaggtagagtacgaggcgctcattacaggtctaaagctagcaagagaagtcggagccaagcgactacgatgctacacaaacttgaaacttgtccaaggacaagttgtcaacacataccaaactatggaagtagtgctgcccaagtactggtacatagcatagtctctcatcgacaacttttaatgtttc

SEQ ID NO: 253032 - DNA, 466 bp, Glycine max
  unsure (1)..(466): unsure at all n locations
gatgtcgaaagaatcacatgtttgtcatcatcaataatatggagaatgtgaatgtatgtatacatgattttgatgatgccaaagaagaatcaaacaaggctgcttcaaatgataagcatttgcttcaagaataattcaagattgctccaacaaacaaagccttgtttcaagattcactaaagaccaagtcttgccttaaaacaaagtgctttcaagacatgcaaggctctggtnatcgattaccagaagacagggttgagaaatagctgttgaaaaagggtttgaatttgaattttcaacatgtaatcgattaccatatgtctgtaatcgattaccagcaacggaactttggaaattcaaattcaaaagtcataacccttcaaattataactgtgttatcgatcacacaaacattgtaatcgattaccagtggaaagttttcagataatctgccgacagtcacatc

SEQ ID NO: 253033 - DNA, 439 bp, Glycine max
  unsure (1)..(439): unsure at all n locations
tgcaagcttgagtcttatgcctaagcaacactctatctctctattttagctactaaaaactgttcttaaacttcacaacgacaggcacctatgcccaagttaattccatacacaaaaaattagaatcgtgctcaatgccatcgaggcattccaccgagcacttgatgggcgcacccttatgcatgaaaaagcggggaatgggggcaatgtgacatgctcaatcattttagaacacaaccttggcctaaagctatagtctacaactccctatctcaacaaaaacaagcacaaagtcaaagataaatgcctcatgaatttgagcaagaatgaacaaataaagcatcanaacgcaacaatggtgagccacagagcaaatagatggcgcacttacttgtatggagagaacaaggatacccaaaatggaagcaaagcacaaaaa

SEQ ID NO: 253034 - DNA, 410 bp, Glycine max
  unsure (1)..(410): unsure at all n locations
cgnctgctcatctcttaagcaacaccatgtgaagaccttttctattatgttctaagcctcctacacctatgtggctacacttgatctaattattgcaattacacaatattcacgtctagaataatcccataagtaaaacaatggtgccttgacaacatcctctgtcaaatgccaatagacctaatactcatagggctagatgatgactcacgacaaaaattaatttgtcctttgataactccctcactaggtaatggagtacagctaccagatttctccacccccttacttttatataattttgcctccttctgtcgtgaaatatgcggcccaaatgcttgaatagagcccaaacccatataaagtagttgcgttctcacggatggatcaccaattgaataaggccctca

SEQ ID NO: 253035 - DNA, 463 bp, Glycine max
agcttggtgaagagttctcgtattgaaggacataattgtttattggaacattggcaatattaagggtattagttgttgtcgtggtcatgtttttttcctcaatgaatatatgaaaaactttttattttctataaattaggaatctagatcttttagttttcattcttattattttgttttccgccccactgctaggtaatttgtctggtaattggatgaggataatggcatcatgacataaaatattagccaatgacaatgttattaaaaatgtcatatcatcacgatgatatcattaaagacaaaaaaataatatatatgaaataattaaaataaaaaagtgatgtatttatggaggttaatattgtattcttaataacattcagttaataattcataatttgtcaacataacatgttagtaatgtcttacttgaaagaaaatagactactatataatatac

SEQ ID NO: 253036 - DNA, 172 bp, Glycine max
  unsure (1)..(172): unsure at all n locations
aatataatattaaatattactcaaatcacattaactattcattatttaatataatttgatttcgcgaccncttactgtcctaatctattattataatttaaacctctcaactaaacttatgtaattattatatgtagtaacatattttaaaaataaatcttatttttattaa

SEQ ID NO: 253037 - DNA, 445 bp, Glycine max
agctttcactgttccctcgaaaaagcacatgtattatagcatcattgtattttacaaagttcacagaaaaaatggcattggttacagaaacatcaaagggtaaatcaacatcatcacaatcacaacaccaattgcaagaaaaatgtctaaattaaaataaaattactattgcatagtatttacttacctgagaaagtcccacaatgctgtaaccctgacctagatcactcatcttctttaactatagaataagatggaaacaaaaactcatgcaaaagcaaattatgattaaactactggaacagaaaattaccaaacaagttcaccactttctcacaggcaatagatgtctgcatggacagagtaaatagatggttactaaattgtcaaacaccaaacatcagcatcatggaaacacaacattcaagaatcacctgttttaata

SEQ ID NO: 253038 - DNA, 475 bp, Glycine max
ccataaaactcagcttgaaaggtatgtggttgttattgcaataccgaaagaggtatacatagaaggccttgaagactgcaaaagttatttgcatagcaggattcttttggcaaagggcgtccctcctccaagagtttctgatttgcaagccaaagatatggcatcctttgggacgttggcatatggtcccaattggaaaaggctattgcaattcttctttctccttagttcaagatttacgtaaggtatggtggtagggatttggaacctaaaccctagcactctgaggcttttcaactgaaccccgaactttaaccctaatttggtgaaacaaaccagtacccagtgttgtatttgaattctagggttaccacaaaagtatagagacaagctatcctattctccatcgcaataggtgttgggatcccctctgcacagatgatgcagtgaatagtcgtgcatttggacgctatgc

SEQ ID NO: 253039 - DNA, 461 bp, Glycine max
  unsure (1)..(461): unsure at all n locations
agcttgtaggattatggagtacctatcacatgtggtactaggtggcggncgggcgatggtgcaaaataactctccacatccacaaatcacgcataaacccagcatccccagttgcccaccttcactgagctcacgtactcccacgtagcccttatcctcgttcctctcaacactgggtccccatcaatctctccaagcttccacaacatccaagaaatacaacatccaatcatcatgaactatcaaagtcaagaaaatagggcaaaggcagaaaactctgcccaaaaacaccaaccaatatcacagcttttcacactcaaataccccagtaacattctcttcgctccaattcgttaaccgttggatcgactcgaaaattttactggaagtctctagtacataagtctacattgtgaaccgtgggatctgctaganaacgtccagaaccaaatctgtactac

SEQ ID NO: 253040 - DNA, 411 bp, Glycine max
taagatgaggaagtgttgaagggtgaaacttcctgcttttattggtgaccacagagtggtacctggagatatgtcgcgggggtcaggagaccttggggacgtcaggtggggtgctattgcccaaaaccaagcttgaccaatcccgaaccaacccgggcatagtcggtcagtgagaacctgtgatgtacctaaacaggcgagctcctggcagtcaacagataaaaggaacaaagaccacaaagcaaagaggcttgtggtggctggccagctgtgaactttgattgatatgtgagatatggtctctggtaatcgattaccaagggtgggtaatcgattacaaggcttaaaaatgaagacaggaggctaagatggtctctgttaatcgattaccacggggtgtaatcgattacc

SEQ ID NO: 253041 - DNA, 438 bp, Glycine max
  unsure (1)..(438): unsure at all n locations
agctngaggaaggtattagcacctcttacatttgtctcgaaggacaacagcctatttcttagaattgtggaaatagtgttatcttaacttttagttctttttattttttgaggtcgacaaaagcagggcttttgctcctacgtaccctcctttggagaggaaatcagacctacgtagttctttcttatgcatgaatcaagcgattctttttacttgaggggtgattattttaaggcgttggaccttaaaaatgatcttttttacttagtaagaaactgaaatgataaactttcaaaaacctattttttgtggacgagcttgactaggcgagtttgattttagccttagtttcactttagttattagtcaattcaattaagaatgagaaatcccaaagagaaaacgtccgattgatttttcgctttattttactaaaag

SEQ ID NO: 253042 - DNA, 464 bp, Glycine max
  unsure (1)..(464): unsure at all n locations
tatactaagttatggatattggggattgatcntatatgtttgagaaaatggactgaaaaatacataaaacattttcttaaaaacagtccactcactaagcgcatatcacgcgctgagcgtatctcctccttgcgctaagtgaggttagcctgtgctaagtgctcaaacccttgcatctcaagctgattgggcatgctaagctagccatgggtgagcttagcccaattcaattcgatctgaattgggctaagggagagtacactcgctaagtgcattgtgtttgttggctaagcgcgacgtacccacgctaagcccaattccttgccacctaaaattgcgctaagctagcaagcactcgctaagcgcataccccctctgtatacaagatgaagtatattcgctaagctggccttgagccaagcttagcgagagttgcatgttttcttatctgcacaactcactta

SEQ ID NO: 253043 - DNA, 454 bp, Glycine max
  unsure (1)..(454): unsure at all n locations
agcttctattntcaatgtcaagcgtctcgatatattacgggacttaatcggacatccgtgttaaaagttattgtggtttacaattgctatgagcttctgttttcaatttcaagcatctcgatatattacgggttttatttagacatccgagttaaaagttattgtcgttggaatttgctcagagtttttgtattcaattttcagcgtctcgatatattacgggacttaatcggacatccgagttaatagttattgtggtttgcaattgctatgagcttctgttttcaatttcgagaatctcgatatattacgggattcattcagccatctgagtaaaaagtaatcgtcgtttgaatttcctcagagcttctattttaaatttcgagcgtctcgatatattacgcgacttaatcggacatccgagttaatagctattgtgggttgcaattgctat

SEQ ID NO: 253044 - DNA, 460 bp, Glycine max
caacatcagaccacttccaggtgctggaactactccactttggatttgatggggcctatgcaggttgaaagccttggaggaaagaggtatgcctatgttgttgtggatgatttctccagatttacctgggtcaactttatcagagagaaatcagaaacctttgaagtattcaaagagttgagtctaagacttcaaagagaaaaagactgtgtcatcaagagaatcaggagtgaccatggcagagaatttgaaaacagcaggttcactgaattctgcacatctgaaggcatcactcatgagttctctgcagccattacaccacaacagaatgggatagttgagaggaaaaacaggactttgcaagaggctgctagggtcatgcttcatgccaaagaactttcctataatctctgggctgaagccatgaacacaacattgctcattcacaacagagtcacac

SEQ ID NO: 253045 - DNA, 461 bp, Glycine max
  unsure (1)..(461): unsure at all n locations
agcttataagaaacaaaatgcctcaatcatttctcaatatgcatgtgaattaggaagcatcaacaagaatcaagccaaggctattgtgcaagcaatcaatggggcaaaacacaccaaatgattatgatgatgtatggctcaaattctcacaaaggtaaactcatcactttcgaattgagctctcaaaactatcatgacatgtagaggagaatcaaagatttcaagtcacaaaatgtcaaacacttttattttcaaaacaattacccatttcttgaacatatcctataattcaaagaaaaacatgcanagtcgtacatgcacacanaaatgacccaaaatattaaactagaaatccgacaaaactaacaacattaacaaattaacacaactaacanattaacanaaccgacanaactagcanaaccaaagaacacttccccccccatacttaacaacacata

SEQ ID NO: 253046 - DNA, 467 bp, Glycine max
  unsure (1)..(467): unsure at all n locations
tcatgatgaatcaagattgattcagagatgttctgatgatatctaatgtgatgaccaaaagctcaaaggtcaatcaaagaatgagttcaagatgttcaagatagaatcaagaacacttcatgattcaagaggaaagttgatttcaagaatcacttcaagattcaagaggaaagttgatttcaagaaccaagactcacgattcaagaatcaagagaagacttaatcaagattcaagattcacgaatcaagataagacttaatcaagataagtatgaaaaggttttttcaaaaactgagtagcacatggatttttctcaaaacatgtttaccaaagagtttttactcttctaaatggtcctcttgaccagacatgaagagtctataaaagcaacgctctgtgttgtatnttaaaacaatccaatcaatttatacaatccttatcagccttgatctctntgacttcttct

SEQ ID NO: 253047 - DNA, 453 bp, Glycine max
agcttataataagaaaatgaataattttttttttgttggagacttactttggaaggttatcctgcccatggatagtaaggatcgagccttgggcaaatggtccccaaattgagaaggaccgtttaaaataattcagatctattcgaatggtgcttatgagttagaggagctaacccctcagaaacgtactttgagcataaatggtaagtatttgaaaaaatataaaccaacactgctcgaagttaaaataagcatagaatgagagaaatactggaaacatagaaatggcgataacagtaaattgccacaaaagggcctgtgtcagtattacatcaaaagtagaatcgaaatacagaattcgaaataaagaaattataagttctactaatgcatgactaagtcctcatatagtttcttcaaggtggccatctctttgcttaagacctggtcagc

SEQ ID NO: 253048 - DNA, 439 bp, Glycine max
tatagataaagtgaatgaacactgtaagcatttctctctttctgtcataagttagctgctcttatttgtctgcatctgacaatagataaatccgtccgtggaatctgaaacgctttgcatcaccagataggtaatattcttgccacgcttgtgatcaatatcgacggacactaacctgtggggtactaaatggatggtccaacgctctcactttgttgagcgaataaattcttgcggtctatctctttgatctaggtcatgtaaaacatcatacacaaacatatgttaggttgaagaaattcatccactagttctccctacttcttaaatggctaaccatcctgctctatacctcgtctgactctagccctgacaatgccaagtctaccaactctccacttttactattacttgcattgcttataaagaaaaacaataa

SEQ ID NO: 253049 - DNA, 454 bp, Glycine max
agcttgttagaccatacatcaacaggggtcttatattctatagcaatggatggcgagcgattcatatgataacatgttataccgactgtctcacgagataacatgtggccatgacgcatatgccatagggaattatcattggacatatggctactagattgtgaaacattagagacaaaacctatcacactggacccatgatggatgtacaaattttcttgtttggttccttgcattaccacatacttctctttccctctaatttgtataactccaccttcaacctagcaagaaaaaccttgtgaatccatgacatccacatatacaagatttttttaaagctttggaatgtgatgaacttcagttaaggttctaacaacaccatcatgcattctgatttgtacaaaacctataccgacatacttagtaggaacatcgttacccatgaggacat

SEQ ID NO: 253050 - DNA, 456 bp, Glycine max
  unsure (1)..(456): unsure at all n locations
actatanaaactcaagctagaagcacagttgagggtgttatcttacttttgttatcctgtgttcacaccttcgctgtggatgaaccaattatttcatctccctgagttttattccaattggcactctctttcttcaaattttctggggatgaaccaatttcttcaagctcgctcaacatatattcagcattgacgctatggcattccctccgagtctttcataaaaggagtaccacaaacaagagggggtgctttttcattctctttagcatctttctgaccaaacaagtcagagaatcaactatacctgcatagtccttgcagggacatcaatgccgattgttgtgttagttaaggagaagcaccactcgattcactattacatctgaataactataaatgtcactataatntatagttcaacgaatggattatatacccaggaatgtcaataaa

SEQ ID NO: 253051 - DNA, 461 bp, Glycine max
gatgctgaccctgatattctaaatgctcttaagaagtctggtattcatgtgatggtgggtataccaaatgacatgctctacacactatctaacagtatgcaagcagctgaaaaatgggtttccaagaatgtttcagcacatgtctcggtggacatcaggtaaattacccttttgtttctattgattgatttatgtcgagttcaatcaaccattgctttatgttggatatgaatgcatgtaattgagtgattcagctatgtaattctgcgtttcatgttgtggatggactttgttaagccgtgagtttcgaggttttcttgagaactgttattatctgattaaatgattttgagaagtaatggtacagaagaacaattttagaagaaatcattgcaactggaagtggaatactccacggaatcctttccaatgtgttgggaataattagaaagtagaattga

SEQ ID NO: 253052 - DNA, 380 bp, Glycine max
  unsure (1)..(380): unsure at all n locations
aataaaagtaattgaggaagatacataacatagaatgagagtaatgtagtcattatatgtgtccagaacaagacagggaggtgcatactcctgaccgctcccattgaagggaacatctagtagaagataaatttcttgtctcccgggaatcataggctgggaaacttagctctccatatntcatatgcatcataagaaaataacattcctatgaagcgaggttgcttgataatgttctttaattagcttctcacaaaaaaaatgccatgttaattggtgtcccgagaactaaaatcaagaacctctaaaacatattaaatgtacagtgaagattcccgggaaacaaaaaatatgtgtcccgggaactaaaatcaacaacc

SEQ ID NO: 253053 - DNA, 419 bp, Glycine max
ctgagctgcaactggacattaactatatttccaacttttctattttgttcgagcactctagaaaggtctagaacagagtgtttttatgtatctgaacatctcctctttcttcattatggcactttcccttcttctcttccttttcgctccctttgtcagctacacggtacccctctctaggcggtcctcatattctatacgaggtgtgtcagttaacaaatgctctctatattctccaacaaactccacggacttggtttgagaacttcttcattgtcatcgcatctcttaactttcattccagcgattatgatcttgccttgtatagaccactcttcatgagtgtattatactcctgtcatatgtcgaagacctgattatcaagggatgatgtggatcaaatctgactatcagctata

SEQ ID NO: 253054 - DNA, 443 bp, Glycine max
  unsure (1)..(443): unsure at all n locations
tggcttacccatgactctatcaagtagtngaagacaagcaatgttctattgtatgaaagggacacanttttgttagggtatatgcttacttctctattatgtttttgcaatttagcaatatgttctacattggctagggttatcatttgtgcttccaagagagattaaacttttgtacattgattggttgatgctttgctaggagaaaatatagaaatatgcactatgtagtttggcacaccattcgttggtgtctttggagacctcacaacagtattatcttttgtaatggtgcgaagaatttctcaggattgttagcacaagtaaaaatcttatcatggtagtgactattatatagncgtattttacgtcctaacaccttttttttattcttggtgcatagatcctagtctaattcatcttttggaatttcttttttatag

SEQ ID NO: 253055 - DNA, 429 bp, Glycine max
  unsure (1)..(429): unsure at all n locations
agcttcctttacaacaaagagaagagaannattttgattgaagaagtacaagtagtggggatgtctcctccacctctagaacctcataatcactcacagactcatcccatgctctcaagatggcttcctcttcacgctccattctctgccagtcttcgcacaacaaaagctctcaaaactctctggaacttggacctttctcttctagaaatctctaaacatgcaaaagccttgagaaatgcccaaactccctctccattnttgaattcaggcttaaataggtggccttgttggtgcttgcacgcttagcgcaactctggcttgcttagcgcgtgtcataccctaatttcgtccggagattattatttgatgatatacacacctttgatgggcatttcgagatacttggcacccttcgttgcataatat

SEQ ID NO: 253056 - DNA, 462 bp, Glycine max
cttgagagaaaacatactacaagttgtcaccgccacagagataccttctacgagagtgagaccgacagcgagagtgagggtgagacctggaatgagagcgagagtgagaccaacagtgatagtgtcgacagtagttcagtgtcccgagagtgagaaagggttcgcgggagtaaaggtgccagaaacgcgatggagacgagttgtgagcgatatgagtgaagtgcaagaaacataaaaaatattattaataggataatacaacgtcaaattttttcaaaaaccaatgctaatgaagtcacattagcattggtttctaataaatggatgttaaccaactcactttaacattggattttccataaagtgatgttaacaaagtcacattatttacaattatgccatcgcattatcatttacatctgttttctataaaagcgatgtcattctaacgatgttaaaagt

SEQ ID NO: 253057 - DNA, 458 bp, Glycine max
  unsure (1)..(458): unsure at all n locations
gctttctcgcgctaagcgcatagacccctgattgattggctgaatgattcagctaagcgcacatcgctgcgctaagcccaacatcttcactgtaagttgtaccttaagcagtgggcttagcgtggatgatgcgctaagcgccacttcctctctgtgaaaatntatcatagtcgtgctaagcacgccatcctgtgctaagccccagattcattctgtaagttgagttttcaagctgggcttagcgggaaaggatacgctaagcgtcaacatcattctattttgaaatcattggaagtgcgcttagcgcaggtagtggcgctaagcctgaatcactcactgtaagatgaagcttgatgtacgctaagcctcgcatctcaggctaagcgcatgttgcagaaagaattttggtgttgcagaaagcgctaagcgccgctgctgcgctaagccccaaatgctta

SEQ ID NO: 253058 - DNA, 454 bp, Glycine max
atcgtcgatatggatgatactggtcaaaaatcttcggtgccttgtgtatactgccttcttgccatgttgtacttgtaagaatgtactatttttctcacatatatgacatgcatgatggcctttcacactatagaccacttaaatttccatatgctggataggcatttatggtacagaaaaccattgcacgcagactagacatctgctgtagattaccatcccagacatcaacctcgtttttccataatgttgtcaactcttcaagtaacggagccagatacacgtcaatatcattcccgtgctgtcttggaccgaatatcatcatgcaaagcattatgtatcttcgcttcatgcgtaaccaaggagggaggttgttaatataatcaaacaggcctgaactggattcggcttaaacaccctgatatttttggctcatccaaatatgatacaatga

SEQ ID NO: 253059 - DNA, 461 bp, Glycine max
  unsure (1)..(461): unsure at all n locations
agctntggagtttccaagtgccaattcgtcttcttttttagtccagtcttcttctggcttcaattcttcagtgggctttccttctgtgtccagcatcttgggatgttcccagcctttgatgacagctttccaggttctgctatccagtgatttaaggaaggccaccattcttgctttccaatattcatagttgcttccatcgagaattggtggtctgttcactggtccgccttctttctccatgttcatcagaatttatctccctagatctcactctgtgatttcgagtgttggctctgataccaattgaaattctgataccaggggacagatgtcgtacaggatgtcacgacatcacgcttcagaacatgcagattatatgtgtccgtatgaacagattaaacaagtaaataacacaagagaattgtttacccagttcggtgctacctcacctacatctg

SEQ ID NO: 253060 - DNA, 320 bp, Glycine max
tctaaactctatacaagaatgaagctctgataccacttgttatatctagtggcctcagatatcttaagaaggagggggggggtgaattaagatattccaaactacttcccctaattaaaaatctatttcactttttatctaagttatgaattcacttaatgacaatcttcttaaatattaattcaaataaaacacattgaatatgaatatacagccatattcaataaaggagaataacggaagagaaaatgctaactcagttttatactgcttcggccacacccttgggcctacgttcagtccccaagcaacccggttga

SEQ ID NO: 253061 - DNA, 421 bp, Glycine max
  unsure (1)..(421): unsure at all n locations
tatcatcatcctcggcaccggtagccccaaacgccaactgtttcccactgcaatggcacttcgaacccgaactctnggattctgaagccgaaggatccgaaaaagaagaaggagaagcgttcttcgttctctcagatctccgcaacggactcggcgtcttctgaccgaatctcaccgtgattctcgccgagagcgacggcggcgtccgcttctcgagccactccgacttgcgattcggagtggcggtggagacggaaccgctcgcaacagctttattcgacaatgactctgtcgaagacctcgtaactggtcctttctccgtgaaaggaccggaaccagtgacgttcgccattaaaacttaatttgcaaaccctaatttgccaacaatagcatgttcggagacatggtggtatcttctgac

SEQ ID NO: 253062 - DNA, 473 bp, Glycine max
atccttagagtcacctgcggcatagcaagcttgtagaattggtgattgttggctatataatctaagtgggtctgagaagagacaagtttgattatgctgcttcgatgaataaaaagtctggggaaaacaaagagaataagaaggagggaggaacccatgctatgactgtcgttcctacatggtcaaatttcccactagctcaacaatatcaacactcagccaatataagttcttctcattacccaccatcctaccagccaagaatacgcaatcatccacaagggctgcccccaagtctgccaaaaatccgcttgctgcaatccgaggccaaataccactcttaatacgaaccaaaacattgaccagggaaagaattttccaaaaagaaacttgtagaattcaccccaattccggggtcgtatgctaacttactctcatatctactcaataatgcaatggtaaccataatccta

SEQ ID NO: 253063 - DNA, 404 bp, Glycine max
  unsure (1)..(404): unsure at all n locations
ggtgggaatttgtgatagtggatttgccggagatgttgatgatatataaagtactaccgganttgtattttttatgggtgattgtgtttttacatggagttctaagaagcaaggcattgtgacactttctacttgtgaagcccagtatgtagctgcaacttcttgcacatgtcatgccatntggctaagaagattgttggaggaacttcagttgttgcaaaaggaaagcacaaagatctatgttgataatagatctgcacaagagcttgccaagaatccggtgttccatgaacgaagtaagcatatagatacaaggtatcatttcattagagagtgcattaccaagaaagaagtagaattgactcatgtgaaaactcaagatcaagttgcggatattttcacca

SEQ ID NO: 253064 - DNA, 437 bp, Glycine max
agcttcttgattccttcttctcgcggcttctctagtattaccgtcatccacgctccatcatccgacgtcccaaaggtataattcttctctaaactgcatttgcttcttctccattgtcaaagcaaagactactaaatgtttgttttaaggaaaattcggattttggtttttccattttgttcctttatatttttccaatgtttgtgattgtgtatgtgcctgcgcttgtggtttggttgatttgccttgcatgtgagagaacttaagtgtggtcttgtgagataaggttgagtttgatagtgggcgtgcccaatatgtatataactagaaacaaaatcacaccacaagaagactccatatataagctgactcctaactcaaatgatcaaagcatgaacaataaataacaacctgcacatagatgtagtgtctgacta

SEQ ID NO: 253065 - DNA, 464 bp, Glycine max
ggcacttgttcacccaacctgagtgtgagggggcaattattgagtatatcttacatgatgttgaagagctctgtgtagctcatgttatgcataatgacactcgtaaagctgttttagttaaccacagttagttgtaacagacttcagacacttacatctaacttctaaggttctggaatttgttgtacagacttcagacacttacaaatctgacaaatgtctctgtagctatatgtggaacttatgtagtcagataccttaggaatcagttcagaaatacaaaatcaaaaattaagtaactttccaaattctctcaaaactttttctgtatttctaccaccccctttccttttatctttctaatttctaatcagcaaggacctagctggaatccataatcaagacaattaacaaatcaagtttaaccatggaaatgataatcaagaatgtaactggtagaaaat

SEQ ID NO: 253066 - DNA, 455 bp, Glycine max
  unsure (1)..(455): unsure at all n locations
agctntgtcagttgtcactagaacgcataacagttatcaaaggattgaataaacttgtgctagcgaggaatccaaacacccatacccttcatcaactcagacaagggttcaaaaaccaattgcataacttttacatgccacttcctcggaaggcacatgcttgttaaatggaattcacccttttaaccccatcgtgaagttctcaccgcaatgatacagagataagttattgaccgtttcagtattttccatattatgatgaaaagttaatggtttcgcattaacattacatgagtgcagataacggcgtgcaaaccataaaacatacttgcggcctaaatacattaatgaactgcaatttaattcatagcattagtggttctttcttcaaacttcaatttgggataacaaggacgaactgcactatacttctgcatttcttctcaatataacac

SEQ ID NO: 253067 - DNA, 454 bp, Glycine max
  unsure (1)..(454): unsure at all n locations
actcagcttgatgattntactctctcccgaatggctggatagatggtctacaaccattcaatccacccttcctagaaacttttccgatcattgtcctatcttgcttagatcttcatcagtggactggggtcctaagccgtttaggatcctaaactgttggatgttagataaatctttcaaggacaccgtctccaagtgctggacctcttctcatatagcaggttggggtggttatgctctaaaagagaaaataaaatctttaaagcaagctctgaaaaaatggaataaagatcattttggtgatacttttaagagggtcaagaggtttgaagaagagttaaacaagttagaagaggaaacaagccatagacagctcactactcatgaggggatgcacttgaaacatctgcaggaagctctgtggacagcggctcaaacccatgagtctttattg

SEQ ID NO: 253068 - DNA, 454 bp, Glycine max
agctttttgcaaaaagaataatgaattttttctcgtaagaattttattccaagtcttcaaagcttctggtttgccccatcttcaagtgtcagttgtctcacaattgatagatttcttcacttgatttttgtctgatgaatatgattgttgggaacatttaatgtttgcattaaatatacatctttccctcatgcaaatagtccactcattaaagtttgggtgtttgagaactccaacaagtattcactttctttgtgtcagaacaggtcctgtgtaaaatagttttacttataatagtgattgaggaatttcagatcttgactctatttattcttcatacgattcaaagatcctagaagaatgtttctatagaagaaatctcaaacacaaagtattaaataaaatcttaaatattatctcaaatgtcatatcagatcatgagttcatttgccta

SEQ ID NO: 253069 - DNA, 454 bp, Glycine max
  unsure (1)..(454): unsure at all n locations
ctaagcttatttggaaaagactaaacgagatgctcctccacttttgcattgcactatcgaggaatggcttatgtgaatgtgtctaaaatatctggtttaagagttcctccaccttttgttaggaataattttttttatttctgtgattgtcaatcatttcaaattatacccaagtaacccaacgtgaaactaaaagcaatgaaccgctggatgaaaagtgggaagacatacaataagtggaagtgttggtgggttgctctaatatggtccatttggcagcataggaataaggttatctttatgaatgccccattcaatggcagtaatctgctgcaagatgcactatttttggcatggacatggntcaaaccaatggaggaaaactttacaatacatttcaaactttggtctagcaaacttccagctgggtttatgtatactatggtgacaccat

SEQ ID NO: 253070 - DNA, 465 bp, Glycine max
  unsure (1)..(465): unsure at all n locations
gctgagcacggctggacatgatatatgtcacggtttggtttattttatggataaaaggggatgtatcatgagatgtctgcggnggtttgacccatgcgggcgccgaagtgacagcgtgggcatctccctccttactctntgcaccagttgctccaattcttttagcattggcacttgtggaggaaacgtaatcgaacttccctcttttcaaccatacttcaattctttcctcggcgaatacttggtccgcgaagctggacggcatgtaacctaccaacttctcatagtaaaacactggcaaggtgtctaccatcatcgtgatcatctccctttcgaccatgggaggggccacttgtgctaccaggtcactccatcgctgtgcgtattctctaaaggtctcaccttccttcttgaacatattctgtagctgagtgcgatcgggagccatatcggaattatactaat

SEQ ID NO: 253071 - DNA, 431 bp, Glycine max
gctttagctttcattgagtatttgatcttttttgtgctctacaatgggggaatgagctcaaatatggggggtaattttggtttgctttcttgcttagatgggttggattgggggtttgtatgggatggccctacgcctataatgcattttgaagcaatgggacatgccacatttgccccgttctcttgctattgatacctaaacgcgcgcccaccaagtgttcggtgaaatgcctcaatggcattagcgcgtggcttttgtaaggaaacaacccatggggcattttggtttgcacatattttctattttttgggacatgcatgcattcccgaaaaaggctagagtaattgccccacatatatcctaagcctaggaactcaaagtttatacaaaaagaacacaagaagaggtgcatattgggtaaagttacc

SEQ ID NO: 253072 - DNA, 471 bp, Glycine max
agtattggctactgtgccgagtgcaagactatgagttgtgttttgcttgggagcaagactgcgaggtcactatacatagaacttagacaccgctctttgtccaaacaatatataaactcagtattagggacattaggcctcactcattcaaacaagcggcttatatcacctccgcgtgttatatatacagcatttttggaaacgcattatattctatgctatatattgaaaatttatgcattgttccaatagaattcaattcattaaaatacacccagcataatttttttttacatcatataatcataaaatgcagtgtttgattaacttccacatgcataactgcagaaaccaaaatcaaaagctaaaacaataataaatgaatttcaattgcaacacatctacagaaatgaaaaaattgagattgcaagaatatatatagcaacgattctcatgcatgataaaatctac

SEQ ID NO: 253073 - DNA, 329 bp, Glycine max
  unsure (1)..(329): unsure at all n locations
tatgctggttaccgggaatgtcctggtccttaaggatatttttctgtttaaatactctttctgtttaagnttatctaatttctgttaccactagcctttatttttgctaagtatatgcaaacctgtattgaatggctatttaagccagagatgctgctaataaaaatcatcattcagttaagttctctgagtttagttctcaatttcaaaacattcactacatttacaataactatcttaaaagttatatcaatcatgatttctaattggttaactatatangaactttactctgacaatgtataaaaattaaactcagactagtatga

SEQ ID NO: 253074 - DNA, 430 bp, Glycine max
actaagctgccacccactgctaggtattattatcttatctcctcttatatttgggcaactacactcttcatttggatctcttctagaactgacatcttttgtggttctcatggtctctttagtcccctccttaactctctagatctctctccttttattcattttgatttatcttgttctccgatgaaactttattaggacttgcttctctgtcacatcctttcatttgaactctctaattgtccctcaagattcctacctctcttctctgaatcatgattttttttttttttttgtggtaaaactatttattattggagtaggaactagttaatatatatagctagattgatcattactggttttaattagttttgttgggtttatatcttgggttggacttaatgctatgaaatacaaatccaccaac

SEQ ID NO: 253075 - DNA, 418 bp, Glycine max
agcttatgcttgtctttatattgtcacacaatatttttattcttaatggttgttggttttttctgacacttcctatttttctcgatgggtttgttactacgtggggtgctatcctgattgtatggtgatttcaataatgagaagcagttaagttttctttatacttaaatcatgatttatttatcctattgtatggggatgtcaataacttacctttggattaatgtatgagtggcacatatttattcgtctaactatataatatgaatatatcaactttcacttacttaatggtgtttgtgaaagagctctgcatatgctacttgtgtagagatatacccctatcacatcgtctccatatggttaggtattggggcataaaggtccctctgtctgcgaggtgtatgcataagttttc

SEQ ID NO: 253076 - DNA, 420 bp, Glycine max
catttatatcttaatcttcatctgtgtgagaaaaattgctaacaacttttattttaaaagaaactatgtccagtagctcaagatcctagatctgccattggatactagcaaaaggtaaaattaaagacaaaggtaccttaaatcctatttgtcctatttatataccgtgatgaactcaagacaagtaaccattataatcaactgaaaatagtgaagcacacaactaaaagtgaaccataatctttaatattatgggttcaatattgtaggcaaaaggactaatcaaagttatgggatttacctcaaaatgtatgctaataatgtcaccttctcattatttttattccatgtattgtaaatacatttttcttcttttaccgcttcttttttaattttgaaaataattatatcccaattgga

SEQ ID NO: 253077 - DNA, 477 bp, Glycine max
gaccttacaccacctgagcatgcagcttaataatgaagcatttttattatgtttataaacacaaacagaatagcaaacgaaatctgtttcacaactggaatctcagcacttcgacttgcaacaatgcaagattcaagctaaaacttgtattatcgcatgaattttcagaggtagtaaaaacaggtgcaaacatttgctatctaattcctctgaagattctctaaagtcaataatgatctaaacctgtaatgacgatactggaaaagctgtcgagctctgggacggaatgtagtaacaggaaaatcctccctgtagaaatggagatgtccacaacagcaaatcaaatcatgaaaagcattcagcatgccaaagtagtgaaaaaataaacagactttttatgcatcttgtgggtaaaaagagtatcaagcatttatcctcagagagagagcgagagtatcacactgtagagtatctatt

SEQ ID NO: 253078 - DNA, 457 bp, Glycine max
agcttgagatgaggaagtgtagaagggtgaatctttctgcttttattcgttgaccacagagtggtacttggagatatgtcgcgggggtcaggagaccttggggatgtcaggtggggtgctattgcccaaaaccaagcttgaccaatcccgacccaacccgggcatagtcagtcagtgagaacctgtgatgtacctaaacaggcgagctcctggcagtcaacagataaaaggaacaaagaccacaaagcaaggaggcttgtgtggtggctggccagctgtgaatcttgtgtgatatatgggttatggcctctggtaatcgattaccaagggtgggtaatcgattacaaggcttaaaaatgaagacaggaggctaagatggtctctgataatcgattaccacggggtgtaatcgattaccaggcttgaaaacgaagtcaggaagctaggggagcttctg

SEQ ID NO: 253079 - DNA, 407 bp, Glycine max
gagagtgatgatgtacaagccctataggcagtatcttatagagcccgagtagtctaagagaagttcaagtccatagccatcaaagtctgaaaagagtatgatgaactaagggacgtcaatatggccaccgctgatgccttggaacgagaaaccaagaaggcccaaaaggaagaacacgtgccaccaaagttttgaggggctttataaggcagcaatattaagctcaaactccgaagaggtgaaaggaatcatcacgggtcaaaggcatgatcttgaaggacgagctaaaggcttaccttacgtcgaaaagaaatttgtcccaacagttaagcgagactgaagggaatatgtgggccatcatcgatgagtgcaaagagaagctaaatctagcggcgactcacgagcaa

SEQ ID NO: 253080 - DNA, 459 bp, Glycine max
agcttggtgaccttccttagtagctagtggttttatgagtaagagctttgagtgatgactagagctcgatagtttcttaagctaagatcttgtaccttagtatgagttggtataataatttgatgtgaggatggagaccttagtaaagattataatgagaagagtgagatagtattttgaggtaagaccttaaagtatgagaaacctagtgatgattagagtgagtagagttacggacccggagaaaagcctattacatcctaatagtgatctacaccttcctacattgttgagaaaaacatgttgagatgtttgttagacatcttatgggtgtgttatttgaaaaacctagtgtaaaagagcattgatgttatagatcatgtttaaagttctgatttatctatgttgtcatgtgatttgaaaactctctggaaaatgaatcaaaacgttggttatgtt

SEQ ID NO: 253081 - DNA, 480 bp, Glycine max
  unsure (1)..(480): unsure at all n locations
cgggatcttaagcaccgcggctgcagcttaaattaggggagggttctatattgatccaatcttactatgaagtttgactgtaccttacaagtacctagctaggagacagatacttttgtattaaatctttttgaagacgtattagaccttgatgtagctagatgcatgcacttgagagcatggtgatgggaatattgcatgtggttaaacgtgttcatgatcacgtcaaaattcaactgaatatattttttgtacgcataaaaaaattcagtagagaagtagagctagttatatctaccaaaaaaaaaaagttgagctagcaaattaaaaacatttaataggtaaacggttagattttagaaagaaagatgttgtttatttttagaanaaaatatattgaaatgtacacccatttttgagtaaaataataaaaagagttttttattcgtattcctttttttgccttaacaatttacacat

SEQ ID NO: 253082 - DNA, 473 bp, Glycine max
tgtccaaaactaggtaaagatgttcagggtccagaattcattttattaagtccatgcaaagattagataacactataacaatcatgaagctctcataataaaattacctcttttattagaaagatacccacgaaagatgaagaaacacttgagaattttcgttctagtaactaatttgttataagatttgcactgctagatcctcccacaaccaatctttccagaaaaatcattaatgatttaccattcttattaaaaaatattaaggataacttttgtgaaccataatcatggatcatgttatttgaaagaaaatttataccatcatcaagaaggagaatgatactttaataatgatacttcaaattgtaccatcacaaaaggcaatttttaagtttgtaatgattgaataatgtgcagaagtattaatgttagtcttggaaattatgttcatctacctagagaattacatg

SEQ ID NO: 253083 - DNA, 457 bp, Glycine max
  unsure (1)..(457): unsure at all n locations
agcttgtcagaggtagagagcttganagggatggttctgggctgagatggcgtttcaacagggaaacattgaaaacatggtgaatcttggaggattcaagaagcatgagccaataggccactgggccaatatgtttggtgacctgnagagatccatagaaacgcttggatagtttagtataagtaggcacgactgaagtctggtgatgagggcggagacgaatgtagacccaaccattgacgaagaagtgaacatctcagtggtaggcgtccaccaaattcttcatagaagcttgagccttttgtaaatggcgacataaagtagcatgaatagtggtgtgtgtaaccaacaagtcatcaactacttctgcctgagaggtaccctagaggtactggggtattgacgatgggagcttcccataagtggcttcggatattgaaataccagtgctcaaatg

SEQ ID NO: 253084 - DNA, 424 bp, Glycine max
tatgctgcaaacacttataatagacctcctcaacagctaatttatcttcaatagaataattatgacctttcaagcaatagatacaatccaggttggaggaatcatccaaatctgagatagacaagtcctccacaacaacatcagcctgtccctcctttccaaaatgctactggtccaagcaagccatatgttcctcctccaatgcaacaacaacagtagcagtcacaacaaagacaacaagcaactgaggctcctcctcaaccttccttagaggatttagtgaggcaaatgaccatccagaatatgcaatttcagcaagagacaagagcctccattcagagtctgacaaattagatggggcagatggctactcacgtgaaccaagctcaatcccaaaattctgacaaattgccttcacaactat

SEQ ID NO: 253085 - DNA, 343 bp, Glycine max
  unsure (1)..(343): unsure at all n locations
agcttgtaaacatactcagaagcgtgtttttagctatgctaccagatgaagccattgatctctattctgcactccggccaaggcatgaatggntagaagcccgctctacttaagtatttatatgtcaattggtctatctctaaacaaaacaggggattcggaagttcctaagttatactgactatggagagcaatgttctagaataacattgttcgagagcagttttatataatttcacaatttaactcatatttttcattattaacattgaaatttttgtattgatttaagataaaaaaaatctaatgaaacttagctataccatactttgttgatgctatg

SEQ ID NO: 253086 - DNA, 401 bp, Glycine max
  unsure (1)..(401): unsure at all n locations
tgaatgtgtgtaacccacaatatttccatagaaaggttgtggttggnggcgaaattaaagcccctccaaagtgttttgcaggggtataccaccaactgtttgcccttcagtggcatacccggggcaaggcttgaagtcagctagattgtggtggggaatttgatgtgtctcccccatgggttgagagacatgtgcatgatcagattgaggttgttggctctcaatgagtatgggagcggagttattgacatcctcactacgagtgtatgccacattgggtggtgtatagttgggaggcaagccatatggcgggaaggtgtgcttgttttgaatttgcacataatgggggccgcccgtacttcccaaatctttgcctatcatatctganggtggatgattca

SEQ ID NO: 253087 - DNA, 453 bp, Glycine max
agcttgtcgtgccatcgccattccggcctaaacccatttcaggctcatacccattctttaacatgactcgggccaccatcaaggaggcaccagataaacgtggttgcatcgaaggagcctccacataagcattgttcacaattcctagtacttgaaaagatgtttctaatgactcttccgcagcttccacatagggtgtagaggaaggacaactcactagtatatcttcttcacccgacactataactagctgcccttccaccacaaacttcaatttttggtgcaacattgatgggaccaccctaacagaatggatccaaggccgacctagcaggaaactgtaggcatggtttatgtccattacttggaaagtatctggcatgtgtgtggcccaatttgaatcgggagatcaatttctcctctcacgtcatgccggctaccatcaaaagccct

SEQ ID NO: 253088 - DNA, 467 bp, Glycine max
  unsure (1)..(467): unsure at all n locations
taagctccttcaactgcacaaggctcttaatatttgaagagtatccttgcggaaccttcacccgacgaagacactgacaaaaacttatctattccttcttggacaaagtatggcaggctgggggcaagtaaattttcttcccatcagaccttggatgcaactgtgatcgtatacccatatcagctagatcttgacgggtattcaagccatccttcgtcttgccttgaatgttaaggagcgtcccaatcacactgtcacaaacatttttctccacatggataacatcaatacaatgtctaacgtcaagatcacactagtatggaagatcaacgaaaatggacctcnttttccatatgcaactctgacttttatccttcttttgggtcttcccaaatatagtattcaggtgttgaacccgctgatatacctgctcaccagtcaacggtatcggcgcaatatcatgctct

SEQ ID NO: 253089 - DNA, 220 bp, Glycine max
  unsure (1)..(220): unsure at all n locations
agcttgtggactataccttcgaccaaacacgtccgngtttctgtctcggcccggatttaaagcgggttgcagcaccggtgatcgaggccgtactctaatcaaataaacatgataatgcagtaactaggaagtgatcctaggttcgttttccaacgagcagtgacaagccaaatgttcataatatacttgcagtaacagtaaccatgggggggggcggggg

SEQ ID NO: 253090 - DNA, 459 bp, Glycine max
  unsure (1)..(459): unsure at all n locations
tctccgaaaggcatggntatttncagnttcctgaataatctaagaatctcgccaaatggcagtccttctgcttcttggaaggtaccacaggatatggtactttcgcaccttcattcataactttttctcttttcttctctctagcttgttcacttctaggcctctcttcatttcttttgtttcatctttttcattttctacttctttttctttttcttggtcatttaattctttttttcttgaccattatctgtttttcctttacctaggtgctttcacttctcacatcatctttcttttcattaatacctttcttttcagcagctttcttcttggatagaacattatcctcatacttcgcctccacaaacctattactccttgtcatcacagctttgcattcctccttgggattctttctgtattcgcccaaaactgttgatgacttgtagctattgc

SEQ ID NO: 253091 - DNA, 437 bp, Glycine max
  unsure (1)..(437): unsure at all n locations
ttgagcaaattcaaacgacaataactntttactcggatgtctgtttgagtcccgtaatatatcgagacgctcgaaattgaatgttgaacctatgagtcaattccaacgacaataacattttactcggatgtctggttgagtcccgtaatatattgagacgctcgaaattgaatgttcaacctatgagccaattcaaaggacaataacgttttactcggatgtctgattgagtcccataatatatcgagacgctcgaaatcgaatgttgaacctctgagccaattccaacgacaataactttttactcggatgtccgattgagcgacataatatatcgagacactcgaaattgaatgttgaacctatgagccaactcaaacgacaataactttttactcggatgtctgattgagtcccgaaatatatcgagacgctcg

SEQ ID NO: 253092 - DNA, 367 bp, Glycine max
gaaaccatgcttgtgctgggacaggacccttctctctttctctgcttgagtgcactacagctaccctatataactccgcgaaatttgttccggccatactcttacctgcaagccctcttggtctcgtgtacgagggctcttgcggcaatcgcatctcttcccataatccaggccacatcttccaacatgtggacgccaacctgaactatccctgcaagatatgcttcctaacccgtttgagacaagaacacatcggctttgcgggctacaaacttttttgtgacagtttacttggcagccaatcttaactcgttataactttacccttcaagaacccccaagatgcataccaagccttaagctctga

SEQ ID NO: 253093 - DNA, 392 bp, Glycine max
  unsure (1)..(392): unsure at all n locations
gtctcaatatattattggcctgaatcagacatccgaatcaaaagttatggctgtttaactatgccatgtgcttccatgttcaattttgagcatctcgatatattatgcacctgaatcgggcatctgagtgaaaagttatgccatatgagttagccgagagcttcgttggtcgatttcgagcgtctcgacatattattggcctgaatcggacattcgagtcaaaagttatggcagtttaaactttccatgtgcttccatgtttaattttgagcatctcgatatattatgcacctgaatcggacatctgagagaannnnnatgccatatgaaatatccgagagcttccggtgggttttttcgagcgacgcgatatattattggcctgaattgga

SEQ ID NO: 253094 - DNA, 457 bp, Glycine max
  unsure (1)..(457): unsure at all n locations
agcttcttgaactcccccttccacaaaggtttctgtcgatgtcacatgactttcggtcttgccttccatttctggaacctatattttttcatagttcatagtcagatgcaatattttgcaagtgatattcttgagtgcataatatttccaacaaacaccaatggaagttcattcagagccattatccaaacacagtctccataagtaaacttaaaatccagattatacctcaaattacttaatgaataaggggatagttgacaaggaaatgatgcaatgacattactagcctaattctgctttgtcaaaatcccaactagttacctaagagcacaacccctcctcctgaattgttgcaaccataaccctcacatgataaaaaccttactatagaagttgccaaagaattctgttgcataganactttttttttataattaaagaagaaacaacatca

SEQ ID NO: 253095 - DNA, 354 bp, Glycine max
  unsure (1)..(354): unsure at all n locations
atgaaagccccaaagttctcttatatattgtggagngggccactcgggaatgacctttattctcttaggggtcatgggaaccccttgatcactatctgaaaaattaagaaaagtaacacagtagaacatacccttttttgtattttcatattgatcattcctaccaaaaagtatgacaaacctaaggtggcccatatgaggacctaagtttgaatggaaactaacaataagaacaaacctacctaatgggtccctatgtacacacaccatgaagatgttaggcgcacgagtgattttacaaaagagggttgcaccactcaaaacattcatcataccacctattttagggacttg

SEQ ID NO: 253096 - DNA, 435 bp, Glycine max
  unsure (1)..(435): unsure at all n locations
tctaaattgactgaattcattattgcattcggagaaatganatgngtattagaatataagagaaaaggacttagcaattatatgctcttgtctgttggatatggactgtgaaatatacatagttgatattattggtcattatattgagaagttatttgacttccaccaattatagttttctaaagagatgctgatataatttcacataagaacgaatagatgagacaagtttgcgttcgtttgagcatatatatatagtaacgtgtcaaaacaggatgagcagccactacacattattttccggcaccatctttgattgaaccaaagacttgaatgaatgaatgatcacacatttgaaaataagaaaactagcactatatcaacaccccaattaaaaaaatacacagtatgatcataatagcttatgaaacatga

SEQ ID NO: 253097 - DNA, 440 bp, Glycine max
  unsure (1)..(440): unsure at all n locations
ttgggaccattctctatacacctaatgaattcccagatgtttgatcaggttatcatttcgtttgaatttgaattatgttcatgagtattnttccataaagaattcatttttcaattctttacacattagttgtgttttttgctcctgtgaaacttaatttgtgttggcatgaaaactatttattaaaagccaatagtttcttttttgtgttaaactgctgttcaatttgactggagtaaagtcctcttcagaactacttttggtagaaaatatttcctttatgtctaactgtgcaagtaatgttttcatttctgctagcagaaactttggagaaaacacagcttatattacagcaacttttacatcagatacataaaggaattcctataatacgagctggtgctgggacaggtatatctgccaagtttgaataagctgga

SEQ ID NO: 253098 - DNA, 355 bp, Glycine max
  unsure (1)..(355): unsure at all n locations
cacatttgccactagtaatcgaatacatcntccgggagacgactactacaaaataaaactctttcacaaaatattttaagttaaatcctctggccaatcctgtaggtgtttcaacttggaactttctttctatagactctaaggaattatctgtgatcactatttcctcgggcttcttggaaactctgtcttgaaaaaaaccttgagaagccgtgttctttggcatcatcaaaatatcaaaatatctttggttaaaatcccccttttatctccgtgcgcgccgccaccccatcatgacctaaacacatcttactcacacccagatctacacaccctttttccttcatccgccact

SEQ ID NO: 253099 - DNA, 412 bp, Glycine max
tctgtggattgaagttatgatacacgtttttttttattaaagaaaatactgctgaatggcatatatatttgaaggtcattgtcagtcaggttatttttctaattttgtatgttgatgatatcttgctcgcaactaatgattttggtctttttcatgagactaagacagttctctttagcaactttgaaatgaaagatatgggtgagacaagctatgtgatagggatagaaatattctaaaataaatcacacggattgttaggcttgtctcacaaagaatatatcaataaagtactagagaaattcacgatggaaaagtgctcagcattacctattccaatttagaaaggagaaaaacttagtcttgcacaatgtcctaaaaatgatttggagcgaaaacaaatggaaccaat

SEQ ID NO: 253100 - DNA, 407 bp, Glycine max
gcatcaccactactagaagagaagccttttttgtgtttcatataaacctgctcctctgtatcaccattaagaaaagtcattatcacatccatttgatgcaactcaaggtcaaaatgagcagctaatgccaagataatacgacgagaatatttcttatatactagacaaaaagactctctataggcgatcccttctttgtgagaaaatcccttagcaataaatcttgccttgtatctctcaaagtagcctaatgaatcccttttggttttaaagatccatttacatccaatggcctttgccccattatgcgactctacagagatccacactttgttacttctgcatggaattcatctcattcttcatggcattataccataaattcgacactttacaactaatggctt

SEQ ID NO: 253101 - DNA, 376 bp, Glycine max
gtgaacaaaatgcaaatgaatgcaaagagtgagaaaaaagctttgtaagagtgaaatggtaactacctaaggcaattgtgccttagtatttttagcagtttcgtatggcttgcttagtgcacagccgcgcttatcgagtccatatgacgtttgagttttaaagacccatatgcttagcgcgtctgtgttagacatgtgacctcataaatcttaagaaggaggggttgaattaagatattacaaattgttccccaattaaaaattctactttgaatttaagtcaagtcccaagattccttttaaaatgaattcctaaataataattcatattaaacttactgaatagaaataataatcaacaataaataatagagtt

SEQ ID NO: 253102 - DNA, 439 bp, Glycine max
atcttaagtcacctgcggctgcagactggaatgtgcttaatggaggatattatagagggagagaaagagagaggggggagcacgataatgaaggaagaaaaagggagagaatttgaactttgagttgtgtcttacaagactctcattcatcaaagttacaacaagtgttacacatgtttctatttatagactaggtagcttccttgagaagctcttttttgagaaaacttccttgagaagcttctgtgagaaaacttccttgagaagctagagcttaactacacacacccctctaataactaagctcacctccttgagaagcttccttgaaaacattcctaaagaagctagagcttagcttcacacacctctctaatagctaaactcacctccttgagatgagaggctataacttagctacacaccccctataatagct

SEQ ID NO: 253103 - DNA, 308 bp, Glycine max
aaaaaacctataaaggaagctataaagaatttaaaaggtcagtcacttgtaatttagtaaaaagtcatataaagcttgtacattgttgtttccactaaaagctagcaaagatgttgggctattatcaacataatgaccttaatcgccaagtctgtgttatttcaaatagcaagcaccaattaatataaattatacaaagagaagaaaaaaatagcactggaattaattgatagaaaaactcacagaacaccataatatgataaggtagccatatttaattgaaggcacaaaatggagaatagaaattg

SEQ ID NO: 253104 - DNA, 326 bp, Glycine max
gcatctgaagtctgagagctttgggcagatatatctactatagctggaggtggtgctgaagtaaaagatgcggggattccacttattattgtaaaggaagagggaatatcagctgctctgagcttggtcttccttgtctctagaaaattaactatttctgcatttgtattccaacaagttccttatgatataagctaagtcaatggccgatcttatgttttcataggaagtaagggcatcagatcccactccccttgatctacacaaggctgtgattaaagctctgaagcctaatcgagaagagttagactgagcgatcatggtca

SEQ ID NO: 253105 - DNA, 359 bp, Glycine max
tgtgggcctcagatccccatttcagattcttcttaggttcaaggacaacttttattttaaccggtgttatgaatataaagtatctcctaattttaccaatgattaatttctatcaaagaattgatccatcacttttaatataatttcaaagacacctttttagaaacaaaaaattaaataaatttaatacagaatgtggaagtcattgtctcattgatattgcaatattaaaactcccctggatcatgccattgtatcatttctaaatacaattttgtgatgcaaacaccaatttaacgttgctagggaagaatcttgatattgacatactttatagggaaaaacatcaactcctcaag

SEQ ID NO: 253106 - DNA, 442 bp, Glycine max
  unsure (1)..(442): unsure at all n locations
tgcgccgccagcaccacatccnctgaagtcggtgcgagaatatatcttcttcggngaggcacaaatggcagcagctgcgccacgactgataccaacgtttaccatcaccggaaatagggttgccatcagcaaaacacccagaccggttgcggaagagacggccagagacatcagacaggcgacaaaataggcggcaatcatcagcaggtaaggggagttaatatactgcaatggttttgacgccagcttgaccaccatatcattcgcgccgatatgggtcatgtaagcggcaaatccacacagcatcataatcatcatgccgaggtcgccgccgcggctcattagtaatattttaacgtattcaacgatatccgtggcgctgtaacctcgtgaaacctggctggacgggaacactttgtgccccataatggcactgataatc

SEQ ID NO: 253107 - DNA, 429 bp, Glycine max
  unsure (1)..(429): unsure at all n locations
tgccaaagctcatacaacaatttgattaaacttaagtctcattctatattctcanatcgaatctgacattctacgtctaatttgttataacttgtgactcccaccaagcattaaaccagaatgaacttgtttgatgaaatgtggaacttatagcctgtacacattggctggaattaagggtaaggatatttaacctaatgcaaccatgcatcaatttgggtgtacatttgagttatgatctcattgtagaagctaaaacagcacgtgtttttatttctaggcttattgtagctacgaactacaacaagcttgcaacaaactccttgattatagatgcatgaaccataatcggccctcatgtaaaagaaatgaagcattccgagagctattacagctgctaaacatagagcatgagaacatttctctatg

SEQ ID NO: 253108 - DNA, 464 bp, Glycine max
  unsure (1)..(464): unsure at all n locations
agcttctagatcaggggaagacgacttcattttatttacttaatngagagatgggatataaatggtccattagagaagatactaacattattggttatcagtacataattaaacaattaatggtctagaagattaactgggagcaagatcatatgatcaaaatcaattttaattagtaaacacaaaaaaaaataaaaaatcactcatgtgcacggcgtgtgacaatattaaagctaataattaataattaagagttacaaaacaatgatgaagctaaggtgtattccatagtgccaaaatgaaatgcgactatgcaaggtaacaataaagttttgatccagaagacattgcttaaataacatataatccggaggctgatgttaaaatactactggtcgacgttataatttaattcatggagaatacataggcttatatatatatatatatatatatatataaaa

SEQ ID NO: 253109 - DNA, 441 bp, Glycine max
tgcttctacaatctccccctttttgatgatggcaaccctgttatctataaacacatgcacattctttttcctagtcgatcactcacttatttctccatattctccccctttgtttttgagttcaagcttcacctgaaattaagttatttaattatatgagttcttgatttaatccctattttctctccccctttggcatcaacaaaaagccaaagtgcgtaagaaatataaaacatatataaatgattataaagcataataccaaatgtaagcacatatcaccagacatagatcattaaaataattaagtttaaaaactcataacaattaagagtaagtaaatataatcatgttcaattatattaatcaaatattaaaagaaatactaagtattcaaatgtcataaaaatataaatcatttggttaagtcactagcatcta

SEQ ID NO: 253110 - DNA, 271 bp, Glycine max
gtgtatatacaaaaacagtgagtgtgtgctctttactttgaccatttcaatacttacccagtgcctcccccaaatttgggacacatctaccttgataattactcccccaaattagggacaaatttgctttgaagcacgctctctgaggatgaagctctcctacaacctaagtcaaggtttcaagagattacactatataggctcacggttcaatcaatcaataattcgcttagctcaaactgggtgcgagggataaattattcaagcacat

SEQ ID NO: 253111 - DNA, 434 bp, Glycine max
gggacaatggcagtgcaatcttactaaaatcctggatgaatcttctattataacctacatgtccaagaaaagaacgcatttcctgcatagaagcgaggtaaggtagagaagtaataacatcaatcttggccttatcgacctcaatacctctaatagataccaaatgccctaagattatatgtaaccacatggtacaaaaactattgttaagagtaaagacccttcccgtggcctttggacgtctagtttggtcattcagacccccaccattctgcttcttcttgggatataggcaatctctttgaatatgccttttctgtctgcaattgaaataggtcatgtcttcatcgacataatatgaggagatgtgccttggcttaccacacttgtaacaagtgatctgagttgagaaagtagtgggtttgctaccacta

SEQ ID NO: 253112 - DNA, 279 bp, Glycine max
  unsure (1)..(279): unsure at all n locations
gaaactcagaatcggcagaaaaaatgactccaatttaccgctgttttatcccgacgcctgaatagccggcattcaagggtagaaaatataaaaccccccatcatatatatatatatanatatcaccaacttatgggcaaatggcaaatattattatcttcccgctttctctccctccttagtcagctcctcacttctccacgagtatgtctccatcattttggctattatatacccccgcttgctgtgtaaagcttccccacctcccggcaacctcatc

SEQ ID NO: 253113 - DNA, 433 bp, Glycine max
  unsure (1)..(433): unsure at all n locations
tgagaggcttacctgagagataccctcgccaggntccaacttacttcacaactcanatagtgaccactatttctgttaacactttgccatgcccaaatggcagaacctgccagggaccaaatggaaccattttcgctgctagcatgaacaacataagttttgacacccccaacattgacatactaaaagcttattactatcatatcaatggggtatttaaaccgggatttcctagatttccaccctttatatttaacttcactggggattttttgcctataacattgaatataccacagcaagggactatggttaatgtactgaattatggtgcaacggttgaaattgtattccaagggacaaacgttattgcagggatagaccatcctatgcatctccatggattcagtttccatgttcgtggatatgggtt

SEQ ID NO: 253114 - DNA, 376 bp, Glycine max
  unsure (1)..(376): unsure at all n locations
tcattggtatcatctctcttttcatcattgggggtgccacctgtgctaccaaatccctccacctatgggtgtattctttgaaagattcatgctcctttttgcacatgttctatagccgcatcctatctaaagccatatcagaattggactgacactgcctaacgaaggcaaccattaggtccttccatgaatggactcgggaatgttccagggtaatgtaccaggctacagctaccccagtaagactttcttggaagaaatgtatcagcacnttctcatcttttgcatatgcccccatcttgtgagcaaacatctttagatggtgcttgaggcaaagagtcccctcgtacttgtcacagaccgacacattaaactt

SEQ ID NO: 253115 - DNA, 436 bp, Glycine max
  unsure (1)..(436): unsure at all n locations
cttatggtcgtgtgacactagggctcaggattcattttctcttatttaagtcaacccagtgtttccaaaacatgttcttttatcaattcatgcattcatctgagtccattttgggtgttcgggaaaattttcacagcattcacccttcaagcgtgtacacattttcttcaaaaactggttatgattagggaatcttttttttccaagaaaagctggaaattaattcttttcaaaagcatgttggatttttagctagacaatttattttttgttcttgcttgctttttttttcatgtggtattttgctacctaaacttatgtatatttttgtgaggtattnttgctatatacatgcgtatccaaagtatcttgcttcctaaacatacataccttccttcctatacctatatatatatatatatctctacaattatct

SEQ ID NO: 253116 - DNA, 274 bp, Glycine max
aacccgccgaacagcgagcacaaaaaaaaaaccacacgccacacacgcgaaaaacgaacggctaaaaaaggagacgccgcccccaactaatctagcaacacacctcaagcaagagaaagccgaaacaaacctgaaaaccgcaaacccaagaacaaaccgaccgaaccacaaagcaagggaaaacaacaccgagaaaacgggcacgcagcaccacacagaacggtccagaaacggagcgcaaaaaaccgcaaaagattgaacccggggaaaaaaa

SEQ ID NO: 253117 - DNA, 308 bp, Glycine max
tgaccctcatatgctcgctaggggtatagacattcttcttctagatactgggtcaaactttcgtatgcgaccctgcgattgaaattgtctctgtcttaccatccaagttagcaccctcgttgcaacgagaaggtactatatccaaaggagttaaaggattcaagccattctcatcttcttaaggagaataataagtagtagaatgaaaagacctattgtaagctgacttatcatgtggcacgcattcctatcattattcaaattcgtttgtatgatacacacaccaaagccaaaacaagtgcctgtgg

SEQ ID NO: 253118 - DNA, 383 bp, Glycine max
acattgtgttttttgtattctcattcacatttcatttactttttataccccctcttgacgtgcttaagccattttacttaagtcatttctcgcttaacctaaaaataaaataaatttccaccgatcgtttgaattgtattatccgtaaacttcggttaaaatgaattccgaccgttcggtcgtgccgtaaccacgttggaaatcaaaaaaagaggtaaaaaataatataataataataaaaaaaaacatcttttagtaaaataaagcggaaaatcaaccggacattgtctctttgggatttctcattcttaaccgaattgactaataactaaggtggaactaaggctaaaatcaactcgcctagtcaagcttgtccacaaaaa

SEQ ID NO: 253119 - DNA, 313 bp, Glycine max
tgggaaacactcttttttcttacaagccggataaaatttgaccacaaataaactactaaaagtgtgtggttagaaattatttttggaaaaactaccccaacttaaaaaatttattttttatgttatcagaagtagcgtctgacttataggagtggtatattttacccttggtaactttaaaagaaaaaaagagaacaaccacgccgacatgacgacgtatttactaaatattttcaattcaaaaagggcacttatcaacgtgtatgttttaattctcaactattaacccctttcaattttaatgttttcttac

SEQ ID NO: 253120 - DNA, 448 bp, Glycine max
  unsure (1)..(448): unsure at all n locations
atagaaacttaagcttnctgccgactatttctgcaagagctaaatctctattgtttatacacccactaagaagggcacctaacatggaagctgttggttctgtgggcatttgacaaataaattggtatgcagtggttaactgacctgcacgtgccaacgcatctaccatgcaagcatagtgctcacttgtaggtgtcatgcactcatgccacatttactaagactctcaaagaataccatgcttcttctttaactatccctccatggccataggcagccaacaagcacaagtatgtgacctcatcaggacagataccaactatttgcatttccttaaacaatttaagggattcttcaaccaatccatgtgttgcaagacctccaatcacttgattccaaatcaacacatcagtttgactcttatagacacagcggaatataagcaaag

SEQ ID NO: 253121 - DNA, 409 bp, Glycine max
tatgatcactaacagaaagaaaccactctatctctcgtcgccacattgctttcttctctgaacgcaggggctctaatcttcaaagttggccaaagagggtatctgccaattcagcaaagaaatgaacaccaacaatcaaagtcaagaatagcatatgaataaaattcaccacaccaattaataaaaaataaaaacacagtaactgcttcaagtgtgcatttcgcataccacatagaattggtatggcatttgagatagccaaagctgtagcgaccccatttccacaacctgacatatcttctccaagtaacaattttgcagacctctccttcatcatctcaatctctacaagtgagaatgaaaatcaaatctcatcatactgatatcatcagagaggatcatagatagt

SEQ ID NO: 253122 - DNA, 452 bp, Glycine max
cttgaaactcagcttctgacagaggacaaagaaaaaattttcagactgtcttgatttctggaggtagtttaaatctgacttgcctaagaaatgggcacttgtaggcgacaaggacgatgtggacgacattgtctgtgaaaaatatggcattagcaaggagaaatgaactcagttttgtcagacccgcagagacccctcatgaaaggtatatactttgtcattttagttgttttccacaacaaatcacttcttataatttattgtaataatcattttcattaatgtgcagaaaaaggtacaggccatccagaagcaaaatactgcccctcacgtattgtctcgtgggggttatgaatatttaaaacaaaagttcatggctgagaagacaaagaaaagactggaagaagctgcccagtctggaaacactgagggcgtcattgaccctccatctc

SEQ ID NO: 253123 - DNA, 139 bp, Glycine max
caccaacgaaaaaaccgctagcgatggatgtaggcccggcagttggccccaacaaaacaaaccacggccgcagaaaaaagccctgaccataaaagagcaagcacttacccccataaaccccccctaaccccggcgggaa

SEQ ID NO: 253124 - DNA, 364 bp, Glycine max
aaaaacccttcaatctaccaagcatgagagaatattatatctctccctcctgctcagaaagcgaggcacacctcaaggcaccctacggtcgagttgccttatatacaggcgcttaatcccacttggattaaaatccgattcggctaggcattctaatcgaatcctaactctcctattaaagatctacgacacttaatctcagacattagtcactccaaactattaatctcaactctaactaaatctttcatcaatcaaactctgattaaattaatatccgctatattcacctatatttcattaatgagtcaacaaagtcaatctttgcccattgaccctaacagcccatagtcgaccctgctga

SEQ ID NO: 253125 - DNA, 434 bp, Glycine max
  unsure (1)..(434): unsure at all n locations
agctgacaagccgacctgtntaactaacaagaatcaggnatttatttctcttttgttatcaaaccttatcttatccagattgtattccatgtaaactttattgtatccagattctatttcatctagatcttatttcatcccatcttatgttatcttgtccaaattttattttattttgtatatgagcttggatttaaaatagatttgtaagctttggggctgaggacctaatccatacgttttttttaatattacgctctttttattttttattacatataccttgcgctgcaacgacttggattcaacatgactttgcctatccattatttttggattcgcacattacctatacgatattctataagattcttttcttagttagtattttgctcgatcttaaaataattaattaatcagagacgtcttttaac

SEQ ID NO: 253126 - DNA, 388 bp, Glycine max
atattcaacctgtctagggatcaaaggtttagtaatttagggtgcaacatataacacaagagccagattgattagagaaatatatttctgtcataccctaatttcgcccggggaccattgtttggtggcatgaaacctttgcttgaccgcctcggggtacttgacacccatcgttaggcaatccgtgaagtttcacaacattctggaagtcaaaaagggcattgttgcgtaatccgtaaagtttcgcgacattcgggaaagaaaataagtgtcgctatgtaatccgcaaagattcgtaacgtttcggaaaaggaatcagcaaaaaaaggcataaggggggtgtatttacaaaaaaaaggtgtgcaaatagaagccagacccacttgtg

SEQ ID NO: 253127 - DNA, 449 bp, Glycine max
  unsure (1)..(449): unsure at all n locations
ctataaaactaagcttgatagttccctaantatggttattttgtagtaattttttcataaatcttgntntattggtgaatctatctctagaatactttccattggaattaatgataaatcctgtgcaaatttcaggttcaaagaggctaagtattgaagtggtaaaagtggcagttgggctaagctcaccatttttgggctaagcgcgcatcccacgctaagcgcagcttcaactcacttagtgcgacagagaatctggcacaacaccaatatcaaggtcacgcgctaagtgcgagatcagtgcgctaagcacagcggttgtcttcagccaggctcagcgcatgactggcgcaaagctcanattcacttactcgcactaagcgtgagggtggcatggattcagaccctatttaaagctagtcttatgcagaattatggtaacaacgtgt

SEQ ID NO: 253128 - DNA, 435 bp, Glycine max
  unsure (1)..(435): unsure at all n locations
agcttcatccactntctcgcaagggatgaagtgtgccatcttatgtatatttgtcaacaacaacaaacacagaatcctttccattcttggttttgggcagccccaaaacaaagtccatagatatgtcagtccaaggatatttatgaacaggcaaaggagtatacaatccatgagggttaaccttagatttagcttgtttacacacaatgcaatgaccacaaaacttatgcacatcacgcctcatatgaggccaaaagaaatgatctcgcagaatttccagggtcttttgaaccccaaagtgtcccatcaacccccccttatgtgattcactcacaagcaactttctaatggaacacttatgcacacatacattatttgctttaaacaagaatccattatgcctatagtaacacatttcagaggaactttcacatg

SEQ ID NO: 253129 - DNA, 373 bp, Glycine max
aaaacgagagtcctttaacaaggtaactaaggccttatctgcgactttcttaaccaagtgcgtcgacgtgaaacaaaggacgcttccatcaagaaaatactttgggcatcaccaaaacttgcatgaatcacattctccccctttttgatgatgacagccacatgtaggtaaggagtaaaaagaatatttatttgtgtcgatcactccccccggagtatgaaataattgcttatataaaaacgttgaagattttgtagatttcatatatacaaatttttttcgaaaaatagataatgccccctactatcttatctatctctccctctttggcaacataaaaaaacaaattaggaaccgagataagagaaacaat

SEQ ID NO: 253130 - DNA, 436 bp, Glycine max
agcttcatgtggaatgcatcatacacttatatgagtattgcttttttaccaaagtgtaggcttcaaataacttaacttgataaagcctacatgcatcacatggaatacagtatacataacacaatactattcatgggttagatgtttcaagaggcgtgcaatatttgtctttagctaacttgattggacctcacacacttaatgatttcagttcgcgtgatggcaaattgacatgcatttgagttaatgttgaacttagtacaaccatcaaaattttcaactagctaagaattggactttttgaacacgtagccttggtgtcttaaacttattcacgagctgtaaaacatgtatcaaaactttcaacaagctatttttctaccattcttcacaagtattatacttcatttcatgtaagctaccctctgcaatattt

SEQ ID NO: 253131 - DNA, 434 bp, Glycine max
  unsure (1)..(434): unsure at all n locations
agctgaaggcttgattcttgctcaatcaataattcttattctatgatgtacagncccttgaatgttaagttcgaaataaatggagcaaatgcttgctcggttaacctttcattttctttaacattttacatgcaacttaccaagatagaatcatttcccaattagtcgataattttgagtaccatttaatttaattttcaaaattataataatatcatttaattttgaaactattgaacaaaaattaacttaattaatctctaatgcaattagatcgtaatctcgtccacttttgtctattcttttaatttcctcttttttgtcttanaaaagcctagatcacaattattntagtcattaaaattaaaaatataaagctgaaatggcttcatttcaaagtaattttaaaaaatgaaatgatantttaaaaatta

SEQ ID NO: 253132 - DNA, 394 bp, Glycine max
tggttcgaggtacttacccgttgaagatcgaagaactatgtttatctaatgaagaacgtcgaagaacggttgaaacctttgcgaaattcttcacggaaaacgttacggaaacgtttcggaagcgcctcagcttagattgtcttcacggaaacaatttttccaagcaaattctaaagagagagaagtgcctaaggggctgaacccttttcttcttcacttcctcccctatttatagcaaaataggggaggtgcttgccgcccagctcgcccaggcgagccaggttgcttcctccagaagcaacagccttctggaggaatattctggagggcccaagtgggcctgggtgctatttgcaccccctttattacaaagtacaccccctctacttttttt

SEQ ID NO: 253133 - DNA, 441 bp, Glycine max
  unsure (1)..(441): unsure at all n locations
ctttcgattcattctatgtacccgtggtggtccacattgtgttttttgtttttntattctcgntccatttactttttatacccccttttgacgtgcttaagccattttatttaagtcatttctcgcttaacctaaaaataaaataaatttccaccgatcgcttgaattgtattattcgttaacttcggttaaaatgaattccgaccgttcggtcgtgccgtaaccacgttggaaatcaaaaaaagaggtataataataatatcataataataaaagacgtcttttagtaaaataaagcggaaaatcaatcggacgttttctctttgggatttctcattcttaattgaattgactaataactaaagtgaaactaaggctaaaatcaactcgcctagtcaagctcgtccataaaaaatagttttttttgaagtttgtcatttc

SEQ ID NO: 253134 - DNA, 449 bp, Glycine max
caagcttatgtggtctagcattctcaatgctttatggataattgacgaacgcacatactggagagatgacaatggacgtgatataatgctcaacttacctgggtgcaaaattccaccacatgaaagcaatttcgtagaggagaatatgagggttgcgaacatcataaatcctgagtcaagctaatgggatactaacctgttacgtgaactgttagcattttatcacaacatgttcagacaagacaacagatagagttcattgcacataccctctctttactccactagtttcctaagtaaatgaatggattgaatcttgaatgacccaacttttatagtgtatgaaggctatttgtaattgtaataaatgtaaccaaatcatcaccccaacatgcgatccgttaaatccaatcaagggatgcccataaccagcacatattttgttatta

SEQ ID NO: 253135 - DNA, 441 bp, Glycine max
ctaataaagtgcagaaattctttgctcgctgcacatgactgatgttatcttgactcagttattcggataataataataataataataataataataataataataataataataatatactcgagaaatctatggaaacgtaagaaattaaatcaaataatattaattccattattaggttatttgaaatagaaatataataataaattttgtttcatttatttatttacaactattcatttaaagacatgagataaaatacgatgaattaattaatattatttactaggtctttatcttagatatatcgtccaaataataaattaaaatttgttattctattttaatactactatgaattatctaaaaataatatgataatcttattaattacccttttatattttggttcaagcattgctacatataaatgtttttaag

SEQ ID NO: 253136 - DNA, 451 bp, Glycine max
  unsure (1)..(451): unsure at all n locations
agcttgtgtttagtcaagttgaggcatctattttgctgagtgaggacaatgtgataggaagtggagcatcagggaaagtctacaacgtggtgctcancaatggtgaggtggtggcagtaaatagattgtgtggagcacctatgaatgtatatggaaatgttggtgctaggaaagatgaatttgatgctgaagttgagacccaggggaggatcaggcacaagaatattatgaggtggttgggtgttgttgaacagtgaggatcaaaggctcttggtttatgaatatatgccaaatgggagtctggctgatttgttgaatggtaacaacacaagtcttttggatttgcccactacgtataaaattgctgtggatgctgctgaggggctttcttattctcatcatgaatgtggccctccattgtccagatgtgaatccacaacattttggtgat

SEQ ID NO: 253137 - DNA, 429 bp, Glycine max
  unsure (1)..(429): unsure at all n locations
tagtgccaccccaagtctctgggttattctatgacttagtgttttggtgccgtataaatactatcttcaggtactagcatgtatcatgcattaatcataagataattactaagtgattgtaggatcatgcatggcattcatactagctaggtgcctaaccgcttttgaatgattggacacacatgtggctagatgtattctgtaattggattttattattccatgtagttgctaaatgagatgacattgcttgtangatggtattggtgcttgaagtgttatgtttggtagaaaattgattatgcttagagaactgtgaccatgaatgataatagtgacctatacttggatcctatattgtagtataatcatttaacgtgatggtagtctctctatgttgctatggtgactaatgtgaatgtatgaata

SEQ ID NO: 253138 - DNA, 436 bp, Glycine max
  unsure (1)..(436): unsure at all n locations
tacacaataagtaactaaatttattctttacaaaattaagtttctaactaactaacttccactaatatatagagtggctactttgaaggaagggataggccttgattangccattctaatctacctaattaaactaattacacaaaacaaaatccaaactcacagcccaattattcaagtgcagaggttctgacttcaaaatccaatttgaccctctaaatgatagaattggccaaagcttatttgtgacaaaattgaatatatttttcttatatttctagggaccactcacattcttcaatttgaccacaattattaattaagctcaatcatttgcctaagaccaaaacgaagttaaagttataaaataaggatcaaagagatatcaattgagctaagaataatgtgatgcgccattattttcttctatttctta

SEQ ID NO: 253139 - DNA, 412 bp, Glycine max
gagacaacatagaatcttgagaagagagctctatattgcttttctttgtacgtatgcgggctcgaacatggaggatggcgtggtcactggccgccatattctctattaactccatggcttcttctgggggtattagcttgatcttcccaccgactgaggcatcaagcacctacttggactgaggccacaagccgtcaatgaaaatgttgagctggactggctcgctaaacccatctgtgggagtcttccgaagtaatccatggaagtggtcaagtgcttcactcaacgatccattagggtgtttgtggaatgatgagatttccaccttacccttcgcattcttagattccaaatagtatctcttcaggaacatttccaccacctcgctccatgtgcgtacgctaatcccctt

SEQ ID NO: 253140 - DNA, 384 bp, Glycine max
  unsure (1)..(384): unsure at all n locations
gatgcttctggtcaatatattaaccttgataaaatgtagattttattttggatatttatctaacgacaagatagctggtatttgtcagttcttatgcttcggnggaagatccctcccttttacgaatttggtgctagcttcttccaattatagaaaaattaaagtctaaacttgtttcttagaaaattttcttctttcttttatggggagagcccaatgtataaactctgttatatcacgcatgatcttgtatagcttccaagggcatacatgaccaactacatttattgaatccattgagaaatgggtgaagaatcttttattggttagtgatattaactccactaaaccaatcactgttgctttctaaagtttgcaagccta

SEQ ID NO: 253141 - DNA, 421 bp, Glycine max
tgcgttagaaagataccttcaaagaacaagaagtacattatttaagttccatgtccaaataacctaataaggagcaaagaatgaattatgaaatgaaagaaaagcatacaattatttccataataagcccacctataagttaatctactttcaaccaaataatggaattcttgtctatcaaatacatacacattgactgttatgaaaatatttatgcatgacataaactaagatagagacaaatattgtataagtattaatttggaagaaaaaaatatatattgtaatcacaaatccgaacatcgaccggtcatgtgacatgaaatagaggaaaaagaaagcacaactgatgtagcaacaacaatgacaagtggatcaaaacaatccaaagtcgaaaatcccaagcgcacaacaaatctac

SEQ ID NO: 253142 - DNA, 404 bp, Glycine max
  unsure (1)..(404): unsure at all n locations
tatctnttccgtgacagctattgttgttttatcaatatatcttctaagcagtaaatgcgttatggaaaagaataatatactatgttttaaggactcaatttgtaaatgtgttaacaaatctctacatttcccaaatgtgcttttctcgaagcattgcggaacggtgctttattaaaaataaaaataaaagcattcaatttcttgcaaatacaaaagttgtctcaaagctaagaggataacatgttctaataaagaaatgagaataaagggtttattgcgatgataataaatctccatcttctcacaatcctatcgccattatatatccctctatttctatttcaaantcatatatacatatatatatatatatatatatatatatatatctatatatatacata

SEQ ID NO: 253143 - DNA, 439 bp, Glycine max
tgtctgcctttccaacatcaagaaccaatgcttccactatatagttcttctccaaaatagttccagccactatggaatcatatcaaaatgagaattggtacttgcacttgataagaaccatccaaacatattagttaataactaaataccatgtgggaaggagaaaaattacactgataattggcaataaaaccaaaaacatcattataatgttcaaagcttataacaagtccaacatcctcaacagccttaactttgccttttgcaaccataccaatgttaaatccttcatcccactttgtatcagatgcaccagagccacagtattccaaccttgcaatctaattcaaagatgcacacaagataagaagtaatagaaaagggagaggatgtgaaaggaattgctgacaggaacacaggagaaaatttattcaagaag

SEQ ID NO: 253144 - DNA, 415 bp, Glycine max
gagcttggttatttccttcttcactacattaagaatcaccgcggtgagtcttctctatggctatcttactggtttagctccatcctctaaatttattcgatgcatacatgtggatgggctaataccaggaatgtccgccagggtctagcctatagccttcttatgcttcttgagaattgacaacaacttctcctcttgctcatcagcaagggaggcagatataatcactggaaaactcttgctatcatccaagtaagcgtattttaaatttgatggcaaaggcttcatttcttgtgtggtcggctggacagtggtataaggagatggtttctcatcctttacctcataaagaaagtcagaggtatgtgtacttcctgaaacatggttagtcctatctgactctataaaatcaatc

SEQ ID NO: 253145 - DNA, 435 bp, Glycine max
  unsure (1)..(435): unsure at all n locations
tctagagagttctacactactctagagttctccatgatgttctagaaaattctacacttttctagaaagctctagaattttctagaacctctccaatttgttatttaatttgatatttatttatttatttgagatgtttctttgctatcttaagtattgttttcaattgaacttatttaacaaatacataattttaattcaattacgtctatatgatacttttttatattttatttaccataataattttaatctattaaaaattatattttaataattatttttcagttgagtattcaatcaactcagcttcaagtacaaagatttatatcaacctaaacaatcctgattttgcaaagttcaagataggataaaatgaacttcgctcttttattttatttttatatacattntgtaacattcaacaaacaaaat

SEQ ID NO: 253146 - DNA, 411 bp, Glycine max
  unsure (1)..(411): unsure at all n locations
accggaccctaagacaccgcagcatgcaagccgggtgttgtacttacccgttgaagactgaagaacgatgaaaaacgaatgaagaacggcgaacaacggtcaataacctttgcgaaatcactcacggatacgttacggaagcgcctcggcttggattttcttcacggaaacaatttntctaagcaaattcgaaagagagagaagggcctaaggggctgaacccttttctacttcacttctctccctatttatagaaaagtgggggagaagcttgccacccagctcgcccaggcgagcagggttgcttcctccagaagcaacagccttccggaggaatcttctggagggcccaagtgggcctggttgctatttgcacacccatatttactaaatacacccccctaccttttt

SEQ ID NO: 253147 - DNA, 425 bp, Glycine max
  unsure (1)..(425): unsure at all n locations
acattcacattattaatgcccgctatttatgttctttctagctatcccttcctaactgaagatgtcctcattctaggaagcattcccattctcttatttactatatatgctggtgcctatccatgtatctcctctctgctgtcanttaattgaaacaaattataaaagctattcgacaataaaacaactgattgtcacatcaacatagtttcatcttangcattctgtgctgcagtcatctcatatttatttgctggctattcaactgcttatgtgttacagaccatgtaatatccatgttctgttttcagatttacttgatcaaaaaaagaaaacctatcccaacatgctgtgtttttagaccagatacatatatataatttatgtgtctgcctgtgtagctgttctatgtatgtccacatatg

SEQ ID NO: 253148 - DNA, 438 bp, Glycine max
tgaacacactcgatggagcatccacgccacacatctatagaatcttgtgtttttacttaattgtaaaaactaactcaaggtaaggattgatgtcacccctgcaagttgggagatggacgtctcagttatgaactttgcaggattaggcatatttgggaggtttgataacagcctgataacatgtgacccaataggccaacaacaacccttattttgaagccatattagaattcaggtttaggtcttactcaactcttaaaagctagtttgataggtgaaaattgcccccttataccactagtctaggtgtgatttcctacacaatgctataattattttgcagagttacataaattaatcatcctagacgttcaaaaacagctgtaggcataagcgtctatccacctccaaaacacggtagtataaaaagactatata

SEQ ID NO: 253149 - DNA, 441 bp, Glycine max
  unsure (1)..(441): unsure at all n locations
actaagctttgtaagttaagaaattttgtaagctttcagctntnnngtaagtgttaacccaatccagccttttcgataacacattttttttgtgcaactaatgcttccaaactgtccctccccttgtgaacttggataaattctttagtaaatattctaccttggcttctaaaactttacatccttcataaggggaagtggcattagtggtgttaatgcaatagcaagaagattcattcttttctttttccaaaactttttttttcttccaacaaatctttttgaatttccactagcttatccacatgccacctcagttttccctttagaagattatttgaaacagacaacttttatgcttcttgatgcattttattgaaagcgtctagtagcttatcatagttattgtcgacttccgaataaaaaatgtttacctcactt

SEQ ID NO: 253150 - DNA, 455 bp, Glycine max
agcttcttcatgactcatcttctccttatatttttatctccaatcatctttcttccttctccattcttctaccatgatcttaaataagtaaaagaatccattgatgaagaagatccaaggcctacaagctccacatggagctacatcatatggtatcaagagcatcttcgtctaggtgacgttcttttgcttcgactatctttttgttcggacgattcactttaattcattggtcttcatcttattctccatttatatcctccactttcttgttttttgatgttgtttatagtagattcaaaaaaataaaccaattaaattttagatctacacttgttcttgcatttctatggttcaaatattatagatctactcttgaatcatgtttttgtggtgaatttaggttctatcatttttcagtcataatctccttgtgctgaacctttagatctaaa

SEQ ID NO: 253151 - DNA, 434 bp, Glycine max
tcgagcaatattgatggttgttcagcttggaatggtggtgttgtttgttgacaacaaatgcttgggtgtgtggtggctagggacaatggtttaaacaatgatcgatgtgtgatgaaggttcaagtgagaaagatcatgactagctgcaatcatggagaagaggaatggtgatgatgacttacacacattatgagtatgaaactagaagagggaatgaatcatatgattgatcattgaaggctttaactttctttcaaaggccaggagtgtgaaaccattcattcaccttaggccaaagtcttagcttctcatcgatcttccacattattataaataacttggttgcttgcgcttcataggtgcaagaaacaatatcatcccatttatcttcacatcaaaagtttgcttgatggaaccaaaacaatggcaaatca

SEQ ID NO: 253152 - DNA, 427 bp, Glycine max
  unsure (1)..(427): unsure at all n locations
attcaccgccacagtcgtttcagcagtatccatgtttatttttctatcattagcatcattctcgattctcttatcacactgtggagtgacttcagcttcgctcttcacatctgaagcatattcaccttctgttttatttaaaacttgagcattgtccattacggggactggctgaagagtactttcactatttaaaacatcttnttgtggaatgcactccgaatctgcttctggtttcacaattttatcctccacaggtgccactacctctttcttcccgttttcaacatgatttgaagtatcccctttggacacacgagcagccaaatcttctagttgaacctgtgcttcaactaactcctgagtttcctccacagtcaaaggtacatactggcctgcttcatcattctcttttgcatcactcatc

SEQ ID NO: 253153 - DNA, 418 bp, Glycine max
  unsure (1)..(418): unsure at all n locations
agcttatgctgcanatatttacaatagacctcctcaaccttagcagcaaaatcaaccacatgcagagcaattttgacctctccagccacagatacaaccctagatggaggaatcaccctaacctcaaatgggccagccctcaacaacaacaacagcagcctgctccttcctttcaaaatgctgctggcccaatcagaccatacattcctccaccaatccaacaacaacaacaaccccagaaacaaccaacatttgaggcccttccacaaccttccctcgaagaacttgtgaggaaaatgactatgcataacatgcagtttcagcaagaaaccagagcctccattcagagcttaaccaatcagatgggacaattggctacccaattgaatcaacaacagtcccagaattctgacaagct

SEQ ID NO: 253154 - DNA, 444 bp, Glycine max
cctataaaactcagctgaagtaactaagcttattacctggaacccttcttcgttgaatcagaaatctatacctgtcgcaaaagtctatggtttatgctcctctgccgaccaccacacagatcttttcccttccatgcagcaacctggagcaattgagcagcttgaagcttatgctgcaaacatttacaacagacctcctcaacctcagcagcaaaatcaaccacagcagaacaattatgacctctccagcaacagatacaatcccggatggaggaatcaccctaatctcagatggtctagccctcaacaacaacaacagcagcctgctccttcctttcaaaatgatgctggcctaagcaagccatacattcctccaccaatccaacaacagcaacagccccagaaacaacaaacagttgaggctcctccgcaaccttccctcga

SEQ ID NO: 253155 - DNA, 357 bp, Glycine max
  unsure (1)..(357): unsure at all n locations
catctagccaagattatacaaaggtgttacaagagaacctaacggggtctaattatgtgggccatcaaatctatcatgtgttgacagcaattgattagcccatgaatctcctcgggggccatacatactttggccatggcttttgctttggctaatagacgcgggaggtcttgacttccattcaaggtcaaggcgaacctatccatccacatagtcgcttcttgatgcaatgcatcaatcaccctccctcttgcttctttntcggcggacacttgtgcaaaaccctccactagcttttggtcatgggccacagactaggtcaactcttccttgtattgccctatgatagctagcatg

SEQ ID NO: 253156 - DNA, 447 bp, Glycine max
  unsure (1)..(447): unsure at all n locations
acacttagaatactaagcttgactttgcgggttgattntagccttagtttcactttatttatttttcaattcaattaagaacgagaaatcccaaagagaaacgtccgattgattttttcgttttattttactaaaaggtatttttcgattcttatattattattttacctctttttttaatttccaacgtggttacggcacgaccgaacggtcgaaattcatttttatagaaattaacggatattntattttttgattaggcgagaaatgacttaaataaatgactgaagcacatcaaaagggggtatggaaagtaaatgaaaatgagaataaaagtacatgaaacaaatgaggaccaccacgggtacacagaaggaattgaaaagctcgatttggaagcttacccgttgaagaatgaagaacggatgaagaacggcgaataacgga

SEQ ID NO: 253157 - DNA, 336 bp, Glycine max
atactcaagcctagcaatatggaagtgtccgaagcacactataggaatcttttattattgccgagtccacaaaggcattgcatgtgtggggccccacataagaggacatgcacacgggaggatccccttgaatgctttgcccctgctgcattgagggacaattcagagcatacttgtgagagcacctgtaggagatgctgcagacaatagtaggagccccagacttatgcctatgccctaataacaaatagatgaagtccgaaacaggatgccacgtggaaataccacatacctgattcaaaatctaccttgagaacttagcatgggagcccattt

SEQ ID NO: 253158 - DNA, 435 bp, Glycine max
tctaagcttctattaagctgaaccattttatcaataaacacaagttgttttttattcagaaaattagaggttatctcttttatcttagtgagagtgattctcctaaattcttgattgattcaagaacaccctggctgtatcaaaagactttcacaacatttgtgtgttgccctcgctggaaagagtgattctttccttcctttcatcttcacccttgttcttttcaaccacaattccagaaaatacacctctgcccagaattatctcgtggccataactcccgttttacgcactccaattaagtgattcttgagccaaaattgaatttcaaaacgagaactttcacctcgtttcggaatcacctcatttggagccctgtagcttcagttattgccatttctatatttctgtccagccaccacttaacctacgttt

SEQ ID NO: 253159 - DNA, 386 bp, Glycine max
ttccaaaacctccatctccaattatatttgccttgctgaaattatcagttgcttcaaggatatccaccacagttaacttcaggagaggctgttcaaacattgcaacattgatactcaaaggttcctttgatctgctactgctcaagaaatagagattgtgatcaacataactgtttagtttgcgctccttaagctcctcaggatcattttgcctcctgctaatccatttatgcagaagaaaagcaacgcttacacttagcaatatgattgtaaccgcaattacagcaagacgccatgcattatacaatattgatctgccaatgcttttatcctgagaatctatacccaacatctggccacacaggtttttgtcccccgcagtctaa

SEQ ID NO: 253160 - DNA, 333 bp, Glycine max
tattatatatctggacaagtttggatatgatggataagaaaatgaatgtgagccttttttccctttgaaagacttggtaaaaaaaatggtttaaaaaaacttttaattaatatctgaattttctttatttccttattagtatatagtgtgaggggtagagggtgtcacagagtagcttgaaaaaggatattagatatttcaaggaacacttattttggctggtgtttcaagcgacttgaatgtaaggatcggaaatggggcttactgtaacttcctggaagtgagcaattctccaagtgtattaaatgaaagtcaagggcgagtcccaggact

SEQ ID NO: 253161 - DNA, 429 bp, Glycine max
  unsure (1)..(429): unsure at all n locations
ctatttaagtcgattcctccataaaattattaatgtgtgtgtgcgaatttatcccaaaatggtaaattttattggaccactggctaagatgaaatcgagacggcagcaggaaaaagtagggaaaatctataaggataggaggttagatttagagtaactctaagatagtgacgggtgggtgatggtaaggactaaggagggaaccccacacttttagctctgtctatagaattattgcttgttggtcaaatctggataagaattaagatattacgcaagctagattcgaaactcaacattggatattctggattgggagccatatcgggtggttgcttttttcctatttacacttccttaacaagttgatagatgtttaacacgataacaaagtaaaaattacctcatttntacacaaagtagttccta

SEQ ID NO: 253162 - DNA, 393 bp, Glycine max
gcagtactctgaaaagaactgttgttatggacaatctattgcacacgaccatacgagcaccgaatatcactttttttactctgccacataccgagataatgaaaaattattgactaattcttcttacgtggaattcaaaaacttgtttgcatgaagttcgatatccaaaatttattttcatgtgatagactaccttccttgttatatataaaaaataagggaaatggtgaaattattctcaaagtgtaagatatttataaattaactttgagtagatagagatattgggcctaaacatacgactccttttatagataggctttatctctttggaaaaataaaaatacaccgtatctttgaataaattatacaaaataggtcttaccataaaat

SEQ ID NO: 253163 - DNA, 442 bp, Glycine max
tgaagacaagactatacgaggtatcttccttgggtatagcattatctctttggctaccgcgtctacaacttgcagactaagaaactcgtcattagtcgagatgttgaagttgatgagtacgcttcttggaattgggatgaagaaaaagtggagaagaacgttcttatacccgctcgactacctcacgaagaagctgaggaagaagacccaggtgaaccaccttgacctccaccacaacaacaagatcaagaactatcatcaccagagtctattccaagacgagtaagatctttggtggacattcaaaactatcaggagagttaaactcagcaaaatacgtcattaataacttggcaaataaattcaccaaaggcagaccaaactgcataaaagatgagcaaaatacctctgatttaattgttgctttcattccaccggctga

SEQ ID NO: 253164 - DNA, 393 bp, Glycine max
catgcaagcttagagtcaaatattatgaagaccactttatcacacttttgctcgccgtttaagaggccttcaaatgctcgattccaagagagggctgaaaaaggactttgttactgttgagacggcaaatattatccctggtcatatatgtcccaataaacaattcccagcccttatttgggagagggaccagatgacaaagaccaaatctaatacgaggcggggcatgaaaaataactacagagcatttagttgcccctatatagcatgttaggattgacttcaaaacaatccatcataccttgtgaaaaaagtgatgagaacagaatcattgtattagtggagtgtggcgcctctcataatttcattgctgttgcggcacggagaaacaac

SEQ ID NO: 253165 - DNA, 444 bp, Glycine max
  unsure (1)..(444): unsure at all n locations
tgttaactntcacgattactatcttaattggtaaacagtactaattatttaacgccaatggtgcacagaaattaagctcatttgattatatagtaagccttttaaaacaagcaaacacctcagatcttcggagggcagtgacagcagaggtgcagcagcagatccattttgaccgttcttgagcagcagttgatggacatattcatcaggcaaactctgcaccttcccaattccagcattatccgacaagtgctctctaacaacatcatgcaaacgcgccatgagctgtttcctcaagtcctcgaaggcgaaatccaacctctccagcatctccagcgagttcttattatacataaacaatccatagaacagatcaaagctgtccccgcaagtgttctccaccaaattcaacaacgactcgtagcctctggtgttaatcggagg

SEQ ID NO: 253166 - DNA, 459 bp, Glycine max
atcttcatggtgaatcaaaggcgacacaaaggtgttgtgtttataacaatgatgataacacaagcatgatgactaaggtgatgacaaaaagctctaagatcaatcaataatcaatctaagtgaatgaagaacaagtctagagttcaagataagaatcaataataattcaagactccagaagaaagactatagtcaagaatcaagattcaaggttcaaaatctcaagaatcaatatcaagattcaagactcaagaattcaagaatgaagagaagacttcttcaatataagtattaaaaagtttttcaaaactttgaatagcacatgagtttgtgacaaaacctcttaccagagagattctactctctggtaatcgattaccagattgtcgtaatcaattaccactagcagaattgttttgaaaaagtttcaaattgaatttaccacgttcctattatttt

SEQ ID NO: 253167 - DNA, 436 bp, Glycine max
  unsure (1)..(436): unsure at all n locations
taagctccttctactgcacaaggctcttaatattngaagagtattcttgtggaaccttcactcgacgaagacactgacaaaaacttatcttctcattcttggacaaagtatggcaggctgggggcaagtaaattttcttcccatcagaccttggatgcaactgtgatcgtatacccatatcagctagatcttgacgggtattcaagccatccttcgtcttgccttgaatgttaaggagcgtcccaatcacactatcacaaacatttttctccacacgcataacatcaatacaatgtctaacgtcaagatcacaccagtacggaagatcaaagaaaatggaccagttcttccatatgcaactctgacttttgtccttnttttgggtcttcccaaatacagtattcacgtgttgaacccgctgatatacctgctcacc

SEQ ID NO: 253168 - DNA, 334 bp, Glycine max
aactggacaagaactgaacccctgtgcacaaaagagggtaatgaagatattcaaggcgtggacttaaccttgacaaaactaattaccggaggcaaatggaacctgggccagaaggctatcattctaaatgatgaagtcatgaaaagtttgatctctcatccccctatccttcatcatgatgtgcatgactcatacgcttgggatggcaataaaaatgggattcataccactcattcagctcaagctaggctgcaaaactaacaagataactctacagcggcacaaacactcgaccacaaccggatatggaagtgcaatgtccaccaaaacatca

SEQ ID NO: 253169 - DNA, 419 bp, Glycine max
  unsure (1)..(419): unsure at all n locations
agatggatgatcaagacagtctatagagtcttagaaagggtatattaaataggaagggaattccaattgaagtagcaaaaagtttggccaagaattattaagttaaaaagtctttttcaacaaatttactctctggtaatcaattaccagaggatgtaatcgattaccagtggtcaaaactaatttacaacagctattaaaatttgaattcaaaatttgcactgtgtaatcgattacacatatatggtaatcgattaccagcagtttctgaacgttttaattcaaattntaaagattggaatcgattacatatatactgtaatcgattaccagagcagatnttcagaagatattctcaacagtcacatctttttgtgtggttcttgaatgactatcaaaggcctatatatatgtgactt

SEQ ID NO: 253170 - DNA, 438 bp, Glycine max
cgcttgagaagcttctatggaggctgaatctttgagcttctatttgtccttcaatggtgattttcaaccatggagttgttgcgaaagataaaggagaagaagtgagaggaggtgccatccactatagaataagccacggaaggagaagtttcaccaccaagagagtgtcttggataataagcttagagagaaagcttcaatggaggaagagaatgagagagagaaagggggggtgtgggagttgaaggagattaaggagagaagttgaactttgaagtgagtctcacaagtttctcacaaattttccttcttaacaatcttcttggaggaatccttttcctctttttccttccccttggcctttgaagacaaggccttactatccttctttttcttttggtttgtaagttttcttcctcatccctcttatctttcata

SEQ ID NO: 253171 - DNA, 400 bp, Glycine max
  unsure (1)..(400): unsure at all n locations
tgggaacataggaagtggaggtgaatctgtggtcatgctaagtctctgacttacttgatgacagngaaacctcatctagagttttttctctttgatgatacgctgttgctggtagtccctaccatcgcaatgcttgatgtcaaaggggatgatatctctataaacctttgaaagctagatgcaaccaccttgggaattatcactaaatagcgagcttttagttcatcccccattaggttcccgaaataggggcacggagcaaacacgctatgtgttggttccttcatattgccatgcatatttttgcaattccatgtttgtgtgtgtctctattgagtcattatttgatggcgataccatgcttgttcggccatatatttctattttgtctatcaatcac

SEQ ID NO: 253172 - DNA, 436 bp, Glycine max
  unsure (1)..(436): unsure at all n locations
actcagctcgtggattatgggacccgtcatatgtggactatgtgtctatctggcgatggngcaagtcgactctccacatccacaaatcacacataaatccaccatcccaagttgcccaccttcaactgagctcacgtagtcccacgtagcccttatcctgattcctctcaacaccgggtccccatcaatccctccaagcttccataacatccaagcaattcaacatccaaacatcatgaattatcagaaccaagaaaacagggcagaggcagaaaactctgcccaaaacacaaaccaataccacagctgttcttactcaaataccccaataacattttctttgttccaattcgttcaccgctggatcgactcgaaaattttactggagggccctagtacataagtctacattttgaaccgtgggatttgctagaaa

SEQ ID NO: 253173 - DNA, 442 bp, Glycine max
actaagcttcttttcctggcttattccctagtggatggcgcctcctctcacctttctcctttatcttccgctgcaactccatggctgaaaatcaacattaaaggacctcattgaagctcaaagatccagtctccatagaagcttctcaagcaagcttccatcatatggtatgaatgtctttgatttagcaaaatggaagagacaaaacatcacagaggtttaccacaactggaagaatctagtatgtgatgcactttgggttatttttcaagtagtatcgcatgtgattgataggtactttaattatatgcaagattagttacaaatattatttcatcaataaaattaattgaattacaattactactaagatccaaatgatacctagtcatttggaaattgttcttaatggttctattcaggattgattgtagtagcatta

SEQ ID NO: 253174 - DNA, 348 bp, Glycine max
ttcaactgaattcaccacgttccaactaatttcaaaacggggtcaacgatcaccagatattggtaaccctataccaatgtgtttgaactatcaaaatcaaaatcaattgggaaaagtaaatcccttcacaaaaatgccttgggtaatctattacattgagttggttatcgattacaatgataatgtttgaaaaaaatcaaaaatgtactttttcaatggtttcaagattttcaaaagtaaaactcctctatggttttctggacaacatgatagtctttaaagcagacttacctgctttgaaaaaaaacataaatttttacaaccttaactgttgacatttctgatttt

SEQ ID NO: 253175 - DNA, 414 bp, Glycine max
tgagatgatgaagtgtagaagggtgaaacttcctgcttatattcgttgaccacagagtggtacctggagatatgtcgcgggggtcaggagaccttggggacgtcaggtggggtgctattgcccaaaaccaagcttgaccaatcccgacccaacccgggcatagtcagtcagtgagaacctgtgatgtacctaagcaggcgagctcctggcagtcaacagataaaaggaacaaagaccacaaagcaaggaggcttgtgtggtggctggccagctgtgaactttgaatttatatgggatgtggcctctggtaatcgattaccaagagtgggtaatcgattacaaggcttaaaaatgaagaaaggaggctaagatggtctctggtaatcgattaccaagggggtgtaatcgattacc

SEQ ID NO: 253176 - DNA, 378 bp, Glycine max
  unsure (1)..(378): unsure at all n locations
ctcaatggatctcangaatatgaaactgcgcccaatctatttcttggcaaagaagnttatcatcgtgtgaaggacatcataactatctttgggaagacgcaaaaaaaaaaccccaatgagaaaaacatctggaagaaaaggtccattttcttcgatcttccttattggtctgatcttgatgtaatacactgtatagatgtcatgcatgtggagaaatttttttgtgatagtttaattggcacccttcttaacattaaaggcaagacaaaggatggtttgacgtgtcatcaagacttgtgtgacatgggtataccagaccagttgcatccaataacacaaaggggctcgaacgtatctacccgccgcatgtcacaccat

SEQ ID NO: 253177 - DNA, 302 bp, Glycine max
taataaaacttacctctatctaatttggtgacagaggcaaaaattactgccttacctgatcccatatcaactcatgctttattgggagccacgtgaaacacagatgaagggctgctctcatgtctattaaataacgtgtgagtttgcattgacaacatgccacactcttcatcatgcccgtgcacagaaattacgtgattccttcgtaaagaagattgtttataggtaaaactttgcaatccgcgtgtgagattcataataactatgtgacaggtgtgtctctactttagacctaacaacac

SEQ ID NO: 253178 - DNA, 429 bp, Glycine max
ctgcagcatgcaagctttgtctttggtggtactcctaagcttatgatgtgatattctatctaaaagagtacggccatttctgataaatattttaacatttatactaatgatgagtttctaaatagctgaccatataaaatatttagaaaaagtgctaatttgtataatggctatcttaaaaaatatacaaagaatggcgtcttattgatagtataaaaaaattagtattttaagccaatattcatataatatagtttatcaaataggatagagaaggtaatttacctcatatgtgatcctgttacctatatcaaccttggtaacaaacttgctgtctatggtactaacacccacagtaatcgaccaaggcaaataagtggatagggaggaaagtcgtgaccattgttcctgcggatgtactgtaacact

SEQ ID NO: 253179 - DNA, 438 bp, Glycine max
gtgacttgagtcatcaagagattataaatatgtgaccatgtgttttattttcaataatcatcaatcatctttgaatcatatatctttcaatctttacaacatcatctctcaacatctttcaatcaatctttcaatatctttctacataattttctgattcatttctcttcatctttctaaaagttttttatcaacactttctttttccaagaaaatttctttgttcaaaaacttgtgctattcatctttttcattctcttccctctttgccaaaagaacaaagggataactgcctgagaattcttttgattcttcccttccccttaagcaaaagatttcaaaggactaaccgcctgagatatcttttgtttccccttacaaagattcaaaggactaaccgcctgagaattctttgtcccaacacattggagggtacat

SEQ ID NO: 253180 - DNA, 385 bp, Glycine max
attaacttggctgtagtatcgggatcaaagatgacatgggcgactgcgaacggacaaagattttccggtccaaactagagtcattccaggtataaagatacatgccgctactatacccaaacccaccattttcgagcccatagagtgggctcaaggatctttctgggattggaggggctgataccgctttaccacgttcaatatgcttcccggaggatatactagtagatcaaagtatagacaagacaacagttaacatatatgtttcctgaatagaaaatcgaaaacacaatttagcccttattttcttaagaaatctctataaatttcgaatagacacgatcaattcatcaaacacattgagcgagctctttttttatatatt

SEQ ID NO: 253181 - DNA, 430 bp, Glycine max
  unsure (1)..(430): unsure at all n locations
aaatattnctatttagagacaacatatacttgtttgagggagacctataaataccaaaagctgtgaagcaatgaagtatgaattgaagcgctcgttattcaaactctttctataaaaatctctttgtgtaaattctagtaaagtttacaaaagctctcaaaacactttcattatcttgagagataagactaagtgttgaaagtatatatttttctgtaagatgattgagtactaaccattgtgcaatcaaaacaaataaatctttcgatttgtgtttgagccaacaacgtcttggtaggatagagaatactaatcgtaataagcttgatgtggaacttgatctaagaagccagaagtgacagcgataaatacttataaactattcaagttagagaaacctggcggtttgccaagaattggatgtagttac

SEQ ID NO: 253182 - DNA, 339 bp, Glycine max
accctccttaagaactagcccttttcttcctctattgcccttaagggaacacaccccttggttggttctccatttggttcttaaccctctcatgcattcttctttacaaatactgacctagattccccttctttatgtataaaagaaacgtccagtgggaagggaatgagggctaacggtgttaggggattgaacccatagacaacctcaaaaggggactgcttggtggtctatgaacccccctgttgtggcaaattctcatgaggaagatactcatcccaagacttatggttgcctctcaaaagagcccttataagggtggataaagacctaatcact

SEQ ID NO: 253183 - DNA, 424 bp, Glycine max
  unsure (1)..(424): unsure at all n locations
tgaccaatcccgacccaacccgggcatagtcggncagtgatatatttttatgtacctaaacaggcgagctcctggtagtcaacagataaaaggaacaaagaccacaaagcaaggaggcttgtggtggctggctagctgtgaattttgtgttatatatgggttgtggcctctggtaatcaattaccaaaggtgggtaatcgattacaaggcttaaaaatgaagacaggaggctaagatggtctctggtaatcgattaccatggagtgtaatcgattaccaggcttgaagacgagatcaagaagctatgagggcttctggtaatcgattaccaagggggtgtaatccattaccacgcttataaatgaaggtagcaggttgtggaggcctctggtaatcaattaccagtctgtgtaatcgattacac

SEQ ID NO: 253184 - DNA, 449 bp, Glycine max
  unsure (1)..(449): unsure at all n locations
agcttgacataaaaatagaaactgtgtgatctatatttccatctgggcaagaatttcactgtgcattgaattgcagtgtaatttgtctccgtgtgagtgaactctgtgcaaggtttactctgagtacaaatatcccaaaggaggttagcacactaatctagaaaattatgataagatttaccagttttaacaaaaacaatttttaccatttttgacaaaactctactctattcttttatagntagttttggaaaagtgcaagaagccatataaggcatggctgagctcgtgcaaatctcctcaaaggttgttcaagctgccaattagtcatattaatggtcattcaaagtgcttagtgtaacatccacattttcgtaaataaattaaaaaatatatttaaaaataaatagagttttagaaaaaaaaatgatgagggttttataattaaa

SEQ ID NO: 253185 - DNA, 417 bp, Glycine max
ctcaagcttcttatccaaggctcatcttggtggtgaagctcctttttctatggtttattccctagtggatggcgcctcctctcacctcttctcctttgtcttctgctgcatttccatggtggaaaatcaccattaaaggacctcattgaagctcaaagatccagcctccatagaagccccacaagcaagcttccatcaggatgttgagttatgtggacttttattgacttacgttgaaattatgagatttcaagttttacttaaacctgctccactaaaaccacaatcctggattagttaactgttggatctctttcaaatgtggactataagcttgcaacccaattttacacaatctgaccgttgggatttgcaatataacatcttgagtatgagatatgatattttaaccgaagc

SEQ ID NO: 253186 - DNA, 412 bp, Glycine max
  unsure (1)..(412): unsure at all n locations
tcgcacaacttgtgtaatcaattatagtgcgactatcatctattattacaaagagttttaacttcagaagaaattttctaactttagacattttctccttactcctacatgaacatgcatgatgcacatatgaaatgatagagactaagatgcaacacacaatacaacaatcaacataaatgccactcaagagagttggacatgtaaaagacaaaaacttcttcaaacttcaaggctaagtcttcatgttgctccccctatctctaacaacaactatttctctatagtgcgtcactccttgtaagttaaatccacttgataattctcctttttgttccaatgtttccttatagtatcgctntttgttctcattcacagcacgaaactaggattgaaactttcaacaatggtg

SEQ ID NO: 253187 - DNA, 438 bp, Glycine max
  unsure (1)..(438): unsure at all n locations
acacaanaaactcagcttccatcagtggtaatcagagcacaagagcttcaagttggttgttcttaaacctccattatttttttgctttaccttctctcgcattattgtttcttcatttttctccatgtatctcctcacgtgtcttgtgctaaatgtttttaacatgattctttagagtttccaccgattaaacttgctatagaagctagatttgattctctatggttcaaatttcttgttattgttcttgagccatgagttgtgttgagtttacgttcctttgagttttgtcttgttatttttttttgtggctganacctaaaccataaattnttacaaaagcattaaagtagaagaaaacctcacaaatctatagtgactcgttcacctattgtagttttgtcaaagaagtcatgtctagtcatgaaacttgtcaca

SEQ ID NO: 253188 - DNA, 321 bp, Glycine max
gacacacagaaactaagcttgcgtatacttctgcagatctaatatgagccgaccttttatttttttttcccatgcatacacgagaagagtatcccgtccttcggaacgtggacaaaccaactccttcatatgtgccatccactggagaatataggccatcctaaggttctgggctacataagacactataagttgggccttcggatgattaacacctgcggacatatttgtgaacgggggcacttttcaatgatgatgattaggccgcagagaaaatgccccaactatcttgaattggctactcatctgagccacacttgg

SEQ ID NO: 253189 - DNA, 294 bp, Glycine max
ctatgaaactcagcttgttggtcaacgcgaaatgtccctgtaggacacaacttttttttttcatactcgccactatctatactgccgctgtccacattgcgctcatctatttaagctgagtgtgcactcacctctagagatcacacatgaactgcatatgtgcaaacacttttatgttgatcacacctcgacctagcatatatatctcttatcgtctggacatatacggggaacatctgtgccaaacatacattcgcagtcatatgtatcagaagaaagatagaatgcggcaat

SEQ ID NO: 253190 - DNA, 452 bp, Glycine max
  unsure (1)..(452): unsure at all n locations
ctctagaagaaccttttgtgtaanaatccttggtgttttaattatgacaaacctcttgaatacaattcataagtcttctgagcttatgtctattgaggagtttgcttaatcgtatttaaaaaagacacgttctataaaaaaaaataacaattgaattaaactcagggttgtcacgagtcactcataaaggatgataagcttgaaagcttaaaagaagactcaaaatatacttggctatgtactataatgaagaagtcaacatgttcactgaatgaagagaaaaatatcaagccataagaagtagctaaaaactaaaggacaataagaatgttgaaacatgaagatgtaacaatgaacatgacattaagaacaacattgtttcaacacactcagaatgaatntcatcaacaggatgagttcatcttgaacattgtatctaacattctagaaag

SEQ ID NO: 253191 - DNA, 433 bp, Glycine max
  unsure (1)..(433): unsure at all n locations
ntaaatgaggaagtgtagaagggtgaaacttcctacttttattctttgaccacagagtggtacctggagatatgtcgcgggggtcaggagaccttggggacgtcaggtgcggtgctattgcccaaaaccaagcttgaccaatcccgacccaacccgggcatagtcagtcagtgagaacctgtgatgtacctaagcaggtgagctcctggcagtcaacagataaaaggaacaaagaccacaaagcaaggaggcttgtgtggtggctggccagctgtgaactttgattgatatatgggatatggcctctggtaatcgattaccaagggtgggtaatcgattaccaggcttaaaaatgaagacaggagactaagatggtctctggtaatcgattaccaagggagtgtgatcgattatcacgcttgaaaactaggtc

SEQ ID NO: 253192 - DNA, 443 bp, Glycine max
  unsure (1)..(443): unsure at all n locations
catgctagctngatgagtatttattcaaccacaagacatatgtgattattccattgtggattccattattttgtgtaaccaagagacattcaagacttttatttaatactcgactaatctcctttaactagatgaagccattttgaaataaagtgataattacccttccgaattcatttttgatccatgacgctacaggtagtattcccaaattcggccttctcgggtttttgttctttttattggccctttgagctcttttgtaaaaaaaatcctaatgtaagatccaattaaaaggaagttcaagtacaacatgaataacaactcagttaattcgtacattagttgtggctactcatttatgattattacattagatggtatctatattatgtttaagagatttaattattgacaatgagtcggctatgtcaattacatta

SEQ ID NO: 253193 - DNA, 401 bp, Glycine max
  unsure (1)..(401): unsure at all n locations
tggaatctctacacaaacatgcttgatagcacctttgttatttctcgtanaatacaagtgaaatgcagtggtgcataaaacaagggtgagagacgaacgtttttgacactggaagaagctggtttggttgagatatcaggtttgagcacacatgaacgctttctatgccgtttaacggtgcgtacctctcttctcataacaacccacatttttaattaattgacaatgtaaaacatttctaactagttcacaatataaaaaaatttacattaacataacataattattaaactcttatttgtctgtttatactatagatatcgtccctgaacttgctcagagtgatatcagagcacgaaggatgtgcaattgaggagctcaatgctgccaagatatgtgat

SEQ ID NO: 253194 - DNA, 146 bp, Glycine max
ccccaaaaaccgcatgaaaaacccaagagggtaactttttaagctagccccacacccaggaaatttgacccaggcccagcggtcaactactgaaaaataaaaggcccctcttcagccccgacttgacatctagataaacgaaaacc

SEQ ID NO: 253195 - DNA, 437 bp, Glycine max
tctctgagaaaacttccttgagaagctagagcttagctacacactcttctctcataactaagctcacctccttgagaagcttccttaagaagattcctaaagaagctagagcttagctacacatacctttctaatagctaagctcaccttcttgagatgagaagctagaacttagctacacaccccctataatagctaagctcacccccatgacaaaaaccatgaaaatacaaaaaaaggtccttactacaaagactactcaaaatgccccgaaatacaaggctaaaaccctatactactagaatggccaaaatataaggccccaacgaaggaaaaacctattctaatatttacaaagataagcgggctcatacttaacccatgggctcgaaatctaccctaaggctcatgagaaccctagggcctacccttggatc

SEQ ID NO: 253196 - DNA, 150 bp, Glycine max
tgatttcgcgagagaattcgatggagcatatcgagcgtagcgagatattataagcctgagtcggacatccctgtgagaagttatgaccatttgaatttttctagagctcccggttgtcaattttcagcctttcgagatgatatgcgcccg

SEQ ID NO: 253197 - DNA, 406 bp, Glycine max
ctcgaacatacacatcggaaattgtctttatattcaaatggccataacttttcacacggatgtccgatccgggcgcataatatgttgagaggctcgaaattgaacaacgaaagctcttgagaaattcaaatggtcataacttttcacactgatgtccgattcaggattatactatatcgatacgctccaaattaaacatcggaaactctcgagaaattgaaatggtcataacttttcacacggatgtccgattcgagcgcataatatgtcgagaggctcgaaactgaacaatggaaactctcgagaaattcaaatggtcataacttctcacacggatgtccgattcaagcttataatatattgagacgctcgagattaaacaggggaaactctcgagaaattaaat

SEQ ID NO: 253198 - DNA, 197 bp, Glycine max
ccgagcaaccaccggagggacaccctttttcgaaggaacaaacaacccaaggggaccaacaaaagcgggcaaccacccaacaggccaaaaccccccgaggggaagacacgggaggaaccaagagtagggcaacccaaaaagggaggaaagcagcccccagaggacaacccaagccaagaaggccaacgcgaaagcca

SEQ ID NO: 253199 - DNA, 424 bp, Glycine max
  unsure (1)..(424): unsure at all n locations
taagaaagcccaagcagtcaaggagaagatcaagtctatatctatcatagtctgaaaggagtatgatgaactgaatgacatcaacttagccactgccgaagccttggagcaggaaaccaagagggcctgaaaggaagaacacgtctgaaacaagttttgaggagctttatggggcaacaacagcgagcttaagctctgaagagacgaaagggatcagtcgcgagttgaaggtatgattttgaaggacaagttaaaggcttgtcttaagtccaaaagaaatttgtcccaacagttaagcgagacagaagggaaaatgttggccatcattgataaatacaaagaaaagttgaacctagcaacagctcatgagcatatgctagtggacgagtacaccaaggtattcgcggaaaaagaagcanggggg

SEQ ID NO: 253200 - DNA, 204 bp, Glycine max
aaatgaagttaccctaacattaattagtacaacgtctgcataggaagcccctactttaatatgggaatcaagctaaaacacaggagttaagaaaacaaagttttaacaaaaagttggacatacccctaatagagggcctgttttccggaaaaatctaaccacaattaggggaaaaccgcttagaactctgggccccagggggga

SEQ ID NO: 253201 - DNA, 437 bp, Glycine max
ctataaaactcagcttagaggaagggtcttcaacttgcagctcagagtggaaagatgtttgctccaaacatgcgggatctccatgaaaggctatcatggacaatgtcaccacaacttacaaatgctgatcagccaaagacaaaagttgttaaatcaagcagtaaaagtgttggtgttgaggcccctgcagtgcaaatcaaaaggccagctgacctaactcctaaaaagtcacaaaaggtatcattgttgttattgttcaagttgttggttgataatggtttattaatcttttatatttctagcttgttgtagaagctcttataagctgtcctgttatctgtcaccataggctaggctgtagcttcatcatgaactatttttttgtactatctggtaattctcatatatatatatatatatatatatatagatacata

SEQ ID NO: 253202 - DNA, 396 bp, Glycine max
  unsure (1)..(396): unsure at all n locations
agcttagccctagaggggatagaccttntttttgtttggagaggagcaataacaatgcctataggttggacctcatanaagagtatggagtcagcaccacttttaacatttcttatttaattccttttgtaggtggagtgatattgaggaggaggaactaacagatttgaggtcaaatcctcttcaagggggaggggataatgcaatcctccctaggaagggaccaatcactaaagccatgaggattgggctaaagctgctgaagaaggccctatggttctcatgaacctcagggtagatttctgagcccatgggccaagggtgggtccaattatcttcgtacatattagattaggatgtcattatatttggttcttgtatttagggctccataat

SEQ ID NO: 253203 - DNA, 391 bp, Glycine max
tacggatggaacacttacttgttggtgatgaacataatctctcaacggaatcaaaaaacgcgaaaaatgatgaccctagggctgcaaactcgtcaatcccgtgggtatggcttttgaaaggggggaaaagaagtttttgaatgcaaaaacgtcccccctttcgtcattcttataatttggtgcaggggtggctcgcccaggcgagctaacctgcattttttttttttgagaggaatattgaccatgtcccctccttccttagggtttagcgtcttgcttaactcgaacttacttaaattagagttaggcattgattacttatctctaacacaaacaaaaagtaaaagaaaactgcgaatacaaaggatacggggcagccttgcagcgacgt

SEQ ID NO: 253204 - DNA, 354 bp, Glycine max
  unsure (1)..(354): unsure at all n locations
acctgcggcatgcaagcttgctggttgcanccacatttctgctagttgagcatggaacccgtgtgtttgctacccttgtacctccttctacctatcattctgtctgtgcataagcttgccccttgtctatcttaatttaatagggtcattacttatttttgttggtataattattaaccaaagaagaaaactattatgcagaacagttcaaatgcttgcagtatatgttcactttgcgtcacagcaggcaggtgttgatggttttccttatgattcatcatggacacagtcacctttcttatgataacgtttgtagattgatagtaattcagagcatagaagaaacagttcata

SEQ ID NO: 253205 - DNA, 477 bp, Glycine max
  unsure (1)..(477): unsure at all n locations
agatgtacccgccttgggacttagtattctcgcaatccatgtatggtattatatctttggtttatttgatcatatattttttctcttagctcttatttntatatttaacctgaatttttcccttctagcaatgacagagacctgttgggaaataacttaattggtcaaattctgcatagtttttcctaccctgctgaagtttccatgtatgtgttattcgtttcataccttgttgcagggccagcttaatgcccaagcaagggcattatgccccccaaaaaaaaaggccccanaattttttttagtactaatatacataaaaaaaaattattgtaaaattatatgtgaaaataaattttaataacatattataagtaactattaaatttttattggtaccgtaagtaacaattaatgtgcaataactcttcaccaatatcatagctttgtttagaaaaaagagatttaatagttaat

SEQ ID NO: 253206 - DNA, 437 bp, Glycine max
caaaaaatttgggcagggggacattcctctagtaattctgacttaccgcagcctcttatccctcttccattcccacctagagcaattccaaacaaaaaaatggaagaagcggaaaaaggagatcttggagaccttcaggaaagtagaggtgaacatacctctgctagatgccatcaagcagattacaagatatgccaagtttctaaaggagctgtgcacccacaaaaggaagctcaaaggcaatgaaaggattagcatgggcagaaatgtgtcagcattgataggtaaatctgttcctcacattcctaagaaatgtaaggacccaagtactttctgtataccttgcattattgggaacagtaaatttgagaatgccatgctagatctaggagcatcagatactgtcatgcctctatgcattttcaattctttatctc

SEQ ID NO: 253207 - DNA, 488 bp, Glycine max
ggctcaatactatttacacaaccaaatgcatatacctattcattgttttgaactatcaaaacatattcaacctaccttgaatataatattctatgagtagctttcgaagtagtgtataacagtatttttgtatggttattattgaaaaactattttatgaaaaggatattgttttctctcaacaactcttcctgaaattggttctttgatatatcttacaacttcaaatgttgagtgctcttttgcaagaaaaaagtagcatagtcaattaagtgtcactattcaacctcattttctagtgaccttttgatccacttcacttagttggtgtaattgattgataatgtatgaatatgcccaaccttaaaaagacttaactaatagtgcaatgcaaagcttatctccctctattatgaaatgttaatgatatgaattgtttgggtatgatcaattacaataatactcaatgtaataacaatgcccgatat

SEQ ID NO: 253208 - DNA, 368 bp, Glycine max
  unsure (1)..(368): unsure at all n locations
ctttatatanctgcaccatcctatcaataaagacaagatgattattattctagaaactagagagcatctcttgtatcttattgagagtgattctactaaattctcgagagactcacgaacaccctggctgtatcaaacgacttacacaacctatgtgtgttgccctcgctggaaagagtgattcttttcttactttcatcgtcaccctcgtcctttcaaaccacaataccagataatacacctctgcccagaattatctcaaggccataactcccattttacgcactccaattaattgattctccgacctaaattgacttttcaaacgagaccttccacactcttctggaatcaccttcattcgagcc

SEQ ID NO: 253209 - DNA, 402 bp, Glycine max
  unsure (1)..(402): unsure at all n locations
tgcagcatgcaactttatgntgcaagaaaacctgccctctatcaatcttcttataataactgtactggnccattatacgacacatgtgaaatgagcaacccgagtcaagaacccaatctggtttgactggtgcctctgaaacacacaagacatcaacactttcatacccttttaaggcaacgtctgcatcaccattgtgattggtctgatccctctcgttcttttcttcttgactcaggacattttttcttgaagtgttcttcactttcacagatgaaacatttcctatttttgccttttttgaattggatcttgtacctttcttgcccttgaattctctcttttcaggcctccctttaatgaacaatccctatgcattttgatcaccctttacttttgact

SEQ ID NO: 253210 - DNA, 427 bp, Glycine max
  unsure (1)..(427): unsure at all n locations
ctttaggacggnttgcgagaggccaaattgtctcgaaaccatattatgctggtatccaaccaggcctaaatagttcgattgaacacctgtacgacaagacaggatctgtggattcaagtaaaatgaccatatttcgttcacttcttcttcattgtctggatcgacaacaggaaaatagtcagtgaaccaggccgggccgacctctcgactaatgaatggagcatgttggggaagaaacttgtcaaagctcagaaaaatcttcatgtacttgaggaaaagcttttgtggattttgatcgaaggtcttgggtgttaatcgaagtgctctctggccttcgatcgagcgattggcaacttcttcagcataatcttgtgggattattaatcccatttcttgttcgaaagtggcgttaagccacaacttggag

SEQ ID NO: 253211 - DNA, 137 bp, Glycine max
tgctatatgtcgcataaacattgttctcgtcacagtggatgagttggaaaatgatgccctctttattttgcgccacttggagatcgtatttccccctatgttctttgacatcatgattcacttgattgtgcatctgg

SEQ ID NO: 253212 - DNA, 504 bp, Glycine max
  unsure (1)..(504): unsure at all n locations
cacatacaaaactnanacnncnttcagtgtgaattataccattattacaattactatttttacaaattaatatctatatgttccagtgaaaagagacagaaaattattattattagcctaaaataaaaatttggtttcttatttatattttagatttcagtttgatcccttatgtttttaaagttccactttgttccattaaagtatttctgctagaccatattagttcttcttctagtttattacacaagatttggtcaacatatggcaagttgtttaaaattaatacgattagcgtaaagattgactaaagaatcaatgccatctaacaagaacaatcccaccaaagtcaaacttttaaaatatagataatcttattacactatcttactatgattattattcggatgctaggcattatctggtggctactcttgtacncattatattagatcaagaccagaattattaatttctctaattataaggtggaacaatgaagtt

SEQ ID NO: 253213 - DNA, 366 bp, Glycine max
  unsure (1)..(366): unsure at all n locations
tgcaagcttgtgactcttggcatatttctcttaacaatcttagtgtcttaaacagcttggacttttgaaaaaatcttcacaaacaagtcatttgaagaattgcgacttttggaaatgtatttttcaaaatcaatcactggtaatcgattaccattaaggtgtaatcgattacacatcaacaaatgtgattctttatgttgaatttgaaaataaaacaattacaagctctggtaatcgattgcaagtattgtgtaatcaatnacatcagcttaaaatactttaaaactgtgtaacataagttataactctcgaaatttgaaatcttaacgttctaaaacactggtatcaattactaccttctggaat

SEQ ID NO: 253214 - DNA, 458 bp, Glycine max
  unsure (1)..(458): unsure at all n locations
acaattcatctgatatggaacacaggatattcatataaaataccaattgatgaagaacacagggcataaagaaagtgtggttacacttcacatataatgcaatttaatattaaaacatacttattttctttcaccaaccaacaaattttcttacaatttaaattcacccacactaagtattcagtataatgcttacaactcanatcagacaatctatataaagttaaattgccacacccttcttccttaccttagaatgaaaatcttcattccaacaaattttctttccattgtcaacagagtcgtacaagagggagtctgacttgtccccttcaagaatgcctggtaacacactatgcagtacaatataaaatttgaaatcaaaacaacaattcatatntagaataagggttcataagggttcataatacaaaacaacanatanacatattttaagt

SEQ ID NO: 253215 - DNA, 148 bp, Glycine max
tcctgcgtgaaattttgtaatcattaatgatagtgactatgatcggactaatttactaaaaagaggtttgtgaaccatcatgtcttccaaaataacacactttgaagatgaccggcggaaaattgagatattaaacttggattatgcc

SEQ ID NO: 253216 - DNA, 507 bp, Glycine max
  unsure (1)..(507): unsure at all n locations
ttacggacctataaaactaagctattgttaacttattaaaataaactctnttaaacttatctcattacaagatggtggcaaactcttctaatatacgtagaattcaaacaagaagtatntacaactcttcttttctttcatatgtgtaccatttttgttcacaacgaaaaatataagaatgcaagtctttaggtgcatgagaaagacagaatcaaacaacactcaacagcaaacgaagtgtttttatcatttatgccagattctgatcgatctaagcctgtgtaatgcaactacatgcgtacacatagggtattgctactgcacccaacaaaattgctggttcacccaacaattttgtactttttttattttgccctttcataaaaggggatacagataacctaatcgtaatttatatgacttttanggtattagtacgacgctttaaccaactgaactaatagcctgattatattataaaataaataatgttcgtatatataacac

SEQ ID NO: 253217 - DNA, 381 bp, Glycine max
  unsure (1)..(381): unsure at all n locations
cctactttcttgacattatgggtcatttaatatgtcacctggtcagataatcagatgttgcggtcatgttcatctgtgttggatgcacctagttgagcgatacatgaagattttagagggttaccagaatctaatatcgaagcattattgtgaaggtcattcgagaagaagctattaaattttgtcagactacattgaacaggcttaacctgttggcctttctgagtctctacatgattacagattgggtggtaagggttcaagacgactgcatgntattactccaactgtagaagaattgttacaagctcacttatatgtgttgaacaacagaatgaagtatttcatcatactttaacatgaagcttagtcaaacaaata

SEQ ID NO: 253218 - DNA, 478 bp, Glycine max
tggaacttgaacacaaatctcaaggaggagtcgtagatatttggtgttttaacaactttcataatataatataatgtatatgcaatctttattttctgattacttgtaagtttggttaaaggatgtttgtgtttatacaactagtgtacgctaatgatgctaattatcttcttaaattcatgataaccttttactctctctatgaggggcttccataatatttgtacttaagacacttgctgtaaaacttatttgtgtgaataaccgaaatgcatcagaaccgacacatctagcatagcttctttatctttagtcctaatcagagttgtagttgataagagagtgatgaaaaaacatcggttaaatgtcacaaggaaaaaactatgaataaaatcaagattcaacaagaacattctcgatgtagtcagagcagtcacaagcaggctacatatgacaactcgatcacaacactttgttt

SEQ ID NO: 253219 - DNA, 432 bp, Glycine max
  unsure (1)..(432): unsure at all n locations
ggaggaaatgcttaccacctcataagactggaatagcggttctaatgactcctctgcggcttccacataaggcatataggatgggaagctcaccaagatgtcttcctcgcctgatacgatgaccagatgctcttccactatgaatttcaacttttggtggagtgttgagggaacaactcctaatgagtggatccacgggcgccccaacagacagctgtagggagggttaatatccattatttgtaaagtaactcgacaggtgtgagggcctatctgtactgggagatcgatctctcccctaacctctcggcgggtgccgtcgaaggcacgaaccaccgttgaactcggctttaagtgggaggcattgaatggtaatatctccaaagtgctcttangcatcacgtttaaactggaaccattatcgatgagcac

SEQ ID NO: 253220 - DNA, 469 bp, Glycine max
  unsure (1)..(469): unsure at all n locations
tgtcctgtttagacatgattgatacatgatttgtgacttgtatgattcganttgggcaaaattggatgaaggcaagagtggttttcgaaatctgcactttatgcagaattttgatggtgaaatgtgtagcagaattttgagttgtgttttgggcagagttttctgcctttgccctgttttgcttgattctgttagtccatgatgattggatgtggaattacttggatgttgtggaagcttgtgaggattgatggggactcggcgttgagaggaacgaggataagggctacgtgggagtacgtgagctcagttggaggtgggcaacaggggatggtgggtttgtacgtgattctgtggatgtggagaactttgtttgcaccatcgttcgacctgcacctagtaccacatgtgatggataccccataatcctacaagcttgaaatgaggaagtgttgaatggtgaaacttc

SEQ ID NO: 253221 - DNA, 409 bp, Glycine max
  unsure (1)..(409): unsure at all n locations
ctatttgcagttgccaccttttcttttaccacgccttctgaaaaataagccgctccagattatttcgaatattttatgccgaattaggaatgacttaaccaaatttggtacctctgctcattcttcaatcacaaggcacatgaaacaagaaaaaaacattgtntttactctcaactatgaaactaacattttccctggatatctagggggattaatcttgggtttagggacgataaatatatttaccctgatatctataattattttttgggttgatattgacgctcttggtatccataaagcatgttgggcttcaactaatccaagtcacgcctgttggattcattaatgggaaaagcactccaggatattgttttattcacaataatcagacgcattatttaaagga

SEQ ID NO: 253222 - DNA, 380 bp, Glycine max
  unsure (1)..(380): unsure at all n locations
attagtgaaaaaatcgttttcgtgaagaaaattcaaaccgaggcgctttcgttacgtgttcgaaacattttcgggggtgaatttgtgaacattttccttcggctttcgttcggtcttcgggcttcaacccgtgagttcccagaatggaacttttcaattcattttatgcaccctttgtgggccccaacttgttcgtgtacctttattttcatttcatttacttttcgtacccccttgtgacgtgctntaagcatttatttaagtcattttctcgccttaatcaaaaataaaatatatttacactgatcatttgaattgtacatctgctaatttcttgtaaatgaaattcgaccgtcggtcatgtcgtaacacattgtaat

SEQ ID NO: 253223 - DNA, 400 bp, Glycine max
  unsure (1)..(400): unsure at all n locations
agagattaattgggataatgaanaacaaagccttgcttttatagactcttcaggtctggtcaagaaggccattaagaagagttataactnttagaaaaacttaaaacccatttgaaaaagtcaaaaccttctttaagagttacatcttttgatttttcagaaacagtcactggtaatcgattaccaaataagtgtaatcgattacacaaagcttttgagtgaaaggatgtgactcttcacatttaaatttgaatttcaacgttcaagggcactggcaatcgattaccaaaacattgtaatcgattacagccttttganaatatttggaaagtggtaaattcagttgaaaacttnttaaacttatttgctactggaatcgatacaacatatggaatcgata

SEQ ID NO: 253224 - DNA, 425 bp, Glycine max
  unsure (1)..(425): unsure at all n locations
ctcatttataagggacttgtttatattatgtagctgcaaagttgacacttatttaattaatgagatgataaagttattaactgtgtgtttataaatatacagagtgagcatattaaacaatctaaattaattagaaaatgatcatgaagtatattttgtgatatattgaatatttttaaaattttgctatttttactgccacaagtttccagtatggatttctcctgaacgaatgaatttgcaaactgaggccgaggcaccgtacacatacaaaaaggaaaccacaaatattcaaaagggtaaattactttataatttcaaaagattcatacattgtatccctaaagtggtctttttaatctttgatattntaatctcttttaggtatataaattaaagagactttgtaattttataattatatt

SEQ ID NO: 253225 - DNA, 471 bp, Glycine max
  unsure (1)..(471): unsure at all n locations
tagacaatattccacacagtttatcttcttaagacaatgttctaccaatgcacaagtgaggaagatatgccaattctgctttaatacagtctcacattgaaggcaacactatgggcaatcaactcctcttgatctcagtatcatccttgttgggggatagttacaacaagctctctaaaggaacactnttactcgaggagggacattcaacatccaaatcagcatccaaaaacccttttactttcaagtgactcacatcaagcacttttaccatacaaatcctatatgttgttttcgcataatanaagtcattaagtttagtactccaaattcgaatatcataatgatcaaactggtaaaaaggtgaactaaacataattttagcacctcaactattgaataggagatgaatcaacttagaattctaagccttctcaccctgtacaactatggcactatcatgtgtgctta

SEQ ID NO: 253226 - DNA, 332 bp, Glycine max
acatcaacttggagaaagagttcttggtgtcaagacatgagaagcaatcaagtataatgttacttccttcactaaagcggtgatccatctccacacatattttatcaatagcaacataaaaaatctttgcacggtaatgatgaagattagtgatagtcctcccttctgctcttgaacgaccccgaaaaaaaaattattccagccactctctcattgtgcccaaccgagctttgacaacatcaactaattccatgacattcacaatattaagatcttttctttgcaatacatttgaaagctcgcttgtgataccaaacaactttaacattaac

SEQ ID NO: 253227 - DNA, 435 bp, Glycine max
  unsure (1)..(435): unsure at all n locations
gaaaatggcatgcctaaagtattcatttcatacttcaatttagctggtatttctatacgagcacgcaattggttgaggctataactgctaaacaatagaaaaggggactccttcagcattaatgtgattgaagcatttgacattgccataaactaatctgatgaattctcatgtcgtttgaaggcttgnggtgctatgtctctgcagctacatcacccttccattatatgctcttgttactcacgtagcacatactntttttttccttctgattttgttctatttgatcagagccattctaatgctttgattgatgttntttcagtgagcatgaactaaacagcgatcagaataatacaaatagtttgctttgtgagatgaatgacctaaattcaataattaatttctattagaaaaccgacgacagatgcaagt

SEQ ID NO: 253228 - DNA, 411 bp, Glycine max
agagaataagaaggatggaggaacctatgttgtgactggtgttcctacatggccaaaattcctactaactcaacaatatcaatactcagtcaatatcagcccttctgattacccaccaccctatcagccaagaacacccaatcatccacaaaggccacccctaaatcagccacaaaacctgcctattgcacattcgataccaaacaccacccttaacatgaaccaaaacaccaaccagggaaggaattttccagaaaagaagcctggagaattcatcccaattccaatgccatatcctgacttactcccctatctactcgataatgcaatgggagtcatgagaccagtaaagatttcttaacctctatttcccagaggatacaaccccaacgtgacatgtgcttatcatgg

SEQ ID NO: 253229 - DNA, 494 bp, Glycine max
aaaactaagcttctaattaatattgaacgaaaaagatctttcaattgaattttcatttgctctacccattataacgtgtccatgtgaaagttatactcttatattataaaattatcaaattattgcttaataataattactcttgttacacttcaatttaattgttgtaaagactctctttaattgaaaataatatagttcaatttaatatatacgtgttttgtgtcatgtaaatattattactatgtgatgtgtgttgtgatacattctataattagcacaaattttatcttgtaattagtacagatttgattttttttattagtacaaattttgatccattctatttctttccttaattaggtcactagcagcttataaataagtcttgtattcattttgtaaaagacagaattacaactaatatcatattattatctctcaaattggtatcagagcctgcaatccaaggagatcttgctttgcattccttc

SEQ ID NO: 253230 - DNA, 431 bp, Glycine max
gcttcttagcctttgatcgtccatcgttgttctcatgggagactactgggagaaaaagaaacaagagaatctaatcctaattgattatttgttttcaaaatgtggagaggcaatgagaacccttttggccaaactataagaaggggacaattatttttgtaatttaccatatgaagataaattacaaattaatactcacaaagggttgtagggtgtcatgccacttctgaagacaaagtttgaaattaattcatgactactcttgttttgtttctttttttactgaaaacataaaaacataaacaattttcctttgtttttattaccacaaagtccgaaatattttattttttaaatagttattagaagtcgcaaactgatttatgatttcaaggtcataataatttttcaaattaattattgacaaattt

SEQ ID NO: 253231 - DNA, 493 bp, Glycine max
  unsure (1)..(493): unsure at all n locations
ttactctgcgtgttagcacaaagggtagctgtgttggacctgaatgaagcggattacttaaagagcttttgaatggtgatgacgatctgatgggcttgctcgtagatgttgggcaaaatactgtgcttgcgggcttgggaaaagtgtttgagaattcatccaccatacataatgttcgttatgaaaatgatgtcgttaaggtttaggttgtcagaacatacatgcctcatgctgaggtccctattcctacatcagaggttcattatcttgagcaagccgttggcacattcgtcgcatggccgacacatcttgttagggaagtaactaatgaggttaggtnttntctcctatgaatctgttctatttngtgacatgcataattacttgtacactaatttcaattatcataggtggtcgtaggacccgataagcctccatcaaagtctgttggagagccaaacaagttaacatctatggccacagatgacccact

SEQ ID NO: 253232 - DNA, 468 bp, Glycine max
  unsure (1)..(468): unsure at all n locations
cttaaaatattattngatcttatataatttcccctttaagcaaaattaagagaagcttaaaaaattaaatcaaatactacttaagtaaaaaagtctattatgtaaaattaaaaaaggggtaaagtatttcatcaatcagcataaaaagaaaacaaagagggcatgcaatctgaatgcctatgtttgaattaaacaactatatatactagtatcttgggattccctttattgtttaatttaatcaattcatgtttttcttttttgtcacttataaaaattatatatattatactattgcataaacaagacaggagtacaacaatacctcttatgatgaatgccataatagatatatgatgggaaaaaataaaatataaaataaaaggtgttagtaaagtgtgtgtagaaattatgtgttaaaaatcataactcaaattgaatacaattgaagtaacaatgtaacatgat

SEQ ID NO: 253233 - DNA, 502 bp, Glycine max
  unsure (1)..(502): unsure at all n locations
actaagctatccactcgagttacataaactcgtgagagtntcatatanttgattcgtgaattcaactcgtagactcataagaatccacttcatataaaaataataataaaatatctataaataacataccaactaaacatttcaaccatataataaagtaaaatagtaaataaaaaatttcataatacttaaataatcaagtctagtaatgcatcactactagataataacttgcagatgttatactagtgatagatcattcccatcgagggtttgatgttattaaagatgataattttttatttgggaacaacacactaaatgaaagtatgttgaacactaaacagacaaaaaataacccaaaataacttacatcttgggtataattttttaattggctaactcgttgactcgggaacaaacttgatagtctactcagtttacttagagtntatagagtctatccgaactaaaaagagaanttacatacgagtcaactcac

SEQ ID NO: 253234 - DNA, 326 bp, Glycine max
cttaaaaacaagagcatcattggaacaagatgggttttcaaaatataactggatgacacaagggaaaagtgggaatgacacaatagctgggttatgtagcttaaaggctataaccaacaacaaacgtattgatttcactgaaacctttactcttgttgctagacttgaagctataagaatcatgcttgcctttgttgctcataaaaacaaaaacaaaactttttaaatggatgtaaaagtgattttttaatggctctattgaagatgagtgttattatacaacctcctactttgaaaccatacactacagaccattgtttaaactt

SEQ ID NO: 253235 - DNA, 472 bp, Glycine max
  unsure (1)..(472): unsure at all n locations
cctttngttcgagtgatctccattgtttatatagaattcattagtcaaggcgaggttgtttggttttgtcttcatcggctacccaaattgtcgtcgagcgaggagtgggttgtagctaattccgccacgcatacccaaaagaggtacgctgggatgtggaccacaactcacaataatctctccaacatcactagctgcttggtaccaaacaatgtcagatgggtcaagagtcatgattcggcgaggccaggaaagcttgtcatcattggtcttgaaggcacgggattgaggtaagtggaaggtaaaccattgatagagtaaaggtgcacaacaagaaatggttccccggccagcctgtgtacggtcatggatagaatggtatgtatcggcgagtatagtgggtacggaggtctatcgaagacagaatttaatggcattgatatcgatgaaagtgtcaacatttgggaagaat

SEQ ID NO: 253236 - DNA, 313 bp, Glycine max
  unsure (1)..(313): unsure at all n locations
tatctctaacagtgttatggcatataataaatttatgtttgaaaaagctattagtgctataaggaaattgagtaaagaacctgctgattggctattacataaagacataccanagcatacatgggctaggcacacatttgaccctcaatgcaagagtgacaatgtaacaaacaacttctgcgaagatgttaatgcttgggttgggacgataggaaatagactggcctatcaatgatgtaatctataatttgtagattaatgacactttttgacaataggagagacaaggctgcaacttanccaattactatta

SEQ ID NO: 253237 - DNA, 414 bp, Glycine max
  unsure (1)..(414): unsure at all n locations
ntaagttattatctaaggttntaaaaacaatgacaacattgtttttaatagttaagaacttgcgttgaactctactaaaatatattatactattcttaaattttatgtaatgataagaaacttggataaatttgttcaaaagtatttttaggagaaataaataaatataatttttttattaattaaaattaatttatacataagttatcaatcatcttttagaacttatacaaattagtctatgcataactaattttaacttattgaaaaagaaattatttattttgaaaaaaatatatttgaaatgcagaaattgcattatatatatatatatatatatatatatataccttccaacatgaagagtgtgaccaaggaatatgacacccatggcaacagagaaaacaatttgga

SEQ ID NO: 253238 - DNA, 374 bp, Glycine max
  unsure (1)..(374): unsure at all n locations
tctagcccgagctatgggaattttgttagctgttcatcagcggaatgtattttccattttccaccatatccatgaggttaatatgaatagaatcgaaatgagttatcatactttccttctagtagccatactttgctcctctaatagtggagatttgttggtggagcacccttcttccatttctttcatttattacgatcttcctctgtatttgttagaatattcaacccaagaggtcgagctttgatgacaactataatacaatacatcacaatgccagtgtgttagataaacttataaatatttctgtaatggaaatgattntacaggcaaaacaagttctcacaaactatcgtctagtaacaaacttaagt

SEQ ID NO: 253239 - DNA, 461 bp, Glycine max
  unsure (1)..(461): unsure at all n locations
cggacacttaaaactcagccttanacatgcttgtctgattcttcccttagcattgctatgtattcaacaaccttcacattcaggagacaatttgtcatataaagcactagcgagggtggtcttacctattccacccatgccccatattcccagaattctaactttgcttgacccaatttttagtaatgactcgatcttctcatagttttcctcaactcctaccagttctttccggtggtttgggtatctaggagccaattttcgcagaacatctttaacaatatccttaaggaattcagattcagtccttgcacatgaacagggcaacaaagaaatagatgaggaatgaaatacataaaaatgattatgcataatctatggtgaatatggtcgtgtagaagagaaagaaacacacatcaattgaggaatgagatacaatgactgtgacaacaaaatcaatg

SEQ ID NO: 253240 - DNA, 365 bp, Glycine max
caaccctgcttggaacattaactgacttgcggacctaggtgagtttattttaagataatgagggccacttatcaaatcactataagcttctgttatcaaagaaaaataaaagtgctaagaacactatcttcccttaggatacaaagaaaattactagattcaatgggacacaaaacatgcataattccaattatcgcactaataaaaaacttacatctcttccattaatgctttgaagttcttacaatgcctaaggcgccaacacagttcccataaagacccaaattctttgatagctttgtgctaccacattctgcctcctcagcaacaacaacaaaaggttggctctgatctaacttccatac

SEQ ID NO: 253241 - DNA, 445 bp, Glycine max
  unsure (1)..(445): unsure at all n locations
ttggtggagttacatcatgtcatgacattcgcaaatgagaaaaagagctctaagtgacgccttgagaaacacaccaaggcagtggcacatcctactattttacaattattactaaagtgttgttatagtcaaaatacaacagaggttaactttatattctagacaagagattatcttagctactatatggcacaagaaattcggagtagcgaaggaatccatctgcttgaaacacgagcattactcccaaatacacgatcaacgtatgagggtcctgcgcgcctctctggttatgagacattatctgnagaggacttgggaatggcatacgaagtagatggactatttgtcacaccctgacaaaatatcatgtattcaaatgtattcttccaccaaacacaagtcaaacttacgatcagtatatttgactaactactctacatgc

SEQ ID NO: 253242 - DNA, 480 bp, Glycine max
  unsure (1)..(480): unsure at all n locations
tagcttatgcacggaaaatgttattatgaaattgatatgcccgaagaaacaccatttcctagttaaccatgcattaggtaccatgttcaattattttgttntttaagtgaaacgggtttatgatcccaacatggttggctcgtggtgcctaacacatgaaactaagaatgtagtgtgaagtttcacgcttcccccttttttgtttttgttttgtagaggaaaacgcaaggatgagcaaacatganaacaaatggtatgcaattntgcagatcaaaaagtttgttgaacgcatatgcatgatgatgccatgactcatgcanaatgggaatgtgataacggacaaatgcangaacgatatgttcattatgatgctgaagagatgtttatgcggtgcatgatatngaatgcatttacggacacgagagcccagaaaaatatctcttcttactttgcgcattgggggtgcagtgccccatgtgt

SEQ ID NO: 253243 - DNA, 375 bp, Glycine max
  unsure (1)..(375): unsure at all n locations
tgcagaagaacatagaccacagactctngcaacaggcgtcgatttctgattcatggcaagttgagttactatgttgactaagggatcaagtttaccctcaagctttttattttcagcagatgaagatgaatccgtgaccacctcatggactcctctaaggacaatagcatcatttcttgcactgaattgttgggagttggaagccatcttctcaatcaaattcctagcctcagtaggggtcatatcaccaagagctccaccactggcagcatcaatcatactcctttccatgttgctaagtccttcatagaaatattgaagaaggagttgctcagaaatctaatggtgacggcagcttacacacagattcttgaa

SEQ ID NO: 253244 - DNA, 435 bp, Glycine max
  unsure (1)..(435): unsure at all n locations
agcttctatcgtacccgctattggtgctcatataatcccaaaaacaaatccctcttattactagctattttgaattctttagttcctgaatgtacaaccttcaaattgttgctcgttcccgtatttggtttttgcaaaaaagaaaattaatctgaaacaattcatgctgaattgttatcgttattattactcgaaccataaggaataatagctaaacaagtaatttaaaatgtaacttttaaaatatgtggtatttttgtaattacaattctacttcaatatctaattttgttaatctacttaggtcggtttttaaatataaatatgaatttaaaggtgatctactgataatataaagtacttgctaatcacaaattatgatacgtatcattttaanatctaactttaatttatcaatattaatagattataata

SEQ ID NO: 253245 - DNA, 446 bp, Glycine max
  unsure (1)..(446): unsure at all n locations
ctctactgttgcaaatcttctacagttagagtgattatcttctttccttttgaaccctcacctcccactctttcatcatgttgagactcgggaagcccaacaggttttgtctnttcaatgtactctgaatagaattcaatagcttcttctgcaatgtacctttccacaatagatgcttcccgatggtgtagattctttgtatacccttttaagatctttatgtatcgctcaaccgagtacatccatgacaaataaacaggaccacaacatttgatttctctgaccagatgaacaattaagtgaaccatgatgtcaaagaaagtaggaggaaaatacatctccaactaatacaatataatggcagcctcgtgttccagctcatctaacttgacaagatcaaggactttgctacatatggcattaaagaataagcacagcccagttat

SEQ ID NO: 253246 - DNA, 190 bp, Glycine max
ttggtgaaagtagactaacatatgattactgcaaaatgagagtacaacacgatgtgcttatgatacgatgaagatatcatgccaataagaacccgcatggataaacagtacctgcacagaattatccattgtccgactagcagacatgtggccctcattactttgatcatctgaaatacttttgtcacca

SEQ ID NO: 253247 - DNA, 350 bp, Glycine max
  unsure (1)..(350): unsure at all n locations
ctatgtacccgnggtggtccacatgttgttgcacgtatntttattcttggtttcggctactttctatanccccctttgacgtgcttaagccatttatttaagtcatttctcgcttaatctaaaaataaaataaatttccaccgatcgtttgaattgtatcatccgttaattttggttaaaatgaattccgaccgttcggtcatgccgtaaccacgttggaaatcaaaaaagaggtaaaataataatataataatcaaaaaataccttttagtaaaagtaaagcgaaaaatcaatcggacgttntctctttgggagttctcattcttaattgaattgactaaataactaaa

SEQ ID NO: 253248 - DNA, 427 bp, Glycine max
  unsure (1)..(427): unsure at all n locations
ctcagcttgacttggcatcaagagattataaatatgtgaccatgacatgtatntaaaagattgatctatctttcattatctatcgttcaatcttctctcaacatctttcaacaatatatctttcaacttttttctacagaattttctgattcatttctcttcatatttctaaaagtttttgttcaatactttctctttgaagaaaagttctttgatcaaaaacttgtgttattcatctttnttattctcttctccctttgccaaaataatagaaggactaaccgcctgaattcttttgtgtctcatttctcccttacaaaagattccaaggactaaccgcctgagaattctttgtcccaacacattggagggtacatcctttctggtacaagtagagggtacatctacttggagattgtacactgag

SEQ ID NO: 253249 - DNA, 263 bp, Glycine max
tttaactatattttattataaaatctaacaattaattatctttaccaaaagatctaggttaccaaaaaatccttcccaattacataaaatcttcccttactttaaatttgaacatatcattttatttatgaccatctgataaagattactatatccactagttatattattaccctttttctattaattatcttaagctaatacttatggtaaacaataattaatactcagagttgctatggaaccaaaatcatcataattga

SEQ ID NO: 253250 - DNA, 340 bp, Glycine max
ggaaaactctggggaactggtccaacacagaaccctgaagaattggcaaagaacgatctaaactaagcgcatactaaagtaaacgctgtatgaaccaaaaaagttgccatgtttatttgctagcaccaacaaaatatctcgtgaaaatgtggcgagaattaattaacagaagaactactgataggaacatgagaattagaaacctgaaaattgattgaatatgtgaaagtgcatgtcttattaaaagaaatcccacaatggatatattttatgacatttgaacttagttttaaccgagataatcatatacgtgatcatgtaccaacttatttacgtaaga

SEQ ID NO: 253251 - DNA, 262 bp, Glycine max
  unsure (1)..(262): unsure at all n locations
gcatgcaagctccttttggaccttgaacaagcaattaatcttctatncagatccatgctatgtgctcgcgactggtctctttctttccttcgcaacttgagttcactattgctaccccatagagctccgcgaaattggttccggccatactcttccttgtgagccctcttggtctcttgttcaagggctctagcagtaattgcattctcttcccgtaacccggcacactcctttcgaacgtgtgtagcggccaacttgaact

SEQ ID NO: 253252 - DNA, 488 bp, Glycine max
  unsure (1)..(488): unsure at all n locations
tctagccaatgacttacctcgaattaattcctttgatagtccttttgagccttgtctccctttccttgttttgaagctcactacaagccttaaatgaataaccatgatatcaccatatctttaaggaattttggagctttggaattggtttgggaataagtgtggggggttcttttgtttcattggataacattgttctgtaggctatgcttcgtgatgtattttgggccatacttgatgtacattgtatattggttaaatgttggacatgctgaatgaaatgttgtttttcacaggctatagagtaaaaaaaataaaataaaaatctaaaaacagaattcggaatatgagaagaagaangagataaagcttatagttgagtgaataagatcttaaatggcacacgaatgatgaaactcttggcctactctttatgattaattttatctttacttactttatttcttatttgttctaatatgactatt

SEQ ID NO: 253253 - DNA, 285 bp, Glycine max
attttcagagacatattccctttctttgtcgaaccccatgtagtgtttatgggtttatatggaagtatttattacactaaatgtttatgaagtaattaatgaactaatccttgtttaaaacacatagattttatacacataatttagaaacctcaaataacttaaccctatttttgctagctggatatcgcaatcataaaatacattgctaaaacctaagtgagtaaatcactcttacctactcttcatacttgttaaaaaattattgttccattttttaaaaat

SEQ ID NO: 253254 - DNA, 400 bp, Glycine max
aagctatacaagccctcatcgcatgacacacacatacatctgtgtttttggagacaacacacacataagtggcgcctcgaggaataaacgaagcacacaaagagttccaatcattcataggcataagagaataaaaatgaggatcaatatctccagatgatatccaacatcaccatgtactgaagggacttgttcctatagtatcaagatcgaattcgaagcaatataataaactcaacaccctctaaatcacaaattaagaattactatataaatagaagcccgccctaattaatcctcaacacgctatctcgactatagaaacgaaagtccattttatatcaactagagagatatccatactttggttctcacacaagaacacgggccatgtatccct

SEQ ID NO: 253255 - DNA, 434 bp, Glycine max
  unsure (1)..(434): unsure at all n locations
tgcaagcttacacatcaaacatgtttctttcaaagtctttatgtagacaatataantcaaaattggagaatatgcttggaaatcttgttgttttccttacagcgcacatttgtagaagatccacaaattaatcaagtcataaaatctatagatcaataggtatgaatttataattcaacttattcaaagattttaccatcatatgatattttacaaagaaaaaacacttctttaatttagatacctacaaatggttctactagtaaaaatcatcaatctacaagcgatcctaactagaggtgagttgaaatttaataactacatatttgacaatatcatcttatgtagaatatggtatagattcgagggtatccacactatatatgtattatagaagttgtagcttctttacttgggtctctctctttccttga

SEQ ID NO: 253256 - DNA, 400 bp, Glycine max
  unsure (1)..(400): unsure at all n locations
gacactataaaaaactcaatcctttcgcaacttgcttcctcactagcagttgctatttcttcatatcagnattctgtggatcaagtggcctcataataattaagaagggggggggggttgaattaattattaacgaacctttactaattaaaaatctactcttctaaggcttttactatgttgttaagtaaatgaagaatataaaatcaacttaatctaaagtaacagcaggaattatagtgcacaatggaaaatatagagtgtatggaaaaataaaacaaacacatgagatntatactggtttggcaacaacccgtgcctacatgcattctcccaacgacttgaggtccttgagaattcttttcaacctctgtaaaattcttttacaagcaaagatcca

SEQ ID NO: 253257 - DNA, 374 bp, Glycine max
  unsure (1)..(374): unsure at all n locations
ngngcatgctgtagaggataacagatgaccaaagtgaacttatagccatttctagggtgaacttgcgtgtcgaagagtcacattttgattctgtgaaattataagtgtatatccagtctgaacaagtttaaattgatgatatatactcgcgtgaggtgacagcttgcttcaaaattatcccattctcacttacacttctcaaacctagaaaatccattaaatcgatgggttccggacacctacattttgagtcgctgcgttctgaagctcgactttggttgacacacgatagatacatgattgtggacttgtacgatatgattagggaaagattggatgatggaaagtgtcatttttgaaatctgcactttatg

SEQ ID NO: 253258 - DNA, 318 bp, Glycine max
aacctccaaatgccactaaatccagatttggccttccaactctcaaaaccttactcttttttccactcataacaccatattctcactttctaaccctaggttaactctacccttcatctctaacagttgtccataagcaatttcagcacataaacatcacaagcatcatcataaataccctaatactgaatgggtaagcttaactcatccaaacatggcaagttcaacatgctttcaacatatttcttcacatataactatcatgaagcaaaaacctagcataacttcccatcatatctcccaaaacccatatcccac

SEQ ID NO: 253259 - DNA, 480 bp, Glycine max
  unsure (1)..(480): unsure at all n locations
ctgcatgatatacatctctccctctctcaagcaaatatcttctttatatcatcaaaatcttcatgatttacaaggtggcacagcaagaccagcaccttccaccttcgggtaggagagttgacgatcacattggatgatgtgtcgtcactccttcattatcctatcattggcgcgctgcacagtttatatgctctttctacggaggaggcaagaattttgctgacagagttgtttgaggtgtctgctgaggaggctagagctgagacaacactgacacgtggggcatacgtacgactaggatgggttctagacatttatgagatgagatgtcatgccttgcggtggatagtagcagctcgtgcttatctgctgcacctggtcggatgcactcnttttgctaataagagtgaacatacgtgctcgtgcatgtggttacctagacgctttcgtgacctcgcaagtggggcattcttgggagtg

SEQ ID NO: 253260 - DNA, 423 bp, Glycine max
  unsure (1)..(423): unsure at all n locations
catgcaagcttactcaattgatttttgtgtaggaactactcttatttttatggtttctcctaaagcttgtaaatatttattggaataattgctgtccattagcttaaggcttagaggtacttcctcgntgacatcttttgtcttgaatggaattgccatgacaggtttattgttactgtctttgatattggtagttgaattggtcgggaggtaatccgatggataaccaccatcttacttgcattgtatacatttgtgtgacacctatatgcttgttccaaggtatctatatcttttgatggctagcctgaaccatcaagaaacgacttaatttgacttttcacaatctaaactgtctggattgttctgttgaccctgaatgtggaaaacatctctttgagtcatctcggagataaaacttct

SEQ ID NO: 253261 - DNA, 399 bp, Glycine max
  unsure (1)..(399): unsure at all n locations
tctanacatatacaagaatgaagctctgataccacttgttggacaagtggcctcagatatctcaagaaggaggggttgaattaagatatcacaacttatttccccaattaaaaattctatctctctgtctattccaggtataaattcccttaataatgaatatcttaaatatcgattcacatagaacagatggaatatgaatataacacaataataaataaagggagttaagagaagagaaaattcaaactcagatttatactggttcggccacacccttgtgcctacgtccagtccgcaagcaacccgcttgagagatccactatcttgtaattccttttacaagttctaacacacaaggacaaccctttctttgtgttataagtctttcacaacaag

SEQ ID NO: 253262 - DNA, 395 bp, Glycine max
  unsure (1)..(395): unsure at all n locations
ctagttgcattttcattctgagcaacttgaatatctattctgaactcagaagagttcttcattcttgattctgaactaacattagtaacccttttttttcaaaggaagcataaaaatttttaaaaccccaattcaacctctcttcttggggtattattgtcactttaagtttattgttgtattggttagtggccacaaaatacacctgacaacttacatggcacttttagacagggacttgttgctacacattatctacaaggtacaattatctactagctcttatctataagctaaaatttatcttcaacattatctacaagctaccgactattatctataagctgaanattatttgaaaggctataacagcctctacaacaaggacttgaact

SEQ ID NO: 253263 - DNA, 463 bp, Glycine max
tggctcaataagcatggggagatgatagtttatcatctagtcaaaatacccttttctatatgagactactgtgataaagttgtatatgatataatccctatgaaagtagggcacattttgttgggtagaccacggaaatttgacaagaaagaaatccataatgatctcaccaatgaaataaccctcacccatggaagcgaaaagtcaaacttgttcccttgacaccttcagaagtggttgggggtcaagtacaaataaaactcaattgggatgaggaaaagaatagataaagaaaataagaacaacctttaatggttaaggaagagtgtaaggaagtaagtgtctcctccaagaggttaactgagaaggaaagtcattctgcaataaagacaaacattacagaaacttcccttcatagacaacctccacatctatttctttgtaaaggacacttgttagcact

SEQ ID NO: 253264 - DNA, 442 bp, Glycine max
  unsure (1)..(442): unsure at all n locations
ggacctataaaactcagctttatccaggaaattcttggtggtgaagctccttcttccttggcttattccctagtggatggtgcctcccctatcctcttctcctttgccttccgctgcatctccatggtgaaaaatcaccattgaaggacctcattgaagctcaaagatccagcctccatagaagctccacaagcaagcttccaccaagtggtaatcagagcacaagagcttcaagtaggtgctccttaaatctccattaattntttttctttaccttctcttccattgttgtttcttcatttttctccatgtatctcctcacatgtcttgttctaaatgttgttaacatgattctttaaaagtttccaccgattaaacttgctatagaaactagatnntgatttctatggttcaaatttcttgttcttgttcttgaaccatg

SEQ ID NO: 253265 - DNA, 450 bp, Glycine max
  unsure (1)..(450): unsure at all n locations
agcttctggcagtcaaccttcgcagcctggtattctgtctagttttcctttttgagcttgcgctaagagaatcgggtggttgaggggacctgggggggtgttgtcattgctgcatanaaacagaaaaacaaattaacccaactaaattaccacagcatacaagtatgaaatactaatgaaatacagataataggaaattgaaaatgacaatggacaaggtaaacaaaatggtgtaatataccacattcaagtagacgtattttcccataaaccttcatcatgatcgatacgaattgcatatacatcctcctcctcattttcattatttacgggaggcatttctgtggagaaggtcggcatgtcgttaacataaagggttgaagcatcaatattgagagggataccacttgtgtttccctgaagaacaattgaccatcttgagtcactggg

SEQ ID NO: 253266 - DNA, 459 bp, Glycine max
  unsure (1)..(459): unsure at all n locations
tatgtttccctcctcttgtacggtgactgagctaacgacctcatcagctactgagaggtataggagtaggggtactcctggcttaagtcgaattaagactggcgatgtagcaatagtcttcttgaaagccaaaaaggcttactcataagcttcgccccataggaaaggctcagttttcctgagtagcttatacaatggcttttcttttttggcgagctttgggaggaacctggacagagacgttggtctaccgttaagcttttggacttccttgacactggtagggttgtgcatctctagtatggttgtgcatttgttggagttggcttctataccccaatgtgtgatcatgaaacccaagaactggcatccgctaaccctaaaagtgcatttttctgggttgaggcacatgtcatatttgtagaattctccgaacacctcttctangtctaccatgtg

SEQ ID NO: 253267 - DNA, 389 bp, Glycine max
  unsure (1)..(389): unsure at all n locations
acctatattaacactctnttataggtatacataatacagttgccgtgctgaacgagtcgtgttgcttgagagaacaactttcatatggtgcaatcctgctcctgctctgtatctatcaactggcttccgggttcaagctaatacgttgtgtggattgtaccctgtggctcaaacagcctttcactttctcatgacatgattgaacggaatcactgctaaatttcttccaattattctaagtgaatatcattggtccgcgccatgtttgccacatttgtctactaaatcttcaatattttgtattgataaaacaaatattctttactaccgaccgtcctaccaatagcccttgatcccccattacttcttttactatcaatcttgaatta

SEQ ID NO: 253268 - DNA, 467 bp, Glycine max
  unsure (1)..(467): unsure at all n locations
tacgcacacgctcacgtgtatgatatccactccacaatgtttttagtatatgagagcttcaaccctataacgcaacgtggcggacaaaagtgggcaataaacttgaatgatcgtcattgtcaatgcggaaggtattctgcgcttcactatacatgttcacatattattgcagcttgtggttacgtgagtatgaactactaccaatatatagatgttgtntatacaaacgagcacatcttaaaagcttactccgcacaatggtggcctcttgggaatgaagcagctattcctccttctgatgacgcatggacacttatccctgacccaactacaattcgtgtgaaaggtcggtcaaaatcaacaacgattagatatgagatggatttggtctaaccatctgagcaccgaacaaaatgcaattgatgtggagccgaatggcataacacgcgtcccttgccaatgcaatc

SEQ ID NO: 253269 - DNA, 177 bp, Glycine max
  unsure (1)..(177): unsure at all n locations
gacacaaatgtanaagtactaccactaggtcaaactcttggagcctttcaaaaagaaagaactggttcatgttgataaggagaaaaaccaccagagtgatgctttagcccacctagggtgcttttaaagaccaagttagcaccagacatttatcccagatggcctaaccttccctac

SEQ ID NO: 253270 - DNA, 421 bp, Glycine max
  unsure (1)..(421): unsure at all n locations
aaatgagaatggnngtaatttatagcaaactctcacctcacacaagtctataaccttaatctaaacttgctcaaactggtttttcacctaacattacaccaaatcaaaatatgactcctcaacacctaattntaccctagaaatggcttttgccttcactttggacttttggttttctctcttgcacagcccaagctatctcataagtcctaaatgacatttcaaactaggactaactcactataacctccaatttctactgaatccagatttagcctttcaaaccctcnaagcatcacacttttccactcataacactacattctcactttctaaccctaggttaactctacccttcatccctagcagttttcatcagcaatttcacacataaacatacagcatcatataanacctaaac

SEQ ID NO: 253271 - DNA, 447 bp, Glycine max
  unsure (1)..(447): unsure at all n locations
gcttccttttcatacctacttcatcaaatgtcatgttacaacccttcacttnccaataagcacggtgctcaatctccaccgaaaggtggcatgccttaccaaaacccactctatagggagacatcctaaaggtaattagtaagcgatcctgtgggcccatataacatcctcaagtttcttgctccaatccttcctaatgggttgcactaccttctgcaacacttgcttgatctctctattaaaaacctccgcatgcccattagtttggggatgataagttgtagcaactttatgcacaatcccatacttttggagtattcaattcaatcatgttagttctcacctgatcactgataatgactcccctgatgagttgttatagaagtggctcccctgatcactcccctgatgagctgttatagaaatggctcccctgatcactgataa

SEQ ID NO: 253272 - DNA, 475 bp, Glycine max
  unsure (1)..(475): unsure at all n locations
acgcgggtctggaagacaaaggtcaagtggtctctttatgcgaagatgatgttccgagtacattggatttggtacgaccatgccctcctgatttccagctgggaaattggcgagtggaggaacgccccggcatttacgcaacgagcataatgtaaacctttacggttttaaaagctctatagttgggcctaggctttagagtttttccttttgttaaggctttgtgtcttttgtttttgaatacaaggatctttcttcatctgttcctatgtctctacccattctcattcatttgcatgtttacttctttttctgaaacggcagatccgatgacgagtcccccgaaggtactaatacctgngacccgcctatcgacttcgagcaagaaatgagtcatacggaagatgaaagaaacgaggatgtgggacttcccccagaattagaaagaatggtcgcccatgaggaccaagaaatg

SEQ ID NO: 253273 - DNA, 387 bp, Glycine max
  unsure (1)..(387): unsure at all n locations
agcttgaatttaaccccatttntcttatgcatggcgggtctacccaactcctttgtggttggtcaacaataggacgacacagattgactcgttttaccacccttgtgtgggaggcacaagagaaagagagaggatgatggaagcttgcttgtggggcttctatggaggctggatctttgagtttcaatgaagtcctttaatggtgattttccaccatggagatgcagcggaagacaaaggaaacgaggtgagaggaggcgccatccactanggaataagccatggaagaaggagcttcaccaccaagatgagccttggataagaagcttggaaggatgcttcaatggaggaaaagaaagagggagagaaagagagaggggggagcac

SEQ ID NO: 253274 - DNA, 486 bp, Glycine max
  unsure (1)..(486): unsure at all n locations
tgtaacggctggacatgatatatgtcagggtgttggtttatccagcggttcaaggataaaggaatatcccacattatttccatgacacgcgtgcaacaatgatgattcagaaattttatgcaaaacttgtcatgcatgcacctatgtggacactcaagcatcaagttttgtggtcatgtgacactagggctcaagattcatttttcctatttaagtcaatccagtgtttccaaaacatgctcttttatcaattcatgcattcatccgagtccattttgggtgttcgggaaaattttcacagcattcacccttcaggtgtatacatattttttcaacaaaacacttttgtgttttgatcagtgaatctttttcaaagaaagaagtggagattatntctttntgaaagcatcttggctttntagtcaaaaaatatattntntgttcttggttgttttggtggtttttggttcggcaattttcaaagat

SEQ ID NO: 253275 - DNA, 482 bp, Glycine max
  unsure (1)..(482): unsure at all n locations
agcttgttgcgtggtagtgtaaggaagagagtatggggacaaatantacaattgtttttcgttgcaatgcatcctctgctccactacttgtatgatagtgggctcttgtaggaatgttcttcctttctatctataagagcacacaaacttgaaattcanatattagtgaatttgaaatcaatcaccggatgaaaattcaaatgataagagtttctagaacatgaatcatcctcaaaatgcttccatgtgtattgtgaaatcatatggacattaactaacttagtataaagcatttatgtgagttagttatgtcattttggacacataaagcttctcagactttggtacttgtcacaatgtatttggacgtttgtttctacacgacatattggacgatgtatgttaacattgataaaacaagttgcatttgtggacactttgagaatgtattgtataggcttaagagataccactcatatgat

SEQ ID NO: 253276 - DNA, 491 bp, Glycine max
  unsure (1)..(491): unsure at all n locations
cttgaacgcatcgattgtatacgaagtacagacaactctatgtgctttttgacctttgtgaaagtgaccttccaggggatattccacggaggccttctagtctcttctatattgtactgttcttgaattcaaatgttagttattcaaacgtaatagagacaaatggaatttgaataaaacagtacatgtgcactttccttttctgtgatacccagtccttgagagactagacacatgaatttatcgtatgacagtgtgttatattgttatgaacaagactagatgcttactaaataaagagagctgaacactagattaaaatagagcatactctatctagttgtgggcgatattcctttaacataataatcttgtccacttgtcaaaaacacaatagaatatcaataatttatacttatgttatacatcaaaatctaaggtggatgagacacatgatcgttcattcctaacaggtntctctcttccaaact

SEQ ID NO: 253277 - DNA, 464 bp, Glycine max
  unsure (1)..(464): unsure at all n locations
tcttaatcacctgcggcatgcagctttagccaatggactaccttgattatattccttgatagcccgtttgagccttgtttccctttccttggtttgaagctcactacaagccttaagtgaaaaaccatgatattaccatatccttaaggaattttggagctntggaattgttttgggaataagtgtggggggtttctggttcattggacaacttggtttgttggctatgcttcatgatgtattttgggccatacttgatgtacattgtatattggttaaatgttggacatgctgaatgaaatgttgtttctcacaggcaaaataaaaaatatttcgtataaaaaacgataatactcaataaaaaagccttaagtcgagtgaataaatcttaatggccataatgagaaaccttggtctacttcatgttaatttatcttactctttaatttctatttttaaatgcc

SEQ ID NO: 253278 - DNA, 453 bp, Glycine max
  unsure (1)..(453): unsure at all n locations
ttataacgcgggtctgggagacaaaggtcaagtggtctctttatgctaagatgatgttccgagtacattggatttggtacgaccatgccctcctgatttccagctgggaaattggcgagtggaggaacgccccggcatttacgcaacgagcataatgtaaacctttacggttttaaaagctctatagttgggcctaggctttagagtttttccttttgttaaggctttgtgtctttcgttnttgaatttataataaaaggatctttcttcatctgttcctacgtctctacccattctcattcatttgcatgttcacttctttttctgaaacgacagatccgatgacgagtcccccgaaggtactaatacctgngacccgcttatcgacttcgagcaagaaatgaatcaaacggaagatgaaggaaatgatgatgtgggacttcctccagaatt

SEQ ID NO: 253279 - DNA, 470 bp, Glycine max
  unsure (1)..(470): unsure at all n locations
agcttgaagtagaggagaccttcaatcctattacgcaacgtggcggataaaagtgggcaattaacttgaatggtcattattgtcaatgcggaaggtattctgcgcttcactatccatgttcacacattattgcagcttatggttacgtgagcatgaactactaccaatatatagatgttgtttacacaaatgagcacattttaaaagcttactccacacaatggtggcctcttgggaatgaaacggctatttctccttccaatgacgcatggacacttatccctgacccaactacaatttgtgcgaatggtcggccaaaatcaacaaggatactgaatgagatggattgngtcgaaccatctgagcaccgacaaaaatgtagtagatgtggagccgaagggcataacagacgtcgctgtccaatgcaatctgagcatgggagttgtcaaatcattgattatgtatgtagt

SEQ ID NO: 253280 - DNA, 452 bp, Glycine max
  unsure (1)..(452): unsure at all n locations
tangtntgaagaaattttagaaagttggagttaaatttttggcagccccacgatagaaaactgcagagcaagatatgaaggcagagcaattagagaaactagaataactggaagattagtgtaagcaagttcttattattactttcttgataagggtatgcattttgccagtatttttaagtatatatctttttttatattggagaaaaattaaaattgtaaattactaatttctttatattcgtaagtgtggttcaaagaccatgtcagcattaagagcaaacacgagctttagcttcatttgaaaagttatattataaggtaaccaaattagaggaatgactgacatttcanagtggcaatgaactcgaaatattggatggatacatgcaaccagttatctagccttcacagctaacatggtaattttcttgaatttgttttacatggat

SEQ ID NO: 253281 - DNA, 376 bp, Glycine max
ttcagacttcacaccggtttgtttcaaacatgaatattatttttacctaaaattaggcttgcttttgcttatattaattggtgaaatttgtcttacttatgaagtatttaacaaaatgtttctaatagaatcaatggctttcttggcttaattttttaattttaagttttgtatattggtccttttttggaataaggcttgactaaattgcatttttgtgtttcgtttgaacaagatcttattaagcttgaaggacccaagaagcttcttcataatagtttctttcagacttcacaccggtttggcccttacaatcccatgttattaataaagttccaagcacatattaacatggaatggtgtaaccagagtacct

SEQ ID NO: 253282 - DNA, 469 bp, Glycine max
  unsure (1)..(469): unsure at all n locations
gattgaacagtgaatngattgaacattgtatgtattggattgtttggtatggaatgagtggttggaaattatttgattgagcaaatgtatgaattgaatggattaggatgattggatgattgtttggatcaagtttgaagtgattagaagagaatgagcatatgattggaattatgtctgaaaatgttagtcggttgtcagattgattgtgaaggaatgcgttaaccgtatcccagtgaaagtgtgatctttaaaattttgagagacacgactatcatttactggctgattttgcgtgaatctctgaagcatggattggatgcatgaacttgagaataatgaaggccatgtntgattatgaatagctacttagccaaaaagctaaccttgtgatngaatgaattatcccttgcacctagttngagctgaattgattgattgggatgattaaccttgagcctattcagct

SEQ ID NO: 253283 - DNA, 449 bp, Glycine max
  unsure (1)..(449): unsure at all n locations
cttctctggaaacttcttattctataaatagaaacatgtgtaacacttattgtaactctgatgaatgagagtcttgtgagacacaactcanagttcaacttctctccctttttcttccttcaattttgagctcccccctctctctatctctccctctttcttttcctccattgaagcatcctctccaagctttttatccaaggctcatcttggtggagaagctccttcttccatggcttattccctaggggatggcgccgcctcttacctcttctcctttgtctccgctgcattctatggtggaaaatcaccattaaggacctcattgaactcaaagatccagcctccattgaagcctcacaagccagcttccatcaagtggtaatcagagcataagagcttcaagtaggtggctcttaaacctccattatatttttgcttaccttctc

SEQ ID NO: 253284 - DNA, 494 bp, Glycine max
  unsure (1)..(494): unsure at all n locations
cggacctatgatactcagcttctgatgncaacaatgattcanaggtgttttgatgatatctatgatgacaacaaaagatgatgacaaaggtgatgaacaaaaagctcaaaagatcaaagaacaactcaagttaatcaagaacaagtcaagagttcaagaatcaagaagaattcaagactcaagaagaaagtctacaatcaagattcaagattcaagatctcaagaatcaagatcaagattcaagaatgaagaanagactcaatcaagataactattaaaaagttntttcaaaactttgaatagcacatgagtttttgacaaaacctttaccaaagagtttttactctctggtaatcgattaccatattgttgtaatcgnataccagtagcaaaatgagttggaaaagtttcanactgaattacaacgttcaaatatttccaaaggtgaatcgatcaatgtttgtatcgataccagtgacctgatgtgaattcaa

SEQ ID NO: 253285 - DNA, 419 bp, Glycine max
  unsure (1)..(419): unsure at all n locations
agctntcttccaccggggctcccctcatggtgttccctagttgtcttatagcgagcgcgggattgtagttaatacaacccctcgttcctatcagcggaatgtttgggtaccctccacatgagaaaaggactccctcctttccttccttccatcgggggaaccaattgattggtctacctcctatcccagccaaaagctggtcccaatctattcttctcttttcagtacacgagcgatggctttggagcggacatggatgcctcgtgtcttgctggaacaggtgtgaaaccaaccaaacacagagagcgagcaagcaacagatgatccgtgcgctactcttttcacaccttcggtcaaatgtgttaaataaatctgccaagacatctaccactggactttccttgctatggcggtatgca

SEQ ID NO: 253286 - DNA, 229 bp, Glycine max
  unsure (1)..(229): unsure at all n locations
tgacctataaaactcagcttctaaaccttacaagaatgaagctctgataccacttgttatacttgtggtctcagatatcttaagaaggannggggggttgatataatataactctaaccgtgtcccgcagctacaaatgaatactacttgcttctgtagctaatgaatcatcgttacagacaatcttgttcgttggttatgatacacgaatcaccaagcctaggcttaa

SEQ ID NO: 253287 - DNA, 468 bp, Glycine max
cggacctataaatactaagcttgaacagtgcttggccttcaataactgtctttgggcttggtggccacgctcaacaaagtactttcgacacctactgtacgttgatttcaccaatgctgttatgggaatgttgcgacaatcctttataaccttattgatacattctgagaggttcgttgtcatgtggccatatcgacgtccttctctatcgtaagccatcgtccatatttcttttgagatgcgatcaatccatgttgctatggctggactcagttcacgaaattcttctaaattttgataaaaaatgtgcttgcaaggagtgtaggctgcataaaattagttatgaataacaatttaaagtataaatgagagtaaaataaacgtggccatcaaatatgaaatttacccaatttcttaacatttctttttgttggcttattgaatttcaatgaagtgcttgtatgtgtc

SEQ ID NO: 253288 - DNA, 79 bp, Glycine max
  unsure (1)..(79): unsure at all n locations
ggaccttaaataaggaaccgtgcttaatattctttacgttttgtcttngaaggctacctgccgggcgatattaccgggt

SEQ ID NO: 253289 - DNA, 455 bp, Glycine max
  unsure (1)..(455): unsure at all n locations
tatggatcataagctaaagcattctatttgtttctatttgtgcaactggagcatatgtaacttcataatctataccctcttcttgactatatactattgcaactaatctagccttatgtctaatgatcacgccatgttcatctaacttattcttaaatacccatttcgttcctatgatggggtacttataaagtttctctactacttcccacacattgntactctcaaactgatttagatgttcttgcatagcaactatccgatgatcatctattatggcttcatttatatgtttaggttcaatcatagacacaaaagccatattatcgcataaatatttaagagaatgtctagatggtaccccttttgagatgtcaccaagaatgttgtcaaggtgatgatctcttgaagctctccactctctttgaagaacattatttgctntgacttctact

SEQ ID NO: 253290 - DNA, 194 bp, Glycine max
acaacattgactttatttggtcgctgttataatatatcaccaatgccttgttgggaaagacaatcattaaaacatatcttaccatgttttatttacactagacaccggaacatgaaagtctaccgctccattcaaagtagctttaattccttcctggaatgaaaccccattattcttactatttaatccttatt

SEQ ID NO: 253291 - DNA, 463 bp, Glycine max
  unsure (1)..(463): unsure at all n locations
cttgattgtcaagaagaaatcacatgtttgtcatcatcattttgtggagaatgtgaatgtatgtatacatgattttgatgatgtcaaagaagaatctaacaaggctgcttcaaatgataagcatttgcttcaagaataattcaagattgcttcaacaaacaaagccttgtttcaagattcactaaagaccaagccttgccttataacaatgtgctttcaagacatgcaaggctctggtaatcgattaccaggaagtgtaatcgattaccagaagacagggttgagaaatagctgttgaaaaaggttttgaatttgaatnttcaacatgtaatcgattaccatatgtctgtaatcgattaccagcaacgaaactttggaaattcatattcaaaagtcataacccttcanattataactgtgtaatcgattacacaaacattgtaatcgattaccagtggaaagt

SEQ ID NO: 253292 - DNA, 430 bp, Glycine max
  unsure (1)..(430): unsure at all n locations
tanataccacgaccaactgtccacgtcaacccttctattgttatatgatctgaccctcataaagaaaaatntcatagttacctaagggtagtggcacgggagaaaatccctatcgttcatactacttggaaggatgtcccagaaactctaaaagttcttgtatgggatgacatnttggtaagtacgctaaactggtaactagatatttattattagagtaacttattcaacagtatttagaagtaacatgtaactagatattttgaactcttctcttaattaatatgattaaagaaaagtgatgtaattgagtctatgcaattcaaggcacccaacttcattgatatggcttggaactggtcaagattcattaagaggtcatcaccatgagtcaagtatttattcacatttatttatgtgaaaatgggtg

SEQ ID NO: 253293 - DNA, 493 bp, Glycine max
  unsure (1)..(493): unsure at all n locations
atgcaagcttagtaaagctaagctctaacaatctccttctttggcaaattttgtctataacatacttagacactttctgagcaggtacgagcagttatgcaagtgggatcagcaacttccattatcagagtaatcaagcacagcggaatctgtagtctatacaagttgcaagtcgtttccaggatgtcagacatctcacatgacatctgctatctgcttctgctccccctgtctccatgcatactgcagcattctttatcagctactagtcttctccaggatgtcaagacgtgtcctgtgacatcagctatctgctccccctgtctccatgctcttactgcagcatcttctagtagctnccatcagtcatcatcagcagcagcagtctccccctcaaatcgtatacatacaactccccctcaaaatcatgaatcatgcatacatcgtatcctactgccatacatcatacatagtatcctactactcaaaatca

SEQ ID NO: 253294 - DNA, 403 bp, Glycine max
  unsure (1)..(403): unsure at all n locations
ttttcgcgcagaattcatttcatggttggtggttggtttgttcttaagtggngtttgtcattggaagtgcggtacgtatgctctgtggttgactttacggatggcctttgtggatgactacgtggtgggtaatgagaaagatcgatattggctgagtaatgacattgttgggttggtgggaaacttggctgtatagaaatggcagtcacagcatgggcttctccctcattctcaccctcttcatttgccccagttatttttgcatttatcaaagcatgatgatcagatttgcctttcagacccacttcgattcttttgccggcgaagaccaaatccgcaaagcttgaaagtgtgtaacctaccatcttttcatagtagaatactgacaatgtgtccaccatca

SEQ ID NO: 253295 - DNA, 185 bp, Glycine max
tcctggcattctaaacaaacaaatcaaacgctacaagactattataggtgctggttgaatacctcactctcttcagtgtatcacacaaatattggttttctctaatgaaacactcttgccttttaccactctaattccccttgagttttagggcattcaaaaagatatggccaccacaaaaaaca

SEQ ID NO: 253296 - DNA, 278 bp, Glycine max
ccactcaccctcattaggacaaactctgttttccttaggcctcacttgaaacacctttgttgggatctctatttggttcttaaccctctcatgcatctactttacgaattctgacctagattccccttctttatgtataaaacaagtgaccactgcgatgggaatgaagtctaactgtgttcggggattgaacccataaacaacctcagcaggggactgcttggtggctctatgaaccacctctgtgtatgcaaattgtacacgacgaagatactcat

SEQ ID NO: 253297 - DNA, 431 bp, Glycine max
  unsure (1)..(431): unsure at all n locations
atcacaatggggggggtgcaaatagcacatttgattattttatatggaccttccacagtgtatatcgaaggaggattgcttctggaggaagtaacccangtcgcctaggcaagctagacagcaacctcctccccctttatcctataagaaggcaaaaggggggtgttcaaagggttccggattcccctggtatatgttcaattgttttgggtgaaaaaaattgtttccgggaagaaaatccaagccgaggtgctttcgtaacgcttccgagaggtttccgtaagcaaatccgtgaaggttttaatccattcttcgtcgttcttcatccgttcttcgttcttcaacgggtaagtgtccaaatccgagacatttaattcatttcttggtttttggctttcatctttatttcgctcaatttcagtttctttttc

SEQ ID NO: 253298 - DNA, 404 bp, Glycine max
gaagcacgcgctcgacactattgttctcttgctcacatggttgcacggagacctggttgtgagcaagacgcccctcaccgttcatgctcatccacggaagtgggcctcggactgctacaggcctttggatgacaaaagggatgttttcggaggagccctgttgctaacctacaaggcatgcgacgacgctcctttacctgcaaactactggtgagctaaagcatactaaacaccgaacctggggcaataccagcagtctctgctactcatggaaggagcctgtgcgtactggaccttctctaaagattgacagtgagagatcgacggttgtgcccgattggaagaagaaaaaataaacgttgtgaggctacactctttccttgcatacacacatgtgttatgca

SEQ ID NO: 253299 - DNA, 350 bp, Glycine max
gacatgatgaaccaactgaagctttttattcaattttttatgtaaaaagctttctataaattcttgtattatgtataataaccctcaaaacactttgaatgtcttgagagaaaagactaagggttgagattatatattccgctgtaggacgattgagtgttagtcattgtgcaatcaaacaatcaaatcttcatatttgatttggagtcaacagtggcttaatatgaaaaagaatattgggtgtagaaaacttgatttagagcttgaattttagagcccgaagtgacatgtattaataattgtaacttggtaaagttagtggaacttaatacttcaccaagaattgaacg

SEQ ID NO: 253300 - DNA, 373 bp, Glycine max
  unsure (1)..(373): unsure at all n locations
gcgtttcattcacatgttctctagctcaagtgacctactgcatactttctacataaaataatgaaccatgcgcgaaaagaagaactgtggatttgatccactagcatcgcttgtacaagaagtttaaggagagaacttctttcttgaacaaagaggcttgctcccaaacatgcgtgaagtgtgtcaatacctatcaacaacgagatagtcaaatgcaactatacaactagattgattgaatgattgacttttcttatctgtgactctttcagtttctacaattatagacaaagctctgttgagcactacaaatagtcaaaacaaaattgcgaatactatgnaagagaacttcttgatgcgctatgattattat

SEQ ID NO: 253301 - DNA, 288 bp, Glycine max
  unsure (1)..(288): unsure at all n locations
atacagtgagaaaggacatgtttctactcangttttttggacactggtgagcaacatngcacctcttgccgttctaaatcttcattcttggttaacaacacccccccctccacttccccaatccttcttttttattcggattgatgcgttatataaaatgcaatacaagtgtattgttagaactctgcgcccatctattaattctaatgcacaatgcatgtttttaaattggataagtaaaaagatagatattgttgtcatcttgtgaatatgatagagatttccatg

SEQ ID NO: 253302 - DNA, 343 bp, Glycine max
gagatatgcgcgggggtcaagagaccttgcggacctccggaggggcgctattgcccaaaaccaagcttgaccaatcccgacccaacccgggcatagttggtcaatgagaacctgtgatgtacctatacatgcgagctcctggcagtcaacacataaaaggaacaaagaccactaagcaaggaggcttgtggtggctggccagctgtgaaacttgattgatatgtgagatatggtctctggtaatcgattaccaagggtgggtaatcgattacaacgctctaaaatgaagacaggaggctaagatggtctctggtaatcgattaccatggggtgtaatcgatca

SEQ ID NO: 253303 - DNA, 313 bp, Glycine max
tgattctgggcatggatacaactttaattgatgtaaattttgtggaaatcctgtttcgaaatgataatgtttgaaagcgcttgggaagccattagatcgttcgtttacacttttggaacttacataccctaactgcttaagggggcaaatttccccatctggggttcttctaaaaagtacatccccatatggggttcttttgttattatttcccgcaacgggcagtttttaacgtggagtgcatgccatgcaggacccaaactgccattgccaatggtgagtttggtctcactgagcacatcgctcatgttgt

SEQ ID NO: 253304 - DNA, 465 bp, Glycine max
  unsure (1)..(465): unsure at all n locations
tannaaaagatggcctcagcaaattccttatntctatatttgaattctatcaataaacctccaatctttaatgaagagggttaccactactggaaaacccgaatgcaaatttttattgaggcgatagatctaaatatctgggaagccatagaaatagggccttatatacccaccacagtagaaagagtttcaatagatggtagttcatcaagtgaaagcataaccatagaaaaacctatagatagatggtctgaagaggatagaatacgagtacaatacaacttaaaagccaaaaacataataacatctgccctgngaatggatgaatatttcacggtttcaaatgtaagagtgctaagaaaatgtgggacactcttcaattaacacatgaaggaactacagatgttaaaagatctangataaatgcactaactcataagtatgaattatttataatgaatgcaa

SEQ ID NO: 253305 - DNA, 426 bp, Glycine max
tataattcaataggtgtactttaattgattaagcttattctattttgagacttgagaattgatgaaagttcatatgatcactcaagtcaatagatgacaaactctaaacagcatgactttggagttcatatattgaattcggaagagtatcttacagattgttcttaaagagtgtgacaagtatttgaaagaataagatgagaattcaccacttggtcccatgagctggttgttgctaagatctaaaatggagagttaagttagattaaacaatgataagggaaccattccatcaaaattgcagataatcggaaatacttcgttaagagatcttcaatggccaatggaagatagcggaataagagagattcgatagtcttattggagtattccagttggactttggaatgtcacctagagacagat

SEQ ID NO: 253306 - DNA, 450 bp, Glycine max
catgcttgctgtaaggcaatgatatttttatgcatggcttttatatgtgtcatcattaataggtaacacttgctcctcacattcctgagaaatgtaaggacccatgtacttcctgtataccttgcattattgggaacaatataattgagaatgccatgctacatctaggagcatcagttagtgtcatgcccctgtccattttcaattctttatctcttataccttcgcaatctacagatgtggtgattcatttggcaccagaagtgttgtttaccccgcaagtctcataaaggatgtgctggttcgggttggtgaacttattttcctgctgatttctatgttcttaatatggaagaggtattttcccatgattcagttccaattattttaggcaaaccatttatgataacagcccgaaccaagatagatgtttatgctggcacattgcta

SEQ ID NO: 253307 - DNA, 482 bp, Glycine max
  unsure (1)..(482): unsure at all n locations
ccttgcagctgatgggaagctagcttagaattatatttctctgttgtacaggttaggcctgtggctttgactacttatgttatacctcatggactgtgatattnttctcacctctcctaatcaaaatatattatgtttcaaaatatgcaggagcttgaagagagcaaatatgcagctcttctaaatatgcgagaaacaccaagttcttgataaaggctatatggctgaaattgatggctatcaaaacttgtttggtttgatgaaacaaagatctttgagtctcaagaacccaaaatatatgtaagagtctggctgtacattttttcagctttgcacaaatttatttcttcttgctagtatagaatcttataagctatatttcttctagacaagaaagagttggagctatttcaagcccttgctgaagcttaatttncaaaggtgataacagatttacctagttcatttggcatttaatttat

SEQ ID NO: 253308 - DNA, 384 bp, Glycine max
ttgagtgctacccgtatctcctatgatgtctctccatgtctttcaaaatctatatcaaggcctactcatgggatgaatacctgatctataccaagaaagtttctttgctaaccaaacgtatatctttgatatccatgtcatcaataaattgattgaactcacccatgtttctctcccaatgggtaagttataattatctctcatttccttcatagatctcactgaacttaatccactcattgaacaccaatttccttcctcacaagaatttttaagccttaacctcatcctataattccatctttctcctcaaatcacagtgtgcataaatattatggaaaatgcagagacattaccttcttttacactccttgtaccctacat

SEQ ID NO: 253309 - DNA, 448 bp, Glycine max
  unsure (1)..(448): unsure at all n locations
cttttataacatcttgagcagaccacgtcnntatttgtattacatttattncgnntccgccaaaccaggtttagaataaccgcaaatagaaggttccacttaatatcatataccattgatcacgagacatatttgaaagaagccaactctgcaaatgatgacacgtataaaattctctaacaccatccatccaaataaaatactgccaaatcagtctcacttattacaatccctgaacaagtggaggagagattcctcgtgaccagcacaaaaacaacaagaattatcatcagtatgtcccaattaatctcatcctccttttatttgtcagaacctctcgtggcaaagcttccataaaaaacttataattcttctcagacgtttccatatgtggagacaaatgacaagtccttggttaggggagggagaattcatacaactatctcat

SEQ ID NO: 253310 - DNA, 317 bp, Glycine max
  unsure (1)..(317): unsure at all n locations
tgaaccnatagacccaattccagtgatctcacaggatctatttcttagtggagtgaaccaccaacttggtcatcaagctccttaaaccaagacttgtttggtgtcatatggaatgaacacccagagtccaagatccattctgtctcagtgttttcatgagacaccattaaagccttagctgactcattaccatcttcaactagagcagcatttccaagttctttagatcgatcttgcttggttccttggtgtctatcacgacaaaatctgctaatatggccttctctttaatagggaacatctaatgtttggacatt

SEQ ID NO: 253311 - DNA, 473 bp, Glycine max
  unsure (1)..(473): unsure at all n locations
agcttggataggatgcttcaatggaggaaaataaagagggagagaaagagagaggggggagcacgaaattgaaggaataaaagaggtacagaagtggaactttgaagtatgtctcacaagactctcattcatcaaagttacaacaagtgttacacatgcttctatttatagactaagtagcttccttgagaagctttcttaagaaaacttccttgagaagctttcttaagaaaacttccttgagaagcttctttgagaaagcttccttgagaagctagagtttagctacacacacccatctaagaactaagctcacctncttgagaagcttccttgagaagctagagcttagctacacacccctataatagctaagctcacccccatgacaaaaaaacatgaaaatacagaaaaatcctactacaaagactactccaaatgcccctgaatacanggctaggaccctatactac

SEQ ID NO: 253312 - DNA, 486 bp, Glycine max
  unsure (1)..(486): unsure at all n locations
gaacaagttcagggaagtgaggatttgtctacttttcttatccagctagcacctagttagtatcaggtaggaaaccttagagtgaaatcgttagaatcccttgaacctaagtgagagttatgaatcaggtatatcggagtaagaaagatcgtgttgagggaagaaacctagatccgaagataggtaaatcatgtattctcgagagtcacgtgtggactaggatttgtagagtgttgaagtctcanaacttatacctctnttcttgaatcgtcccatgttaaaaaaaaagtcggccatgtggccaatcgtgttaccttgtgtttgtttgttcatttcagattctcatcagtgtctcttatgatattacccaacttcaaaatagtatgtcattcgcattctattatcattgagatgtcactcgtggtagaaaacttgacttatgaaatactatcattgagttagtggacatcatcaagcataatcact

SEQ ID NO: 253313 - DNA, 382 bp, Glycine max
  unsure (1)..(382): unsure at all n locations
tcacccctccatttaaaatcctgaaatcccaatgagaatcagagaaatcgtacaattctctttagcataaatattaattactctaaatgcttctttatgcgttgaataagtgggtccttgtttccagttagcctcagaccattcttcctcggatacaacttgcattcatccactttcaatttctctaaccgtcccactgtcaaccaaaacaattgagaaataaacattgttaatagaaaagcttaaacacatacaatatatcacagtaaaaaacagacataatattctatttccacttttaagctttaagtaacaacacaaagggcttaaagagaaatctngtctaacttaaaggtgtngtatgtatctaacttgaagcaaa

SEQ ID NO: 253314 - DNA, 450 bp, Glycine max
  unsure (1)..(450): unsure at all n locations
cttaacctatgcgcttatcaagctttaattaataattattgagttctgaaacaaccaagagtgagacaatttcatgcaatttctttggtttacatcatcatagaaatggaagacaaagaacacattgactcatttaattaagtttataactgttctcacactaactatgaaaatgggataaaggtgtttcaaaagtatatacaatttacgagtatttacttctccattttttntgacatcgactcaattataatagtttgattttttttttaagtgtttggatagaatatgaaataattcaattgatctcatcataaatgaattgaataataaattatatatttttaaacttcactcaactaaattttagttcatataatttattaaattattagattaaatcattcatattcttctctcttaagctattctttgtatatttatcttatc

SEQ ID NO: 253315 - DNA, 475 bp, Glycine max
  unsure (1)..(475): unsure at all n locations
tantcaggncaaccttgtagacttcaattaagagaattatgcttataatttactacttattttattaacttaaattcaattacctgttattttatattagtttgattcattaataaaaccattttaatatataattaataatatgaatataaaaatacttattcctcacatccgtaggaatttaaatgcttatagaataattaattcatacaaagaattgagtaaataatatatccaataacaatataatgaaatttatattgcggtttaatcaaaattattatataataaatttattaatctttataactaatacttaaaaattatatttattaaaatttcgaattgatgaagcactattatactaaaaaagtagactcttttntatcgcatttattcccgatctcaattttataaaagtcttcctacaaaaaggttcaatagaataagaatatataagatacgcgtatgtgtc

SEQ ID NO: 253316 - DNA, 330 bp, Glycine max
  unsure (1)..(330): unsure at all n locations
tcctgattcaccatatattttgacccanggtgataatgtcaatccttaccctcgaaagcaaaaagataagaaaggaaaatctccaatcaaagagaaagctacaagaaaagaaaggaaattcccaatcaaagaatgggagaaagtaaaaaaggaagaagataaaggaaggaaaggaagttcctgatcaaagaagcataagaaatgtgcagaaaggtctttttgaccagacaatatctgagcaatacagaattgtcacctaatgaacaaaaggaagggaaaccatgacctaaagtggtcttctccctttgaataccaaccaaaattctgtgc

SEQ ID NO: 253317 - DNA, 376 bp, Glycine max
  unsure (1)..(376): unsure at all n locations
acgtaatacacaatgaccttcacagaaccttcttactacgaaccatatgcaatgccgcttaactgctcaaaggacacccatctcctcaacacccaccaaacaggtaagggaaacaattgccaattatgacgcatgaactaacaaaggatttttacttatgaaatgcatttgctctatgacagcaatgtctatgagtcaaataaactgtccccttaaaacaactcagctcacttatctacttattctggaatggggcatactgagttgccacataaaaaaacacttcaccgcccaaatgctaaattgctaatcagaatagtctcatcaagcatgatatatacaactaaaaatggtatcaaccanaataaaacatctc

SEQ ID NO: 253318 - DNA, 63 bp, Glycine max
atgtgaagcaagcttatgcgcctgagtgcttacgaacgttcactagcggagacattctttaac

SEQ ID NO: 253319 - DNA, 424 bp, Glycine max
  unsure (1)..(424): unsure at all n locations
gatcttccttgtttgtacttgttcgaaatatctatgatcgccttatgatgttctgagtgctcgtcgtgctatacaaactacattctaccatgctttaatctctgacagcattatgcatgngtgtttaggatcattcgacaggggaaactggtgtgattcttagatcgcgataagacatggctactttgtcacatctattcgatgaattcaggtaccgctacctacttggtgtatgtgtagcataatgcggtcctggctgatattagnacagcatgatgaatctgcggacgatgctagatcacgattacgctttactatcatgaggaatctgcgtttagcatttcacgatacgccatagaatgcatgagcattcgtagtatagaatatccttttacatcacaccctatacgaagacaccgtgcgt

SEQ ID NO: 253320 - DNA, 366 bp, Glycine max
tggcgctttaaattgtgggaacgcgctcaaatatatggcgcaattttggtttgctgtcgtgcttgaatacgctgaattacgggtttgtatgggatggccctacgcctataatgcattatggaacaatgggacatgccaccttgcccccgttgtcttgctattgacgcctaaacgcgcgcgcaccaagggttcggtgaaatgcctcaatggcattagcgcgtgacttttgaaggaaaccacccatggtgcattttgcgtcgacatattctttatatttggaatatgtattcattccccaaaaaggtttgagttattgccccacatatatcctaagcctaggaattaaaatttttgccaaaagaacac

SEQ ID NO: 253321 - DNA, 398 bp, Glycine max
  unsure (1)..(398): unsure at all n locations
ttccgccngactacggaaagatcttagagtggaccttatcttttgtatccatagaagccattgcatcactcacccaatactacgaccagccttcgagatgcttcacattcggagacttccaattgggaccaaccattgaagacattgaggaaattctaagatgtccgctcgggggaagaacaccatatctttcctccggatgtctaccctctttgagcagaatggcaacttgggtcaaggattcatcaagaggtttggaccgcataaaacagactcggaacggcatggctggcctaccacagaagtacctataagacaaggcgaggggtatggccaatcattgagactgggtcccgtgtatggatgttgtagctccgctaatctttggggtcgtcctc

SEQ ID NO: 253322 - DNA, 471 bp, Glycine max
  unsure (1)..(471): unsure at all n locations
tancagtattctctatacttggatgntgacagttctatttttatagctgttaaaaaactcgagctgcgagttgtataataaacaaaacaagcctaaaccaagccttatatagaccgagccaaagacccttgataagcggctcggctcatttacatctctagttcggatatatagtctcgtgtactttaccttttttgtgtgttgagagataaaaatatattaaagagaaatattatatttgttttagattcggatcttttacattctatcttaattaaaaaaagaagtactcctatctttatctttgttatgttcattctctaaaccaaactcacattaatctcttctccttagtttttgttcctgtaccgtgcattcaatagcaattattatcgtcttgctcgttgatcgttcaagtatattgaactatacacctctaacatctttttagctcatattacgaatgaatga

SEQ ID NO: 253323 - DNA, 202 bp, Glycine max
tattcagaaaccagtcaccaacagtgattttttactgatagaatcggcataagggaactatcttaaaaggatcgccatacgcgaatgttcatgaaaaaacgagcaaataaataaaccatcgaggacctagcctaaagacccatcaaaaacatgctgcagacaaacgcaacaccgacactgactcaacgcgcctgcttttttt

SEQ ID NO: 253324 - DNA, 482 bp, Glycine max
  unsure (1)..(482): unsure at all n locations
cctcgtaacaaatattgtagtaatagcacttgacaattgttattatatgggtagcaattattatttacaatgggtgtgtgtgtgtgtgtgttgcaatcaataattagtgcatcaatttaacaattgaaatccaatagcataatgcaataactgaaatacgaagttcgtgaattgcaatcccgtcaatgaaatnttgttgaattcctagtagaagacaaattaaaatgcttacttgttgaagacaagatcaaatgtatcaaaattgttgatgttgcaagaacattattaatggggcaaaccgagaagtcaagccttcctttgcctaaccacacgcttcaaatactaagggtttcaatgggcaaacactatcaaggaattgaataacgtgacggcacagaggatctagccttgttgtttattaaccctagacacctgccattaaagacccaatggttcagcccacatttgttcccacacggact

SEQ ID NO: 253325 - DNA, 410 bp, Glycine max
tacaataaattacatattctactcaatcaactaagataaaaccctcgacatgtatggtgaaattagatatactcattaaatgttaaagcttatttatgaaacatagaacagttgtaagaggtggaattagttgatgtgaccaacacagggtccggtcattatttaatagtcttaacaacaaggattaatattgtgaatgaaaacaaatataaggaaccaataagttttaaaacaatatagggagattaaatataaaacagtgtgaaatattaagtagctaaaacttagttaaggtaaaaatataagttaaaatactctttaagttgtgggtgttctgattattttatattggcattcttattcttataaaatttaatatactcttttatggttttaaaagagataaatga

SEQ ID NO: 253326 - DNA, 472 bp, Glycine max
  unsure (1)..(472): unsure at all n locations
ctttggaaagaagaagaagaagaatgtcnaaagatgttctttatgattataagagttatatcaagttctaaatatgcaagtcaaggtcttgcttttatagactcttcatgtctggtcaagaaaaccatagggagagttatatctcttgatttttattcaaaacttgtcactggtaatcgattaccaaaatcatgtaatcgattacacaaagcattttatgaaaagatgtgactcttcacaattgaatttgaatttcaacgttctgatacactggtaattaattaccaatatattgtaaccggttacaccatttaaaaatcaattggaacattgcaaattcagttaaaagctcttgaaatcaaactttgtcactggtaatcgattacaggaaactggttatcattaccagagagtaaaactctggtaactttaantatttgagaaaactcttttgaaaacaaaattggctatg

SEQ ID NO: 253327 - DNA, 441 bp, Glycine max
  unsure (1)..(441): unsure at all n locations
tacttcttatggacttgatggggcctatgcatgttaaagcctggggaaatatgattcctatgttgttgaggatgatttctccacatttacctgggtcaactttatcagagaaaaatcacacactctgtgaagtattcaaagagttgatctaagactttaaagagaaataagactgtgtcntctaatagaataggattgaccatggccgatgaatttgaaaaccagcaatgttactgaattctgcacatctgaaggcatcactcatgagttctctgcagccatcacaccacatcaaaatggcttatttgataggaaaacatgactttgcatgaaactgctagggctatgcttcatgccaacagactatcctataatctctgggctgaagccatgaacacagtatgctatatncacaacagagtcacacttatacgatggact

SEQ ID NO: 253328 - DNA, 451 bp, Glycine max
  unsure (1)..(451): unsure at all n locations
tctattaagctgaaccattttatcaataaacacaagttgttttttattcagaacaattagagtttatctcttttatcttagcgagagtgattctcctaagttcttgagtgattcaagaacatcctggctatatcaaaggtctttcacatcccttgtgtgttgctctcgctgganagggtgattctttccttccaccatttcatcttcaaccttgttctttcaaactccaatttccagaaaatccaattcttcctagaattatctcgtgaccataactctcattttactcgttcaaattaagtgattcttgagtctaaattgaaattcaaaacgagagctttcaccttgttgtggaatcacctcatttggagccctgtagcttgagttatatccatttttatatttctgtccagtcaccacttaacctacatattaccatctcattcatcca

SEQ ID NO: 253329 - DNA, 366 bp, Glycine max
  unsure (1)..(366): unsure at all n locations
taaatgtttaaatcttttattaataattgagattttattcctttaataatacatatgcgacgggtggagggtgtcatagcttctgttacaaatgtcaatgggagggatttgagtccgcgacctttgccttctcccttctcctttcatccttaagacccctttcccaccctattngttagtttttcttagctgcatgggtaatctacttgcctccctttttgtatatgccttgtctagcacactcaaatagctgcacgtctctccatatttgtgtatcactcaactacaccacacaaagtcagcatcattaccaagaggcaacaaaattcacccaaaaccacaagagacccacaccataatccatgt

SEQ ID NO: 253330 - DNA, 425 bp, Glycine max
  unsure (1)..(425): unsure at all n locations
nagcttgattttntctaagttctttaacaagcttttatctatatatttgtccttcatataactgtctttgggcttggcggccacgatcaacaaagtactatgggcacctatgttaaacaaatggcctcagttatcttaagaaggggggggtgaattaagatattccaaactattttccctaattaaaaatctatttcactttttactcaagttatgaattcccttaatgacaatcttcttaaatattaattcaaatgaaacaatntgtatatgaatataaagaaataataaattaaggagattaagggaagagaagatgcaaactcagttctatactgtgtcggccacacccttgtgcctacgtccagttcccaagcaacccgctngagagttcactatcttgtaatatctttacagttctaaca

SEQ ID NO: 253331 - DNA, 350 bp, Glycine max
  unsure (1)..(350): unsure at all n locations
agcttctcggctcatactgggaatacctctagttcaacacccgngcaacctaaggcacccacccagagggaagcttcccaagttccaactccgaacacgactcgaccggccggtaattccaacacgacaaggaactttccttcgaggcccatttcggaattcaccccactcccaatgacgtacgaagaatttctgccatccctcatcgccaatcatttggccgtggtaactcccggaagggtccttgaaccccctttcccgaagtggtatgaccctaacgcaacttgcaagaccatgggggtgttccggggcattcgtcgaaaatgcttggccttaatacaggtccaaca

SEQ ID NO: 253332 - DNA, 487 bp, Glycine max
  unsure (1)..(487): unsure at all n locations
ctgggttcctaggcctaaggtatatntggggcaattattctatcctccatgaaactgcctacacacttaanaatgacaatcacatgtataccaattcgttccataggttatatttcacaaaaacatgcataaatgccattgagggtggtgtacttacttgtatggagtgagcaataaggccaaatggaaccaaaaacacaaacaacggtgacttatggctgaaaaaacgcaaataccatgagtgccttcattcttggaagcttgggggacgttntggggtgaaaaatatgcaccaatgaagcttcacccctgccttcctttntatgttttcatgtacagggtgctcacccaagcgagctaactctacaattttttttgcaagaattctttgcaaaatattgactatcctctgggtttgcgcttaatttaatttaattcataggattatgaacaaactangcatattcaactatgacttaagaaacat

SEQ ID NO: 253333 - DNA, 400 bp, Glycine max
cttctaaattgtatatgaaacccggcgtcagagtcaaaatcaaacaagctatacctcaggctttaagctaccatatgaaaatgatatccacatgtagcgtcaaaagagaataaagaacacaatttctgcccccaccctattctctcaaactttgaaaccgacatacacacacatactttttcacatcttctatgttttatgtgcgaagctctgcacatcattaacccaattgcttcttcacttactgagttaccctgagctttactataatactaataactaatttgatggactcaccaactttttatatactattatgcaaattacatctgtcttattagaatgcttccttagtgtgggagaacatagcttatcattctaagtctcaagtcacagatat

SEQ ID NO: 253334 - DNA, 379 bp, Glycine max
tgacactatcaaactaagctttgtactccccattctggcttccattgccaattttcttcctcgcacgcgtctagaatcttgcaccccgtatcataggcttctctagatcactctgctctcctacatacatacgggcatgtgcttgctgaaaagactcttctccatggcacaaatcatatcctccaagcgaactcccatttctacatcaaacgattcatattgggacctactctgcatgtctgtcaattcagcatgccatatccacgttgagtaattcttcttaattctatcacacaataaatgctcccgtatgtcatttactatttcacgtcttacgttcaaacaattgatgcaccgacaataatatttttcgtgctca

SEQ ID NO: 253335 - DNA, 478 bp, Glycine max
  unsure (1)..(478): unsure at all n locations
cttgcggattngacttcatctgcacaaggatcatagcgggtctgtttagaggcatatctgcttatcctgctttgataaatgcaaaaactgccgccaacgataatggtgagaatgagggataaacccatgctgggactgtcattcctatacggtcaagttacccaccatcccaacaatgtgcttactcagccaataacaacccttctccttaccctgtgaatgtatgtatacatgattctgatgatgtccatagaagaatcaaacaaggctcattttgcttcaagattaacacaatattgtttcaacaaacatagccttgattcaagatatcttcaagatcaagcctngcctcacaatgaaatgtttcaagtcattcaagtcacatgtaatcgactaccaatacatgtaattgattaccaatggtgtaaaagtgtgtcattgattacacatcatatgtgatcgaataccagagactctg

SEQ ID NO: 253336 - DNA, 374 bp, Glycine max
  unsure (1)..(374): unsure at all n locations
gaggatgctttaatggaggagaagaaagagagaagggtggagcacnaaattgaaggaataaaagagggagagaagtggaactttgaagtgtatctcattagactttcattcatcaaagttacaacaagtgttacacatgcttctatttatagactagaaagcttccttgagaagctttcttgagaaaacttccttgagaagcttctttgagaaaacttccctgagaagctagagcttagctacacacacccctctcataactaagctcaccttcttgagaagcttccttaagaagattcctaaagaagctagagcttagctacacatacctctctaatagctaagctcacctccttgagatgagaagctcgagc

SEQ ID NO: 253337 - DNA, 472 bp, Glycine max
  unsure (1)..(472): unsure at all n locations
cttanataattgctcgtcatgatggatgcatgaggtattctttttntattactttattgggcgttcgcccattctcacacaaacaaatatttacacctcatttatcaatttctttgattttttctaatcttattcgccggctcctgccagccaattatgtactttaggtcataccactcaagatgccttccttacttgatttgatatattacaatatcatctgtcttatcgattgtcactagctcaagttattaatataactatattgttaataatcgcactatgtatctgaaataataataattcacatgtcactttattattcataaagcatctattgcacgaaatcttattgnattatgaggaatataaatatgagaatacttgttacatgtttattacaagatcataaanaaatactttaacttcattattctagcaatcatatatacatgcttattatctataattc

SEQ ID NO: 253338 - DNA, 428 bp, Glycine max
  unsure (1)..(428): unsure at all n locations
caatggtgcacaacatgntttccacattcaccaattccgcattaacccaccatcccctgttgtccacctncaactgagctcacgtactcccacgtagcccatatccttgtttttcttaacacctggttctcatcaatcctcccaagcttccccaactttcaagtaatacagaattcaacaacacaaactatcacaaccaagaaaacagggcaaaggcagaataccttgcccaaaacatcaaccacaatcacaagctttttcacttaaagaccccagtaacaaatccttcgttccagttcattaaccgctggatcgactcgaanattttactgtaagtctctagtacataagcctacattttaccatggtgatctactagaaaacattcagaactcattctgactactcttccacaaccagcaacatac

SEQ ID NO: 253339 - DNA, 470 bp, Glycine max
tctactatgtggcagggcgggcttccttcactttcttgtctccaacgcgagctctgaccactgtccttccttcccacggtgcttcttttcatgtccgcctgagtgggcttatagcctaaaccatacttcccacgatttccttgggtttttatcaggctagttatgccgccattgtctttgcctaaacccatcccgggttcataaccgttccccaacataactcgggccatcattaccgccgcatcggacagacaaggttacccaaagagggagtccacggaggaaatgctgaccacctcaaaagactggaaagcggtttctaacgattcttctgcggcttccacataaggcatggaggatgggcagcttaccaagatatcttcctcgcctgacacgatgaccaagtgcccctttcactacgaattcagcttttggtggagtgtagaaggcacaactcccactgagtggat

SEQ ID NO: 253340 - DNA, 480 bp, Glycine max
  unsure (1)..(480): unsure at all n locations
agcttgaagtgagaaagtgtgtaagagccagttcttctctactttatgtgntgaccacaaagtggtacctggagatatgtcgcgggggtcaggataccttggggacgtcaggtggggtgctattgcccaaaaccaagcttgaccaatcccgacccaacccgggcatattcagtcagtgagaacttgtgacgtacctaaataggcgagctcctagctgtctaccaataaaagaacaaagaccacatgtggatgccaatcctagtgatagaggtgtcatcatctgaagaagaccctgaggaggacccagaggagttacctcccgagcctgttgtggatgctcttgactttccagagggtgatgaggacccactccctgatgtggattctccagaggacgtcatgacagcattcgaggcagactctactgaggagagcgcgccttgagggatagcgactattggaaactcttcatcatagtag

SEQ ID NO: 253341 - DNA, 484 bp, Glycine max
  unsure (1)..(484): unsure at all n locations
ntacggacccttaccgaacatgcgccaggggtagaatcattagtgaggtagacgaagttcatgaagagatgaatgccgacatggaggccatgaaagaccaaatagctcctatgatggaggccatgttgagcatgaagaaaataatggaaagcaatgcgactattgttgccactactagcgctgccgcttaggtagatccaactcacccatcttgtgtgaatcaaataagtcgtccaatcccggacatggttggtcagggatgagaagcattgggaagtacaggcgggcctcatgttgtgcaaagcaataattctttcccaccatatgaattgcctcccaattatgccccacccaatgttgtacatgtgcccgacgagaacgccgaccactccgctcctgttccccttgatagccagcaaccccagttggtgcatgcatatttngcttcacccatatggggccgagtgaagaattccgagaccac

SEQ ID NO: 253342 - DNA, 154 bp, Glycine max
tgaggaacggacgctttttctgcaggccaactttcttacaaacaccgaacatcttatcctttacaagaaattctcgcttggccttccctcaatatgcactttgaggaggtttgttcaatattggttgggccttaatgcaggagctttaactaac

SEQ ID NO: 253343 - DNA, 482 bp, Glycine max
  unsure (1)..(482): unsure at all n locations
acgtgacctataaaactcagcttcaacaagaccacttccagggtgctggaactacttcacatggacttgatggggcctatgcaagttgaaagccttggaggaaagaggtatgcctatgttgttgtggatgatttctccagatttacctgngtcaactttatcagagagaaatcagacacctttgaagtattcaaggagttgagtctaagacttcaaagagaaaaagactgtgtcatcaagagaatcangagtgaccatggcagagagtttgaaaacagcaagtttactgaattctgcacatctgaaggcatcactcatgagttctctgcagccattacaccacaacaaaatggcatagttgaaaggaaaaacaggactttgcaagaagctgctagggtcatgcttcatgccaaagaactatcctataatctctgggctgaagccataaacacagcatgctacattcacaacagagtcacact

SEQ ID NO: 253344 - DNA, 226 bp, Glycine max
tgataacaatgatgacaccccaagatgatgaccaaggtgatgaccaaaagctcaagatagaatccagaacacttcaagattcaagtcggaatttgaattcaagaatcaagaatccagattctaggatcaagcctcaagacatcaagatccagattcaagaatctggagaagacttaattcagatcaggatgaagaggttttttccaaaactgagtaacacatggat

SEQ ID NO: 253345 - DNA, 486 bp, Glycine max
  unsure (1)..(486): unsure at all n locations
actaagcttagccaatatcccaatttaccataaaccttactcctcttatgaaaacaaaataagaaaggaacttcccaatcaaaagagcgggagataacaaaaagagaaaatttccaatcgaagagcaggagaaaacaaaaagagaaaattcccaatcgaagagtatgagatagcaaaataaggaaagaaaattcctgatcaaagatcggaagaaaacagaagatacaagcagaaaggtctttggaccagacaatatctgaacaatacaaaattgtcacaaaaaaagaaaggaaaccacgacctaaagtggccctctccctttgattaccaaccaaaatcctgtgtgtcagcgactttttcgccccgcactatacaaaaacagaanaggaaaaggccaaaaacattcanagccaaaattcccacataaaaaaccaccattcccaagaaaaagtcctactgacccatgatcacgcatgtaatctttga

SEQ ID NO: 253346 - DNA, 422 bp, Glycine max
gatgatgacaaaaagcccaagatgatgatttcaagattgagtcaacatgttcgagatcaagattaatctcgagattcaagaaatgacatctagaagaatcaagattcaagagaagatgatttcacacgggaagtatttgaaaggattttttaaaaaccaaacatagcatagttttggtttacaagaaaagttttcctcaaaatgtttgaaagtaccagagtttttactctttggtaatcgattaccagtttcctgtaatcgattaccacgggcaaagtttaatttcaaaagctttgaactgaatctgcaacgtgtcatattctttttacatggtgtaatcgattacaatatattggtaatcgattaccagtgtatctgaacgttgaaattcacactcaattgtgaagagccacatcttttca

SEQ ID NO: 253347 - DNA, 464 bp, Glycine max
  unsure (1)..(464): unsure at all n locations
gcctaattaacctgaaattgagagagaatgattattaaatatacaaacacaaaatactaagtatttattacctatacttaacaaaaaatacttataacactataaaataaccataaatggggagagtttggtacaatttatacaagttntatacacaaaagttagtcattttcaccgactaacaactcccccaaatttatagtttttcttgtcctcaagcaatcaagaacaactcacttgtccttaagtggcaatgacatgcagtgactatatacaaaggtgtatgcaacagaagttactgattgcataataagataatagagtaaaatgccctcatcacttgtcttcacaaggtatgcagttttccaaagagaataatgaaatgtaacctgaacaagtagatggagttaggcataagacagatatcaaggaaagtagcttaaaccacagtctcatggctactg

SEQ ID NO: 253348 - DNA, 239 bp, Glycine max
aaagctgccgaccgggtacaggaagaatccttcattgaaaggtatatggatttctcagtacaccatcgttctgacacagaaattgaactaaatcataggcaataaataggactcatgtcactggcttacctagggtttgtgactcctacagccaaaacaatggcatcgtttttcttctcgagccgatcaaaagagtacaaaggatcatgtccaacattagcactcaccacagaatctat

SEQ ID NO: 253349 - DNA, 439 bp, Glycine max
gacacagatctacttgcgtgatatcattctttcattctttctcgcaaagctatctacaaagttgtgtatatattttaagctctcaaaacaccttataaaccttattagacaaacctaacgtgctgagagatatattcgtctatacgaggatctcgtattagtcattgtgcaaacttccaacaaatattcatgatttatttagagccaatcacggcttgcgaggacaaagaatattggatctagtcaagcctgtggtagagactgtctctggcagagcaaaacatggcaatgaaaaatatttgtcactctagataagtccgtggaaacttaacacgttgcctataactaaacgtaatctgagtgtgaagactaaccaatataactctcatctattattccttacttcttctattctgggtgaacgaacaacggctcaaat

SEQ ID NO: 253350 - DNA, 382 bp, Glycine max
tgcttttattcgtttgccacagagtggtacctggagatatgtcgcatgggtcatgagaccttggcgacgtcatgtggtgtgctattgcccaaaaccaagcttgaccaatcccgacccaacccgggcatagtcggtcagtgagaacctgtgatgtaccttagcaggcgagcttctggcagtcaacagattaaaggaacaaagaccacaaagcatggaggcttgtggtggctggccagctgtgaattttgtgtgatatgtggattatggcctctggtaatcgattaccaagggtgggttatcgattacaaggcttaataatgaagacaggaggctaagatggtctctggtaatggattaccacggggtgtaatcgattaccatg

SEQ ID NO: 253351 - DNA, 407 bp, Glycine max
ctttgatattgatgtatatacatatattagtcgtattaagcgactatatatctacccattcctcactcacttctcatcatgagctgtcttcttgacttcatatttagaagaatctaaagatggttgaccactctctcctccataagaagattgcaagagaaaatccatactagattcttcaagaactataaagcatatttgtagtcttgatccactttttaactaaagataaaatggccacacaagtatgagtacctacatatatttattagtttcaaacactaataatttaaatataatacttgtttatacttaaaattagttccgaatatacaatattctaatttcaaagctcatattattcgaaacataataatctatataactaacatttaaacaaaaataaa

SEQ ID NO: 253352 - DNA, 488 bp, Glycine max
ctcaacttcttggacctgacggcaactactcctctttctaaatcatgctatgtgctcgcgactaggccctttcttctcttcgcaactcgagttcactattgctaccacatagagctccgcgaaaatagttccggacatactcttacttgcgagccctcttggtctcttgttcaaaggctcttgcggtaattgcaatctctttccgtaacccagcacacgtccttccgaacgtgtgttgcggccaacttgaacttctccttggcaagatttgcctttcctaacttcgttttgagagcttggacttattcgttctctttcggtgcttcaaaactctctttgttgacgactctaacttgtggagccaatctatacctcgtatatgaactttcatccattcgtggacccaccaatgatgccatttctaatgcctctaagctctgatcttttttaacggggtttcacacctatggtacttgttaccctggaat

SEQ ID NO: 253353 - DNA, 501 bp, Glycine max
  unsure (1)..(501): unsure at all n locations
nggctatctgantatgcagtgcctactaggtgactataagttcttttgttgggcgcccatgaacacactgcacagaaaatatgtcaatctgtcaaataatgactgtctgtttctcctcaatatgattcacagcaccatgaaatacgtactatcttactntggaaacacaagtgatagaatgttgtaagctcttcaactcttagtggaacattcatatcgtatcattgaaattctcaacataattgcaccttcaacttaagagcattatgatgcaattaaaggaatactaccagacatatattgcacctttcagtaatagagcatcttgattaaattaaacgaatactaccgatgactgcaatatgccttcccaaatatagagatatctgacaggatcgggctgccatcagatgggggttcatgctcagtgtgaggtatacacaagtatatcatattctctgaaataagagacattcccactactatcaaggtcgtggattg

SEQ ID NO: 253354 - DNA, 383 bp, Glycine max
  unsure (1)..(383): unsure at all n locations
tccgtccggtagtcccgaagaagaccgcgctcacagtgatccaaaatgagaatgaggagctgattcctactcgggtgcagaacagatggagagtctgcattcactattggaggctgaaccacggtaccaacaaagacccatttctccntgccactcattgaccagatgctcgaacgcctggcatgtaaatctcactactgtntccttgatggtttttctgggtatatgcaaattacttttgctcctaaggatcaggaaaggaccacattcacctgccccttcagcacttttgcctataagaggatgcctttccgcctgtgcaatgcccctggtaccttccaacggtgcatgggtggtattttcagtgatttcctacaaaattg

SEQ ID NO: 253355 - DNA, 397 bp, Glycine max
  unsure (1)..(397): unsure at all n locations
tgcttcttctctatctcttgatacgcttgtatctaatatatgtacctcaattttcgtaactcgatgtaattngaattcttgtctataattcaagttcatttcttttaaattgattgtttgtctctcgtttaatataatgttgttataaatcagcatttggacacttatagtgcattgatcgtatatatattcctaatgactgccctaattgagaaattctaaagatttacaattttcaattgcggaaaagagtttttgagttaagatatattcaccttcaattacaatagtaaataatatattcagtttcctatatgctcctataacctgaattggagtaaaaatatgggttgtacatgttaagcttgtggtgaactctacagtaccacacatgtta

SEQ ID NO: 253356 - DNA, 432 bp, Glycine max
tgcatctcgtatatctaagaatagtgtcaagctgagaccgtgccaagcaggtcctttaattaaacgccgccacaatagatctggaatccatctcgataagcacccagtgatccctaaattcactcagccaagcaattaaatggaagagggctaaagtttctgcctcttccggaagaatatttccaaaataatgtggacattaacaccaacacatttcggcaattggctcttcaattattattcttgatccttgcttctactttgttttgttgcactcattgcttctattgatacttcttttcattgccatccttactttgatgctactttattttgaggtattcttatttttctcacattatttctttgcgtggacaggttactatattctcagtgccttaatatcaataggtttattctcttgggtgaact

SEQ ID NO: 253357 - DNA, 429 bp, Glycine max
  unsure (1)..(429): unsure at all n locations
ggggtgatgtcgcgcgtactgatgggtaccatgaggtgttcgctgtggtctgacccatgcgggtgttgaagagacggcatgggcatctccttccttcctttttgcccctgttgccccgattctcttggcgttcacgtttgtggaggaaacgtaatcaaactttcctctcttcaatcccacctcgattctttccccggctaacaccagatccgcaaagctggacggcatgtaacccactatcttctcatagtagaacactggcagagtgtctaccatcatggtgatcatctctctctcaaccatgggaggagctacttgtgccgccaaatccctccatcgctgcgcatattctttaaaggtttcaccctctttcttgaacatattctgcagntgaggtacggcacgagccatatcagaaatgtctgatac

SEQ ID NO: 253358 - DNA, 469 bp, Glycine max
  unsure (1)..(469): unsure at all n locations
ggccttgaactaacttctgatcagttataaatatcagattaagaacatctagtttcatgaatctagattcaagaacaatcaagatcaagattcaagactcaagattcaagaatcaagagaagactctatcaagataagtactaaaaacgtttttcaaaacattgagtagcacaagaatttgtcagatagaaaaatcttttaccaaagagttttactctctgggaatcgattaccagaaggtagtaatcgattaccaatagccaacattgttttcaaactgatttacaaagctataatcgattaccatgagcatgtaatcaattaccaatggtttaaaacgttagatntcaaatntcaagagtcacaactagtgataaaagattttatatcatttaaacttgtgtaatgtacttgtatcgataccagagttctaacattctgttttaaattaacatgagagcacatctgt

SEQ ID NO: 253359 - DNA, 492 bp, Glycine max
  unsure (1)..(492): unsure at all n locations
ctctttcaccggtacttttcagctacctatgagtcctcttcctaacatacaagcaattgatgtgtctgacaataccataaatggccaaattcctagcaacaatatcagntcagtttatccaaatttgcaatatctacacttgtctagaaacaacatcctaagatcaatccctagtgagttaggccaaatgagcntactgtattcattagatctctctgggaaccaattgtcaggaaaaatacctgagagcatatttggagatgggcacccactccaattcttgatactttcaaacaatatgtttgagggacctatattgacaatccctaatggtttgaagaaccttgtgttgaacgataatgagcttattggtagactcccaaacagcatttttcatgcatccatcatttcattggatgtaagcaataatcatttggtgggaaagattccacgtctaactaaaaacttgtctggctggaagaactttatttg

SEQ ID NO: 253360 - DNA, 350 bp, Glycine max
  unsure (1)..(350): unsure at all n locations
tacggaccttagatactaagctgctgttgtgtggacccctatttgagaaactgttagtcggtgaatacgactaactcttgtgtataaaacttgtatataatgtatcacactctcccaatttatggttattctgtagcgttataagtattttctgttaagtataggtaataaatacctagtattttcattttgtgtggataataatcaatttctctcaatttcaggctaattaagcaagctntggaaagtgctgttttcaccttctcgctaagccaatctgttggcttagcaagcgttcgctcagtgcaatactcctatgctaaccgcgaggaagaatccataagaagatg

SEQ ID NO: 253361 - DNA, 451 bp, Glycine max
  unsure (1)..(451): unsure at all n locations
ttgagtcatctctctctgaacctttgagtnttcagaagtatctttaagcttctcgaagtacctctgtatattgtaagtgcttacggatatccgcttaagaatttaaacttgttgcttgagctaacatatttgatgattgtagattcgaaaataataatttgtgttataaattttttttaactaatttgtattagcatttagaaggtatagtttcgattaattttttaattaaattagttttatatttttatgtcttaataccagtaaacaattatgtatggcttgtatgaaattattaattaatttacttctatattctatatgatcgtttgtgtgcacaaaatataagaacattgtcattaaatttctaattggtctgaaattcggttcttgaagatatatctgtgactaaggttcgtaatttcagtaaataaatattttataaaatatt

SEQ ID NO: 253362 - DNA, 360 bp, Glycine max
ctctgatggctgctttgtttgtgcttactcagctgactccatacgtcgtttcatagcctgctgcgcctccacaatgtccacctctgcatttatctctgtcagctatgctggatcaatatcaagctcttcggcatggagccttcttttcgggacttattaattcatatatcatcaagtgctggttcttccttactctccagctaggattccaaatcccatcccacgttttaggaatctctctgagtggtataggattctctctgagcaggctaatctccttgtggagaatgctcaagctcctcctttggctgatttgcagccatctttgtgaatgcttcagctacatcatggtttggatca

SEQ ID NO: 253363 - DNA, 163 bp, Glycine max
agataatgagcgcactgagtagacattcgcgcgaattagtttgcccatagcaaccgctggacatgttcgagaggttatatatgagacgcgccttattctatcaaccgtgatagaagctacgagcgtaagaatttgaccatagcatttgttggagagtttctag

SEQ ID NO: 253364 - DNA, 352 bp, Glycine max
attggttaacatggaccgttccaaagcataaaatcaacacataactttaccgctcttgcaagaactacgtaggtctgagttcctcatcgcaattgaggatacgtaggagcaaaaggcccgcttttgtcgaccaccccaagagatcgttaatggtccaacgccttaacgtttctctcctttcaaaaacaagatatcggtaatggtccaatgctctaacgtttttcttctttaagaaaaacaagagatcgttaatggtctaatgccttaatgtttctctcctttcaaaatccaaagatcatttaatggtcccatgccttatatgacctttgttcggataaaattgatcttacag

SEQ ID NO: 253365 - DNA, 453 bp, Glycine max
  unsure (1)..(453): unsure at all n locations
tctcnncccaatttctataaatatggtgagaagtgaagtgtataagggttcagccctctatgcacttctctctctttcgaagttgcttggaaaaattgtttccgtgaagaacatctaagccgaggcgcttccgaaacgttttcgtgaggaatttcgcgaatgtttcgaacgtacttcgacggtcttcattcgttcttcatcgtacttcatcttcaacgggtaagtacctcgaaccaagcttttcgattcattctatgtacccgtggtggtccacattgtgtttcgtgtatttttattctccgttcatttactatctatacccccttttgacgtgcttaagccatcttatttaagtcatttctctgctaacctagaaatataataaatttccaccgatcgttgaattgtttatccgtaaccttcggtaaatgaatatctaccggtcgatcgtgc

SEQ ID NO: 253366 - DNA, 380 bp, Glycine max
ttaacaaatgcccatctagtagatctaaacatggatattgaaggagaaaatttataattcataatgataaaactggtgttagctatttttatggaaagactggacacatggcatccaaatgtagacatatgccaaaaattaggtcatccaaagttttcaaaactaacaagaaaggacccaaagaggtttgggtttctaataagaaaataattcttgttgcatatatctttaaccaaaagaaagatacatcattcatggtatttggacaacgaatgctcatgacacaagataggagaaaggtgtatcttccaatgcctaacccctatgcatggtggaatagtctcttttgacaagaatcatatagtgaagattacaggagt

SEQ ID NO: 253367 - DNA, 435 bp, Glycine max
cccatcacatgtggtactacgtggcggtcgggcgatggtgcacaacaagtgttgcaaatgcacaatgcgcgcataaacccaccatccactgtagcccacctccaactgagctcacgtactaccacgtagcccatatactcgtttctctcaacaccgggtccccatcaatcctcccaaactttcccaacatctaagctatacaacattcaaacagcagaaactatcacagccaataaaacagagcaaaggcagaaaactctgccaaaacaccaaccaaaatcacagcttttctcacttaaagaccccagtaacaattccttcgttccaattcgttaaccgttggatcgactccagattattactggaagtctgtagtacataagcctacatttcgaccgttgggatctactatcaaacatccagaactcattctgc

SEQ ID NO: 253368 - DNA, 448 bp, Glycine max
  unsure (1)..(448): unsure at all n locations
tgtacttgcagttgctcagcttaggcaggcacctgagctctgctgctctattgggttaattcacaaaatgccaagttggtggtcttttaataaactgacctgtgaagtctgcaatgaaggattgtcctgtcggatatcattcatatgctagataagtagttttctctaggggcagagtagctagattactcgataaagagtagacagatgtgacatatatgatttgcatgccaagaagttatttgattatctgatgttgattattctagtctacactatntatgcagctgttggagaatcattaatcaatactgggaaacaaatagcagctgtacattttattcatgccttccagctccaagaaaagcttcccccagtgccccttctgaaggatacctctagaatcgatgagaaattccaagttaagactgaaatggcgtgacatact

SEQ ID NO: 253369 - DNA, 444 bp, Glycine max
  unsure (1)..(444): unsure at all n locations
ctcacctgcttcataatacctataaattatacagngtttttcttttgatggatgtcagtatacaagtagaatcatanatgagaaattgtaatatatctctatcactggttcgctgcgctctaagcttccacttctagagggaagaacagactgggcaaaacaccaactcctgatcttccttgaaatctggtggttttaatacaagcaagggtatatatattatatacaccaactcctgttctcaatgttacttaaggggccacagctgaatcattctaacattgttgactgggatggatttcatttcatattttcatcacacaaagcattatagtgattgattccatgtgtattctcaaaattatctctccatcttcgtattcctaactaacacagatatttggtgttctttgtcaaaggtggtgcttaattttctcgtgtgct

SEQ ID NO: 253370 - DNA, 457 bp, Glycine max
  unsure (1)..(457): unsure at all n locations
tngagccaattcagacgaacaatatcttttactcggatgtcttattgagtcccgtcatatatcgagacgctcgaaattgaatgttgatgctctgagcaaattcaaacgacaataactgtttacttggatgtctgatngagtcctgtcatatatctagatgctcgaaattgaatgttgatcatctaagtaaattcagacgacaataatcttttactcggatgtctgattgagtcccgtcatatatcgacacgctcgaaattgaatgttgaatctctgagccaattcaaacgacaataactntntactcggatgtctgattcagtcccgtcacatatctagacgctcgaaattgaatggtgatgctctaagcaaatntaaacgacaatatctttntactcagatgtctgattgagtcccgtaatatatcgagacgctccgaaatgaatgttgaagctct

SEQ ID NO: 253371 - DNA, 217 bp, Glycine max
atatcaactaaatcataaaaaagtttttaacgaccgaaaccggacaaatagacccttgcctctcgaaattgacaatattacaaattattgtataatcctcattcaagtcattcagtgaaattttgatgatcgatcttattctaataagcgaatgccgaagaaatgggtgtacggtaagataggaaactcaggggaaaccaccaattttggagaaacg

SEQ ID NO: 253372 - DNA, 478 bp, Glycine max
tcatcaagcagggtttagcatttcaagagacttcattgtacacatgagcgtcgtaagtagagaatatgcttattacatcagacacctaataagaagaccaacgtgttgtctacttgtctttacacatcattactcatgtgagtttcccttttaatagttagtgtacatacatattcatagttcacacatatctgttcatactagagacctaatcattgaatatagctgtaccaaggtacataagttccccgagatgtcgattctcgattcttaccattttatactacttgcgggatccggtgcacttgccaggttcgaccaatagctgcccaacttgatgcatgtgagatagcattgctcttcttgctggtttatgaatggtacccactcacggttactaatattcttttgctattattgctatggagttgttgtagaaaacacatgcttagcttggaaggggtatataagatatact

SEQ ID NO: 253373 - DNA, 454 bp, Glycine max
tgactgctgctgcatacatggagaaaatggatcaatgtctgttactttctaccactatatcattcctaataaatggcagccccacaaaggagtctgctcccactagaagtttgagacaaggtgatcccctagcccccttgctcttcaacatagtggctgaatgcttaactggaatgatgagggttgccatagataataatctgttacaagttttcaagtagggaagcaaaatgagcacgttaatattctgcaatatgcagatgacataatatttgtggcgcatgcttatgtgggataatgatattgctttgaacgctatgctgaggggttttgaattggcatctcgattgaacataactctgcacaagtcaagttgggatcttttgagctgacgtcaactgaattcatgaggcaacaccaattttgaactgtatacattatggaatatctttct

SEQ ID NO: 253374 - DNA, 365 bp, Glycine max
  unsure (1)..(365): unsure at all n locations
cagccttctggaggaagggtctggaaggcccaagtgggctagattgctattagcaccccctcttttactaaatgcaccccccttctattnttttggtaattctttttccgtaacgttacgaaactttacgaatttcgtaacgatacttatntcccttccgcaagggtacgaatctttacggattatgtatttactcttttttagctttcgaagaagttacggaaactcgcggagtgcacaaaaacacctcttttcgacttccgccacattacagaatntcacggatcgcgcaagcctgcttccttttgatttccgagacgtctcgggacttcatttattgtgcaacanaggacgccaagtacctc

SEQ ID NO: 253375 - DNA, 485 bp, Glycine max
tcaaccaagatgggatggtccatttcaagtacttgaaaggttatttgtttatgcgtacaagattgaattgtccggtgagtataatgtgagtactacatttaatgtgtccgacttaacttcttttgatgtagatcgagaagccgatttgaggacaaatccttttgaatagggagagagtgatgaagacaatgcaatgaatacaggcaaggaacctttagaaggacatgtaggacctatggcaaggtgtagaacaaaggaggccaaggaagctcttcatcaagtgttaaccatgccatttgaatttatgcccaaattacaaatggataagcttcgaattgttgattgcaccatgttccaagaatagtagagggtgccactcttgttgagtggtttattagcatgtcgttagtggatataaaggctctaacttgtgttaagtgactgcaattgtctgggatttgaccactatagcttgttatattaaa

SEQ ID NO: 253376 - DNA, 389 bp, Glycine max
actaactcctttgcgaactaatacaagacggcgagctaattctaagagcatttctacaagaaacgctggtattctcaccacgttatttagtaaacattaaaaaccaaaagaggatgcaattttgaaataaaggttcgggagttgtttatgcataccaaatgtatatcacctcatacgctcgtcacatgggacgatgacctttaatcgagtttgcacaacatgacttcaaaattatttatcttcctttttgatattatttatttttttggggtcgacaaaggggctgccctcgttcctacgtatcctcaagtgcgatgaggaattcacactcatgtagttctttatgtccgaatgcttgtgagtaaatagagcttatgtattttatttaa

SEQ ID NO: 253377 - DNA, 414 bp, Glycine max
  unsure (1)..(414): unsure at all n locations
taccagctcgataaactaacgtttactgctggagccagagttagtcttaacttatgtcaggtgaagatagcatcgcatgtgtgttcccttgactcanaaagcgataattgatccgctaatgttctatgaagatccgtaagaccattattaattaataagaaaaccatatgagattcctgatatgcaaaattgatggagagcagctctatcacaacctgattgtactataaacaacgctcgaagagattgtggccaagtgttgctgctaaagctcttaagcgatgagcacccgctcacatttaaaatttcaagcttcggagagagcaaattgattcatcaacataaggcaagctttccaaccacgcatacttacatatttaagatttggtgcatgagaacaacttcgacacttca

SEQ ID NO: 253378 - DNA, 453 bp, Glycine max
tgaaactgaactacagaagctgtgagaaattcaatggtcttaagttatcacacggaattccgattcaggcgcataatatatcgaagcgctagaaattgaacaacggaagctctcgagaaattcaaatggtcataacttttcacacggaagtccgattcagatgcatactatgtggagacgctcgaaattgaacaacgaaaactctcgagaaattcaaatggtcataacttgtcacacagaagtctgtttcaggcgcataatatatggagacgatcgaaattgaacaacagacgctctcgagaatttcaaatggtcataacttttcacacggaagaccgattaacgtgcatattatatcgagaagcttgaaattgaactacggaagctgctgaaaaattcaaatggtcataactaatcacaccgaagtccgaattaggcgcataatatatcgag

SEQ ID NO: 253379 - DNA, 492 bp, Glycine max
  unsure (1)..(492): unsure at all n locations
actataaanactcaagctcttntggcaagatccaccttaatgacaaagaaactattctttatatgcatataacacaataaggtgggattggactgtatntttagaaattcgaactattcttgaaacatacacatgttattcttcatcaataaagcttcatctcattgttattgtttgtcttgaaacaatcatcttatccaagttttattgaaaacaaataacaaatatagcgaaaatcttgatcgtatgaagaggcaatcttcttcttaacaaaccaacaaaaaaaaagatctaagaacaaattcaaatcctttgttagtaaacaccaatgaaaacaatgaaaaagaaacacacaagaatttatactgattcatctaaaccaccaagactacgtccaattcttggtaatctatcaaggtccactaacttatcaaaagttaagtattcttcattgtcacttctgactcttacagagataagctctatcccaag

SEQ ID NO: 253380 - DNA, 477 bp, Glycine max
  unsure (1)..(477): unsure at all n locations
ngagcacctctnttcttacctcttccttcattgttgggttcagccgcctctgagggtgtcggactggcctgtaatcgtcttccatcattatcctgtgcatgcagtaagcagggctgattcccttgagattcgatatgttccatccaattacttccttgtgtttcttcagaatgtctaccaacttgttctcttcttctcttgcaagtgcatggctgatactacagtttagtgtcatcttcctctangaacacatacttcagatgattgggcaatatcttcaactctaccttcttcttctcgggtggaacctccttctttagtgtcgcaaaactggcttccccctcaggagtactttcttgtcgatccaagtcttccaagcaaccctttagatcttcttcctcttcaccagttaggcaatccagtgtgtcataccctaatttcgtccgggggacctttgttggtggcatgcaactttca

SEQ ID NO: 253381 - DNA, 440 bp, Glycine max
aagctgattacagtgaactagagacatttggttgtatatgcttatctaaagcaggataagttggaaccaagggccttgaaatgtatcctcatatgctatccacaaggagtaaagggatacaagctatgatatttggaacctggacaccggaagtgcatcatcagcatagatgtagtgtttaatgaactataaatggcaattttaattatgccattcaagtctgctagaagttagagttcataagttcaagtgaagtctgaagagataactactcagactcatgaggaatcagtagtgataagatgcaagtttgttcttgcgcctggacaataaaatgaagaagcaacttaggattattgtttggctagagacaggaaaaggaggacaatcaaaacccctgaaagatatggtcatgcagatctgatttcctatgctttaat

SEQ ID NO: 253382 - DNA, 457 bp, Glycine max
  unsure (1)..(457): unsure at all n locations
tcaacctcctatataagaccacaatngatcagcatttatattacatgtccatcagaaggacccatgataatggaaacaacataatggatttagttcagagtatgagattttggcctccagaggtttgaatactaaatggatccctgagtaattcaacaaaactgcaagaaatgtatatataaggaaacagacttccatgaaccagttacctggtttcatcctcatcatcaaatcttatcatgttgctataatgcatattttccaaggcagagagttgcacatcaggaaggtctgcttcaactgcgatactgcaatatgatgcaatcaaatcaacacagttcatataagatcatcaaaaggatgccaacatggatgtattttttaagaaaatctaagcaaggataagtcatataagtagtagactagtangtggtcatgtttcattctagtattggct

SEQ ID NO: 253383 - DNA, 475 bp, Glycine max
  unsure (1)..(475): unsure at all n locations
ttgagcanattcacacgacaataactctgtactcggatgtcttgattgagcccgtaatatatcgagacgctcaaactggaataccgaagctctgagataattcaaacgacaataactctttactcggatgtctgattcagtcccgtaatatatcgaaacgctcgatattgaatgctgaagctctgagcaacttcaaactacagaaactatttactcggatgtctgattcagtcccgtaatatatcgaaacgctcgatattgaatgttgaagctctgagcaaattcaaacgacaataactntttactcggatgtctgattgagtcccgtaatatatcgagacgctcgaactggaataccgaagctctgagataattcaaacgacaataactttntactctgatgtctgaatgagtccccggatatatcgagacgctcgatattgatagctgaagctctgagcaacttaaactacat

SEQ ID NO: 253384 - DNA, 392 bp, Glycine max
aaccagctcagaatatggctctcaaccactcgttcccgagtgttattttattatctgacctccaactttaatggagcgggttaccactattggaaaacccgcatgctaatatttatagaggcaattgactcaaatatttgcgaagccatataacaaggaccctatgttccctctataatggccggaaggccacaataaaaaaacctagacctaattggactgatgaagaaagaatattagtccaatataatctaaaggccaaaaatatcattacactacgccctcggaatagatgaagactctatggattgaattgttaaatagctcaagatatgtgggacaccctacaagttacacatgaaagctgcactcagctgaaagatcttgataaa

SEQ ID NO: 253385 - DNA, 426 bp, Glycine max
aacttacgaatgacgtcatgatttaatggtttattatacaatacggtatcgatccatgatctgacgttaatccaattcattgtgagagcacatctttcataaatgcttgtgaatcgatacatgtatggtatgataccatgatcagtctgataaaaagcaagagattaactcttcatggtttctcaacgtataactcttccatgcgttcttaccaatatgagaatctattaaagcagaccttgattgattcaataacttttacaacttttgaacgtctttgaacaacttctgagacatcttgaaaactttgcttcccatctttcttcttcctcctctgccataagctgtctaagttttctgttttccaaacacttgtcttcttgagaatacaacaagtgagctatatccttatcatcgtcttctccc

SEQ ID NO: 253386 - DNA, 478 bp, Glycine max
  unsure (1)..(478): unsure at all n locations
cgacttacagatggagaccatagggaatgtatacagcgctttatctggataataagaacatgctacacttagtaatacaaaatacttagagagcaagattaaaagcacagtgatccttttgttgcacaatactacaggaaacaaagcacggccagcctcttaatggcagtatacatactttcaagagaggagtcaccatccatgatatgtgagaagccattggatttaaaggagttgagttcggtggtgagctggtttctgaattccaataggctntcttcaatccactcctcttaagtgccctctcanagaatgtcaatgtatgaaaaattgaccacataacaggcgcatctgagcacaactgaaccaaaccgtgtggacctgacaaatatttatcctggcactccgattgtgttcactgaatgctcaaaagtgttaggtaccaccttaaaacatcttgtggctggtggatcctgag

SEQ ID NO: 253387 - DNA, 234 bp, Glycine max
tcaacagtcaaaagcctagataggctgtgccttattccatgttgaaattctaatgcaaaatgatttcttcgaagagtggatacatccaacataagtccatggaacttataaatctaatctttaatgctctaatttaaacttggacaccctgctaaatttgacacttccattgtaacatgtcaaatgccttttcacatatatactaccaaatttttagaatatcttattttctaa

SEQ ID NO: 253388 - DNA, 290 bp, Glycine max
caacctgaatgatatcacaggaagatggtacttgtacgatctcaaaacttcatcaaaatacacaaggtaccagctcattttgactagtacttcttgaaagcttactagaaaacttccttagaagcttctctaagaaacttgcttgagaagcttacgtaaaagaacttccttgagaagtctctttgagaaaacttccttgagaatctagatggtagcttcttccacccatctataaactaagctcacctccttgtaaactttcttgagaagttgaagttatctaccacccc

SEQ ID NO: 253389 - DNA, 437 bp, Glycine max
attcgtacacttaaaactcaagctttaagaaccttcaagaactctcaggatctattagctaaaatgaacatgtgaacacttgtagaactctgatgaatgagagtcttgtgagacacaaatcatagttcaactgtttctcccctctatctccttcaatatcgtgctccccactctctctttcttttcctccattgaagcatcatctccgagcttcttattcaaagcacattcttggtggcaaagctccttcttccatggcttattcctaagtggatggcgactcctctcacctcttctcctttatcttccactgcatctccattcaccattgaaggacctcattgaagctcaaagatccagcctccatagaagcttcacaagcaagcttccatcacaacatgaccacagatcaacctccatttcctatgtctcacaca

SEQ ID NO: 253390 - DNA, 496 bp, Glycine max
  unsure (1)..(496): unsure at all n locations
tgccactgcagcagntaagtgaacaaatgaagtgtcttcttcattggatggttgctcggtagaggtacatgctaataactaataaagatttcctgtgcagggtatcattgtttttgcatgactgatggctaccttggagctggagatattggttgaatctgcctcaagtgttattttgaaggtaattgagataatcttttggtggtgcttggttattatatacctaaacttgngttcaagactaggtattcaatatgtggattatctaccataagaatgttctaataagtgattttatcatttgagcagatgatattatcatttgaccttgcttttgctttgattccgctcctaaagttcagtagcagcaaaatgactagcatcacaagcattgaagaagtgtgttccctcttgttcgtggattcatgaactataagttaatacatgaaactgaaaaatgtttaactctaaaattgattactaggttacatgaatg

SEQ ID NO: 253391 - DNA, 486 bp, Glycine max
tccatcaagtagtaatcagagcacaagagcttcaatttgttcttcttacacctccattgatgtttagatatacattgtcctccatagtcgttacttcattattctctatgtatctcctcacatgtcttgtgctaaatgttgctaacatgattctttagaatttccaccgattaatcttgctatagaagctacatgtgatactctatggttcaaaattatatgttcttgttcttgaaccatgaattgtgttgagtttaggttcctttgagttatgtcttgccattttttgtggctgaaacctaacccataaaattcttacaaaaacattaaagtttaagaaaaccttaagaatctagagtgacttgttcacctacttgtagtttgtcataaaagtcatgtctagtcatgacacttgtcacataagatttttatgtcgcgctgaatatattttcctggttctttgctactcattattgatagtgatga

SEQ ID NO: 253392 - DNA, 331 bp, Glycine max
  unsure (1)..(331): unsure at all n locations
tcttccatatatacatatactgagtatctttcccacttctaatttgcaactcaatatggttacgcaaaatacgttgattggagcgcaaatatgatggaagaagaggcaaagcaaaagctgaagactgctgaaccgcaggctaagaaagacaggttaaggatgtggacaaactatgtaccaccgtcttcaaattcanaggctattcataaccagaatttttctggcgaggtaaataatgctcaattatttatttatgccacatagtcagtcttcattcatataagcatataacattctaacttgagctctacaggtgtgtgacgttgtgagt

SEQ ID NO: 253393 - DNA, 476 bp, Glycine max
  unsure (1)..(476): unsure at all n locations
tctactgcactntnttctgcctttaagagntgggcctctgtatcatcaccgggaatcctgataacaccaatatgaaagacgaatataaaacacaattagaaatcaacaatgccaccaagcatagttgttggtgtttgcagaataatttacctggaagcatgtaaaatccattacacaattagaaatcaacaatgccaagtacagttgtttgcggaaaacattacctgtcagcacgtaaaatacgacaccaagaggcttccactaatgctgctcttctagcctcgattgccttatgtgccgcttctctagctgccattntctctctcagcactcttgagtaatgtgggttagaactgccaagagtctgatcaagcgtcaaattcataccatctacttcctgaaaaggtcgaatgtgtgttagcattggaattcagaagtaatcaactaaatactagtgacaaacatatgtgtgtatg

SEQ ID NO: 253394 - DNA, 377 bp, Glycine max
  unsure (1)..(377): unsure at all n locations
cttcgctcgagctggcttatgcatctgcaagagcangactgtgttgagcaaacaccatctaactggagtatctgacctcttctgtgagaagcctaggcccttgtggcagtgatccaactgcttccatcaagaaaattacaattaagtatgtcaatgccatatgcactttccatatgtcttgactcgaaagcttgtcacaatttggcatatacctgtcctatgtcatccagacctccttgagaaaagccatctataatatacccgtgggacaatccaagctatgctatcctgaaaagtgatctatgtctaacgaataaaacaagggttggacataaccacaaaataatgccttaacctgatatagcaacttttaactt

SEQ ID NO: 253395 - DNA, 502 bp, Glycine max
  unsure (1)..(502): unsure at all n locations
gctgaagggattggttctttgatgccggatgtgtctcaggaccccttccgcaagtctatgaaactgcccgacatggtttctctgaagcaacactcttgcaacagcccctctccttgtcttgtctactttatttgttgtcaccccatgcttgactttatggtggaatacattctgcaactgattccacatagtatgtctatgaccatgaacatcatcatcatgatgatggtaatggtgatggtggtggtggtggtgaaagattaatcctaacttatttttcagcctccttagtcttccaactgtttccttaagaattctttcgcggtgatgtctattatggtttgaaactgccaaatctacgagaagtaccaccttccttcttgagatatgagatgttgctctcttctgaacttcncttatatgctgagatcaccatcattgctgatgatggatactgtgttccatctggcagagaagtagtctcagagtcactactactatt

SEQ ID NO: 253396 - DNA, 424 bp, Glycine max
ttattgagcatgactagtgttctctgaaatctactacgtatctaaactaatatatgtaactggctggctcttttaaccatgctctatggtctgcataagtatttctgtagaaaaggcttgaaactggatcctatgttatggtgtaaaagaattttcattgacgtttttattctcacaagtatccttgaaaattatatcacccattcacgtcaataatcatgtagtagattaatatttgatgtaaagatctaagattacttgatttgtggaccatgaatcattgtcaatatagcaacagtgatttcaagatcacctcattcgcttattaatggcggataaaagtgtacttgggaatgccaaccaaaccgaatttcaaagacatcttgaaggaaccctcacattgattttatgaatgaaataacct

SEQ ID NO: 253397 - DNA, 419 bp, Glycine max
tgtgtccagatacggccatgaactaactctggagcgttacggagagttacatcgatcatattgttctccgtacgttctttgagagagcatgggtcttcggccaggaagtgcttgaatccgcgactgccaagacatttcttgagtgggtggcttacatcctcattgaggtcactttagggtcactctgctgccgctcttaactgtctcagtaagccgctatcctacctagctattgatagaacgataatgagccgcatattatctagtgaatgacatttattcatcgacaataggaatctaacgcgatcgatcatgctggaaccccacgccatccattgctagatatactattagttttgcatgcccttctctttggataaattaatcaaacttgtcaaatctgactattttcttagaaa

SEQ ID NO: 253398 - DNA, 240 bp, Glycine max
gcccagagctaccgctggacattttccagggtctatatatgagaggcgccatcatctatcatcctggtgaagagatacgagcgttaggatttcaccagagcttttgttggagaacttccagcgtctcgacataatatgcgcccgaatcggagctcccggagagaacttatgggcataaggatttgaccagaggatttgatgatgaactatgagcgtttaatattatgattagccagaatc

SEQ ID NO: 253399 - DNA, 368 bp, Glycine max
  unsure (1)..(368): unsure at all n locations
cacataaatactcagcttgcacccagctcgcccaggcgagcaagggtgcttcctcttatttaacagccttctggaggaatcttctggagggcccaagtgggcttggttgctatttgcacccccatttntactaaatactaccccctgccccttttttggtgattcttttttcgtaaagttacggaaacttacggatttcgcaacgatacttgnattctttccgtaaagttacggaaccttgcggattacataatcatcccccttttgacttacggaaggttacggaacctcactaattgtgcaacgatgctttcttttgatttccggtgcgtcacggaaccttacagatatgcatcaataccgttttt

SEQ ID NO: 253400 - DNA, 493 bp, Glycine max
  unsure (1)..(493): unsure at all n locations
tggtcttgatttttcctaagntctttaacaagctttgaactatagacttgtccttcatttaactatctttaggcttggcggccacgctcaacaaagtactttcgacacctactgtacgttgatntgaccaatgttgttatgggaatgttgcgataatcctttaaaaccttattgatacattctgagaggttggttgtcatgtggacatatcgacgtccttctctatcataagtcatcgtccatttttcctttgaaatgcaatcaatccatgttgctagggctagactcagttgaccaaatttttctaaattttgattaaaataatgtgcttgcaaggaatgtacgctgcataaaattagttatgaataacaatttaactatatatgaaagttaaataaacgtgaccatcaaatatgaaatcttacccaatttcttcaacatttcttttttgttggcattatcngaattccgatgaagttgcttgctatgtgtc

SEQ ID NO: 253401 - DNA, 424 bp, Glycine max
  unsure (1)..(424): unsure at all n locations
tgccacccagctcgcctgtgcgagctgagctctgccangctagcaatgttgcttccttcacaagcaacagccttctgtaagacccaattgtgcctgcgngctatattcacctccatttatactaaatacacccctgcctttatctttgggattctttttttgaaagatacggaaacttacagatttcgcagcgatactagtgttctttgcgtaatgttacagaaccttgcggattacataatcatccctttttgacttacagaatgttacggaacctcactaaatgtgcaacgatgcttactcttgattttcggtgcgtcacggaaccttacggattggtcatccataccttctttagatttccgactagttccggaacttcactaattgcctaattgatggttgcctagctccttacaaggac

SEQ ID NO: 253402 - DNA, 395 bp, Glycine max
agatgccttctataagctgcatgctaactgactcatcagattgaggctttgatccctaccatatgttgcgacttctagatcttctgattggacaaggatctcatgcctgagagccaagttctctctctctaaattgtcaccttttgaccatttctagtcgtaaagaagactggctctgagcatcaatttgtctggagctcaagagttgttctcagttaatttgggtgatccaattctgtgtttttttgcacagcatcatagatattatcattctgctcttctcttgactggcttaagctgctaacacactccttaagtgctccatatagatgagtgacttcatcttcagaactgaattcctggaaatgacagtgtcaagttgcttctttaaacag

SEQ ID NO: 253403 - DNA, 389 bp, Glycine max
actcagctttttgtcggtacgcctaaaaatctgcaatgagttctgctttgtttcttcgtgcgaactcaaccgaagttgtatttcggtcgacgccggcatattgtcggccaggataacattagcccacctcggcatacaaaaaacatgattcaccggtattgacagataaaatagctggccttagtcgggcaggatagatgaccgatcgaggtctaaaaaagaagcatgaccggattacgccgatcgaacgtttcctaatagatatccttcaagtattattcagggattgaatggaaaaaacaatagccgacatcggtagctaaatagccgtgactgatatttttcagcctacattgcgcaacttctttcacaaacgctggccgataata

SEQ ID NO: 253404 - DNA, 391 bp, Glycine max
ttgagggtgcgtatcccacccatctttatagtagagtaccgattatgttgttacgatcacgattatcgtctccctttttgcacatgttcttgaattgcatcctatccggaaccatatcagaatagtactgatactggctaacgaaggcaaccattatgtccttccaagtatggacccggcaaggtttcaagttagtggaccaagtaacaactaccccagttagactttcttggaagaaatgtatttgcagatcctcatctgtgcgtatgcccttatctttcgacaatacatctttggatggttcttggggcaaggagtccccttgtacttgtcaaagtccagcaccttgaacttgggaggggtgatgatattgggtactaggaacaactct

SEQ ID NO: 253405 - DNA, 479 bp, Glycine max
actataaatactcatgcttcacagcatatgccactctactccaagtattaaaggtattgctatcaaggaaacacatgtatattcaccatgataacattgttgttgaacgatattgttatgctgtgattcaaagatccttccacccaagcataaagaccctgagagtgtaatgccactcttgcatctttggcccaatctacttggtagtctctatttaatgcccttgcagggtacgattgcttcacccacgctaagcgcttctttggtcatgcgctaagttgaaagtctctcgcgcttaatgcttaacccatgcatctcaggctgatttggtccgctaagctgaccaaggctgagctaactctatctcaattcaattttaattggctaagcgatatcctgctcactaagtgcataattttactggctaagcgtgacatgttcctgtaaacttaattctttgcagcctaaactgtgtttca

SEQ ID NO: 253406 - DNA, 494 bp, Glycine max
  unsure (1)..(494): unsure at all n locations
attacggaccttaanactcagcttacaactcttcttttgatagtcaaacctctatgtcttttatctctcctcatattaatcatccaactcatctaacatcattttccaataatggtcgataggaatgtccatttgttttagtaccactggctgattgcaaatgtatttcgaccggaaatacagcatcatgcccataagtcagtcgaaatggggtagtattagttgatttcttatgagaatttctacatgctcatataacttgatctaacgttttatttcaatttcttgacttttgacaatgtgttttctaatcaagttaatgacaatcttattgnctgcttcgacctgaccatttgtttgcgctaatatggtgttgatgttaataatctaaagccaattttttgggcaaattctttcatttttcgtcagtaaaaactgaaacgtgatcagtantaaattgcttccggaatacctaacctataataatatatatt

SEQ ID NO: 253407 - DNA, 334 bp, Glycine max
gattcaaagccttttatctgatatgaccaatcctggaatcaaacctaacacagttacctacaataccgctattgatgcctatgggaaggcaagaaagtaagctggatttgtctgtcttatttactgtctgaaagcaatacatcctcaatctggttgctaagagaaataggaaaaataaattcatcgactacctactttgttgtcctactctagaatgtagatacaatcaaaacaactgcgagagcataggttcaatcccttcttttaacgaaggatagtcactttaatggcagccataaccattatgagtgccatatatgagctctcttaccta

SEQ ID NO: 253408 - DNA, 418 bp, Glycine max
aatggttaatgttgtctttataacaatccctttggatataatgatgaaatctgcgtatcttcatgtgaataatagattaagttctgaattgcaaaatgtagcagttggtctaatcgcatattcactactaagtgcagcttccacgtgcttagcgcaatatagatattggaatagcatctgcatcaaatccgctccgctaatcacgagattagtgtgcttatcgcagcaggtgccttcagccaggctaagctcgagactggcgctaaacctaatttcacttactctggctaagcatgagggtggcgctaatcgcagcgtcgcgattctatagcctatataaagcctgtcttgtgcaaattattgtacatcatgttttacagcttatacatcttttacactacttatttgacaacttcta

SEQ ID NO: 253409 - DNA, 497 bp, Glycine max
  unsure (1)..(497): unsure at all n locations
gaccttgatctcaagcttgccgtgaattgcacagcttcgttacaattcttgcgtctcgatatactacggaacacaatcgaacatccgagataaaaaatattgtcatatggattcgctcagagattctcgtttcaatttcaagcatctcgatatattactggactcaatcggacatccgagttaaatgtattggccgtttaatttgctacgggcttccattttcaataaccagcgtctgcatatattatgggactcaatcngaaatccgagtaaaaaggtattgtcgtcagaactttctaagatcttatgtttataatatcgagcgtctcgagatattacgggacacaatccgacatccgagtataaattattgcggtttgaaattgctaccaactttcggtttcaatacaacctgctcaatatattactggactaatcggacatccgagtgaaaagtcattattggttgaacttgctcacagactctattctgaatt

SEQ ID NO: 253410 - DNA, 481 bp, Glycine max
tcaagtatcagaattgttaccttcattctcatatcttttattatatcccccaagaaagattgtgattgttgtttcccaccagatgtaaaatgcgaaccatttgacagctcaattgaaatatccaagtcaccccatcgcgcgaagagattatatatcaatgatccaaatggctcaacatgtgctcctgtttctaaagagaaatacaactctgaatactcacatttcttaactaatgaactataatttgcttatttctattagatataggagcgctaatcatcttatgacatgacttcatatagagcggaagacttcatggtaagccatgtgaatccatcttgttctactctgtggtctcaaggtaacaacaaaacatatgcttgagaagttgtttgcctacagcataataaaactatcctaatttcattattattggagaaaccatcaggtatctgaaagctgcgcccaagtggcatcttta

SEQ ID NO: 253411 - DNA, 417 bp, Glycine max
  unsure (1)..(417): unsure at all n locations
atagaaccttttcttagcatttgtttttatttgatcccatggttacgggtgaaaatttttgtttgaatcaatacttcgatatcctatcatggaggaatatangatgaatgcatgacacaaatgcatcttacagacacgagagcccggaagatcatntttccttactggcaacatttcacagcacggtgccccatgtatgcatttaagaaagtgatatggaaatttcgacttcttgtgaanaaatgacgagaccaaatgcatcacatgcgtgatgatgcaatatagacataaacacgtagatagcatgaaagaggaacatacaagcgtggttatgtaactccatgtggagcttgtaggccttggatcttcttcatcaatggaatcctttgcttctagaaattctatggcagtggaata

SEQ ID NO: 253412 - DNA, 501 bp, Glycine max
  unsure (1)..(501): unsure at all n locations
tgagtaagcctctctgagagagaagataaatagcttgtgaatgtcttatcctcaagcttgagagagccaccgtagtgtataagcaaacgactctgatgtttcgatgatgatcatgatgatttgatgcaaatgatgcaagaatacaagccacatcatcaagatgatcactagtattttaagaagggaattcctaattgatatagcaaaaggtttggccaagtaatttgagttaaaaagtgtttttcaagagatttactctctggtaatcgattaccagaggatgtaatcaattaccagtggccaaaaatggtttacaacagctactaaatatgtgaatncanatcttagactgtgtaatcnattacaccataatggtaatcgagtaccancagttaataaatgttttaattcaaatattaaagcctgtaatcgattacacacatatctgtattccactaccagaggagattttcataatataactgtcaagattcacatcta

SEQ ID NO: 253413 - DNA, 481 bp, Glycine max
tacgtgaatataaatactcaagcttaccttatggttttaccatgttgctcccactatctctatcagtgttatggcatataataaatttatgtgtgacatagctattagtgctataaggaaatcgagtatagaacctgctgattggctattacataatgacataccaaagcatacatgggctaggcacacatttgaccctcaatgcaatagtgacaatgtaacaaacaacttctgcgaagtgtttaatgcttgtgttgggacgataggaaatagactggcctatcaatgatgtaatctataatctgtagattaatgacactctgtgacaataggagagacaaggctgcaacttaccaatttactattatccctagggtcatatgtgtcttggaataaattgtggaagatgggaggtattgtgtcgcacacatggtggcgatgatgagtatcacgtaaggaatgacgttgcttattttgtggt

SEQ ID NO: 253414 - DNA, 411 bp, Glycine max
tcttcgtcgcgaggcgcgccaaagctttcttcttcttcttcgttaacaggataattcctcttccccttacccttagcttgtaatgagcatcactgttagcatagcaatggaaccttaggatagcaatggaaccttagcatatcaatggaaccttaggatattaaccttatggtagaagacgagaggggagaagacgagagtattccggaaaaggctgacggcgatatcttccggaagacccgttaggggttctttcagaagtttctgaagaacatttttcggatagtttccggaagaactgttcttccggatgtaaccatacgtcttctggaagaacacttcttctggaagactcccggaaaacctcttctcggaactttccggaagaagtggttcatccggaagaatttt

SEQ ID NO: 253415 - DNA, 442 bp, Glycine max
  unsure (1)..(442): unsure at all n locations
gattatactggttcgggcactatccgtgcctacgttcagtcctaaagcaacccacttgagatttccactctctgtgtaatactccttttacaaagtctaaaccacacagggacaacccttcccttgtgttcaggaatcctctacaacaagagacccacggtctcttaatccctcttcagaaataagaagaagaaatctctcttaacagagatagattgtacaatgaagatcaatcaaaattccttattgaatatgcaagtggttgaccaaggaatctttttgagaggataacacatttcagttcagaaaaactctcttaatcttttgagaggaataaaactttgggcaatgaaaactctttntaatggccattcataataaattttgaatagatgtgactctcggaaattattntctgaaaatcccctctagtaatcgatta

SEQ ID NO: 253416 - DNA, 383 bp, Glycine max
agcttaaagagttgagtctcatattagttatattgttatagtagactcttaatcgattacactcggtggttgagatagtgactgatttattcacgaggctctgctttaatcgattgccttgcgcagagtacttattagacctattttgaagaaaactccttatgaattgtacaaaggaagaaaaccgaacatttctcacctaatagtttttggttgcaagtgttgcgttataaacaatgataaagactcttttggcgaattttatacaaaggccgataacgatatccttcttggttattcattgcatagtaaggcctatagagtattccataaaagaaaattcattgttgaagaatttgtacatgtggtttgtgatgatacta

SEQ ID NO: 253417 - DNA, 438 bp, Glycine max
agaaagtgtggaagagttagtctttctacttttattctttgaccacagagtggtacctggagatatgtcgcgggggtcaggagaccttggggacgtcaggtggggtgctattgcccaaaaccaagcttgaccaatcccgacccaacccgggcatagtcaatcagtgagaacctatgacgcacctaaacaggcgagctcctggtagtcaaccgataaaagaacaaagaccacaaagcaaggaggcttgtgtggtggctacccagctatggatcttgagtgatatctggaatatggcctctggtaatcgattaccaaggatgtgtaatcgattacaaggcttaaaaatgaagacaggaagttaagatggtctctggtaatcgattaccaagggtgtgtaatcgattaccacgcctaataatggtgacaggaaagagagat

SEQ ID NO: 253418 - DNA, 428 bp, Glycine max
ttaagtcacctgcggcatgaagctttaactattacctaggcgtgttggttttttgtgtgtaagaattgattaagcatattgctgcttagttgctaaagttggcttggactaatactacttgaacttatgtatatgtgttctctttttgctcatcccttggttgcccttcattgggaattcacctgcggaatgtgttcttcatttcatgtaaatgttgcgggaaatgattctgtttttaaatattcggcgaaatagatatttgtatactgctatgttgaactgatagcaattatttttctctacaccatctactgcttctattgactaattcatcaataaaaacatcccacacctgcagctggaagagatgaatatgccaccacctgtctttattaataaactttcttaaacagaattgcatgtgtttg

SEQ ID NO: 253419 - DNA, 430 bp, Glycine max
  unsure (1)..(430): unsure at all n locations
tccgcattntatacatttaaatttgtttgtcatcagcggttctgtttggttgagtttgttcaactattttgcttgatgttgggacggcatantatttagtctactgatgaaaagcttttgtacgttttttcgtttgttcttgaatagctctgtatattcaactttatttctatgtacatattgcgggtggtgtaaataagccatgtcgagttaagctcttgaaagtttcggcttagattgtatgaagatttcaaactttgattcatttggttaaatgagtcaaattaaggggaagtaaagcttctacgtggactgtataatgaatgttattaatgtttgacttatttaggtaaataaatcaactataaagcttgagtggagttttttattatttatataaaaaaagaaagttgtagacttttactcttat

SEQ ID NO: 253420 - DNA, 393 bp, Glycine max
  unsure (1)..(393): unsure at all n locations
agcttgtttctacatcttcattagctcanattgtttctttcctgtaatgtccataatatatgctttgaagtggtggtaggctttttattgtactctttcacatgatgatgcaggaaacatgttgtttttggaaaagttgccttcggaatggacattttgaagaaaattgaaccttcgggaacatctgatgggaaacctacccaacctgcttaatattattgattgtggcgaagtctctgaaacaaaaatctcagcatactgccgacatggagaaaggtacttgagataggggaatggatattgatgaaaatattatgatattataatcattgttccaggctaccgctcaatgtaatcgcttgtaatatgtgaactacttttcctctttgggaa

SEQ ID NO: 253421 - DNA, 424 bp, Glycine max
tattagggggctgcgaatgcttttacttgttcttggatccgaagttaccgatgcatctgttgctgcaattgcctcaagctatctaaatctggaattgcttgatctcacagggtatgcgtgtttctattctagttaccttccatgttctataagagttctgatgtgcatatgcctacaaaatgtgaagaggaaacaattaacgttctgtagcaacttgatacagttaacgctaaaaagaagtggaagacccatgatagttacacatagttcaagagcgggttagtggatcctctacggtcaactccatctttagtcaaatcacagtggttcgttgtatccaataatccacaaccattggtcaatccaatgttagactggttgatgttacaaagatcaatgttaatctataaattggtcaaacaat

SEQ ID NO: 253422 - DNA, 448 bp, Glycine max
  unsure (1)..(448): unsure at all n locations
ctgcggcatgcagctcttagagacaagaangacaaactttatatttaacttcnctcccctttctctcggagaaaacactcaaatctatatttttttactattataaatagaaacatctacttgagaataagtgtaacaaacaaaaactaaaaaagttcaaacataattctagacctaaaaagcaaaaagagagtgttgttctttagcgtttcattccttaaaaaattaataacaaagattattcttgatgtagatacacatggaatgagttaattggatttttgcagtagtatattttaaacccaacataaattcctttattatctcactatatgtgttatgaacactaattgttcttaaagcatctccaatggaaggatggctcataagaaggtcttcaagctctggcggcggcacctaatatagatcaatacggataggattgaat

SEQ ID NO: 253423 - DNA, 453 bp, Glycine max
actaagcttgctacaaaatcctatatttaaatagagggactactaattctctatttggagatggaggaaaatatatagctcttggttaatgcaaatgagtgtttgacgtaatctatataaaaaaaaatggtccagtttttagaagtagatccgagtagggcttggccaatttttggttggctgtgtttgacgcaatttatataaaaaatggcccagtttttataagtagatccaagtacggtttggccaatctttggtcggcttggcttgattggtatttaaatatttttggttagtcaacttgaattgtgaattgaagacgatatttcttcttaaaatataaacataaattataaacttattttttagaaatagaatttaaattttctaccaaaaaggttgaatatatgaatcttttatctcgtataatctgaaaccattttccgaattttc

SEQ ID NO: 253424 - DNA, 452 bp, Glycine max
agcttttcacgcatttccacaggcgtactattcatactttttccattaaccatgacgctgctcctttcctttgtataccctgttagaattaagaccagagcattaaaatgtcatgtactttattataagttctgaaaactgcaagcacttgaatgaaactatatcacagactattcaaaatgtacacagttcactcaagtagccgcaaaaagacaagttgataacagggcgtttcttctttttgatatttattttgagaatcgaaatgattctaagtttcttagttattacatcaaaataaagacaataataactttatgtcgaagcatatgaaagaaaggggaaagaactagcgagttcaattctatatttgacatattttaaaaatcaactagaatacaatatgagttagaaaagagagactactccatgtcgattcccataacgaggat

SEQ ID NO: 253425 - DNA, 447 bp, Glycine max
ctgccactgtctggaacgccggcgagccgcgatggagatgatgactactacatgttggtggcgttggtgataggatcaatggtagtgaaaaagagaactatagtaatagtgatagagataatttggtgacacttgcaataacacaaggatatgataataggaaatattaatataataatagtaggggccaaagtaccaatattaacaatgataaatgatgttgtttaattgttaaattacaattttaatctcttttaattttttatttgtgattatagtgcatcaatttttttaaatttagttctcttattatcaagtgcatgttgtattcatggaaaagtcaaaattcaatcaatattattaattcatattctaaataaaaaatgaatatatcctacttactattctcttagccgataagaatatgtaaataattataattataat

SEQ ID NO: 253426 - DNA, 445 bp, Glycine max
  unsure (1)..(445): unsure at all n locations
agcttctcccctattttgctataaatttggtattgaagtgaaaaaaaaagggttcagccccttaggcacttctctctctctcgaattagctgaggaaaattagttccgtgaagaanatccaagccgaggcgcttccgtaacgtttccgtgagtaattacgcgaagattctcgaccgttcttcaagattcaccgttcattcttcgttttcttcagtcttcaatgggtgagtacctcaaaccaagcttttcaattcattctatgtacccatggtggtccacattttgttgcatgtatatttattcttgggtttggctacttattatacccccgtttgacgtgcttaagccgcttatttaagtcatttctcgcttaatctataagtataataaatttccaccgaacatttgaatcgtatcatctgttaatattggttaatatgaattc

SEQ ID NO: 253427 - DNA, 447 bp, Glycine max
  unsure (1)..(447): unsure at all n locations
cgtaatagattaaaccgatatgaggcatttctttactattcttataaccaacttgngtaatcgattactgtaaggttataatcgattaaaataaagttttaacaaatgaggaaattttctaactttagaaactttctccttactcctgcatgatgatgcataatggatatatgaaatgatagagactaatatgcaacacaccacacaacaatcaatacaaatgtcactcaagagagttaggcatgtaaaagataaaacttgttcaaggttcaaggctaagtcttcatgttactccccctatctctaacatgatgcagccgctgttgtcgccaatgacaaagccaagcaggtggctgcaatagctaacagagacgacaagggtgtcatatgtgagggagaataagtctctattgcggactttaacaatgagggagaaagagaggtcga

SEQ ID NO: 253428 - DNA, 444 bp, Glycine max
  unsure (1)..(444): unsure at all n locations
agcttgcaaattaaacatcattacattgtttctctctatttgcaaatttcagcttacaaagagtggttctggctcaacttttcgtctgatcctgaaaaaaagttagacagaaagaagcatgtgtttagcaaaatccaccaagtagttgggacacaagccaagtccaaattacattacaaatacaaacttgtgatatttggcaaattctacacttttcataaaacaaacatctttcttgcacttgcaagtgtcaattattgcgattaaggaagacttanaaccgatttggtacaagcataagtccaaaaatgatgcaaactctaacaaaaagtgaagggcaagaatactaaacacacacaaaactcaggcaaaaatcgaagtggttggtttccataagaatcaatcaagtcagaggggaatgggctattataaataatatgtatg

SEQ ID NO: 253429 - DNA, 428 bp, Glycine max
  unsure (1)..(428): unsure at all n locations
ataaacttccacaaaacacggctggaaactgttttgcaacttanggatgctagagatgtcggattattgttagattattgcagctttgatgggaaaaaaactaatggctagaatgatcagaaaataaatgtgttagttggaatcttacatgaccaagaaagagattttgctggaatgatcattggtggaaattcctgccaagcaattatacacgggaaaaaattaaaattttccctaggttgtcaaaaataactgttagaaagctgttttaactgtggtcgtccttagcatgccttaattgcagagactttgactcaccttcattgtgttgggtgtgaagcggtgtgtttaacccctaatcttataagtcgantttgtaggattaaattangtcctaaactcattctaaaaatagcttttggaatctt

SEQ ID NO: 253430 - DNA, 352 bp, Glycine max
agcttatgctgatgccataaacaagatattctttcaacctcggcccccgactcgaccacggaagaacaataatgacctctccagcaacacatactaccctggatggaggaatcaccctagactcagatggtccagccctcagtaacaactacagaaccctgctccttgctttcaaaatgcatgctgccctaacaaaccatacattcctcctccaatccagcaacaccaacagccccagaaacataccacagatgaggcccctccacacccttccctagaagaacttgtgaggcaaatgactatgctgaacatgctgtctcagaaagagaccagagcctccatacgcagctta

SEQ ID NO: 253431 - DNA, 398 bp, Glycine max
acctataaaactcagcttgtttctacaccgttgtacgttgttaggacactatgtttttcttgtatatacgactccaccactgttgctgtggtcttactgtgactatagcccccggtacactctactttgtgactgtaagcaactaagctcgcgagcgctgaggagacctcctgcaccctgagataaaaagattgagcgacataactggctaatacttctgcaagaatcaaacaactaaattgtgtactcatggaacaatcccaaatctgatgattgctttggagcacaaagtggcccggtagagaaagaataattgtgcgggcaagctgaaggaaagccatgccggagagaagaggcggcacgataaaatctataacctctggagagtagcggactta

SEQ ID NO: 253432 - DNA, 446 bp, Glycine max
agcttattgaattatgcgcttatgacatagttctcatgtgataagcttttcttgaataagcacttcattaagtatggctagtatactagtagtaacaggcttgatgtaatcacaactgaatgagctgagtcagcacattcagatattcagtaaggaaaagcagttaacaatagttgctccttcctctgtataaatacctatgtaataaatgaacgaaaatcattttctctttctcttaatttgatataaacaattctctccctcttttccctatgaataataacttttgcattgagctacttctccaaacataccctataatatatatcacaaataacaattgcaagcgcacacacacacaaatggcaaagaaatcacttgaaactgcataccatatcctttttatcataatagccatactagcatattcacactatatatcatct

SEQ ID NO: 253433 - DNA, 426 bp, Glycine max
tgaccatcaatcctacagcaatctcaccaaaccaagttggtgcatataattgggatagaagctcccacacaagtgcaagatcatgcaatcctacaaggaagatagcgatcttaacaacctttcccaatatagaaactagaaagaaagaaagaaatgaaaacaatcttgtccttttggatacagacttttattcatagcattgcatgggcatcttcactaggcaaacattaaaaactataaaatggatgaccagctcaaaaaattatggcagcagaggaatgtagaacatctagagatgaacacaagttgtctggtcaagtagaacctaatgaaatgatgctttccaatactaagggtaaaacttctcaaagtacctctccacaattaatgctgaaaaggcggtaaccgtagatcaatttactcata

SEQ ID NO: 253434 - DNA, 418 bp, Glycine max
  unsure (1)..(418): unsure at all n locations
agcttgtagaatggctagacatgatacatgttatggcttggtttggttcaaggataaaagggatgccccacattatttccatgacacaaatgcaaaaatgatgatttggaaacttcatgcaaaacttgtcatgcatgcatctatgcggacactcaaatgtcaaatttttatggtcatgtgatgctagggctcangattcatttcctctatttttaatcaacccaatgtttccaaaatatgttcttttatcaatttgtgcattcatccgagtccatttcgggcgtccgggaaatttcacagcattcacccttcaggcgtagacacatttcccaaaaattggatatggtcaatgaactttttaaagaaaagttggaaatcgtctcttttaaaagcatgtcattttagctagacaacttaa

SEQ ID NO: 253435 - DNA, 437 bp, Glycine max
  unsure (1)..(437): unsure at all n locations
tgctggtggggcttctatggaggctggatctttgagcttttatgaggtcctttaatggtgattttccaccatggagatgcagcggaagacaaaggataagaggtgagaggaggcgccatccactagggaataagccatggaagaaggagcttcaccaccaagatgagccttggataagaagcttggagaggatgcttcaatggaggaaaagaaagagggaaagaaagagagaggggggagcacgaaattgaaggaagaaaaagggagagaagttgaactttgagttgtgtctcacaaaactctcattcatcaaagttacagcaagtgttacacatgcttctatttatagactangtagcttccttgagaagctttcttgagaaaacttccttgagaagcttctttgagaaaacttccttgagaattgtttaccacag

SEQ ID NO: 253436 - DNA, 433 bp, Glycine max
  unsure (1)..(433): unsure at all n locations
agctttacagcagaatttagtattgttcttcttcctagaatgaaaatagcttaatgccattaacctatggaattaaaaaaaaaaaacttaatggctgagtgtaactgaaattgtggcaaccaaaagtcacccccaacagccaacaagtcagccaccatttggtctcccaaaaggcttatgcctaggttgccaattgggcccttattacaacttgaactaaacctactaaagcccttttagttgattaaccccaaacatatttttggtcagccaactttacaaggattgggccattatttagacaaactaaacactctaaaattgagacaaagtggngccatttaatcctcctccatttgggccatgatacaactcacaaccttggacttatctccttgaaacttgtgcttgtattcaatagtatggacaacac

SEQ ID NO: 253437 - DNA, 434 bp, Glycine max
tagagaggaaacttcatggggaagaaaagtttagagaggggggagggagcaccaaattgaaggaggaaaagagggagagaagttgaattttgaagcgtgtctcacaagactttcattcatcaaagttacaaccagtgttacacatgcttctatttatagcctaagtagcttccttgagaaacttgcttaagaagcttccttgagaagcttgcttaagaaacttccttaagaagcttctttgagaagcttccttgagaagctagagcttagttacacacacccctcttataactaagttcacctccttgacaagcttgcttgagaagctagagcttagctacacacacccctctaatagctaagctcacttccttgagatgagaagctaaagcttagctacacacaccccctataatagctaagctcaccctcat

SEQ ID NO: 253438 - DNA, 392 bp, Glycine max
  unsure (1)..(392): unsure at all n locations
cgacccgggatcttaagtcacctgcggcatgcaagcttactatctctggtggatatgtatcttttataactctatngaaggacctacatattcttgatttggaaaccatgacatgggatgaaattgatgctgcgtaagaagtttcctgagacaacctttctctctcacttatttcttattttacctttttttggttgggtggggatgggtatggaagttttaattgatatgctgggaaatgttaacgttttaagggtgtaaacaaaaataaatcacaggtgcaaattgaagtttaactttgttttgcaactaacttttctgcttatgccaaaaactggctttcatgcatggtaattatgttacctcattttcatgagtggccaatctcgcta

SEQ ID NO: 253439 - DNA, 445 bp, Glycine max
ccttaaaacttgcatcctaccctctgatcccttattttacttattgctttctctaattctgcttacagcaagaccggttacttttaacctctcttgaacaatacagtttaaaatgtgagcacaacatcgcatatgaaaaattcaccatcacttactaaacaatgcatgcaaaaaaagacttttcctcaaatagacttgcattttatcattctaagaaacaatacctagagttaatgaaaatattttctgctcaatcccccattcttacaaaaaaaccatatataactttagtcatctcacgccccacgcgtggaggaggaaaatgacaaaacttatcctcttactattcaactttcaatttgcatcaacataatgtgcacatattgaaatataaccctcacaaatacaagatgtccacacattcaatgtcacgcttattctacta

SEQ ID NO: 253440 - DNA, 439 bp, Glycine max
  unsure (1)..(439): unsure at all n locations
ctgcgaccaaatngcattttatctataacgaataaggacggaggggaaaaaaacaaaagtacttcaactttcaacttatgtgttcaaaaggtgaaagaggaagtgaaggtaccaaaccataccaccaaaccaatggaagatgtgagagtacttcaccacacccaactctaccaataattaatgttacaaattccggaatttgaacatataacgattcgtcacctgtaggaaattatagccccatttcccatactcacagcatatatatatatatgccacaagatcatggtattttgtactttcagagcaccatagatggttggcattggcaagttgagagaaatatatatataaatagacatttaacattnnnncattctgaaaaataaaagcaagctggatttttattgatgaataaataaagaaaatattacagaat

SEQ ID NO: 253441 - DNA, 456 bp, Glycine max
  unsure (1)..(456): unsure at all n locations
tgcatgcatcagacgncaactttgcctccaaatgttctaatatttcttggtcattngggtcaaacttaactccagctggtaaccccggcaagtcatggattccaccctaatatttcaccacacacgtacaacacaaactaataagagattggttcatatataaacaaaaaacaacttaaaagagaaaaagcacaaacatttataggttataagtgttagaaaataaaataaataaataaaaagaagatgcataaccccagattaaataaaagaacaacagtattaataaaattccaaaaaatttaaaataatgagttaattgcgtttgatcctccaaaagtaaaatctcaaaaaataagaattttaattctatgtaacaaattctaagaataaatatttatttntataaaaataaaattaatgcacataatatatttctataaaatttaaattata

SEQ ID NO: 253442 - DNA, 250 bp, Glycine max
gggagaaagagaacgcggatggaaaaccactctttatatctcctcaggtaagataacgggccccctccaaaggatcaggctcattaaacactcacacgcgaaatagctacaggtccaagaataaagattcacatctgagctccaaaaaaaatatcggaaaaggtaaatccaaacagtagcctttacaacacgccaaaactcttaaaggatataggtctcatccaacgaaaagaaccaccatttctaaaaa

SEQ ID NO: 253443 - DNA, 434 bp, Glycine max
ctgactatgcgagctgattttagccttactttcaccttagttatttgtcatttcggctaagaatgagaaatcccccagagaaaatgtctggttgattttccgctttattttactaaaaggtatatttttgttattatattattatattattattgtatctctttttgatttccaacgtggttacggcactaccggacgggcggaatttattttaaccaaagtttacggatcatacaattcaaacgttcggtggaaatttattttatttttaagttaaacgagaaatgacttaagtaaaatggcttaagcacgtcaacagggggtataaaaagtcaatgaaatgagaataatactacacgatacacaatgtggacccccacgggtacatagaacgaatcgaaaagcttcattctaggtacttaccccgtgaatat

SEQ ID NO: 253444 - DNA, 445 bp, Glycine max
  unsure (1)..(445): unsure at all n locations
agctnggattgattcggtctgacgagggatctttttgatgaagctnggatggatncggcctgacgagggatcgaggtttagtaatttaggctacaacatagaacacacgagcatgattgattagagaaatatatttatatgcatcagcttgtttgtgagtaagacccaacatttctacctattgctgtcacttttacttactttgtattttacagatttagcataaaagtttagtttgaattctgtttgaaattatgaatcatacatgttctctcaacaatgcttcatttctaaacttaatttaggctaacgttagttccttgtgttcgatactcggattcatccgttttaatttataaatacttgacgatccggtgcgctctccggaaaactggatttcccttgaatatatttgaacgtataanaagtggaacaaaaagcaact

SEQ ID NO: 253445 - DNA, 446 bp, Glycine max
  unsure (1)..(446): unsure at all n locations
ntctcataagtcctaaatgacatttcaggctaggattaactctctttaacctccatttaccacagaatccagatttaaccttccaactctcaaagcctcactctttttccactcataacaccacattctcactttctaaacctaggttaactctacccttcatctctaacagtttccataagcaatttcagcatataaacatcacaagcatcatcacaaaaaccctaaaacagaatgggtatgtctaactcatccaaacatggcaagttcaacatgctttcaacaagagtcttcacaaataactatcacgaagcagaaaactaacaaaactacccatcatatctcccaaaaccccatacccacgaaaatcaaaggagaaagaagtccacccaaacttgaaatttcgaagtcccactcgtagacacgcacttcacgaccccgaaaat

SEQ ID NO: 253446 - DNA, 438 bp, Glycine max
  unsure (1)..(438): unsure at all n locations
agcttgtctcagcgtttatgcgagacagagtctttcttgttagctatcatcgccaagtaccaagaagagttaggtctagccacggcccacgagcatagaatcgcggatgagtatgcccaagtgtatgcggaaaaagaggctagaggaagggtgatcgactctttacaccaagaggcaaccatgtggatggatcggtttgctcttaccttgaacgggagtcaagaacttccccgattgttagccaaggccaaggagatggcagacacctactccgcccccgaagagattcatgggcttctcggctattgtcagcatatgatagacttaatggcccacataattagaaatcgttaggaaacttgtatggtctctcagaccttgactagatacgacttccttnttgaataaaatgagttggcccatgtttactccaaaaac

SEQ ID NO: 253447 - DNA, 429 bp, Glycine max
  unsure (1)..(429): unsure at all n locations
ggctctanattacattgatgtttgtatttatgggaggatgttatatgccatttttgctttaagagtaacgtcccactggtaaaactaactttccaaatgtttgccttcgcacgaatggccccgaggaagcttgcctcaaagaggtccacgaaggacaaggcagcagaaggaactagttccgctccggagtatgatagtcaccgctttaggagcgcggtacaccagcagcgcttcgaagccatcaaggggtggtcgtttctccgggagcgacgcgtctagctcatggacgacgagtatactgatttccaggaggaaatagggcgccggcggtgggcaccactggttactcccatggccaagtttgatccagaaataatccttgagttttatgccaatgcttggccaacagaggatggcgtgcgtgacatg

SEQ ID NO: 253448 - DNA, 417 bp, Glycine max
agcttgtagggttaaagtctcacgaacggctctttctcttgtctacaaatgaagaccgggctatacgagacatcttgccaaacaaagtcaggttaacgataactcgcctgagctttttcttccatgctatatgcagcaaagtcattgatccagtaatgtttgatgagtaggaaattgaggtcccaattataaatgtgccaggttggagatgtattttccccctactttgtttgacattatgattcacttgattatgcatctggtcaaagaaatcaaatgttgtggtcctgtttatctacggcggatgtacccggttgagcgatacatgaagattttaaaagggtatacaaagaatttatatcgcccagaagcatctattgatgaaaggtacattgcaaaagacgccattgaattttg

SEQ ID NO: 253449 - DNA, 459 bp, Glycine max
ctcaagcttcatgatgaatgaagatcgattcacagaatgtttgatgatgatatatgttatgacaaaaagctcaaagatcaagaacaattcatgataacaaagatgatgatctcaagaatcaaagaatgagttcaagattgaatcaagaacacttcaaggttcaagaggaaatttgattttaagaattaagtttcaagattcaagcttccaagaattaagatcaagattcattcaagaatcaagagaagacttaatcaagataagtattaaaaagtttttttcaaaaactgagtagcacatgaatttttctcaaaaccttttaccaaagagtttttactctctggtaatcgattaccagattattgtaatcgattaccagtagcacaataattttcaaaaatctttcaactgaatttacaatgttccaattgatttcaaaatgttctaatcgattacaat

SEQ ID NO: 253450 - DNA, 440 bp, Glycine max
  unsure (1)..(440): unsure at all n locations
agctntagttgactgaatacatataatattttataattatataaagggctaagttaaaaagtgatagatacatcaaagtgaaaatacgtaatggaaattgatgactgaacaagcaaaatgtatgatacctaggcctacccatacatatacataaaagggaaaacagttagtctcagagtagtcacccgctcactaaaccaaaccatgttttccagactaaaccaaaaaagataagatgataatggagatctctagcaagatccatgagaagaaatcttatggcacttgtcatgtatcataccaaaaaatttgattctagaaagccttggcatcaaactatttaggtttcttgtaactatcttggccttgtcaaaaagagagctccaattgtgagggtaattgacaatctccactttttataaactaccttgcatctccat

SEQ ID NO: 253451 - DNA, 451 bp, Glycine max
tataagaaacaaaatgcctcaatcatttccaaatatgtttgtgtattatgaagcatcaacaagaatcaagccaaggctattgtgcaagcaatcaatggggcaaaacacaccaaatgattatgatgatggatggctcaaattctcacaaaggtaaactcatcactttcaaattgagctttcaaaactatcatgacatgtagaggagaatcaaggatttcaagtcacaaaatgtcaagaacttttattttcaaaacaattacccatttcttgaacatatcctataattcaaagaaaaacatgcaaagtcgtacatgcacacaaaattgacccacaatattaaactaaaaatccgacgaaactaacaacattaacaaattaacacaactaacaaattaacaaaaccaacaaaactagcaaaaccaaagaacactccctcccatacttaaacaac

SEQ ID NO: 253452 - DNA, 455 bp, Glycine max
  unsure (1)..(455): unsure at all n locations
agctngctaaaaggatggntggatggtctgtatagttatttgaagccggactgaaattcgagctacaaagacctattaaaactcaatgcatggctgacttcatggcaaagcttccccctaaacttgtggaagcaatgccttccaagattattttgatgatgctaaagaatcaagagtcaaggaagttttaagaatcaagatcaagattcaagattcaaaaataatcaagatcaagattcaagattcaagtaaagaatcaagactcaagattcaagaatcaagagaagactcaatcaagataagtattaaaagagtttttcaaaacattgaaaaacacaagaatttttcaaaaagaaaaatcttttaccaaagggttttactctctggtaatcgattaccacaaggcagtaatcgattaccagtagccaacattcttttcaaaactgatttacaaa

SEQ ID NO: 253453 - DNA, 443 bp, Glycine max
tctcttgcatgtaattatttaaattgaatgacaaatctgttgtgtacttctttgcttattgctaataaataatagattccatgtgcatatacttggcgtctgccatggccatggtataaataagtaaaataatatataggaaggttatttatgaaattggtggtaatgtcaaggactgaggttagaatgctatgtgttgaagtcgaactacatcacctgtatctccttgactcatttcaacatgcccttccatataatttaatggtaattaacgctcttttggcattttatagcatacctattacctagcaacagaagctgctggcgtgttcactgataaaagtagtatataaaactatcattatggtctgccttgcccctgcatcagctctagaacctgaattgaaaatacaagtctacaattttcattgatgaatatcgtg

SEQ ID NO: 253454 - DNA, 410 bp, Glycine max
agcttgagatgaggaagtgttgaagggtgattctttctgcttttattgttgaccacatagaggtacctggagatatgtcacgggggtcaggagaccttggggacgtcaggtggggtgctattgcccaaaaccaagcttgaccaatcccgacccaccccgagcatagtcggtcagtgagaacctgtgatgtacctaaacaggcgagctcctggcagtcaacagataaaaggaacaaagaccacaaagcaaggaggtttgtggtggctggccagctctgaaacttgattgatatgtgagatatggtctctggtaatcgattaccaagggtgggtaatcgattacaaggcttaaaaatgaagataggaggctaagatggtctctggtaatcgattaccacggggtgtaatcca

SEQ ID NO: 253455 - DNA, 393 bp, Glycine max
  unsure (1)..(393): unsure at all n locations
ntaaggtgctcaattgctccaggttgctgcatggaatgtgttaatgtctgtatggtggtcagcagaggagcacaaaccacaaacccttgcgacaggtacagatttctgattcaaggccagctgggttaccaagttgaccaacgcatccagtttgcgttcaagcttcttagtttcagatgatgcagatgggtttgtagctacctgtcataccctaatttcgtccggggacctttgcttgatgacatgtgaccattctttggtccttgtgaggtgcttggcacccatcattatgcaatttatgaaattccaggacatgccgaaaaaccaaaaaaatgttgatgcacaattcgtaagtttccgtgacacatcggaaatcatatggaatcattgctg

SEQ ID NO: 253456 - DNA, 405 bp, Glycine max
  unsure (1)..(405): unsure at all n locations
agcttagtgtaaaggcaaatatcacaatattggagattgaattgtgactctagaaatctttaacgtctttgtgttggaccttgtggcctcaataatcttaagagggataggcttaaaatgcagaagaagcaacaacaatcaatttaataatgttctataaacatgtaaggcaaaattgattgcaataacataaatgagataagggaagagagaatgcaaacacaattttatactggttcggccacttcccgtgcctacatccagtactcaagcaacccacttgagattttcactatctttgtaaaatccattacaaagtctgaaccacacagggacaacccatcccttgtgttcagatgctntacaacaagagactcacagtctcttaaccaatcctattgaata

SEQ ID NO: 253457 - DNA, 437 bp, Glycine max
acctataaatctcagctgacgagagtcacgccgagcaagtttccatccttgttttgatggttttcacaacttgaaggtaaatttttattttattggtttgggtttgattgggatgattatgcttgccggtgatgcttaattattttattggtttgggtttgattgggatgattatttgggaacatttttaggagattaagaccgtggaacttgtgaagccaactgggtaggtatatctatccttgtctggagctgatcctaggtaagtacagtgttctttctgtatccagtttttgttggtttaagtttgtatccagcttttgttgttaggaggcgtggattcttgttgcttttataggaggtgaaggacaataattgtgagattgttgtccgtattcgcgttaacatgtttgataatgaatatacctcacagacta

SEQ ID NO: 253458 - DNA, 443 bp, Glycine max
  unsure (1)..(443): unsure at all n locations
agcttagccctagaggggatggaccttttctgtttttggagaggatcaataacaatgcctataggttggatctcccacaagagtatggagtcagcaccacttttaacatttctgatttaattcctttagcaggtggagctgatattgaggaggaggaactaacagatttgaggtcaaatccttttcaaggggaaggggatgatgcaatccttcctaggaagggaccagtcactagagccatgagcaagaggctccaagaggattgggctagagctgctgaagaaggccctagggttctcatgaacctcaggatagatttctgagcccatgggccaagtttgggtccaattctctttgtacatattagactaggatgtcattatnattgatccttggatttaggggtagttttgtatttcacatgcactaagtgaatatttgat

SEQ ID NO: 253459 - DNA, 451 bp, Glycine max
  unsure (1)..(451): unsure at all n locations
cttgcggatttggtctttgtcagtgaaaggatcaatgtgtgtctttaataaagggaaatttagtcatcctgcttggacgaatgagaaaactggggcaaatgaagagggtgaggatgaaggagaagcctgtgctgtgactgccattccaatacagccaagtttcccaccaacccaacaatgtcattactcagccaataacaaaccttctccttacccaccgcccaattatccacaaaggccatccctaaaatcaaccacaaagcctacctaccgcacttccaatgacaaataccacctttagcgtaaaccaaaacaccaaccaagaaatgaattttgcagcgagaaagccttagaattcaccccaattacagtgtcctatgctgacttgctcncatatctactggataattcaatggtagccataaccctaaccaaggttcatcaaccttca

SEQ ID NO: 253460 - DNA, 408 bp, Glycine max
  unsure (1)..(408): unsure at all n locations
agctntgtgtaatcgattacacatatttgtttatcgattaccagtgcttgtttctgaaaaatctaaagatgtaactcttcaaaatagttttgactttttcaaatggtttttaagtttttctaaaagttataactcttctgaatggccttcttgaccagacatgaagagtctataaaagcaaggctttgttttgcattttgaatcaatcatttcaaatatttctaacaaactcttacaatcctttacaagccttgaaatctctttgaagttcttcttcttcttctttgtaccaaaagctttatgaagttttctggttttccaaaccttgaaaacttgngctattcatcttttcattctcttctccctttgccaaaaagaattcgccaatgactaaccgcctgaattctt

SEQ ID NO: 253461 - DNA, 443 bp, Glycine max
cgaagggatctagagaatccaataacaaacattcttgatgttttgatatgaatcctccacacgcagctttgggacctgactgaataaaacctactccaccgagatagttgggacagcattgctccttggcgcttgaatggtacataaggccacgtgtctccaaccaactcatctcccgccaaagtgtctctataaaagccccacatcgaaggactcaactaactttcaaatccgtttttattcctaatttctaaccaaatctggatcctttctatttgtcataaccgaaccagatctcaaaccaatgcgttagaaactcatttcgatcgttcctatcgaacattggcaccctctgtgggaaacattcaccagagttggatcagaaactttccaaactgatgatttcaagttgtggaggaataaaaataaataatatttttata

SEQ ID NO: 253462 - DNA, 438 bp, Glycine max
  unsure (1)..(438): unsure at all n locations
agcttctccccaatttctattatagggggagaagtgaagtagaaaagggttcagccccttaggcacttctctctctctcgaaatagctgaggaaaattagttccatgaagaaaatccaagccgaggcgcttccgtaacgtttccgtgagtaattacgcgaagattctcaaccgttcttcaagattcatcgttcgttcttcgttttcttcagtcttcaacgggtaagtacctcaaaccgagcttttcaattcattctatgtacccgtggtggtccacattttgtttcatgtattnttattctcgntttcatttactttgtatacccgcttttgacgtgcttaagccatttatttaagtcatttctcgcttaatctagaaataaaataaatttctaccgatcgttgaatcgattatccggtgattcggtaaaatgaatcc

SEQ ID NO: 253463 - DNA, 351 bp, Glycine max
tctaatttctatttctagaccaaaatccaattatttatatctatgtcattaatgaggtgactattatttgcccaaagaatattccctgagttatccttattctttctagattttaacttaaaaacttaagagttcgtgcttaggtatctatcataccctaatttcgtctggggaccattgtttgtcggcatgcgaccttcgcttgaccccttcaaaatgtttaatatccattgccatggaatttgtaaagttctgggacatttcagaaagaaaaccactaaaaaaaaacaaaatggggtgaacttatcaaacacggggagtgcgcttaggaaacctcatctagaacactct

SEQ ID NO: 253464 - DNA, 384 bp, Glycine max
agcttgtagggaaagtctcacgattgtcatgtgttgatgcaacaattgttagccatggctatacgagacatcttgccaaacaaagtcaggttagctataactcgcctgtgctttttcttccatgccatatgtagcaaagttgttgatcctgtcaagtttgatgagttggaaaatgaagctgcaattatactgtgccagttggagatgtatttttcccctgcattcttctttgacatcatgattcacttgattatgcatctcgtcagagaaatcaaatgttgtggtcctgtttatttgcagtggatgtacccggttgagcgatacatgaagatcttaaaagggtatacaaagaatttatatcgtccaggtgcatctattgttgag

SEQ ID NO: 253465 - DNA, 471 bp, Glycine max
  unsure (1)..(471): unsure at all n locations
acactccagaatacttaagcttganagagcccaggtagtcaaagagaagttcaagtccatattctttttgtctgaagagagtatgatgaactaagggacgtcaatatggctaccgctgaagccttggaacgagaaaccaagaaggtctgaaaggaagaacacgaccaaaacaaattttgaggggctttatagggcagcaatagtgagctcaaactccgaagaggtgaaaggaatcatcacgggtcaaaggcatgatctggaaggacgagctaaaggcttgccttaagtcgaaaagaaatttgtctcaacagttaaagtgagactgaaggggatatgtgggccatcatcgatgagtgcaaagagaagctaaatctagcggcgactcacgagcaaaggctagaagatgagtacgccaagatatcagcagaaagggaagcaagggaaagggtaattgattcattgcaccaagag

SEQ ID NO: 253466 - DNA, 447 bp, Glycine max
  unsure (1)..(447): unsure at all n locations
ntggctaatgtggcagatagggaccctctccatctggggtcctcgcccttataaatgggctaggtttctttccttcctttctaaggtgacccttctcttgttggcatgtgtaggcccgtaacctaaccgaaccttgcacagttttcaatgaaccttaccaagctcgtcatgccatcaccgttccgacctaaacccattctgggctcatacccatccctcaacataactcgggccaccatcaaggaggcaccagatagacgcggttgcaccggaggagcctccacataagctttattcacaatttctagtgcttgaaaagatgtttccaatgactcttccgcagcttccacataaggtgtagaggatggaaaactcactaatatatcttcttcccctaacactataaccagctgtccttccaccacaaacttcaatttctagtgcaac

SEQ ID NO: 253467 - DNA, 445 bp, Glycine max
  unsure (1)..(445): unsure at all n locations
agctttngaatcctagaaaaaccatgattgtgttggcaacctaaccccattacaagcctagaaagtccttcagattcattttgtgtgttcattgctatatgatataagatgaaatgcaaaggttgggacttgtgttagttatttatgatggaatgagcctaaacacttgagcttgagtgaaacaatgactgtgaggttttggttggtgatccttcctcgatttctaccatccttactagcttatttcagttgtgactctaatgtgtatgttcctatctttgaaaagctgcatgtttgtgaaaatcaatttaatgaagcagtccatgatattcagttcatatggttgaatttatttgtganacaagcaccattttgagtgaccattgtatctcgtcacttgaggatatgtgaattgttcttttttgctcgacgaccagcaaactat

SEQ ID NO: 253468 - DNA, 427 bp, Glycine max
  unsure (1)..(427): unsure at all n locations
tgtagggttaaagtgtcatgattgtcacgtgctcatgcaacaattgttatccgtggctatacgagacatcttgccaaacaaagtcaggttagccataactcgcttgtgctttttctttcatgccatatgtagcaaagtcattaatcctgtcaaatttgatgagatggaaaatgaggccgcaattatattgtgtcagttggagatgtattttccncctgctttctttgacatcatgattcacttgattgtgcatctggtcagagaaatcaaatgttgtggtcctgtttatttgcggtggatgtacccggttgagcgatacatgaagatcttcaaagggtatacaaagaatctatatcgtccaaaagcatctattattgagaggtacattgcagaagaagccattcgaatttgttcaaaaaacattgag

SEQ ID NO: 253469 - DNA, 450 bp, Glycine max
agcttaaagtatgcccgagtcattcatccctattatatgttgtcgaagtattggcgatcagaattgccattccttggattatagggttgaaccaagctcatgcttttacaaaaaggttcatcaagtcaagttgaaatatggaagtaaccgtcttgcaaaattggggcaaaagatgaattgagtcacatcactgcttcgtctactgccaaacatatttaggattattgatgtccttgttacttccagtttcaccttgacaaagatgtcatggaccatgttgaaaatctaaattgattcaaccccatatcttgcgtaaaaattcgcaatacttcaactgtgcatcattcgcatgcatccatgcttttcattgagtgcattgctcgttgcattctctcctttgaaaataaaataaaatgaacttaatcatttgtatataaaagaaagggacac

SEQ ID NO: 253470 - DNA, 440 bp, Glycine max
  unsure (1)..(440): unsure at all n locations
tctcnctttntctgcttctagagctcttttccctaaataggctctatggctactctggaattttgtgccctggccattctgtacaagtgtgtagaagctaacatagaaggtgtaccctaattctacacaagacaggctttaaataggctctgaattcaaaacgttgcgcttagcgccaccctcacgcttagcgtgagtaaggggaattgggcttagcgccagtctcgcgcttagcctggctaaaggcacctgctgcgcttagtgcactaatctcgcgcttaaggcgcgactttgatactgatgctctgccagattctcctttgcgctaagcacgttgaagctgcgcttagcggtggtgtcataccctaatttcatccgggaaccatccgttgttgggatgcgaccctcgtttgaccacttcgaggtacttggcacccatc

SEQ ID NO: 253471 - DNA, 430 bp, Glycine max
  unsure (1)..(430): unsure at all n locations
agctnttacgtacttatatatttaaggggcttatcttgttattatttgttagagcacaacaacttgttgcatggatttatagtgcatttaactcttttaaatgcagtgaagagaaaagtttaaatcaaacctaaaaagacacagttttctaatttgaaagttgaaaccgaaaatgtagagaaaatgttattcatcaagttttattttgcaagatgtgttaaaacatgacttgtcttttcgtaaattataaaggctttcacaatatagttaactgctttggatcgccacctaaccatctaatagttttagcccattatagtcgattaagatctggtatcaaaggtatctcacataacacttcttgaatatcttcattattgactctatcacccatttgttctaccattcgatcaagagttgaccattgtat

SEQ ID NO: 253472 - DNA, 424 bp, Glycine max
  unsure (1)..(424): unsure at all n locations
aagctgctttacatctncccttttgtgatgcgacccttatttttttattcatatacattcttttgtctagacgatcactcacttaattctccatattctccctctttgtggttgagtctaagcttcacttggaattaagttatttaattatatgagcgcttgagttaatccctatattctctccccctttagcatcaacaaaaatccagagtgcataagagatataagacatacgtaaatgactaatcttacaagagaatagaaaacgatcaaacaagataacttaaccattcattaaactagaaagacaatacttcatagaatgtcatataatccagaaagtcattcataataaccaaatgaaagtacaaaccactagtcatatatcgtcaaagtaattaagtgtaaaactcataaccataga

SEQ ID NO: 253473 - DNA, 415 bp, Glycine max
agcttcttatccaaggctcatctttgttgttattctccttcttccatggcttattccctagtggatggcgcctcctctcacctcttctcctttgtcttccactgcatctccatggtggaaaatcaccattaaaggacctcattgaagctcaaagatccagcctccatagaagccccacaagcaagctttcatcaataatgtagaatgtttgacagcataggaagtaagaccttgtcaatgtagaagtaagaccatggtggtcttataaaaagtataatgacataaagtcatcttaagtttgatttcaacttggttaaaggtcttgtcacctatctagtggcgtttccatctcgtttgaggagcttgtctcgtgatgattgtgaggaggatgtctgacttacccctggttgaaagt

SEQ ID NO: 253474 - DNA, 427 bp, Glycine max
tgtaagtatgtattggtataatttgcctgttccattttttcttaatgtctttagaggttacttcctcgctgacatcttttgttgtgaatggaattgccatgacaggtttattactactgtctttgatatttggtagttgatattgtgttgtgggaggtaattccgattagattaactcaccatctctcacttgccagtttgttatgacatttgttgttggatcacctatgatttcttgtttccaacggtaatctatattctttctgatggcataagcatgaaaccaatcaaagaaaaggacattgattttgactctttcgacaaattcatagaacttgtcttggatttgtttgttgtttgttcccttgtcatgatggaaaaaccatctcctttgatgttcattcttcggagaatagaaatcttttct

SEQ ID NO: 253475 - DNA, 450 bp, Glycine max
agcttcgtttcccctcttcatacatgattgtttttataaatgttatttttagaaacaacgttcagtaaaaatctaaaggcttatatatgtttttgatctctaataaataccaaatttttgtctttgctccctactaaatttttacttaacattgagcccctaataaaatgacacttttattttttgttcttgatattttggtttaatccttaataaattagcaaattgtgtttgctcccttagaaattagcgaattttgttttcatcccaactaataacaaatagaaaaaatttctcaaaaaccaaatacaaaattcactaatttaccagggacttaaaactaagtgccaagaaccaaaaataaaatagttattttactaaggaattaacgcaaaacgaaaaaattaattgagatcaaacccgaaatttgaatatttattatgaataaaa

SEQ ID NO: 253476 - DNA, 446 bp, Glycine max
  unsure (1)..(446): unsure at all n locations
cgttctttccttggtgatcaagcaatggcagagaacttatgtattttatcttcccttcatgaaatggaagaatgtctcagtagcgaaatggaattgagatttgtcaagctcgctgcttccatgcaataaacaatacacgaaatgtttcagtataggcaacaagattctccaacaacaagcaatccacctagaggtgagagatctagcccctattcttgtagcactcgattggctaggttggactttccatgattcaatggtgaaggaataaaacagaggttgatccactgtgaaactttttttctgttgataatacactngatgaattcaaagtacatttagcagtagttcattctgaagggaaagcacttcagtggcatagtgcttacagaatatctgtatgattgaagaattaccctcttgaatgaatattagatcttgtactt

SEQ ID NO: 253477 - DNA, 451 bp, Glycine max
  unsure (1)..(451): unsure at all n locations
agcttcaatggctcaatgagcaaggtgatttgtatttcaatcaacaagtaaacatacccttttctataggagactactatgatgacgttttatatgatataatccttatggatgcagggaacattttgttgggtagaccatggcaatttaacaagaaagacatccacaatggtctcaccaatgaaataaccctcacccatgtaagcaaaaagctcaaacttgttcccttgacaccttcacaagtggttggggatcaagtacaaataaaactcaaatgggatgaggaaaataataaaaaaaagaaaagaagaacaacctttaatggttaaggaggagtgtaaggaggtaggtgtctcctccaataggttagctaagaagaaaagtcatttttgcataaagacaaacattanagacactttccttcttagacaacctccacatattcttcttt

SEQ ID NO: 253478 - DNA, 439 bp, Glycine max
tcatccatagatccgtcttgtaagactaggcatagactatataacattattgtaacaacataattaaaaccaaaacttaatcagcaaatccctcttgtaagactaagtttcaatcctacttcaattaagttctaaggcaacagtacatttcccaatgctaaagtcacctaactatgcacacaaatggatgattagaccaaaagcatacaaacattaagcattcaaggaagcattgaacacagaaaacataatcaattagatattaggtatttacatcatttgttcattagaaatccccaactagggtgtttagccagccattacagaagaaatcctgacaataataagcttacaaaacctaggtatctctgccaaagctgctcctcttgctgcctccagagctcttttcccgaataggcactgtgcttgtctctggaat

SEQ ID NO: 253479 - DNA, 446 bp, Glycine max
  unsure (1)..(446): unsure at all n locations
agcttctcaaggaagttntctcaagaaagattctcattgaagctacctagtctataaatagaagcatgtgtaacacttgttgtaactttgatgaatgagagtcttgtgagacaccactcaaagttcaacttctctccctttttcttccttcaatttcgtgctcccccctctctctttctctccctctttcttttcctccaatgaagcaccctctccaaccttcttatccaaggctcatcttggtggtgaagctccttcttccatggcttattccctagtggatggcgcctcctctcacctcttctcctttgtcttccgctgcatctccatggtggaaaatcaccattaaaggacctcattgaagctcanagatccagcctccatagaagccccacaagcaagctttcatcataatgcctgttactctanggtgccattctctactt

SEQ ID NO: 253480 - DNA, 403 bp, Glycine max
tgtttgaaggacagattctcatcatgcaaagcttgcatgatctatctcagtaaaggccaattatgagtgtagagcagttcattaggaaggtggcctggcctggagcccgaccttcttttgtgggggataatgaaagatttacagcccaggcacctcaacaacatgagctagaaccagaaaacgatcactcatttgaagccatcatcccctgagctgttgatttttcaaaaagaaaattagagacgagatccaatgaggctgctcatcctggaccagtgctagtaccagctgatgtaccatttccagggatggatccatcttcacctcagcatgcaatagactcttccactcctatcttagagatacttgagggacataccacaccagtccttgctctggacac

SEQ ID NO: 253481 - DNA, 416 bp, Glycine max
agcttgagatgaggaagcgttgaagggtgttatcttctacttttattcgttgaccacagagtggtacatggagatatgtcgtgggggtcaggagaccttggggacgtcaggtggggtgctattgcccaaaaccaagcttgaccaatcccgacccgacccgggcatagtcattcagtgagaacctgtgatgtacctaagcaggcgagctcctggcagtcaacagataaaaggaacaaagaccacaaagcaaggaggcttgtggtggctggccagctgtgaatcttgtgtgacatatgggttatggcctctggtaatcgattaccaagggtgggtaatcgattacaaggcttaaaaatgaagacaggaggctaagatagtctctagtaatcgattaccaagggggtgtaatcgattac

SEQ ID NO: 253482 - DNA, 450 bp, Glycine max
cacggacctataaaactcagcttaacatcagaccacttccagggtgctggaactacttctttggacttgatggggcctatgcaagttgaaagccttggaggaaagaggtatgcctatgttgttgtggatgatttttccagatttacctgggtcaactttatcagagagaaaacagacacctttgaagtattcaaagagttgagtctaagacttcaaagagaaaaagactgtgtcatcaagagaattaggagtgaccatggcagagagtttgaaaacagcaagtttactgaattctgcacatctgaaggcatcactcatgagttctctgcagccatcacacctcaacaaaatggcatagttgaaaggaatgaagtttgggagctagttcctagacccgagggaactaatgtgattggcaccaagtggatcttcaagaacaaaaccaatgaa

SEQ ID NO: 253483 - DNA, 410 bp, Glycine max
agcttgtaggattatggggtacccatcacatgtggtactaggtggcggacgggcgatggtgcacaacaagtttttcacatacacaaagcgcgcataaacccaccatcccctattgcccacctccatctgagctcacgtactcccacgtagcccatatcctcgtttctctcaacaccgggtccccatcaatcctcccaagcttccacaacatccaagtaatacaacattcaaacagcacaagctatcacagccaagcaaaacagagcaaaggcagaaaactctgccaaaacaccaaccaaatcacagctgttctcacttaaagaccccagtaccaattccttcgatccaattcgttaaccggtggatcgactccaaaattttactggaagtctatagtacataaccctaca

SEQ ID NO: 253484 - DNA, 441 bp, Glycine max
ttaatgatatggtcttcaccaaagaaaggatcttattggtttcttaaaagaggcaaatctgatcatcatgctttgataaatgcaaaaaaaaaaaactagggcaaatgaagagggtgagaatgaaggagaggaccatgctgtgactgccattcctatacagccaagtttcccaccaacccaacaatgtcattactcagccaataaacaaaccttctccttacccaccgcccagttatccacaaaggccatccctaaaatcaaccacaaagcctacctaccgcacttccaatgacaaacaccacctttagcgtaaaccaaaacaccaaccaagaaatgaattttgcagcgagaaagccctagaattcactccaattccagtgtcctatgctgacttgctcccatatctacttgataattcaatggtagccataaccctaacca

SEQ ID NO: 253485 - DNA, 379 bp, Glycine max
  unsure (1)..(379): unsure at all n locations
agcttaactgggaaacttattgaaatcagatttntctataagaaaagacaaaactttctttgacaattttatctggcgattttgttttcattagttaagcaagcaattgaaatagatataaataaatgtttaaatatgctttcaatccatctaaatatgtggaactttagttttattatctgaaaagctctttggtcagatatagtcctgagaaatataattttcttaaaatgattactatcgtagtttagtgataacatggtcatgacatgtgtctagacatgtctcattagctatcactctaagatggcatgcttcactatagatctagatgcatgttacgtcatcaataaatggtgataaagaatttttacaagac

SEQ ID NO: 253486 - DNA, 440 bp, Glycine max
  unsure (1)..(440): unsure at all n locations
tgtgagaataattaatcgcaatttctgtgcaacgagtcattcttattcttctcattttggaaattcggataaaaaatcggttaggttcgaattgaaggcatatgacacgagtaataaacgtggaaagatgaaagctgaatgaagtggctttgctgcaaactgtgaaatttgaggcgtgtgttctttgaattcaaatttaaatttgctacatttggaagaatttttctcaacttctctttcatttatcataaaatatttcaaggctattttacgacttatttcaaaccatatgagatatactactgttgcatttgtttctgcagtgcggttggtgctaatggttgagacttcttagagacttattaatcaatgacatagaaatatgatagacnatctatttctaatgttccagttgattacatgaaagcaaagattgtcgt

SEQ ID NO: 253487 - DNA, 452 bp, Glycine max
  unsure (1)..(452): unsure at all n locations
agctttaattataggagagcacaaancctaaaattaaccattntttcttttccatttacattcttttcaactcaactcacttgccctttgtacttagctttattctaatagcacacacacctcttatttaaaacttactgtgttttttttttaaattacaatctaattacctatttgttgtgtgtgctagtatttcttacctttataacttggctacccaacaaactcccccaaatttgaggaaaattgcgttgaatcctattgctgtcctataacctaagataaggtatatggagatgacattttaaggcttgaggttcagcttaaacaattcaattcttcagctcaaatgtgggtgcaaacgatataacatcaatgtattaggtaagctttttggccaagtagctatttcatacaatcatggccttcatcattctcaattccatacattc

SEQ ID NO: 253488 - DNA, 448 bp, Glycine max
  unsure (1)..(448): unsure at all n locations
tgtgatagtcataaaatctagctntaagtgttggntngtttatatttgtgttaaatacaaggccaggcatagccaggtaagttggatagatcattgcacatgcatgcttccaaattattagaccgaaaggaaaaggaagaaggaacaaaaagaacactctcaattaactaactaaccacattatacgtacaacaaaaaagagtgtcttgcatataattccaattatagctaccaccttttcatctctttgatctatctctttctatagatctcgtacaaacaacacagttttaatttagacttttagtccttagtggatgcagggcatcaaatcctgtttattccatttggagttgctttcctttccttatgaattatgataacttgcttcctttgctacatacaagaaatatttaaaataatagtactaanacaatcatgagtactt

SEQ ID NO: 253489 - DNA, 430 bp, Glycine max
agcttgtaaacggatggacatggatatgtattgttgttggctggttcagggataaaagggaatgtcccacattatttccatgacacaaatgcaacaatgatgatttgcacctatgtggacactcaagtgtcgaaatttttttggtcatgtgatgctagggctcataattcattttctctactttagtcaacccagtgtttccaaaatatgttcttctatcaatttgtgcattcatccgagtctatcttgggtgttcggaaaaactttcacagcatttacccttcaaatttgtacacacatttttttcaaaaattggttatgatcagtgaatttttccaaagaaaagccggatgtcatttcttttcaaaagcatgttggttttttagctagacaacttatttttcgctcttcacttttttccttcttatca

SEQ ID NO: 253490 - DNA, 469 bp, Glycine max
  unsure (1)..(469): unsure at all n locations
ctataaaactaagcttcatggctcaatgagcaaagggaaatgaaagtcaataatctttgcttagataccgctttctataagagactactgtgatgaagttttatgtgatataatccctatggaagtagagcacattttgttgggtagaccatggcaatttgacaagaaagtaatccacaatggtctcaccaatgaaataaccctcacccatggaagcaaaatgttcaaacttgttcccttgacatctttataagtggttggggatcaagtataaataaaactcaaataggataaggaaaagaatagaaaaagaaaagaaggataacctttaatggttaaggaggagtgtaaggaggtaagtgtctcctccaagaggttagttaagaaggaaagtcattntgcaataaagacaaacattaaagaaacttcccttcttagtcaacctccacatcttctccttcgtaaaagg

SEQ ID NO: 253491 - DNA, 332 bp, Glycine max
caagctttctccctctctatctcacggagctatctcctttcttcttcctcaccatggaagctccatcaaagctccaacctttgtacaccatttctgctccaaatcgcaaaaggaagccatttttgaagacgtgaagcgcacctctccattgtgggacttcacatttcagggttgggcacacttcttctcacataaaccttcgtgggtatcggagtctgggagatatgatgggaacgtctactaggtctacgccttacgatagttatttgcgaagaaatacgatgaaagcacgctaaatttgtcatgtgtggaagaagcaagctcacccattc

SEQ ID NO: 253492 - DNA, 307 bp, Glycine max
agcttcacattctgaactgaataatatcacccacatccaaggccttcgtattctaataacgcacaagccgggaagcgctcacaacactttcgaaaatcccgagagacaaatagatagcgcccaacctgcacaatcatcgtctggaacacgagaatctggcctatgcgcacccaaccataaacaaacccgctgatcccgtctagagacagaagaggtagaacacaagaccgacgggggaaaagctcacggacaagccctgcgcaagagcccgaagcggcagcgagccacacttataacccaacggaaa

SEQ ID NO: 253493 - DNA, 434 bp, Glycine max
agcttatccggcctcccatcagcagagccttcattgagaaatactacatgcccaagcaggcacagcagcaggaggagggccagcagcagccaactgtagatgcaccaccgccgcctctataggagacaccatccctggagtccatctccgctcacctgcggaggatagaactccagatgcacatatacatgcagcatgtgactagccagcaggcggctaatcacagggggcaggtgcagctaaatgagacattctatcgatacaatatgcaccagtagagtcaggaccctagtcctttcccttggcctacccccgagcagttcagggccacagttgcctggcccagagatgaggccgattttgagacactggcaggacccgcagggacccctggggacgacgaaggatctcagaaggacgacaatatgaccgac

SEQ ID NO: 253494 - DNA, 74 bp, Glycine max
cccccggacccggaaacaacaaaccaccacgcacctgaccccgcccagaaccaaaacacacaccgcacgcagaa

SEQ ID NO: 253495 - DNA, 444 bp, Glycine max
  unsure (1)..(444): unsure at all n locations
agctntatgccgcattttagttacatgtgttttgtaccatgatgacgactataaaccaaccatgttgggattatacactcatttctcttaaaaaatgattgaaaatcatgtggacatggtacctgatgcatggttaactaggaaatgatggttcttcgggcatctgatttcaatctcataattacatttgccatgtacaacataagtatgccctagtcattcatctctatgatatgttgtccaattattgacaatcaaaatttctactccttggattatggggttgaaccaagcacatgtttttaagaaaaggttcatcaagtcaaggtcatgtatggaagtaaccagcttgcaaaagttggggcagaagatggatcaagttgcatcgcttatttgtctactgccaacacatgatngagctaaataatttacaaaaaaattaag

SEQ ID NO: 253496 - DNA, 441 bp, Glycine max
  unsure (1)..(441): unsure at all n locations
tcaacatcagaccactttcaggtactggaactactttatatggacttgatggggcctatgcaagttgaaagccttggaggaaagaggtatgcctatgttgttgtggatgatttctccagatttacctgggtcaactttatcagagagaaatcagacacctttgaagtattcaaagagttgagtctaagacttcaaagagaaaaagactgtgtcatcaagagaattaggagtgaccatggcagagagtttgaaaacagcaagtttactgaattctgcacgtctgaaggcatcactcatgagttctctgcagccattacaccacaacaaaatggcatagttgaaaggaaaaacaggactntgcaagaagctgctagggtcatgcttcatgccaaagaacttccctataatctctgggctgaagccatgaacacagcatgctat

SEQ ID NO: 253497 - DNA, 425 bp, Glycine max
  unsure (1)..(425): unsure at all n locations
agctngcatgtngcaagccatcatgatgagttctattaatatctagattacgggcatgcttaatttgtaatatctaatttatatcaactatatcattttagttgatggttgtcttaataacagatatatttctccctgtgaagctactttgaggatctttggttttccaatttatggcaggaagcctgctgttgaaaaagattgcatttccactttccaggacaacatgctattttttatcaagaccatgatgatattgacgatgttctatccaagccaggcatctccaattcaaagttcatttcttggatgaacactaataaaaatttccctgaaacaaaaaatcttacttatgctgaatttgtttctaagtttgtctatgatcgcaggagaagatactataaactcaggaaaaaaggatacac

SEQ ID NO: 253498 - DNA, 445 bp, Glycine max
tctcgaggggaagaacgttgtggtggttggcttcaattattcatgtattgacttagccatggagagtgccaaggcaaaccaaggtaactattcaatctaatttctttttctagcatatatattaataattaataattaaaataaatttaaaaaattacagagaaaaatgaagagaaacaatgaatttggtgtttagaaatgcacgagacttggtcagataatgatctcagttccaccagataaaaggtaacataaccaattaaaaaatggcgtacttgactctttgcaatttatgttccaaagattgaagcaaaattttaacatgatacattttagatattaagtgttaagtaaataattattgatgaataaatatattttttgctcattatttgacaaacttattataatcgtgcctgtgttaaccgccgagggaattgtcata

SEQ ID NO: 253499 - DNA, 288 bp, Glycine max
  unsure (1)..(288): unsure at all n locations
catgcaagctnccattgttaaattatcgagcgccttttatatcttatgcgccgtgaacctgcacctccgcgcgacaaggtatgaccattcgaatttctcgcgagcttcgcgcgaccaatgtcgagtgaggagatataatacacgcctgaatcggaccctcgagtgaaacgttatgaccatctaaacttctcgagagcttgcgttgtacaatgccgagcgtcactatatgtgaggcgccagaacccgaccttcgggagaaatgttatgacaatatgcactactcgagag

SEQ ID NO: 253500 - DNA, 110 bp, Glycine max
gtttgagcgattcacatggtcatagctattcactcggatgttctattcatgcgcataagatatcgcgacggtcgacattgaacaatggaagctcttgacgcaattcaaat

SEQ ID NO: 253501 - DNA, 359 bp, Glycine max
agcttcaggggttgaagtgagaaccaaatcttatatattgttgtagatagagctctattaataagtattgttgacaattacttaacctgtttttttttttaaggggacaattgaacagttacttataaaaatgacatgcaaactgaaaaaggagacacacattgagtaaaaggataaaacacaaattttttttcaaaaaaggataaaacacaaattaatgtggctatataattaagcttttgcaggatgttgtaaaaaaatgtctatgcgttttatgcaatatattttttttgtcaataaatattggcagtgcattgttaaaatacactatctaataaatatagcacacaaaacaattt

SEQ ID NO: 253502 - DNA, 403 bp, Glycine max
  unsure (1)..(403): unsure at all n locations
tgagactgtaagacctgaacctttgntccttgaccattttctgtaagcttcatttaaggcacggggagtcattttcacttcttaaaccctagcattgctgtctttggaaactatgcttcattacatgttgacgagatgtttaaaattttgtatctactgccatgactagaactggatcatatgtggcttttctaaaagatcgaatgataaaaatgacttctttacatgttaaagcatatggttaccctcatattgcacttatatcaaagttttatagcaaaatttatgaataaaacaagctctataacattttgtccgacaaaatctgtcacggaaattatctggcggggagagttgcatggactagatctattacaagatcgaccttaaaaatgactttatt

SEQ ID NO: 253503 - DNA, 430 bp, Glycine max
  unsure (1)..(430): unsure at all n locations
agctcgatctctacttccattattcagtttttcctttcttcacagaacaagaaggaatcaaagcggcatggattgggaaatccacgagtggttttagcattcgacttttttctgcctctagaaatggataagagtttagaacgttgcccctcattcttactttgcttagtgatagactctcattaactttttgttttatacatatatactcctttttctatgagaaacataattatttaattataacctatcatcataaatttattgatttttaaaaattatttaagtaattcaaaatcaatgcataaatattaatttttttatataaaaattcacataatgtaagagattttntttagtccagaactataatgtgtttatgggctgatgactagtttatcgtgatatgtacttaaaattttcaatttgg

SEQ ID NO: 253504 - DNA, 430 bp, Glycine max
tgtattggtttagtataattctttaaaagtgagaatcatgtttattttcatactctgattttgaataatttaattttcaatttttttgcacatgacttgataggtcaaattttgtgacaattgtgatgagtatgtctatttattttctaggttgagtttcaggaaatcccaacccaaatgagcatgacccaaaaagcatatcttaataccctttgcattggtattgtgaaagaagagacgagtaaaggacaatattcatataaatgagatttaattttttttaattaaaacccaaccaaaatactttgatattttttaagtatgtgtattaagtattcaattagcacatctttttacagtgaaaattctagagaagagaataatgtgtcttgtgactcggttcactaagagaaactatatataaaaaata

SEQ ID NO: 253505 - DNA, 431 bp, Glycine max
  unsure (1)..(431): unsure at all n locations
agcttcttagtgtcctaatgtattgaataaatttctaattgacatcagatatgttggaggatcctttgatgttgagtcccttgtaaagaatttacttgggcaacttgatggtaaccaagcaattttggtgaatgtatatgatattacaaactatactaatcccctagtcatgtatgggaacctatatgaagaaggcgatatgtctcttgtgcatgaaagcaagcttgattttggagatccatacaggaaacatcagatgatatgtaggtaggtgcttctggctgctgtacttttttctgtaaggacctttaatggttttacttgtcaactgatagttatcatcaacattttgaacaggtaccatcagaaggcaccgacaaactggatagctcttaccacggcattcctattctttgtgantctttttttag

SEQ ID NO: 253506 - DNA, 446 bp, Glycine max
  unsure (1)..(446): unsure at all n locations
tccttannaaactaaatatatattttttaatttatataatttgcataaaaataatttacagattaaaataaatttacttaattcgtacaatttgcatattaattgatgtaattatattgatttatataattagagtaaacataatttgtatattaaaataaagttacaaaataatttatgaaatttaattaaaaattggtaaaataaaaataaaaatatgtaaactattcaaaatatatatatatatataaattggtataaaataaaattgataagatttacatattaacttttttaatttataaatttttataatacgataaaaattaataactctggactaatgatacatataaaatattatttataaagctaattaaaaagtaaatgtattaatagtttattatcttatctttgaataaaaaatcataagttcaactcatatt

SEQ ID NO: 253507 - DNA, 420 bp, Glycine max
  unsure (1)..(420): unsure at all n locations
agctnttataaaggctgggatcatgcttattttattgctngngatgggtaataggcctgagtttgggctatagaaatataaaacgggttaggccaggcttaggtaaggtctgaccagcccaatccatttccaccccttaacgaagggaactataagattccaatccctaggcattttgaaatcatcataatcaataaatatgtccttgattggataataggcactttgaaatgtgtaaacttcatttctagctgccttccaaagtctaatgtcaatattattcaaagccaataaagaaatttgagtaatagcctcaacatcccattgagaaaatatccaccaaatgaaatcttaattcctggtccctgtctccgaatcaataatatccacaactttcaaatgttctaaaccttaagtagt

SEQ ID NO: 253508 - DNA, 461 bp, Glycine max
gacctataaaactcagcttgtggcctaggatcttcttcatcaatggattcctttgcttcttggaagatgaatggaagtggaatggagaaggaagagagagaggagatgccacttcaaggagaagatgagtctagaagaagctcaccaccataagaggccatggataagagcttggaggaagaaggagatgaatgaagggagaggaagagaagagcacaaaattttgtgctctaaaatctggagtttaattttcaaatgatcaaagttggaaaaatgcacacacatagcctctatttataggctaagtgtcacacaaaattggagggaaatttgaatttctattcaaatttcacttgaatttgaaattgaatttgtggagccaaaatttcactaattatgattagtgaattttagatatggttcagcccactaatccaagatcaagtccaagattctccact

SEQ ID NO: 253509 - DNA, 461 bp, Glycine max
  unsure (1)..(461): unsure at all n locations
cctgcggcatgcaagctttgacttgagtcatcaagagattatatttatgtgaccatggcatgagtttcaataatcatcaatcatctttgaatcatctatctttcaatctttacaacatcatctctaaacttctttcaattaatctttcaatatctttttacagaattttctgattcatttctctttatctttctgaaagttttttatcaacactttcttttccaagaaaagttctttgttcaaaaacttgtgctattcatctttntcattctcttctccctttgccaaaataacgaaggactaaccgcctaaattcttgtgtgtctcttttctcccttacaaaagattcaaaggactaaccgcccgagaattcttttgattcttcccttccccttaagcaaaagatttcaaggactaacaacccgagatatttttgtttccccttacaaagatcaaggact

SEQ ID NO: 253510 - DNA, 423 bp, Glycine max
tttgccaaagaatgtgtctttcactctccctatggctctgttattcgttatttacgactaacttttgtattgaaaagtttcatgaaatttatatcttttccccaatttatggttgttttttaggcttgtacatatttttatgtttagtttaatttcactcagtagatattcctaatattgtgaattaatgtggttcaacttcagtttcaggctaaaggatgaagaagaagaaggttgaagcagctggtgtcttgatcagcgaggcatatgcgcttagcgagtaacatccgctaagcgaggcactcaattcgcttagcgagatggaagaatctggaagagaatttgccattcatgcacgtgcccagtgcgccatcagctcgcttagcgagtcatttgtctcttctcgcacccagcttgctaagc

SEQ ID NO: 253511 - DNA, 432 bp, Glycine max
  unsure (1)..(432): unsure at all n locations
agctggtcaagctgtctctctcctaattgtaatatatatatgntattngaatgaaataaaactaagcaagtgtgtgaaaagttctcctcctcacatattcaaagcttcaagttggtaccagagcaggtcgtatccgccgtcgtccaccagccgtttcaactggtgactacagggttctgtgcgcctcgaggagcgcaacccagcccaactaaccgctgggccaggagcttccccacgcgccatctccgtgcgcgccaaacgccggcgcgtgaccaccacgcgccgccctccccttgtcggaaacgagcgcgtttgcttccgaccgtctcgtcgggctctcctgagtccatatcagccattagnttttggtttcggcacttctgtgagagaccttgtgccttccttggctctctactttagtttcctttgatc

SEQ ID NO: 253512 - DNA, 452 bp, Glycine max
  unsure (1)..(452): unsure at all n locations
ttaaagtagtaaactaagttaactaacctacggttaanatttattttaaacaaggttaaaggaagcttacttggattgctgaaattggatgcaaagaaggaagcaaggagaacaagcaaagagtgagagcacattgcagagaagaagcaccaacgaaatgccaaaaatgtagtttaaaagcacaaatgataatgtaactgccaaaggcagttatgccttattttttgaggtttcgaatgccttgcttagcgcatcaactcgctaagcgagcatacataacgtttaagattccaaacacacgcacttagcaggcaaactcgcttagcccaatgaaaaaattcaaattttccagagaagactttgggcttagcgtgaagagtcgcgcttagcgaataatcatgctccttaaatgtagtagtgggctacgcttagcacgggtggctctgcttaac

SEQ ID NO: 253513 - DNA, 372 bp, Glycine max
  unsure (1)..(372): unsure at all n locations
agcttcttatccaaggctcatcttggnggtgtttgcttttcttccatggcttattccctaatggatggcgcctcctctcacctcttatcctttgtcttccgctgcatctccatggtggaaaaccaccattagaggacctcattgaagctcaaagatccagcctccatagaagctccacaagcaagcttagggccttcccttggatctctagcccaatctacttggagttttctacccaatgcccttgcggggtaggattgcatcactatggccaggaagatcctaagagcaggttattactggcttaccatggaaagtgattgttgtgtccatgtaaagaaatgccacatatgtcaagcgttcgcagacaat

SEQ ID NO: 253514 - DNA, 462 bp, Glycine max
gacacacagaatactaagctttcgcagggaagctaagagtgaagtatgcaattctacacattattgttgttgtcaactgggtacccactaatcatacttccactgatgccacaggtttgggtaaatatctgtatgctgttggaaccaagtccaaatttaattctggaaactatatttttgatcaaactgttaagcattcagaaacttttgctgtcaaattacccattgccttcccaactgtattgtgtggcattatgttgagtcagcatcccaatatgttaaactacactgactctgttatgaagagagaatctcctctatccctgcattacaaactgtttgaggggacacatgtctcacacattgtctggacatcatggaaagctgctgattcaagtgctgtgtccaaagatgctctgattgctgaactcaacgacacatgcaatgagctggaagcaacca

SEQ ID NO: 253515 - DNA, 455 bp, Glycine max
  unsure (1)..(455): unsure at all n locations
ttaagtcacctgcggcatgcaagcttcttgataactggatcatatatgttctcatttatttctctaagctattagctttcggttttaagttgtcagttagacggttataactgacatctctccttgaagagcttctactttatattaggggttggaatagtctaacagaagctcatcagttntgtacattttcaataaagtttcagttcagaattctctcttaaattacttcaataagcatttattcaattggcccatatcacgtgaacacttacgccataattttgaccatgaaacttttcggaaaaagctgagaagagcttattttgataagttacgcaaagaagctaaaaatggaagcttatgagagtcacaggctatatttataagttcaaataggctcttctaatgctctcctaataaaaaccattatgtgtctcaccttatagctagct

SEQ ID NO: 253516 - DNA, 442 bp, Glycine max
  unsure (1)..(442): unsure at all n locations
ntagtggagagttctatttctataactgcaacatattactttatttgcatgcatacagtccatgagtgaggctaagcagttatgccttcctgtttgtattctgatctaaatacctttagtttggtaggaaatcatgtctgcagctgcagatttcaaccattatcctattaatctaaggtttttatctaaatagctctgagtaagtatttgacaaaggttgagtcttaattaaattgctgaaggagatagttatttgagagaaattgggttaatgggctgcatacttgatctcttatttatgacttgattacaatcgaccaatgccataatcaagagcttaattagaatttagaagctaattaatctcataccaataatcagtagctaacttgtaggttgagcaatttatcatatatattatagtaagtattctagcatcaac

SEQ ID NO: 253517 - DNA, 445 bp, Glycine max
agctggtgcatccaataccttgatgaggatgttttatatgttcttaaaactggactgatccatttgcttccaaagtttcatggccttgcaggtgaagacccgcacaaacatctgaaagaattccatattgtctgctccaccatgaaacctccagatgtccaggaggatcacatatttctgaaggcctttcctcattctttatagggagcggcaaaggaatggctttattaccttgctccgcgatccatcacgagttgggatgacctcaagagagtattcttagaaaatattttccctgcttccaggaccacaaccatcagaaaagatattttaggcattagacaactcagtggagagagcttatatgaatattgggagagatataagaaactatgtgtcagttgccctcaccaccagaatttttagcagcttctcctccaaatat

SEQ ID NO: 253518 - DNA, 428 bp, Glycine max
ttagttgaacagaataattcaaaaatgtcaaagaattgggtgtttaataagaataacaagactttctgtgattggtgtaaagatacaatctttgcagatgagaatgcttcagaaacattaagaaagctagctgatgggcctaaaagaaatgttataacttggcaaggatacgacataaacaagtattcattttacacaaaagcacaagatgacaaaagtacaatgcagaacagcgaggtcaccctaagggctgaatctcaacactttgcaagtgtcaatgacgccaatccctatgtagcttccatcccttactttgggttcattgatgaaatttgggagcttaactatgtgaaatttacggtatgtgttttcaaatgtaaatggattgacagcaacaccggtgtgcgcacagatgatatatgatttac

SEQ ID NO: 253519 - DNA, 420 bp, Glycine max
  unsure (1)..(420): unsure at all n locations
agcttgcctgtctgatgcagcagtaatgtttttccgagttatgttgggaaacgattacgaacccggaatgggtttaggcaaagacaacggcggcataactagcttgataaatgccaaaggaaatcgtgggaagtatggtttaggctataaacccactcaggcggatataaagaggagcatcgcagaaagaaagagcggtggtcaaagctcgcggttgaggcaagaaagtgaaggaagcccgccttgccacataagtagaagctttataggcgcaggtctgggaaacgaaggtcaagtggtcgcgatatacgaagatgatgttccgagtacattggattnggtacgaccatgccctcctgatttccagcttggaaaatggcgagtggaggaacgctccggcatttacgcaacgagcataat

SEQ ID NO: 253520 - DNA, 445 bp, Glycine max
ggccacccagctcgcccaggcgagcaggggtggctttcttcataatcaacagccttctggaggaatcttctggagggcccaagtgggcctggttgctatttgcacccccatttttactaagtacaccccctgcctttttttggtaaagttacggaaacttacggaatgttacggaacctcactaattgtgcaacgatgcttccatttaatttccggtgtgtcacggaaccttacgggttgtgcatcaatattttcttttgttttccggcacgtcccggaatttcacaaattgcctaatgatgggtgccaagcacctcacaaggaccaaacaaaagtcgcatgtcatcaagcaaaggtccccatacgaaattaaggtatgacagttggctctctttacttgtcttttattggaaataaaaggacagtaaagataagacactaattt

SEQ ID NO: 253521 - DNA, 432 bp, Glycine max
ggaccttaagcgactgagcagcaacttggggcttaccttcgaccaacactgtctttttctgcctcggcccagatataaggcgggctgcagcaccggctccgcttccctaattgtactggaggcgggtgccgcggctttatcctctatagctgtctggagctttgacatgacctccgagatggaagccatttgatcttttaaggccgatggatcggccttcatttgtacctgcacgccctcttcattatccatctttccggattgagtgttataagggcgcctttgtgctttcttagttatgatgaaattcctaaagaaataaacaacggtgagtatgccaccaaaacatgaatatgcaaatgagtgatcagagcactcggatccatcccaaagtgtttttagataacgtaatgagttcaaaactcctcattt

SEQ ID NO: 253522 - DNA, 394 bp, Glycine max
ccacgcttgatgtgtctcgtgtttaagaaagctgactggctctcatcaataagaccacatatcactagccccaaactactagctaataacttaactatcaccgcgtacatacatccaatcaaggagattggattgtagtcatcaaacagactggggacgtttggttgcgggaagtagaactacgaaagaagcataactgcctctggggaagctgccacgcacacggaatacatcaacaaactctccgaagccagcttccatcatacgccacaattctttaaagaaggttaagccgaagccatcatgtccaggacaatagaccacatccaacttcacactgctggttcgatctccagatctgagaaacgaccatgcagagactccctctgttcct

SEQ ID NO: 253523 - DNA, 338 bp, Glycine max
agcttctccccctatttgctataaatgtgtgttgaagtgaagaagaaaagggttcagccccttaggcacttctctctctttcgaatttgctgaggaaaattatttccgtgaagaaaatccatgccgaggcgcttccgttacgtttctgtgagtaattacttgaagattctcgaccgttcttcaaagatgcatcattcgtgcttcgttttcttcagtcttcaacgggtaagtaccttagaccaagcttttcaattcattatatgtacccgtggtggtccacattgtgtctcatgtattttcattctcattttcatttctttttacaccccctttgacgt

SEQ ID NO: 253524 - DNA, 448 bp, Glycine max
tcaggctattcaattgcttcagattgttgcacagaatgtcttttgtctgtgtggtggttggcagaggagcataaaccacagagtctggcaacaggtgcaaattttttattcatggccagttgggttaccaggttaaccaaggcatctagtttaccttcaagcttcttagtctcacctgatgaatttgtggctacttcatgcactcctctaatgacaatagcatcacttctagcactaaattgctgggagtttgaagccatcttctcaattaaatttctggcttcagcaggggtcatgtctccaagggctccaccattggcagcatctatcatacttctctctatgttgctgagtccttcataaaaatattggaggagaagctgctttgaaatctggtggtgagggcaactagcatatatatttttaaatctcttccagtattcatata

SEQ ID NO: 253525 - DNA, 399 bp, Glycine max
agcttcatcttctaaccaagaagaaagtgatattgtatactcaattgaaatagacgaagatgatgatctgagtctatttgtaaagagattcaacacattcttgagagtaagaggaaatcaaagaaaatcaaactttaaaccaaagaaaaaggcagaagattcatcctctactctaaaatgttatgaatggctaaaagaagtctgaaaagaaaaatcttagtgaaaagaaggcgaagaaggcctacatcacacgggatgacaatgatctggaatcatctgagaattcagaaaatgaagtgataaacctgagtctaatggctaaaagttatgaaagcgatgaagaggtaacatcttcaaataacaacttatccatttcttttgatgaattacaagatgcat

SEQ ID NO: 253526 - DNA, 342 bp, Glycine max
tttgagaaaaaaatgaacaagtgttgagatgttgttagtccattggacgaaaaaaaacttgagtgaatcttaactttgttaagttagggagtttcgttggatttgaacttactatgtgaacactctctgagggataaaaatacattttctttcaaacatatattgtttgtgaaagccacgagtggcttatagacaaagaatacgtgggtcttaatcaaaagggagattaagggtagtgcccacaatggcctaaagagtactcgttgtagccaaaagtggcataaagaatacttggttgtaatcaaggaattgatgaatgaacctttcaaggttaaagcagaa

SEQ ID NO: 253527 - DNA, 400 bp, Glycine max
  unsure (1)..(400): unsure at all n locations
agcttatcangataaaactattcatatgcatctgttttctatatatataaaactatttattggaaacataaccaaaatatattgctttctgcaaataatcttttaaaatgaataaaaaatctattaattattggttcatgataagctttaattagattgttttctatctacaatttaaaagaaaatctttattagattccttcttttagaagctctattatattcttgggtaacaaccacaaatgaaatgaatattaaaagagagaggataaagttacgaaactatactgtatagccgaagaagttcttaaattaaataatgaaatcattggaacaaaaaatagtttatatatatatatttaaaacacacacacactgcgtattgaataatcactaaaac

SEQ ID NO: 253528 - DNA, 448 bp, Glycine max
cgtagaagtgtgattcaacacaatccaacattttctatttgtctctatttgaagacaagccaatggaattgcccataaattaaatagtaaaatcatttttttttaatctttataggttctatcttgttacaattaagcaatgagatgagatgaatatgtttcactaaaaaaaaaaggttgtcaataatgcttaaaatttgtattccaccaaataagaatgtttgaaatttggacctaattaacttataaacctaattaattttaacaaaaataaataagtctatattttggaggaaagaaaattttatttctctaaacaagcataacacagcaataaatctttaaaaaatacgcatgatattgttctaaaactatatttcatcctctttatgttttatgagctaaattatgataattctccaaacttattgagttcgcgattgaatga

SEQ ID NO: 253529 - DNA, 395 bp, Glycine max
  unsure (1)..(395): unsure at all n locations
agctntgagggcgcgtagcccaccatctttttatttagagtatcgataattggtctaccatcacgatcatcgtctccctttccatcattgggggtaccacctgngccgccagatccctccaccttttgggcgtgttctttgaaagatccgtcccccctttttgcacatgttctgtagttgcatcctattcagaaccatatcaaaattgtactgatactgcctaacaaaggcaaccattaggtccttccaagaatggactcaggaaggttccaagttggtgtaccaggtaacagctaccccagtaagactttcttggaaggaatgtatcagcaattcctcatcttttgcgtattcccccatcttctgacaatacatctttagatggttcttgagac

SEQ ID NO: 253530 - DNA, 443 bp, Glycine max
  unsure (1)..(443): unsure at all n locations
taggggcaggtacgaacaagtgctaggcccatgtatctatttatcatcatcccgcatccggctaaagacgttaaagaagcgctcctaggaggtagcctagtatctctaatttttctttttaatttcttgtttcatacttgttcgttttcttgaattatatcctgaattcacctaagtttatatgcaattataggatttttagagaaaatataacaatgaacaaacacaattctgcaaaagcttttgccaaaaaaaaaaaaaaatagctcgcctttgcgtgcgtgtttggtagaaattttaaaaaggggaggggtgaagccattttcaccctatttcttccccanagcacaccaccttcaacaagcttacgggagccactattggcagcagccccaagcttccattgtgcactttngctttcattatttgcgttttctttcatc

SEQ ID NO: 253531 - DNA, 439 bp, Glycine max
  unsure (1)..(439): unsure at all n locations
agcttggtgctagacatataattgcatctatatcagtgctataaaatgtggctatggaaagtctctctttctctgagttaactgttgccccgtgctctatgctttggtagattccattactcatcacctagcaaattaattagttgataaggtaagaacaaattaatcactgtttgtaagaattgaaaacattagaaaaaaaatattttctctaatttaaactgttttatgaattaatgagtagttgaactaagatcttaggatcgagacttatagataaaaaaacctagttaagaggggagacatgaaatgttttcaagcaaaaattattcattgacaaagtcaatagatattttgcactaataacatggttaanaaaacttattttatcaagctaatagattgaaaaaaaaagaggattaattacctccaacatgtc

SEQ ID NO: 253532 - DNA, 426 bp, Glycine max
  unsure (1)..(426): unsure at all n locations
ttacttcactacttcaagtagtacaggatatgcttccatttgaaaacacattagctaaaagttactatcagacaaagaagatactgtgtctgatgggtatggagtatcataagattcatgcttgcccgaatgatngcatattgtacaagcatgaatttcaagaaatgtccaaatgctctgggtgtggggcgtcacggtacaaggtgaacgatgatgaggactgcaattttgatgaaaactcaaagaagggccctctagcaaaggtgttgtggtatcttccaatcattccaaggtttaagcgtctttttgctaatggagacgacgcanaagaccttacctggcatgcaaatgggagaaactctgatggaatggttcatcgtccggctaattgctcgtaatggaagaagattgatgcttttatccgga

SEQ ID NO: 253533 - DNA, 448 bp, Glycine max
agcttgtgaagtgcataatttcatacactcgttttccaatctgctggcttagcgagtcatccgttgagcgcaacattcctcagcaaggcgcgaggaagaatctggaagaaggatgagttgtgcatgttcgctgagcgaagggtcatgatgtaggctccattggagcttgtaggcctaggatcttcttcatcagtggattcctttgcttcttggaagatgaatggcaacggaatggagaaggaagagagagaggagacgccacttcaaggagaagatgagtctagaagaagttcaccaccataggaggccatggataagagcttggaggaagaagaagatgaatgaagggagaggaagagaagagcatgaaattctgcgctctaaaagagctcttaatctgaagtttaatattcaaatgatcaaagttaaaaaatgcacacacatgacc

SEQ ID NO: 253534 - DNA, 451 bp, Glycine max
  unsure (1)..(451): unsure at all n locations
tcatggtgaatcaaaggtgagtcaaaggtgtttgacgattctttgatgataacaaaagatgatgacaaaggtgatgacaaaaagctcaaagatcaatcaaagaacaactcaagtgaatcaagaacaattcaatagttcaagataagaatcaagaagaattcaagactcaagaagaaagtttagagtcaagaatcaagattcaaggttcaaggtctcaagaatcaagattcaaggttcaagatctcaagaatcaagattcaaggttcaagatctcaagaatcaagatcaagattcaagactcaagattcaagaatcaagagaaggctcaatcaagataagtatgaaaagtttttctcaaaaattgaatagcacatgattnttctcaaaacatgtttaacaaagaggttttactctctggtaatcgattaccagattgttgtaatcgattact

SEQ ID NO: 253535 - DNA, 411 bp, Glycine max
agcttggagaggatgcttcaatggaggaaatgtttatgttgagaaagagagaggggggagcacgaaattgaaggaagaaaaaaaggagagaagttgaactttgagttgtgtctcacaagactctcattcatcaaagttacaacaagtgttacacatgtgtctgtttatggactaggtagcttccttgagaagcttccttgagaagattcttaaagaagctagagcttagctacacacacctctctaatagctaagctcacctcattgagatgagaagctagagcttagctacataccccttataatagctaagctcacccccatgacaaaatacatgaaaatacaaaaaagtccctactacaaagactactcacaatgcctcgaaatacaaggcttaaaccctatactact

SEQ ID NO: 253536 - DNA, 348 bp, Glycine max
  unsure (1)..(348): unsure at all n locations
agcttgactttggtttanacatgattgatactttatttgggacttgtaggattngattcgggcaagattggatgagaggaagtgtgattttcgaaatctgcacttatgcagaattttgctgtcaaataggtgcagcataattttggctttgtgcaaaaaaatgcttgtgtgtgatgggctgtggaaagagtattacagaatgagttctggacgtttgctagtagatcccaacggtcacaatgtaggcttaagtactagagacttctagtaaaattttcgagtcgatccaacggttaacaaattggaaggaaggaattgttactggggtctttaagtgagaaaagctgt

SEQ ID NO: 253537 - DNA, 466 bp, Glycine max
acctataatactcagcttgaggattatggtgtacccatcacatgtggtactaggtgtttttctggcgatggtgcacaacaagttttccacatccacaatgagcgtataaacccaccatcccctgttgcccacctccaactgagctcacgtactcccacgtagcccatatcctcgtttctctcaataccgggcccccatcaatcctcccaagcttccacaacatccaagcaaaacaacatacaaacagcacaagctatcacagccaagcaaaacagagcaaggcagagagaactctgctcaacacaccaactaaaatcacagcttttctcacttaaagaccccagtaacaattccttcgatccaattcactaaccgttggatcgactccaaaattctactggaagtctatagtgcataagcatacattttgaccgttgggatctacaagcaaacatccagaactcac

SEQ ID NO: 253538 - DNA, 450 bp, Glycine max
  unsure (1)..(450): unsure at all n locations
agcttganattgaacaacgaaagctctcgatattcttctatggtcataacttatcacacggacatccgattcaggcgcataatatatcgagacactcgaaattgaacaacgtatggtctcgagaaattcaaatggtcataacttgtcacacggacatccgattcaggcacataatatatngagatgctcgaaattgaacatcggaagctctcgagaaattccaatggttctaacttttcacacggaagtccgattctggcgcatcacttatcgagatgctctgaattgaaaaccggaagctctcgagaaattcaattggtcattacatgtcacagagaagtccgattcaggctcataatatatcgagatgctcgaaattgaacactgaatgctctcgagaaattcaatggtcataacttgcacacggaagtcaattcggtgcataaatat

SEQ ID NO: 253539 - DNA, 324 bp, Glycine max
tgaaattgaacaacggaagctctcgagaaattcaaatggtctttatttatcacatggaagtccgattaaggcgcataatataccgagacgctcgaaattgcacaacagaagccctcaagaaattccaatggtcataactatcacaccgaagttcgactaaggtgcctaatatatcgagaatgtcgtaattgaacaacggaagcccttgagaaaatcaaatggtcataaattatcacacaaaagtcctattcacgggcctaatatattcatacactcgtaattgaacaacggaagctcttgagaaattcacatggtgataactta

SEQ ID NO: 253540 - DNA, 424 bp, Glycine max
  unsure (1)..(424): unsure at all n locations
agcntttgcatgtttagagatttctatagttatgatggtccaagttctagagagttttaagagtttttgctatgagaaaactgacagagaactgagcgagaagaggaagccgtcctgagagcatgggatgagtctgtgagtgattgtgaggttctagaggtggaggagacatccctactacttgtatttcttcaatccttcatttttctcttccctttgttgtaaaggaagcttcccagatatggagagctagttggttcttccttgtaggtacttgatgtaaatacttgtatatctatttaatgatgttttatgtgttctatgtgctatcaatacgtcatttcagtgtgcttttgccttgatcatgtagatgcatgctttgttaggctcattcaatagtggaaactgatctgattcttagaac

SEQ ID NO: 253541 - DNA, 444 bp, Glycine max
  unsure (1)..(444): unsure at all n locations
ttctagctnttcattggtgtattntgatctccttttttgttctaaattgtgggggtgtgctcaaatatgtggggcaattttgatttgttttcttgcttgattaggttgaattaggggttggtatgagatggccctaggcctataatgcattttgaaacaataggacatgccacattgtccccgttctcttgctattgatgcctagacgcgcgcccaccaagtgttcggtggaatgcctcaatggcattagcgtgtgacttttgtaaggagacaacccatggggtattctggtttgtgcatattttctatttttttgggatatgtattcattcccgaaaaaaggctagagtaattgccccacatatatcctagtcctagaaactgaaatcttatgcaaaaagagcacacaaggaggtgcatattgtgtaaagttaccctctttgg

SEQ ID NO: 253542 - DNA, 358 bp, Glycine max
agctcgacattcatcacagagtgacaactctttatgttctcaacacaatagataggcacaataaaggaacaaaactgtgcataacatggttgagagcatgatgaagtataagaatctgccaatttccttttggggtcaagtagttattgcaacaacttatttgctcaattgatgtcctactaagagactcaaatagaaggtacccgaggagtattgaactgatagaaagccaatggtgagtcactcgggaattattggttctttatgctttgaacatgtgtctcatgcaaagaagaacaaattgcctgataaaagcgagtccatgctgctaggtggctatcatgccactaaaacatac

SEQ ID NO: 253543 - DNA, 441 bp, Glycine max
tataggcgacctcaccaatcttctggaaacccggttgttctttaaaaatgtttagctaattcacaataaggttctccagtggttgatgtctgtctgtgtggacaaagtttgactaggatccaatctccaatcttgaagttaacatatcgacaatgaatgttggtgaactgcttcattgtttcctgcgatttgagcaactttttctgcaaactagctaagatagcatcacaattcaccatgaattcatcaattgcatctatacttgatgatcctgaaagttattgaggaatgataagtggtttcttgccaaaagttatttcatagggcaaaaatcccgtggtggaatgtttcaatgtattataagaccactaagcccacatcaagtatcgaccccaagaagaacggtgttatgcatgaatgcctaaagatattgctcaatga

SEQ ID NO: 253544 - DNA, 450 bp, Glycine max
  unsure (1)..(450): unsure at all n locations
agctnntttttacaatccaaagcggtatctattttactttaaggacaaaaagtaaaataaacacattttacaatcactaaaacagaactatcgtcatcattatcattatttaacctggagtcatgcattttcttcccataatggttggaattagtctcctatgtacaagaaaaggtgaccattgacgggtatcttgagaggaatacaaatggaaggaggctcccaataatagttaaaaatacttaattgtcgacttctaaattcttcatatcattattgctaagtgtaaattttttcttgatgactaatcaagtttcaacattgcaattagtgtgcatcagattnttaaagttggaagcaatggctcacgcctcaaagaatagttgaagatcctatatcaactaattatatatggccaaaataatgtatacaataagggcatttgtttat

SEQ ID NO: 253545 - DNA, 434 bp, Glycine max
  unsure (1)..(434): unsure at all n locations
tcagcttagaaagtatcgtggggattaagcctctttttttattccgttctctcattgggttgttacgtgaaaatttggggtggagagagaaatgggacaaagatattgtcattctgtgtgctacaaatatgttgtcttcgttacttgtacgaacaaaaaatagccttgcagagaatatggtcctttttttgtcttaccttaatacacttgaaattcaaatgataagcaattcaaacataagagggaatgaaaaatgtataaaactttttcaagaatatggtcatttttggaaatcttaatgtatctntgtcttccttcttaaccaacaccaataagcaagcaccagagtgagtgatgagaaaatatgcaattatagagaggaatcacgttctgattcttggaaacttccaaaaacttatcagcattgtcaattg

SEQ ID NO: 253546 - DNA, 424 bp, Glycine max
agcttctccgaagggcatggttatttccagtttcctgaagataactaagaatctcgccaaatggcggtccttctccttcttggaaggtaccacaggatatggtacttccgcaccttcattcacagctttttctcttttcttctctctagcttgttcacttatactctcttcattcttattttttttcatctttttctttttcaacttatttttctttttcttggtcatttaattcttttttcttgaccattatttgtttttctttttcctgattgctttcacctgtctcatcatctttcttttcatcaatacctttcttttcagcagctttcttcttggatacaacactatcctcatcctctgcctccacaaacctcatactccttgtcatcacaactttgcatttctccttgagaatctttct

SEQ ID NO: 253547 - DNA, 437 bp, Glycine max
  unsure (1)..(437): unsure at all n locations
ctgagaactctttgttagctctcnagatgttatggtatccaaggagaaagcagcatccctgaagatagctatactctgatagccattgtgggaatcaaggatcctgtgcgccctgtggttagggaagctgttaaaacttgtttagctgctggaataactgtccgcatggtaactggtgataacataaatacggctagggctatagctagagaatgtggcattcttacagaggatggtgtggccatagaaggaccccactttcgggacttgtctacagagcaaatgaagagtattataccaagaattcaggttgtaatctcattgtaagttctgtgattttcattactcattcacgatgcctgtctttcttatgtgcttaacatggtttcaggttatggcgcgatccttacctcttgacaagcataccttggtaaccc

SEQ ID NO: 253548 - DNA, 431 bp, Glycine max
  unsure (1)..(431): unsure at all n locations
agcttggaagattccgctccgattgattggttcctctcggngtgaggtttcaacggagaacaacggcggtccgtggcggccaccggtggttgtgggtggtggagaagaagcttgggacattggggaagggttttggaagaaagaaggagaaaagaatggttgttttccaaggctacacgaaaaataatgttagacaagtggcctcagatatcttaagaagggggggttgaattaagatattccaaactatttcccctaattaaaaatctatttcactttttactcaagttatgaattcccttaatgacaatcttcttaaatattaattcaaatgaagcaacttgaatatgaatataaagcaataataaataaaggagattaagagaagagaacatgcacactcagttttatactggnttggccacaccctt

SEQ ID NO: 253549 - DNA, 436 bp, Glycine max
  unsure (1)..(436): unsure at all n locations
tagcttcttcttctcttttctctattagagaatttattatttcgtcaagctcttcttgaaatctcttattccttggtctagggattggtccatccatgttgagtccaaccagaccaaactcttcctccttggatagtcctctatcaagttaggaccagaggattttgaatagaagttggtgacctttgttaaaccaattgagttaggtgcttgttttccttttcaaagttgagattttgtattgattaacgattctcgaacaatctttttttttaaaatacttaaggtatttttgattggtattaatgattgttgagaatttagcaagagtattatatggttcacaatagtgacaagtaaattcattttgacaataaattgtgcaatataaatatgcaattaagagtanatttaatagactatgagattatagtaa

SEQ ID NO: 253550 - DNA, 440 bp, Glycine max
  unsure (1)..(440): unsure at all n locations
agctntccctcactcctancaataatttacattatccacaccacccaaaccccaaaagccaacataaaacacatcaaaaccttgaaataacatacttttatgaagctttgaaaagtgtccatggaggaaaacaaaaatggaggatgagaggggaaagaggaggtctcttacctctaaattagtccaaatttgaaaaagatgctcaacaaaaaggtcctttgtgctagggtttcaaggtctcacactctctaatggtaggctgtcttggagaggatgaaaagagtgaaatgagagtatttgtgttgtggttcaattctgaagggtttattactcctcctattttgtctctttgcactctacaactcactaaattcacacacattattactatcaatcaagactcactcaactaggtccaaacactctaagaatgaaccaac

SEQ ID NO: 253551 - DNA, 445 bp, Glycine max
  unsure (1)..(445): unsure at all n locations
ntgtgtaatcgattacatggttttggtaatcgattaccatttgtataaaaatcaaaagatgtaactcttccaatggttntcaatttttctcaaggtcataactcttccaatggttttcttgaccagacatgaagagtctatagaagcaagaccttgacttgcattttaataagaattacttacaactctttcatatactcttttacaacctttgaatctctttgaacatcttcttgaacttcttcttcttcttcttcctttgccaaaagcattttgacttttttggtttccaaactttgttctttcatagaaaaaataagtgtgctattcatctttttcattctcttatccctttgccaaaaagaattcgccaaggactaaccgcctaaattctttntgtgtctctcttctcccttttctaaaagaacaaggactataccgctga

SEQ ID NO: 253552 - DNA, 416 bp, Glycine max
agcttaacagaatggatattaaaggaggggtttgtataatcataatgaaagacaaatacccttggtgcaagagtatagtagattagtagataaaatctttgaaaggagaaaggatggaagatgaatttggcctgaccagattaaagagaattatggtaaagattagtgggcttaaacaatcttcaataccaaatgcttttagctgcaagttatttccacaaaaactcttaatttcctgaatactcgcttggaagtttttttatttatttatttattttttctttttttatttaaatgtggctatttagtgtaggctaatattttcttatatttctcgttgtttcaccttaaagacatgagacacattatgaaggacttcctattagatatctgttggcagggcagatctaatattt

SEQ ID NO: 253553 - DNA, 434 bp, Glycine max
ttacatcaatgcttaaggtagtgcagggtatattctagattatttcacattaccaaaaagttactatgaggcgaagatattatgtttgataggtatgaagtatccaaaaaatcatgtgtgccctaatgattgcatactgtacagagatgagtttgaagaaatgcataaatgccccaagtgtggggtattacggtacaaagtgaaagatgactagtgtagtagtgatgaacggctccccagcaaaggtgttatggtatcttcctattattccaaggtttaagagattgtttgttgataaaggtgacacaaaagaccttacatgacatgcagatgggagaaactgtaatggaatgctctgtcatccgattgattctttccaacaaaagaaaattaatcatttgtatccagattttgggaaagaagcaagaaatctt

SEQ ID NO: 253554 - DNA, 442 bp, Glycine max
agcttgtctcagtgtttatgcgagacggagaccaacatgctagctatcatcgccaagtaccaagaagagttaggtcaagccacggcccacgagcatagaatcgcggccaccgctgcctctgtcagttcggctgccgaagcagacccgactctcttggcaactgcgcaccatcctccttcaaacatagtaggacggggaagggacacactggggcacgatggcaaccctcacctgggatacaaccgagcggcttacccttatggattgccgcccaactactcaccacccgtcttgcaagaagatgcgggccacattgcttctcccgtccttgaaagagagcctcctcaacagcccgacgaagtccacaaagaccctcaagactatgctcgaagggatgtcaagttctatcccccgatccccgaagggccggcaccaggcacgt

SEQ ID NO: 253555 - DNA, 452 bp, Glycine max
tcggaagaaagtgatgaggtacaagtcctaaaggcagagcttgttatagcctgtgtagtcgaagagaagttcaagtccatagccatcaaagtctgaaaagagtatgatgaactaagggatgtcaatatggccaccgatgaagccttggaatgagaaaccaagaaggcccgaaaggaagaacacgaccaaatcaaatttttgaggggctttatagggcagcaatagtgagctcaaactccgaagaggtgaaaggaatcatcacgggtcaaaggcatgatctggaaggacgagctaaaggcttgccttatgtcgaaaagaaatttgtcccaacagttaaagtgagactgaagggaatatgtgggccatcatcgataagtgcaaagagaagctaaatctatcggcgactcatgagcacaggctagaggatgagtacgcccagatatcagcagaaa

SEQ ID NO: 253556 - DNA, 415 bp, Glycine max
agcttgctggagaatattttcattccaaattcttttgatatcacctgctgttgaaaggttataattttatttgcttggtgaaaacttagtaatatttgaggatgatgatgacattgatgttttgctgtccaagccaactgttaaagagtctatgtttacttcttagctacaagctaacaacattttccaggaaggaaaagatctaacgtacttgcaattcatttcaaagtttacacacattgccaagtatagatgttggaggccatgtaaaggtggcaatacaattggcaggcttaattgggtacctccaagcactggagaattgtgttaccttaggatgatgttggttgtggttaaaggactaaccacttatgaacaaatttgcacagttaacagtcaactgtattcttcattt

SEQ ID NO: 253557 - DNA, 425 bp, Glycine max
acctatgatactaagctaggctaatagtctaatttcatagctttaagcttttctattccaacatgagggatctgaggatgaagcttagtttaagttagtctaaatctatgagggctgtctaaattgagcctagtccaacaagagggatctgaggatgaagcttggattgattcagtctaactagggatcgaggtttagtaatttaggctatagtgttgaacacaaaagcatgattgattagagaaacatctttatatacatcagttggtttgttagaaagacccaacatatttacttactactgtcaattttacttacttgcatttttaccgtttttatcctagaattagtttaattctattccaaatcatcaattatcaatgtttctttcaacaatgccttattcctgaatttaaccctgtctt

SEQ ID NO: 253558 - DNA, 454 bp, Glycine max
  unsure (1)..(454): unsure at all n locations
agctntacagatttacagttactagcattaattatgtatttatgattagaagattatggttgaatctgttgaaatcgtgcatgcaatagctgcttatgtggatgttttagccaatttttaaaatttaaaattgtctgttgcttaggatctattttgtaggagttctgattttgttttttatcagactagaaactgttttagtcatgcctagggattttttgttttgtatatttaactctaaccaagagcaaatgaataacaactatgtatccttcataaatatatgtgctcttctctgtttttgatctaatattcaacaaattggtatcagagtcatcatcttgagggatctgtgagttgagagaaaccataatggaagcagacacaacacacataataccaccaccagtttttgatggtgaggagtacgacctatgggctgcaaggatgactt

SEQ ID NO: 253559 - DNA, 454 bp, Glycine max
  unsure (1)..(454): unsure at all n locations
agctttttaatcatctgtaaggatgattgggtgttagacagtggctattcctactatagacagcttttctcctatgtttaagttgtatgtaacttgtattttcttcacaaatgaggcatgcatgatgacccttaacactgtaaccgctgagattctcatatgctggaaagtcattaatggtacaaaaaagcattgcacgcatttcaaaggtcttcttgcgaaacgcatcaaacactacaaccccgtcgtcccacaactttctcagatcttcaaccaacggacttagataaacatcaatgtcatgtcctggttgtcttgggcctgatatcatcatagacaacatcatgtattttcgcatcatgcacaaccaaagaggcaaattgtaaattactagcagaactggccatgaactgtgttgagtgcttcangtgccatatggattcattccatcact

SEQ ID NO: 253560 - DNA, 423 bp, Glycine max
  unsure (1)..(423): unsure at all n locations
agcttcctctctaagcttcttatccaatactctctctnnggggtgaagcttctccttccatggcttattcccaagtgaatgacgccttctctcacctcttctcctttatcttgcgctacatctccatggtgaaaaatcaccattgaaggacctcattgaagctcaaagatccaaccttcatagaagcttctcaagcaagcttccatcactaaccctatgtcgtaaacccttaacactgacccctatatatagaagtcatattcactttcgtttaacacatccacacaacactatcttgctttattactttcttccaactttgcaaacacaaaccctctgncacatttctttctctattattactctattacacaacgtgtcttcctttattgtcaaatggttagtgcgcttcaatggtcatat

SEQ ID NO: 253561 - DNA, 404 bp, Glycine max
ttatttaaattcctaggatcatgaacttttatttgtgtcctactatgacttgagaaacaaaggtgatcaaataacaagcaaagatttaataggtactaggttgcctcctactagcgcttctttaacgtcttgagtcggacgcgtgatgacttgtcggtcatggacctagaacctttgctctcctttggctttggacttggtcgactgctggtcgaccacgggtcgtaggcaacgctccagcctttgtatatgagccgaggggctctggatgtggcggcagagcgtctattgcccgctactggccatccccaggctaatgttgatgcaatctcttatcgctctggcaaacagaatgacgtcttggactaaacggctacaatcttctgtgtcctgcttttggcttt

SEQ ID NO: 253562 - DNA, 395 bp, Glycine max
  unsure (1)..(395): unsure at all n locations
agctttagaattgcnattgggcacctacttctaatactctatgttgtccctatgtatataaaacagtcccacaatcccaatcttacaaaatcatattcatatgtcattggggcatttcaccgaacacttggtgggcgcgtgtttaggcataaattgcaagagaatgggggtaatgtggcatgccccattgtttcagaataccatataggcctaaggccatcccctacaaccctcaactctaacaaatcaagcataaaaaaccctaaaactgccccacaaatatgagcacattctcacaatttagagtgccaaaagatgaacaaaatgcaccaatggaaagctaaaactcaaggattgaatacttacttgctggagtgagtaggaataccaaaaac

SEQ ID NO: 253563 - DNA, 434 bp, Glycine max
cgtagaagcaaaaggccagctatggtgttcaaggtgtatttttataatgcctatgactcactctcatgggtttttttggattatatgctgcaaagaatgggtttttgccacaaatggagacactggatgtctgcctgtctcaagtcagcaagcatttctattcttatcaatggcagtcctacaaaggaatttgctcctactagaggtttgaggcaaggggatcctttagcccccttactctttaatatagttggagaaggcatcacaggattgatgagggaagcagttcagaagaacttatatagaagctatatggctggaaagaaaaaggaacccattaatattttgcagtatgcggatgacacagtttttgtgggtgaggctgagtgggagaatgttattcgtttgaaggctatgctcaggggatttgaatt

SEQ ID NO: 253564 - DNA, 369 bp, Glycine max
agctcggcgagagtacatctgtctctatttctctatttgacatgtatgcaaagggtggagcagtggaagaagcgtaccatgtgtttagcggtatgaaagggaagaatgtgatttcgtggaatgtcatgattcttgggctcgcatcgcacggtaatggagaagaggcgttaacacttttcgcgaagatgttacaacagaatgtggagagaccgaatgatgttacgttcttgggggtgttaagtgcttgtagccatggaggattggttgatgaaagtacaccatgtattgatattatgggcagggactataacatccaacccacaataaagcactatgggtgcgtggtggaccttttgggtcgagctggtt

SEQ ID NO: 253565 - DNA, 447 bp, Glycine max
tgttctttgattttttaagttctttaacaagcttagaactatatacttgtccttcatttaactgtctttgggcttggtggtcacgatcaacaaagtactttcgacacctactatatgttgatttgaccaatgctgttatcggtatgttgcgacaatccttcaataccttatttatacattctgagaggttcgttgtcatatggccatatcgacgtccttctctatcataagccatggtccatttttcctttgaaatgggatcaatccatgttgctatggctggacttagttgacggaatttttctaaattttgataaaaaatatgcttgcaaggagtgtagcctgcatgaaattagttagccacaataatttgaagtatacatgaaagttaaattaacgtgaccatgataaatgaaatcttacccaatcttttcaacatttcttttt

SEQ ID NO: 253566 - DNA, 415 bp, Glycine max
  unsure (1)..(415): unsure at all n locations
ggaccttaagcaccgcagctgcagctgcnagtcaagaagaaaaatttcttctgtttgttcgaaaccgacattgctgcttcggatgcaagtaaagcgaagaacaaagaaatagcgggtacagtttgcgtaccttctataagactccggggcggagtggcgttcgcgttcgatcgtcggttccaatcgaggatttgacggaaatgggggagaaggtgaggagagagaaagtacagagagtgtatcgatgaaggcgaattgcgcgcgagagagaaaaagagaacatagtagaagggggttggtgttggttgatacttgcaggcacctatataatgtaattgattattgctgtctgcaaatggttctaccccattatttcatttcataacgattacttaactctggcgttgactgctcc

SEQ ID NO: 253567 - DNA, 397 bp, Glycine max
tatcaaatctcacagtagatcgggaaatgtctgaggtgatatctttcacagaaggggcgaacacacggataggaagaagtgcaagccacatggctgctattacaatcctgtagtatccctttagcatcaaagcaagggcagcacataatggacacatcatggatgccacagacaaaaataagggaacaagaccaaagagtaacttcatgggcaaccacctgatgaaatcttgctcagcataacgcgatgtgagaattccaataaacatcaacaccgatgatgaagatgtgatgaaggatatagcgtctgatacgacgataaacgtaaatgtgctttcacctaagaagacaggtgggccatgcttatcatcggtaccccctggggcagtgaaggctgc

SEQ ID NO: 253568 - DNA, 431 bp, Glycine max
  unsure (1)..(431): unsure at all n locations
agcttctccatgatcncattggaaggcgcattctattccatggctgcttcaaggttaacctcatgcgtggcggtaacttccgctgcggtggtttccatgtccaccttctccgatcgtgcctacgccgattcttactttcgactcccgttcttctcttctaaatcttccagtgagccctcgccgccgaatcagccctctgactccaattccgagcctccgccgcccgatgaacctaacaaatcgggtttcgacccggaatcgttagaaagaggagccaaagctctccgcgaaatcaatagttctccctactccaagcaggtttttgttttattntttggtctaacgaactcagtgctctttgcgtcgggcatgattgnnggtttctgaatgttttgctcttgtttcgcagctgtttgatttaatgccaaaac

SEQ ID NO: 253569 - DNA, 443 bp, Glycine max
  unsure (1)..(443): unsure at all n locations
cttcccacgaaaattaaagntntaaatnnctatttctcacataattgcatgagaatgtgtgtgtgttaaacccaaagttaaaccaaacaaatcctaactatttaaaaaggaaacagaaaataactaacttctaactgatgataatatcaaagtatgtaatctgtaatttgattcattatccgggggaccaggagatgttggatttgtcggtgaactcaatatttgttttgattttgagggaagcaatagtcgttttcttcgttgcgtaattattgatgatcatccccatccactttgttgttgttaggctggaatattntgtaaacctcgttaaaatacaaacagtgtcgatctttttctgaacttgataactatttaacctgattgtgaaacagccaatttttggctttttatttgtcgttaaagaagacagttgattgtgt

SEQ ID NO: 253570 - DNA, 392 bp, Glycine max
  unsure (1)..(392): unsure at all n locations
agcttaacacttaaacagagttgatcttattttntgaattgcgttctanaaaattctttagattacaagcatactcaaatctctcaattcaaagtagcagcatatcttgaaaaagtttcattagctatcttcgataatggcacacgcgtttcattttgttatagcaagaattttatctattttttccatgaaaaaatgaggcataggcctttggtcttcctttgcttatcaaacaagataatgaaaacaataaaaaaatatttataaaattaactaaattattaatatttctacactcgtcagcaattcaatgcagacgtgtacaacatacatataaacatataaacaaggcatctattgtgaacgtatagacaaaattcctatgtattaac

SEQ ID NO: 253571 - DNA, 440 bp, Glycine max
ctcaaagctagaataactatgctacaatatttattatattgtctatattgatcaacttgagctatggaagctagaatgactatgctacaagcattttattaaattaaaacatgtgataagctattaattaacataagatataaatatgcgtttgattcatcaaatatggttcatctttgcttgaggtctccaaaaattaaatttatgagtcaagtaagttcttagtccttaacattttcagattttcctattaaaaaacatttccaaatttcaatctttcaaaaaacgtgtaacattatgtagtatataactataagtactacagaatatttcaatatctattgtgagactattactctcgtgaccgttatttataagctaccggctcttatatataaggcgaagataatctatcaaggctataacacctcttacaaaca

SEQ ID NO: 253572 - DNA, 412 bp, Glycine max
  unsure (1)..(412): unsure at all n locations
agccttgacttgagtcatcatgttattatatttatgtgaccatggcatgaattngtaatcatctttttcaacatctctttcaacaatcaagaaatctatctttcaatcttctttctcaacatcattcaactctttcaacagattttttctgattctttttctcttcatctttctaaaagtttttgttcaaaactttttcttccaagtaaagttctttgttcaaaaacttgtgctattcatctttttcattctcttctccctttgccaaaagaacaaaggactaactgcctgaattcttttgtgtctctgttctccctttgcaagagaattcaaaggaccccgcctgagaattctttngattcttcccttccctttaaacaaaagatctcanaggactaaccgcctgagatat

SEQ ID NO: 253573 - DNA, 441 bp, Glycine max
  unsure (1)..(441): unsure at all n locations
nttatttctttntatcttttgaggtcaacaaaagtggatctcttgctcctacgtaccctccatcgaagaggaaatcagacctacgtaattctttcaaaaggggcgaatcaagtgattctttttacttgaaaaggggtcgtttaaggtgttggaccttaaaatgatccattttacttggtgagaaagctaaggcgttggacctctaaacgttttttcagtgatttttgcggacaaagcttgattttgtgagttgattttagccttagtttcacttttgtatttagtcaattcaatttaagaaagaaaaatcccaaagagaaacgtccgattgatttttttgttttattttactaaaagatattttttgattattatattattattttacctcttttttggtttccaacgctggtacggcatgaccgaacggtcgaattcatt

SEQ ID NO: 253574 - DNA, 451 bp, Glycine max
agcttcctcgtgaggcttctttgagaagctttcttgagatgcttctttgagaagctttcttgagaggcttctttgagaagttaatgctttaactaccaatatccttctaataactaaactcacctccttgaaaataaaacacggataaaataacacaacaaatataatcaaacatcaaatataattactaatagtattttagggtgttacagagacaggggcagctgagggatgatgaatttccgaatttccttggaggaggcggagccatatgaccggaatcgccaaacttgtgatttatccttcattattaatttcagttattttattatttcccttgtgatctgacattatctacttccaattattatgtcaattgtgattaaactgaatatgcagttgtctgtcgtattgcgagtaattgatcgctttgggcatatggtcgtactta

SEQ ID NO: 253575 - DNA, 453 bp, Glycine max
tctttgagagaacttccttgagaagctacatcttagctactcacacccatctaaaaactaagctcacctccttgagaagcttccttgagaagctagaacttagctacacacacccctctaataactaagctcacctccttgagaagagaagctagagcttagctacacacccctataatagctaagctcacccccatgacaaaaatacatgaaaatacaaaaaattgcctaatacaaagactactcaaaatgcctcgaaatacaaggctaaaaccctatactactagaatggccaaaaatacaaggtccaaatgaaggaaaaacctattctaatatttataaagataagcgggctcatacttagcccatgggctcgaaatctacccttaggctcatgagaaccctagggccttcccttggatctctgacctaatctacttggagtcttctatc

SEQ ID NO: 253576 - DNA, 451 bp, Glycine max
  unsure (1)..(451): unsure at all n locations
agctntataaagcttcataaatatggtaaccgactctttnttggcgatggactgaaggaacttaggagaacccatgacattcacgaaagtgttctcatgccttttgttggaagggacaaaaatactactttcagtgtggaagttgtgggacctctacaccaaagggcagccacaaccataaggcaccatgtttttaccattgatgtctctaaagatatgatacaacacaattatcaattggtaggtctttgttaatataatcataatcctttatattatttattgttgacttcttatctttaatcaccgtgttccttctaacctaggttctgccaccagaggcttcaatttatttaactgcataaaaaaaatatatgattgtagatcgtggtagtggtaggcatcacaaatggatgatcaccatgaataatggcctatcatgtgttgctga

SEQ ID NO: 253577 - DNA, 449 bp, Glycine max
  unsure (1)..(449): unsure at all n locations
tctaaactntatacaagaatgaagctctgataccacttgttttttttggcctcagatatcttaagaaggggggttgaattaagatattccaaactacttccccaagtaaaaacctatttcactttttatttaagttataaatttccttaacaatgaacttcttaaatattgattcaaataaaacaatttgaatatgaatataaagcaataataaataaaggagtttaaggggagagaaagtgcaaactcagatttatactggttcggccacacccttgtgcctacgtccagtccccaagcaacccgcttgagagttccactatcttgtaaattccttttacaagttctaaacacacaaggacaatccttcctttgtgtttagaattcttttacaacaagagaccctcggtctcttaatcccttagagaattagaaggagaggaagaatg

SEQ ID NO: 253578 - DNA, 448 bp, Glycine max
agcttaggttaaattagtctaaactttcatattctatttaagttgagcctagtccaacaagagggatctgaggacgaagcttggattgcttcagcataactagggatcgaggtttagtaatttaggctacaacatagaacacaaaagcatgatcgattagagaaacatctttatatacattagcttgtttgttagaaagacccaacatttttacctattgttgtcaaccttacttacttgtattctttactgtttttagcctagacttagtttaattttgctctaaaccatcaattattaatgtttctttcaacaatgccttatttatgaatttaaccttgtttaatactagttccctgagttcgatactcggattcatccattttaatttaaaatacttgatgatctggtgcgcttttcggcaaaccagaattcccttgaacatatt

SEQ ID NO: 253579 - DNA, 442 bp, Glycine max
  unsure (1)..(442): unsure at all n locations
tgctctaaatntacattgatgtttgtatttatgggaggatgttgtacgccattcttgttttaagagtagtgttccactggtaaaactaactctccaaatttttgccttcgcaggaaatggccccgaggaagcttgcctcaaagaggtccaggaaggataaggcagccgaaggaactagttccgctccggagtatgacagtcaccgctttatgagcgctgtacaccagcagcgcttcgaggccatcaagggatggtcgtttctccgggagcgacgtgtccagctcatggacgacgagtatactgatttccaggaggaaataaggcgccggcggtgggcatcactggttactcccatggccaagtttgatccagaaatagtccttgagttttatgccaatgcttggccaacagaggagggcgtgcgtgacatgagatcctgggt

SEQ ID NO: 253580 - DNA, 455 bp, Glycine max
agcttatgggatatatcacctccttggctatgttactgaaagctcgaatatattgctctgcaatccttaaacttgctgcctgcaaatcaaatgacaatattaatccctttcctgttattccatgggaatcaataaggttaaaacaatgtgacaattaagaggcagttatatacaccaaaattcaccacattttttccccagcttcggcgataacaccaacatcaacataataaacccttctacctatttagatggtcacatatttgaatgtcttcaagaaatcaaacattataactagtcaaccagatcctgtattaaaactgactaggacaatcaataatgtggtttacatacagaagtctctcagtcactcacacatgcagtctatatggctggaatggcaaaccaagaataaaaaaatgctgaccatcatcgacatacaaacaatagaaatc

SEQ ID NO: 253581 - DNA, 448 bp, Glycine max
  unsure (1)..(448): unsure at all n locations
cgaataagttttatcttgtgtctagtattagctgagcttgtttttatgtagcccttctctccacttctttcatttngaatgatattgtcacatgaattgtggaattaatatcaattgtgttgctactgtcagtattgtggatggatttcatgcttatctctgaatttttaagttgcatactactgtctgccatgcagccaagcttggtggaacctaaatgagttaatttttgcaatattaaatgtgtttttaatgatgaaccaagatttgtgggtcttccagtatgtgccatttgatgtattttctatgttcatattgaaagaagaattctcaaatttggttgtttgcatcatactttactagttctctttcattaacatcgtgtttggaggaaaaaaatgtagccgcctattngcattaatgagatattgttcaacactgataatga

SEQ ID NO: 253582 - DNA, 358 bp, Glycine max
  unsure (1)..(358): unsure at all n locations
ttaagcacctgagctgcaacttcttgaagcttctttataacttttgcttaacttcccacacccctctaataaataaactaacctccttgaaaataaaacatgaataaaataatacaacaaatagaatcaaacatcaattataattactaataatatttcagggtgttacaatgttggttgtattatgttgggaactctataatgtccaatctagtttgtggaggagatgttattgtgaaggcatgacttgtgtttccaaattcagcttatgcaaagaataacttcgtgtgtggcttaattgtgtatagttaagttgattgtgtttaantagctctaatgtaggatgaaattaaaattg

SEQ ID NO: 253583 - DNA, 431 bp, Glycine max
cgtagaatggctagacatgatacatgtcagggtttgttttggttcaaggataaaagggatgccccacattatttccatgacacacatgcaaaaatgatgatttggaaactttatgcaaaactggtcatgcatgcacctatgcggacactcaagtgtcaaatttttatggtcatgtgatgctagggctcaggattcgtttcctctattttaaccaacccaatgtttccaaaatatgtacttttatcaatttgtgcattcatccgagtccatttcgggcgtgcggggaaatttcacagcattcacccttcatgtgtagacacattttccaaaaattggttatgatcaatgaactttttcaaagaaaagttggaaatcgtctctttcaaaagcatgtcgtttttatctagaaacttattttctttttttttttt

SEQ ID NO: 253584 - DNA, 453 bp, Glycine max
agcttcctcaatagttgcatgtagggcaactctgctcattctttagtcatgcaaattgggggatgcagtatttatggtggggctcataagtcaggcatgtgcatggctcaggacgatgcatccaaagaagtcaactacatggccaatcccaaccatcaagggtttcatcaaggaggacctccaggatataatcaggggggaaatttctctcaaggccaaggctgtagatcccattctaggaataaattcaacaaagatcaaggtggtccatccatctggcctcccaaccaagggcctaatctctatgagaggaccaccaagctagaagacactctggctcaatttatgcaggtttccttgtcaaatcacaagagcatagagtcagctgtcaagaaattggaggtttaggtgggccaactagctaagcaactggctgaaaggtccacagggagt

SEQ ID NO: 253585 - DNA, 424 bp, Glycine max
tcttcattgtggattgggctctggctagcctatgttgtattgaagcatggatatgggcttgagtgaatagcagggaatccactgcctcgacggtcgtcgtaccttgtaaatattgtggtactgacgggggtggcttaccgtaggtggcttcgaaaggagatattgcggtggcagaatgaacagtgctattgtatggccattcaactaatgtcaggaagtcaaaccattgtgagggcttatcatggatgaaggcacgaaggtactattctaatgtgtggttcaacacctctgtttggtcgtcggtctccggatggtaggaagcgctcatgcgcagttagatgccgctgagacggaataactcacgccacaactgactaaggaagatggtgtcacgatcagacacgagggaatccgtgcagcttgc

SEQ ID NO: 253586 - DNA, 135 bp, Glycine max
  unsure (1)..(135): unsure at all n locations
agcttcatggccgaaaatccgaggataagcactangtgcctcattctttggcgccccaaaaagaaggaaattaaaaacatcaataaacaatatattacataacttaattttgactatcaaatttacttgtgatgg

SEQ ID NO: 253587 - DNA, 414 bp, Glycine max
accatgaaactaagcttttgcgtaccgtcttgggctcaaaaacccaaaactaattcttcttattactagctattttgaaggctttagttcctgaatgtacaactttcaaattgctgttcgttcccctctttgttttatgcaaaaaatgaaatcaatatcaaacaaaacatgcatacaattgtcatcgatattgctacttgaaccataaggaataccatctaaagaagtacttcaaaaggcttatttattttttttggtattttttgaattacaattcgacttcaatatctaattttttaatgcacttaagcggtggatgttgacgaacagaacgataaggaagaatgtaatttatagaagattaaggaagtgtcacattcttttttcctcatcaaggaagtgtcacatgaatgc

SEQ ID NO: 253588 - DNA, 440 bp, Glycine max
  unsure (1)..(440): unsure at all n locations
agcttgcaacatgagtggtttagatatggtttatttactgcaacttcagtttaagactacatgtgtttgttagttattgtgcgcaaaattatattaacagtgtaagagtttgatgttactcattgaataaattatatgactaagtaaattcaactgatattttgatgcatcaatgcttatcaacctcgaggtttcaattttacatcgaatgcatgtatacttcatgcaatgtttatacttagtgccataagtagatgnnangnaactcaagtttagtgtgactttgtattaaattctctgttgtggttaaatgatatgatagtgtaatggtgaaacccttaattntgagtcatgataatcaacttctaaggctattatctataaggggtcatcaatttgcatgtgtgatattttgaccataacacgcttcatgtactgag

SEQ ID NO: 253589 - DNA, 441 bp, Glycine max
  unsure (1)..(441): unsure at all n locations
tgtatggcaatcttgttctggttttaaaattggtgtcttattnttatatttaattagttctgttgctctaatgatttttttttccaattaaactagtggagagacaagcacatgtctgtccacatttttattttttattatatattaaaaatttatatttacaaaaagatgtgaaaatgaggaggatatgacagactaaatagaaaaatgatagaacgaaattaaaatagtttatatgagttaataaataagtaaatatttgtaataatcaatataaagaatactagcaggcataaattaagaaaataaaaataatttatttcgtattctagcctaatccattacaatgtggaccaattaaaataccgatcacttgtaacaaatcttaaacagcatgagctgacccgcttaccaattatattctcaccttatgcttattat

SEQ ID NO: 253590 - DNA, 442 bp, Glycine max
  unsure (1)..(442): unsure at all n locations
agcttgtagcaaattcaaactgcaataactttttactcggatgtctgattgtgtcctgtagtatatagagacgctcgtaattgaaaccagagctcgtagcaaattccaactacaataactttttactcggatgtctgattttgtcccgtagtatatcgagacgctcaaaattggaaacggaagcttgtagcaaatgcaaaccacaataacttttaactcggatgtccgcttaagtcccgtaatatatcgtgacgatcgaaattgaaaacataagcacttagaaaattctaacgacaataacattttccacggatgtccgattgtgacccgtaatatatcgagacgctcgaaattgaaaacataagctcttagcaaattctaacgacaataactntttactcggatgtacgaatgtgtcccgtaatatatcgagacgctcgta

SEQ ID NO: 253591 - DNA, 431 bp, Glycine max
tctatattcaaattcgagcgtctcgatatattacagcactatatcggacatctgagtaaaaagttattgtcgtttgaatttgctcagagcatcttttttcaatttcgagcgtctcgatatagtacgagactcaatcggacatccgagtaaaaagttattatggtttgaatttgctaggacctactattttcaatttggagcacctcgatatattacgggactcaatcggacatccgagtaaaaagttattgtcgtttgattttgctcagaccttatgttttcaatttcgagcgtcacgatatactacgagacactgtcggacatccgagtaaaaagtaatagtcatttgaatttcctccgagcttctgttttcaatttcgagtgtctcgatatattacaggactcaatcagacatccgagtaaaagttatt

SEQ ID NO: 253592 - DNA, 289 bp, Glycine max
  unsure (1)..(289): unsure at all n locations
gccctagggacaacaaacacttcacttacatcaaaaaatctcgatgggactaagcgccatggagctagcggcaacgacctatcaagcctatcaccctgacctcctgctagaatacgcactctcaccatcaagaactaaaaattcctgaaacggattggaggcgagaatcacctaaatgtctgcaccactatcaaaatacctctaatcatatacaaacgaatcttgtgagccaatcagagcataatanaccgacacctccagatctgccttatctcgaatcacatgcgca

SEQ ID NO: 253593 - DNA, 457 bp, Glycine max
atgtaatcaaaagaaatcaagcatactaccatgttattataaacacggttcccaatttaattcaaataaaagattcgggctgaaatacgaattaagcatgtgcttatactcatgatagacacataaataattctgacttgaattcaaattaatgcattatgttagctaacatgttacaacatttgaatgcattactacacattattacattttataacatatagcatgcgtcatgcacagatattaatatatcttttctatgttaaatatcttactaataagttatatatcttttaaaccaaccaggagtgtaaaacttaaaaataggatgttgaaaaatattaataaaccttataaaatatcaaatgagcaccaaaacatatcacctcaaattatcaaatgaatttaacgaatactcgaattcatagagcttgatcaatatatcacagagtcttat

SEQ ID NO: 253594 - DNA, 363 bp, Glycine max
ttagccatgggagtcaccagcgacgtccaatgtgttcgatttatctcctcctgacagtccgtatactcatcctccctgagctggatgcgcctctctctgtggaacgaccatcctttgatggcctcgaagcgctgatggtgctcgacgctccagaaacggtgactatcaaactcgggggtggcactggacccttccgctgcggcgtctcttctagacctcttcgtggaaagctttatcggagccatttcttgtatggagtgaccaaaaacactaagaagggaagcagaagcgcaaaaatggtggcctaagggtgaaaatctgcaaatacacggggtgtttgcattatttgaatggggggggggg

SEQ ID NO: 253595 - DNA, 374 bp, Glycine max
cttatgcttatattatttatggcaatgttgagctgggggagctcgcaactggtaagatattacacaagtatcctggaagctctggaagctatttattaatgaccgctaacttgtctacctctttgggcaggtggaaggaggcacatgttaataaaatctgatagcatggtcaaaggattgggttaaacgaatgtggctcggagccaagttgaagtcagcgatagctatcatacatttgctgcaggaaatcaatcacaggttgttttgtcattatctataaggcactagaagaactaaatcttattctttaagaagctagcttatacagcagaacccaatacaatatcagtgaatgattaaacctatcgaaaaaa

SEQ ID NO: 253596 - DNA, 465 bp, Glycine max
cgccttgatcattcacacagtgttataaacatcatcgaccaatctatctaaataaatatacataatatatatttgtacgtatttcatcatattaacctttcatgatttactaaaaatacatgtttgtttactgtgagataataaacatatagacgtatataaagttatgatagtaaatttattgaatgatacataaatgtcttattttcaagctttattgcaaaatgaacttttaaataagttatcgtgatagtcatgccaaagtataatgagacagaagccctcgctagaagtatagtcctgccacaaacaatgttatatatcccttacgtatatcatggaatcctatgagcctgacactcaacagtatgtgaacctaaaagaaattagataatgactaagtatactagaatgaggaatagcctcacaagctttcgtccaaactaatagtatgataactcacta

SEQ ID NO: 253597 - DNA, 454 bp, Glycine max
tcttatcttcagatgatgcagatgggctagtagctacctcatgcactcttctaatgactatggcatcataactggcgctaaactgctgtgagttggaggccatcttttcaattaaatatctagcctcaacacgagtcatgtcttcaagggctccaccactggcagcatctatcatacttctctcatattactgagtccttcataaaaatattggagaagaagctgttatgaaatctgatggtgggggcaactggcacatagtttcttaaatctctcccagtactcatataggctctcttcactgagttgtctaatacctgagatatccttcctgatggctgtggtcctggaactagggaaatttttttttaagaatactctcttaatgtcataccagctcgtgatggaccttggacaaggtaaaacaaccagacctttgcactcctctaatgat

SEQ ID NO: 253598 - DNA, 397 bp, Glycine max
cacaaatttcatcctttttacctgaaattgaagatgaaacacattaaaatcacaatgttgggcatttctgctgaacaaaattaagctaaacctaaaaatatgtacaaacctacaaaaagaaccataaattggggaaatgacaaacattttataacacttttctatataaaagttagtcgtaaatgatgactaacaaactcccccaaatttacagttttgcttgtcctcaagcaaagaaagaacagttcagttgtcctcatgtgacacgatcacaatggttattcaaattgtgtttgtttccaagcattcagtaacatgacacaagtggcatacaatgcttcaatcaacaacttttcataagatatgcaacttttcaaagatatgaacatgataatta

SEQ ID NO: 253599 - DNA, 414 bp, Glycine max
actcagcttcggaacgtgtactgtagcctagccatgcttctctgtgttcttacctacctctgaggattcaattcaattacacaccttcaatttttcaaccattttgctctttgttgagtagttttttttccccttctgaggcgtatttgtgtggcttagctgattctggttcattttgcatgtgctatttgccttcaaagttgtatgtaatgtgaattctttatgggttttctctgttgttgcttaatctatttgttcaattgggttgcttaaattttgaaactttatgcatctttagtttgcagatgcatctggggtattactattcactacatagttgtgtttttcttctttctagatggtaatagtattatggggatttattgttacaatcattggatttattgaatcgat

SEQ ID NO: 253600 - DNA, 354 bp, Glycine max
actacctagctcgtgagaggagggtttttcagtaatgttgacttgaagagagtgaagttgctaggtccaaaaacctgtctcacggtatggagacagaaccaacatgttagctatcgcagcaatccagagagctaattaccctgcccacacatatgggggacgagaacccagtgacgcggaaaggagctaagaagggatcgactgtactcagagcacatgggatggaccattgctcttaccttgacggagtagacttccgatgctaccagacagcgaggcgcactatcgcccgagagatcacgctttcgtatgcagaatgaaattatggcgttattaaacgtaaaactgatgtct

SEQ ID NO: 253601 - DNA, 445 bp, Glycine max
  unsure (1)..(445): unsure at all n locations
taccaaacatatntcagactttttattggtgctcgttgttatgaaagtttataacatgcattatagatctttcatcataaattaaacataatgacctgtaaaatataattcgtagtggcttttgtcctgttgcctttctgaaggaaaccagtaaatctctgcacataaaaggacacatgaaaattataaactaagatataatataattgaaaccaatcatcaaaaaacctagaacaattaatattcagaattaaaatagtaaaattgatattattagtaccggatcatgccaccactaactgtgccacgaacagggtcttgccaagttttgtacaaatcttgtataagttcctgcctatgagcttgagcacatactanaccggcatatttngtcacttcgggccagtcctgtgatgcgactacctatagattgggtaaacattat

SEQ ID NO: 253602 - DNA, 478 bp, Glycine max
gacctataaaactaagcttatctaactgagaatgtaattttgtacatttgttagtttttgaataacatgaacaatttcttcaaaacaaagggggaattaacgatttgtaattaatcttctttttacttccttcttattaatttattttgctcatacattgaggtgcaaacttattcagaatcttcaatgcttgattgtgtatttcactaattcatggctttatctctcccttctctacaagttaactatcaattctgttatttctaaatctcttttgaaacttgaaagctgtataaacttaaacttattgcaggcttgagttatgctagtacttcctctaccttcaaaacgcaaaccacttcttattgtgcccatcatttgaacaagaatatttcagaaagcacatttgacttgtactccatttcattcaaccttgttaagtgattcatgcatgatattcatcaccacatgatgtgat

SEQ ID NO: 253603 - DNA, 347 bp, Glycine max
ttaatcggcaaaataattattgcagtttaatcatttgggcctacttgactaattctgtggtttaatctaatttccaaagaaatataagaaattgggcttggatcccgaattgggctgaatcggcttggacttgaagagaacacacaattttatttggccgcccagtttattttatttcatttttggctgcatttttgtaattgggccactagaccttattgggcccaaaaatcatatttgtaaactttggggcctaatgacctttaatgagcccagctgcttaggtttaggtgtaagccggttactgctgacgtatagagatactatacggtttcattttcagtatt

SEQ ID NO: 253604 - DNA, 447 bp, Glycine max
  unsure (1)..(447): unsure at all n locations
gtgaaacatgtaacccttggcatcatcaaaacatcatcttgttcctttgtctacacagacgacgtcaagtcctatgaagcacaaacaaggacattgagtcctataaaagacaaaagacattgaagtctttgaaatgtaaatgaagacgttgtagtcttttgaaagcgtaaatgactaaagacattgaagtcttttgaaatgtaaatgaagacatcatcgtcatttaaaagtgtaaatgactgaagacattgaagtctttgaaatgtaagtgaagacattgtttcctttgaaagcgtaaatgattgaagaccttgaagtcatttgaaatgtaaatgaagacattgtcatcttttgaatgcgtaaattactgaagaccttgaaatgtaaatgaagacattgttgcgttngaaagcgtaaatgactgaagaccttgaagtcatttgaaat

SEQ ID NO: 253605 - DNA, 456 bp, Glycine max
  unsure (1)..(456): unsure at all n locations
tttagtttgaggagcactattagaatatctattggatatcgcagaggatttttaaacactctttggggtgtnttatatttttagggtgtttaaaatcaagacttttcatcatattggcttccaaagtccaaactgtggagagtggctccccttcatagacccacctaattacatcctcttggaaactcccaaatactgtcttgaatgatgtcaatacaatttaattttctttgctgtcatcaattaatttatccttacacctttcagtttaagtttggacgtttactttatggttttgcatctttgttttcatgctatgttctgtgcaggattcgtgcttgataatgaagaccgaagtgttacaagatctgatctgtacttcaaagagctattttctcgctgtggattacatgtttacacatcaaaggtaaatagcacatgcttatactcggattc

SEQ ID NO: 253606 - DNA, 307 bp, Glycine max
  unsure (1)..(307): unsure at all n locations
ttcttataatcactttggaaattatcaaaataaggtgccctgtgcctgccgaaaaccctcttgtccaagatcgtgtatcatgtcttctatacgatctacacatttctacatcaaattggtgtcactccttgagacgaatagcggcgccattgcctgcacaattccacccatgtcatcgtccaanttcgtataaatccggaatgatcacctcacataagatgtaatcttatgtcattcaatgactgttggctcccattcacacatttaagacatggacataaatatatttccacccattactggtaca

SEQ ID NO: 253607 - DNA, 488 bp, Glycine max
  unsure (1)..(488): unsure at all n locations
tatctcttaggttaagcacacttgatagtgtgagaggatgatcctatatgaggtgatagttaaacaagctgcaacattgtgtatacctgaaggattttcaaccaatagagctcttgactatgatggaaaagatttctactactggaaaggaaaaatgaagttgttcctggaatttcaagatgtcgatatgtgggacattatatagattggtccttactaaccaactaaaagaaatcaagctggaattgagatagactaacctaaatttgaatggaccccagatgagaaagctagagttcttttggacatgtgttttgaggcatatntgagtatgatagaatataagaatgtggaactgctcacgaaatttagaacacactcaaaataacacatgagggtacgtgaggtaaaagactcaacagtctattttaagtcatatgttaaagatgcacgaacatgattccataggattcactacaatagtatat

SEQ ID NO: 253608 - DNA, 444 bp, Glycine max
  unsure (1)..(444): unsure at all n locations
tgacanatctntattcacccatgttaaaaatattttatttctcgtgatcagtggaaatattatgtggcttgtaacttcaaaacccatttttgactttggtaaagccaatatttcagctattggaaaaaaaataaaaaaatcaaagtatcatattgattaaagataagattaagataaaatatataattaaatgataattgtcaacatataaactaactttttgagttacattagactcataaaccacattctaacacatactaaatatctagattttagactagtaatagtccatatgtattttatcttagaaaaatattctgtcacactttctttaacctttctttagttagttccttcaataggaattgtttgtgccataagtttctatttttttttattacattggcctagtgctgtaacaaagggtgggtgtgaatgaca

SEQ ID NO: 253609 - DNA, 420 bp, Glycine max
  unsure (1)..(420): unsure at all n locations
cttgaagccagcgtcaagccctctgattatgtctggggggttcaatatcaagtgattttctcttttacgggcttgatcttcttttcttttcttttttgacttttttcattggcacttttattaccgagaagaagaaaatggaagacaacaacaatttttccaccctgttttcaaataattcaactgaagagttaagcaggattcagattgagcaacctgctgatgtggattatcatgttggtccatcaatagaggcaccaaaagagaacattggggatgcttcaacagatggaagatcggtttcccctactagggaatcgccatcatgctccgagttggatactgaaaaaccatattcaacttcaaacagagtgtgagcaccaatgaatgaaagttttnttgctttggcggctaaactta

SEQ ID NO: 253610 - DNA, 452 bp, Glycine max
  unsure (1)..(452): unsure at all n locations
ngtggtgtggngaganaatcgtgctgctgccttggtcattctgaaggatagtttatcaaagtttcaggtatacttaaatttttgtattgcctgtgctatagtgaactatgaagctatcatgattgtggttgagggtttgcagtaaatcgcctttttctgtgttgagatgttatattacttaccctttgttagatcctgtatttgtaacctttggggccaatggtggccttttcatgccccttctcatatacaatagagattcaagtgattttaattattttttctttctctagctgtattctgtctttttgaaatcttgctccatgtttaaattgctaatatcttcttccacaggttgcaggtctaccaaccaatgtccactatcttcaaaagcttgctaatcacagggcatatgcaaatggcaatgtggagactcattttattgataacta

SEQ ID NO: 253611 - DNA, 478 bp, Glycine max
  unsure (1)..(478): unsure at all n locations
ntagaatcaaactctntntctctcaactattcttcattctgttttccctttccgctttttctcttccttttccttgcaaatatttcgtggcttttaactgttgatgatcatggaaggctaaacactcaatcaatccaagaatccactccaagcaaggttgaatttgagttctagtttagtatttctaatctttgtgaatgttcatctttttcttcaatcctatttttgattttcatgattatgattatgcttagtattgaaaatggattaggttacggattcatttcctaatttcaaaatttaataacagattgtttggatgattttcctacctaatttgggatttcaaacaatttacggattcattattagaaaatacactttcaacatcggttatttacgacattctacatngattttaanaccgatgttgaaagtaccgatgttgaatgtattattgctaacatcggctttgaaa

SEQ ID NO: 253612 - DNA, 105 bp, Glycine max
cacttattttatcataaacaaatcaatgaattttaagctgggtatttgccttatccccaagttttttgaactcttaaaagataccatatttaccatttttttatg

SEQ ID NO: 253613 - DNA, 434 bp, Glycine max
tggacttaccttgagataattcctctgatttccctttgagccttgcttccctttccttgtcttgaagctcactacatgccttaagtgaaaaaccatgatattaccatatccttaaggaattttggagctttggaattgttttgggaataagtgtggggagtttttgtttcattggacaacttgttttgttggctatgcttcatgatgtattttgggccatacttgatgtacattgtatattggttaaatgttggacatgctgaatgaaatgttgtttctcaaaggctaaaaataaaaaataaataaaaaatttcgtattaaaaatatttgaaaataaaagatgatttaacactataacagacatgcataatgttgatgaataaatttaatggcccagaatgagaactcttgttctctcttacgttaattatatt

SEQ ID NO: 253614 - DNA, 421 bp, Glycine max
cagctttttggagtagaaacatgggacctactcattttatttcaaaaaaggaaggcctatctagtccagggctgagagaccatacaagtttcctaacgatttctaaatatgtgggccattaagtctatcatatgctgacaatagccgagaagcccatgaatctcttcgggggcggagtaagtgtctggcatcgccttggccttggctaacaatcggggaagttcttgactcccgttcaaggtaagagcaaaccgatccatccacatggttgccttttggtgtaaagagtcgatcacccttcctctagcctctttttccgcatatacttgagcatactcatccgcgattctatgctcgtgggccgtggctagacctaactcttcttcgtacttggcgatgatagctaacatgttggtctctg

SEQ ID NO: 253615 - DNA, 165 bp, Glycine max
tctatagaacgttcattcctaacttctttattattgcattacctctcaacgagctggtgaagaagaatgcggcatttacctggggtgaaacacaagagcacgcctttgctatgctcaaagaacagcctactaatgcacctgttctagctctttctgacttttcta

SEQ ID NO: 253616 - DNA, 382 bp, Glycine max
gagacttaacttggataccaaccttgtgctacaacaactgcagcaagacccactatccacaatgacagaaaatttttgtttaaaccttgcatcttgtatgaaagatgttctctctttgggtttgggttaggtcacaaaattgactcccaagtaaccttctgaccattagaagatcaccttcttcataggggtaaatctcttcaatatggtcatcaccattggcttcaccctcacttccacttgaggaaggagaagatgtagcctccttttggctactatagatgtcttgacccctcatgatcatggttttctttgtggggcaatgagaagcaatgtggcctaacaatgctggttctttcctcctccctaagtctagctctca

SEQ ID NO: 253617 - DNA, 460 bp, Glycine max
  unsure (1)..(460): unsure at all n locations
taattcacaaggaccctagtgttgngtgcttaagtttcattntctaggtagaatttgaatttttttgtgattgcttgtaaaactcacattgcattgtgaaaatctaattctagttgaattagataactagagtagcttctctagaaatagagagtgaaccagtataaatcttgttgtttatcgtctctttaactctcatctctctctattacattctttatcaatttgctaagttttaaaggtttttcaaattgattcactttaataaaaggatcttgtaatcaggtgattgattcaatattagtgttaaacataatatttgtgatatgatcattgtgaagcaaatttttttaaaactctatttttcttttgatttgatttcaaaaccaattcacccnctctttgttnggngagtcccataatcttttttcgatccccatgcttaaagaagaatatcttc

SEQ ID NO: 253618 - DNA, 154 bp, Glycine max
gaaaacactgaagacgcggggcaactcttttcacaccgaacgcccagcgaagcacagacaaacaacagaccacccaccagaacaccacaccaaccaaacgaaagcagagcaaccaacacacctacgacaccacgaccacctcaccgaaaaacaa

SEQ ID NO: 253619 - DNA, 404 bp, Glycine max
acttctcgggccatttctggcaagctaattttggaaaggtaatttaccaagaaatacttctcttaaaacaaaaacggcatacaacctccttccataaacaccaacatcaatgtaaatttagagccaacttattgccatactttctcacgaacattcccttgcacaagatattcttctaactaagaaaaatgccccatgcacaatcaaggcaccttcgttacctagattatttatatgcattttcaaggcgtatttgctacctacatcacatgcacttccttggctaaatttacatacatgcatactcaaagcatcttggctaccaaaaaatgcacacgtgcacattctggtatttctatacctatgcatttacaaaccttgtgatgaatcttggctatctacac

SEQ ID NO: 253620 - DNA, 446 bp, Glycine max
  unsure (1)..(446): unsure at all n locations
tgcccagagaaggagtccacggaggagatgcttaccacctcaaaagactgganagcggtttctaatgactcctctacggcttccacataaggcatagaggatgggcagctcaccaagatgtcttcctcgcctgatacgatgaccagatgcccttccactacgaatttcaacttttggtggagtgtagagggaacaactcccactgagtggatccacgggcgccccaacagaaaactgtagggggggttaatatccattatttggaaagtaacttgacaggtgtgagggcctatctgtactgcgagatcgatctctcccctaacctctcggcgggtgccgtcgaaggcacgaaccaccattgaactcggctntaagtgggaggcattgaatggtaatttctccanagtgctcttaggcatcacgtntaaactggaaccattatcgat

SEQ ID NO: 253621 - DNA, 407 bp, Glycine max
tgcaactgcgtagcgagtgaaagagggtgaactctgttattagaattcatacagacgcatgtatataccactgagctcatatagtaaacaaattcattataaatatatgcaatataaagacggcgccaatgaaaaccgtcgtggtccactcaaagaacaacggcggcgttatactaaccatagataacttgttcgaaagctcctataattacaaaatgccaccgtgatattaactacatcggttattaaataccgacgtatatatgccgatgataatcatgtattagagaagcgttcttatgaaattattaataaaattctaatataagaaaaacaatacgaaaacactttataattggctgcatgagagtaatctgccacatcatataacatccttggacattaca

SEQ ID NO: 253622 - DNA, 420 bp, Glycine max
  unsure (1)..(420): unsure at all n locations
agcttgcttctacacttatgctatacttgttactaatatagggtggaatcttatttatatgtatataacaatgctataccaaactctatatattctgttgggttttgaataggtgtgtatgaaaatgatttttttagacatgtattgggattctttagttgttcttcattttttctttcacataacagaccgttccgaaacgaacataattatttggaaatttgtatctctcatatttgattccatttgcctcaagtactagggcctgtgtttgctgaaactaacataaatgcttttgtttgctgatattctcttggaggccattattgagacataattaattgaagcattttacaacgctatggcttattntggcggtagttttgtttgaatcagtgttctaatgaagaaaaagatata

SEQ ID NO: 253623 - DNA, 403 bp, Glycine max
  unsure (1)..(403): unsure at all n locations
tgacgcggtggcatacttgtagataagacgagtttattaacatcggctatgtcacaaccgatgttaacatagactcgttaacattgattttttgaagaactgatgttaacatagtctgtttgatcttaaagcggataacaaatcatgtttttaaaaggatgggactacacatatattatacaatcaaagttgataaaaacatgtttatctctagtagttatcaccctatcacctgtaaggagacaaatcactgggccttacaatataactaacataccattgttaacatgaagaaaagagtctgtgctaatgcatgttattaggcagaatgctattaatnttaaattctctcttgcatccatttcctttcttctatctagttttaaccttctcttcacataac

SEQ ID NO: 253624 - DNA, 331 bp, Glycine max
caaacccttaacactcttgtggccattgttctttccccgaaatgcatacctcaaacgccttcatgtagatctcaaagcaaataattagcttggtcttggtcaaatatttgagcagatgtgaaaggaaccctctcctatataagttgccacccactaaagtatacctggcagcttgcgttcttaactttttcgcttttcccttgcctgttgggagtgtcttatgcttcaaagatttaactatctcattcttccatcccgaagggtttcttcaacctaaagcattctttccatgagacatcgggttcaaacctaatggagtatgaaccgtttc

SEQ ID NO: 253625 - DNA, 122 bp, Glycine max
  unsure (1)..(122): unsure at all n locations
tgtacaaacagaaggagtgacgattatcattgtggacatttattagnaatagctcacgggctctacagttaaactatcttgcttggttttcatctatggccattcgctaatggatcaaacac

SEQ ID NO: 253626 - DNA, 396 bp, Glycine max
  unsure (1)..(396): unsure at all n locations
cgtagcatgcaagcttaatacagacactanacgtttctttatataattatgggtactacccccttcaattaatatttccaccttgtgcctgttgatacaacccaataaacctatttgttttggggccatgtggccccaaaatgcatgatagctaatttgggctggcgatggcccattatcctcgtcgtatcggcactcatattagggaaaaaatcactccaagggttatcctctttgtttgtaatcagaaggaacaatctgggagcacacctatgaccgtggatgactttttcattgcaggtgaaacataaacctttcttccggcgcgaggcaagctcttttggtgacaatcgctcgcacggaatggaaggggactttggaggtgtgggtaataaa

SEQ ID NO: 253627 - DNA, 461 bp, Glycine max
  unsure (1)..(461): unsure at all n locations
ttttagataaaaggtaaacccatactataaaaaatgcttgttaaacttgacaagccgacctgtttaagtaataataataataataataataataataataactattattattattaaataaaaaaaattaaaattcttcaaattcttataaaataataaatagaaaataaaagtacttttaaattggattgtgacctgtacgcatttcacctctacacacgtccctttgcattctcactttttaattcattttctttctctaagttcttgtatctatgccaaaaagatagagattaaagttaaaaggataatgcaactagattaatacttccaaggaaaagaatattttgaaagatatttcaaataattaaatattcttgttcgctatattagtataaatcatctctaattcataccatgttttaatattatgctttntatcattntcttatgatatactc

SEQ ID NO: 253628 - DNA, 371 bp, Glycine max
tttctttttcctatataactctattgaatactatacatattcctaacgccctattgggtcattgctctaattaagatcattatacaaacttgggggaagaaactgctcgacgaaatatatgcatcacattgatgaaatttagaatactatctctggtatagcgaccacgtgtattaagaataaaataatccttcttaatccgcatataaaaaaaataacatatgtcttataggttgatggtatgaattagcggtccatgacaagccatggaaaatatgaaagacttcgtaatagaatttatacaatatacttggggcatgtacttctttcaacattttagcgccattgcatgtttggtacccctcactaat

SEQ ID NO: 253629 - DNA, 455 bp, Glycine max
ctagctatatgtgagtcgataaggagtttcattggttgctatctggagtgtacagtggtacgcccagggtatgttgtagagttcttctttccataggcccttagacttatcgagtctagtacgcagggccctgaggatgactctgttagctgcctctgcttagctgttagtatgaggatgttcgacagaggtgactaggtccttgatgcctagccttgttaggaagtcttcataagtgtgagctttgaattgaggttgttgtcggtgacaatggtgtatgtgaggtcgtacctgcatatgaggggtttctaggtgactatttccacctcgttggctgtaattttacgaagtgatcttgcttttatccacttggtaaagtagtcgatggctactagtaagtatttgacagctcttggtgattatggcagtggtcccagtatgtacattccacacat

SEQ ID NO: 253630 - DNA, 388 bp, Glycine max
ctgcagcttaatcgaaacatgggtggaaacgttaccgtgctttgaacgtgaatcaaattcaatgtgagagcacaccctttcacataaaagcctctgggtaatcgattacaactgaatatgggaaatcgaataagaaggattgtttttgaaaaaaacaaaagatgaactctcaaagggtttgctttttcaattggctttaagcttatctaaaagtcataactcttctaaatggttctcttgaccacacatgaagagtctataaaagcaagactctgatttgcatttcacatctatctaatccatcaatctatctttttccaattcattctttacacaagcaatttttccacattcatttatgaggctctttgaacttcttcttcttcct

SEQ ID NO: 253631 - DNA, 474 bp, Glycine max
acttgcccaaaccccagcagtagttgtttccttagagacttgctcttatcaccttgtctctgacactaaggataattgcactgtgtgccttctgcagtagtgctttcttatccccatcatccatcatcttttcgagtttggcttttccatcaagtgcttccaccaggccctgctgaacaagaagggctctcatcttcaatcgccataacccaaaatcatttttccctttgaatttttcaacctcatacttggccaagcccattgcttgaatcgagcccaaaatcatccacgctcacaaaaatatgagtttcttgtttgaacaagaatgagcaaaaatgtagaaaaagatgaacaaaagaacttcaaagaatcgtgattcgactagagtaaaacatcaactctcaatctcctcacaataaccacttttatttaaactctgaataatccctcctctgggtacaatctctctactga

SEQ ID NO: 253632 - DNA, 209 bp, Glycine max
aacctattcctaaaaaacgagccaaaataaaactctaaagggccaaatggttaattaccaaattgggggaagggggggggaacatattaatattcaaaatgataatatttaacctcggcggcattgataaagaaagtgtctctgtttaccatgttcagaatataaatcaaatcgctgatgtgtttcataaaaaactgtcctaaaattat

SEQ ID NO: 253633 - DNA, 476 bp, Glycine max
tgtaatggtaagaaaagagcaacacacatagtcatctattattcttcaagttttgttaaaaaaatgtaagtataaaataaaagtgtgtgtgctgctattgaagaaaaagaaaagctaagtgcggaaaggcaagtaatagaactggaataaaaagaaaaagattgatctatggattaatgctctcttagaacctaaacttttgcatcctagaaaaaccatgaattgattacagcccagcctcgttacaagcctagtaaagtccttcagattcagtttgcatgttcttgactgtatgatatgagatgaagtgcaaagattgagacttatgttggttgttgattgttgaataagcctaaacacttatgtttgagtgaaacaatagctgtgaggctatggttaatgatccttccttgatatatgtcgctctcactagcttatttcagttgtatgttcacatctttgaaaagctgcatgtc

SEQ ID NO: 253634 - DNA, 383 bp, Glycine max
  unsure (1)..(383): unsure at all n locations
tcagacgtgacgatggaacgttcaatcgngagttggttgtttctctggataggaaggtccccgcgaacgcaattcctgttgaaggggtgctttcaatcgattatgtcgatagaaacgcgggtttgttttaccgtgtgtacttgccagcctctggaaacgaggctcaatggggtatcatagaccttgagaagccgttgagtactacagaaattgttcctgtgatcatattctttcacggcggaagcttttcgcattcctcggccatcagtgccatctacgacaccttctgccggcgccttgtgaggatttgcagggctgctgtggcgtctgtgaactaccggcgatcactcggatcaccggtattcttgctcctacgacgactg

SEQ ID NO: 253635 - DNA, 363 bp, Glycine max
tgatattgaatataaacaatgagaacctcaatatatttaaaagttctaataaatgatcaaattttattttaaatctctaataaaaaattttggtggtttaaatcatcgatgtattaaaatttttggtttaaatcttcgtcgctagctatatgatggcggtacaccatcataatcgattaatgatatttaaaaaattagtttctaagatgatagttatcacttacttaactaatgttagatactcaaaacaaaatttttcgatatatcaaaaatttaaaacacaccaaaatattattaaaaatcaaaataaaattttatcatttattaggactttcaatatatatatgccaaatatgaataaaa

SEQ ID NO: 253636 - DNA, 468 bp, Glycine max
  unsure (1)..(468): unsure at all n locations
ctgtaggattatggngtacccatcacatgtggtactaggtggcggtcgggcgatggtgcacaacaagttttccacatccacaatgcgcgcataaacccaccatcccctgtagcccacctccaactgagctcacgtactcccacgtagcccatatcctcgtttctctcaacaccgggtccccatcaatcctcccaagcttccccaacatcaaagtaatgcaacattcaaacagcacaaactatcacagccaagaaaacagagcaaaggcagaaaactctgccaaaacaccaaccaaaatcacagcttttctcacttaaagaccccagtaacaattccttcgttccaattcgttaaccgttggatcgaactccaaattttactggaagtctctagtacataagcctaacgtttgaccgttgggatctactagcaaaaatccagaactcattctgcacttgctctttcaca

SEQ ID NO: 253637 - DNA, 395 bp, Glycine max
  unsure (1)..(395): unsure at all n locations
aagagctccaagatggctagctcgccaaccaattcgctttaaggaactctaaaattcctctagccaatactgaagaaaatccaaaaagcggaagctctgatgtggtatgacatccttgaatcttttatcaaatatcaagctgatgactttaaagaagcgttgcttaggaggcaacccaaggaagttcattttattattcagtttcttttaagtcttcaaattctatatgcaccatttatagacaagagtgtaggggtgaaatcactgcagctaaatgacgccttaatgtgtgggccaattgggtcacataccggatacattggattgatacactcattntctccaaagcatattgacaaatcgatgcagccaaatcgttattagttcacttgggt

SEQ ID NO: 253638 - DNA, 387 bp, Glycine max
ttaaaaaaaacacattctattatacgataaacaagggcttaatatataacgcggcttacttctaaatgtaacggtaatttagttggtaggggtacaaaaatattaatagtaacgccatttcatcattagctcatgcagaaatgcagatcatacacaatgaccataacaatttcaatgcagcatgcaacgtttctaatcagacaacaccatcaaaaattccatgtcatctatatgacttatttatcgggcttcaaaaaaaaaaaagaaaaattacatatatgttacttactggaaagcaaaacacaaaataaataaatgatgaagttgctcaaaaatgattgcatattagttcttagattttattaaataatattaacatctaatttt

SEQ ID NO: 253639 - DNA, 418 bp, Glycine max
ctataaatatggcgagaagtgaagtttaaaagggttcagccccttaggcacttctctctctttcgaatttgcttagaaaaattgttttcgtgaagaaaatccaagccgaggcgtttccgtaacgtttccgggagtgatttcgcgaaggttttcgaccgttcttcgacgttcttcattcgttcttcatcgttcttcggtcttcaacgggtaagtacctcgaaccaagctttccgattcattctatgtacccgtggtggttcacattgtgtttcgtgtatttttcttctcgttttcatttagtttccgtaccccttatgacgtgcttaagccattttatttaagtcatttctcgcttaacctaaaaataaaataaatttccaccgatcgttgaattgattatccgtaacttcggtaaaat

SEQ ID NO: 253640 - DNA, 461 bp, Glycine max
  unsure (1)..(461): unsure at all n locations
cttcgaccgaacacggccgtgtnactgtctattgtcttattcaaggngggctgcagcaccggctccgctaacctaactgtactggaggcggttgcggtggctttatactctatggttatctgaagttttaacatgaccatccgaaatggaagccatttgatcttttaaggccgatagatcggccttcatctgttcctgcacgccctcttcattatccatttttctggatcgagtgtcatacaggtgcgttggtgttttcttagttatgatgaaattcctaaagaaataaacaacggtgagtatgctaccaaaacatgagtatgcaaatggatgatcggagcacttggatccaccccatgattgtagataacgtaatgagtccagaacttctctttttataaaaagaacaaagctttcatctagcctagattatcaaaggtgttacacatgaacctaacgaa

SEQ ID NO: 253641 - DNA, 368 bp, Glycine max
atgaattggtaaaataaattaggaattaatagttccaataataaaatctaattgaagaaaattaatatattaagattcaacaataaatactttcaatgcatttttagtttaattatttattaaatctttttaattgaaaataatataggtcaatttaatatatacatgttttgtgccatgtaaatattaatactgcgtgatgtttatatgattcatgaagtctgataacatgttactttgggattataacattgtgattgagattgagagtatgtgataaattaagtatgtggtgaattataagatacatgtgtattgagattttgtacgctttgagttgtgagctatgaactgtacaatcacataat

SEQ ID NO: 253642 - DNA, 455 bp, Glycine max
  unsure (1)..(455): unsure at all n locations
ttcgttnttaattaattaaaaggaactcgatttctatttgggctagttntgaaccctcaccctacaagcatgaaaggactccctttgccgctaagctactgcaatttaattatttattagttgcagttcatgtgtatttataacttctgaaggataaatcatttatacacaaacggtttaaaattgtgtgtctctaagttatgctgaacatgcaatattatgttaaatattggtatgcattggatttgatcctttaaagtttattacatgttgaatggatatacgtacaatgttattttgaattggtatacatgtaatttctatgattcaatattgagcacatttgcattattaagtatgtttatgcaaatattattnttgaatgttaagtgattaatataatcttattaaattagagaatagccacagcatctttaattgagtaaaatatatgc

SEQ ID NO: 253643 - DNA, 395 bp, Glycine max
  unsure (1)..(395): unsure at all n locations
tattagncaattcattcaagcgaacttccaaagaaaaacgtccgatcgaattttttgattaatttatttaaggatattttgattattctattattattttgccttttttggtttaaccgagggtacaacgtgaacgaatggtagattttgtcttaacaatgattaaacgagattacaacgcaaatgatcgggtgaaattcattatatcatttgttaggcgagaaaacgacttatacgatcgggcaaagctcgttaaaaaaatggaagaaaagaaaccgaaagtgaacgaaacaaagatgaatgccaaaaaaacaagatatgaattaaaagtctcggatctggaaactcacccgttgaagaatgaagaacagatgaagaacggtgaagaacggagg

SEQ ID NO: 253644 - DNA, 486 bp, Glycine max
gcatacggacacttaaatctaagctgtctgcctaccattcgcctaaccatttcggctctacacatccctcaacataactcgggccaccatcaaggaggcactatatagacgcggttgcaccggaggagcatccacataagcattgttcacaatttcaagctcttgaaaagatgtttccaatgactcttccacagcttccatatagggtgtagaggatggaccactcattaatatatcttctttccttgatactatatcttcaatttctggtgcaacattgacgggtgatcgacgccatacccgaatcaaataaacattaaaaatgtagtatttacgaagtgatcctaggtcgtctcccaacgagcaatggtcaaccaacgtccataatagattgtcataaaatagttacgaatggggggggttatattcattttcgtcattgacacagcacgctaatcttaattagaaaataatagaattaaacat

SEQ ID NO: 253645 - DNA, 360 bp, Glycine max
  unsure (1)..(360): unsure at all n locations
ctgacccccgcgacatatctccaggtaccactcctgggtcaacaaataaaagcaagaagtattcacccttcaacacttcctcatctcaagcttgtaggattatggggcacccatcacatgtggtactaggtggcggtcgggcgatggtgcacaacaagtttttccacatccacaatgcgcgcataaacccaccatcccctgttgcccacctccaactgagctcacgtactcccacgtagcccatatcctcgtttctctcaacaccgggtccccatcaatcctcccaagcttccacaatatccaagcaaaacaacatncacacagcacaagctatcacagccaagcaaaacagagcaaagg

SEQ ID NO: 253646 - DNA, 397 bp, Glycine max
  unsure (1)..(397): unsure at all n locations
gctctaaatntacattgatgttggtatttatggtatgttgttatatgccatttttgctttaagagtaacgtcccactggtaaaactaactttccaaatgtttgccttcgcaggaatggccccgaggaagcttgcctcaaagaggtccaagaaggacaaggcatccgaaggaactagttccgccccggagtacgacagtcaccgctttatgagcgttgtacaccagcagcgcttcgaagccatcaagggatggtcgtttctccgggagcgacgcgtccagctcagggacgacgagtatactgatttccaggaggaaatatggcgccggcggtgggcaccactggttactcccatggccaagtttgatccagaaatagtccttgaggtttatgccaatg

SEQ ID NO: 253647 - DNA, 290 bp, Glycine max
gcctctatgaccaagagtctaaaaatcaattctcgctgctcccattattctaacgaaaagggaggttgacttgtgcattatccatttttctagcccaaagggctcttaagagaaggggcactttaaagctgtaatatatagccattcatgtgtcttcatcttacagattatgtttcggggataagttgcgtcatgacatctgaatatactcttcatgaatcatgtgtcttcatctcacacaatatgtttcggggataagctggttcatgacatctgaatatactcttcat

SEQ ID NO: 253648 - DNA, 402 bp, Glycine max
  unsure (1)..(402): unsure at all n locations
tgccaaacttggatatagtgttcttatattggattatttagnggtaggagggtctgccgaggtcgtggcccttgagctgctcaagttgcttggctttcaagaagggaaggtgctggacagtgaccactttgatctggttttctttcacaatggagctggtgaacaaaaagtggatgctgctgatatgggatatatggatgccttggttggaggggtaatgagtcaaatgcaacctggatctgacatcagttcacgtctgcacttgttcgttgtcgagagctatggcaatatcttggagggtgatgattctaagttctctgtgtcaaagagggtagatgagaagaactcccatctttcagtgctttatactctacaaagttatgctatgaaaggaggaattcc

SEQ ID NO: 253649 - DNA, 370 bp, Glycine max
tacgctgcccctatatatatataaaccagccccacaatcctaatattacaaaatcacattcatacgtcattggggcatttcaccgagcacttggtgggcgcatgtttagacataaaatgcaagaaaatgggggcaatgtggcatgccccattgcttcaaaatacaccataggcctaagggcttctcacacaaatccttaactcaacaaatcaagcataaaaagcaacccaaaactggcccacaagcatgagcatggtctcacaatttaaagcaccacaatgaacaaaatgcaccaacgaaaagcaaaaaactcaaggattgaatacttactcgttggagtgagtagaaacaacgaatatgaaagcaaaac

SEQ ID NO: 253650 - DNA, 455 bp, Glycine max
ctcacctcgcttctcaatctctccctttttgatgatgacaacttttgttatcaagaaacacacacacacacactttttcctagtcgatcactctcataaatttccattctcctcctttgtttttgaatttatgcttctcttaaaattaagttgattactcatgtgagttcttgatttaatccctatttctctccccctttggcatcaaccaaaagccaaagtgcgtaacaaatttgaagcatgcaaatacaacgaagcatccatacaatattcatgggataatttaaaccaaatcatgaagcatgaatcatgaagcaagaaccatgaatagatcaaatatatagaaaccatatagtcaaataacataattaatatttgttcaaacataccatgcaaataaagaaatagtagattgttcaaatataataataatatagattatgtggataagtcac

SEQ ID NO: 253651 - DNA, 336 bp, Glycine max
gaagatcctgcaagatgccagttcgaatccgaagctgttatgagagcctgcaatgagcttgtgagtgactgtgagatcctataggtgaaggagacatcctcaccacttgtgtttttgcagccttctatcttgttcttctctttgttggaaaggaggttcccagactatggaaagctaaatcctctgttggatcttccctggaggtacctgatgtaaatatatttctatctatgtacgatgttttgcgcgtccctgtgctatctgctattattccaatgtcctcttaccttgatcacgtacatgcatgctttgttagggtcattcaacagtgggaac

SEQ ID NO: 253652 - DNA, 480 bp, Glycine max
  unsure (1)..(480): unsure at all n locations
ttcgcgaccttgaaactcaccttcaggctaagtcttcatgtttctcaccctatctctaattatctcccccctttttggctttgatgatgccaaacttgattttgccattgagtatatttgaagagtctcaagagtagagacttttctttttcttagccatacctaaaagtttcttaacactcagagaagtatcaattcatatcatcatcatcattatcatcaggtaaagttatatatgaatgtatgatgcaatgctaatgcgatatattctcccctttgcacaatgcttatgcaatataaagaacaaatgctaatataatgcactatgctatgctaatacatcttctcccccttttcgcattaacaaggccaaaaaatattcatagaatcaaaacaaacagaatatgaagggaaaaagacatagcatctcattcatataaaaattntacaacataatcatcnaactactaaatgatatca

SEQ ID NO: 253653 - DNA, 446 bp, Glycine max
aagcttgccagtacacccacccaacctacaagactataatatgtttatatactgcgtatatctagatgatgatgacacatatgccaaacattggttctgtaggaaacatttgggatatataatgttaactgccaagtcaagacaatcattagttgctcctatagagtttcaaagctcaaacctctccttgctgaagacttacgattactcctacttccttttgtatctcttttcttatttaattctattaacagaatttattgtgagaagaaaggatatgatacagaagaattgttctttctggctatttatttaattctttattcctgcatcaaatttacatttacattatagaatgtcaatcagctgtgatatcaaattagcaacaataggataagaactgccttaaagcccagcttagccttcgaagaagttataaaattgat

SEQ ID NO: 253654 - DNA, 355 bp, Glycine max
tcttttgcctcctctatctcttttgtcggagaattctctttaattccttgttcttcatcttattctccatgtatatcctccattttcttgtggtctggtgctgtttacagtacaatcaaaaaaaaaataaaccgattaaatcttaaatctatacttggtcttgcatttttatggttcaaattttgtagatctactcttgaatcatgtctttgtgttgattttagttctatcatctttcattcataatattcttgcgctgaaccctagatctaaattttcttccaaatattgattagaaaaaaaacacaaatcttagtgtaaatcacttaatccatcgtggcttagagtcattgtt

SEQ ID NO: 253655 - DNA, 475 bp, Glycine max
  unsure (1)..(475): unsure at all n locations
tgtcggcaaactgcatgcatgggttaacttggtaacccagctggccttgaatcagaaatctgtacatgtcgcaagggtttgtggtttgtgctcctctgttgacccctatacagacctttgcccttccatgtagcaacctggagcaattgagctgcctgaagcttatgctgcaaatatttacaatagacctcctcaacctcagctgcaaaatcaaccatagcagaacaattatgacctctccagcaacagatacaaccctggatggaggaatcaccctaatctcagatggtccagccctcagcaacaacaacagcaacctgctccttccttccaaaatgttgctggcccaagcagaccatacattcctccaccaatccaacaacaacaacagccccagaaacagccaatagttgagacccctccacaaccttccctcaaagaacttgtgaggcanatgactatgcacaacatgcag

SEQ ID NO: 253656 - DNA, 233 bp, Glycine max
caacttaaaactttagatatgctttgtacgcctcatacagttggaagggaaccgggctacagcccgcaattaacttatgccgagaaaaaacacagaggtggtcgggcggaagtataatccctcaaacttaccccttatgggttggcttcagaatttaattccccgtaccggttcggaagaattaagccaaacccctacctttgaggggcaacttcctccttatgccgattatc

SEQ ID NO: 253657 - DNA, 438 bp, Glycine max
agtctcacgattttcacgtgctcatgcatcaattgttagccgtggctatacgagacattttgccaaacaaagtcaggttagcgataactcacctgtgctttttcttccatgctatatgtagcaaagtcattgatccagtcaagtttgatgagttggaaaatgaggccgcaattatactgtgcgagttggagatgtattttccccccgctttctttgacatcatgattcacttgattgtgcatttggtcagagaaattaaatgctgtggtcctgtttatctacggtggatgtacccggttgagcgatacatgaagatcttaaaagggtatacaaagaatctatatcgtccagaagcatctatcgttgagaggtacattgcagaagaagccattgaattttttcagaatactacagaaggctaacctgtgggcttctgat

SEQ ID NO: 253658 - DNA, 376 bp, Glycine max
taagtcctctccacaaagaagatgacacttgcattacacccctgcacagcaacttgaccaatgatgacccgcctaaatgatcaaccttagcccctaccacaacaacaacttgaaggccacaggcaattaaccacagaaatcttattcttacataaataaaaaaaatggtactatcaatccactctctaacaccatgttgaacgtacttttattattgggtcaaaccgaatcaaatttataaaacccgcatcatgaatctctctcttaattagtaggttttaataaattttaaataatcatgttcctaacaagcctgcagcaatactataaaggttaaccatcaagctagctcataagcctgtcaaacatctacaaa

SEQ ID NO: 253659 - DNA, 372 bp, Glycine max
  unsure (1)..(372): unsure at all n locations
tggattggcgagactcagacgngaaatccaaatctgaagctgcacagaacatgatattcatatttgaattatatgcatgagttaggactagtacccaaatccttagggttactaacctgaataacatcattgaactaatgtaaatatttaacatatgtgatgtcaaaattaatttatctactctatctcacatattaaactctcatttaatatatattgatttaagtacttcatccattcatccactagttcaaccagggatcaattaacctaatacctagatcgggtaaagatatttcaataattgctancacaatcacttgaacatagtaatcaaacaattcgcatgtacacgataattaatactttaaa

SEQ ID NO: 253660 - DNA, 412 bp, Glycine max
gagccactaagcgagcctgatcttgtgattctcttaataattaccgcgcttatggatattgggttcatgcacataatgattatgcctgcatgtttgttagtgtcaacagcatctgtcatatagtatgagtcacgcgtcggaagaatttaggcacaaccaaagattggctataaataattcctttgtattggataaagcacgtacacatattcattatgtctctctctcgctctttttgcttaaccgacacctccttggtcttgaataccaagacgtgccaaccatcataagacatttgctcctttcttgtgacatgactaatgaagattgagaagatgggaaacctttttatttattctcgcttacccacctgcttagaaacttttgtataatacatggttacagtgaatat

SEQ ID NO: 253661 - DNA, 93 bp, Glycine max
ccgattcgggcgcattatatgtccacacgctcgaaattagaacaacggaagcccccgagaaattcaaatgggcataacttctaacacggatcc

SEQ ID NO: 253662 - DNA, 377 bp, Glycine max
ccctcctagaaggagatcacctcgatgacttatgcttcttgattgtggcactccatgacgaatctccttgggaaagacatctctaattcctgccataatggttgaacactaggagaaacataaatagctaactggatagaattatcactctctctctcttgtgtatcactcttttcctcgggtgtatcactcttctttttcatattcctttgtggtgcctaactattatctttctcttgttctctcttttctatcattctgaattggtcatcacacacttatctaggggatagacggctaagagtaaacgaggaagacttggctattcgtctgtagggcacttctctgttacggttcaacaaacgttgcatttgtgt

SEQ ID NO: 253663 - DNA, 407 bp, Glycine max
tgactacagaggaagccttaatttcttttttatacccatcttcccgcgtgattctggccgaagaacgcaaaatgctagccagtctcacacaattggatgtccatatattacatgatattgcatgcctttcatttccacggcgagccccaacaattatttgtatttaactaaaataagtgaccttataatcgccttatcttgcaggcgggggttttccttccttcctatctttctttctttttccatttactgctataaaaggagtggccttaaagcgttaatcctctgtcaacagatgccacagaagaaactgatcaggttccctctcctgaaaggtctgcccctgaaggagtaaaaatctcccttgatgatcctgaagaagaccacaaaaactaactcgggctaca

SEQ ID NO: 253664 - DNA, 465 bp, Glycine max
  unsure (1)..(465): unsure at all n locations
gctgttggactatgatcactattgaactgaatctcaattgtatgatgatcaagtgagcttctagactcaaagctttttgagtaaatcttactatcactttcacctgcttcatcatgatccttatcaaataaaccatggatatgtttccctgggatctcaaacatcttcctgaaatgaaaagacttggacttctccatgctgatttggtgatgaaaagctcgaaccatcgttcattaaaccttcttagattgtcacactgtcacctttgttttatagaaaaacaaaggaacaagtaattgggtgttgaaatgttggccttgattgaagaatatgtttgtgtgttctctcttcttgatttttattatttttttaaaaagtactatntgttcaatgagagaaagaacagaatgaagggaaacaaaagagaacccttcaatcaaaaagagagagatgttaaagaatgtc

SEQ ID NO: 253665 - DNA, 384 bp, Glycine max
gatattgggttgacccttgagtacatgaataatgtgaaaataaatgaggcctgttgtgtttgaagggtggtgttaccccacaagggatggaatggcatgaactattttttagtaagttatatttcatttatatgatatgtatatctatgttggcttgtttctctctattaggtaggaatgtgataactcactccccgtgtgctatttgtgtttggatcctatgatgatctcgaactttgtgttcgtgggagtagatggttaggtggatgactatggagaacctcgtgctagaggacgttggaacacaatgctttgataggatttgacattgcgatatgggtttctatattaattgcatgaagtcttggacgactttgctttgag

SEQ ID NO: 253666 - DNA, 473 bp, Glycine max
  unsure (1)..(473): unsure at all n locations
tgcanactgcatcacaggcctatccccatcagtccttcttagctgcttcatcttcggtctcagcccggagatacgccgagaagtgcaggcctttcaacctgctaccctccccaaagccacgactctcgctcgattacaagaagataagatcaatgatcaacgaaagcacatacgtaccccctttgctcacccatcatcaaccactacgccctctaaccctcacttatcccaaccaccacgccctaaagccccatttgtccagcgaacccaagaagacatggcctatagacgagagaaggggctctgttataattgtgatgaaaaatggagctcctcccatcgttgtaaggtaagattcctcttcttcattgccaactccggcgagtcttcatcactagaatccagcccttcagaaccttcgtctccatcaaaatgtgactatgatcaaacaacgctcgaagctacccagtcct

SEQ ID NO: 253667 - DNA, 353 bp, Glycine max
aaatgggatacaaaccccttcataaatacaaatatcagtgtaaatttaaagcaagcttatgcgcatacttctttacgaacgttctcttgcacaagacattctattaactaagaaaaatgcacccatatacaatcaaggcaccttcgttacctaaattatttacatgtacttccaaggtgtatttgttacctcatcacacgcatttcctttgctaaatttacatacatgcgtactcaaagcactttggctatcaaaaattgcatacgtgcacattctggtatttctaatacctatacatacacaaacttcatgatgaatcttgactatctacacaataaggtgctacatttcat

SEQ ID NO: 253668 - DNA, 464 bp, Glycine max
  unsure (1)..(464): unsure at all n locations
tgtctcagcgtttatgcgagacggagaccaacatgctatctatcatctccaagtaccaagaagagttaggtctagccgcggcccacgagcataggattgcggacgaatatgcccaagtatacgcggaaaaagaggctagaggaagggtgatcgactctttacaccaagaggcaaccatgtggatggatcggtttgctcttaccttgaacgggagtcaagaacttccccgattgttagccaaggccaaggcgatggcagacacctactccgcccccgaagagattcatgggcttctcggctattgtcagcatatgatagacttaatggcccacataattagaaatcgttaggagacttgtatggtctctaagaccttgactagatacgacttcctttntgaaatanaatgagttggtcccatgtttctactccacatagcttgtgcacatcaaatcactcctaca

SEQ ID NO: 253669 - DNA, 411 bp, Glycine max
  unsure (1)..(411): unsure at all n locations
gctttaaatttagaataataatgtaacttaatatatatttataaaggaatatttttagaagaaatattaagaattgtaaaaaaagccggaagagttttatattataatccagcgtgggctccatttgctacgccagaaaatccacggatcagcgaacactttcactaatccacccatctccataatcgcttccccgaacgaaaaccttctattctattcaacctcccttcacagaaccacaacacaacacccccttaaaaatgtctatcaaaccaacacacacaaaacaatcatcaatcgcacttacccttcctcctcctcctcttcctccaaaagctgtgcacaacactactactactactttatagtaattttttctaccgctcngccgcgtcttgatactgacggtac

SEQ ID NO: 253670 - DNA, 457 bp, Glycine max
  unsure (1)..(457): unsure at all n locations
ctataccgggggggggcttaatgtttttctgttatgtcttgacttgcgtttatgatacctgttaaaatttattttaaatntatttatctatttatagaatataaattcatataagcaatatttatttttatgaaacctataagcaatatttaataatacaattttgtcatgtcagcattttagcttagttgatatattctctgcttttaaaagaacttttgatgtactatctcctttaacccttgcaataacaataacagttttcatgaataataataattatcagttttcacagctttcaattttcattaaattgaaaatggaatttttatgtgaaaggtttggttaatttggttaattttataataattattttatgagatgtatctaagattatctataattgggtgatagtataatacattttacattaccgatgcatgaaagttgaactcta

SEQ ID NO: 253671 - DNA, 411 bp, Glycine max
  unsure (1)..(411): unsure at all n locations
ttgcttgaaatacgggcatccttgcttattggccgagacaaacaaaaaaagaaagccaaatactcttccatatggatttaggtcacaacccaacagacttgttaaggaaagaatgaggttaggcctacgtttttatggagtattctttcttgggtaaaccattgtggaataaggataaatgcgaagaccatatcatcattcccatagacagtgctaatgtgcaatgacaaatacaaaggaagtctcttgcacaagcaagagtcctagaagagcattatggtctcacatgaagagatgctgcatcatgctgagttgagcaacactagtgtcacttgaaaaaattntgacgctgaagtcaatgtgtgcacaagggagtagagaatgacataaaataaacatatctctatgtag

SEQ ID NO: 253672 - DNA, 487 bp, Glycine max
  unsure (1)..(487): unsure at all n locations
ctcagcttccaagtgagagaaccacaccagtgggaaagagaagtcatgattaanataaatccatgcaaggcacattgtttagaagtaacaagttcatggggcatgcaagcgtgcctcttgtgtcacagctagctgagaaagaaagtcttcttgtggaatctgacgatgatgatgacgacgatgacatagaaaccgaggactaatacgttgaaggaggaagaaccgttgctcagaacaatgacaagggaaagggtccatctgttatcggtggagaaagttcaaaaacagatggtgatgaaggactagatgtggataagaaggctgatgagttcattgctaagtttgtagagcaaataaggcttcagagaattgagtcaattcagaggagtacaacgagtgcaagaaactcttcaaggtaataatattgaagatggatacatatcatatccttctatttactacattagttaaatggaatggaattaaa

SEQ ID NO: 253673 - DNA, 410 bp, Glycine max
ttaagacaccgcagcatgcagccttgagccaatattctgactcaccattaatcttgacccagggtgagaatgccaatccttaccctcagaagcaaaaaaagaagagaaggaaaattttcaatcaaaggaaaaaggagaaggaaaaattccaatccaagaggaagcaaaaaaaggagagaagggaaaatttccaatcaaaggaaaggaaattcccaatcaaagagtgggagaaagccaaaagaaaagaaagaaaattcccaatcaaagaatgggagaaagaaaaaaaggagaagtaaaaaagaagaaagctcctggtcaaagaaaccagaagaaatgtgcagagaggtctttagaccggacaatatctgaacaatatagaaattgcaccaaatgaacaacaggaaggaaag

SEQ ID NO: 253674 - DNA, 469 bp, Glycine max
  unsure (1)..(469): unsure at all n locations
cgcatgatttacattctcctcctgtctcaagcaaattcttatttcttcttcacatcgtcaaaatcttcatgatttacattctccccctctttgatgatgacaaccacctgtaggttaggagcaacaacaaagaaaaaatatctatttgcatatagtttactcccccttggttttggaatgattgcttatatgaaacagttgaagatttcatatttttcatatgtaaaccttattgtctcataaacaatagataatttttcttactattttatcttttatctttctctccccctttgtcaacatcaaaaacaaatcatgaatagagaagagaaagatgttaccacttgttgcaatgtatgagaatcaagtgacaccaaaaggcattaaaacaatcattcaatattaatcaagcatanacaagtacaataacacatcagtcaaacacaatcaaatacagtcaataatcaaa

SEQ ID NO: 253675 - DNA, 383 bp, Glycine max
tagacaagcggcctcacatatcttaaaacgggggttgaattaaaatattgcaaactatttccccaaataaaaattctatttcaatttcaatgcaaggtgcaagttaccttaaaaattaacttttaaataatgattcaaatagaacaatctgaatataaatattaatcaataataaataaacgagtttaagggaagaaaaagtacaaactcaaatttatactggttcggtcacacccttgtgcctacgtccagtccccaagcaactcgcttgagagttccactatcttgtaaaaaccttttacaagttctgaacacacaaggacaattcttcctttgtgtttagatttctttacaacaagagattctcggtctctcaatcccct

SEQ ID NO: 253676 - DNA, 474 bp, Glycine max
  unsure (1)..(474): unsure at all n locations
gcattacggaccttgaaactccgctttgtcactccacctaaatcttgccttcangttgaccaaatctaacaccgttgacaatcgtgtgaagcttatgcaccccagatacaaaggcttcttcgaatcactttgtaatttcccatacaaaggtgcatctgcttgccagaaacactcttgcccaagatcatgtaacatgtcctttatacaatctccgatgtctacatcaacatgctcaatgtgagacaccgttggcatgtctggcaattcaccatgcaatatccattctgtataattcagaatgatcccctcacatataagatgtgatcttatgtcattcactgagtgttgtctcccgttcctacatttgacacatggacaaaaaaatttacgacctacaactagtgcattttgtgcagcaaattgcaagaattgtcaatcctcatctcatactcgtgactaatgcatgatngctta

SEQ ID NO: 253677 - DNA, 378 bp, Glycine max
gacctggaatacaacgcacttaaggccctactacaattaaaactgggtaaggtactctatttcttacttcgatattttttcccatttggaaaaaaaataagcgttttgcttaaaaaaatttaaagaggcacacctgagtacctttgtaaaaagaaaatccctattaaagttaaatcaccaatgaaatccttttaccccacacaatttacataccttcttgccatcttacattgcactatggaaacaaaaggtcgaatacgaacctcaacttttcaaaataaaaggtcaaatctgaacctcgaatttttcaagccagcgaaaggttgaatctaaaccttggcttcttcaacccaacaataggtcaagtttgaactttat

SEQ ID NO: 253678 - DNA, 477 bp, Glycine max
tataacactcacatattatgttcaactaattgagttaaacctctttgatgaaattaaatgacgttaatcaaatttgttaattaagataattttttttatgatattttggtccggagtactattaattagtgttataaataaactacatacaaaatttctatttgaaaatatgttttataatttttttagtaaaactaaaaataacaaattgttaatttatatatttagttattaaattttttaatattttatttttaaaaataatttacatgttttataaaatttctgtttataaataaaaagtcaattcttatatgacatattttgctcccactcctatgataggggataatagtttaggaaccattctaaagataggaaaaacccatgaataaagatggaattaatgaaataagacattgtagaaactcaaataatgggggaatatatatatatatatatatatatatatatata

SEQ ID NO: 253679 - DNA, 459 bp, Glycine max
cggtaaaagaaagagcatatatgcaatgatgtgaatatagcataacacttcataaggtcaggaaaaagaagggaaaacaatctttagagaaggataataaaaagagatgaaatctttgaaagatactgaaatccctgcttctttttatattttttctcagtagaaatcaaataaaaatatcaaagagtttatcacaatcacatatttgctcaaacatctcattcttacctctgtacatgtctccttctctattttcttgttaaaatataaaaatgccaacaatatattaaggaaaaagatattactaatgaaaagagaaaataaattgtcaaaaaaaaaagttaaaatccatagtggttggatattaggttacttctatacttaaagaaaggcataattccaacttgactcgcctagtgtttgagggctcactgcttcatccaatagctacagatatat

SEQ ID NO: 253680 - DNA, 368 bp, Glycine max
tttctggcgatgacccagatgatgaccaaaagcccaagagaatgacttcaagattgagtcaactagtttcaagaatcaagaaaagtttgatttcaagaatcaagagaagatgaatctcagattcacgagaagaaatcaagaagacttccctagggaagtattgaaaagatttttcaaaaaacaaacatagcacagttttgtttttcataagaggttttctcaaaaatttctaagttaccagagattttactctttggtaatcgattactagtctcctgtaattgattaccaatggcaaaggttgatttcaaaagttttcaactgaatttgaaccgttcaattgaattcaaaatggtgtaatcgattac

SEQ ID NO: 253681 - DNA, 457 bp, Glycine max
  unsure (1)..(457): unsure at all n locations
cgcttctatataagctgaaccattntatcaataaacagaagttgagttntattcagaaaattagagtttatctcttttatcttagtgagagtgattctcctaaattcttgagtgattcaagaacaccctggctgtatcaaaggactttcacaacctttgtgtgttgccctcgctggaaagagtgattctttccttcctttcatcttcacccttgttctttcaaaccacaattccagaaaatccacctctgcccagaattatctcgtggccataactcccattttacgcactctaattaagtgattcttgagcctaaattgactttcaaaacgagacctttcacctcgttntggaatcacctcattcggagccctgtagcttcagttattgccatttctatatttctgtccagccaccacttaacctacattttaccatcccattcattccatttatg

SEQ ID NO: 253682 - DNA, 310 bp, Glycine max
acgaggagtacccatgggaggctctcgacaaccacaaaaggacgttgtgaaaattatcatgaagggtcctttgggacgcatgccaatggacatgccatggcccggaaaattctgagggcagggtattacttgctcaccatggaaaacgactgttgaatccatgtgagaaaatcacacaagtgctaagcattcgtggataatgtcaatgctctgcccatgcctttgaatgtattggcagcgccgtggcccttttctatgtggggaatagatgtgatcagaactattgagctcaacgcatcaaataaatatt

SEQ ID NO: 253683 - DNA, 466 bp, Glycine max
  unsure (1)..(466): unsure at all n locations
tgatgttgaactnggtccatccgctgccttagctnttgcaagctggctagttctaggctcttgactctgacatgatagaaccgttttttaaaagagggtgcttggttcgaccccatgtttgctagaatgaaaattgtgacgatcaatacttcaacatcctgtcataaaggcggtatgatgaatgcagcacgaaatatttatgctaagcatgacaaaacgtgcttacctatagacacaagagttcggaagatcatcccttcttacccataatgcattgggcatcatggttcatttgtagaccttaccatggtgcccaatgtatgcaattaaaaaggtgatgcggaccttccggctacccgtgacaataatgacgagacaaatgcgaagcatgagtgacaacacggtatgagtatgcatacacaagagcatatggttcgtagcacanagagaaacatactagatggac

SEQ ID NO: 253684 - DNA, 450 bp, Glycine max
aaacacctatatgtacaatgtacgcctactcactttatacacatggcatacacatgacactggtgagcctaagctcatcgctccacatgacccaaagatgtgcccggaatgccgcacatatatccaagaagagatactgtggaccctgcacaccttgaagaacaagccgatactacacttcccggactttgcgaacgctgtagaagtgaaagtatcctattagacaatatcctggaaaaagaatctcatctacccaattgtaaccgaagaaaatgttattaagaggataatccgcgacttaaaagtggctataaacaatatggatctcaaggaaaatacctgcatagaaatatgccacatgtgatgacaaacagcatcagtctcaatgatgatggaaacaactccgaagaaaataatatgacctacattagtgtgaaccattccttcgtg

SEQ ID NO: 253685 - DNA, 255 bp, Glycine max
acctcaatcctgtgcaccgccctcatttgcatatgagcctgcctaacatcactttattcagaaaaggtgatgacaaattacctacaatcttggcgggaattcttccagtaatcgattgcgaaccgaattccccctttccatccctccatagcactcccagcaacaaatggacaggccataaagagatcttgaaaccgttaaaacgtaatgatacatacctctgttgatgcataaagcaattcaagaatgctaatt

SEQ ID NO: 253686 - DNA, 369 bp, Glycine max
gaaagtgaaacatgtttttacctcaaagataaaagaagaggacatcaagactcaggtaaatcccaacaaggatttagccctttatatacaagggagcagctttcacaatagggagaggggtttagagaaaatacccaattacaaagaagaggggatggctcctccaccttcaagaacctagaaaataactctaaacctaaaacctacctaaaacgtaggacctttgctctcttgctcagcatttcctctattcattggacataaatcgtagtcaggtcagacctctatcatggtggcacgctctctctttattctgtgcacataagctaaaaagggctttctgacactaaggggggcttaccgccattc

SEQ ID NO: 253687 - DNA, 407 bp, Glycine max
gctacccagctcgcccaggcgagcagggatgctttctctataatcaacagccttctggaggaatcttctggatggcccaagtgggcctggttgctatatgcacccccatttttactaagtacacccctctgtcttcttttggtgaatcttttttcgtaaaggtacggaatcttacgaatttcgtaacgaaacatgttctctttacgtaatgttacggaaccttgtggatacataatcatcccctttttgacttacggaatattactgaacctcactaaatgtgcaacgatgcttccatttgattaccggtgtgtcacggaaccttacgaatcgtgcatcaatattatcctttgttttccggcatctcccggtaattaacaaattgccttatgatgggtgccaatcac

SEQ ID NO: 253688 - DNA, 267 bp, Glycine max
agctgatcctgtcagttaattataatattcatcagcgctgggttttatacgataacctaccttttcaatatgcaatgtctatacgtgcagtcaggaactataaaaacataatgttttctatttcgcctggttcttgtgaaaattgatattgtttgagagatgaatattggggtatccaatggagggcttgaatgaggttggtattgttatgagcatagacaattttatatgatgtgttgtgctccacacattgaatgatgatttgat

SEQ ID NO: 253689 - DNA, 409 bp, Glycine max
tgcaagctaaccaggcagtaaatcttctgtctcgacaagttgaagcgaggttccagaatccgagagccaggtacaccaaacagcaccatagaaaatgttttattaattacggggggcacgatatataatcatcaagcacaaattaataatatccgtatatgtggggcacgataaaggtttagttctacaaattaaacaattaattaattaacacctacaatcatttgctggttgttgtctaattagaaaggcttattaatattgaattcataagataataacatgatgactttgtggttatattaagatattggattgtgtgttgcaaaacaaagctgaagcaaacggaggtggactgtgagttcttaaagaaatgctgtgaaacatcgacggacgaaaacaggaggct

SEQ ID NO: 253690 - DNA, 336 bp, Glycine max
ttatgacatttgtctcttataacctttccaccaagtatactcctcgtctgtattttttctggaaaaccaaatgtctactatactcataaaaaaaaaaaaaaaatcgttggaatacacaactggtatgttgcatcataaaattgcatattcagtcaattatcatagtcaagtgggaaaaaagtcctactttaagagtggcataataaactgataataattcggatatacatatatatatgtggcggggtgcatttaggacatcggattacctatgctgatgtaagcagagctaatgcatacttactgttttgattctaaagatggaatgccgcacaa

SEQ ID NO: 253691 - DNA, 390 bp, Glycine max
gagaagaagagatcgcgtagtataatacggctctttgttctaatatcattaaatgtaccttcaacagtcgtattttcaataaaaaaatcgatgttaacaaaacactataaatgttaacatcggttttattgaaaaaaccaatgttaacttattatacgttaacatcggttttttgtatcaccgatatcaactaatgtacattatttacaattatgctaccgcgttttattttaacatcaatttctgttttatcaaaaatcgatgttaacccgaccatgttaaatctacattatcttgttgtgaccatgtaaattgctatgcacatcatcatatgggactagattcaattaggtgatagtcatttaactaaagaaaaagtttatgtttata

SEQ ID NO: 253692 - DNA, 423 bp, Glycine max
  unsure (1)..(423): unsure at all n locations
ttaagtcanctgacgcatgaagcttatnttgtgatgccaagactcacgttttatatatgattcaagaaagtttcaagagtcaaagattctagagatgactcaggatatgcatgaacctcaagaaaaatatcaggggaagttaaaaataatttttcaatgataagattgtctaacacaatttatccaaaagaatttttcatagaaaattttttaccacaagttttactctctgataatcgattaccataaggcagtaatcgattaccagaagcccaaacagttttataactgttttacaaagtagtaatcgtttaccatgagcatgtaatcgattaccaatggttttgaacgttggatttcaaaattcaagagtcacaacctgtgataaaacatttttaaacttatgaaatcgttacacaacat

SEQ ID NO: 253693 - DNA, 194 bp, Glycine max
  unsure (1)..(194): unsure at all n locations
aataaaccgagtaaatcttagatctacactctgtcttgcatttctatgggtcaaaaatttgtagatccaccacttgaataaaagttnttgtgatgaattaaagatccatcattatcattcaaatatatcggctgacctaaacaaaattcctccaaaattgatacaaaaaaacccaaaactagtgtaatacttat

SEQ ID NO: 253694 - DNA, 355 bp, Glycine max
  unsure (1)..(355): unsure at all n locations
agctncaacatcagaccacttccagggtgctgtatctatcttcacatggacttgatggggcctatgcaagttgaaagccttggaggaaagaggtatgcctatgttgttgtggatgatttctccagatttacctgggtcaactttatcagaggaaaatcagacacctttgaagtattcaaggagttgagtctaagacttcaaagagaaaaagactgtgtcatcaagagaatcaggagtgaccatggcagagagtttgaaaacagcaggtttactgaattctgcacatctgaaggcatcactcatgagttctttgcgcccttacaccacaacagaatgcttanttgagagaaaaaca

SEQ ID NO: 253695 - DNA, 351 bp, Glycine max
actatattttactcacctgctttcccttataccaagtgagattaaaatagttttcatattctcatatggaactcaactgagaaagtgggatgacaacattcttgtttaacgaagatgtataagtctctcgtataagcaagaaagaagcatcactcttaataaggaaaaagtaaaacaatgctcatgcttattacaaatcagaatgaataaaacttgccagctcttgaccaaatgattataacaaaaacgcatataattatgtccaaaactagagataagttcaacaacttgagattacaagtgccaggattatatgataggcttatcgacacattcatgttataattaatt

SEQ ID NO: 253696 - DNA, 380 bp, Glycine max
agcttcctcggggccatttcctgcgaaggcaaaatattgtattgttagttttaccagtgggacactactcttaaaacaaaaatggcgtacaacctcctcccataaatacaaacatcaatgtaaatttagagcatgcttatgcgcatatttccttacgaacgttcacttgcacaagacatcctatcaactaaaaaatgcacccatgtacaatcaaggtagcttcattacctagattatgtacttccaaggtgtatttgggatttacatcacacacgcctccttggctgaatttacatacatgcatactcaaagcatttgtggggtaccaaaactgcacatgcgctcatcttggtattgtaatcccatacatatacaaactt

SEQ ID NO: 253697 - DNA, 302 bp, Glycine max
  unsure (1)..(302): unsure at all n locations
aatgtctacgtattgatcggtatatctattccccacatccctgaaatatgtaaagattcantgtcattcaacatacatttgtattattagggaacaataacgtttgacaacgccatgctcgattaggagcatctataatgttatgcctctgactatatctaatactctatactcatggtgcctttgatgtcaaccgaacgtggtaattcatttagctaataaaagtgatgcctatcctgctggtttcatagaggatgtcataattaatgtcggtgaattgatttaccctatagaattttata

SEQ ID NO: 253698 - DNA, 367 bp, Glycine max
  unsure (1)..(367): unsure at all n locations
agctccaagacaactctcctctgcagttgtctttctctacttcaaatncaaatactggcctcactagttcagctactcgtggtaataactctagtgtagattccaattctgctggttcttcctctagaactgctaacctttggcatgctaggttaggtcaccctaatggtcatgtaatgaaacttgtcttcatcattgaacaattctccataaaataaaaatatcacaggttgttgttcttcctgctgtatgggaaaatctcagagattaccatttcgcactcttgttactgtctactcccctttggagcttatcttcacatatttatgtggaccttctcatttgactgtatatgtaggcaaaaata

SEQ ID NO: 253699 - DNA, 416 bp, Glycine max
agcttgtggctgacgtggagcttgtgatgtatgttttcaagagggacttcctccctctcacctaaagttgattcttctgtggacataattcgccccaagcatcaaatttccaatgtggatctttatgaatggaggtctttcaccaggacttgttgtattagtaataggaacaagacacttggggcattgcttaagcttaaggggaaagtttttgagttgtttaaaatctccaatggaaatgatgaatgttctctccacaagggtgatgaggttcatgacgaaggagggttgacctctttcaaggaaaagattattggagtggttagaacgggtggctttgaaaaaaaaagacctgcaaatctttctctccaggagcttctgcatttgctctctatgtcaatcagcgtgcatttatt

SEQ ID NO: 253700 - DNA, 266 bp, Glycine max
  unsure (1)..(266): unsure at all n locations
cttgacattgccaaagaatccgttcttttataacatgtttcatccacgaaccatttgcacctgcgaatggaaggccantcatctcagtgcatgcctgaacactaatcagccttgttctgctaaccagtctcttcgccaatgtctgttcttaaggtctcccagtgtaattggtgtgaaaacctaattggtcccattcatactgtgtacaaccgactgtccaaaagtgtttcggactttttttttaccctaccctgtcagctttccct

SEQ ID NO: 253701 - DNA, 375 bp, Glycine max
  unsure (1)..(375): unsure at all n locations
agctngacagcgcgtgttcaagattcctatatttaatgtccggcacgtaattgttattggcgcaatactttgccaaaatgggcaatgggccctactgttatggtggaatcgaaggaaaaatattgaaatggttctgatttcttacttcttatgaagtcgcaaaactttgtttatntctcatttcataccttttctcccggtgaagtttgaagcaacctttaagacggggtactcaaaagagaattatatatttgctgtaatcagattattacatgttttgggtggagaaaagacggcaaattntgggttggctatatgctccgacattagggtctctaattgagtaaataacagcaaaaggggtactttggggag

SEQ ID NO: 253702 - DNA, 380 bp, Glycine max
  unsure (1)..(380): unsure at all n locations
catanaaactcaagcattgtatactaatataaatngcttgtcatgcccaacatatatatatatcactatgtatgcaatcaagactctacttgcaacgacgaaaattatactagagggaagcacagagacagaatttatagatgattcacaaatctacagcacacccaaggctatgggaacatgccatataactattaagaaaaaatacagctttaaaaacactggtgctgtatcgccctagtattggagatatttgtagttcttaaacccaatttaaacatatctgacctgacctcaattgctccccacaacctatcgtcagcatctgacagttccacgttcctttagcaatacggaatgatggtaaatgaactttttcc

SEQ ID NO: 253703 - DNA, 419 bp, Glycine max
caagcttgtgccattcatcaagggttacaacatgtttgggaccttggattcaagattattatttgtgagtccaactctcaatcttctttggactttatcttgaaggatctttaaagtttccatcctcatcatccgctcatcaactccattcgttttatggcagcaagaaaatggaatatttccttcgatcacacccaatattatcaaactcaaaccagtcattgacttgattggggtactaggtcactgagtcaggagtcgacccagtaagtcatcagttgactcgcatgactcagtctatatttcaaaaaaataaataatttaattacaagtaaaaggttatacttaagatttaaagtttaataaacatcaacatatttagacgcatagttatgaactttatctaaattttgaacatg

SEQ ID NO: 253704 - DNA, 444 bp, Glycine max
tgctatgtcttcttcactgaccaatggaaacaacatcttttttcttctacagatgaatatgaagttcgtccatcttaactgcaacggtagtgccctcctgcaccaatgtcgctgcctaccactatcaactggacacctaacacgcgttgaagcaccgcgcctggtaagatatttctaatacactctgtttaaggctgttcaattgtctctcttgcagcccacatcatattatccttcctgaaacagagttcatccataaatgaattgttttatacaatgcggaatacgacaagataaactttagcatttagtccttatttattaaactgcattagagtggccacacaaagatatgtgatgcatgttaatggaatgggctaacaattatacattatacgttagatgtaagaatcaccactttattactccttaatactggcattt

SEQ ID NO: 253705 - DNA, 340 bp, Glycine max
  unsure (1)..(340): unsure at all n locations
agcttcttatccaaggctcatcttggtggtgaatctccttcttccatggcttattccttaatggatggcgcctcctctcacctattttcctttgtcttccgctgcatctccatggtggaaaatcaccattaaaggaccccattgaagctcaaagatccagcctccatcgaagctccacaagcaagcttccattaagtggtatcagagcacaagagcttcaagtaggtgctccttacacctccattaatttttttttttgccttctcttncattgatggttcttaatttttctccatgtatctcctcacatgtcttgttctaaatgttgttaacatgattc

SEQ ID NO: 253706 - DNA, 385 bp, Glycine max
taaacattcacctttcagcctcccgatatattatctgtactctatcaaacatccgcagaaaaagctattgtcgcttgaatttcctctaggtgcaacaatcaatttcgagcgtctcgatatgttatgggactcaatcagatatccgagtaaaagttattgtcgaatgaattggcttcaagcttccacatacaatatcgaacgtcttcgaattgttatgggactcaatcacatatccgagtcaacaagtatagtcctttgaattggctcacagctcaacaatcattttctagcgtctccatatatgactggaccacatctacatccgagtaaacagtattgccgcttaatagctcaaggctcacattcactttcaggttcgattatt

SEQ ID NO: 253707 - DNA, 335 bp, Glycine max
gcttcttataagctgaaccatcttttcaatttacacaagttgagttctattcagaaaattagagtttatctcttctatcttagtgagagtgattctcctaaattcttgagtgattcaagaacaccctgtctgtatcaaaggactttcacaacctttgtgtgttgccctctctggaaagagagattctttccttcctatcatcttcacccttgttctttcaaaccacaattccagaaaatccacctttgcccaaaattattttgtgaccataactcccattttacacactcaaattaagtgattcttgatcctaaattgaatttctaaacgagatc

SEQ ID NO: 253708 - DNA, 376 bp, Glycine max
agcttgagctcactgttgctgccccacaatgctccacggaatttatcacggccatgctcttccttgcgagccctcttggtttcttgttcaagggctcttgcggtagctgcattttcttctcgtaactcgacacactctttccgggcatctatagcgaccaacttgaatttttctttggcaagactcgcttttcctacttcgattttcagagcccggacttcttcatcttcttctggagcttcgaaattctcttcgttgataatctttaacttggcgagccaatctaaaccccgtgtacgaactttcagccattcatgataaccaccaatgatgccattacgaatgcccctaagttcttatctttccttacgggctc

SEQ ID NO: 253709 - DNA, 402 bp, Glycine max
agcttgtctctacagaagaaagaaacaaatattattgtatattcattgcagataattctttgcagcgatcaagaataattatgaaccaatcaatcaagaagcataaatagaaaattggtcccacattctataaatggtcatcttcagtgcttcaaaaaaatttcccacaagaaatagaaagtacaaaatcatacataaaagcttagaagcaaagtttaagggtgttatcttacttttgatatcctatgtccacacctttgctggggatgaaccaatttcttcatctccctgagtgttattccaataggcactttctttcttcaaatgaccaagctcgttcaacaaatattcagcattgatgtaatggcatccatccgagtcttcagaaaggagttcccaaac

SEQ ID NO: 253710 - DNA, 422 bp, Glycine max
agcttctttagggtcaaggggagccattgaaagaccccggaagatatcatcgtctagtcagcaaacttaattacctcactatcaatagaccaaatatcacatttgcagtcaatgaggttagccaattcctgaaggaaccatgtgttagtcattggaatgccatcatacatatccttcgatatctcaagaatgcaccaagtcgcacattaatataggaagtccacttctgaatattgtgttctcattggaggaaacttgatctcttggaggagcaagaagcagaaaacagttgctagatctagtgcctcaagggctctcgtgttaacaacattttgtacaagcttggatcatatgatatatatgctccagcttgagggggagtattaaagatatgaattgtaattaggaaatatctgcagatg

SEQ ID NO: 253711 - DNA, 444 bp, Glycine max
  unsure (1)..(444): unsure at all n locations
tactgtcagtatctcttcttacaaaatctntcattctaaaccaatactgaccattccttttacaccaataacaccaatgaaagttatcctctcataccattgtttatgtctgacttcataatcattgccaccaatccaatttcataaatgattgatccagcccactacaaaacatcatctcgggtagcaaacacctacaatgcaagacacacaattttaagtcttcaaagggacattcattttataaatttaataacaataaatcacattattccttgagaagtattgaacacatcataacaatcaagatgttcttcttcattcacaccaacttcttcttcattatcatcattcatattaacttcttcagacattatatngttatacatttattgatcntcgtccatcttaacaatacatacacatgccacattttcacatcac

SEQ ID NO: 253712 - DNA, 428 bp, Glycine max
  unsure (1)..(428): unsure at all n locations
agcttatgcatanaaatatatttctctaatcatttatgctcttgagttctatgttgaaccctaaattactgaacctcgatccctcgtcagactgaatcaatccaagcttcatcctcagatccctcttgttggactaggcccaattgagacaaccctcttaggtttagactaacttaaactgagtttcgtctgcagatcccttttgtaagactagactcagctcaagcagcttacgaaagtttagcctaatttagcctaagcttcgtccacagatccctcttgtaagactaggcctagactaaacaacattattgtaacaacataattaaaaccaaaacttaatccgcagatccctcttgtgagactaagtttcgattctacttcaatcaagctctatggcaacaattcatttcccaatgctaaatctc

SEQ ID NO: 253713 - DNA, 474 bp, Glycine max
actcaacctaactaacatgtccgatacacaagggatttgagtggtggacttttattccctttatacgccttcaaaaagaaaaacctacgccaacaacctcacaaaataaatgctttaacaaatgggttcttataccattaaatgggagaccagactgattcatttgatagtaaaaaaatttttggtcatcggtcataaaatttatatacaaaccctttaatctaattggggacatactctaatttcactcacctatattgaattatctgtaatttaataaattcctacacaccatcaaagttaatattaattcttctgataataaaatattctgacgtatataacataacgtgaattacactgcatcattgcatcaaacatatgaattagttggtaataatttatatatgcgctacgccgttccgaattattctgtcaaacagcttagattgaacacatcgggcctaaccaata

SEQ ID NO: 253714 - DNA, 156 bp, Glycine max
atctggttgcgtatccgctcttggcgctcacataattctatattccaattcttcttataattagctatttcgaattctctagttcctgaatgtacaacctttaaaatgttgctcgtccgcctcttaggaatgaggaggattttataggacttcatt

SEQ ID NO: 253715 - DNA, 314 bp, Glycine max
  unsure (1)..(314): unsure at all n locations
cagctctacatgaagctgcattatgtggtattttatcatctttatctacgtgacgttcttttgcttcctctatcttttggtcggccaatgcactttaattccttggtcttcatcatcttgaccatgtatcttctccattggcttgtggtttggtgctgcttaaagtataatcaaaaaaaattaaactgattaaatcttagatctacactttgtcttgcatctctatggttcaaattctttagatctactcttgaatcatgattttgtgttgattntagggtctatctttatttagccataatattctcgtgctg

SEQ ID NO: 253716 - DNA, 414 bp, Glycine max
tatatccatactattttttattctcttaccctctgctcttgaaatcgttcatatgtaactattttttaattacttatttctctttattaaatattgcgttatctatttcataatatcataatatttactttgacaacactatttaattagtttttaatttaatatgtttttgtctacaaaaccagaattgaattcacataaaacagttatacaatatgtttattatattatatttaccaactatttcaataattttacaaacgcttttatataataaacagcttataactttagctttaactggagcttataaacttaacatctattatcagtttgggaaacataccatacctttacttttgttacgcaaatttcaataacagtaatgagtgaacataaaacactgcatttatt

SEQ ID NO: 253717 - DNA, 394 bp, Glycine max
  unsure (1)..(394): unsure at all n locations
agcttatcacaatgagctaagatgtgatttttgtttttgtctttggatgagtgcttatgtacaaatcgggcttcttggtagaataattatcattcttgaatttgcatttgaaaaaatctagagaattatgatacttatgtatccgattcgaaataatcaggctacataacgaatactatatgcgtaatgtcgcttccctaagctgcagttggaaattatccaaatgtggtcattcattgttttcctggcctttctcaacatcctcatcatcatatatagggtgcttgcaatgttttcagtgcttacctattatcctcattatacatttgcacttctcttctcaacaaaaaactgaccaggtatagagaaacctatntgacttaacaaacattat

SEQ ID NO: 253718 - DNA, 407 bp, Glycine max
agcttctggtgggacatcttgacttgcttttctatctgacattcaccacagattctgccttcttctattttcagattgggaatgcctctaacagcacctttgtcaatgattttcttcatgcctcttaagtgcagatgtccaaatctttgatgccatattttgacttcatcttctttggaggatagacatgtggaggagtaactggtttcttgaggtgtccataggtaacagttgtcctttgatctgctgcccttcattagaacttcactcttcccatttgtcaccaagcattctgactttgtgaaggttacattgaatccttcttcacacaattgactgatgctgatcaagtttgcagtcagtcccttcaccagcagtaccttgttcagactaagaagtccatcatg

SEQ ID NO: 253719 - DNA, 427 bp, Glycine max
gaccataaaactcagctgcccaaatagattgaagttgcattcaattaatctctaattagatggatcattttcaaggtccaacgccttaatatgatcacctattaaggtataaaagaatcacttgatatgcaagaactacgtaggtctgattttcttattgcaattggggatacgcttgagcaacagccctgctattgccttccacctcaagagatctttattggtgcaatgccttattgtttttctctctctctaataaactagatattggtcatggtccaacctcatgcttgatctatatgtgcatcttgtatgatagattattacagtgacttcttgccaaatggtgcataaatgatcttttacataactgattaatgatgtcaacttttatgattgtatgccgtgtgcgttcatgaacttcaca

SEQ ID NO: 253720 - DNA, 269 bp, Glycine max
gacaatctcaccatcatgcttcggcaaaaaaaagctcggggtaactataacaatgaacagagggaggaacccatgcggtgactggcattcctacatggccaaatttcccaccaccccaacaatggtattacttcagccatagtggacctttctcattaaccaccaccctatcgacaaagaacactaaccattcactaaggccatccctaaattaaccacaaagccttactggtggacattcaaggcaaacaccacccttaacacttacc

SEQ ID NO: 253721 - DNA, 396 bp, Glycine max
  unsure (1)..(396): unsure at all n locations
tactcagcttagatttcctcttaatagggaatctctccttgctaatattgttccaatttctgtcccnctcattaagaacaagcttatattttcctctatagccttgagctgctacacctttgttggtttctatttggttctaaccctttcatgcaacttctttacaaactctgacctaaattcctcttctttatgtataaaagaagtgtcaagtgggagaggaattatggctaacggtgttataggattgaacccatagaaaacctcaaaagtggattgcttggcggttctatgaaccccctgttatatgaaaattctacatgaggaagagactcattccaagacttatggttgcctttcaaaaagcccttaaaagggtggaatagaactattcac

SEQ ID NO: 253722 - DNA, 309 bp, Glycine max
agcttcttcactagagggttcctccctggattgtaacttgtgccatgattgaaatcaccggtgggacgaggccttgtaagagccgaggcttgagcaggggctctttgtgatggggcagatgacctttgctggatgggtgccgaattggaggggtttccggcatatgccaaaaagcttggatggtgctaagcatattgatgactattgagaggcgttgattggggttttggccaagcaggagccgaggtcacggcatgagcatccctttcttttctttttgccccggccattctgaatcttttgttgctt

SEQ ID NO: 253723 - DNA, 430 bp, Glycine max
acacaaaaactcagcttctcatatcctaatggctgtaggctaagataactatttaacctcatttccacaaatccagaataaccttccaactctcaaagcctcactctgtttccactcacaacaccacagttctcactttctaaccgccagataactctacccttcatctctaacagtttcataagcaatttcagcacatgaacatcacaagcatcatcatataaacccttaaacagaacgggtatgtttaactcattccaacatggcaatttcaacatgcgttcaacaagtgtcttcacatataatcatcacacagcagaaacctaccagactacccatcatatctcccaaacaccatacccacgaaattaagagagaaagagtgcacccaaccctggattttgaagtccactcgtagcacacctttacg

SEQ ID NO: 253724 - DNA, 365 bp, Glycine max
  unsure (1)..(365): unsure at all n locations
tcttaactttatacaagaatgaagctcagataccatttgttggtcaagtggcctcagatatcttaagaagggggggggggtgaattaacatatcacacactattccccagttaaaaagtctacttttaatgtaacccaactacccaagatttcttttaaacaagaactccttgataataatgcaaatttatcttactaaataaaaagaataagcaatanatagtaaaggagtttaagggaggagaaaatgcaaactcagatttatactgtgttgaccacacctatgtgcctacgttcagtctccaagctacccgcttaagagttccactatcttgcanaatccctttacaagatctgaaccacac

SEQ ID NO: 253725 - DNA, 243 bp, Glycine max
cggaggaaagccggggaaataaaggaggaaggggagaaccatctggacgccgccacaggcccaatcccccggccacctgtttaaccagcatgcgccttagtgatacaccccctacaaaaaacagatgatccaaggcagcctaaaaggacaagccaccgtgtaatcaggccaaccacctaccagcagacaccccagggggtttacccaaaagttggaaatacccaatcggagatgcgaaactcc

SEQ ID NO: 253726 - DNA, 366 bp, Glycine max
  unsure (1)..(366): unsure at all n locations
agcttgtatctggatgtggctgatttataatttaatttaaatggaaaaaaaaaataacggacaggacacatataagggttccttataatttcaccaatcgcctttgcttgattttctgttttattcatatttctcttattttgcactttgtttattatggctttaattttttcatattttatttatgaaaaacaaaattgattgagagaagggttgcttccatgcatacaaaactacaccaaccaaatctaagcgaggatttgtagaatcgacctcaaatcctatctttgtaagggtagaagactaatcatgcgggttaacctctcgttggctctttttcanattttaaaaagttaaaatttagta

SEQ ID NO: 253727 - DNA, 266 bp, Glycine max
catacaacggcgtttgcgcatctgtttgaagagcatcgtaaatatctgcatgacattcccgaaagccctctttgccaagatcacgtatcatgtcttccatgagatcttcgctttgtagctcaactggatgagatggacatgttgttgtatgaccaaccaactcaccatgccatatccactttgtgtacgtcgggctaaagccatcacatatcagatgcgatctaatgtcatccaatgaatgacgcctcccgttgacacatttaaca

SEQ ID NO: 253728 - DNA, 434 bp, Glycine max
agcttctgcatgtataaagaattctagagagagaattgtccaagttccagagagtttgagagattttgttgtgcgaagacctacagagactggagcttgaagaggaagtcgtcctgagagcttgagatgagtttgtgagtgattgtgaggtcctagaggtggaggagacatccccactacttgtatttcttcaatccttcaatccttcatctttatcttctctttgttgtaaaggaagcttcccagttatggagagctaaatcctctgttggttcttccttgtaggtacttaatgtaaatacttgtatatctatttaatgatgttttgtgtgttcactgtgctatcaaaactttattctaccatgcttttgccttgaccatatagatgcaagtggtgttaggatcattcaacagtggaatctggtctgattctt

SEQ ID NO: 253729 - DNA, 365 bp, Glycine max
  unsure (1)..(365): unsure at all n locations
gggggccaaatgaagaataaagaggtagagaagtggaactttgaagtatgtctcacaagactctcattcatcanaggtaccacaagtgttacacatgcatctatttatagactaggtagcttccttgagaagctttcttgagaaaactttcttgagaagcttcttagagaaaacttccttgagaagctagagcttatctacatacacacctttcataactaagctcacctccttgagaaagcttcttaagaagattcctaatgaagctagagcttagctacacatacctctctaatagctangctcacctccttgagatgagaagctagaacttagctacacaccccctataataagctagctca

SEQ ID NO: 253730 - DNA, 392 bp, Glycine max
agcttgaagtgaggaagtgtggaagggtgagactttctacttttattcattgaccacagagtggtacctggagatatgtcgcgggggtcaggagaccttggggacgtcaggcggggtgctattgcccaaaaccaagcttgaccaatcccgacccaacccgggcatagtcagtcagtgagaacctgtgacgtacctaaacaggcgagctcctggcagtcaatcgataaaagaacaaagaccacaaagcaaggaggcttgtgtggtggctggccagctatggatcttgagtaatatttggaatatggcctctggtaatcgattaccaagggtgggtaatcgattaccaggcttaaaaatgaagacaggaagttaagatggcctctggtaatcga

SEQ ID NO: 253731 - DNA, 478 bp, Glycine max
  unsure (1)..(478): unsure at all n locations
tagctggtttctgatttactatatatggattgccaatgctttgcctgataataacaaatggatgaccacaacagcgctgggggcggcaacggacaatggtctttcaaataaacctgttgtacatgaacaaacattatatcatgcgctgaccgtgccaaacgaacaagcgaagtcattgcataattggtacactaactatattcaatgtacctgaacaaaatgatttccaaacacgtgaccgacacatatgatgcggtggccagaagagtcaggtggtggttgacttctaagagggaaaaatgtcatgctntgttgttgggacaacgatacattgattacgttataccgtgaagcaatcacatatcccatgtctgttatatccatccacttgttcacactaaccttgatgaaccaaacatacacatcgtagtaanttagacattgttattacaataaataactctaaaacatacctttg

SEQ ID NO: 253732 - DNA, 391 bp, Glycine max
agcttaatatgcaatgtgaaatattgcaggggatatatattgcacgaatttgctttgtacatttgggtaagtgtaagtgtaactgttgttacacttaacttaagccatttttgacaaactcgcttagcgagtcagcgcgataagcgagtgagagagacgtttggtttctcaaagttgtcacttaaagggccgacgcgcggtgcccaaattgaaattcaaatgttttttttagtagggcttagctcaaagcaatgtgcttagtgagtaatgcagatgttaattcctgcaactctcgctaagctggattcagggctggctcagcgaatataatgcatcctatatattgaggagtgcatgcgcttagcgagcatgtgctcgcttagtgctattc

SEQ ID NO: 253733 - DNA, 218 bp, Glycine max
actcacttgcgattgtcttctggcgaagatcaaggggttttattagcaaactgaaccatgcctcataacgcaaaaaaaaaactgggcaatgaagaggtgcgaagaggagaacccatgctgtgattgccattcctatacaaccaagtttcccaccaacctaccattgtcttactttacccataacaaaccttgtccttacccaccacccagttatccac

SEQ ID NO: 253734 - DNA, 245 bp, Glycine max
tgtttaataattgtctgcctgaggtctgcatctgactctcttgtctgaactatttgtcatgaggctgacttgctttgctcccttggactatacttttgataactgatatataagctgtctcatctcatttttgtatacactctaataaaacacccccactttctagcacactacataattcatctccctatttgatatgtcttaaatagtgtatatggatctgttatctatcttcccttgataca

SEQ ID NO: 253735 - DNA, 200 bp, Glycine max
aaatattttttggagatgggaaccgaaagctagaaaaagcccaatgataacaatgggacagagaatctttggtcaacattaggtcacagaatctaaggcctcggctcacttctctgaggccattacagggtgcaatatgagcatcaaatgtggagctgcacaagcccggaaacgtggaccttaaaaggcttatgcagctg

SEQ ID NO: 253736 - DNA, 378 bp, Glycine max
agcttcctctttcttgtctagatgtgatctttctatattgatttttctgctaaggttcctcatttctctttgattaattgctctctggtctcaatcctctaacacttttcctacctctttcttttctagattgtgctcttcctctcaaagcttcctctttcttttctagataactgacttttttgctaaggttccacgtttcacttccaattgccgcccctacgaaatactaacttctgaaagttaaatgctaaacttacctcttcctgtaacgtagtcatttcccaagtaataacatatttcctacaatatcatcaaattaggaagtcaactgatctaatttatatatttaaagaaaaaaacggattcttcaattgg

SEQ ID NO: 253737 - DNA, 329 bp, Glycine max
  unsure (1)..(329): unsure at all n locations
aatggggtganaattgcttcacccctcccctttntaagatttcacgtcagacacgctcgctcaagcgagctaaacatttttttttttgttttgcaaaaacctttgcaganatgngacgttcaatggtatatatattatttaaaaatcctataattgcatataaacttaggcaaattcaggatataattcaagaaaatgaacaagtatgaaacaggaaattaaaaagcaaagctagagatactaggatgcctcctcagagtgcttcttcagcgtctttatccggacgccggatgatgatcgatcgatcatgggcctatcacctgttcgta

SEQ ID NO: 253738 - DNA, 365 bp, Glycine max
agcttgtaccctatgaatcatgggaaactttttcttgactctgctgaggatctaaagcgcatatttcctttaccatgctacatccactagaccccattatgtttctatggacagatggaaaagaggacttgaatttgaatcggggcaattgaagccggttatggctcctcaatgagtagttgaccattttttccccttttcattttgaaactttatgtcgattctttacttgtcggattaattctcttgtaagaaaaattgtggattaaattcaaaccgaaactggccacattctagaaccaatctggcctctttgcatagttcttgactcctccatcgcttggtatgaaaaaaacgcaaaatga

SEQ ID NO: 253739 - DNA, 402 bp, Glycine max
atgcctatggtaatgctctcatttatttatgttacataatattcttaagacattgtgcaagactaaaattatctcctttctgaattagaacaagtgaagttgggaaaattttcatactgaacctctctagtacattattgacataagacatttgggacacgcctaacaatccttgtaatctattttagaatatttctattcctatcacatagcttgcctcacgcatatccttcatttcaaaattactagagaacaacttcttattcttatgaagaatgccaagattattagatgcatacaagatatcaccacatacataatagaaaatataccttacctcactgaccttaaatatgaacatcaacaatatggtgtccttaaattcaaagaaacaatgtgtaa

SEQ ID NO: 253740 - DNA, 391 bp, Glycine max
  unsure (1)..(391): unsure at all n locations
agctnttcgattcattctatgcacccatagatgtccacattgtgtttagtgcatttttattctcgttttgtttactttttataccccctgttgacgtgcttaagccattttacttaagtcgtttctcgcttaacttaaaaataaaataaatttccaccgaacgtttgaattgtattatccattaactttggttaaaatcaattccgaccgttcggtcatgccgtaaccacgttggaaatcaaaaagaggtaaaaaataatataataatcaaaaaatatctttttagtaaaataaagcgganaatcaatcggacgttgttctctgtgggatntctcattcttaatcgaattgattaataactaaagtgaaactaaggctaaaatcaactcgc

SEQ ID NO: 253741 - DNA, 322 bp, Glycine max
tcgcgaccatgatcagtccctatgttgtttattgttctgtgttcttcgcgcgacactcactaaaaccatccatgttttcttcatgaaatcgtatgatgggatcctcatcactgatgggatgttcatttggatatgatgtatgtgtttgtggttgatgtgatggggtgatgctgtaaaatattgtgatggttgattgtatggttggtgaaacgagatttattgggcattcaaacaagaatcattttaagataatacttgtgtgcatgaagtataaatgccaaggcatcctgggttaacgttgttgtatgaaaccttggatcat

SEQ ID NO: 253742 - DNA, 359 bp, Glycine max
  unsure (1)..(359): unsure at all n locations
agcttctaatttcttattntagtttggtgctgaaaaccacacaaaactntatggttgcaaatcctgttcttgcccccactattatggagcatgaagaccccacttataaatttctgcaaggaagaatcatttgaccaattgattcatttgttattgtcctaatagcgacagaaagtgctacacccaaccaccggaacagaaccaacacacaaatgccatactggcgaccataaatttgaacaagaaagttaagaatttggaacaatgttagtcttacaaaattcaaattgaatgttggaaattcaaatttaaccgcgtaccgattaacttaacttctacgatcattcgtctagaaaaat

SEQ ID NO: 253743 - DNA, 423 bp, Glycine max
tacggaccttgaaactcagctgtacgcaagatcaccgccagcgcctcgtcggcgtcgcaatccatcgactcgcgagtcaactcggcgattcttcgaatcagcactttgaattcgaaaccaatccctagcttctccgcgtgtctccccagcaacaatcccacgctgttcagcctctcgtcggcgccgttctccgccaccgcgacgatcttcacggcggatggagctcccttccgccgcgccgaaagctcgtggagaaggctcacgtattggttcccgtcgccgatatcgaaatccagcacgcacagcttcccgttctcggttaatgcggattcgaggattgcgatgttggcgaccatgcgcgcgaccttgaagaagagcgagtgttcgaatagtaactgagttgactcggcgtgttctatgctg

SEQ ID NO: 253744 - DNA, 180 bp, Glycine max
  unsure (1)..(180): unsure at all n locations
gaccttaagcgactgacgcagcaactggaatatgcctgggtatattttttttntgccgacccagccactaccattatctattcttggcatctaagattccgattcaaagacccactcgtgaacaacttcacttttctccctttaaaaactgatggtaggagatatcactttcctaacccc

SEQ ID NO: 253745 - DNA, 406 bp, Glycine max
  unsure (1)..(406): unsure at all n locations
agcttgtaggattatggngtacccatcacatgtggtactaggtggcggtcgggcgatggtgcacaacaagtttttccacatccacaaatcgcgcataaacccaccatcccctgttgcccacctccaactgagctcacgtactcccacgtagcccatatcctcgtttctctcaacaccgggtccccatcaatcctcccaagcttccccaacatccaggtaattcaacattcaaacaacacaaactatcacagccaataaaacagggcaaaggcagaaaactctgcccaaaacaccaaccaaaatcacagcttttcccacttaaagaccgcagtaacatttccttcgtttcaattcgttaaccgttggatcgactcgaaaatttactggaagttctagacataaccta

SEQ ID NO: 253746 - DNA, 309 bp, Glycine max
  unsure (1)..(309): unsure at all n locations
cttcttgcttttattggtgaccacagagtggtacctggagatatgtcgcgggggtcacgagaccttggggacgtcaggtggggtgctattgcccaaaaccaagcttgaccaatcccgacccaccccgggcataatcggtcagtgagaacctgtgatgtacccaaacaggcgagctcctggcagtcaacagataatatgaacaaagaccacaaagncaggaggcttgtggtggctggccagctgtgaatcttgtgtgatatatgggttatggcctctggtaatcgattaccaacggtgggtaatcgatta

SEQ ID NO: 253747 - DNA, 66 bp, Glycine max
  unsure (1)..(66): unsure at all n locations
agcttgcagtanttctttaaatgtaaaaatgtgagtgtatgttctgaaatatgaaatactaaattc

SEQ ID NO: 253748 - DNA, 419 bp, Glycine max
agctttatgtaaaattttgcatcttgtatgatagatgttctctctttgggattgagatagatcacaagattgacctccaaggagccttctaacccttaagaggtcacctttttcatgggggtaaacttcctcactagactcttcaccccttaattcatcttcacttccaatagaggaagggcaagaagtagtctcctcttgactactataaatgtcttgaaccctcatgatcatggttttctttgtagggcattgagaggcaatgtgacctctcccaagacatttgaagcatttaatgttgctagtcctttcttgggaactagtattaggggtggtattctctatggtcttacccttatcttccttggcgtttgaaggtgcagcccctaaaaatccatgggcttggtccttccttggat

SEQ ID NO: 253749 - DNA, 373 bp, Glycine max
  unsure (1)..(373): unsure at all n locations
tgatcatgattgggactgttgaatgatttggccagaatggatgaaaggaagtgttgatttccaaatctgcacttatgcagaattatgctgtcaaaatatgtgcagcacgattttggctttgtgcacaaaaatgcttgggttgtggtggctgtggaaagtctaatgcagaatgagttctggattgttgctagtagatcccaacggtcacaatgtaggcttatgtactatatacttccagtaaaattttggagtcgatccaacggttaacgaattggatcgaaggaatngttactggggtctttaagtgagaaaagctgtgattttggttggtgtgttgagcagagatatctgccttgccctgttatgcttggct

SEQ ID NO: 253750 - DNA, 420 bp, Glycine max
  unsure (1)..(420): unsure at all n locations
agctnntcatggttggcaagtttctataggagatttgttatggattttagtattgcggcagcacctcttactgagatttccaagaaaaatgtagcatttaaatgggggaaaaaacaagaacgtgcattcactacacttaaggaaaaattgataacaagaacatgcattcactacactcaaggaaaaattgatgcatgcaccaattctcgcattacctaatttgacaaatcctttgaaattgagtgtgatgcatctggggttgggataggagttgttttaatgcaagagggatatcccattgcctaatntagtgaaaaaatgaatggggttgtccttgattattccacatatgacaaggagttgtatgcgttggtaagggcattacanaattggcagcattaccttctacccaaacaaatt

SEQ ID NO: 253751 - DNA, 380 bp, Glycine max
attattactgttgtgtcttccaagtaaatattggatgcctaatctaccctaagggggttcgagtaagtgaacgctgacccttatagagccatacttatgtcttccctaatacaaaaagtacaggttagctcgcctgggcaagcaccccctgtacgagatgagttaaaagagagggaggggtacgtattcttcaacccaaactcccctccccccactttcataaacgcataagctacgggacttgccatttttgcgctcccaagccaccttttgttgcattatgctttcgttattgatactcctactcactccataagtaggtacctcattcttgggaacttgagctttccattgatgtattttggtgctctaagttgcat

SEQ ID NO: 253752 - DNA, 421 bp, Glycine max
agcttattcgaagccccttgaattgattgtctttcatgcatcctcaaccattgagtccggagccccacgaatagattgcctagtgttgttcatgcatcctccaccatcttattcggagacctatgaattgattgtcgttcatgcatcctccaccataaggtccggtgccccacgaattgatagcctagcccttctcatgcatcctccatcatcaaatcttattcatagccccatgaattgattgtagttcttgcatccttcaccattgagtccggagccccaccaattgattgcctagcactgttcgtgcatccctcatcatcaaatcttactcggagccccatgaattgattgcggttatgcattctccaccatgagtcctgagcacagaattgattgctagggtgtcgtcttctcccca

SEQ ID NO: 253753 - DNA, 297 bp, Glycine max
  unsure (1)..(297): unsure at all n locations
ttgaagttatcatttanaattctactaagtaaatggatcaatttcaacgtccgacgccttaaaangatcacctttttaaataaaaaagaatcccttgatcagaaagaactacgtacgtctgatttactcatcacaaactgaggaatacgtatgagcaatgggaaacacccttgtcgaccacaaaataggagaaatatataaagggtataaaggatattacgacataaaatggaacatataaaccagagtcacgtttgcacattcgattaaatgctgccggtccttgggacggacgta

SEQ ID NO: 253754 - DNA, 387 bp, Glycine max
agcatgcaagctgtacaagcaacggactcgctgcatctgttatcatttggaaggtcttctgcccacggtgacagcttctcgcagttcttcaacacttctatagagtctctccatgaagacaaaacatcatagctaaggaatgtctttgccttgaatataagattcccttcttctaagtcctcagtcattcacaaggtactctgcaccacactttaagcctgagatggtgcctgctgttaaatcaacagcaattccatacaaaaattggccgcaagctcaaaagcctctgccccaccagggatatcatcgataactattttattcaaatcagggtcggggatcctatatgactctactaaccttccgctctaaataccagggatactt

SEQ ID NO: 253755 - DNA, 331 bp, Glycine max
aaacggtcggaattgacgacatgatcaatacgcacttatcaaatcgaatgaacaagacaaactatttctcttactcattatagccttattctaaactgagccccgggcccattttcataatattaaagcatttttcagtaaacattttaaaataccaatagtaagtgaagaattaatgttaatcaatccactttcacttcaatatagggctcttacacacagtgtgggatacgcccctatctcactcggtcatcactatgtggctcaataattttgtcttaaaaaaaatgaaaagaaagaaagaaacgtgccgataacaaaaatgggaaga

SEQ ID NO: 253756 - DNA, 427 bp, Glycine max
  unsure (1)..(427): unsure at all n locations
agcttctaattaagccaagagcatgtgttgttattagttaaagaaagaagagaagaaaaggattgatcagggtgtgtctatctttactctttggtttttcatgtatggttttacacatcttttgtttgtgcatgaatcattgaagtcatgctagaatatgtgattctagtttggactaagggtagatttctcttatgctcttattcaaaaaagaccctagtgttaggtgcctaagtctctttttccagggttggaatcgtagattgcttgtaaggattctatatgcatagtgaaaatctaatttgagttttggatagataactgaatagcttctatagtgataaagagtgaaccaatatanaaaggttgcgacttcttctcttgatcttattttctntctcattctaggcctgataaattttctaag

SEQ ID NO: 253757 - DNA, 419 bp, Glycine max
  unsure (1)..(419): unsure at all n locations
actcagcttacatcctgttggataaatctttatataaattgttatgttgaggttatgaaatgatgattcaaactgtgagtatgtgataaattgaacatgtgacggatgatgaaatacatgtgtattgagatgagatgtgtgtattgagttgtgaactataaactatgcaatcacacaattgtaagaccctttaagggcgacgagtattgtgatgggatccactgtgggaatccgacgagttaaaatgattttgaaaacaattgagtaaatgtgtgtatntcatagttcatagataaagtgtatatgattcatgaggtgtgataacatgttaaatggttgatataccattgtgattaagattaagtgtatgtgataaattgagtatgtatatgattgagatatatatgtacattgaagtg

SEQ ID NO: 253758 - DNA, 422 bp, Glycine max
agctttacacaggcaagtgtttcatcttatatttctaatcacagatatgttataaatcgatattgcaagtcatttcccacaaatcaaggataatgtccataatcatcatggatcaataggaccttttaagatcggacttgtaggaaattttggctttggttgctctagtctttctttttttggtgagtaggagaacaggcaccaagatttggttagtaacttgaacgggttatcacttcctatcccctctcatcttgaccaagttactatcgtttcccttcctttttactttttaccacaactctgtacatgggacaaacattgtttgttccaaagaaactcgttttcttttccattttcccttacccttctccaatgtgatagaaatttcggaccttctcttttctttctttcttttattt

SEQ ID NO: 253759 - DNA, 498 bp, Glycine max
  unsure (1)..(498): unsure at all n locations
tacgcgacactatataatacatcagcttctattatntatgacaacagaactatgatattgaataatctattcatgttgcgtttgatgagactaacccatataggcttagaaagggaacacttgatgattatatagattcattacaagacctgcacattgatgagaaagagcacaaaagcacaggaaatggaaaattaaaagactttcaaattgatgaaaattaaaccaatatatatcttccaagaaagtggagaacgttgtgatatcatcatcttgataatatcatcggtgacatctcaaaaggggtaacaacttgacactctctctaagatgcatgcaatatatggtttgtgttctttaattgaacctataaatttatatgaaaccataatttatgaacatcgggatattgctttgtcacaagagttaaatcaatcttgaagaaataattcacggagatagtgacaacctgatattatcattatatgactaatggga

SEQ ID NO: 253760 - DNA, 331 bp, Glycine max
agcttcttatatataggcaaacatggaatattcttttcttcttggatatgttctatgttattgtgagatgttcaagcagcttaaatacagcacatccactaagttgttaatcttgtgacctgttaaagagcctgtactttgaggatcattatagttgtagtttattcagttagtggaataaatattggattcactagatatataagttcttatcttagttatacttgaacttgcacgtcaaatggagaaatggttggttttgttctctctctgagaaggctactgcccaaggcaagccaaacccatgccctttgcattccaatggctaaaa

SEQ ID NO: 253761 - DNA, 261 bp, Glycine max
tattgtaacttaaaaatcccaattccataaaactatcttagcacgcttcattacatcccaatgcatattttaaagagaaatataatggggctattctttactattctacataataaaaggaattgttgccttaattagagctatgaaacttagctacattattttttggaaaggaatatgttttcacaatgatcataatgtttaaatacttgaaggacagggaagttaacatcagctgccattcggtgaattcttgacacc

SEQ ID NO: 253762 - DNA, 425 bp, Glycine max
  unsure (1)..(425): unsure at all n locations
agcttctttcctacatcanagtatatataatttatattataattaaagaattatgttcaaaataataaaaataactttatgtaaaattctaaaccacttcacttgtttttaagtaactaattccaatcttctggatatacatagtttggcctatccttttctttaaataagctttatgtaaatgataaaacttattcttgtattgagattgaatttgcttcattgcatattctttcacctcatcatttacactaaaaacatccttatatcacatgttttcacataaaaagtaaaaattaaatactatcaagatacatgatgagacccattngaagatataactagtattcaaatatataaataaatggaatataatngatctaaatatatactaacattcatatgtcaccacatttcatctacat

SEQ ID NO: 253763 - DNA, 439 bp, Glycine max
  unsure (1)..(439): unsure at all n locations
tgcattaggaacttaaaactcaacttgcttgtaattaaactngtcattatatgctatagacacattatatatgcaatcattaagttaacagctgcagaaggtttagcaaaagccatcgcaccaagcaaaagttcaacgctttgcaaaaaggaaaacggaatctcagttaatttctttgctttaatttggcatctgtttcagcaattgactaataattaaataaattgcaatccactaaaaaaaagtcacagttggcttgggaaccggtggaaaatatatcacaaaaatgggcaccagcaacaaacaaaataacatgaattcaaaaaaatggactttcccattccacctcaagaacacataacacatgacaacgttgtgcaaaaaatatcacaggcacacataagcaaaaccacataattgtntgggtaactttacaact

SEQ ID NO: 253764 - DNA, 348 bp, Glycine max
agcttgcaataataatagtttgatgacatttctctctccgaaccctcccatgcatggcctcttccgcattcctttccgttatctcattatctacgccatccgtctcttgtcgaacaggtgctgcgcgttacaatgcggggtttcctacgacacgatcaccgtcctcaacgcgttccctcacgacccacaagccttcactgaggtcaaccttccctatttcttcttttgttgagttaatgtacaatctgattcgtcaaagtgatcgatgatgataaattgataacctttgcagcttcgagaggcgatcccacttgggagggtaacgtattaataatctactggtaccac

SEQ ID NO: 253765 - DNA, 328 bp, Glycine max
  unsure (1)..(328): unsure at all n locations
tggactagccagtgatggaatgaatccatatgacaatttattcactcaacacagttcatggccagntctactagtaatatacaatntgccttcttggttctgcatgaagccaaaatacatgatgttgtctatgatgatatcgggcccaagacagccaggaaatgacattgatgtttatctaagtccgctgattgaagacctgacaaaaatgtgggataaggggggttcaatgtttgatgcgtntcanatggagacttatcaaatgcgtgcaatgcttttatgtatcgttaatgactttctatcatatgggaatctgagcggttacagt

SEQ ID NO: 253766 - DNA, 436 bp, Glycine max
ttaagcgactgagcatgcagcttgaagcatgttgaaatagaaactgttttattatatacggcagaactagaactccacatgcattaagaaactaagaatgaaaaaactctttaaatcgcaacaatttataacctgaaccctcacagatgacaataatttaccagggagaatatattcaagttaccagattctaatatataattaggccaattaataaaattatgaaaactaaaagctacaaagcattcaagctggttgaacactttcaatagaagtttggaatccaacgcatcttagctaataagacaacaagaaataacatattctggtaaatgtaacaagttatgagaatgagtatgcccagcaagggtgaaggaccttctgatgacaggtttaagagagttgaaaagaaacactttctgacacaaaataaaac

SEQ ID NO: 253767 - DNA, 373 bp, Glycine max
  unsure (1)..(373): unsure at all n locations
gaaaatgaattaactgcactgataaaatgaatagagtatctctatagtgcttaaatcaacttctccaagagccacttactcttacagagactatctcatctaatctaacgtattcaaacgctaaagtgcataagttgatattagcttatgcaacaagctcaactcattcaatcattttatattcttctactaagtgtgtgaggatgaatgggttatacacttctgctctgacatgtaaaccccacggctacccttgccagaaccaatgtgggccctacttctgaaaacaacctcgnccttccaagccgcatcgcatcaagcagtgcttcgttcccaattcatcaacgcagcatgtgccgaacagagaacacac

SEQ ID NO: 253768 - DNA, 309 bp, Glycine max
agcttaacaaatcatgttgggagttgtcgtccaactattttctatcgtctaataacaaccaactccaaggatactgcttgcacactctgaagcaacaccatcatcaccaacatcaataccaccaccatccaatcaagagtgacaataatttccaatcatcattactttctttgaaccctagagctttttgtcaattccacaaaggaatttaaataatacaatcgcggattggaatctctggatgccttattactattggctgtatatatatataaaaatatatatacgctctacatgtcatgcataaag

SEQ ID NO: 253769 - DNA, 270 bp, Glycine max
ccagctgtcgaaaaaggttgagttatattaaatactattttttatggatcattatcaaggcccacgcccttaaatgaacaccctttaaacaaaaaagaatcacttggtaacaaagaactcgttagatgagttcctatcacaattgatgaatgcttacgaatcataggaatcacacctggcgaccaccaaaaaggacaaatataaaaggggataaaggatggatggacagtaaagggaacataaaacaaaatcacgtttgacattcgatga

SEQ ID NO: 253770 - DNA, 382 bp, Glycine max
agaccagaggaatatggagcacccgccttatttgtgtctatgtggcgatcgggcgaaggcgcaaattaactctcccactttcacaaatcaaacatgaacccaccatccccagctgcccaccttaaactgagctcatgtactgctacgaaacccttaccctcgttcctctcaacaccgggtccccatcaacccctccaagcttccataatatccaagcaattcaattccaactatcatgaactaccctaaaccaagaaaatagggcagaggcaaaaaactctgcccaaacacattcacatataacagttttccttactccaataccccagtaatagtctctttgttccgactcgttaaccgttggatcgacttgaaactttta

SEQ ID NO: 253771 - DNA, 368 bp, Glycine max
  unsure (1)..(368): unsure at all n locations
tatattanatacacattataatagaacctctcattattctttttgttgttagttaattgtcataagcttggtaaacattgaatcatataaaagtgatgtatgtttaagcctcttccattacttccattggtatttgatgacataaagaaggcattgctgaacattgagttggtatttttgggatttcagacccaatgaatgcagggtatatagtaattaacctagtgaaagccaatgtctcaaatgaaagggacaccaagctttgccatataagctttgatcctatcatccaacccaatgaatgagggtatacctctgaaggcacttattctgcattctgtccaatgccacaaccaaagggtaactaa

SEQ ID NO: 253772 - DNA, 291 bp, Glycine max
  unsure (1)..(291): unsure at all n locations
agcttgtntgaggacagctcgaattagttatttttattgattggatcatatgaattgaaacgttatgtgtggcttcctcggtctgcgcacaaacagcttacttgtggatacacctaattggcgctatctaaaaatcacaacttgacatggatcctagttattcatgaatggtttgctaaaatggcccaacacctttcaagctacaccttgcaggaattttttggatcattggccaattgtgcttcgttctagggaaattgatggggcccaataccttttaagatcaggatt

SEQ ID NO: 253773 - DNA, 348 bp, Glycine max
  unsure (1)..(348): unsure at all n locations
tacataaatgcgatcgacatatcgagacataataatctctatacttttgatntacacatattcgctgacgaacatatatagaactttgacctggttatataaacaaaccaagtgcgtaaatataaaagggttagacgtaattaaaatggaatacctcaatataaatatatgagttcctcctaataatatgtgtggtcaaataatacatgtctatatgatacaagggagctagctacgaatacaattgtggtcatcatcattagttacataggcgtccctaattatatataatttagatgatacatggnttgaccaataattcatttgtcctcatctacatcaataata

SEQ ID NO: 253774 - DNA, 413 bp, Glycine max
agcttgcatgttagctcttttttatttatatgtatgtagcttaacttatcctccctccgatattatttagaagacccaaatttgagatgatattttttttttataagaatcaatttataatatttcttatattaattatttttacactagaaatgtctctaattaaaattgaaagaatgtattgacaaacaattaaaagtgaaaagagtattaatgacaagaatagttttggaaaaattataaatttaagataaatttattgttatgaactaaaataatcatttttcttaattgtgataaattaggtacctgggccttatatataagatcagatggattatctgaaaaatattgttgaatctttcatgatatcacaagtaagttgggatttttatcagtttgttaccatcttc

SEQ ID NO: 253775 - DNA, 360 bp, Glycine max
  unsure (1)..(360): unsure at all n locations
tatcttcctaacaanaatttcatgcaggtggaccttcttcaagttatgttgacttaccgcaacttcttatccctcttccattcccacctagagcaattccaaacaaaaaaatggaagaagcggataaggagatcttggagaccttcaagaaagtagaggtgaacatacctctgctagatgccatcaagcatattccaagatatgccaagtttctaaaggagctgtgcacccacaaaaggaagctcaaaggcaatgaaaggattaacaagggcagaaatatgtcagcattgataggtaaatctgttcctcacattcctgagaaatgttaggacccaagtactttctgtataccttgcatta

SEQ ID NO: 253776 - DNA, 425 bp, Glycine max
  unsure (1)..(425): unsure at all n locations
agctntaagagtcttgggtaagggccactgcatattattttctatcttttggggatccattgataccccatccttagagataatatgttcaaagtatcctatcttagtttttccaaaagtacacttctacttattgacaaagaaagagtgttctaataatctggccagcacttgtctcaagtgctttaaatgatcctcccatgttttgctataaaccaaaataccatcaaagaaaaccaaggcataccttcgaagaaaaggcttaagggtggcattcatagcacattggaaagttgctggagcatttgttaatccaaatggcattactagagaattctaatacccttgacgagttctgaaagctgtttttggaatgtctggctcgtgcattcttatttggtgatatccagcccttatatctattt

SEQ ID NO: 253777 - DNA, 389 bp, Glycine max
  unsure (1)..(389): unsure at all n locations
ccctatctctaacatcttctnccttttggctttgatgatgccaaacttgaacatggcattgagcgcatttggagggtctgagtcttaagattagagacttgcttttcttaatcaatcctaaaaactcttaacacttaagaaaagatcaattcatatcatcatcatcatcatcatatatcttagtatatatataaatggtgctaatgctgcaatataatgcagtgcagtatgctagttcatctcctaaatgcttatgtaatacaatgcaagcaaatatgcaatatatgtagcaataatattcatatcttcccttatgcaaatatgcaattcatctcccctctttgcattaacaaggccaacaatgtttgaatcattcatataacagaaca

SEQ ID NO: 253778 - DNA, 432 bp, Glycine max
agcttataataagacataccagcattttattgtactctttctaggaccacaatattggtcccagacacaatatacacaccctgttccaccacataaaagggtccatagaggaaggccaaagaataatagaaggagatctgtatatgaggacaatgtcacaggacataaactaaagaggaaattggctgagtttacatgtggaaggtgtggccaaaccaatcataacattagaagctgtaaaaatattggagttcctgttaggccaaagaaatatgttgcaccatcaactctaaatgaggatgaccacctattatcttaagatgaacaagctttgaatgaggctgaagaagctgctgctcatgttcaacaagatccggtggagattaatttatctcagccttctttgtcacaagatagtgacattgagttgat

SEQ ID NO: 253779 - DNA, 246 bp, Glycine max
atttgaaagaccacggttgcgaagctgggcgcgttttaccaggcgcttctgtactttctctaagcttcattagagctctacacactcaattctttcaagatccaacgtcgacatgacagtgtttggaagtgcaacaatgcagaaatcaacgtaacaagctgacagcgtttcccggcgctatgagttcttaaactcttagagctatgacctctactctttcagatccaggtaacatgcagtttggag

SEQ ID NO: 253780 - DNA, 383 bp, Glycine max
agctagagataaggaagtgtagaagggtgaaacttcctacttttattcgttgaccacagagtggtacctggagatatgtcgtgggggtcaagagactttggggacgtcaggtggggtgctatttcccaaaaccaagcttgaccaatcccgacccaacccgggcatagtcagtcagtgagaacctgtgatgtacctaagcaggcgagctcctggcagtcaacagataaaaggaactaataccacaaagcaaggaggcttgtgtggtggctggccaactgtgaactttgatagatatatgggatatggcctctggtaatcgattaccaagggtgggtaatcgattacaaggcttacaaatgaagacaagaggctaagatggtctc

SEQ ID NO: 253781 - DNA, 339 bp, Glycine max
actcaacttactataacaccaagagaagaaaggaaaatgcttctttataacaaaaaagccaccgcaagaagctacattaactcgtgcataaggcacttaactcaagggagaaacatatcacatgatacctccttaataaccctaacatgagaggcttatagagaaacttatgcatacagggcctaacacatatatgataaacaagggatgaacataatcttattcttctttcgtgaacatgagagctcaccataaacaatctaagaaatgtaacagtatgaaacaaactcaccccactcgataatatcacttggagaatgacgagcacccacatgagaa

SEQ ID NO: 253782 - DNA, 338 bp, Glycine max
  unsure (1)..(338): unsure at all n locations
agctaggagcttataagctaatcaactagnttttattttacattgcctacaagctcaaaaattagatggtagttgtgagttgaaagatatcgagctagcttattgaactataagtttttgatcaaattatatattatagtaccaaataaatataaaataataaaaatgagcatgttactaaatattattgtataaattttaatgttattttatgcatgggtaaatataaattttgacgaataatttttttttggctcatggagggtctaaaaggccaaactaattaatggcctcttaaaaatgatacatgatcaacatctgcaagaagaggaatatga

SEQ ID NO: 253783 - DNA, 424 bp, Glycine max
cgggaccttagatcgactgcagcatgcaagcttgaaataatgaaactagctaacttatcttatttaagattcacttatttctcgcaaggttccttcatccattaaaggtgatagcgctacacatggccgttactgtgaaaagagagatagtgggaactctaaacactctttgaagcatatcttcatagaactacaacttgccagtgtcgtcttgcgctcaaaagtgacttttagtgtacaaatcaaatataacgttaacagcataagacaaaaggaattaagaatattaagacaagacaatttaaatcttcccttttgtgcggtgcggcacgagttgttaatgaacctatggacgctactttctgatgattggttttcgccttaacgatagagtaaatgttcattgcctttgactatgaccaag

SEQ ID NO: 253784 - DNA, 378 bp, Glycine max
  unsure (1)..(378): unsure at all n locations
accttgaaactaactgatggatncccgtatttatactataagttctttgttttattaanaacatgtttatagtgtgggcgagattaaaaagtctaatatttgactaattatggcataacacatattgaccaattctatcgcatgggttaaacttaaatctaatacaagtcgttatgttaaaaattgaactgcacaaaatgtcaaggtatatgtgctatgcaaaagtgcatgtctgccggatcaaatcaattgttgaactataactaaatggaatgaaagcaatgtggttccactatgacacggagagtatcacagatcctctataaatctcatgatgaatggaaataaaaagatataatgccattgatgaacaaatgt

SEQ ID NO: 253785 - DNA, 381 bp, Glycine max
agctattctctctcctcactcagccaattctttatttttcagatgctctccctcttcctcacggtgctttttccttctcctccattctccattgaaaccccaacaaagctccaacctttggccatcatttctgctccaaatcaggaaaggagggcattttcggggacgtgaagtgcgtggctacaagtgggacttcgaaaattcaggtgggggtggactactttcttctttaattttcgtgggtatggggtttggggagatatgatgggtagtcttgctatgttcctgctgtgtgatgattatcttgtgaagacatttgctgacagctcgttgaacatgtcatgatggatgagataaacaacccattctgtttaggggttt

SEQ ID NO: 253786 - DNA, 301 bp, Glycine max
tggatatccattaagtaaggaatctatgcttcctaatatggtattctcaacccacttaccctcattaagaactaggctctttctttctctattgcctttaactgaatacacctttgtttggttctctatctggttcttaaccctatcatgaaacttctttacaaactctgacctagattcccctactttatgtataaatgaagtgtccaatgggaggggaatgaggtctaacagcgttacgggattgtacccatagacaaccttaaaaggggactgcttggtggatctatgaaccaccctg

SEQ ID NO: 253787 - DNA, 400 bp, Glycine max
  unsure (1)..(400): unsure at all n locations
agctntagcctgtggaactgtnggtgcttttttgtttacagaatcatcagaaaacagcttggacatcttcttgtcaagtcaaatacaccagagcctgagccaaaagaagactctgtccaccaccacaatataagattcctcgatgatgttgcaggcccaaagggtgctcaactggaaataagttatggagtctttgggtacatgcaggtcctctcagcatgtttcatgtcatttgctcatggcggaaacgatgtcttcaatgccataggtccattggcgggtgcgctagctattcttcaaggtggtgccgcaggaactgagattgtgattccaactgatgttcttgcttggggaggaattggcatctgtgcagggctaatgatgtgggggtatagagtga

SEQ ID NO: 253788 - DNA, 266 bp, Glycine max
agagaccatactaagttttctaacaattatctattatgtgggccattaagactatcatatggctacaattacccgtaagcccatgaatctcttccggggcggagtatgtgtctgccatcgacttggccttggcttacaatcggggaagttcttgactcccgttcaaggtaaaagcaaaccgatccatccacatggttgcctcttggtgtaaagagtcgaacaccctttctctatcctctttttccgcgtatactatggcatattcg

SEQ ID NO: 253789 - DNA, 391 bp, Glycine max
  unsure (1)..(391): unsure at all n locations
catgcaagcttgtaatcgattacacatatactgtatttctttatctgagcagattttcagaaaatattctcaacagtcacatctttttatgtggttcttgaatggctatcanaggcctatatatatgtgacttgagacacgaatttgcgaagagtttttcagaacaaaaaagtcttatcctcttataaagcaaacattgttttatcctcttacaaattccttggccacattacttgtgattcaataaggaatttttgagtgctcaaattgttcaatctatctctttcaagagagatttctttttttcttttcttattctgaaagggattaagagaccgaggtctcttgttgtgaaagaattctaacacaaaggacgggtcgcctgtgtgtt

SEQ ID NO: 253790 - DNA, 407 bp, Glycine max
gaagattcctaaagaagctagagcttagctacacatacctctctaatagctaagctcacctccttgagatgagaagctagagcttatctacacaccccttataataactaagctcacccccatgaagaaatacatgagataacagaaaagtccctactacaaagactactctaaatgcctcgaaatacaaggctaaaaccctatactactagaatggacaaaatacaaggcccaaacgaaggagaaacctattctaatatttacaaagataagtgggctcatacttagcccatgggctcgaaatctaccctaaggctcatgagaaccatgggggcttcccttggatctctggccccaatcacttgaagattttatctcatgccttgcggggacgattggtcattcct

SEQ ID NO: 253791 - DNA, 366 bp, Glycine max
agcttgtctctacaaaaataagtcttgttgatgtcatgacttgcacactctattagagggtgcccgccctcgagaaaagtgagtaaggcgcttataccttccccgtgcataaacaaattgtgaaccctcattttcaaaaacacagatcattcgccgtttggaggcaactccacgcatttttcttcaatggaagacgcatctctggacccacgtaaagccttcttgtgcccccggtggagggcaggttacgatgagtgatgactccacaagggaccgtcatagacgatggccgaccatacggagtgcaacgatttaaccatactactttcttattatacttcctacaccctcaaccgctggtgggtc

SEQ ID NO: 253792 - DNA, 462 bp, Glycine max
taagctattggtagcactcttgtggattaaaatacttctctattaacatattgttgtgcgtcaggagtggtctaaagaatacttgttatagccagaagtgacattgagaatacttagttgttatcaaagatttgaatagtagaatccttcaaggtttgaagtaaaactggatgtagcccaagagttggggtgaaccaatataaaaccattgtgtgttctttactgcttctatataactatttcttttctataaatcacttatatactactatatcccaggtttgtgaatcggtcttttaagcacaacatgatattgagccccttggacaaaaccattcttccattgatatttgtttgagaaaagcttttaatagttttcaaaagagtaagtttttatccatcacactattcaaccccctttctcgtgtgttcacgatttcagttgtatcagacctatctcta

SEQ ID NO: 253793 - DNA, 403 bp, Glycine max
agcttgcatgtaaaagatctgcgtgtctttctttgtgaactcatccgacggagaagagacatgtatattttgatcgaacgccacttagagaatcttggaagactaccttcccttttagtagtgaagagatcacgtcccatgtcttgtgttggacgacacacccttctttgaaatagtaaacatcaagtccattgtcacataatcgacttatggtaagcatattatgtttaagcccttcaacaaaaggtacattatgaatgggaggataaggatcaatacttatctttcctactgctgctattttccccttctgagttcctctaaaagggattggtctaccatgcatgagagtgaggcatcggagcatacacctttctcctgtcatgtgacgttgacagtcaca

SEQ ID NO: 253794 - DNA, 350 bp, Glycine max
  unsure (1)..(350): unsure at all n locations
tcttctccaatatattataaaagaactatgactctttgttaatctatgtatgtntcccttgacgcgtctaatgctatttcttctataaaggatgttctacatgatgttgcataatcttttgaacgaatgcatattcatggacaaagattcttaanggaaagggagatgaaccaatgaatatcctccagaataagccataccagataatgaacttccctaaaaatgtagagcttaaaagatcatccccttgacaacattattggtgatatctctaaaagggtaacaactatacattctcttatagatgtatgccataatatggctcttgtgtctatgattgaacctaaaat

SEQ ID NO: 253795 - DNA, 389 bp, Glycine max
  unsure (1)..(389): unsure at all n locations
gatcctctgagtcacctgaggctgcagcttggtccaaggctttgtttagactctcctcttacctataagtgaatctaggatctctatcaaacattgtgatagacgatgtcgcaacctacccttcggcgggagggcaacgcgagactcacgggtgcatctttcaagaaaggaatacgcggagttgccaccaacgtttatttcgaggaaaacgtcggtaaaaccggaaaagacgtggtctacgaacttttaagtgaaaggttcgggagctgtatttacgcacggtgaaggtattagcaccccacgtgcccgtcacaaaggacgacagcctttaatcaagtgtgcgaatatgacttcaattcgtggtatcttccctntttttgagttcttat

SEQ ID NO: 253796 - DNA, 416 bp, Glycine max
  unsure (1)..(416): unsure at all n locations
tataaaaggcatagcttgagcatatgatcggatcacatcatttgttacctgcctaaattanaataacaacaacatcaatatttttaaatcataacataattaacattcaattaaatagaatgtattacatacttttacagatctacgaaggtgttgtttccaaaaagaggagtagttgtagattccatggtttaggctttggtactaacgttaagaagaagttaaagagggatatatgagaacgagagaaagtgagtctttgagtgagtgtatatgatgacaatacatgcattgtatatatataanaaaattaacactagcataatttattcggttggatcttgtcattgaatttgtcagtgggatcttagtcattcaacgtgtattgctccaatcagtggtatctaagtcattga

SEQ ID NO: 253797 - DNA, 381 bp, Glycine max
  unsure (1)..(381): unsure at all n locations
agcttgccaagacaacgcacacactcctctttttcttgttctttgactttngaatatatatcatttgtccaatcagtagaatcttggtgctcttgtaattatgcgaactctctcgctcaacaattttcttttttagatcatcctacataaatacaccttataaattattatcatacatcaatatcctgaatacttcaatatcactaaacaaaactcatcttcacattagttactccccctcaccccataaccttctattagaaaattgagcacaacaaagaaaaagtatgaaataaaaattaatattcttacaattacaatagcaaccttttcagtaacaatgcttccatcttttcgagttcgagcgtcaatataaatttc

SEQ ID NO: 253798 - DNA, 420 bp, Glycine max
  unsure (1)..(420): unsure at all n locations
ggccctggcttgaagcttctgcatgtgtaggaagctttataaagagaaaggtccaagttcccaagagttatgagagaatttgctattgtaagatctacagagacgagagcttggagcgaaagctgttcttagagcttgagacgagtttgtgagtgattgtgagatcctagaggtgaatgagacatcctaaccacttgtatatttgcaatctttcatcttgttcttctctgtgttgaaaggaggtgtctagactatggaaagctaaatcctctgttggatcttctctgtacgtacctgatgtaaatatatttntatctgtgtcatgatgttatgtgtggtctctgtgctatctgctcttcattctantatgcctttaccttgatcacatagatgcatgctgtgntacgggcattcaacatc

SEQ ID NO: 253799 - DNA, 395 bp, Glycine max
  unsure (1)..(395): unsure at all n locations
agcttttaatntcaatacaaggaagcatgacttattctcttgaatctaagttttggctttgaatgtaaaaaggcatgaatattaggacatgtttgagaggtttttattataatttaaatttggctgccccatgaggaataccttgcacctaggtagcatggaaaatacctttcaacggtatgtatatatgtgaatatatatagcatggaaatgccttgcaaagtgtgtgaatatatggcataaaaataccttgcaaagtgtgaatgtatagcaaataatgaatttcataaatcggtatatgtaggataggtagcgtaaaaatgcctttcacaatatgtatatttgtggataggtagcataaggagcctttcaaaatatgacccatgtcaaaaatg

SEQ ID NO: 253800 - DNA, 414 bp, Glycine max
  unsure (1)..(414): unsure at all n locations
tgcaagncgactctcgacatccacaaatcacacattaatccaccatccccagttgcccaccttcaactgagctcatgtactcccacatagcccttatactctttcctctcaacaatcggtccccatcaatccctccaagattccacaacatccaagcaaattaacatccacacatcatgaactatcaatatccaagaaaaacggtgcataagcagaaaactctgcccaaaacacaaaccaataccacaactttccttacacaaatacctcagtaacattctctttgttccaaattcatcaccattggatcgactcgaacattttactggaggtctctagtacataagtctacatattgaccgttgggatgctctatataacgtcaagaacacaatatgtacaaccctttcacaa

SEQ ID NO: 253801 - DNA, 388 bp, Glycine max
agcttagacaggaatggtcaggataaatagcataatctaccattgacaagcttggaatctacatttgtaataccaaaatgagtctctttaaatttaagctttatttttttcccctaaattcaattctcattccatttttctttttcaattagacattgtacactcgaccctttataattttgttgccctttcaacttatggtgctatattgtacaactttaatcgctatttgtatctatatgattaatatatgtaggggcctgtgttaatgtgttgcagagatgcaatataatatatgtaccaaaaaatagagatgcaattaatataaaactattaatatgactatataacttaacaattttgaataattgatttgtaacataatatc

SEQ ID NO: 253802 - DNA, 298 bp, Glycine max
  unsure (1)..(298): unsure at all n locations
tcattggcactagcagatcttattgaagttttatttcccactgaaaattacacaacgacctattttatgaacattgcaaaggtatgttctgactgcatcttanagttaaagaaattgcaagatgtttggtgtatnttcaacatctcatgttaattcatcttgcacgcagaagtacctataaatattggtcttgaaatgtgtgacagggacacatccacagcaatggagcctaccatagtagcatgtggatgattatctttctagttcacaaataggtattgtgttataaaaaatcaac

SEQ ID NO: 253803 - DNA, 325 bp, Glycine max
agcattgcttccacaacatattagtcaaagactattatttcaactaatggaaaagcaccaaaggctgcgtatattatatttctaagaatattaaggaaaacctgacctgacctgaggctctggaaacttgatgccaaggcttgcataaagttccactaaactatcgcaccatgtattctaaccccagggtcaaactctaagccattatatgatataactaaaccttctttagtgcaacaataatacacggcaatgagttattagctttgtatacataacaataggtccttgacaaatccaatagtaagggaaacttacagataaa

SEQ ID NO: 253804 - DNA, 392 bp, Glycine max
  unsure (1)..(392): unsure at all n locations
agctcgtcattagccatacatgaaatatctattatttctaaatcaacctccatttcttctcttatctccttattttatacgaggaggccgcttggtactcgaagtccaagacacaacagttattcataagataaaaatacaatacttttctagctaaaacataaaacgagcttcttaaataaaccgaggctatcggaatattaatattctgaacaatagagtttttagccactcacatcttgcgtttgatntggatgacggaataagtatctcttttagaaacacccaaggtgtggaaatctgatatctatgcgacgttactcttcataacgaagaggtcaatccagatattcaaaagcatattcttataaaaaatgccaaaacagaggaaa

SEQ ID NO: 253805 - DNA, 415 bp, Glycine max
  unsure (1)..(415): unsure at all n locations
ttctgaggcatcatttctccaaagacaacttatcatgctgtatttatgggattagatattaacacaatgggtcagcataagatagaacttatcgtaacaaatattttgcaacatgtcatatcaccatggaaaataggatataaactaacacaaagtattatgagagaaatttttggagtaactccgatctcctcctccgatatccggatttaacagtcacaagcatcaatgaagtatgaattatgacaccacacatgatattgacaccatgacacggttaaattttaaatcataagacatgtggacacacatatatataatacaataaanaattcattagcactatcactatgaatgattggttttgtatacattatacgagtggataagctgaatattattattattatgtgtt

SEQ ID NO: 253806 - DNA, 406 bp, Glycine max
agcttcaagaattatggcctcatcaaactacttgtttcccgagggaaattctataaatagacctcccatttttaatggagtgggttaccactactggaaaacccgcatgcaaatctttatagaggcaatagatttaaatatttgggaagccatagaacaaggaccttatgttccctctatagtggctggaagtgcaacaatagaaaaacctagagcagattggactgaggaagaaagaagattattacaatatatttaaaggccaaaaatattattacatctgccctaggaatagatgaatactttaaggtttcaaattgtaaaagtgctaatgatatttgggatacactacaagtaacacatgaaggcacaacagatgttaaagatctacgataacacattactc

SEQ ID NO: 253807 - DNA, 431 bp, Glycine max
cgagtcattcatacctatgagatgttgttgtattattgtctatcaaaattgccattccttggattatatggttgaaccaagctcatgctttttcgaaaaaagttcatcatatcaagttgaagaatggaaataacgtcttgcacaattggggcaaaagatgaatcgagtcacatcactgcttcgtctactgccaaacatatttaggattattgatgtccttgttacttccagtttcaccttgacaaagatgtcatggaccatgttgaaaatctaaattgattcaaccccatatcctgcgtaaaaaatcgcgatacttcaactgtacatcattcgcatacatccatggttttcattggttgcattgctcattgcattctttccttgaaaataacataagatgaactaatcattgtataaaaaagaaaggacac

SEQ ID NO: 253808 - DNA, 261 bp, Glycine max
ccttagagcgacctgaggcatgcaagctagaacagtctgagatgagttatgctaatttatctttgctcaacttcaccggaactttgcaacctcttgcttgtttgacccacctatattcgtcagactgcacactcccatactataatgaaccaatcttgctcaacttcatcatctcagcgaaccctccatccttccttcactagttatccccctgccatatcttttgtcccaagcgaatattaaattgaagaaacttgtttc

SEQ ID NO: 253809 - DNA, 444 bp, Glycine max
ccgtagccatagtactcatgatcgaaagcttattttatatgttgagggcgaactgagcatgatgggacgtgacgttgtggcacaggactccataccaatgggaacagttgggatgattatgaatcccagaccacagcctatatgaaggatcattccgattattctaacactgcataagtgtgtcacgctcacttgggatgcacacaactctctgcatggtgacctattcaaccatagctccaccatcacaactatatatataatggacgaggaattcatgtatagaccatgatatgtctgacaagtacattgtataagtgctgttgattctgatattaacgtactgatttcttattttactgcagtcgcgcgtgtataaaataaagactaactatcagtttccgattaatcctcattgagttggatcatcctaagaaatgatta

SEQ ID NO: 253810 - DNA, 417 bp, Glycine max
agcttatgattaggtgacactgtaatattttgtgtggactttattgcaaaccaatgatgaaggttagtttcatacgaaggtatgagctcccttcttggtcaactagttccgcataaaaactcttaattccaacatgaccttctggaaactttatattctcaaatgtttttgttgcaattgatccgggtcccattgtaaaactcccagttacaaaaatagctggcttaatatgatttttaggcttttgatatagtgaatatgatgcacttggaccaacaatagtattgagaatgaaagtatcattgcattagagataaactccatgtaacctaaacataaacaagtagtgtcccaaaattaggaatgaattgtctatgatgttattctcttacgtcacctcaaataaatatattcaaa

SEQ ID NO: 253811 - DNA, 305 bp, Glycine max
tgcatgaatcacattctccccctctttcaagcaaattctttttgatatcatcaaagcttgcatgatttacattctccccctttctcaagaaaattcttcttgacatccatcaaatcttcatgatttacagaaaactatcatttgctaaaacatttacacctgcacctcccttgcaagttgctccacattgcatatggactatcatgactgcacccaacaattgtacacatgttgcatggtggcaactcttttaaggcaccctctaatttttgcttagcaataaagtaaagaattttattacatct

SEQ ID NO: 253812 - DNA, 218 bp, Glycine max
attgcaacgaggattggggacaaatgtggcatgctctcattgcttcagaatacaaaataggcctaaagccttcttattcaaatcctcaactccagagaacaagcataaaaacaaaccataacggtcccaccaatataagcacattctcacaatttggagcaccaaaagatgaagataatttaccaatgggatgttaaaacatcaaggttgaatcttac

SEQ ID NO: 253813 - DNA, 296 bp, Glycine max
atatgcttctgtgtaatggggaaaaatggtatcgatgtgcaaatggaggcaatagcacgactgaacatgagtggagtctgcatgtttgaaaaatctactgatgattacagcaagattctgacttacagaagtatgctccttgatccaacacggaatctgaggaatcacctaagtttatgtggtttaactgctgaagatagaatgcccgtgtacctcataacctacattctcacaccgaagtctagcaaccatgcacaggtaactgatgaagatttatagatcgtgtatgggataaa

SEQ ID NO: 253814 - DNA, 410 bp, Glycine max
  unsure (1)..(410): unsure at all n locations
agcttatanaatatataataaaagaactatgactattgatgaatctattcatgtttccttttatgagtctaatgctatttctccgacaaaggatattttatattatgttgcagaatgtttagaacaaatgcatattcatggacaagattctaaaggaaaagggaaaggaagcaatgaagatcctccaaaagaagccaaatcaaattatgaacttccaaaagaatggaaagcttcaaaagatcatccccttgacaacattattggtgatatctcaaaaggggtaacaactagacattctcttaaagatttatgcaataatatggcttttgtgtctgtgattgaacctacaaatataaatgaagccataatagatgatcattggataattgctatgcaagaagaactaaatc

SEQ ID NO: 253815 - DNA, 264 bp, Glycine max
  unsure (1)..(264): unsure at all n locations
aaaacttacccgtttgagaatgaagaacgaatgaagaatggatgaataacgactggaaacccttatggatttgctcacgaaaacgtctcggaagcattacagaagcacctcggcttggattttcttcacggaaacaattttttttcaccagaacagctgaaatgcatagccaggggatccgggatccttggaacaaccncctttttctctttttatagganaaggggagaggaggttgctgcccagctcgcccaggcgagctgg

SEQ ID NO: 253816 - DNA, 389 bp, Glycine max
  unsure (1)..(389): unsure at all n locations
agcntnagcttttaacatagcattccttggaattatattattcacttcgcggatattattatgagtattgggcccataaatgttcatagaaatcgttatgcagcaagatcaattactggaatttagctatatatttagaagcaaaaagagtcccgtaaatctgagcggcaactaagtttatcacagttaattctattcatgaactttgatctttggcattatctgtttgaactcttttataaaggaaatcagatataaatcctctgtttttagaaatattttatattccccagtgccatgtagaatccagcaagtgacttaattaaaacttggtcactcattatcaaagagaaactataagcatttcatttcttctgctgactggattc

SEQ ID NO: 253817 - DNA, 372 bp, Glycine max
gactggctacctgtcgttcacgttttgttctcttgaaatttacatgtagtatatgcctttgattttaccaattatgcattggctacagaattgtgaaaagatttgatgctctagcatttattcttgatatgtatttactctgtataagatatgtttgatagcaaatgcagtggaaactaatctaatcaaaaggtcttctaaaatggtaacagactccttcactcccctccttcccccaagcacacacacatataaaatttgtagatgttgatgccacttgaataaatgatatgattgcctagatgtagccatgtggcagtactaactgatgttcagtacttataatttaattttcactatgaaaatatatta

SEQ ID NO: 253818 - DNA, 421 bp, Glycine max
  unsure (1)..(421): unsure at all n locations
agcttgcttctggggcttctatggaggctggatcttttatcttcaatgaggtcctttaatggtgattttccaccatggagatgcagaaaaagacaaaggagatgaggtgagaggaggcgccatccaccagggaataagccatggaagaaggagcttcaccaccaagatgagccttggataagaagcttggagaggatgcttcaatggaggaaaagaaagagggagagaaagagagaggggggagcacgaaattgaaggaagaaaaagggagagaagtttaagtttgagtcgtgtctcacaagactctcattcatcaaagttacaataagcgttacacatgcttctatttatagactaggtagctagcttccttgagaagctntcttcagaaaacttccttgagaagcttctttgagaaaac

SEQ ID NO: 253819 - DNA, 322 bp, Glycine max
aatggaccaacaattattcgtccgcagaatacgcccccatctttcggcaatacatccgaagatgccccttctgacatgtcgtccctttgtacttatcaaagtacggtactttgaacttgggaggaatgacgatattgggcacgaaacataaatccgctaagtccgagaatgggtaattgccaaggccctcgactgttcttaacctctcttcaagcgcctcaatctttcccttatctttcgcgaagggaacagattcttttaccggtgtgggtgaagccgggatattgcggactatgatcggctggggtagttcatgtgggga

SEQ ID NO: 253820 - DNA, 316 bp, Glycine max
  unsure (1)..(316): unsure at all n locations
agctntatcattggctcagtgttactgattgttatttattgaaacacagacatagttgaaggatcaatgtattatgtatgttgaactaaacaaaggacatgtgtcaatataatcataagcgctcttgagtgaaaatataattttttttcccaatatataagcttgaaaaaatctcttaaaacattcttttctttggatccaaacatactcaaaacactgcttgtggagaaacacattacatcatcttatttttaagttgtaatactaagacttgtggtctctaaattatattctcacaaaacctttttaggacttt

SEQ ID NO: 253821 - DNA, 248 bp, Glycine max
tgagtttgaaatatatgaaattatactcaagggtattcacccttgataaaaaaagcataccagcggttaacttgctattaacagtggccaataggtgggtcctcaagttcgaaacttcacaatgataggaattatgttctttacctgacatctgggaactgtcacaggatttttaatatttttcttgctggcttataattctctatcttcaaatcttcaaattgttaatttcagatgttctctcacct

SEQ ID NO: 253822 - DNA, 420 bp, Glycine max
agcttattgctcaacactaaagtacactctatattatcattagaccaacacaacatctactagaccagttgtatgaatatgataccagctaacttcaatagttcattagaccagcagaccttgatatgaacaactgaacaaggaaatcacatatttgcggcctttcatgtgttatgcccaacatcctctatggaccatttctccaccacaaaagggctccaacttttatcaactcccaaaaatgtaatcacatgcaaataataattaacaaaaaaggccaagaaacgcgaatttttgggggaagacagatattatattggcataagcaacctgcaaaatctacaggataaggtggactcaagagtgagaaaacaccaaaatcaacctcttcataccttgcagaacatattaagtgaaaaa

SEQ ID NO: 253823 - DNA, 411 bp, Glycine max
agcttggagggataaagactcacgtgttactttcttatgcaacaattggtagtcgtggctatacgagacatcttgccaaacaaaggcaggttaacgataactcgcctgtgctttttcttccatgctatatgtagcaaagccattgatccagtcatgttcgatgagctggaaaatgaggccgcaattatactgcgccagttggagatgtattttccccctgctttctttgacaccatgattcacttgattgtgcatctggtcagagaaatcaaacggtgtggtcttgtctattcacggtggaaggacccggttgagcgatacacgaagatcctaaaagggtatacaacaaatctacatcgtccagaagcatctattggtgaaggtacattgcacaacaagccattggatttt

SEQ ID NO: 253824 - DNA, 381 bp, Glycine max
tcagagcacaagagcttcaagtatgtgcttctttacctccttaaatattttgcttaccctctcttccattgttggttcttcatatgtttctccatgtatctcctcacatggcttgtgcttaatgttttaacatgattctttacatgattctctaaagttttcaccgattaaacttgctataaaactagattgatttctatggtcaaattcttgtcctgtcttgaacatgaatgtgtgagttaggtactttgagtttgcttgtattttttgggctgaacctaaatataaatcttacaaaatatatagtaaagaaacgtcacatctaaggactgtcactatgaatttgcataaacatgctgtatgaactgccatagattctat

SEQ ID NO: 253825 - DNA, 408 bp, Glycine max
atcctcagagtcacctgaggcagcaagcttgataagggtactggtttggcggtttcttctttgtcatccctcttctttgagtcatgattgttcgtaatgttaggatctccattcacactgatatccccttccatttcaatggaggaagagtccttttgctcacaagcccctctaccaatgactttaaacctaaaaaaactacatgaaatgcatcaattaagatagtaacacagaacaacatagtcctcttcaaacagtaacttcatcatgaaatctcattatttctttttctttatctctttttcgtttcctggctaattgagtgtgcactgagtttgcaagtttgaaagaattcgcatatatataaagatactggaaccagttaccttataaaactacagcaacagg

SEQ ID NO: 253826 - DNA, 387 bp, Glycine max
  unsure (1)..(387): unsure at all n locations
actcagctgctgacatcacaacctgttcccttaactttctcttctgtttccatgccatcataaacatcaaacaaagctgaagtaattctctcaaaggtgggtagcctctgaatttcagcccattgtaacgcttctccggcgttgttatcaacttcttgttgcacaggattgatgcttgaaacgctctggaaactataggcatgacttctaaatgaggaccttatgctccttcctatctctgctaactcatttctcagagactctatctcattcgcacctgccagctgtgccatctcaacacaacactaaggggattaaaactcacatatgtgtggaatgcatcatattntgatcctcttctgaacattatatagaaacttccatgct

SEQ ID NO: 253827 - DNA, 391 bp, Glycine max
  unsure (1)..(391): unsure at all n locations
agctntgcaaattattgtccctggcacaattgtctgtatttaaactattcctgcactggacgagtccaaccaaccaatcccaaacaatgtcatattccattgacttttttggtcattcaaggcatgcattgatgcatttgccttttgtaaacccattgtgcaaatcgggggaacatggctatatggaagatacaaagggacatttttacttgaagttgcacaagatgacgctaacaacatagttccattggcatttgtcattgccgagggtgagacaacagatatgtggcacttttttttttgcaaaacttgagaacacatgtgacaccacaacatggtatatgcttaatctctgataggcacgagtcaatcaatgtgcatataacgactt

SEQ ID NO: 253828 - DNA, 338 bp, Glycine max
  unsure (1)..(338): unsure at all n locations
taacttcattttggttcacaaccctactagtatctatgcaggagcacgtaacataaataggtgttctactatgacataatgcatatttcaaccataattttaagtactaattaattaaataattgaaagttgaaactacattgatcaatatacattgagtagcttgcacaacttactaaacactagtttacttgaacattcttcttgtaaaaaanacactaataagaaataagaagatacggtggtgtgggaagaaccaatatggaaatacattgatggaatgcgagagtttaataaaaaggaagcacactacactataactcactccttggaaacat

SEQ ID NO: 253829 - DNA, 383 bp, Glycine max
  unsure (1)..(383): unsure at all n locations
agcttgatatgaggaagagtngaagggtgaaacttcctgctttcattgatgaccacagagtggtacctggagatatgtcgcgggggtcaggagaccttggggacgtcaggtggggtgctattgcccaaaaccaagcttgaccaatcccgacccaacccgggcatagtcggtcagtgagaacctgtgatgtacctaagcaggcgagcttctggcagtcaacagataaaaggaaaacaagaccaccaagcaaggaggcttgtgatggctggccagctgtgaatttagcgtaatatgtggattgcggcctctggtaatcgattaccaagggtgggtaatcgatacaaggcttaaaattgagacaggaggctagatggctctgtaat

SEQ ID NO: 253830 - DNA, 416 bp, Glycine max
atcccaacttatcataaaccttgatctcaggtgagaatgtcaatccttgccctccgaagaaaacaaaataagagaaaaggaaaattcccaatcaaagagtgggagaaagtaatataaagaaagtccccgatcaaagatcgaaagataacatatgagacatgctgaaaggtctttggaccacacaatatctgaacaatacagaattgtcaccaaataaacaagaaataaggaaaccacgacctaaagtggccctctccctttgattgccaaccaaaatcctttgcgctagcgactttctcgtcccgcactatacataaacagaaaaggaaaatgctaaaacactctaagccaaattccccacctaaaaatcattcttcaaaaagatctattgattcatgatcacgcatgtaatcttt

SEQ ID NO: 253831 - DNA, 211 bp, Glycine max
  unsure (1)..(211): unsure at all n locations
agctntccacatccacaatgcgcgcataaacttttcatcccctgttgcccacctccaactgagctcacgtactcccacgtagcccattacctcgtttctctcaacaaccgggtcccattaaacctctcaaagctccacaacatccaagcaaaacaacatttcaaccgcgcaagcctatacaggcaaaccaaacagaacataggcagaaaac

SEQ ID NO: 253832 - DNA, 338 bp, Glycine max
gctgcaagctggaatcatatatactatctctgacagccaatgggtgagttccgtccaggtagtcccgaagaagaccggcctcacagtgataaaaaacgagaaggaggagctaattcctactctggtgcagaacaactggagagtctgcattgattatatgaggctgaaccagggtaccaaaaaggaccatctttccatgccattcattgaccagatgcttgaacgcctggcaggtaaataccactactgtttccttgatggtttttctggttatatgcaaattactattgctcctgaggatcaggaaaagaccacattcacctgccccttccgcactt

SEQ ID NO: 253833 - DNA, 451 bp, Glycine max
  unsure (1)..(451): unsure at all n locations
taaagtatgcccgagtcattcatccctatgagatgttgntttagtattggcgatcaaaattgccattccttggattacggggttgaaccaagctcatgcttttacaaaaaggttcatcaagtcaagttgaaatatggaagtaaccgtcttgcaaaattggggcaaaagatgaatcgagtcacatcactgcttcgtttactgccaaacatatttaggattgtttatgtccttgttacttccagtttcaccttgacaaagatgtcatggaccatgttgaaaatctaaattgattcaaccccatgtcttgcgtaaaaattcgcaatacttcaactgtacatcattcgcatgcatccatgcttttcattggttgcattgctcgttgcattctttccttgaaaaaataaaatataataaaataaaatgaacttatcaaaaagacaaggaaacatgc

SEQ ID NO: 253834 - DNA, 464 bp, Glycine max
  unsure (1)..(464): unsure at all n locations
acaccgaactatnaaactcagcttaacaaattcgggtggctaacaacgctgagaaattgattttctgctagccctactttatgcccctctaccaaaaaaagacaaacatgagaaaccaggtatattagccacagacaagcgctggcataattcagagacagcataacataattggaaggcattatacagttcctaacagccatgaaataaacctctttcacgagctataactagcttatagcgcgacacgtaatttatacaaggttctcattatgcgtttccagaagctcgaattaacttgtaggaagaaaaaaatcatgttatccttccaactattctaatctaaacacaatgaagggtccgagaaccactggagcaagagatagttatgagatccacaaattactggggactgacaatgagaaaaccactctatggatagcactggaataactgaatggaac

SEQ ID NO: 253835 - DNA, 388 bp, Glycine max
  unsure (1)..(388): unsure at all n locations
ctgtccaggttgccctggctaatgcatccatggtggatgatcttgcagaacaaaaatcaagagctaattaaaccgattgagatttgccaggtattgcaatcttgtatgattattctctctcctggtgtgtgagaatcataatatgtaacttctatctctgactttgccatcaacttcctcaggaagaaaataaaattttggacaaaatgcatagacagaaggtggcagaggttgaaaagctcacccaaactgttagagagctagaagaggctgtccttgcaggtggtgcagccgcaaatgcagtgagggattatcagcggaaagttcaagaaatgaatgtaatgtgtgaaaagtcttcagcatgttcaaactcacatntgctttattc

SEQ ID NO: 253836 - DNA, 451 bp, Glycine max
  unsure (1)..(451): unsure at all n locations
nnggttatgaatagattctagccttagtttcactttggttattttgtcaattcggctaagaaagacaaatccccaagaacaatgtccgattgattttttttgattattttattaaaagatatttttttgattattatattattattttgcctctttttggttttaagcgtggttacagcatgacagaacgggcagatttcattntaacataaattaaaagatgttattattcaaatgatcggtggaaatttattttattttttgattaggcgagaatatgacttaaataaatgactaaagcacgtcaaaagggggtacggaaagtaaatgaaataaaagtataagcatgcacaacaagtggggaccactaagggtagatagaatgaattgaaaagttcgatctccggaatttaccggttgaagaccgaagaacgaacgaagaacgatgaag

SEQ ID NO: 253837 - DNA, 148 bp, Glycine max
ccccacacgccaccatagctatccaaaaggggggagcaaatgggctcacggccatggactggcccgggggccgagcacgctacggaccaattctaaaaaaagaccatgcctaaacaggaatttaggcctgccccgcgaaatccaagga

SEQ ID NO: 253838 - DNA, 326 bp, Glycine max
gccaacccacataattgggacatgtattcgagttttcaggcaattaccaatcccgaaagagcccgaccaaggataacagcaacaactaataatggggccaccgccaagacaagaaactggcaaccctctctacaaagtatctcagaggctgccagctgaactttgtggtcaacgcaccaacatgtggtgtgagagacagagaagcaaccgacgaaaaaaaacacaaacagccgaaaaagaagaaaacaaaaaactccatgattgcgtgggcatgcggaaaacaaaatatagcacactgaggttcaggggaggccagaaacaacaga

SEQ ID NO: 253839 - DNA, 372 bp, Glycine max
  unsure (1)..(372): unsure at all n locations
tgcacgactaatagcgagtcacactcaagccanatantttgtctcctccgncaacaacaacggcaattgttgtgattgcagccaacaactctttaaaaaaaagaggttctaatacatacactaacggaaaaacaacctcttatgttggcttgagaatccctaacaatgcctctgcagcccactatcgctggcgatcctttggcggcagcctcactagcttgatacgttgtggcttcctcggatgaaaaacgacattgaaagctctaagcttagtgaactcttccatcactacaaaaaaaaaaaataaaccatatttccggcgccaaaaattgttggaaacgttaaacatctgtcggtaattgaaaattttca

SEQ ID NO: 253840 - DNA, 347 bp, Glycine max
tttaaaaaaactgcctccattcatttggattaaaacaacaaaatgcgcacctcacgctttcctctcgcgctcttgaacattcttaaccctatttgttctcgtccctctcaaccactccaccccatcgcaccccactccttgtctcaaactctaaagctgtatcactccctatctcagttactcacacggcgccaccgcacacctcatagaccccaccgtcggtcgtccaaccattcatgctgccgcaacaccaccaacccctccgaactgaagctagggtttccaagctagcgtatgaaacaacgatctctccctcctgcttttcgattccctccaattcttcatgt

SEQ ID NO: 253841 - DNA, 76 bp, Glycine max
ctccccccagcagcgcccgtgtgctctctgacccccccacgccgcgctgcacagaactgctcacatacaatctttt

SEQ ID NO: 253842 - DNA, 448 bp, Glycine max
tcatcaaacttacgtttcacagatttctttaaggacagattatatacttacgtagtcgatcgacacacattgtgtggtgtgtattggttaggcaagctaatgctaataggctaataggaggcattggtggattgtcccttcctcaaatccataataactattataacaagtcaccattatcccattactacttactcttagctatgacaagttttgtgcttttaagtatcattcgataaaatgaaaaaaaaaatgaagtaaaataagataaaagttttaaattaaagtaaaaggcaaaaatgtaaattccactacatagtactgtttatttactttctttttcgttctctttcactacaaacgaacggaatcttattttctttgaaaattatagcacaagttatgtgaatttcttcttcaagtcatctagatatgtgctctgagatga

SEQ ID NO: 253843 - DNA, 124 bp, Glycine max
caagaagggagggaaagagaaagggaaaaagagagggggataaagaagatttaggaagaagaaagagagggaaaaaaaggaagacgaaaagaaagagtaaaaaagaggaaaaagaggaagacaa

SEQ ID NO: 253844 - DNA, 453 bp, Glycine max
tggagaggatgcttcaatggaggaaaagaaagagggtgtgttatagagaggggggagcacgaaatttaaggaataaaagaggtagagaagtggaactttgaagtatgtctcacaagactctcattcatcaaagttacaacaagtgttacacatgcttctatttatagactacgtagcttccttgagaagctttcttgagaaaacttccttaagaagcttccttaataagattcctaaagaagcttgagcttagctacacatacctctctaatagctaaactcacctccttgagatgagaagctagagcttagctacacaccccctataatagctaagctcacccccatgacaaaaaacatgaaaatacaaaaaaaggtccttactacaaagactactcaaaatgccccgaaatacaaggctaataccctatactactagaatggccaaaatac

SEQ ID NO: 253845 - DNA, 448 bp, Glycine max
tcatttgtgcatgcacatctgcatgttagcccttctctttttgtcccttcttcccctttcctttcctccacagtccaactctcaaacatatccttactgagatcactgtgtgtacatctgtgtgcttctgtattctatcctcactctcaactctcctcaatatatctccggtcttttccttgcttgaaacttacaatatgacacatcacaatgcgatgcatagcttaataatatgtaattgaccttcgaggctctgaatgctcttaaacttacggtacaggctaagacacgtcctattggatcaatgaaacttcaagttagtgggggacctactacttcttcatacctataattagaaatataatatgttgagtgtggtcatacacttttctatatcgttgcatataactcaacgactgccgtatctactgccgtgacctcaacgaaa

SEQ ID NO: 253846 - DNA, 208 bp, Glycine max
acggaatcaatataatgcgaacatatgatgatcctaaggctgcctcctctctactcccgtgggtatggcttttgaaaggggggacaagatatttttgaatgccataacgccccccctcttcgcattctctattatttggagcaggggtggctcgcccacgcaagctcacctgcacatttttttttttttttttttgggggaaccttaa

SEQ ID NO: 253847 - DNA, 442 bp, Glycine max
  unsure (1)..(442): unsure at all n locations
nnaaacttaaacaaaaggtcataaccataagcacttttattaactcaaataaattctgtacaagttcttgcaaagtccaaatgcccctacttgccataccttgcagttgtggagttcaactgtcatctttcttctattgttgacaaagtatggggacagatatccgcgatcaaattgcattccttccacaatctcaagactattctcggtactccttccggtttcaattgtcactactccgcttctgcctacttggtgcagagcctcggaaatcatgtttccaactgaataatcattcccagcactgactgcagcaacatctgcaagctcatgatcctcaacctacaagtgcagccaatggtgttgaattcagcaagattttccagtttccaactataagcaacaattggcaggcagaaaaaagcacaattaaatcaacatc

SEQ ID NO: 253848 - DNA, 404 bp, Glycine max
  unsure (1)..(404): unsure at all n locations
ntctccactaagttgcccggagcctgaaaagtctttttttatggcagaggccctagatgcaaggaagaatttctccaagaacaccatcttaacgtcatcccagctgaaaatggacctacgagcacggtagtatagccaatcttttgccactccctccagagaatgaggaaaaacctctagaaagatatgatcttcttggacatcagggggcttcatggcggaacaaacaatacggaactccttaagatgcttatgaggatcttcacctgcaagaccatgaaacctgcgcagcaaatgtattagcctagtcttgagaacatatggaacaccctcatcaggatattgaatgcacaagctgtcataagtgaaatcatgtgcaaccatctccctaagagtcctctcac

SEQ ID NO: 253849 - DNA, 471 bp, Glycine max
acctatgaaactaagcttctatccaggcactctcttggtggcgaaactcctcctttcatggcttattctctagtggatgacgcctcctatcaccttttctcttttatctttcgatgcaactcaatgactgaaaatcaccattaaagggccttattgaagctcaaagatccagcctccatggaagcttctcaagcaagcttccatcacctataattaaaatatcctatatacgtaagcaagaatggcaaaaagtttgggaagaatgaagatgacatagtatactttgaaaagaacaaatgatagtatgatgcatttgatacaccctattaaaaaggatattttggtaaatttcatgttattttatttgtaatgtctattatctatcaaatcattgttataccgtatggatccccgacctagtcaagtatcaaatatacccttaagacctttaagttattgaagctctatgac

SEQ ID NO: 253850 - DNA, 300 bp, Glycine max
  unsure (1)..(300): unsure at all n locations
tagaatactaagcttcacatcatanngaacatatccgctgacgcgtatangttcattccttcgacgaccgagctcgcgcagcctccgaacgcataactcctgacgcctcccgccgtgcctttgacctgatcggcgaaagaaccaccggctgtgtattcgacgaaaatgtactaatactcgtttgcgttttcaacagtgtgagcatggccgaaacattcgatgacattatgggaagctccaatgcaatcgagtatctcctcttcgtttttcagcatagacgaggagcgaacatcggaggat

SEQ ID NO: 253851 - DNA, 407 bp, Glycine max
cagcatgcaagcttctcccatgagggatccatctacttattctgtatactacaagggactaaagataatgtctcattgaatgctcaaaggactctatgttgaatctccattctacagaatcctttctcaaccctcatgacttctctatatcttttcttaagcactcaatctcacaactattatcccatcaatcattatgatatcattctcattggaccataccttaaacttctcttgggcacctggagttaatcaaccttggctaactctaacgccaatagtgtcctatggaaaatatgcacaacatctttatctttctaactatacaattacggctcacatcacttctctattaaacatatttcttttctacaagtcaactgcatagtaacctgaagttagaccta

SEQ ID NO: 253852 - DNA, 239 bp, Glycine max
cacggagatgccacggatgacaaacgagaagaggtgacaggaggcgccacccactagggaataagccatacaagaaggagcatcaccaccacgagagtgccctggataagaagctcacacaggaagcttcaatggaggaaaagaaagagacacatcaacagagaggggggaccacgtaattgaaggaggaaaagacaaagaatctactgaagaaaactacccccaagaagaacgacaac

SEQ ID NO: 253853 - DNA, 140 bp, Glycine max
gagggaaaaaaaacaacggaagccgaccggcgcaagaggggaggccaaaccctagacatacagactaacaaaaaaaaaaaagcggacagggccaccaaagagggagacggcgccccacgcggcagggggatgggcgggcc

SEQ ID NO: 253854 - DNA, 442 bp, Glycine max
tgtaatcaattaaacttatacaagagacttctctgtcagcttcttattcttaagtaatcgattatgatcaggccggaatcaataaaaacaaagatttttaaacatagaagacattttctaactttagaacctttcttcttactcctacatgatgatgcatgatgcacatatgaaatgatagagactagatgccacacacaacacaacactcaatacagatttcattcaaagagttgggcatgtataagacaaaacttattcaagctttaaggctaagtcttcatgttgctccccctatctctaacaaattagatattaactaagggcttaagtcattaagcgtagttagtttgaataagaaaggaatagcctaggggactcacatatgaagctcccttataacctatctctccctgataagagagagagcacctatcccccc

SEQ ID NO: 253855 - DNA, 88 bp, Glycine max
  unsure (1)..(88): unsure at all n locations
aataaaaaccagcttntgaagctcanctgatcggcagaagtttttctggagagaacaaagagccacaaccgacncaggcaaccgggcg

SEQ ID NO: 253856 - DNA, 458 bp, Glycine max
tcatgatgatgaaacaagtatgaatcaagtagttctgatgatgttttaatgcccaaaagaacgagatcaagattaagtcaacaagttcaaaatcaacactaatttctagattcattagaagaagtcacgaagactcaagattcacgagaagttgatttcaagattcaagagaagatgaattaaagatttcagagaagaaatcaagaagacttctcatgggaagtattgaaaaggatttttcaaaaatcaaacatagcacaattgtggtttacaaaagagtattctcaaatttttctaagttaccagagtatttactctctggcaatcgattaccagtttcctataatcgattactagtgataaacattgagctcaaaaagcttttaactggatttgcactgctccaaatgattcttaaacggcgtgatcgattacaatatcgtggtaatcgactacta

SEQ ID NO: 253857 - DNA, 437 bp, Glycine max
  unsure (1)..(437): unsure at all n locations
tatgctgcaaacatctacaatagacctcctcaacttcattattttaataaaccacaacaaaacaattatgacctctccagcaacagatacaatcccagatggaggaatcaccctaatctcagatggtctagccctcaacaacaacaacagcagcctgcttcttccttccaaaatgctgctggtccaagtagagcatatgttcctcctccagtgcaacaacaacaacaacaacatcaactgagacaacaatccactgttgaggccccttctcaaccttcattataagaattagtgaggcaaatgacaatacagaacatgcagttntagtaggagactagagcctcaattcagagtttaacaaatcagatggggcagatggccacccacctgaaccaagctcaatcacaaaactctgacaagctgccttcttaatctgt

SEQ ID NO: 253858 - DNA, 453 bp, Glycine max
  unsure (1)..(453): unsure at all n locations
ggcccttggttaacacatgattggtacatgacatgggtcttttttgatccacancgggcacnattggaagaaggaaagagtggtcttctaaatctgcacttcatgcagaatattgctgttgaaatgtgcagcagaatactgtataagtgcataaaaatgcttgtgtatggctggttgtgaaaaaggtagtacatatgcgggtctggacattttctagcagatcccaacggtcaaaatgtagacttatgtactagatacttccaggaaaatttttgagtcgatccaacggttaacgaattggaacgaacaaaatgttactggggtattcgtatgtgaacagctatgatcttgagttgtgtcttgggcacagatactgccattgccctatattgcctcggtcacgatgcgtcatgatgattggatgtggaactacctcgatgttgtggaagcttg

SEQ ID NO: 253859 - DNA, 186 bp, Glycine max
aaaaccactagaggaaaaagggaggagcctcctcaagacacgtaacgacctcccatatagtaaccggctcaccaagacagtaatactaccacggagaacctgaccccatgacacctgaagacaatgaaagccaccatctatggggcgatacattcgccgaagcacaccacaaaacaaccataaaaa

SEQ ID NO: 253860 - DNA, 461 bp, Glycine max
  unsure (1)..(461): unsure at all n locations
agcttattacacaccatatatgggtcaccttgatggtagagtgngttaaatagcatatgggtcacattgatatattttttaaaataaagggcatgcagaagcttattgacactctgaatgtaacaaccagtctagtagctaattgacacttttcaattctcttcttaccacccaataaaagggaaggtcgatcgcacgttcatcctaaggaatggaaatactgatttggattagttgccaactactgactcctcatctaatcctagaaataagcagtctaaactctcaagtttcaagacaaccaattcaatgaacttgtaattttatctggaaataaaaaataanataacaaagtccagaaataattaaaaatgaccaaagtcccatccaaagaaccgtgaatgatttgttcataaacaaccaatatactccactgcacactcacaaaaaagagtgtaaca

SEQ ID NO: 253861 - DNA, 416 bp, Glycine max
  unsure (1)..(416): unsure at all n locations
atcatctagctgatatacttacaaaggttgtctctagcanaatatttcacaactcacttgacaagttgggcattgaagatatctatgcatcaacttgagggggagtgttgatgtgagctgtcaaagaggaataacaggaaacaataatattcttggtacccaatttatatcattgaatatttgctgaattattctagcctgaattagtgtgattatatttttctaccaaaaatagctctatgtattgagtatatatagcgttcctctgttacattgtaaacaaggaaaaaataaatatattctttctctatttttgggaaagcaactttccagaggtgttcaaggtgaaatcaatcaatgacagccttgggatgatctatctttatatgatgtgtgctttgatctagatctcacca

SEQ ID NO: 253862 - DNA, 229 bp, Glycine max
cgggccatcccgatagcctttttaaaaacccccttctcaataaatatttaatattttatggaggaggaacataatatgaaagttaaagaaaaaggaaagtccatcaaaataatgaggaatataaaaaggaacatgactcacacccaaattgtaattaaagtccttgattataggaatagaagttatatagcacgaatgtgtgatcaaagtctgatagttttataaaaaa

SEQ ID NO: 253863 - DNA, 463 bp, Glycine max
  unsure (1)..(463): unsure at all n locations
taatgctgatgggcagcctttgaagattctgaggaagaacattactactttagctcagacatggagcantttttccttttctaacctcattcccgcctcccacacatctgatgtgaccttggacatagccaaattgatttatgggattattatgaagatggacatgaacctggggtaccttatctcccaccaaatctctctggttgcacagcatgacacatccagacttggattccctaccttgatcatagctatatgcaaggccagaggagttcagtcagactctagatccctagagagcttgagccctgccattaacttggcatatattaagaagaactgttggaatcttgatgatccaacagtgacatttacatggccaatgaacgtcaatgataatatgagtgaggcccctaccatttcagcaccacctgagacaccatctgcttcttcttccacagat

SEQ ID NO: 253864 - DNA, 460 bp, Glycine max
  unsure (1)..(460): unsure at all n locations
gctttagggcttttctcctcttaagaacatatttcttttcttcttcccactcccctttggcttaaaaacccttctggagtttgagattccgcgactacacgctaatcacgtctgcttgttgagcgcatgtaagtggctgggcgctaagcaccccttcgcctaactgcaggttctttatgctgcttttttatgctaagcgaaaaccctcccgctaagtgacaacagcttgctaagcgagcctggcgcgctgagcgcgaaccatctgacttcaacttctctctctatacgttgcttatatatctatgaaataaaagccatcaaaacaagtttgaatatcagtttaaggcacctactacacaataactcagagatgccgaaactccgatgattcaccacaaatgaagcaataataatgagagaatattgctaattcttatatgtnttaattacataatctact

SEQ ID NO: 253865 - DNA, 468 bp, Glycine max
  unsure (1)..(468): unsure at all n locations
tataagaacaannaagactcaatcatgtccacatatgcatgtttattatgaagcatcaacaagaatcaagcccaggctattgcgttagcaatcaatggggccaaacacaccaaatgattatgatgatggatggctcaaattctcacaaaggtaaactcatcactttcaaattgagctctcaaaactatcatgacatgtagaggagaatcaaggatctcaagacacaaaatgtcaagaacattttatttcaaaataattacccatttcttgaacatatcctataattcaaagaaaaacatgcaaagtcgtacatgcacacaaaactgaaccaaaatattaaactaaaaatctgacgaaactaacaacattaacaaattaacacaactaacacattaacaaaaccaacaaaactagcacaaccaaagaacactctcccctcccatacttaaacaacacattgtcctcaat

SEQ ID NO: 253866 - DNA, 400 bp, Glycine max
  unsure (1)..(400): unsure at all n locations
aattatgtgttacattcgtctgatgccaacatacttgtttcgagatcgcaaagtgtgccactttcagatatgtttagtagggcttggtttgcactatgaagcaacggagatccccttggaaataccagcaaagacattagttgaagggctagaaattaagaataattcttacatacaatgcctttaggtacaaccaattaaaaacttaagctacatgaaaataatagacaaaacttagatgcaaattcataagtgattttagtgttctccaatcagaactggagtttcacctttctaacctatgctgatctttagtgtaagcctctattatgcactatacctggatgaaactccaatttttattggagaacaacacatanaacacttcagaagtacatct

SEQ ID NO: 253867 - DNA, 471 bp, Glycine max
  unsure (1)..(471): unsure at all n locations
ctaagctttgtgtttaattgttgatggaggaagttgttccaatgttgcatgttccacgttaatggccaaactaaatttggattctaagccccatcctggccatacagacttcgtggcttattgaagatgaagaggttaaagtgactcagcaggttgaggtgtgtctcaccattggaagatacaatgataaggtgatgtgtgatgtggttccaatggaggcaactcatatactgttaggaagaccgnggtagtatgacaccaaagtagtgcatgatggcttcaccaacaagatttctttcaagcaccatgacagaaaaattattcttaaacctctatcccctagagaagtgtgtgatgaccaaatcataatgagagaaaagagagaactagagaaagaaaagagcgaaacaccaaagaggaatatgacaaagaagagtgacacacatgatggatagagtgatacacatgaga

SEQ ID NO: 253868 - DNA, 462 bp, Glycine max
  unsure (1)..(462): unsure at all n locations
ggtcaaaattgcgaacaagtgaccaacagcaatcctggtcaaataaattgggctagttggattatacttttggtccaagtccaacccggcaaaaaaaaatatcttataaagtcatggctctgttaatgcatctttgccttgtgaactggagacagcgtcgtcccatcaacaaaaatgttttaatatttaaattcaaattcaaaaatttaatttctgagtaaataatgtatactatatgcattgagagtgtaaaggtttttatactaaatcgttatatataaaagttttgatattctttataataattctcttataatttatatcaacaataatttttatttattgcagttaataaagcttacattgacaatacatataaatttaacttaatttataaaatgagttttctcaagtctatctcattgtaatatagattatgntttgataaattagctcaaaagt

SEQ ID NO: 253869 - DNA, 433 bp, Glycine max
  unsure (1)..(433): unsure at all n locations
caagtacagaagccaattaaaaaattgatctattattcaattattcttcaccatcatttttaattatctaaggttcattggttgattttaacattagcaattagtcagtcaagttcaagaggacttatttacatgtgttaaggaatatgtatcttttttctcccagaaaaaaaataagtcccttgatgcatttcataagttaatggaaaataaaaggtgtagaagaaatgcatttaaaggtgataagccatagcaagtgtttgcagtttaccgcttgaactcaggtgactgcttatatttgtcaaactcttgcaaccattcttcatccgagaaaggagggagagtaccggtgaatttccaatcagtcattgaaagaccagatcgggtgagtcttngtaaaccctcgagcaccaccatgctgaacacccatgcc

SEQ ID NO: 253870 - DNA, 445 bp, Glycine max
  unsure (1)..(445): unsure at all n locations
agcttatgctgcaaacatttataataggccttctcaacagaaaaaccaataatagtagaataattatgacctttcaagcaatagatacaatccaggttggaggatgtagaaacaaagcttcatggtgaatcaaaggtgattcaaaggtgttttgatgataacaatgatgataacaaaagatgatgacaaaggagatgacaaaaagctcaaagatcaatcaaagaacaactcaagtggatcaagaacaattcaagagttcaagataagaatcaagaagaattcaagactcaagaagaaagtttagagtcaagaatcaagattcaaggttcaagatatcatgaatcaagatcaagattcaagactcaagattcaagaatcaagagaaggcttaatcaagataagtatgaaagggttttctcaaanattgagtagcacatgatttttc

SEQ ID NO: 253871 - DNA, 443 bp, Glycine max
  unsure (1)..(443): unsure at all n locations
ctggggctgatagctatattacagcaccaaaggtctattttatcggtctctcttatctctctactgaggttctatatactctctcctctcttccttattcatataaggtgtagagtgctactctctttttcgctttaggcacttttcgttctacaataacataatagtctcgcctcaatctacacattcgctctctattgattaatggaaggctaagtcttcagcgttgtcttctcttgaggatcaagaacagttctctttgagggtctattattaccattaaaattctaatcagtttttcctcttcaccaaatactctgtatatgttgctattaatccatgcatgcttagtgctngatgtaaatgctctacccttaattaacatatatgcttaatgatccgtcatggataaatcggtgtgtgtgttgcttaatcacataatg

SEQ ID NO: 253872 - DNA, 457 bp, Glycine max
agcttatagttattggagggagaataaaataatccaaaatcaattgtacccttcaagtaacgaagaattctttttgcggcctttatatgaggagaggtaggagcctccgtaaagcgacacacaactcccaccgcatatagaatatcatgccttgtattggttagataccttaaactccccaccaagactcttgaagaccgtggagtctaccttctctccttcatcaaactttgataacttcaagccaccttccataggtgtgttcacgggattgcaatcaagcatattaaatttcttcaacacttcttttgtgtagctttcttgtgagacaaagataccattctccgtttgcttcacttccattcccaagtaatatgacatgagtcccatatctgtcatatcaaattcacgagacatggactccttgaagtcttcaaacaaattttggttactgccg

SEQ ID NO: 253873 - DNA, 375 bp, Glycine max
tgtcagaatgccaagcacctgctgcagtcctgggaactttatactgcttgactggctccaagacaatgatcatactaccactgacaccatggataatcgcataaaatggcgtcccacaggaccttcattggataaagacacggtttaaaaacaaaacctctgtcaatcctataaccctctgcaatgcagaaacacttggtgcagtgaatatagtatatatgtcaatgccaataccataggcatggtggtcaccaacactggagaccgcatggctcaccattgtcaccattcttggtgccgtctcactgtatgcaatgacccttcatgttgtcccatctaatgccaacaagcacccaacaggctgaatcattttgc

SEQ ID NO: 253874 - DNA, 419 bp, Glycine max
  unsure (1)..(419): unsure at all n locations
agctttaaagaataagaattaagggtcaatctcaagatgttgtcaaaattcatgaggaaattggaaccttaataactacattagccaaatttgtcactaggacaaaatatcttgacaaactattaggatactgcaaaagtctataacgacccgtcttgtcgctacgatatcactaactataaaatgtgacatttcaatttaagtgaaaactccattgatttgattatgaaaatgatggtaaacttttcgcgatatacattcatcaaacaacacacaaacacgtgaataaatacacacacatgcacacacacacacacatatggggatatatatatatatatatatatatattaaaccactatacatcattcaaatgtcaaaacataattcnagttttacatatatctaaactggggact

SEQ ID NO: 253875 - DNA, 456 bp, Glycine max
  unsure (1)..(456): unsure at all n locations
tgtccgcanaanatcactaaaaagggatttaagggtcgatacctcagtttttctcaccaagtaaaatggatcactttaaggtccaacgccttaaaaggaccaccttccaagtaaaaagaatcatttgattcgccctttagaaagaactgcgtaggtctgatttcctcttcgatggagggtacgtaggagcaagagccccgcttttgaggacctcaaaaataataaaaaaaaagaaataaagcttagatacataatttcacacaattctaatctaaggttgttgttctttgggacaaacgtgagaggtgctaataccttcctcatacgtaaatacaactcccgaatctggaatattcttcatgaccggnttccttcggtttttccgacgttttccacaaataaacgttggtggcgactctgcgcattgtcctcctttggaagacgcacccgtgaacc

SEQ ID NO: 253876 - DNA, 361 bp, Glycine max
  unsure (1)..(361): unsure at all n locations
agcttccttgagaagattcttagagaagcttctgcttagctacacacacccctctaatagcaaagctcacctccttgagatgagaagctagagcttagctacacacacaccctataatagctaagatcactgttagtcgtcttatacgactaacttttgtatagaaaacattntccaaacttgtatagttcccccaatttgtggttattttgtagtgattttgtaaataaatcttgttttatcgttaaagctatctctagaatatttacattggatttaatgatgaaatttgtacaatttcaggtgaaaaagaggctaagtcatgaagtgccaaaagtgacagttgagcttatctcatcag

SEQ ID NO: 253877 - DNA, 447 bp, Glycine max
tgatggaaaagaatatgctagttattgtcgatcaatatgaggtaaagatgacgagggagaggcaagatctggctactttacatgggcaggctttgagaagcaaggaaggaagtgatagaactactacatcacgaaagcacgaagtggatgaatgggtttatgctcacgctaaataagagtcaagagctcctgacgaaggctaatttatactttgctcctgacgaagttcatagtctctttgattattgccagcacatggtcaaacttatgactcacataattaagaaccactgatgcacttgttatttatttttggttgtaccctgacacgatgtaatgaacccagttttgttttaatgaacagcgggtttggtttgaccctatgttcttttgagcggcttgtgtaaattttgcatattgtagacacttatatatttcatgcattca

SEQ ID NO: 253878 - DNA, 453 bp, Glycine max
  unsure (1)..(453): unsure at all n locations
catgcaagcttaagctcattcatatgcacaaggctcttaatatctgaagagtatccttgtggaaccttcacccgacgaagacactgacaaaaacttatcttctccttcttggacaaagtatggcaggctgggggcaagtaaattttcttcccatcagaccttggatgcaactgtgatcgtatgcccatatcagctagatcttgatgggtattcaagccatccttcatcctaccttgaatgttaaggagcgtcccaatcacactgtcacaaacatttttctccacatgcataacatcaatacaatgtctaacgtcaagatcagaccagtacggaagatcaaagaaaatggacctcttcttccatatgcaactcttacttttatccttcttttgggtcttctcaaatacaatattcangtgttgaacccgctgatatacctgctcaccagtcaac

SEQ ID NO: 253879 - DNA, 442 bp, Glycine max
  unsure (1)..(442): unsure at all n locations
gtggaatatttcaagcaagagnttggagtgcacattgaagttacaaagatgtggagagccatgaaagaagcaaagcaattagtggaagggaatgagaggaaacaatatgccaaagtatttgattatgcacatgaatcgttgaggagcaatcctggatcaacagttaagatcaacacagtgccaagtccagaaggtccaccacaatttcagaggctatatatttgtcttgctggctgtaagaaggggtttgttgctggatgtagaccattcataggtctagatggatgtttcctaaagagtgcatttggaggaaacttgctctctgctgttgggcttgatggcaataaccacatctttgttattgcttatgttgttgtggacattgagaacaaagacaattggacatggttttaactttatgaagatcttggggattacatac

SEQ ID NO: 253880 - DNA, 475 bp, Glycine max
  unsure (1)..(475): unsure at all n locations
cacctgcggcatgcaagcttcacaannagttgtatggcttgaaacaagcacctaggctgtggtacaagaagtttaatgagtttatgagcaactcaggattcaaaagatgtgacatggaccattgctgctatgttaaaaaatatactaatagttatgttatccttgctgngtatgttgatgacatgttgattgcaggatccagtatggcaaaaattaacaggttgaagcagcagttggcaaaaaactttgaaatgaaggatcttggtccagctaaacaaatccttggtatgagaattcttagaaacagatcagaaggaattttgaagctgtctcaggagaaatatatacacaagttgcttgacaggttttaccttggagattctaagaccaggaatacccctttgggatctcatttgaagttttcaaagaaacaatctttgtagacagatgaagaataatgttacatgtcaagagt

SEQ ID NO: 253881 - DNA, 413 bp, Glycine max
  unsure (1)..(413): unsure at all n locations
ctcaagaactgcaaatcctccattcaggaaaggagtggtatttagagaagcttccaagtcaaaatcaatgccaccaatgaagaggaaagattctgatcaactaattgcccacactgttatgcaagcaatgaaagcctctccattcccctttaagatattttaattttaatatttcataatagttgtgaatgaactgtgacaagataaattacaaaagctttgttttggttacttgcaatgtaccttttaaatttgattaagtttaatttaaaacataattaagatagttttttaaaatgctcaaaactataaaagaaatacgtatcattaagtttaaaacctaacaggaaccagtcaaccgtggttctaagtanacactatttgcaatgacattcaaattcttgtcgtcactt

SEQ ID NO: 253882 - DNA, 431 bp, Glycine max
agcttttggtatcaattacgagcgcctcgatatactactggacataatcggacatccgggtaaaaagttattggtatttgaatttgctcataggttctggtttcaattacgatcgcctcaatatattatgggattcattcggacatccgagtaaaaatttattgccatttgaatttgctacgagcttccgatttcaattacgagcgtcttgatatacaacgaaaaacaatccgacatccgagtaaaaagttattgtcgttagaatatgcttatagcttctgttttcaattacgagcgtctcgatatattacgggactcaatccgacatccgagtaaaaagttattgtcatttgaatttgctcatagcttctgttgtcaattacgatcgcctcgatatatcatgggattcattcggacattcgagttaaaat

SEQ ID NO: 253883 - DNA, 444 bp, Glycine max
  unsure (1)..(444): unsure at all n locations
tatctaagaattccgtataaattccgtagtatatcgagacgctcgaaattcaaaataaacctctcagcaaaatgaaacgacaataactttttactcgaatgtccgaatgaatcccgtaatatatcgagacgctcgtaactgaaaacagaagctctgagcaaattcaaaagataataactttttactcgtacgtccgattgtttcctgtagtatatcgagaccctcgtaattgaaaccagaagcccgtagcaaactcaaacggcaataaatttttactcggatgcccgaatgaatcccataatatatcgaggcgatcgtaattgaaaacagaagctatgagcaaattcaaacgacaantaacttttactcggatgaataccgtaatatatcgagacgctcgtaattgaaaacaaaagctctgagcaaattcaaacgacaataact

SEQ ID NO: 253884 - DNA, 401 bp, Glycine max
  unsure (1)..(401): unsure at all n locations
cacaataagcaattatnttagtatcctgttgtctgtttattgagaattatacctgtcctgtcagggcagtgggatcttttctggaattcactcatgacgagattgaagtggtgagtcattgctgcttcagtagttaaataaaaggcaaaaaaaaaatgtattgctattcgctttcatttttttagtgttagcaaactatgttaattttatcactagttagtgaaggatttccatattggctgtaataagttcataactcggaaattctaatgcatagtgtatcaatgagaattaatctactgcaatcaactcccagattagaatttagaaccttcagagagaggggcaaaggaagaaatcccaataacaatttcacctgtccaggcacaaattcacattac

SEQ ID NO: 253885 - DNA, 481 bp, Glycine max
  unsure (1)..(481): unsure at all n locations
aactcaagctntaaaagcctttccataggaaacaagccagagatgggagcgtgtttctttctgtgtacctgngaagaccgtgaatcagtgtaagaaaaaatttgcattgatgaaggagagtttcacgaacaagaaaactgcagtctaatgttccgtcgtgatatcttaaaatttattaaaatttcttctcaagagtataagctagcttcgaatatccatatactagtttatgagcccaaatttctagctttcttatccgattactattgggtgctttcgataaccgtcttttgaactctgaattaatacattcactcttattgcctgaaatagcaaatataattgtttattattgatcacaccgacgactacttcattagttctaaccataactggttgtaacacacatattctagtatcatacaccacgtggtatatcgttacattggtttttgccatactgtacaccattcacagctat

SEQ ID NO: 253886 - DNA, 485 bp, Glycine max
  unsure (1)..(485): unsure at all n locations
tataaaactaagcttgcnagtttaaaactgattttgaaacccagtaatctaataccagttcatgtaatcgattaccagtgcttataacgttcaaaaatattttgaaaaacattgtaatcaattacacaaaacatgtaatcgattaccagtggctctgaacattagaattcaaatattttcaaatgaagagtcacatcttttgaagaaaaataactgtgtaatcaattacacaaatattgtaatcgattactagtggcaagtttttagaaaatctgccaacagtcacatcttttcatttgattnttgaatggccatcaaaggcctataaataggtgacttgggcacgaattttcttcagagttnttcctgttcacaaaaggcataatcctctcaaacaaaaatctcttatcatccaacattccttggtcaaacacttgtgttattcaataaggaattgagtggttcatagtacacatctatctctt

SEQ ID NO: 253887 - DNA, 277 bp, Glycine max
cttgacaacatgaatctttgagttcataattcaaatggtggatttggctactcaactaagattgagaaactgcctgctcaaaatatttgaaagttttctgatattttaatacacccatgaaccagaaatcacaattgtcaactgtgaccatctctatgtacttcttgtgtggcttctgaacattttcactttggttcacacagttgatcttcttcagtggaatgacaacctgcacatgattgaatataactttcagaactttaacaaattttggatc

SEQ ID NO: 253888 - DNA, 473 bp, Glycine max
  unsure (1)..(473): unsure at all n locations
tattacatattcaatgtgatgatggttaatgtcatatattttactgggccaagtcagcgatataactccattattttttattcaaacatantttacccaaaaataaataactaaaaatactctcaattaaagaattattttgttattaataattaaaaaataaacaacattaaagtaaatgttatacaaactagatatgtaattagtatcttagtccttattatataaaataaatgcttattttctataacaaattgtataataaaaaaaatatttcaacaactatgagtgaaaaccgattagttagtcagagaaaataaacaactgagtgtaaaatccaactatgagcgtaatcagaaagcaagaagcaacctctcttctaaacgtgaattctcacctcccttggcccgatgtgggattgccaatgtgcattataaagttaacgtcgtgtacccatgcgggatttctactct

SEQ ID NO: 253889 - DNA, 395 bp, Glycine max
  unsure (1)..(395): unsure at all n locations
ttgatctaagtgttaaagattccaaactgtgtgaaaacctttcccagtttgaaagagggagtttaacaggatttttggtaggagaaaggaagcaagtggacagtgagaagacttttatgggcttgaagttgaatatttgttgaaggaattgagcttcatggttgcaattgagagagttgtcaaaaactggtccaaagtttacagttgtcacataccagaagccatcatcatattgctcacaggaaactccctgcacataatccacaataaaaggttngaagttgtcagagactttgaatagaaactataagaaatatgcaagaattgcaggtgagaaacacaacctttgtgtcctttgaacattntagtatcaagatagtactggtccattaatg

SEQ ID NO: 253890 - DNA, 381 bp, Glycine max
tctctttaatcccaccataggaggtaaccctaacgactgcgtgcagattttaatcataatatcattgggccctaccaattaacaatgattcgggaaagttgcctatggtgtgaaacaaactttaaggccatctaatccaaccatagaacaaaaaagataatacaattaatgcaacgaagaacttgctcttattaatcaatctaatttattatagttaaactcttggtaggagacaagttcctctcataatggacgaagatcggtatgatttctgctttctgtcaaaagctatacttcaataatgaatacagcttcaaccaacaaaattccaaagatgaacaaacaatcctatcttggtattcagttaacttcacagaacac

SEQ ID NO: 253891 - DNA, 459 bp, Glycine max
  unsure (1)..(459): unsure at all n locations
agcttataagaacaaacatgccgtaatcatttccaaatatgcatgtgaattaggacgcatcaacaagaatcaagccgtggctattgtgcaagcaatcaatggggcaaaacacaccaaatgattataatgatggatggctcaaattctcacaaaggtaaaatcatcactttcaaattgagctttcaaaactatcatgacatgtagagaagaattaaggatttcaagtcacaaaatgtcaagaacttttattttcaaaacaattacccatttcttgaacatatcctataattcaaagaanaacatgcaaagtcgtacgtgcacacaaaattgacccaaaatattaaactgaaaatccgacgaaactaacaacattaacaaattaacacaactaacaatataacaaagccaacataactatcaaaaccaaagaacactccgcccccatactgaaacaacaca

SEQ ID NO: 253892 - DNA, 443 bp, Glycine max
ggatcttgataattggtatgcatacatattttctatatttaaatcacatagcaattatctaattttcctctcttctgttgcttcttttgtgtcaaaacattatgaatttagcttcttctgagtttttatccagtagatgcgaaagttagtttatgtgtaatgtttttggttgtattttttttcttttctgtagaattagacaacaagaggtctggaagagggttgaagaactaaagtagcgcgctcaatgcatcaacaatcactcagcacgaggagccaacctataggccaggcttagcgcatatttggcaacttagcaagcatctaatggcttaacccgcatttggcggcttaatctgcatctggtggcctagtgcgcatctagtggcttagcgtgtggtcacttatgccagctagactattgcagtgtgctcagcatgcat

SEQ ID NO: 253893 - DNA, 318 bp, Glycine max
gatcctctgagtcacctgcggcagcaagcttgaaaggaagccgcctattatcttttattagtttgtgagtggttgtgagatcctataggtgaaggagacatcctcaccacttgtattctttcaatctttcatcttggtcttctctttggtggaaaggacgcttcctagttatggaaagctaaaaacctctgttggatcttctttgtaaggacttgatgaaatatcctttcatctatttaaagatggtttgagtgtcctctgtgctatcagcttttcattctaatatgcctttaccttgatcatgtgaatgcctgcttt

SEQ ID NO: 253894 - DNA, 437 bp, Glycine max
  unsure (1)..(437): unsure at all n locations
ctcttgtagaaacttccttgagaagcttctatgagaattctttcttgagaagctagagcttagcgacacaccccnctctaataactaagcttaccttcttgagaagcttccttgagaagattcctaaagaagctagagcttatctacacacaccccctataatagctaagctcacccccatgccaaaatacatgaaaatatataaaaaaagttcctattacaaagactactcaaaattccctgaaatacaaggctaaaaccctatactactagaatggccaaaatacaaggcccaaaagaaggaaaaaccaattctaacatttacaaagaagaatggatccaaccttgacccatgggctcaaaaatataccctaaggttcatgagaacactanggcctctcttaatagctctagcccaggcctcttggagtcttcta

SEQ ID NO: 253895 - DNA, 385 bp, Glycine max
  unsure (1)..(385): unsure at all n locations
cttactctatgttattttgtttttattgccagtgagaatcatcaacttcggtgttgaagatgaaactggtaaacagtgtattgatgtccctggccagtgaccaaacgaaattgaaaaccatgaatttcagtcccaaccaatgaaatgcaaacctcctaaatgtttaaaatgtatttttctgtattaatttgcgataaatgtaaggattaaacattgacatcataaagaatcaattccccaaaatcctccagtgtcatttgggtcgtttttggttacattttcaatttatatgttttctttaacagaaatcccaccttattntcactttatttcttgtttggtgaacctattaagaaaaagatgaaaacgggaaaaaaagtaaaat

SEQ ID NO: 253896 - DNA, 410 bp, Glycine max
tgaagagggggaatgcgccgtctctttgcgtttatttctcttcaccccaccttagcatggccaatgtcacccgcaacacgtggcgtaaccacaccttcatgggaatggtctatgtcttcttgtaatgatatgctgatgacgtggatcccatattttatatgatctgataagagaagaaagatcaaaagacattgttattcgtgaataatcattgccaaaacatctatgacaactaattgagaaaaaagacattactcttaggtctcgtataattccagacaaaattcacgcttataagattataaatataaacttttacaatttaacatgcattaagcggcgtttccattgatttaaaaatacttctttgttaaatggaaatctagaacgctatttccaatcacttatca

SEQ ID NO: 253897 - DNA, 441 bp, Glycine max
  unsure (1)..(441): unsure at all n locations
agcttttaaaaatccaacaaaatgatcgtttctctggattcaagagaaagaagaaggaacangaagaaaatgaatgtgttgttggcaaagaaaatagaggagagacgagaggactttctttgttgagttttagcgtgggagaaaatgaagttggaacctcttgtataggttgtggtttagggtaaaagtgattcaaaatttgaattaatttaagcaaaagataattaaaaatggttgtaatctaaacattaatgacacatgattagatgtcatatgaaattatgcttgaagatatgatgatactagcaagtgtggtggcataatttatggaaacaaggagatttgtatagttgaggttgacattngtcaacatattttcaactgagagtgacaagtgatatatttcaataagaactttttcgatcataanaatgtctcctt

SEQ ID NO: 253898 - DNA, 463 bp, Glycine max
  unsure (1)..(463): unsure at all n locations
nttgtcactccaccttcaagttgaccaaagctaacactggtgataactaagtgaaggttgtgcatcccaaatacaaagtcttattagaatcacattgtaatttatcataataaggtgcacgtgcttcctaaaaaccttcttgtctaagatcatgtatcatgtcctctatacgatctccgattcctacatcaagcgggtcactctaattgactgtaggcatgtatggcaatttaccatggacaaaaatactttccacccattatttgtgcattntgttgcacaaacttcaataaattttcaaccccttcctcatactcatcacttatgcatgatgctttcatccaactttgatccatgttntgtgtaccatgataccggctaggttatgacatatacatgaaattatcacttttttcataaaatggtgtggccttatcccattgtattgaatcttaaatggaaa

SEQ ID NO: 253899 - DNA, 473 bp, Glycine max
  unsure (1)..(473): unsure at all n locations
cctatcgttagttaatgggtctatactacatcttataaatttgttttaccctgnatttataagatctttaaagttatatatntttcctaatgtttgtcaaagaacattatccaacttttgagattgagtaaggttatgtgaaaaagtaaactgtcatcgtgtctcatacagcctcttatatcttatctcgttntatcatcttatccagccttttgtatattaatttaaatttaaatatgaattatttttaaatcaactaaaatactatactattttttgttgttagtcttctcaaccttaatttatatgtgtaacaacctacattgaattaaggattaggaattttgttcatctggatatgatgatattgaatccattcttgtcctcgagataaaatatctagaattgatagttgtgtgtaaattaagggaggacaccattaaaattcaccatgggttttcaatattatattt

SEQ ID NO: 253900 - DNA, 429 bp, Glycine max
  unsure (1)..(429): unsure at all n locations
agcttataaatgttaacatggctattacaaataaagatatttaagtggaagattgaagtcatacaatcgtagaacatgtagataaccattgtccactgttgtattggagcacataacccctgtccaatcagatgtacatgggtctccacgatcccaattgctcaaatttccattaatatcaatcaattttccctttatggctttcaatgcctcaactgcatgttaataacgctaatgaaataatcacactatcaatagaaccaaatgaaaacaacattattacatattataagcatattattttagcagaaatgaaaacaattccttataccaatttctaagataaaatactattactatttgactacaattaatacccttaatccaatgctcngcgtcgtcggagaagcaccccccaacgatgcactg

SEQ ID NO: 253901 - DNA, 476 bp, Glycine max
  unsure (1)..(476): unsure at all n locations
cttttggagtagaaacctgggaccaactcattntatttcaaatttattaagtcatatctagncaaggtctgagagaccatacaagtttcctaacgatttctaattatgtgggccattaagtctatcatatgctgacaatagccgagaagcccatgaatctcttcgggggcggagtaggtgtctgccatcgccttggccttggctaacaatcggngaagttcttgactcccgttcaaggtaagagcaaaccgatccatccacatggttgcctcttggtgtaaagagtcaatcacccttcctctagcctccttttccgcatatacttgggcatactcatccgcgattctatgctcgtgggccgtggctagacccaactcttcttggtacttggcgatgatagctaacatgttggtctctgtctcgcatagacgctgagacaagcttcttttggaccttgaacaagcaatcaactcctc

SEQ ID NO: 253902 - DNA, 379 bp, Glycine max
ctacttctcatggacttgatggggcctatgcaagttgaaagccttggaggaaagaggtatgcctatgttgttgtggatgatttctccagattcacctgggtcaactttatcagagaaaaatcagacacctttgaagtattcaaggagttgagtctaagactttaaagagaaaaagactgtgtgatcaagagaatcaggagtgaccatggcagagagtttgaaaacagcaagtttactgaatactgcacatctgaaggcatcactcatgagttctctgcagccattacaccacagcaaaatggcatagttgaaaggaaaaacaggactttgcaagaggctgctagggtcatgcttcatgccaaagaacttccctataatc

SEQ ID NO: 253903 - DNA, 434 bp, Glycine max
ttagtgtactaacaaccgccgctccagccaagctatcttggttaaagtgtattaacaacttttcattcctagagtgtgcccccatcttgcgacaatacagcttgagatggttcttatgacaagtcgtccctttatacttgtcaaaatcagacactttgaattctggggggatgacaacatccggtaccaagcaaagatccgtcatgtccgcgaacgaatagtcaccaaagccttcaatagccctcaatctctcctcgaggagatcgagtttccttctttcttcggccgctgggggtggtccttctgtggacaagaatattggttgtgctgtgaggttaggctgatgcaatgtgttgggtgccggcccctcgatggggatcggcgggtagaactcgacatccccttggtcatactcttgatgatcttctgggact

SEQ ID NO: 253904 - DNA, 227 bp, Glycine max
cgggtcactagccgttttatccctttgtttaatctaaccaccatgtgactgggataagccaaagatgcctggacatggttttgtaaaaccttgtttcacttatcagtcagatctgtaagacggttgggaaatgaaaaaccaaaaattagttaaaaaacacttataaaaaaacgttaaaggtacgaacgccaagttacctttaaatcctaggttcttaacacactcca

SEQ ID NO: 253905 - DNA, 466 bp, Glycine max
  unsure (1)..(466): unsure at all n locations
tcagatagagttaagtgtctattctgtatatgtgaatctgttctttttctcacttcatatatgtgtactgcagggttctcaagatcttcgcataatcacattttattctacacaacttcctggtccaaattaccattgccgtgaggtacaattgtttgagaatgtgtttgtaaaacatgtcacatgttgtgtttaagtattctcttaactactgcaaataacatatgtgggcaagagcttttattattatattctttagattcttaaatttttagactacttaatgtatcatgcagggttctaaacttgccacattaccccgtccagatagtgtccttgaagtgctattgatcaattgtgagtatacattatcgtattggagtcgttcatattcgatgcctatgtatntgttttgctgctcatttcacatatattatgtacagttccacgtggcgtgtctatggat

SEQ ID NO: 253906 - DNA, 407 bp, Glycine max
cttttttgtgggtttgaagaatggcaagcctccagatggttgagcctccaacatttcaagatgtgttaaccctgatgaaagaaaagttattggctacaagagtcatgatgaacatttcgggttgcattacttactccaagtagctatcataggtacattgtctaacaaagattgtccacccattaattcatctctgttcattcttcattgtttatgtcaaaaagttattgaaatagaagatttgaatatcttgcaatctgagattatagaaacactctgtcaattagaaataaattttccccctaggttctttgttgtaatggctcatttgcctatacatcttgtgaatgagctaagattgcgagggtcagttcaatttccgtggatgtactttctagaaagatatt

SEQ ID NO: 253907 - DNA, 470 bp, Glycine max
  unsure (1)..(470): unsure at all n locations
agcttatacgaatcaagntgatccgtatgttgatataacacatattgtatcatgttgatccgnaagatttatacagatcaacatgattcgtatgaatcatacaaatcaacatgattcgtattggttactcacgctcacctaattttaccgatcaacatgatccgtatgactcataaggatcaacctgattcgtatgactcatacggatcaacttgagtgtgaaggacattttcgtccattcacttaaaatgttgggtgcaccaacaataatgctgggtgcacctagcatcaccctaagaatcaatggtgtttattacaagcccgtctcatttaagcaaccaaatggaggttctcatttggagatactcttaccaataattaacactagactagaatatctnttaactaaatgttctatttctatctctataaaaattattttagtcctacaacaaaaatatttgtttgct

SEQ ID NO: 253908 - DNA, 255 bp, Glycine max
tggtaattcgagaatcacttgaaattagtgaaaaaaattggttccatgaagaaaatccaagcgcgggcttttctgttcagtatccgcgtgtgattcctctaatattattacctgtactttatcgcgttttggctctttcttgctcggtctgtgtgtttctaccggtaatacctgatcacccatttttcaaaccttctgtgtaccctttgcggctctctttagttctccgtgcttatctaactttacactttcttt

SEQ ID NO: 253909 - DNA, 412 bp, Glycine max
tggcttgtgcagaattagggtgaataggtgtacaatctcttcttttgagaattccagagcacaccacagatactatttcgagaaaagagctctggaggtagcaagaataacaacttttgcagagatacctaggttttgtaattataaagagattaatgagttgtaaagcgattgtgagatgctaataagaggaagagggatcccccttcttgtgtaaggaataattattctctactcttaatcttaattgtgctaaggtttttctgtatggctggctaaacactcttgttgggaatttctaaggaacaactgatgtaattactttgatatttatttgattgtgttttctgtgttcaatgcttctttcaatgcttaatttctacatgctcttggtctgatcacccatttgtat

SEQ ID NO: 253910 - DNA, 356 bp, Glycine max
  unsure (1)..(356): unsure at all n locations
agctngncgagttcttttcttagccctattctcttnttgcttttgcttcttccttaaggcattggttcttctacaagttcttcgaatctcttgatccaaagggactagatcttcttaagaaactctacctcacatacatggaacaaagcaactaaagaacatgttagcaaagtactcaagagtaatacaaaaacagaatttaaaagcaaagaattgaagaataacgaatcattgcatagaatatgaaattagcataagttgcctaatacgagaaacaagtccccgacaacgaagccagaaaacttattacatcattgacaaatgtaccaattagtgtagtattttcaatagtaagt

SEQ ID NO: 253911 - DNA, 464 bp, Glycine max
  unsure (1)..(464): unsure at all n locations
tctacttatgtggcagggcgggcttccttcactttcttgtctctaacgcgagctntgaccactggtcttccttcccgcgatgcttcttttcatatccgcctgagtgggcttatagcctaaaccatacttccaacgatttccttgagtatttatcaggctagttatgccgccgttatctttgcctaaacccatcccgggttcataaccgttccccaacataactcgggccatcattaccactgcatcggacagacaaggctgcccaaagagggagtccacggaggaaatgctgaccacctcaaaagactggaaagcagtttctaacgattcttctgcggcttccacataaggcatggaggatgggcagcttaccaagatgtcttcctcgcctgacacgatgaccaagtgcccctccactacgaatttcagcttttggtggagtgtagaaggcacaactcccactg

SEQ ID NO: 253912 - DNA, 245 bp, Glycine max
aagcaaagctaactattcactaatttcgcccatattgggagcggtaatacctacgaaaggcattagtactctttctttctttttaccgattgaatcccgaggaaaataaaatataatgggacacctggaatgttaaccactacatccatctagcgagagagatatgaaagatagggattataaataatataatatgagaaaaataaaaaaaacaataggtatgtgagaaaaaattgtgttcaaaa

SEQ ID NO: 253913 - DNA, 428 bp, Glycine max
agcttcatagatacgcgctccgttcgttctttatatccaaggaaaacaagcaagacaccggacccgatctctccatttcttctgaatctaagaggtaccactttttttttttttattaccttttgctggtattatgggggattacattatcggaattggaggaactcgatttgtaatataatctctgaaatattgaaagtcgaccttactaattaggcttttcatatggatggaattctctgcatcaataaggaatacaaaaaatgtgattcagggtattccttgcttcttaaggtgcaaatattcattcttgctccctacatgtgagactttttaagaataactgaataagtcatgtgtgaaaaaaaaaatattatggaccttacaccggtttatttactattgttcttgagttatatgcaccacat

SEQ ID NO: 253914 - DNA, 433 bp, Glycine max
tccaaatatagctggttaactttatattccaatgatatattcatctgcaagcatgccattgcttttcattgatggtcctaagttccatcactcgaatttctggtatgcttagtttcctcgggcagcaacatgcactctgcttacgatggtggtaaggaatctactatactcataaaaatcatacatgtctcccaaaatgagatactcactgcatgtttgctaattggaagacctacccctactgtttttttaacaagaggcggttgtatacttgaagaaaaatttcattatttgaacgctgctatgcacattgatagttgatacatctcttctgctgtctctactaatttaatttgctgaagagccaacgaacattctttgatcataatctataatataattgtaagtaaagagcattctcccaccacaaatg

SEQ ID NO: 253915 - DNA, 330 bp, Glycine max
ctgcagcatgcagctatgcatgcctcgcataattctttttatgtcatgtacataccaacttggatcacactatgctcaattgctcttaacgcgatttgattcattacaaagtttgtacatttcttgatccttgattacataccctatactataagcctaactacaaatttcattggcacttacaggttataggcagatcattgcacaatgttttcttagatcaagatagaatgcctacttaaattaagtttagtgatttaacgggaggaaaaaagatatgacatccccttataatgaaattcactttgccaaaccatatacttaacatgc

SEQ ID NO: 253916 - DNA, 439 bp, Glycine max
  unsure (1)..(439): unsure at all n locations
actcaacttcttattttcagagaagagacaaatatagttgtttatttatataccttaacattcataagagcagngaatgattgaattggtgagtctataactcgagaagcacacatggacatatcccaaagcttcaatgtgttatctatggatgaagagactatgctcatggtgtctacaaacttgatgtagctcacagtcttatcatgtccaaccattatacaagaggcactttcagattgcgaagatcatagtaatatatctgatgatctgctgaacgaaatgcaaggaaatgagcaaaatcaatgggaaactgaacacaacacacattngactntgttttgatggtaccaacactaactccctgcaataaaagcacatgtgagggaaacaatccatcatgcgtctagattaaacacataaaacatgcaaaagaatg

SEQ ID NO: 253917 - DNA, 427 bp, Glycine max
  unsure (1)..(427): unsure at all n locations
ctgctctanattacattgatgnttgtatttatgggatgatgttatatgccatttttgctttaagagtaatgtcccactaaaactaactttccaaatgtttgccttcgcaggaatggcaccgaggaagcttgcctcaaagaggtccaggaaggacaaggcggccgaaggaactagttccgccccggagtacgacagtcaccgctttaggagcgttgtacaccagcagcgtttcgaagccatcaagggatggtcgtttctccgggagcgacgcgttcagctcagggacgacgagtatactgatttccatgaggaaatagggcgccggcggtgggcaccactggttactcccatggccaagtttgatccacaaatagtccttgagttttacgccaatgcttggccaacagaagaaggcgtgcgtgacatg

SEQ ID NO: 253918 - DNA, 375 bp, Glycine max
agtctttacctgaatttgcatgttccaattggtgtttaaatggagtaatcgattacaatatattggaaatcgattaccagtgtatctgaacgttgaaattcaaattcaattgtgaggagtcacatcttttcataaaatgctttgtgtaatcgattacatggttttggtaatcgattaccactgacaagttgtgaataaaaataaagagatgtaattcttccaatggttttctcaagattttctcaaggttataactcttccaatggttttcttgaccagacatgaagagtctataaaagcaagaccttgactcgcattttatgaacttgatataactttttacataactttttgaacatcttcttgaactttttc

SEQ ID NO: 253919 - DNA, 463 bp, Glycine max
  unsure (1)..(463): unsure at all n locations
tattacggacctatgaaactcagcttccaagtttctggttttctaaccttgatatctcgtgtctttcattctttccatctcttttccctttgccaaaaagaattcgccaaggactaaccgcctgaattctttntgagtctctcttctcccttttccaaaagaatgaaggactaaccgcctgaattcttttgtgtcccccttctcccttgtcaaagaattcaaaacgacacagtttgagaattcttttgattcttcccattccttatacaaaagtgttcaaaggactaaccgcctaagaattcttttgtatccccattcacaaagtattaaaggcttaaccgcctgatatctttgtcttaacacattggggggtgcatcctctgtggtacaagtagagggtacatctacattggttgttgactgagaacaagagagggtacatctctcttgtggatcagcttta

SEQ ID NO: 253920 - DNA, 470 bp, Glycine max
  unsure (1)..(470): unsure at all n locations
agcttataaaacaaaattgcctcaatcatttccaaatatgcatgtgaattaggaagcatcaacaagaatcaagccaaggctattgtgcaagcaatcaatggggcaaaacacaccaaatgattatgatgatggatggctcaaattctcacaaaggtaaactcatcactttcaaattgagctttcaaaactatcatgacatgtagaggagaatcaaagatttcaagtcacaaaatgtcaaaaacttttattttcaaaacaattacccatttcttgaacatatcctataattcaaagaaaaacatgcaaagtagtacatgcgcacggaattggcccaaaatattaaactaaaaatccgacgaaactaacaacattaacaaattaacacaactgacaaattaacaaaaccaacaaaacttagcaaaccaaagaacactcccncccatacttaaacaacacatttgtcctcaatg

SEQ ID NO: 253921 - DNA, 444 bp, Glycine max
  unsure (1)..(444): unsure at all n locations
agctttggggctgaggacctatataacagctccagggttttagtttagagagtttttggagaggagaataattctagggttctagaattccagtttttacttttcatgcacactgttcacgtagaataaaatttgttttcttcaatttcgtttctgcttcaatctacaatttcattttctgctgattaatggaaggctaagtctccagcgttgttttctcttgaggatcaggcacagctctctttgaggttttgttattactgttgaattctgatcagcttttcctcttcaccaattactctgtatttgttgctattaatccatgcatgcttagtgcttgattaatggtatctacgcttaanttacgttcatgcttaatgatcagtttcattcatgattaggtggtgtatgtgtngcttaatcacataatgacaaccttatgtt

SEQ ID NO: 253922 - DNA, 458 bp, Glycine max
ttaaactttatacaagaatgaagctctgataccacttgttattatatgtggctcagatatcttaagaaggggggtttaattaagatattgcaaactattttcccaattaaaattctatttcactttctatgcaagttacaaattcccttaaaaatgaactcttaaataatgattcaaatagaacaatctgaatataaatataaagcaataataaataaaagagtttaagggaagaaaaagtgcaaactcggatttatactggttcggccacatccttgtgcctacgtccagtccccaagcaacccgcttgagagttccactatcttgtaaaatccttttccaagttctgaacacacaaggacaatccttcctttgtgttcagaattcttttacaacaagagaccctcgatctcttaatcccttagataatctacagagaagagaagaatgaatctctc

SEQ ID NO: 253923 - DNA, 462 bp, Glycine max
agctttaataattgaattaaaacgttcaatatctgctggtaatcgattaccatatatgtgtaatcgattacacagtgcgaaatttgaattcaaattttaatagctgttgtaaatcatttttggccactggtaatgttagtgcttagctctagtgagtgtttaaaagattggctaagattttgttaaaacataagcacttatacaatgaaggaaagctggagttgctgcacatgatgtccaacggtatgtcaaggaatcagatcgggctgcacaatgcacaaggcaagataaaatgtcaaatgaagaattgaagctgcaggatccacgatgtcggatacaatgtccaagacatcctgcccgaatatactggacacataaatctgtatatctttaacagattgtgcaagatccacgatgtccgatacaatgtccaggacattcttcccgaaaatactggacaca

SEQ ID NO: 253924 - DNA, 454 bp, Glycine max
aagccatagattgatttattaagcttgcacactatttttctttctttagtagaggagaatccttcaggctgtttcgtgtaaaactcttcctctagatgaccattaaagaatgtcgttttcacatcatttgatgtaactcagagtcaaaatgagctactaatgccataattattcgaaaggaatctttcttagatacaggagaaaaattctctgtgtaatcaattccttctctttgagtgaacccatttggcaacaagttttgccttatgtctctcaatgctgctcacttcctattggcctccttaggttttccataccctgcaaggtattagaaacatggattgtagaaccagaatcaatccaccatgtgctatgattaatactaaccatattagaatcataacaaacaaaagaaaatggagtacctttcttgtccatccaactcttaaacttt

SEQ ID NO: 253925 - DNA, 461 bp, Glycine max
agctttgaccatggaagcgatcatcaccatgagatttttctactgatgcatcattggatcgtaatttatttctatcatccttgtttctttcatccttagctttctcagggagtctattaaaactcctatcactacccctctcttgcattctctcaacagatcggtctcttccatatctttcaattgacctatccctaggtttttctgcaacaaagtcatcaccacgagacttatccagacggtccattctttccctgtgatccctttcatatctttcgttgcctttgtcttttgccctttccaatggcttatcacctgccctgtacagaccatgttcctctggtcccgatttgtcatcagcaaatctaggatccatcatcttctctctttcagagaatctaacttcagtttcaaaatctcttagctccacatcccctttccgtcgttacctagtctgtctg

SEQ ID NO: 253926 - DNA, 478 bp, Glycine max
  unsure (1)..(478): unsure at all n locations
atactaagcttgngacaataaacagcgacaagctatagtttaagccttttataacaaccttccattcttagcaaaatattcgacccgcattagttgactctgtactgatggatttcaattctcattttttgaactctaaaataataatttatgcaaaagttaaaagagaccacttatttagttaaacgaaaacccaaaagtgcatcacacaaattaactataatgcgaaagaaaattgcatgtttttattcaaatgcaccgcaatactgcaagcctacaactataaaaaaaaataaaaattaatgtcggcccacaccttgtttttcttaacatcagacttttaattaattttaacttggaaaataactgtataatcttgaactaccaaaatagttctaaatttatgggttaattaccagagatgagtatgttaacaaaaccttactaaattaagacagattntaaaanaataggaaaa

SEQ ID NO: 253927 - DNA, 450 bp, Glycine max
  unsure (1)..(450): unsure at all n locations
agcttgtaacaaatgccagtaaaaccacgtctcttttatgcaaatctctttcggatatttacaaaatcaaaacaagataaggggttaatggcaacgtaccatcccagagtgacgatgaacggagtgtattcttctattggaacccggaagcatcattttcgacggaataagcttctcaacgccctaaagcccaaaaacccaactcataaaattattcaattttttaaataaaaaaataaacactaaaagaaaccctaatgcaccagaaaatttcagaaaaaacctaccaacacaaccccatctttgcacttgatcccaataacagtcctacaacaaagtttcaaatctaggatcactaccaaatacaaaaaaaaatacanaatcccaaaaaaaatcataattattcataaactatttccgttcaattcaaaccacgaatataaaaaaaaa

SEQ ID NO: 253928 - DNA, 449 bp, Glycine max
atgctgcaaatatttacaatagaccttctcaacctcatttttttaatctaccacagcagaacaattatgacctcttcagcaacagatacaaccctggatggaggaatcaccctaacctcagatggtcaagccctcaacaacaacaacagcagcctgctccttccttccaaaatgctgctggcccaagcagaccatacattccttcaccaatccaacaacaacaacaaccccagaaacaaccaacagttgaggcccctccacaaccttccctcgaagaacttgtgaggcaaatgactatgcaaaacatgcagtttcagcaagagaccagagcctccattcagagcttaaccaatcagatgggacaattggctacccaattgaatcaacaacagtcccagaattctgacaatctgccttctcaagctctccaaaatcccaaaaatgtcagt

SEQ ID NO: 253929 - DNA, 277 bp, Glycine max
tgatatatccaagaaactgatgaatgacaaatcacattagctccgagggattcgacctgtaatgttgattaaatatagagcaagggattctaacaattacatttttcccatgtcatttggtatccctccacacagaggagttctagacaacatcaataaccgccaagcagatagctgggaaatttcacatggaattgctccagacagcttattacttgatagaaaattttgtgcaccaaatcagaatgtctctggctctaaccctcttcttgggaac

SEQ ID NO: 253930 - DNA, 464 bp, Glycine max
  unsure (1)..(464): unsure at all n locations
tgacggggtttgtcgcatcggggaaccaattcactttatatgtgggtcccaattggattcctaattttcaacttacctatttggaagtgacatcatggcaattaggtcccagctttccattgtggattcagtcacaaaacaaacttaaatatgttggactatctaacacggggattttcgattctattcccacacagatgtgggaagcactttctcaggtnttgtatttaaacctctctcgtaatcacatccatggtgagattgggactacattaaagaatccaatatctatccgaactattgatctaagctcaaatcacttgtgtggtaaattaccctatctttcaagtgatgtgcatcagttagatctttcaagcaattcattctctgaatccatgaatgactntttatgtaacgatcaggacaagccaatactattagaatttctgaatcttgcatcaaat

SEQ ID NO: 253931 - DNA, 350 bp, Glycine max
ttgttcgtgctcgtgcgcttatcacaattatggaccgcttagcacacattagtgaatcttggcttagtgtgtgcctttctcgcttagtggatgaactgaagcggttcgcttagggagatgaagcggttcgcctaacgaacctgtataactcatcttcttccagagtcttccttgcgcttaacccatgagtgttgcgcttagcggacgctcgctaaaccaacagattggcttactgagaaggtgaaaaacaacactttccaaagcttgcctaatttgcctgaaattgagagaaaatgattattaaacacacaaaatggaagtactaagtatttattacctatacttaacag

SEQ ID NO: 253932 - DNA, 460 bp, Glycine max
tctggtgggacatcttgacttgctttccaatctgacatttatcacagattctgccttcttctattttcagattgggaatgcctctaacagcacctttgtcaatgattttcttcatgcctcttaagtgcagatgtccaaatctttgatgccatattttgacttcatcttctttggaggatagacatgtggaggagtaactggtttcttgaggtgtccataggtaacagttgtcctttgatctgctgcccttcattagaacttcactcttctcatttgtcaccaagcattctgactttgtgaagtttacattgaatccttcatcacacaactgactgatgctgatcaagtttgcagtcagttccttcaccagcagtactttgttcagactaagaagtccatcatggactagctttccattccagtgattttcctttagagcatctccaatgtacatactagg

SEQ ID NO: 253933 - DNA, 369 bp, Glycine max
  unsure (1)..(369): unsure at all n locations
agcttagngcattgntttctttctacagcatatgaagccttggagngcacaattcccaggcatgtgtgtccaacttaacagtccgtgacagcatcataagggaatcagacaacgggctcataatcaagacatggcaaggtggaatgggatcaatgtcaagtctgagattcgagaacatccagatggagaacgttggaaactgcatcataatagaccaatactactgtttgtcaaaggaatgtctaaaccagacttcaactgtgcatgtgaatgatgtgtcctacagcaacataaagggcacctatgatgtgagaactgctcctattcaactttgttgcagtgacactgttgcctgcacaaacattacac

SEQ ID NO: 253934 - DNA, 468 bp, Glycine max
  unsure (1)..(468): unsure at all n locations
tagctctaactgaatttaacttacagtacttacccctctaagcatttctcactgcagcaacttataaattcgtcggtgtagctcccaaatatattatcaagacgcttcactaattttgggacatcctccagaggcattatatcccatatctttaaaacttgagtatacattgattcttttactatatctgttgaacagacaacaaagagactttcaactttgaactgctttaatatctgtgatgaatttccacaaagtaagtccactttcatccttttaggtctccaaccagtggagagtttgagcaagaggtcaagaactaactttttagtctgctttgatcgcagtttcttaaatgatttaaggaaattatcactgaaaagaacctgcaacaaaaacaagaagagaaggtgaactaaaggtcaaaaacatgattggaanatcgacaacaggaagaaaaatgtaaaa

SEQ ID NO: 253935 - DNA, 356 bp, Glycine max
  unsure (1)..(356): unsure at all n locations
agcttgccaattcttctggctatntattgagggatcgcggattttgattgctgtaatatgtttgatcttgatacatcttgtaccaaggttattcaacttatatatttatgatagatatattgattttgctttccaaaaaaaaaaaaaaaagaaactagggttgtattcgcctactgtaggagtttgtaaaatacaagtatatatccatgtcttctatgggtgttaattatacaatttttaattttaaaaatatacatatatcttataaatatttgngaatattaatttatattatgtaattttatattctcatattcattatatcattttaatttatgtgaacacgtatttaatct

SEQ ID NO: 253936 - DNA, 398 bp, Glycine max
  unsure (1)..(398): unsure at all n locations
tgtcttgactgaagatggatcagtggacataagcactgctcaatttgttgcatgggctgtaaggattttggctgcagttatgattcttcaggtttttttttattaatttccaccttgtttctgttatgttgttgatgcttaagataagcgcatgattgtaaatttgataagatgttgtttccagagttctatggatcctctgttgggaacattggcattattatgtggatcatttgtctccttattgaagaaaatgcataggttgagattccttcgtcatttacgcaggttggtccacttccttgaattttggaccttattaattttcaacaataaaaattttcttttcattntttttaattaagtagaagaacgaaggttttctttttccctgcaga

SEQ ID NO: 253937 - DNA, 432 bp, Glycine max
agcttccacaacatccaagtttaataacattcaaacaacacaagctatcacagccaagcaaaacagaacaaagacagaaaactctgctcaacacatcaaccaaaatcacagcttttctcacttaaagaccacagtaacaattccttcgatccaattcattaaccgttggatcgactccaaaattttactgggagtctatagtgcataagcctacatttggaccgttgggatctactggcaaacatccagaactcattctgcactagactttccacagccaaccacacacaagcattttctctgcacttgtgcaaaattctgctgcacaatttctcagcaaaaattctgcataagtgcagatttcgaaatcacactttctctcatcaatcttgccaaatcaattctacaagtccaatcatgtataatcatgct

SEQ ID NO: 253938 - DNA, 452 bp, Glycine max
  unsure (1)..(452): unsure at all n locations
tagatcgggcatctgagtcaaacgttatggtcatccgaattntctggggcattcgatttctactttcaagtgccatgatatattatgggcctcaatcggacatccgagtcaaaacttttgcacatcggtattttcccgggtcttccatgttaaattatgagcgtcgcgataggttactggccttattcggagatccgatggaataagtatggtcgtttgtatttgcgatgagtttcatttttatccttagagcgtctcaacaaattatgagcttagatcgggcatccgagtaaaatgttatggtcgtccgaatattcgtgggcattccatttctactatcgactaccatgataaataatgggcctcaatcagacatgccagtcaaaacttttgcccgacggaattcaccgaagtttccatgttaaatttagcgtcgcgaaggtacttgacta

SEQ ID NO: 253939 - DNA, 168 bp, Glycine max
gcttctagccaaatggacttaacttgaattatttctctcttatatcccctttgagcctatgttgccctttctttgttttgaagctcattacaagacttaagtgaaaaatcatgatatcaccttacccttaaggaattttggagctttggaattgttttaagaataagt

SEQ ID NO: 253940 - DNA, 468 bp, Glycine max
  unsure (1)..(468): unsure at all n locations
gctgtcgctggagctgacccatcaactatccaacactctttatttggtgactcctaggctcttgaccttgacttgatagaacctttttttaagcaaaggcgcctgactcgatcccatgttttactaaagtgaaacaaaacccagtgggaatcaagactctgacatctatcatgggtggaatggatgaatgcatgtgtcataccctaatttcgtccggagaccatcttgttggtgggatgcgaccttcgcttgaccgcttcgaggtacttgacaaccatcgttagacaatccgtgaagttctgtgacatgtcgggagttgaaaagaagcattattgcgaaatccgtaaagtcccgtaacattccagaagtcaaagaggggatggttgcataatccgtaaagttttgtgacattactgaaagaaaacaangtatcgtacgtaatccatatagatctgtaatggtacggaa

SEQ ID NO: 253941 - DNA, 454 bp, Glycine max
agctttgcagattctattgcttcatcacttgttatcttctatcactcatccattgggtaacaaatcttaaactgttacaaatgtccaaacaaaaaccgcaaaataatgacaaaatcatatctgtctaataattatattcacatagaaaagtgtccatatttacaccatggtgcagaaattaaaacttaatcctcaagattcccttctacctgaaacaatattaattctgacatgatgtaaaggcaccattccaaaatttcataattggctatttgcagtttccccacacatctcaggacttcacagggaagtagagaaccatattacttaatgtagaataggtgcatagcagaaactaactgaacaacaaaaaaagaatgaaacctaaattgaaatgcttaattatggcaaaattacgtcaaagatacacaatacatactatcaccaattgtat

SEQ ID NO: 253942 - DNA, 458 bp, Glycine max
taaaatacaataaggttgcaatcttttttaatagagagtttttccttctgaagaatttttccaactttagaaattttcttaattcttaataattttactaatgctaatgcaagcaataaagcaataaactagttctttccaaatgcttatgcaatgcaagcaaatatgcaattcatacgcagttcatctccccctttgggcattaacaaggccaaagagtttaaacttatgcacaaaaaagaacacacaaattgaaggaaataaaccatagcatttcattaatcatgaaacattgcaaacaattaatcattaatcattgacctttctaatcaaacacttaattttcttcaaacaaacacaaacatggaaaaacataacaaaacagactaacaaatagtagaaccaagcactgaaacataattacgcttcatccttaactgagttaagaaggttactga

SEQ ID NO: 253943 - DNA, 435 bp, Glycine max
  unsure (1)..(435): unsure at all n locations
gcttattatccaagatcgctaagaagaatttcttgttgctggcagcgtcgttgttctcaatgcttgaatatgatggtgtcgcttttttgaatgatttaggttttttttattttgttccaatatgtctccttttggatgacattgttgttgttcaatctatgctatatttcatgatttaatttacggttttattattttaatttatgcatcttagaattttgcttatttatgttgaatttaatcacgtttaactatgatagcttgatgatgttaaaatctatcgaaattgttaaaattgtgcttgttagctcttgtattggtggacatatgacatttgaaattaggttttatgctatggattgaacttcacctaagagtcttgttctttttgtgtgattcattntacatttcggaaatgacaatgaaaacaagtga

SEQ ID NO: 253944 - DNA, 466 bp, Glycine max
gcttgccattaaaggcattgtaatatcaatttgctaaagatcccaatgaaaggaagtgactaaagtcagaatagttctgattcttataggtttcacaactagggaaaatgtttctttgaaatcaaaaccaggttgttgatggaagccttttgctacaagacgtgccttgtacttactgacagacccatctgaattatgcttgactctaaaatcccgcttgcaaccaattggttgcctattaggaggtttaggaaccagttcccatgtattgcttttgagtagtgcaaccatttcttcatccatagcatctttccacttaggatctttaagtgttgttttgacagttttaggcacaacatgagttagaagcaagggttggtggagtctaggcttgacaattccattttttgatctagttgtcataggatgaatgttacaacgtatgactagattggtagaggaaact

SEQ ID NO: 253945 - DNA, 404 bp, Glycine max
ttcttagtgtcacctgatgaattcgttgtttctttatgctcccctctaatgacaatagcctcacctctggcactaaattgctgggagtttgaagccatcttctcaattaaatttctggcttcagcaggggtcatgtctccaagggctccaccactggcagcatttatcatacttctctccatgttgctgagtccttcaataaaaatattggaaaagctgctctgaaatctggtggtgagggcaactggcacataatttcttaaatctctcccagattcatataggctctcctcactaaagtgtctaataccctgaatatcctttctgatggtcgcggtcctggaagtagggaaattgtttttctaagaatatcttcttgaggtcatcccagctcgtgatggact

SEQ ID NO: 253946 - DNA, 467 bp, Glycine max
  unsure (1)..(467): unsure at all n locations
tatattctgcttcattataggaacataaagattcgatttcttttgtgatcctcataggcatattattgggagaaattaaaacaacaccaattccataaccatcactactgaaaaaaattatttaacgacggttaaatagggctttcaacgacggttcttcaccgtcgttatagccaatgtcattgaaaatgaataccattgatgacggttcttagaaacaccgtcgttgaaaacatgaccattctaagacaggtgttaaaaaagacccagttgtttcataagaaccatcttagaaaatatacattctaagacggttcttatgtaagaaccgtcttaanagccctgctttctaaaagaaccatcttagaaagtctatcagtcttagaatgtcctactntctaagatggttcttatgtaagaaccgtcttagaaagcagaccttctaagacaattcttacataagaatc

SEQ ID NO: 253947 - DNA, 415 bp, Glycine max
acctgaggcatgcaagcttatcatgtgcacgacaaaggactaaatatgatatctccgtcttatgaccactacaaatcaagtccttcttgcctaacacatgatcaagccttgagcacaacaggcacggtatttgcaatttgcagtaaccagcaaactttgctataacataagaaaaaacggcgtcgataaacaggaaaaagatcagcaaccattcgagaaaagccgatgccaaggccgtggttacacccggggagagcttacgccactcagaagatgaaattccagtggtagccatcatccaaccaactcaattatcttcgaaaggagaaaccgattgctgaaagttgaaacagatcaaactttgaccttctcccaaaatgatatgaataagtcaagggaaagggttgaagaaact

SEQ ID NO: 253948 - DNA, 464 bp, Glycine max
ttctggtatgattttcttacagcaacatctttattctgtatatgcaattcaacagcaatcgcttataatgtgtttgatttttttcctaatcattggtgcaaagaggaataagctactaatattatatattttttcaattcaaagaacgagaaagtatatatacaaagagaaaagtagaaaaatattaagaaattgaagagatagggcaaaataggtttattaaatttgaatattaataacataaatatttctcacagctattgataaaaacatactataagaattcaattattaaatatatattaattaacttaaacattaaatataagcaatccatgcattgtgcgtataaaatcttttatgatataactttttttaactcagttgttaaaaagttattataaatctttcgatacttgagtctaattcgtatggataaaacataaactaattagttatattat

SEQ ID NO: 253949 - DNA, 406 bp, Glycine max
  unsure (1)..(406): unsure at all n locations
cttaagtcacctgcggcatgcaagctttctcttttgtgcaactatcttatttctttttaggagtaaaatgaagctagacaggttcaggtgcaggtgttgctactggtggaggcacttgaatttggttgtcacacctcaaggtgatgacactcacattttttggattctgcacagtttatgaaggcaatttgtcagaattctgggactgagcttggttcaactaagtaaccatctgccctatctgatttgtcagactctgaatggaggctcttgtctcttgttgaaatttcatattctagatggtcatttggctcactaactcttctaaagaaggctgaagacgagcctcanatgcttgttgtctctgatgtgacttgtgtcgctgattggaggaagaacatatggg

SEQ ID NO: 253950 - DNA, 377 bp, Glycine max
caacaggcaaacggatcaacttgaaccgtaacaagcgcgcggaccaactatgtcaactaccgaccaaatatagctgctgcagaacaacaaaaccctatgcggagcacgacatagcagacacggatcaagctgaatgagacgggtgcaccagcaataacgcgaggcgcacctagcaacacccacgaacaaaccgtgatctatccacaagatcccgtgatacccacaggcaccgcgtagcttagggcctgtccaaccaagattgtcaaaagctatctataacacagtatctaccccaaaatagagcccaagcccacaccacgaaataagactgactcgcaagctaccgcaaacacatatgatcacacgacggacacaaa

SEQ ID NO: 253951 - DNA, 461 bp, Glycine max
  unsure (1)..(461): unsure at all n locations
taataagaccatctatggattgcacaagcttcccttttgtgtatntaaaatttcatgaggtcattctttcattcagctatgaagagaatatcatggatcactgtatataccacaaggtcagtgggagtaagatttgcttacttgtattatacgtacatgatattctgcttgcgactaatgataagggtatactatatgaggtgaaacaatttctctcaaagaactttgatatgaatgatatgggagaggcatcttatgtcatatgcataaagatccatagagaaagatctcgaggcattttatgcttgtctcaagaaacctatatcatcaaagttttagagagatttaatatgatagaattgttaccaagtgtagctcccattgtgaagggtgacaaacttgcttcgagtcaatgccccaaaatgatcttgagcgtgaaaacttgaagcatattccatatg

SEQ ID NO: 253952 - DNA, 393 bp, Glycine max
  unsure (1)..(393): unsure at all n locations
cttcaagtaggtgctccttaaacctccattaattttttttttgctttaccttctcttccattgtggtttcttcattttttctccatgtatatcctcacatgtcttgtgctaaatgttattaacatttaaagtttccaccgattaaattttctatagaagctagatttgattttctatggatcaaatntcttgttcttgttcttgaaccatgaattgtgttgagtttaggcgcctttgagattagtcttgatatttttctgtggctgaaacctaaaccataaaattcttacaaaaatattatagtagaagaaaacctcacaaatctagagtgacttcgtcacctattggtagtttttcatagaagtcatggctagtcatgaaactttgcacata

SEQ ID NO: 253953 - DNA, 432 bp, Glycine max
tgtttcatgtaacacaaatctcacagatacagaacccttatattaattcaaccataggggtaaaattaagaaaagatcaatttaatcaagtacaaaattaattaaaaaggacttattcctagataaccaattataagcattcagtttttcaactcctaatttataacttataaacttcccgttagcttatcaattaattttaaaatagatggatatgatgaatgttgaattgaagtgctataattaatgtaatgaatatgaatatgtcaccttgttccctaagcatcccatgatgccacatccgacgcaacagacacttggatgttgaatgaatggacgaaggtctctcttagcccatactgatatcaatataccaaccatttgcttgtaatgatcattcgaaatcttgtgggcttgcgacctggatattat

SEQ ID NO: 253954 - DNA, 405 bp, Glycine max
  unsure (1)..(405): unsure at all n locations
tgcaagcttgatgtgagaaagcgtggaagagtctgtcttcctacttttgtnggatgaccacagagtggtacctggagatatgtcgcggaggtcaagaaaccttgggacgtcaggtggggtgctattgcccaaaaccaagcttgaccaatcccgacccaacccgggcatagtcagttagtgagaacctgtgacgtacctaaacaggcgagctcttggcagtcaaccaataaaagaacaaagtccacaaagcaaggaggcttgtgtggcggctggccagctatgaatcttgagtgatatctggaaattagcctctggtaatcgattaccaagggtggtgtatccgatacagggcttaaaatggagacaggaagttaaaatggcctctggtaatcgattaccaggggg

SEQ ID NO: 253955 - DNA, 446 bp, Glycine max
  unsure (1)..(446): unsure at all n locations
tctacccanatggacttaccttgaattaattcctttgatattctttttgagcctatgttcccctttctttgntttgaagctcattacaagccttaagtgaaaaaccatgatatcactttacccttaccttgtgtttggattaggaatttcaaaattttaaggaatttgaaatgcctagaatttgaattgctntaattttaatttctttcatttttcaaatactttgttttgataaatcaattcaaatttcttccattntaaattctttgtttggatagggcaattcaatttcctccatatgcaaaatttcaattttatattttaaatagatgaaattntaatattaaactttatagaaataaacacaatcgaattctgaaatattaattacaaaatatcttcaatttttaatacattataattataaaatattgattaatttaact

SEQ ID NO: 253956 - DNA, 405 bp, Glycine max
ctgtatggtggtcagcataggatcacaaaccacaaaccctttctacaggtacaaatttttgattcaaggccagctgggttaccaagttaaccaatgcatccagtttgccttcaaacttcttattttcagatgatgcacatgggtttgtagctacctcatgcactcctctaatgactatggcatcatttctggcgctaaactgctgggagttggaggccatcttctcaattaatattttggcttcaacaagagtcatgtcttcaagggctccaccactggcagcatctatcatacttctctccatattactgagtccttcataaaaatattggagaagatgctgttctgaaatttgatggtgggggcaactaacacatagtttcttatatctctcccagtactcat

SEQ ID NO: 253957 - DNA, 474 bp, Glycine max
gaccttaaaactcagcttttatccaggctcatcttggtggtgaagctccttctctatggcttattccctagtggatggcgcctcctctcacctcttcttctttgtcttccgctgcatctcaatggtggaaaatcaccattaaaggacctcactaaagctcaaagatccagcctccattgaagccccacaagcaagcttctatcacagtctcatgatctgaaatgcatggtctaatgacctgatcactgcacaatttccacaagtaggggtcatcccaaataaaatgcttagcatcacttttaattttatctttttgggccttagatgctaagggaggaaaaacagaagcaactaaataattgacaatgttagcaaaccagggagtagaaagagaatcagaaatactatacaatatatataaatgatcatccggaaaatcatcccgaatgggtgagtcctcatcagacacatgtt

SEQ ID NO: 253958 - DNA, 451 bp, Glycine max
  unsure (1)..(451): unsure at all n locations
agcttgattaatgaccctcctagcacgattcttggtgtgtncatcgggggacaagacacatacatgcaaaggaagtacaactttacagtacaaacaaatatgcaagcgacattgttatttttttcttaattaatgaacgctaacgtatattactttttcaatcttaaaaattaatctatgttaaaataattcttttagatacaagtcaacataaattactttttttaatacttaaattaatctttcaataattgattttagtgaaattgaatttaaatttttaaaataaaattttaaatttaagttagattcttatcatgtttttcatttgcctaaattctaaaatgttatcttttccttggcataagctcttntttcgatgtagggtgtgatacctgaaaatattattacaaataanactttaacatcaataagttaacattgattttac

SEQ ID NO: 253959 - DNA, 424 bp, Glycine max
  unsure (1)..(424): unsure at all n locations
tatntaattccatctctgatatatctcttctgctctataatgattacggagggtttcctctgttgtaaagagtcaatctccgtatttcctaaacaagcctacgttcctctaaatttctaatgaatttgatgaattacttgcatatatcttccatggatcgtaattgtggtatatagtttgtcagtaaaacattttccatgtagctttctactgtgtttcacaataacttcataactttttgcaggtatttgaagttcatcttgataatccaaaagtgcttctccggtattcatctgctctggttcaaggtgccacaaatgttctctggtatgaatacaggctgttgaaaagaaaactttacttaattgtccataattagcaaaagccaagcttggatttggattgactggtgtttactatgtac

SEQ ID NO: 253960 - DNA, 366 bp, Glycine max
  unsure (1)..(366): unsure at all n locations
tacctgaatatgcaatgttccaattgtttnttaaacggcgtaagcgattacaatatattggtaatcgattaccagngtatctgaacgttgaaattcaaattcaattgtgaagagtcacatcttttcataaaatgctttgtgtaatcgattacatggttttgggaatcgattaccaccgacaagttttgaataaaaataaagagatgtaattcttccaatggttttctcaagattttctcaaggttataactcttccaatggttgtcttgaccagacatgaagagtctataaaagcaagaccttgacttgcattttatgaacttgatataactttgtacataactctttgaacatcttcttgaactt

SEQ ID NO: 253961 - DNA, 438 bp, Glycine max
  unsure (1)..(438): unsure at all n locations
ttccaaagntntctggttatctaaaccatgatatcttgtgtctttcattcttttcatctctcttccctttgccacaaagaattcgccaaggactaaccgcctgaattctttatgtgtctctcttctcccttttccaaaagaatgaaggactaaccgcctgaattcttttgtgtgccccttctcccttgtcaaagaatccaaaacgacacagcttgagaattcttttgattcttcccattccttatacaaaagcgttcaaaggactaaccgcctaagaattcttttgtatccccattcacaaagtattaaaggcttaaccgcctgatatctttgtcttaacacattggggggtgcatcctttgtggtacaagtagagggtacatctacttgggttgatgactgagaacaagagagggacacctttcttgtggatcagtt

SEQ ID NO: 253962 - DNA, 459 bp, Glycine max
  unsure (1)..(459): unsure at all n locations
agcttgacaccatatgagcaccacttganaccaattattcctatctgtcattacatgaaagtgcgagctagaattgctgataaagcagttattaatggaattttgttggacattgcatacaatgtgaatcttcatgccaaaagagcaatggatgtgtgtttttatgagcagttttgaagtggggtacttgttttgtgacatcaagtttcttggttaattggtcactatcaaatttttccaatttgtgttttagtggcagaattagactcacaaatggttttttgcttattaatgtagtatatatgaaaggctgtatgattctgagtcagaactttgtaattagcagatactcactaaaaaagtatttataaatgtttctgttttactgtgagaatcaatctccgacaaacataatgaacagcactagaatactagcatactcgagttgttaattttatt

SEQ ID NO: 253963 - DNA, 391 bp, Glycine max
tgaatggtgttcgaacctggcaagtgcaccagatcacgcaagtagtataaaacggtaagaatcgagtatcgaactctcggggaacttgtgttacttggtaaaactatattcagtgaataggtgtctagtatgaaaagatatgtgtagactatgaacaggtatgtaaactaactattaaaaggaaaatcacgtgagtaatgatgtgtaaagacaagtagacaacatgttggtcttcttattaggtgcctgatgttataaggatattctctacttaacaatgctcatgtattctatggtgtctcccgaaatgctaaaccccgattcctcatgataatctagcctaatcctgatttagcatcgtcctcagatttctcttggtggactaaactcg

SEQ ID NO: 253964 - DNA, 449 bp, Glycine max
  unsure (1)..(449): unsure at all n locations
gacctgcggcatgcaagcttcttaatgaacatgttcatgaaacgattattcttttctctctaatatattattngaaatgctaagcgtgttaactcagtttattgaataagatgtgttttaactcggcaaaaaacacttgcacgaatgtgcaggtagcaagtgccacgaccacttttgtgtggatgatcaagaggctggagactacattacaaggccacttttgtaagtatataatctttctgctgcttaacatgatttctcatatttttctttcagagtattatttctctttctgagtattaaagaaatgtcacaccgccttgaatgacttaattaccctaatcctaaatgaacttcaatttcttttcccttttggcatgcctgctgcacacgttgcggaattgattcaaatgcatcatttaaggagctttataaataatttaatatct

SEQ ID NO: 253965 - DNA, 259 bp, Glycine max
acaaaaggcttaactcttgcaatgggttaacctacaagaaagaaaatacgaacatgaaccataaggtcatataaatggcatagaaaataataaaaaggatgttacccaatatttccagcaaaggaagtgttgatccctaaaccggagctctgataccaaatgatatgaaccctcatggcacaaggcgctgacttaggatcgtctatgatcaaaccctgatggaacacgcggaaattgattaaagaaaggatgaaaaata

SEQ ID NO: 253966 - DNA, 385 bp, Glycine max
  unsure (1)..(385): unsure at all n locations
gcaagctttaaagcaaaaaacatctatgaagggaatatatttgcctaaacaaaatacaanattatgaatacactccaacacatgaccatgggagccacaacctgctagacatcccaagaatattcggaggaaataataatagatatcctaggtgcaggaatttccagccaaataaaaggatggcaggataaccatctcactattgatgaaaaataaaaaatttacagcgcagtcaaaacggagctaaacggaaatggcattacaagtgatgataggaaggagattcatgaacgtgttgatacccctatttctacaatagcccaacactttataggtgacccatcactctggaaagataagtcagcagaactattatccaatctta

SEQ ID NO: 253967 - DNA, 474 bp, Glycine max
  unsure (1)..(474): unsure at all n locations
ctatcacattatggatagtntaaagtntataccaccaaaacttattgtattntataaatattaaaactaactctcaactcatattgtagttgttaaaatagtcatataacacattaatatttttactaaaaataacatatctataaattaacgaacctgtgaagcttggtaagtttttctaaaaccgtacaaccaaagctactaaacccgaaagaaacattgcataaaaaataaataaataaaccctgacattttactaaataaactaggacaggtcataccttaactagaataagtcataaacatttaatgaacgatctaataacttatccctagctnttttttttttttaagaaatgaggaagcatcaaaattgaacaaagcatcaagactaactactaataaaaattaataaacccataattaatatttatcaataaaaagaatttgacacccaaatttattgaggataaa

SEQ ID NO: 253968 - DNA, 465 bp, Glycine max
  unsure (1)..(465): unsure at all n locations
ctcagcttacacaaaacttgtggaagaatgctttccaggttattttgatgatgtcaaagaatcaagagttaagcaaagtttcaagcaaagattcatgaatcaagtttcaagtttcaagatcaagtttcaagaatcaagaatcaagaataatcaagatcaagattcaagactcaagattcaagaatcaagagaagacccaatcaagataagtactaaaaagtttttcaaaacattgagtaacacatgaagttttcacaaaaccttntaccaaagagttttactctctggtaatcgattaccataaggtagtaatcgattatcagtagccagcattgtttttcaaactgatttacaaaggtaattgattaccataatcatgtaatcgattaccagcgttntaaaacgtttagattttcaaaattcaaaatgaagagtcacatctgttgatgtgttatcgattacacc

SEQ ID NO: 253969 - DNA, 373 bp, Glycine max
  unsure (1)..(373): unsure at all n locations
aactttatcagctatatgaagaataattttctgtctatggatatcaancgacaacgcaagacataagatgtataacaactgcgttactagaaccaggtttagaaaaatatcttgattcaaaacattgaccaaacggttctttaaaaacatatattttaacaagtgataataaacaatacatttttaattgaattcaacaccttttatattgatatagtgtactattattcacaaattattacaaactatctaattttaaataatgtttgttttacctttacatacgataaaatgctaagaatacatagtttacatattgcggaggaagataataagcctaacatccaattagtactcgagacatacacaaatt

SEQ ID NO: 253970 - DNA, 369 bp, Glycine max
  unsure (1)..(369): unsure at all n locations
agctttaagagaaaccattaaaactaaggtttttcttatacaaaaancaancgaagaagctccgccaagcatccccattgaaaaacctttattctaacctttcaaagntagtgagaaggctaaacgaaacattagggaacttacaaaaactaaatccttaattgaaggcgtaggcgacaaccatagtgaattactaaacaagatgggtagattacttaaaggcattccagatactccccaagcctcgaataatacttccaaaatggtaacaagaaggacctccaaataaagtaatgttcttaatgaagatagggaccaaaactcagataacacaactgagataggatcagtgtcaggagagaatataaa

SEQ ID NO: 253971 - DNA, 227 bp, Glycine max
tgcgcctaaacaaaaagaataaatctacactaatgaaaacatccaggcgtcataatctattggacaactctactcttaaatcatttttcaagccttcaatgttttcttccaatctacattaactgtgcactactcctatattaccaactcctctgacctatcactattttattagctacacccaacccatgcgtctattcacttattactcaaaaaatttagagaga

SEQ ID NO: 253972 - DNA, 317 bp, Glycine max
  unsure (1)..(317): unsure at all n locations
catttgctctagtattcagttagtaccttattgggaatgaaattcacatttcactcatttataaaggatggtttgctgaaatagttatacatcttaccacataagatgacaactttggggattaacgttaatccaaaagtgtggtatggaaaaaaactaaagttttacattggttaaaaataaaattaaattagtacatatgatagagggataattttcactcgaataaacttttgagattgaacactntaaacatgtaagaggtaacaactttcacgctataatatttgctaattagaatatctacgttgtgacga

SEQ ID NO: 253973 - DNA, 453 bp, Glycine max
  unsure (1)..(453): unsure at all n locations
tcaccaacagtcggagtatatacaactgcgagcaactctttatcatgatcaataagaagatctaaaagaaccgttcattactctcctgcagcacacaaaaaaatacagtgaaagcattactccaattcagaaatctaccaatcgaaccatgtgaagaaacttccctcaagatatcttacatcatagatgaacattaaatcaaaatgataaaaaaatcaagagcagaaagcacagaccacaagaattttggcactattcataaagtgtctgagcaaacaacagatgggagaacagaaaatccttcagaggtagatgcaaaaatgcgtggattcatcatccacatgcaattntttcaaaacgcattacttaatattctcttaaacaataattgcacaaaaggccacacctgaagatccatcattgccatgtactactgcgaaggaacatgatact

SEQ ID NO: 253974 - DNA, 442 bp, Glycine max
gatccttaagtcacctgcggcatgcaagcttgtgtagcactatccatagtagtagttgtgtatattgcagctagaagttgttgtgctcaaagtttctggatgaaacaacaacttgaagactgtggagtaatccttgatcacattcccttaaaatgtgacaacacatgtgcgatcaatctaactaaaaatcttgtcatgcattctaaaaccaaacatatagagataagacatcattttcttaaagattatgtttcaaaaggagattgctgcattgagttcattgatagtgagcatcaactagtaaacatattcactaaaccacttgctagagaataggtcttctttattagaaacaaactaggcatcttagatagaattagcattgaatgatgttgtgtttagtacatgtaatacgttttgaatgcaatctatatctcttgtt

SEQ ID NO: 253975 - DNA, 433 bp, Glycine max
  unsure (1)..(433): unsure at all n locations
ttaacctcatcgtccctcacagtctttagatttgggagctctttcaatccttgngntcggactctcagccacttatgatagccgccgatgatcccattactgcttcccctaagctctctgtcctttcttcacgccgcatcccatgccttgcgaactccttggagtaccctcgcgttgtggtcactaaaaccccgtgcgatgaaaggcgtgatgctntcgtctaatggcgctcctctcatggggtagccaagctgtcttatggcgagaacgggactataattaatacaaccccttgttcccatcaagggaacatttggacatccttcgcatgaagatagaatcttgattcttccttccttctagcgagggaaccaattaacagacgccctcccatgctagccaagagttggtcccaattcgcctttcctttttc

SEQ ID NO: 253976 - DNA, 448 bp, Glycine max
ctcagctgagacttgtggcacaatcattctactcgtttttatgtcttgtctgtatcatacattttaaaggttattaacacccccagacacaccactatttccttcgttagatgatgagccaccgctgagcagttttggaagcagaggaaggcctcacagtaaacccatttccatatcgagatcttctacggtgagcttttgaatacatttatacagttatgtttatctgtagttatatttttaggaaaaaaattcctctgaatttctttttctttcatctcagataatgttgcgcttatacttatcattcatcatatgttggatgccctcctgtttccgatggataaaagataccaaagccgtaggggcagtgcaagtccaaatcgtttaagtccatcccctcgatcatgaactaacacattgcaatcaaagggaaggccttcgtcat

SEQ ID NO: 253977 - DNA, 441 bp, Glycine max
  unsure (1)..(441): unsure at all n locations
aagctttctaacaagcttctttgagaagctttatccttatctatccacacccctctattaactaaattaacttccttaatgtcataccctaatttcgtccggggattatttcttgatgacgcgcaataaatgaagtcccgagacgtctcanaaatcgaaaggaagcaggcttgcgtgattcgtgaaattccgtaatgtggcggaaatcgaaaaaaggtgtttttgcgcaatccgtgagtttccgtaacttcttcgaaagctaaaaaagagtaaaatatataatccgtaaggattcgtaaccttgcggaaggaaaataggtatcattacgaaattcgtaaagtttcgtaacgttacggaaaaagaattacaaaanaaaaatagatagggggggtgcatttattaaacaggggggtgttaatagccaccangcccacttgggc

SEQ ID NO: 253978 - DNA, 434 bp, Glycine max
  unsure (1)..(434): unsure at all n locations
tcatttacgtttctgctttagtgagcttatggtatgtttatttcctagngnngnctccctccgaggatgaagcgtaattctctttgaggtttctgttttaatgttgctctcctatcggttctcccttcaccaattaacctgcatgcgttntgttaatctgtgcatgtttcgtgtttgattaattgcctatgtgcttaaattgcgttcgtgcttaatgaacaaggggttaattggtgtatgtgttgcttaatcacatattgacagccctaagttgattttcgcttagtaaattaaattatggttggattaagtggttaattgccaggggtgaaatcctcataacctaggatataagaatggcttctgaatcagaggaaacaacacgtttctactattattaatcncgtatttcaattcgcttgtctttaattcac

SEQ ID NO: 253979 - DNA, 214 bp, Glycine max
ctccttaaattaacctaatttgttaatcaacaaaataattaactatgtcctataattaagaacaaagataatcgttattataaaaactaatagatttatcataaatagtgattccaactttacacaatgttgttatccacctggaatgtgttgaaaagtgatatacaatctattaccgttcaaaatcactcaaaattgtttatcatgttttaaa

SEQ ID NO: 253980 - DNA, 440 bp, Glycine max
  unsure (1)..(440): unsure at all n locations
ttagnnttagaaggaagacagacaacttattatcttgtatttataaacatataangcaagggctaccttaaaaatacaatcaaccatattcaataatcataatccatatagttgtaaaccgttattaacttcaactcgagctaagttaattttgggtgagcaggtcaaaatttaaataacatgaaattcaactctgagataacaagtctcctacgtatttgatcagatattaaactaataaactgtgtactaaattgataagaacatatactaaagacattaaaaagaaagaaaaaaagttaagagcatattctacagttgatatttagctaaaagacggagaatagtatgctttggaagtgttggcctttgcaatgtgttcggtgcaagtgagaacaatacagctgacactcactggagcatgaaaagttggttcaact

SEQ ID NO: 253981 - DNA, 462 bp, Glycine max
  unsure (1)..(462): unsure at all n locations
catgcaagctntacacctaattatatcctgaacatttgctatcacaaactacttacatacatttgaagtacaccatacaaatttttgctggttcactcctattcatttatacgcatattggaaagctaattacatcctgtagatatttgcattcaaaaagggcattccacactatcatacattcatttaagaaaacaattattcatactttgctaggaatttcatgctccttatatttacctatgtatacacactattgcaaggtgttttccacgctacctctatgtaaagtatcaaacatggggcagcccaaattcgagcaaaaactctcacaagcaaatcctaattttcatgttgttctaattcataaaaccaaatttggattcctagccataagcatgtttccttgcattgaaactacaagtttgggttcctaagctttgaattgcatttgggcaccta

SEQ ID NO: 253982 - DNA, 454 bp, Glycine max
  unsure (1)..(454): unsure at all n locations
ngcataacttagtgaaatttttgctcagtttagtgccgctaagtgaagcttaatcttggctaagcgcaaatccatgcgactaaccattggcttagcaggcttcttgccagctaagccaacgttgtagacactgtaacctagcattttctattaagcggcattcctgtgtcgctatgcctagttgtcgtttttgtaaagcccgctaagcgaaatttgtctcgctaagcagccagtgtcttttctagttntatttttcggtttttaaaattcgaataaccgtgtcctgattaattgtttggttctctatatgcagatggcctctaagaaacataagaatagtgattctagaccacatgatcataatgataataggagatttcaatcagaggaagcttggagaggatgcttcaatggaggacaagaaagagggagagaaagagagaggtgggagcac

SEQ ID NO: 253983 - DNA, 409 bp, Glycine max
agcttcaacattcaatatcgagcattgcgatatatttttgtactgaatcagacatccgagtaaaaaggtactatagtatgaagttgctcaaagcttcaacattcaatatcgagcgttgtgatatattacgggactgaatcagacatcagagtaaaaagttaatgtcgtttgaattatctcagagcttcggtattccatttcgagcgtctcgatatattacggaactcaatcagacatccgagaaaaaagttactgtcgtttgaatttgctcagagcttggataatcaatttcgagtgtctcaatatattacgcgactcagtcagacaaccgagtaaaaagttattgtcgcttgaattatctcagagctccggtattccatttccagcgtctcgatatattaccggagtc

SEQ ID NO: 253984 - DNA, 400 bp, Glycine max
  unsure (1)..(400): unsure at all n locations
ttgagcanattcaaacgacaatannattctactcggatgtccttttgagtcncgnaaatatcgagaagctcgaaatggaataccaaagctctgagcaaatccaaacgacaataacctattactcggatgtcttatcgaggcccataatctatcggaacgctcgaaatagaataccgaagctttgagcaaattcaaacgacaataacctttntactcggaagtcggattgagccccgatatatatccagacgctcgaaatggaaagttgaagctctgagcaaattcaaacgacaataacctttatactcagatgtcggatagagcccccgaatatatcgagacgctcgaaatggaataccgaagctctgacaaattcaaacgacaataanctttgactcgg

SEQ ID NO: 253985 - DNA, 443 bp, Glycine max
  unsure (1)..(443): unsure at all n locations
ctgcagctttataacctctgatcaaaagtaacttctctttaatcgttgatataatncgatgtgatctaacactaatggagggttattgttttttaaaaacaatattcactattgttataattattatttttatatatttaaaattcaaaaaatttatatttaaaataattatttgcttctaaaagttaataatttaatatttatttaatatattaaatttactattatgaaacggagggttattaatttaataattagtgttgttgtgtgcatattttataaaggtttgaatcttattttataaaatattttacatttgtgtataaattattaatacacatatatttaaaattattataaaataagagataatataatattaatttgaaatttaaaaattatatttttatttaagaacacaattattaaatggacatcttaac

SEQ ID NO: 253986 - DNA, 404 bp, Glycine max
tgttgcacaactgcaggagcaaccaataaccttcctagcttttccttccgaatcaatcttgcacaactgcacagggagaaagtccgccaaaattaaagcacagaaacaatggcataaattaatccattggaaggcataaatatagaatagtcataatcaatattaaatattatccaacaaaaagtaaatgatattctccaaaggaatgaaatcaacaaggcttactatcaatgacacttacactagcccattctccaagggtctttgcacccggaactatcagtaggctaacattgtgctttgcacaaagggccttagccagtataacttagtcaggttggtcacaatcttctgctagaacgcagttgcacatcatgcttctcaatcccttttgcaccttcatg

SEQ ID NO: 253987 - DNA, 423 bp, Glycine max
tgcagctggaactcgcaggtaggttggtctcttatttctaaccctaatcctgactccctatatcaacctcaagtgcctcgatccttggtataagcaaaaattacatactcattctacatcttggtgaatgttgagttttcccacccccactcttgttccataattaaaaataacatgtgagattgtaatttatataaaattacatatattaattttttttgtgaaatataaagactaaaatgtagtcctaattaaataaagttttgaaaaataattacttatttaataatatacttcacttgcgagttaagatcactttgcatttcatcctaaagcaagaatatgaaaggacacattataaacaaataggggctaactatgagttcaagttaagagcagagaagaaaacaaagcataaacgaa

SEQ ID NO: 253988 - DNA, 446 bp, Glycine max
  unsure (1)..(446): unsure at all n locations
aagcctcttaatgaagcttcttgaggaagctacattgttctgccttggtaaaaacacttcccagccttcgttaaccgttggatcttctcgaaatttggtctgcagcttcaaaagacacttgtccacaatctgaccgttgggatctttgagacgatgtctggagtgtgctcgaagcttccgttcccaagaacatttcttatttaagcatttcagcctttgcttttgtgtagcttaggaaaaatgtcatttcttctcctttctttcttccaaatccatttctaacgtcccaagcactttctccatcacccacagccaccattagccaccacaaaccatcgttgttctccattgaaaccccacaccgagaagaacccttcaacccaagcggaatcttccaacttgacttgcggtttcggtagagaacganaccctaatctgacctttca

SEQ ID NO: 253989 - DNA, 411 bp, Glycine max
catgcaagcttcaattgcagttacccattagagtgtttttcttgttctgagcaattctttgacctgcagcagacaaaatgattggcaaaggtgcaacttacgttggtgaacatggaatatattcaggttcatcaaaaagaataaatagaagttgacacatgaaggtctgccaaaaaggcaactattaataagtgtgggctttgaagagtgggccttaaaaaaaatgcttaatttgactctggctagtaataagcctagttcaactattagagtgacaaaaacaagttctaaagcacccattccctttgtcaagagtttttattacagaaaatatggtattggagagggaggggggaggaatattgtttaagtagtggctagttgtgatagattagttacccatagttagct

SEQ ID NO: 253990 - DNA, 457 bp, Glycine max
ttgcttactggtaatcgattacaactatctgttaatcgattaccagaaagtaaaaactctttggtaaacatgttttgagaaaaatccgtgtgttactcagtttttgaaaaaactttttcatacttatcttgattaagtcttctcttgattcttgaatcttgagtcttgaatcttgatcttgattcttggaagcttgaaccttgaatcttgattcttgattcttgaaatcaaatttcctcttaaaccttgaagtgttcttgattcaatcttgaacatcttgaactcattctttgattatcatgaattgacctttgagctttttgtcatcacctttgttatcatcaaaacatctttgaatcaatcttgattcatcatgaagctttgcttctacaccatagatattacaggctcgaacaacaatgacctcaacaaacattttaggtgtgaagggtatcat

SEQ ID NO: 253991 - DNA, 408 bp, Glycine max
  unsure (1)..(408): unsure at all n locations
agctngaccggatgtaagatacatcttcttttatcttaatcattcttgactccatttcattgaagcgcatatccacttgcagttccaaagtatcaaacctctcaccaacaaaggtttgaagaccatcaaacctttccaatatcttagaaagaagagatgaatcttctccctcatgtccttcttcaccaacatttctagcacccttctttatccaagatccatcatgctctttaacatatccaaaggatgctatgactgaagcgcctataaggaattatctcttgattagaacataaggttcacaatcaatagggatgttgaagtgttgaaggaaaagggtaacaagatgaggataaggtaatggggcattcaatcgcaatgccttatgcatgcgatatctaacaagat

SEQ ID NO: 253992 - DNA, 461 bp, Glycine max
gtgatgatttggacttcgccagcggaaggatcaaagtgtttcttgaaagaggcaaattcggtcatcctgctttgataaaaactgtggcaaatgaagaggatgagaatgagggagaaacccatgctgtggttgccattcctatatagccaagtttcccaccaacccaacaatgtcattactcaaccaataacaacccatctccttacccaccacccatttatccataaaggccatccctaaatcaaaccacaaaacccacctaccaatgctaaacaccacctttagcacaaagcaaaacacccgccaagaaatgagttttgtagcgaaaaaaaaaacctgtaggattcacccaaattccggtgtcctatgctgacttgctcccatatccactcgataatgcaatggtagccataaccctagccgaggatcatcaacctccatttctccaagaatacgactcg

SEQ ID NO: 253993 - DNA, 433 bp, Glycine max
  unsure (1)..(433): unsure at all n locations
agcttgtgggtggaggacgcatgaacgatattctctatttatggggctccgagaaagggttgaggatggagaattgcactaagcaatcactacgcatggctccaagctccagggtgaaggacgcatgaacaaaatcgccattcatggggctccgaaaaagggttgaggatggcgaattgcactaagcaatcactatgcaaggctccaacctcctgggtggaggacgcatgaacggaaacgcaattcatggggctccgaaaaagggttgaggatggagaattgcactaagcaatcacttcgcatggctccaagctcgtgggtggaggacgcatgaacgaaaacgcaactcatggggctccgaaatangattgagaatggagaatcgctctaaacacattacggcacatggctccatactcatgggtggaggacg

SEQ ID NO: 253994 - DNA, 463 bp, Glycine max
  unsure (1)..(463): unsure at all n locations
caccagatggatgtaaagaccacctttctaatggttgtttacatgaaaagggttatattaaccaacctaaagggtttgtttctacgggaaaggaaaaaatggtgtgtaaattaaagaagtcaaaatatggactaaaacggacttctagacagtggtatctcaagtttaatgatactattacgtcgtatggttctgtagagaatacctttgatcaatgtatctacatgaaggtcaatggaagcaaatttgtaattttagtcttatatgttgatgatatattgcttgctgctaatgatattgctatgttacattatgtaaacaagtatctttctattaactntggaataaaagatatgggtgaggcatcttatatgataggaatacaaatattccgtgatagaatacaaagaatgttgggatcgtcacaaatatgatatatcaataatagtttagagagattcac

SEQ ID NO: 253995 - DNA, 419 bp, Glycine max
  unsure (1)..(419): unsure at all n locations
agcttgtatgtcctgataaaagaaattaatctgatgcagtcaacattacttcacatgaagaaagaaaattcataaacacaaatagttataaacaataattaaattaggaataatgtatttttaagtaatcatgtaagtgttagtaaaatagttgtcgcatcctcccctttgtagctgttaaagactaatttttagtaattgtgaaagtaatagaaaagtattaaaaatgctaagataattaagaaacgtatttctaactgtagcagagtaacagggtaagtagaaattttactaagcatgatttgaagtatcccatattatagnttggaattggcttacccttggtctaacttctcattntgctcttaagaaaagtggtaagttttactaagaattgttattgatgcactcccaccatg

SEQ ID NO: 253996 - DNA, 449 bp, Glycine max
  unsure (1)..(449): unsure at all n locations
ttatttcactctcttatatttattatttatcttaatattaatctaatatattttatgtcaattggttcaataatatataaatatataataatttgtaattacatgaaattttcacttcaaaatttaaaatatatagaaaaaggaatggaaaagnttaaataaaaatacactattttaaataatttttataatacatgcaaaactagtgtgctaataatttaaataaataaaataaattttaaaacaaccatatttttatttatgtaaagaaatataaaataatacattgttaaaattaacatatagtttaatttataaacagttaacaaatataattcatttgtaactaaatattgtatatataaatgtaaactaatatcttaaatacaaaattaagtgaacctcattaaatatctcatgatagaagagttacccgattagagataccc

SEQ ID NO: 253997 - DNA, 393 bp, Glycine max
agcttatggtatgatttggacatatatattatatattgtctttgtgcatcctgccaattgctggaacacccagcaaaacagcgtaattccaattttacccttaacccatccgttatctccttcccacgacacggtgctactccttgcttttactgcgttccactgttcttcatatttcttctggtcaatggttgctctacaattatcctatttttcccattcattattatccacccattattctcactaagtgcaagtattccgcttaacgccaatttcagcaaatttcaatacttttcacgaattcatcattttaattttttatttgtttcaatctacagagtccgaatctcttttgttgggtttaaatattcaagtttttcaaggaatttc

SEQ ID NO: 253998 - DNA, 456 bp, Glycine max
ataaaggaaacagcaaccgcagaaggcttatttattgttacaattagtaattattcgcttgctgtcatgaatcttcttccttcgacattctattctccatcttactggagagtataattttgattgaaattacctgtgttttcaccatttggcaatcttctattgaactataaacagtgatatattttttttcagttggtcattatgaaaacttcataatttaacttgtataactcgtattattctcataatttattctcggaattttatatacaaagtcgaatattccgtggttcagatttatgtaaacttctctagcggacagaaagtcagaaacaaatagaaagcatacaccccaccggcatggctctctctttcagtctcgctcgcatgaataataatagccagacaaggagtttgaataagacgtggagctagagaaattcatgattcatc

SEQ ID NO: 253999 - DNA, 377 bp, Glycine max
  unsure (1)..(377): unsure at all n locations
tcactcacaagcttcttatggtngaagccaaattccaactttgaatctataacatgagtcttgaaccacccaaaagccttacacctcccttctttttttttcttccattcttccattcttgacttgagcttcaaacttctcatagtttccattcaaaaccatccacaaaaaccacagagaaggaggtntttttttatatcaaattttcttcgaaatcaaaattcataaaacttgctaaagcaaaatgaaaaccttaagccgcattccgcaaatgaaaaaaaatgatcgaatcgaatagtaaaacataaaaaagcagtggagattcaatgcaatactttacaatgaattaaaagttcagctcataacaatgtttgcat

SEQ ID NO: 254000 - DNA, 433 bp, Glycine max
acggacctataaaactcagcttgtctaaaaacttggggaaaatggatagagtctcctttgtatttgaagctctctcaaagaaaaattaaagcagaagaaagaagcaaagcatgcatgcaaactattctcaagacaaagtcacataaaatagtttctttccctagaaccaattttctcttcaattcaaaattttctgaaagcacttaaacggaggtcattacaaccaaggttaccaccttccaagggttgagttcacacaaagaaatccccacttagcaatggtgatctctacacaaaaattggaagaagaaatggtgaggatggatagcttcttgagctctagcaaaggcaccaacaatggaagcaagtgtgcataatttccttttctccttctcctctttgtctcctagccagaccatcgaaagggagcaag

SEQ ID NO: 254001 - DNA, 430 bp, Glycine max
agctttcagtctttgcttaactccctttatttttttcttttaacacaaaaccaccgttgggatggcttggatgcaagctacctgttgcctatttcaccccccttcttgcaaagtgacttaaacagctagaccatcctatctttggcttttgggggttgtgctttaaattgattgctacttatcaggccaaagttttagatgagtgtgtgcaggtgaagttttttatggtttagtttagtagttatattaagtaataatgtttagataaatttatttggctctatctattagtattagtactactactaacatacccaagtgtccggaggctcctcactatgcgatggttggggagggtcattgtacgtagtcttacccttgcatatgcaaagaaactgtttcttgattcgaaccaatgatcaactggtca

SEQ ID NO: 254002 - DNA, 465 bp, Glycine max
  unsure (1)..(465): unsure at all n locations
cggattgattcggtttgacgagggatcggngtttattatatttggctacagcatagaacacaagagcatgattgcttatagaaatatatttatatgcatcagcttctttgttagaaagacccaacatttctacctactgctgtcacttttacataccttgccttttatagtttntagcataaaggtttagtttaaattttgtttgaaactatcaatcatacatgttctctcaacaatgcttcatttatgaacttaactcagtgatgtaactcctatggagcttgtttgccttggatctttntcatcaatggattcctttgcttctagaggtctgattgcagtggaatagagaaggagaaagatgaatggagacgccagttcaagtataagatgagtctagaagaagctcaccaccatatgaggccatggataaaaactttgtgggaagaatgagatgaatgaacg

SEQ ID NO: 254003 - DNA, 359 bp, Glycine max
  unsure (1)..(359): unsure at all n locations
agcttacattngncatctttatcaaccaccttgttaccggcggngatggctttctgacgagctacagacaaaaatgcattcgtcattgattagcccggctagttgtcgcttttgccgtgactgctcttaccaccttttttacctgcttcagatgcgcgctgcgggtcattcttgaaattacccccgctgtgctgtccaccttttttacctgcttctgatgctctttcgcggtcttctgcaaaattgccggaaccgcctcgatggtttgccattactgacctccgtctgggtatagacatcatattgcatataattaacgcggcgtatggcggctgccatattttcgctacgtgggacta

SEQ ID NO: 254004 - DNA, 359 bp, Glycine max
tagtcccacgtagcgaaaatatggcagccgccatattctttgttaattctatgcaatatgatgtctatacccagacggaggtcagtaatggcaaaccatcgaggcggttccggcaattttgcataagaccgcgaaagagcatcagaagcaggtaaaaaaggtggacagcacagcgggggtaatttcaagaatgacccgcagcgcgcatctgaagcaggtaaaaaaggtggtaagagcagtcacggcaaaagcgacaactagccgggctaatcaatgacgaatgcatttttgtctgtagctcgtcaaaaagccatcaccgccggttacccggtggttgatactgatgacaaatgtaagct

SEQ ID NO: 254005 - DNA, 448 bp, Glycine max
cccagctcgcccaggcgagatatgttgctttctccaaaaggcaccaccttgtggaggaacttcctggaaggcccaagtgggcctggttgctatttgcaccccctatttactaaatacacccctgcctttcttttgttgattctttttccgtaacattacggaactttacgaatttcgtaacgaaacttgttttcctttcgtatttttatggaaccttacggattacgtaatcatcccttttttggcttttggaatattatgaaaccttacggattgtgtaaaaatgcttccttttgatttccggcatgttacggaacttcacgaatcgtgcaacaatgctctcttttgacttctggcacgttagggaacttcacatattgtgcaacaatgggtgccaagtacctcgaagcggtcaagcaaagggtgcatgccatcaaacaatggtccc

SEQ ID NO: 254006 - DNA, 414 bp, Glycine max
ctttaacagttactcgaagccattatttatgtatatggtatacgatatgagccgtttatgaagaaaggaatccacacaaaagagcataagtgtcttgatcctcctcggtcctcacccacttgtggccttcgacgtgtccaacaactccagcatcatcgaggaaaactccaaattgttcaccacgccacgctagattgatcgacattgccgcctctttggctctgtccaaccctcattgtttgcgaacattatcatagcatagtcgagttaatataaatgagatctaaaataaattttaaggaaaatatttcactctaaatgcatgaaagaattatgtatgaaacctttgtcaacatataagattgtttttctataataaatgtagcattgctaagttatagagactaaaaataa

SEQ ID NO: 254007 - DNA, 393 bp, Glycine max
  unsure (1)..(393): unsure at all n locations
cctcatcgtccctcacagnctttattatttggagccaatccaatccttgggttcggactctcagccacttatgatagccaccgatgatcccattactgcttcccctaagctctctgtcctttcttcacgccgcatcccatgccttgcaaactccttggagtaccctcgcattgtggtcactaaaaccccgtgcgatgaaaggcgtgatgctttcgtctaatggcgctcctctcatggggtagccaagctgtcttatggcgagaacgggattataattaatacaaccccttgttcccatcaagggaacatttggacatccttcgcatgaagatagaatcttgattcttccttccttctagcgaagggaaccaataacagacgcccccccatgct

SEQ ID NO: 254008 - DNA, 448 bp, Glycine max
actcagcttcacaaataactttctaaggtagtgtgcagtgccccaactgttattctttcgttaagcactaataaattcttgatcacttcctagaaatccttttgcaaagcatgctctcctaaatgtatcatacaccacattatcaactgttctaatgtctttgtaagactgtggacctttatcataggaaagcatcattctgaggtaaaacaattcgccacttgaaggtgggacccatatgaacatgcctattgtatttccttgttttcttggttgccagcatcttttgcatgcaacataaacaaattttgacacatattgaggataagtaagatcccgtccataagggtatattttgttagaatgcatccaggctgtgaacattgattctttgattgtgctctttgatagaactgcaccaatttgttgactatctgtccagcaaact

SEQ ID NO: 254009 - DNA, 455 bp, Glycine max
ttaagtcacctgcggcatgcaagcttatgcaatatacaattgtaggcattggtgcaattttcatatgcagaaactgctacctccgcagaggatgctttggatggaagaagcatacctaggtgacagttgtattatttgtctgacatggtatttagttcaactgtgatggacatattggctgtggatgtggtgcatatcctcagattggtcaactatagactgttgtaacttgtatattcacactctcactttggtttatttattatgtagtttatatgctgttcttgaaattgtaattatgaatcattgaatgtgtaaaatacggttagctatatcattccaactggaccaatcataagaataaatgtgttgagttcaacgtttttctactaattagtagttattagcacattcattggctctgctgatatgtgtatataccttatgcattatta

SEQ ID NO: 254010 - DNA, 484 bp, Glycine max
  unsure (1)..(484): unsure at all n locations
ttgaaactaagcttctgggactgactntcttctttttttctcttccttctcatccatattaagagaaataagtttatttagggttttagggaatttacggaagccttaagcacgcatataggacttgatttccctttttttcctcttctctttcaccaatattaagtgaaataggcttactcaaaggtttaggaaatttaaagaagcattatgaaagcctcggaagctccgaaaaccatttttcaacaaaacgtggaggatcttgataagttcaccccccctttactaaatgcattcctgtttatttacacacaccccattttgttaagtacactcccattttcttgttttttaccggtttcttcccgaaacgttacgaaactttacggattacgtaacgacacctattgactntccggaatgtngcgaaactttacgaattatgcaacaaggctcttcttgacttccgaaatgttgtggaact

SEQ ID NO: 254011 - DNA, 415 bp, Glycine max
  unsure (1)..(415): unsure at all n locations
agcttctagtatatatatttgtcttcttcttcaagtgcccattgtctctaaacgaataagtttcttcacttgagctcagatttgaagattgtggttgttggagcatttaatccttgcatttgatgcacgtactccttcatgctaaaaaatcactcttgtgagctttcatgttgatcacttcagtagaaaaccacttggttttcatttaaagaaggtttgtcaccaccaatgcacgtcttttgatggtgtttgtcaacttctagatatttaacttcatttattcttcataggatttgacaaatcctaggagaatatcttcgcaaaatgaatctcanacataaaacattaaatgaattcttaaatgtcatcattntattgatatatcagatcatagcatgtctctactatcggctga

SEQ ID NO: 254012 - DNA, 463 bp, Glycine max
  unsure (1)..(463): unsure at all n locations
tatttatattttgacaagcaatgagatatattctttatttttataacgngcaggatcagtaacatgtctagatccggggataatatgcatagagaaaatgcttagcagcttccaaccacgactgtgttatccctggttttaacggaggggcctgttacgcgtcttcttcgtgttgttgtaacaaaaattgactacgttttacccggcttcaatgcatgaaaaaaataaaacattagttgcttaccaatttgctaccaagaataaagcattatccgtggtataagaatcgaggtgcaggtgcttgtttgggatttgctgtgttgttatatgaagaattcactactttgtacctctctccaaatatatatatatatatatatatatatatatatatatatatacctcacaaactttggttataataacttgtaattattggagttatatatgttaagagcttatg

SEQ ID NO: 254013 - DNA, 452 bp, Glycine max
agcttgtgtggaatcgacaagctatgacatttattgtatcttcaagtgacgtgacgaggaatccgtggggtagctcactataggtaaggggagtttattataaaatttaccattttaacaccatagttaggattaaggaacctagctatgaggatatctgcctgtccttgtgcatgctgatttttcttcaaagaaaattacgttttaactaatgggatgcgatatatatattgtgatgaatgatattgttttggctgtttgaaggctgtgcgtgaggaaatgatattgttgtgtttgtttgaattggtgttgatgttgctattgaggaatttaattgatatgtgatgataatgatgattatgatgatattgatttgagatgacattgttaataaagaccatgtcaacatgaatgggtattattgatgaatatgtgaatatgaaatgatgttg

SEQ ID NO: 254014 - DNA, 473 bp, Glycine max
tgtagaattatggggtacccatcacatgtggtactttgtggcggtcgggcgatggtgcacaacaagctttgcacatccacaatgcgcgcataaacccaccatcccctgttgcccacctccatctgagctcacgtactcccacgtagcccatatcctcgtttctctcaacaccgggtccccatcaatcctctcaagcttccacaacatccaagcaaaacaacattcaaacagcacaagctatcacagccaagcaaaacagagcaaaggcagaaaactctgctcaacacatcaaccaaaatcacagcttttctcacttaaagaccccagtaacaattccttcgatccaattcgttaaccgttggatcgactccaaaattttactggaagtctatagtgtataagcctacattgtgaccgttgggatctactagcaaacatccagaactcattctgcactagactgtccacagccg

SEQ ID NO: 254015 - DNA, 420 bp, Glycine max
  unsure (1)..(420): unsure at all n locations
agcttacttggattgagatgaagatgtattttattatcatgaagaatgcaggagataactggaaacacaggcatcaaaatgcacaaagcacagagtaagcacaagcacaaaggagagaatgctttgaagtgtaaaggtaactgcatatggcaattctatttcattttagcattttcgtttggcgcacttagcgcatagctgcgcttagcatgccaacgtgacgtttgagtttaaagctcatgtgcttagcgccacctctcgcgctaagcccaattcaataatttcaaattccagaaaggtattcaggcttatcgcaaggacacgcgcttatcgctgtctgcaactctaattggtcttgtaattntcgcttagcctgagatgtcaggcttagcgctaaaacaagctctacttacagttatg

SEQ ID NO: 254016 - DNA, 455 bp, Glycine max
  unsure (1)..(455): unsure at all n locations
tgccgccatggagttntccgactatgctcttgngtggttgttcttgctacaaaaagagagagcaagaaatgaagagccaatggttgatacatggacggagatgaaaaagatcatgaggaagcggtatgtgccggctagttactcaagggacttgaaattcaagctccaaaaactaacccaaggcaacaagggggttgaggagtatttcaaggaaatggatgtgctcatgattcaagcaaatattgaagaagatgaggaggtaactatggctcgatttcttaatggtttgactaatgatatccgtgatattgttgagctgcaagagtttgttgaaatggatgatttgcttcacaaagcaatccaagtggagcaacaattaaaaaggaagggagtggctaagaggagttttaccaactctggttcttctagttggaaagaacaaggtaagaaagatg

SEQ ID NO: 254017 - DNA, 448 bp, Glycine max
  unsure (1)..(448): unsure at all n locations
agcttgcaaaacaaaagngntggatggagctctatatcttttagctttttntaagttttatttgtttaaactgtgtcggggtgagtttacggcaatgttgtggctttaattttgtaagtctagctatgatctctccatgttcacggntatccttttccttttggtttaggtactcgcattctgcaagcacatgtcatcgtggcttatacatgtgatattcttttttctttaaaatttaacatgaattacttattctattgtgattaatttcatagcttacatgatcgacatctcgggtacagaaaaattcgtgttattccccagtttggtttcttttaccatattaataaagaaagagagagatttgatacacaatctgaaacattattgttcttaaatcaagtatgtnggattatgagaaaaagatgatggcaagtgtcttactact

SEQ ID NO: 254018 - DNA, 451 bp, Glycine max
  unsure (1)..(451): unsure at all n locations
ctatgtcataagggcttcaattatttatcttattttgatgagtctcagctaacattagagctttatgacagtcataagctactttcacatgcttaatcaaacacctttaattttcaggtttaaatacttaatgataagatgaacctaaataagctcgatagaagctcttccaaatactttctcagtcagttagtctccttttaccaaagtgaatgaaaactcgcgtgtgtttgtaactcatctttggtcttgcgacctccatctactggcgtcagataatcaaatgcctgcttgtcacctgtatgttttacttccagtagcacagtaaaagaagggagagaggagttactgtagccttttctcatgaaaatataccacataattntatattactaggggttattgatatacactcatttaacaaacaaatgataacgcgttgcgcatgtta

SEQ ID NO: 254019 - DNA, 423 bp, Glycine max
  unsure (1)..(423): unsure at all n locations
ggcttattgctatattctgaatgttcacaccttcacattgcatcattctttaaacattttggctttgttccatgggagattatgcaattctttattagttttctctgaaatgtctatggagatctgcgcttgttaatgtgaatgggttgtgttaccttctttgccctgcatccataaatcgttataattggttttggagtttatccgtttctgaaacgcaagtttaaaattaattttattaaaatcaattcattataatttaaaacattaaaaaatggagcttaattctggtttataattatatgttggagtagaattaantctcacttttccttgctttaaatatttacttaatatacgaaagaactttaatccacttgtaattaacataaattttttcatgatatgtttgcactatttcat

SEQ ID NO: 254020 - DNA, 459 bp, Glycine max
  unsure (1)..(459): unsure at all n locations
atgaattgattttagccttagnttcactttggtttttattcaattcggctaagaaagaaaaatcccaaagaaaaatgtccgattgattctttttgattattttattaaaagatatttttttgattattatattattattttgcctctttttggttttaagcgtggttacagcatgacagaacggtcagatttcattttaacataaattaaaagatgttataattcaaatgatcggtggaaatttattttattttttgattaggcgagaaaatgacttatataaatgactaaagcacgtcaaaagggggtacggaaagttaatgaaataaaagtaaaagcatgcaaaacaagtggggaccactaagggtagatagaatgaattgaaaagttcgatttcgggaatttaccggttgaagaccgaagaacgaacgaagaacgatgaagaaaggtggaaaacct

SEQ ID NO: 254021 - DNA, 395 bp, Glycine max
gcttaagaaaaaggatggcctcatcatattccttatttccggaagggaattctatcaatagacctccaatctttaatggagagggttaccactactggaaaacccgaatgcaaatttttattgaggcaatagatctaaatatttgggaagccataaaaatagggccttatatacccaccacagtagaaagagtttcaatagatggtagttcatcaagtgaaagcataaccatagaaaaacctaaagatagatggtctgaagaggataaaaaacgagtacaatacaacttataagccaaaaacataataacatctgccctaggaatggatgaatatttcactggttcaaattgtaagagtgctaaggaaatgtgggacactcttcgataacacatg

SEQ ID NO: 254022 - DNA, 434 bp, Glycine max
  unsure (1)..(434): unsure at all n locations
tcttacccttngagctntgaataattggtttgtatctttgggtaagtgcttgattaatttaaggaatcaaataacatttgtagaacacctaatctcttgaatcaaataaaaagatttttgaaaaaaaaatgtgtgcgcctgaagggtgaatgcaatgaagatttttctcgaagccctgaatggactcaaatgtgtgcgtaacttgattaaagagcattgtctagaaacactgggttgatttgaatggggaaaaacaaaccctaagccttagtgtttatatggccacaaagctttatgtatgagtgtccacatggatgtatgcatgatcagtttcgcacaaatttataatcttcattgtcatatgcgtgtcatggaaatgatttggggcacttccttattcttgaactgcttgctaacaaatataccaacatgcg

SEQ ID NO: 254023 - DNA, 440 bp, Glycine max
gtcacctgcggcatgcaagcttatacgaccttggtgagtcgagaatactttattatttatttgaacaagtttgaatatgatgtaaaagaaaaatgaatgtgaacctttttccccttgaaagacttgtaaaaaaaaatgttttaaaaatacttttaattaatatttgaattttttttattccttattagtatatatgtgaggggtagagggtgtcacaatttgaaccaaccacttataaggaagcaatttcctattctaaaaccaaggagttgatagtggctatgaataaagagatggaatccttccagaagaaccagacttggagatttagttgagctaccttgagtagcgggtgcaagtggatcttcaagaagaaatttggatcatccactgaagaagtcgtctggtataacgtacgtctagtagctaaaggttccagt

SEQ ID NO: 254024 - DNA, 470 bp, Glycine max
ttacgtgacactataaaactcagcttataagcaagcttccaacaagtggtatcagagcacatgatcttcaagtaggtgctccttaaacctccactaattttcagctttactttctcctccattggtgtttcttcgtttctctccatgtatctcctcacgtgtcttgtgctgaatgttgttaacataattttttaaaagttccaccgattaagcttgctatagaagctagatttgattttctatggttcaaattccttgttcttgttcttgacccatgaattgtgttgagtttaggttcctttgagttttatattgtcaatttttttggctgaaacctaaaccataaaattcttacaaaaacattaaagtagaagaaaacctcaaaaatctagaatgacatatgtcacctattgtagtttgtcatacaagtcatgtctagtcatgaaacttgtcacgtaagattccttatg

SEQ ID NO: 254025 - DNA, 321 bp, Glycine max
  unsure (1)..(321): unsure at all n locations
agcttcttccggaagtcttccggaagaatcttctttcggaagttaatttttttttttaatgcgtatgtaatgacgattttgcccttgtgtaaatatctttaaattaacgtcttcaggctgtgttttactgcgctttctttctttcttcttccgatggctttgattcttcttccgcttgctttgttgcttcttccgtttgctttgtttcttcttccgcttgctgttggttcggtggtgggcccttcagcagtctgttggtggtcccgtgaagtgaagtatttgaagattntggtggcccgcgttccgtatttgaagttttat

SEQ ID NO: 254026 - DNA, 440 bp, Glycine max
  unsure (1)..(440): unsure at all n locations
tanatgannataagttttntataagttaaaattagcttactcaaactaattgtagactcctttcaattagcttctccaaaagttcaatttaactcatgggagaaacttaattcgttattaggtataaggttcaggtttagacttaactcaaggagaaacttaatgcattttaccttttttaatttacttctcatacaaattctcgagaagttntttttttttttttctacacagacccaagtatttgaaattaagcaagttcaatttatgtattttttcgcatgaaaaggagaaaagagaaaaacgaacttgaaaaggtcgtaacggtcacgcgagaagctgagacaagcgtccttgagagagttcatgttggtgtaaaggcttacggtgtcatcggaagaagaggagggtttggggaggtagccttnggtgctcaagcg

SEQ ID NO: 254027 - DNA, 192 bp, Glycine max
  unsure (1)..(192): unsure at all n locations
gcttctattccttcagtgactatccttaggttgagcaacctttcaaaccttttagctattgcttgacaagcctnctaagacattgacaacaatgaaaaaagtctacacttaatgcatgttcagataaaatgcgtaatagtgataatnganaatatattttaccactgcatgtcgaggctgctctacatcaat

SEQ ID NO: 254028 - DNA, 226 bp, Glycine max
  unsure (1)..(226): unsure at all n locations
aagcacgtgacgtctccgaatcctctgcgatggattatgtcgccgggattcactattcatttatcttatgccttatcctgctgttaaccgtgaaaatcgtaaatagattttttaaattatcttntatttctaagaagttaattntcactgatgattctattaagagtgagatataaaattcatttntgactgtaagttcttttagtcatgaattacagttttcaac

SEQ ID NO: 254029 - DNA, 264 bp, Glycine max
ctctcgcggttggatttcagccctgatactgccttgtgcaaggcccgaggagtcacctcagattctcttaccttcgagtcactcagcccagccattaatttggcttatattaagaaagaattgctggaaactggatgacccttccgtaacttttctagggacccaaaaatccatggctagaagatctgaggccctatcttcttcagctactcctggctcccctacccctgctccctttactttgtgctctccttcagcaccagt

SEQ ID NO: 254030 - DNA, 344 bp, Glycine max
  unsure (1)..(344): unsure at all n locations
aaaactaagcttctcatggcatgattcatcattggacatgagtgtgttcattgtntcttatagttaggaccatacatataagttctccaattctgcaaaaaaagttccttcttttaacaagatgttgcctgactatgccttgcgttgctcttctactcaaattcctttgttggtaattgcctttatattcatgagggtgtntccaagtactccaaccatagatgaccacctggtttatgcttcttgtaattgttttcaaatgtgacaagagaagctaagcaacaaaatgtgactcttcaaactcatgattctggcgattgcaggatgtgtaatatttcaatgag

SEQ ID NO: 254031 - DNA, 440 bp, Glycine max
  unsure (1)..(440): unsure at all n locations
tgggtcatggntnggtgtatgggtttcttgagcctattatatacacaatgcaaaggatagacgtgatgactgtcaatattacattgaaacatgggtgaaggattcaatatgagaggtgtacctaggagcttacttgaatcaataagtaaactctatcaagagcattaattaaaaaaatgtttgcattatacgtacttaattataggtgtggaattcaaggcctattggcagcttgttgttgtgtgtcttaaggacacatatccgtgttggttttgttcattgcgtgagaagcctaatattaatatcaaagctgcaattagcaagttaatttgtaaattataactcatttactctattatgcattaggaaatgtaaatacatttatgctcgtatataccatttatgtttttttgtaccagtgccatgatgacattaacact

SEQ ID NO: 254032 - DNA, 357 bp, Glycine max
aaaaaaacttaatggctagtgtaactgaaattgtggcaaccaaaagtcaccccccacagccaacaagtcagccaccatttggtctccaaaaagctgatgcctaggttgccaattgggcccttattacaacttgaactaaacctaactaaagcccttttagttgattaacccaaaacatatttttggtcagccaactttacaaggattgggccattatttagacaaactaaacactctaaaattgaaacaaagtggtgtcatttagtcctcctccatttgggccatgatacaactcacaaccttggacttttctccttgaaacttgggcttgtattcaaacagtatggacaacacttt

SEQ ID NO: 254033 - DNA, 240 bp, Glycine max
gcttgctatggtgtggagaagcttccaaatctactgcagttggtcggtctgggcgaacatcgagtctccatatggatggggactgggcattaatacgaccgttcaaatcggtgactctgatattccgtgatacagtctcacgatatgcgtcgcgttgttcacccgtcctgtggtccaccgacggtcttaaacaccactttttgctcgagagggagaccaaccgtctatcattcggctgat

SEQ ID NO: 254034 - DNA, 263 bp, Glycine max
  unsure (1)..(263): unsure at all n locations
aatgatcacccctcaagtaaaaagaatcacttgattcacgataagaaagaactacgtaggtctgatttcctctcccaaggagggtacgtatgagcaaaagccccgcttatgtcgacctcaaaaaataaaaagaaataaaagttaaggtaacacaattccacgattcttaaaaaatggctgttgtcatttgagacanacgtgagaggtgctaataccttcctcaagcgtaaatacaactcccgaacttagaattttcattttga

SEQ ID NO: 254035 - DNA, 298 bp, Glycine max
  unsure (1)..(298): unsure at all n locations
aattcacattaaattgtgaagagtcatatcttttcataaatgctttgtgtaatccattatatgattttggtaatcgattaccagtgacacgttttgaataaaaagtcaagagatataactcttctcatggttttctcaagaatttctcaaggttataactcttctaataagtttcttgaccagacatgaagagtctataaaagcatgacctgcacttgcattttaataacttttgaagaacaactctttagaatttcttgaacaactcttgagaaatttaaaacccntgctacttatc

SEQ ID NO: 254036 - DNA, 346 bp, Glycine max
  unsure (1)..(346): unsure at all n locations
ctgcagcttcacaagacacttgtacacgatctgaccgttgggatctttgagaagatgtctggagtgtgctcgaagcttccattcccgagagcatttcttatntaagcatttcagcctttgctttcgtgtagcttatgaaaaacgccatttcttctcctttctttctctcaaagccatttctaacatcccaagcactttctccatcacccacatccaccattagccaccacaaaccatcgttgctctccgttgaaaccccacaccgataggaactcctcaaccaaagtggaatcttccaactggcttgcggtttggtagagaacgaaaccctatctgacctcttgtt

SEQ ID NO: 254037 - DNA, 351 bp, Glycine max
  unsure (1)..(351): unsure at all n locations
tcccttattttttgtgcaggggcatctaatcccggcatgtgcattaagaacatagtttgatttgaatcccttggggggacaatagttttcgctggactatgctggagntatatatctctatgcattctatgaatcctttgggttgtttaacgagtttggtgggcttaacaatcattgggtcatttaagtccaaaccttacatttcatctcacaagttcggaatagttacatttacgcattttgcctgtcacctctaccgggaacgttcctattntttaattagttaactttttagttactttgtctaatataacctatctcacctatgcaaataaacattctctattacac

SEQ ID NO: 254038 - DNA, 364 bp, Glycine max
  unsure (1)..(364): unsure at all n locations
ngctaacccatggaagctcctaatatctcccacactttttgttgtgggccattcttggatggccttgattttctcagggtccacttggaccccatttctaccaactacaaaacctaagaagactatattatctactcaaaaggtacacttctctatatttgcatagagtgtgtttttcctaaggactgaaagaacttgcctgagatgtcctaagtgatcatctangctcctactgtacactaaaatatcatcaaaataaacaactacaaatctacctatgaaatcccttaagacatgatgcataagcctcataaaggtgcttggtgcattagtgagcccaaaaggcatcactagccattcatac

SEQ ID NO: 254039 - DNA, 396 bp, Glycine max
  unsure (1)..(396): unsure at all n locations
ttgagaaaattcaaacgatattaactttttactctaatgtccgattgtgtcccgtagtatatcgagatgctcgaaattcanaacaaaagccctgagcaaaatcaaacgataataactntttactcggatgtccgaatgaatcccgtaatatattgagatgctcaaaattgaaaacaaaagctctgagcaaattcaaacgacaataactntntactcggatgttcatttgtgccccatagtagatcgagacgcacgtaattgaaaacggatgctcgtagcaaattcaaacaacaataacatttaactcggatgtctgattgagtcttgtaatatatcgagatgctcgaaattgaaaacagaacctctgagcaatttcaatgacaataatggtttact

SEQ ID NO: 254040 - DNA, 359 bp, Glycine max
  unsure (1)..(359): unsure at all n locations
tattatatatcgatacgctcgaaaataaacatcgaaaactctctgcaaattcaaatagacataactattcacacggatgtncgattcgggcgcataatatgtcgagaggctcgaaattgaacaacggatgctctcgataaattcaactggtattacctttcacacggatattcgattcgggcacataatatgtcgagaagctcaatattgaacaacgaaaggtctttacaaattcaaatggtcataaactttcacacggatgttcgattcaggcttataatatatcgatacgctcgaaattaaacatcggaaactctcgcgaaattcaaatgggcataacttttcacacggatatccta

SEQ ID NO: 254041 - DNA, 263 bp, Glycine max
  unsure (1)..(263): unsure at all n locations
ctcttactattcacatttgttcacgatttgtatattataaaaaaaatcagacatgacagctaaanaaaaaaggatataccatttgaagaataatatgggtcccaccaaccacatgagaattgatttatttaagaatgatgcttattacctgcaaaggacctacttcatttgagagagaatatgttacatataattcaatatgctacatatagagaagcatgttntgccatgggttttttacaagatgagagagaatatgttga

SEQ ID NO: 254042 - DNA, 362 bp, Glycine max
agaattaacaccttcctcacgtttctctcatattatatgaaataaataacgtgtggaactaagatttgattcctttaccatattcttcaattaagaacatgtattcttttacatagcaaaccaatcaagtttattgggtgagcaaatcgatagatgataggaatatttgtacctatataagtgaagagataaaatcataacaccttcaattatttataactctatatacacacgtatgcctttcatttatttttataataaacaaaatgatattaataaattacgttgcaatgcagtttttccttaaaaaataaaaaactaaacataagtaattgcatcttatacagtacaattatttttct

SEQ ID NO: 254043 - DNA, 260 bp, Glycine max
caatcgtactataactttaatgaggttaattattagtatacacttcttgtatgggaaatgaccttatattatataagtcaaatatatttattttctcaataactagttagttttatggttaagatgagtaccacacgtacataatataatgtctttttatcaaaagcatattaatattgattaatagtggtaacaaaattgtttgggtatattcatgaattatatattcacatatttattcattctatacaataataaaa

SEQ ID NO: 254044 - DNA, 440 bp, Glycine max
  unsure (1)..(440): unsure at all n locations
gacgtgagagacatgggccatggagcgggagattatattattcttactatatnccacggagtaattgaaaacacatgcgtctatgcaacatagtgctcggaacaaattaacaaaacaaaaacatgaaagattaaagtttgttggagttnacgaaaccatacaccaataaaataacacagtatccatataatgaacttaatgtactcaacatcaaagggatggtagatcactatttcatggaagccaatcgtcatcaagtttttttatattgcgccaagtaattacctcgagcagggtatgtgatcttcaatgtctatgattaacgtaatatattaaatataaatttgggccaaagtttaacaaaaatgttgttacccagttccgcacgacacaactaataattctggcccgaatagagaacaagatatacatattctgat

SEQ ID NO: 254045 - DNA, 459 bp, Glycine max
  unsure (1)..(459): unsure at all n locations
tggtatctncttcttcactacatcaagaatcaccgggttttgtcttctctatggctggcctactggnttagctccatcctctaaatntattcgatgcatacatgtggatgggctaataccangaatgtccgccagggtccagcctatagccttcttatgcttcttgagaacaaataacaacttctcatcttgttcatcagcaaggggatgcagatataattactggaaaactnttgctatcatccaagtaagtgtattttaaatttgatggcagaggcttcagttctggtgtggccggctggataatggtagaaggagatggtttctcagcctgtacctcataaagaaagtcagaggtatatgtacttcctgaaacatggntagttctatctgactctataaaatcaatctcacgaggtaaacaccacagacatgcaatcatatcaatttagattcctc

SEQ ID NO: 254046 - DNA, 343 bp, Glycine max
agagaagactccagatatggcagaacctccagaaaagcattcagattagtttaaaagaatttttcaagaacaggttgaacaacacaaaatttgtccaagaaatatctttaccggagttttactctctggtgattgattaccacttatggtaatcaattaccagaagcccaaaacagctttataactgatttacaaagaagtagtcgattaccatgggcatgtaatcgattacatgtgtttttgaacgttggatttcaaactttaagagtcataacttttgataaaatattttcaaaatagtggaatcgattactcaatatttgtaatcgattactagtgattc

SEQ ID NO: 254047 - DNA, 291 bp, Glycine max
cttgatgaatcttaattttatcaagcgcagcgaagtatatggggaattgttttaacagaattacccccccactcacagtgatatatttatggttatcaaccaaatgctcgtaatgactgttgacattgggaagggatgtctatgctgcttctaacttctccagattagcccttgttggtctataaatgtaatgtcatattacctatgtctgaatgctatgtactgagttcatccaacgggccattctgtatactgcagccgtttctatctcaattacttaacgaaatttat

SEQ ID NO: 254048 - DNA, 356 bp, Glycine max
  unsure (1)..(356): unsure at all n locations
aatttacattctggagaacaccatcacccctgaaatataactcttctctttcgcttccttctcaataatacgtataaaacaatcatcttgatgagcacaaagtatcaaataatacatattggaaataatcttatttctctatagaaaaaaaagttacatatacacgcattactatatcttccacgtaattctgtaaggaatatggaatacatattgaccactgaattacaaactattttgaaaccaaacatttttcaaattctaaatactaccacctccttttctttttaattatgagattttcagaagtctttattctatntatttgtcacttctaaaagtctgtgatcacatta

SEQ ID NO: 254049 - DNA, 235 bp, Glycine max
ttagttcaattaaaatttcagtagaagatttgttctttctaaatctcaaccggaacaaatgtttgccctttgtttgaggtggatgaaaattataaaattttgcgtggaaaggtttctcctcatatatccacgggtaattaatatttagggcaataaatatagttttttttaaacaattgctttaagcagtcataatcgccatataaaaattctatagtatccttgtgttatatat

SEQ ID NO: 254050 - DNA, 358 bp, Glycine max
  unsure (1)..(358): unsure at all n locations
taaaaacctgtaaatttttggaagggactctatggtaaaaatgaaagttacacttattacttgagcctccaattgaaaagccatcaagaaaaagtgccaatacagattcttaataatgaagctgtgcaccgaagaacccagaaagttgactcaacaacctctttcattctctctttgaagaagaacagaactcatataatggttctccatttatgtcaagaatctgagcattcacaaggccaatatgtgccatgttgtntctacaaccacaagcaccaaaaacttacaaagttattaaataaattaactaatcatattactctcttcatgtgtacacaagaaaaaagacccatgaaat

SEQ ID NO: 254051 - DNA, 257 bp, Glycine max
tcacctctggaaacttctgacaacttcttgaaaagatcctagagaagctagagcttagcttcatacacctctctaataacttagctcaccttcttgagatgaaaagctagagcttagctacacaccccctataatagcttagctcacccctatgccaaaatacatgaaaatataaaaaaagttcctactacaaagactactcaaaatgccttgaaatacaaggcttaaaccctatactactagaatggccaaaatac

SEQ ID NO: 254052 - DNA, 384 bp, Glycine max
  unsure (1)..(384): unsure at all n locations
aaatccattttgaagatctctacgcnctcaggactattctcatgacattcgattatagggataccttacttttaacaaataataatggagatagagaattagagaagggagttaaaaattatataagtataatagtatcntatttgaaatcattaaaagatggatgtaacaacaatagagatttagaaacacagaattgagtngtgtagacgatagaatttccctaaaataatgagcatctgaatgaactcgcatcctctataaagtgtagtcactctgatgcaagaaaccattgtggatgtaacctaagtcattgtagtggagtatctgtcttgcttactaaacctatagtgcaacaatacttctagtattagaaatctcaac

SEQ ID NO: 254053 - DNA, 413 bp, Glycine max
  unsure (1)..(413): unsure at all n locations
actcagctttaaaattaattcaatttctaaagccgtataaacatttatacttctgggaatcgattacagcttttaaattcaaattcaaaatttgcaaattgtttcataaatcaatttagccactagtaatcgattacatcctctggtaatcgattacagtgaatttcacatagttaagctcccagatttcttcaacaaaaccaaagtaagggatggaggctacatanggattgtcatcgtgtacactagcgaagtgttgagatttagcccttaaggtaaccccactatttgcattgtacttttctcttcttgtgcttttttatagaagaaatacttatttatattgtatccttgccaagtgataacatttcttttagacccatctgctagctttcttaatgtttcagaagcat

SEQ ID NO: 254054 - DNA, 307 bp, Glycine max
  unsure (1)..(307): unsure at all n locations
tacggaccttaaaactcagctggagtggaaagaatgattttgttgcttggtatatttcttaatangaaaagtaaaatgaaaagaaaacctaatatgaaaaggaaacgcttaccgaattaaaagcaataaaatatgagaaataaaggtcatgactacactaatatataaatctagtgatattgatgagtatgacatatatatcagtatatttaaaaattatgccaaaaattatttttttttttagcacttaacttaatttatactacgtattataagttaaagtattatttataaagagcaaagtttt

SEQ ID NO: 254055 - DNA, 414 bp, Glycine max
  unsure (1)..(414): unsure at all n locations
agaatgaatcaatgaacactaagaaacaactntaatctcttcttatctaatggcattaaaatcttatcggcatacactacgtaattattagttattatcataatattatgaaacacagaggaggtatagggacttggtttggattacaaaggtcttttggtgatatattccacaaaggaggtaaatcgatgctattggcttgcctggcaaattaacactattttcggatattagagagatgagaatgatgtgtgactctggtttacgtttgtagagtggacttggaacaagtttttgtgttggggagagttttagttcaattgttgcacgaaggcacacttgaggttcattcatctattatgaaagggtaaaccaattcacccattttattcatgaatcatctactataaaaac

SEQ ID NO: 254056 - DNA, 380 bp, Glycine max
  unsure (1)..(380): unsure at all n locations
ttgagcanaatctaatgacaataactntttactcggatgtccgattgtgtcctgtagtatatcgagatgctcgaaattcagaacagaagctctgagaaaaaccaaacgacactaacattttactcggatgtccgattctgtcccgtagtgtatcgagacgctcgaaattcagaatagaagctctgagcaaaatctaacgtcaataactttttactcggatgtccgattgtgtcctgtagtatatcgagactctcgaaatttagaactgaagctctgagcaaaatcaaatgacaaaaacattttgaacagatgttcgaatgaatcccgtaatatatggaggcggtcgtatttgaaaacggaagctcttgagcatatcaaac

SEQ ID NO: 254057 - DNA, 460 bp, Glycine max
  unsure (1)..(460): unsure at all n locations
ctcagcttctggaagcaacctgntctgtgcccacagtgcattctgttatgaaagctccaacaaacttcttttggtgggaatatgagtctgatcacgcaagatagtgtgatcacttgcagccatattttcagtcaatcccatggcctctnttggggtcttcaaattaatttttcccccagtagaagcatcaagcaacttctttgactgcggccttaacccatcaataaagatattaagctgaatcggctctgagaattcatgagtcggagttttccgcagcaagctatgaaatctttctagagcttcactcaaggactagtctggaaattggtgaanaaaagagatggcaacttttccttctactattntcgactcaagaaaatatttcttcattaaattttcaacaactttattccaagtcttcaaactattaccctttgatgagtgtagccatctcatg

SEQ ID NO: 254058 - DNA, 354 bp, Glycine max
aaaaaacaaatcgcgcatttagccgagtttattcgctatattattggtggttacacccgttattaatataactaaatgttacgacctaaactaattgcaaaaatataatcaatgatatttttattggtgtaatttttaaaatatatatcaatttgtagattttctacttgtacaatttaactgtattaaatatataaatttgtagattctacctaaatgtcaagtttacctctatctcataaaatagttagggtatgactaaaacggactagctaggtttgagtccaaaatatatcaagtctggatccactaagttgaagtagatgacaatgtgggtagataaaaaaaatattg

SEQ ID NO: 254059 - DNA, 417 bp, Glycine max
  unsure (1)..(417): unsure at all n locations
ctacttcacatgttcttttttggcctatgcaagntgaaagccttggaggaaagaggtattcctatgttgttgtggatgatttctccacattacctgcgtcaactttatcagggaaaaatcagacacctttgaagtattcaaggagttgagtctaagacttcaaagagaaaaagactgtgtcatcaagagaatcatgagtgaccatggcagagaatntgaaaacagcaggtttactgaattctgcacatctgaaggcatcactcatgagttctctgcagccattacaccacaacagaatggcatagttgagaggaaaaacaggactttgccagaggctgctaaggtcatgcttcatgccaaagaacttctctataatctctgggctgaagccatgaacacagcatgctacattcacac

SEQ ID NO: 254060 - DNA, 425 bp, Glycine max
  unsure (1)..(425): unsure at all n locations
cgttcagaaactgctggtaatctattctatatatgtgtaaccgattacacacggcagaatttgaattcaaattttaatagctgttggaaatcaactttggccactggtaatcgaatacatcctctggtaatcaattaccagagagtaaatttcttctaaaagactttttaacttaattatcttggccaaaccttttgctactttaagtggaattcccttcctatttaatataccatttctaaaactctatagactgtcttgatcatctatcttgaatatctttaattgctttgtcttgaataaagctttgagacgcatgtgatctcttggcatcatcaaaagaacggcttgatgctttgtctacataatggattntgaaaaatttatgaatgaactttaagccaggtaatcacatgctactatta

SEQ ID NO: 254061 - DNA, 387 bp, Glycine max
  unsure (1)..(387): unsure at all n locations
accctcattaagaactagctcttttcttcctctattgcctttacgtgaatacacctttngttggttctctatttggntcttaaccctctcatgcatcttctttacaaattctgacctagattccccttctttatgtataaaagaagtgtccagtgggaggggaatgaggtctaacggtgttaggggattgaacccatagacaacctcaaaaggggactgcttggtggttctatgaacccccctgttgtaggcaaattctacatgaggaagatactcatcccaagacttatggttgcctttcagaagagcccttacaagggtggataaagacctattcactacctctgtntgcccatcagtttgtggatgacaagtggtagagaaaag

SEQ ID NO: 254062 - DNA, 373 bp, Glycine max
  unsure (1)..(373): unsure at all n locations
cttgtatgatatgtttaaaagtaattgattgattgctcatgttttttcaaaactattatattctattttcaaataaaattattttgatatattaaaactctctatgttaaacaaaaattcatcttggtaagtgttgatattntttttttacacatagtttttaaaaaaagtgtctggtaatcgattaccttcacatgtaatcgactacagatagttaggctaagtgtaatcgattataacattcctgtaattgattatagagtgtctatatctataaatgtgaaatctcagaaaccgtgagaacgcgagttctacagcaatgcgacccttaaatccctagacttcataactcgatctctctctcaattctcaa

SEQ ID NO: 254063 - DNA, 375 bp, Glycine max
  unsure (1)..(375): unsure at all n locations
aaaattagagggtatctcttttatcttagtgagagtgattctcctaaattcttgagtgattcaagaacaccctggctgtatcaaaggacttttacaacctttgtgtgttgccctcgccggaaaaagngattctttccttcctttcatcttcaaccttgttctttcaaaccacaattccagaaaattcacttctgcccagaattatttcgtggccataactcccattttacgcactcaaactaagtaattcttgagcctaaattgaatntcaaaacgagacctttcatctcgttttggaatcacctcatttggagccctgtagcttgaggtattgtcatttctatatttctgtccagccaccacttatacctacgt

SEQ ID NO: 254064 - DNA, 319 bp, Glycine max
  unsure (1)..(319): unsure at all n locations
tttatgatttactggtgtgtttatacattactgcattttgttgtttttatgattcttcacttcctactacttttgggtttgatgttgtgataactatcttaaggattacattacagctaagagtggatttgattgctgatcaaacacaaaaggtatttgataggatcctaacaaaattaggttgtactgtcccaccagttcctagattttgcatgcaacaaggaggtaagaagctgcattttttataccatgcactttcataccttangtgtgtatggaggtttctgtttttggcatcagagaatgaataaccaagtta

SEQ ID NO: 254065 - DNA, 385 bp, Glycine max
  unsure (1)..(385): unsure at all n locations
ttacggacctataaaactcaagcttgaatagcttctggcctgagaatcaatattgccaagagtttacttggagcaattggtcaatctgatcagtggatcagatgtgctgctgatctcttgaattgtggtccactgcagcttcctttctgctacctagggctgcctataggtgtcaacccgagaaggaaggtggtgtgggaacctattatcaacaaatttgaggctagactgaacaaatggaggcagaggagcatatccatggctggtagaatcaccctaattaatgctgtcttaacagctctgccattgttntacatgtcttttttcagggctccttcagcagtgactaacaagctcatcttcatccaaagaaagtttctttggg

SEQ ID NO: 254066 - DNA, 425 bp, Glycine max
taagactacacccgatttagatttccctcttaggtttaaactaacttaaaatgggttttggtcgcagaaccctcatgtaagactagactcagctcaaatagcttactaaaggttagcctaatttagcctaagctttgtccgcagatccctcatgtaagactaggcctaaactaaaacacattatggtaacaacataattaaaaccaaaacttaacccgcagatccctcatgtaagggctaagttcaatcctgtttcaatcaagttctaaggcaacagtacattttccaatgctaaagtcacctaactgtgcacacaaatgggtgatcagaccaaaagcatacaaacaataagcattgagggaagcaatgaacacagaaacataatcattagatttagatattacatcagttgtcattagaaatcc

SEQ ID NO: 254067 - DNA, 238 bp, Glycine max
aagatcatcaagaacactcactgttagatagatcagaacattcagaggtcagatagatcagaagattcaaactcagaggaagttagagtcagaatcagattcagggtcagatctcagaatcagatcagaatcagactcagatcagaatcagagaaggtagtcattcaagaataagagaaggtagtcatcagaatcaagaaggttatcagatagttgaaagtttttgctctgttggggt

SEQ ID NO: 254068 - DNA, 357 bp, Glycine max
gatggattccagacttcaagatcaagcatcaagaatccaattcaatattcaaaattcaagagaagaaatcaagaagcaacaagtcaagacttcatataggataagtattaaaagatttttttcaaaaaccaaatagcacagtgttgttttacaaaagaattttctcaaattttctaagttagcagagtgattactctttggtaatcgattaccagctggcagtaatcgattaccaatgaccagattggttttcacaatgttcaaatgatttgtaacgttccaaaatgattctcaaatagtgtaattgagtacactatattagtaatcgattacaagtgaatctgaatgtggaattca

SEQ ID NO: 254069 - DNA, 388 bp, Glycine max
  unsure (1)..(388): unsure at all n locations
cccttggggacaacaacccttaaccccactttcttatgttgctccaccaacaacacaattccctacaccttatgggtactctatatatggagcaccaccaccaccaaaagaaaaagagaaagaccctaacaagtgccctcctgctgcaggtgttcagtgctgcacccctccagatccttatgttgtttctcctccaaatacttacactcctgtgccctatggtgaaggccaacgctcggcttcaatgcttcttcaagttgtagttccactcatgatgctntgctcttcctttattttnctcttctgaattttgttggggtcatttaattattatcattggcaagtctacgacaagtagtgatcattttaaactggatatcaatatcat

SEQ ID NO: 254070 - DNA, 224 bp, Glycine max
ttatcgacaaaagagcactttgttctttgaaacacaccactttttgggcatacatatactccagacagtaccacctggccttccacgcttgaaaaaactgaaggtctcccatatttatatgtcatgatactgttcttacatttgttgtgagcttatcctagtttatcgatttctgtaataatattgatttgtaataactggagtctcactattcattgcatgat

SEQ ID NO: 254071 - DNA, 195 bp, Glycine max
tgatacgatgaccagatgccctttcactacgaatttcaacttttggtggagtgtaaaggaacaacccccactgagtggatccacgggcgccccaacagacagctgtagggggggttaatatccattatttggaaggtgacttgacaggtgtgagggcctatctgtactgggagatcgatctctcccctaacctct

SEQ ID NO: 254072 - DNA, 315 bp, Glycine max
ttttgcttgcgcacggagttctggcttactatgtatattccgcccctcaatcatttaaacgttttaaactccatttgcactggcttttagataacctgattgcatgcaacatttaaaagttatactgatgctacctgagattgtatcaaggtgtggtccacaccaccattgcgcaatcgctttaccaatcatattaaaacattgggctgaaccaaaaggccataatataggtccataatagaagggctctattatagattttaaccctaagggcattagtctttcaaaattcatttgcattaattttattctttt

SEQ ID NO: 254073 - DNA, 464 bp, Glycine max
aagctggaagatatgacattaatcattactattaaatagactttttatatttatcatttataacttaacatccattattaaccgatattttgaaaccaccgacgcttaaagtattaatgttaacatccggttttgaaaactaatggtaaactaaactattccacatcaggttttctgaaaaatcggtggtccataattagaaataaccaaaaaatattaaatatggttaaacccaatatcttttttagaaaaatcgatgttatggttgactacgaacatccagtttttctaacaattgatgttgtgaactaactacaacattgtgtttttttttctaaaaaaggatgtttttgctcaaaacaacatcatttttagaaacaacatccgagaattcaatatcaaaacaatgattaatgcagattatcttgcaaaatcattggatttaatcttcaatgggaatttaa

SEQ ID NO: 254074 - DNA, 407 bp, Glycine max
  unsure (1)..(407): unsure at all n locations
tgaaatagaanaagggggggggggtgggtaaagggaaaagaacatttgtgaaaagcatatgagtgtgcttttaagaatntaaaagtgactctaaagaatcttttcataatgaagatccaattttatctcaaaacattttttatggcaagctttacaattcatcatggattatcaattatctattattaatgtatatctatattcccttatcaatactttattttggagtaaaatatcaagttttatatacttgacataacatattgccgtaattctattcaattatcaatgatccattatattaatgaagttcaaaatagattcctttgtttctttaataaaagcatataattctaacgcagataagtttcgttaatttacgtcttgctcagtcagtggtctgggat

SEQ ID NO: 254075 - DNA, 400 bp, Glycine max
  unsure (1)..(400): unsure at all n locations
ttcattcttgtgttatgagcctacatcaaactttttgtttatngatgnttctgtcacaatcaagtgattgttgacatctccatatgtgtgtacaatgtgattatgttttcgtttctaggattcatttggaatatttgttggtgattatgaataagtgaccaattcttttgatttaaaattttcgtctcctaatcaatcgaatattcatcttgtacaatgtgattatgggttgatttaaaattttcatctcctaagtagcttgaatcactcactgagacactcagtaagttgctagcatagttacaagcggctcaaccctctcattcagctgntatgcaagttggaggctatagtatttgtcgaggagctcatgaatcttgcttgttgataccccaagatg

SEQ ID NO: 254076 - DNA, 350 bp, Glycine max
ttatttcatattaatatatatagacttccatttttttaaacaatatatggccctctctcttgctcttaccatgattcatgaaacatattagctctctggctctcttctgttctggtatcatcttctctcttttctctgcgatattaggtaacacattattttctggcaattcttgtcacctgagtttatcccaaaagaacatattgtatcttaggagattcttgcatcattaaaaacacattgtgtgaggctaatacatgtaaataaaaccaaagttcagaatttcacatatttcccttttagcaaaccgtgtatataatgaattcaaaaggagaaatattacaatttac

SEQ ID NO: 254077 - DNA, 292 bp, Glycine max
  unsure (1)..(292): unsure at all n locations
aaaacttaatggctgagtgtaactgaaattgtggcaaccaaaagtcacccccaacagccaacaagtcagccaccatttgggtctccaaaaagctgatgcccacgttgccaattgggcccttattacaacttgaactaaacctaactaaagcccctttagttgattaacccaaaacatatttttggcagccaactttacaaggattgggccattatttagacaaactaaacactctanaattgaaacaaagtggtgtcatttagtcctcctncatttgggccatgatacaact

SEQ ID NO: 254078 - DNA, 368 bp, Glycine max
agtgatacacacacaactagccttgtttataattatacttcctttgaagtaacaactatcttattcaccgtgtagcttattagcggaaacactgttgtacgagtttaccggttgtaaacgtaatgaagtagtgaatataatggtcatataataaccaatgcaattaattagttactttcttgatcgagcgagcaagcaatgaatcaagtaacaaataatttttaatctaaaaaaaagtaacgatttttaaaaaaaattattttcagatttaattaagacaaaaaattcataatgtgatgaatcaagtaataaataattaattcttggttgttgggtaataaatcaattatcccttaatgtagtatttt

SEQ ID NO: 254079 - DNA, 258 bp, Glycine max
tttttatacttcccccccccccctctgtaaaatctttgtaaagctttatgtttgtttatttctaatttatattttttatgtcttttttttattatatactagtttgtttaaaattgtttattttttttctatctattttattttcgtctattgttttttttgattcttttgctattttggtttgttttttttatgctttattattttgtttattgtatttttattttttaatatgtttttttcttttatttttttatg

SEQ ID NO: 254080 - DNA, 193 bp, Glycine max
ccccctacctttgtcctccaaatccgcatgtttcacagccaccttcactgaattgctctttatttgatgactctctattgaatggctgcttatccctccacaatgggaggagctgtattcttcctattaattttcaccccataatatttatcactgcttctgattatatttggataccatgccacctctatgt

SEQ ID NO: 254081 - DNA, 252 bp, Glycine max
catgaggaaaacaatgctaacatgcatatctctatggacattactaaaaatccatcctgaacaaaaagaagccaacgaccaatttcagggaatcactgtttgtggtcttaatatatgcaatatctagtgattaaatctttcaagcattgcattgatcagatcaaattattgtactacatacttgctggcatgactacatcgattttattgagtgatactcaacaggatactgactttatcattcattatact

SEQ ID NO: 254082 - DNA, 364 bp, Glycine max
  unsure (1)..(364): unsure at all n locations
atgcagcttatgttccagttatggcaatctcctccttctgaacctgcttctagtgctagctcaatntctggtcgttttcaaagatttcttacactcattgatgagaaggaagatccatctaagagtaaaggaagaaagaggaatggagatgaaagatcgcttgaagatcaactgggaaggcagccaaagagggtacagacagaaataaagttttccacataggatatatatcttgggagttttccgggaaagtttacattgattaaaagatgtggagtcattgaagatatacatgactatgtaatttgaagatatacatgactcatgtaattgttttatatcacaaagaacatgttaacacttc

SEQ ID NO: 254083 - DNA, 275 bp, Glycine max
  unsure (1)..(275): unsure at all n locations
gcttcatctgttattttttttgagaactagaanaagaatattatgtccaaatatgaaagaatgtgaaaccatttgggaaaaaggaaaggaaaaaaaagttaaatctcacacattttaccgaaggcaatngagacaaaacagcttgtgagtacttaattggaaacatatttgaggcatatctaaccaatctagcttttaagcaactaacactcatccacatattntaataccttttcctttacattgttntgctaaaaaaccttatgatattcata

SEQ ID NO: 254084 - DNA, 290 bp, Glycine max
  unsure (1)..(290): unsure at all n locations
ttcaaatctgcctttatgcaaattttggtgtgaaatgtgcacagaattttgttagtgcaaaaaatgcttatgtatggctggtgtgaaaggtagacatatgggtctggacttnttagcgatccacggtaaaatgttacttatgtctagaacttcagtaaatattgatcgatcacggtaacgaatggaacaagaaatgtactgggatttgatggaaagcttatttgattgtgtttggcaagttttgctttgctgttgctggttgtagcctgagatgatgggatactgatgtg

SEQ ID NO: 254085 - DNA, 353 bp, Glycine max
  unsure (1)..(353): unsure at all n locations
gagagaaatgagtatactgccnatagattacacaatataacatacctctggtaaatttcaaccttctgcggatcaataagtgaacaacttcatcttgagtatgaaatgaataacacatcactaattggttcataaataaaataaacttagcagaaacaaaaacatagcaatgcctgtgatatttgagaaccctttgacagagacgcagagtacattagcattgtatgataatatccattaaagcaagtaatcaaaactagtaaaaatttagcaatacattcaaaatttacatttcacaattaagagtatcaaaacataataattatccaaacaatgagtacacaatgcttaaa

SEQ ID NO: 254086 - DNA, 324 bp, Glycine max
  unsure (1)..(324): unsure at all n locations
tagagagtttgccttctgaagaaattttctaactttagaaattntcttctcactcactcatgatgatgcatgatgcacacatgatatgataaagactaagatgttacattcaatatgacaaccaatacaaatgctactgaagagagttgggcatgtaaaagacaaaatttcttcaagcttcaagcttaagtcttcatatatctcccctatctctaacagtatatagatccaggtctgcgaaccggcgggttaagtttgcggattaggtggataatgagtctctctttctaaaatccatataattatatcaatgtttttaagatg

SEQ ID NO: 254087 - DNA, 466 bp, Glycine max
  unsure (1)..(466): unsure at all n locations
atccttaagtcaccgcggctgcagctgcttgggagctttatggaggctggatctttgagcttcaatgagggcctttaatggtgattttccaccatggagatgccgcggaagacaaaggagaagaggtgagaggaggcaccatccactagggaataagccatggaagaaggagcttcaccaccaagatgagccttggataagaagctcggagagggtgcttcaatggaggaaaagaaagagggagagatagagagaggggggagcacgaaattgaagggaataaagggagagaagttgaactttgagttgtgtctcacaagactctcattcatcaaaggtacaacaagtgttacacatgctnctatttatagactaggtagcttcttaactttcttgagaaaaccttcttgagaagctagagcttagcttcacacactcctctcataactaagctcacctccttgag

SEQ ID NO: 254088 - DNA, 174 bp, Glycine max
gaatcaccatgaaatcaaaaaagagcacccctttctttaaaaaaacattgctaaaaatcacaaaaaacggctactatttctatttcataggaaataccctcccacataactcgccaaaacgccaggaaacgatcgcaccttacctcagcattatgttttccgaacatggcttca

SEQ ID NO: 254089 - DNA, 131 bp, Glycine max
accaatgacaccagcctcctcataccaacagccgtttttttgctcttcccataacacgccagggtattgcgatagcactcaccggggcacaacacctcaaggactacacgatgggaggctacaattctcac

SEQ ID NO: 254090 - DNA, 426 bp, Glycine max
  unsure (1)..(426): unsure at all n locations
acctgcggcatgcagcttgtaaatctcatgaatttcataagctgtacaacaatgattttaattaccactncatgatattggctacacattcaatttgcttgaaacaatggcaactcaaataaaattactctggagttggcttgaaggggaacgcaataaattaaatggctcttttcttattgtgtatacatgttatcattcaatttgaattatattgattgtatagctctataaaatctattctaaaagttagacatcttcatgttcatgagcaacttccaactagtttaaagatgctttttacaaattataaatgaagcattgaacaatatttgagaatgtctacgatagttaaacttgtgctttaccatacctttaggtggaaattacattgtaaatatgccacacgtggaatttacattttat

SEQ ID NO: 254091 - DNA, 437 bp, Glycine max
tatccaaacgaagacaaatcttatctaaatagaccagacatatatgtttgtacctcacaggcactattatcattattactctccgaatgcagagaggatggtggcatgttaacttctaccaacgcacttgcttcctgatcaaactcactgatgaactttaacaggtaaggccaaacaagcggtgctgacaaaggaacccacatggcagcacattccttatgctggtgctccacggcaactgtgtaaagcgtattcctaaaaagaactatttaagccagatattaatagatttgcttcttgtgactaaggaaaccatgaaattcttctattatagaaccatgacatctttaagaaatatggaaaggatagaaaaaaatctgatgtatgaaatcattctttattgaattaacaacgtaagacaaacaaaatcttgatgg

SEQ ID NO: 254092 - DNA, 399 bp, Glycine max
  unsure (1)..(399): unsure at all n locations
agcttanacaaaggaagtggattatgcaacttaatgtgatttatttctacgagatgtctgcattacctttcacttacccttatctcaaattggtgtggcattaaccatcactcaaaatgactgttgattcattcttctattcgcacgatcccatatgacaagatgcgaatccatgcatgtttatgattgaacgatggtgcaacaattaaaaagttgttatcgtattcaattttacttaaatgcttatgacacctcgttgatcaagcaaaatggctcaagattcagtgggcaagatcgatagtgtgtgtttttaaggacaataagaagtaaaagacacaacacacgaggctgagatacaaattattaaccctcatttattaatgctacgattatgcgtta

SEQ ID NO: 254093 - DNA, 394 bp, Glycine max
  unsure (1)..(394): unsure at all n locations
ncactggagcttacatcaatctcttctacttactttcgttcttaaccattttaaacgtccgcagcactttcgccatcacccacagccaccattagccaccacaaaaacatcgttgttctccgttgaaactccacaacgagaggaacccgttgattggagtggaaactttcaacttggcttgcggtatcggtagtgaacgaaaccctaatctgaccttccatttatctttgagggaaccatgattccatgtgtgattcttgatagttccagcgtgtctttgcatacttactgactggggaaccaccattgtatgttatacgcttgctttgtaaaacccgatatgctctcatctctttcatgtagtgacgagtgtgtttgacccagagcatcgatg

SEQ ID NO: 254094 - DNA, 453 bp, Glycine max
  unsure (1)..(453): unsure at all n locations
agcttggagaggatgcttcaatggaggaaaagaaagagggagagaaagagagaggggggagcacgatattgaaggaagaaaaagggagagaagttgaactttgagttatgtctcacaagactcttattcatcanagttacaacaagtgttacacatgcttctatttatagactaggtagcttccttgagaagctttcttgagaaaacttccttgagaagcttctttgagaaaacttccttgagaagctagagcttagctacacacacccctctcataactaggctcacctccttgagaagcttccttaagaagattcctaaagaagctagagcttagctacacacacatctctaatagctaagctcacctccttgagatgagaagctagagcttagctacacaccccctataatagctaagctcatccccatgacaaaaaaaacatgagaata

SEQ ID NO: 254095 - DNA, 410 bp, Glycine max
  unsure (1)..(410): unsure at all n locations
tgtctcagcggntatgcgagaccgagaccaacatgttagccatcatgagcaggtaccacgaagaattaaatcttaccacagcccacgagcacaaagtggcggacaaatatgcccgagtgtacgcggaagaggatgctagaggaagggtgattgactcattacatcgagaggcaacgatgtggatggaccaatttgctcttactttgaacggtaatcaagaacttccccgattgctgaccaaggccacagcgatgatggacacatactccgccctcgaggagatccaccgacttctcagctattgtcagcatatgatagacttgatggcccatataattaggaaccgctacgaagtttgtattgtcactcagatcttgactagatataactttctgaataaaaagagttta

SEQ ID NO: 254096 - DNA, 459 bp, Glycine max
  unsure (1)..(459): unsure at all n locations
agcttcatanataaatngaatacacctaatattttatgctgaaattgtatagctagaaatgacttanaagaatttattaatataatttatactaatcagatatgtattttttttcattgctaaagaattttaagattaaatgtgtatggcctgaaataattttgagataagggatcttgtttcataagatgcatgtgagtgaaatcaatacactttaaaaatatttattttgatatgtaaaaaaggtcgagcttagaaaccacctaggtcacaattgtattttttttgaaatcccggcatctttagtgagcatctattattcttttttatataaaaagaaaataaaaatatatttttatcatctaaagaaataaaaatatttaaaaaatttaaataccgtttagttatagttgcaattgacttggacaatagtgccatattttctatattttagtcaca

SEQ ID NO: 254097 - DNA, 411 bp, Glycine max
tgaggtggatgcatgcatgtaagaattaccaggatcttactgtccaatgtctcttgatgctatgaataagaaattatcaataaaagaaaaacacttattagttcaatttggtacaactcgcatatatttttttattggaaaccatagttaaataaaattattataaatgcgaaactggtcttaaactacatgtcactcgttaaattgtaactatattacatcagttattccacactcccgaattcatatacagcggtataaaaaaaaatagtcttaactaattaaaaattccttctaacatgatttttagaataattgctatcacaatgataactctccattatattttaattacaactcacaatgaattttgaatctacactctaagtaaactattcaaaatctatcaat

SEQ ID NO: 254098 - DNA, 422 bp, Glycine max
  unsure (1)..(422): unsure at all n locations
ggaccttaagcacctgagctgcagctgggcaaaatttattacggtcgtgctatattttntcaagaaanaaaaatctacatccanaaaagtatgcgatatgagaatatctaaaaagagcacggggaaaataaaatagtaataaaaaaatactattattggtcaagttaggtaaagtggaccgaagaattagcataggaattaacaaggaagctaataatcattgctagatccccctacctaccatcacaaatttccgagtaacttggcagtttcgcagctcaaaatgacatggttgaccagagtgtacagggtgcatgaggattgtaaatcctctcttcaggattatcttcgagttttacggattaaattaaattactatgtagcggagtggtgacacacctgcaccaaggagaacaacctgt

SEQ ID NO: 254099 - DNA, 432 bp, Glycine max
  unsure (1)..(432): unsure at all n locations
agcttgtttgtgttcatcttanaagatttaattctttataagattgatttacaataaagagaataatgcttatgccattaaatgatccaacagatctatgtgcttctctacaaggaggtttctctagctttaaaaatcaacagcttgtacaatatgagaagactgttaaaaattcatgagaatgtgagggtattacgctatcctgatcattttgctgctcgtgtgttgcaaatttaatttcacagggttcaattctaggtgttgaggtccacgtttctagaaaatcatattctactcaactggttgtcatggaagatgagaatgggaaccaaaattctgcgccacctcaaaacgaagggtttctcatcccgaatgatntactttaactataccgcaggttaatgaatagcttaatacgtagcttttgatttc

SEQ ID NO: 254100 - DNA, 482 bp, Glycine max
  unsure (1)..(482): unsure at all n locations
tgcgatgactntgagaacaanaatatcaagatggcccttgatgagattcttcgctgtaagatgatggctaagctgggtgcctcctcccaaaaaggtcaattgcaatatgatgggtggtcagatgcaaatgcgaatgctaatggactngtaattctctaagacttatacaacaataatgtccagtcattgcttccaagtatctaaatgagacttaacatatttctggctggatctagtatttaagttttaatttcataattttcctttgtactcctctcattttccttgttggatgaatcatttttaattcttataatttcgtttatagtcttcacgtattctggtattagagtatactatactctaatatctggaatctgtatgatactctgacaaaacgatatctttttctggtaggaatctcaagaaaatgaagaaagtacatcagctattccttgtgataatattcagagtcatgggaa

SEQ ID NO: 254101 - DNA, 418 bp, Glycine max
  unsure (1)..(418): unsure at all n locations
agcttgtaggattatttggtacccatcacatttggtactaggtggcgatcgggcgatggtgccaaacaagttatccacatccacaaattccgtattaacccaccatccnctgttagccaccctcaactgagctcacgtactcccacgtagcccatattctctgttctctcaacgccaggtccccatcaatcctctcaagctcccacgacatccaagagatttcacatccaatcatcatggactaacaaaaccaagcaaaacagggcaaaggcagaaaactctgcccaaaacacaactcanaatcacagattttcacatacaaataccccagtaacatttcctttgtttcaattcgttaaccggtggatcgactacgaaaatttacatggaaggctctagtacataagtctacattttg

SEQ ID NO: 254102 - DNA, 350 bp, Glycine max
  unsure (1)..(350): unsure at all n locations
cttataagcgcgggtctgggagacaaacgtctagtggtcgctatatgcgaagatgatgttccgagtacatnggattctgtacgaccatgctctcctaatttccaactgggaaattggcgagtggaggaacgccccggcatttacgcaccgagcataattgaaaccttgaccgatttaaaagctctatacttgggcctatgctatagagtttttccttttgtaaggctgtgagtctcttgtctttgaatgtataatacaaggatcgttcttcatcatgtcctacggctctacccattctcaatcatttgcatgatcacttctttttctgaacgacagatccgatgacgagt

SEQ ID NO: 254103 - DNA, 446 bp, Glycine max
  unsure (1)..(446): unsure at all n locations
agcttgaaaactaaaaaattagntggtagcttttaaagttagttattaaattataagggtttaataaaattaacagttgaagtagctaagaaatataaaatggcttatttaaaaatggaacaaggaaattgaataaatattttaacgattaataggaaataaaatataaaagctacaagttagaagctggctnttaaaaaatgctacttcaagtaacattttaaaaaaagttagaagctattaaaaaatgccaaaaaagtttgtttactgaacaatcaaacaagttttttagttagtaaaaaaaattataagctagttaaaatgacttgttgaatataacttaagtaacgttttaaaaaatactagaaattactaaaaatgtttatttatcaaatagtcaaataagctttttagctagtaaaaataaactagaaattaactaaaat

SEQ ID NO: 254104 - DNA, 421 bp, Glycine max
  unsure (1)..(421): unsure at all n locations
cggcttcatgtgaaaacaggaagcaatacatgtgttaattatggaactttaatttggtgagtcaatacttctaaattttctataggaaaatactattaaatgttgaaagtatgattggaacattggcagactcattaaataattatattattgaaagatagtctatgcatgtttggatatccgnggtaatactattaattgttgaaagtatgattggaacattggcagactcattaaataattatattattgaaagatggtctatgcatgtttgaatatccgtggtaacactactgcaaatatgatattctaagtcggctaaatttgatattttacgatggtttaaaaccgtcgtcaaacgcaatgtcataaaatagtatcatatttacaacgacgacttttcaaccatcttataaaatat

SEQ ID NO: 254105 - DNA, 467 bp, Glycine max
  unsure (1)..(467): unsure at all n locations
agcttgagatgaggaagtgttgaagggggaatttttctgcttttattgttgaccacagagnggtacctggagatatgtcacgggggtcgggagaccttggggacgtcaggtggggtgctattgcccaaaaccaagcttgaccaatcccgacccaacccgggcatagtcggtcagtgagaacctgtgatgtacctaagcaggcgagctcctggcagtcaacagataaaaggaacaaagaccacaaagcaaggaggcttgtggtggctggccagctgtgaaacttggctgatatgtgagatatggtctctggtaatcgattaccaagggtgggtaatcgattacaaggcttanaaataaagacaggaggctaagatggtctctggtaatcgattaccaaggggtgtaatcgattaccaggcttgaaaacgaagtcaggaaacttagggagcctctggtaatcgattacc

SEQ ID NO: 254106 - DNA, 393 bp, Glycine max
tggttttaggattataaaagcatgaaaatagggactttgttgtaagaatttgggctgccccatgattggcactttgcacctaagtaatgtgggagatgcttttcaatggtgtgtagatatgtgtgtaaatatatatggcatacaaatatgtatatatgtgaatatatggcatgtaaataccttgcaaagtgaatgaatagtaaataatgcatttcaaaaatgtatattcgtggataggtagcgtaaaaataccttttaaaatatgtatatctatggataggtagcataagaagcctttccaaaaaaatgttcccatgccataaatgacacaagaatgcttcccaaatgaatatatgatgtggaattgctcctcaagtgtagatagatggcatg

SEQ ID NO: 254107 - DNA, 382 bp, Glycine max
tatgaccaccagaatttctcgagagctttcggtgcttcatttcgagcgttcagatatattatgcgcctaaatccgacttctgtgttatacgatatgaccatctgaattatttaacagcttccgttgttcacttttaagccttccgatgtattatgcaccttaatcggactcccgagtgataagttaagaccattagaacttcttgagggcttccgttgtgcaaattccagcttcatgatatatttatgccctgaatcggacttccgtgtgacaagtgatgaccatctaaatcgccgagagcttttgagctctattaaagtctttcgaatattttgacctcgattggccttcgttgacaagtatctaccattcgagttcttga

SEQ ID NO: 254108 - DNA, 462 bp, Glycine max
tctcaatatattatgcgcctgaatcggacttccgtttgaaatttattaccatttgcattcctcgagagcattcgctgttcaattcttcgggtgtccatgtatcatgcgccttgaaccggacttccgtgtgacaagttatgaccatatgaacttcttgagagccctcgatgttcaatttctagcgcccagatatataatgcgcccgaatcggactttcgtttgacaagttatgaccatttgaatttatcgcgagcagtcggcgttcaatttcaaccatttcgatatattatgcgccgaaatcggcattccgcctgaaaagttatgaccatttgaatttttcataaccttcgttggcctattcagaccgctgatgatcatttgcctgaaccggctatcgactatagtttaaatatatgaaatctctgaagactcctggtaaattgcaccttctccattatattc

SEQ ID NO: 254109 - DNA, 388 bp, Glycine max
atagactcatttagaattgttcttggagaggaaaaattattacgcttgcctcgatatcttgatgattgggacacattcatgaagcttagattcagttttgctatggcgggcctccttgatgaagatgacttgcgcccattgagtgaactacccttgggaacagcctcctgccatcctttcattgacatgtcatcctgtgccacattatcactttcattgaacattgtttggtctaagtgagccgacctcaactctatcaatcccgtgatctttaatttgacctccagatttatcttctttatcgttagtaatcttttgaatagaataaccacaagacatgtcctcatctctttgattttcatctgaaactgttcccaaatttggcctg

SEQ ID NO: 254110 - DNA, 414 bp, Glycine max
catcagggtccgacctctgtaatatgttctcatccgcattcagactctaaatcggtaataaccgatgttgaaagtaatatcgctaacatctcgttttaaaaccaatgttaattaataaatacatcatcggctatttaaatagtcgatattatatgataagaattatgaaaaaagaaagttattaatctacctacccacatcggtcttttataaaccgacgttaactggcactaaccacatcacgtttttaaaatatcgatggtggtctagaatatattttaatatgctggctgtttttcataaatccaaaataacttgaaatttaaaactgtgcacacacatatatctttattctttttaaactacttctccagaattactcgaaaattactattctataataaagcattttat

SEQ ID NO: 254111 - DNA, 467 bp, Glycine max
agcttctagccaaatggacttaccttgaattattttctttgatagcccctttgagcctatgttcccctttctttgttttgaagctcattacaagccttaagtgaaaaaccatgataacaccttacccttaaggaattttggagctttggaattgttttgggaataagtgtgggggggtatgtttcattggaagatatgatttttggccatgcttaatgttttattttggacatgcttgatgtatatatatattgcctagttcttgctttaatcttcaaattcgtactgtctaaaaaaaaaagaagaaaatatgaaaaaaaaattcaattgctgcatattcatactggttcaaaaaaaaaaaaagaagaaaagaagtgaagttgaataaatgaggtcttgttatgaggacttgatttgggagccttggttgattttgttatatttagagggttgggttactacttggc

SEQ ID NO: 254112 - DNA, 439 bp, Glycine max
  unsure (1)..(439): unsure at all n locations
tcaacatcagaccacttccacggtgctggaactacttcacatggtcttgatggggcctatgcaagttgaaagccttggacgaaagaggtatgcctatgttgttgtggatgattactccagatttacctgtgtcaactttatcagagagaaatcagacacctttgaagtattcacggagttgagtctaagacttcacagagaaaaagactgtgtcttaagagaatacgagtgaccatggcagagagtttgaaaacagcaagtttactgaattctgcacatctgaaggcatcactcatgagntctctgcctccattacaccatagcaaaatggcattcttgaaggaataacaggactctgcaagacgctgttagggtcatgcttcatgcccaagaacttccctatatctctgggctgaagccatgaacacagcatgttata

SEQ ID NO: 254113 - DNA, 259 bp, Glycine max
cagctatctgtttagagttcaattttttgtcagccccagatttaagaattgtggtgaaacctgtagccaagctgaaatgactcccctgaagctgaatgatctgcactgatgcgctgccttaggggagagacatcccctaccgatttcgccattttacttttctcttgggtgaaagaagctcctagtatgaagctaatctcttggacttcctgatgactgatgaaaatcttttcatatctaatgacgctcgggggccttg

SEQ ID NO: 254114 - DNA, 105 bp, Glycine max
acaatacgctattgactcgggagtcggatcgaggcactcattatactcttacgctagtaatcgaaaatacaggataccatcagatctacagagactattactatt

SEQ ID NO: 254115 - DNA, 264 bp, Glycine max
gaaacattccatgttgaaattatactcgtatctacaagctaatatacctatgaaaattcatattccctaggcgatgagacttcaacataatatcttcaatcaacaatacccacatacatctgaaaacttgattgtagcccataaataatttgccagacgtcgccaggaacatgagcatgactgttggatcttggtgccagaaattatgtaatgatgtataccaacacttctgtcttcagctatcaaaccaccaacacctagtct

SEQ ID NO: 254116 - DNA, 277 bp, Glycine max
aatcgccataccttgagtaatagaggtgaaccaaactcatgctttaacaaaaaggttcatcatggcatgtcgatcatatggacagtaatcgtcttgcacaatgggagcataagatgaaatgagccaaaatatgcttaatgtaccgccaaactatttaagatattgatgtccttggtcttccagctcactctgacaacaagccatggaccatgggaaaccaaattgattcaactccatatctacgtaaaagtcgcaatactcaacagacatcattcca

SEQ ID NO: 254117 - DNA, 449 bp, Glycine max
agctatcactctacaccaccatcgcactggtctttatccatagatgactctaaacgatgttctaaaagacatgccgccaacgtttcttccatccagagaaattggatgtcatcttatgacaaacaacaaaatatacctactgctcctacattcacatacccagccagcaatactcattcctacttgacacagttagacattcacagcaggaattgttattcttaagctattatcaaatatctacatgcccaccttttatttattattgcattcttttcagatgttgttctacaatcaacttatatatagaatgccaaattggctattcattatccagatgaacattagacaccaactaacactacacagcatgatcaatttgtcggctatgacagctcatattccagcgatgaagatgtcaatatgacatactgaaacctcgatatagg

SEQ ID NO: 254118 - DNA, 400 bp, Glycine max
  unsure (1)..(400): unsure at all n locations
tngcaattgcttgttcaatctaacatggaagcttagtttctctcatccaggggcccatgatgaacaattaacatggttctgactcataatatggtgggaagaaagaaaatactagttcttatcacagcatcgttactttatcggcctactaaaccactgattagagactaccagtgtacatgcatactcaaatagggacgaataattacaacatacaaatctactctcgcgaagcatatgagaatgagcaattacaacctttataatgctactaaaccaactatctcactccaaaaatcatgctaagggcttcccattccaccccggggaagaagagtatgtaaccagcaataactatttcccacccacaaaatagatatttacatatctacgttcaata

SEQ ID NO: 254119 - DNA, 399 bp, Glycine max
  unsure (1)..(399): unsure at all n locations
agcttcgagaaccatgaggcattccctagctcattgagaagttctttgatgatcggaattggaaaacgatctcttaccgcgattgaattgagtgccctatagtcaacacacatacgccatgtctcatctttcttctttaccaacaataccggagaagaaaaaggactacggcttggccggataaggctggaatccancaactccaatacctgattttcaatcttcgtcttctataagtgtgggtatctgtacggtctaatgttcacggngttggctgcagggaggaggttgatatgatgatcgtgttgtctcgggggaggtaaggatgaggggttgtggaatatggagtggtatctgagtagcactttgttaatggcgagaatggggtgagggggggct

SEQ ID NO: 254120 - DNA, 452 bp, Glycine max
  unsure (1)..(452): unsure at all n locations
taatccgaacatgtcaaagaattgtgtgttgtaaaagcataacaagactttctgtgattggtttaaagatacaatctttgcagatgagaatgtttcagaaacattaagaaagctagcagatgggcctaaaagaaatgttataacctgacaaggatatgacataaacaggtattcattttacacaaaagcacacgatgacaaaagtacaatgcagaacaacggggtcaccctaagggctgaatctcaacactttgcaagtgtcaatgacgccaatcccagtgtagcttccatcccttactttgggttcattgatgaaatttgggagcttaactatgtgaaatttacagtatgttttttcaaatgtaaatgggttgacagcaacaccggtgtgtgcaccgatgatatangatttacgttggtagacctaaagaaacttggtaccacaatgaccc

SEQ ID NO: 254121 - DNA, 396 bp, Glycine max
  unsure (1)..(396): unsure at all n locations
ccataatctttgacccatngtgagaatgaccatcctcgctctcgcgagaaaacaaaaaaacaggaaaaaaggagataaattccactcaataacccggagaacgaaaaggaaaataaatacccgatcaacgaccggaagaaaaacaaaataaatactgcagaaagtgtctttggactagacaacatctgagctatacacgagtgttaccatgtcaacaaaaaagacaggaaaccacgatctaatgtggtcatctctctttggttggtcaccaaaaacctgtgcgtcggagacttgttcgcctcttctaaacaaaacaaaaaaggaaaggccagaatactctatccaaatttcgaccgaaacaaaccattccaaaaaaatactatcgtccatgatcac

SEQ ID NO: 254122 - DNA, 416 bp, Glycine max
  unsure (1)..(416): unsure at all n locations
gtgtacccaccattttccataatagaacattatttatatgnctactatcattattattatttcttttcttcgcattgagggaaacactcgggcttctagaatcctccacctttgggcatattctttgaaagatccgtgccccctttttgcacatgttctgtagttgcatcctatccgaagccattaaactgtcactgcctaatgaaggcaaccattaggtccttccaagattggactcgggaaggttccaagctagtgtaccaggtaacagctaccccagtaagaactctcttggaaggaatgtatcagcaatttcacatcttttgcgtatgcccccatctatcgacaatacatctttagatggttcctggagcaagtagtccccttgcacttgtcaaagtccaacaccttgaact

SEQ ID NO: 254123 - DNA, 432 bp, Glycine max
cacattcttggaggcgagactccttcttacatggcttattccctagtggatggagcctcatctcacctcttttactttgtcttccgctgaatctacatggtgaagaatcaccattgaatgaagctcagagatccagcctccatagaagcttcacaagcaagcttccatcactttatctacctgtgcctgcactcatcttctcttaccttcaagctcttacccatggctgcctatgttggtgagcattttcttgactcatcttatccttgaagaggcgcctccaatcatctttgttccatctgcattctgctacgcgtaaacttcaagaagcaagggactccattgatgaagatgatccaaggcctatatgctccacattgagttcattaggaataatacttgtttgaaatgtaaccatctcaaccatattat

SEQ ID NO: 254124 - DNA, 333 bp, Glycine max
  unsure (1)..(333): unsure at all n locations
cttcttaggnttacatgatgcaaaagggtttttatctacctcatgcactcctctaatgactatggcatcatttatggcgctaaactgctgaaagttggaggccatcttctcaattaaatttatggcttcagcaggagtcatgtctccaagggcttccaccctggcagcatctatcatacttatctccatattacggagtccttcataaaaatattggagaagaaactgttctgaaatctgatggtgaaggcaactggcacataatttcttaaatcgctcccaatactcatacaggctctcttcactgagctgtctaataactgagatatcttt

SEQ ID NO: 254125 - DNA, 406 bp, Glycine max
taacagaatactctataaaaccaattaagaaagatgtggtgtctcttggcttatactagttcacttaaacaaagcaacgatcaattctcctttatgtgactgtaaagaattccactaatcaaaactttaatctcaaacaagtattttgtcctgccactccttttgaatctaagaccacccaagtattccataccactaattcactcttgactctcacaaacaaaagtttgaatgaataaaatgattcaacaatactaaaagagtgaataaactgctaagcttgaatacaacaaactttgcatagcaaaaagtaaagaagactaagtgttgactatatcgtccatcgaaatatacaaagcttaacttcagagaacttgcgctcatatattttcactcgatcatattt

SEQ ID NO: 254126 - DNA, 451 bp, Glycine max
  unsure (1)..(451): unsure at all n locations
taaatactcaagcttctcgatatattatgcgcctgaatcagacttccgntttaatatttatgaccataacaatatctcgagagcttcctggtttcaatttagggctgctccatatattatgcgcctgaatcggacttccgtgtgacaagtaatgaccatttggatatctatatagcattcgctgtctaacttcgagcgacttgacatattatcgcccctgaatctcgactttctgtgtgataagttatgaccatttgaatttctctaaagcttccgttgttacatttctagcgtttccatattttatgcgcctgaattctgacttccgtgtgaaatgttttgaccatttgaattttttgagagctctctgttgttaatctagagctgctttcttatttaatgagcatgaatcggacttctgtgtgtacatattattatcattagtatttcc

SEQ ID NO: 254127 - DNA, 412 bp, Glycine max
  unsure (1)..(412): unsure at all n locations
ccagaaaactctggaaagcnttttggtacaatgaagaagaagaagttcaaagagattcaggacttgtaaaagattgattgaataagtgtaaaaagtgtattgaaaagcaaatcaaagccttgcatttatagactcttcatgtctggccaagaggaccatttagaagagttataacttttagaaaaacttataaccaatttgaaaaagtcaaaaaccttttgaagagttacatcttttgatttattcagaaatagttaccggtaatcgattaccaaatcagtgtaatcgattacacaaggcttttatgtgaaaggatgtgactcttcatatttgaatttgaatttcaacgttcaaaggcacttgtaatcgattgccaaatattgaatcgatatagctttttgaatcaattgga

SEQ ID NO: 254128 - DNA, 456 bp, Glycine max
  unsure (1)..(456): unsure at all n locations
cgagatgaggaagtgttgaagggtgaaacttcctgcttttattgttgaccacagagtggtacctggagatatgtcgcggnggtcaggagaccttgnggacgtcaagtggggtgctattgcccaaaaccaagcttgaccaatcccgacccaacccgggcatagtcggtcagtgagaacctgtgatgtacctaaacaagcgagctcctggcagtcaacagataaaaggaacaaagaccacaaagcaaggaggcttgtggtggctggccagctgtgaaacttgattgatatgtgagatatggtctctggtaatcgattaccaaggtgggtaatcgattacaaggcttaaaaatgaagacaggagactaggatggtctctggtaatcgattaccaaggggtgtaatcgattaccaggcttgaaaacgaggtcagaaagctaagaaagcctctggtaatcg

SEQ ID NO: 254129 - DNA, 301 bp, Glycine max
atttggatttcaatttttgtgacacttcttgtcttgttacaccacttttattggaggactttagcttatagactgacactcacaaaattattggagcactatgctattacgggtctgaatgtgatggtattaatatttctttaaaaagtcacttagtgttacaattttacgagataattaatttctttgaggtaaaaagtaacatttcaactgataattcaacttaattgaatttttaaaggaactggaaaaaagctttttatacatgaaaaaatataaacgtttattcattgtaaccata

SEQ ID NO: 254130 - DNA, 385 bp, Glycine max
  unsure (1)..(385): unsure at all n locations
cgcttagactaagtacagcctactatcctctaactgatgtgccaacttgatgtagctccatgtggagcttgtaggcctcggatgttcttcatcaatggattcctttgcttcttgaggtctgattgcagcgaaatggagaaggagaaagatgaatggagacgccacttcaagtataagatgagtctataagaagctcacaaccatatgaagccatggataaaagcttggaggtaggagaagaagaatggagggagaaggagagagagagagagagcacgaaatttatgcctcanaagaggtctgaactttgaagtgtaattctaaaatgatcaaagttgaaaaaaatgcacacacatgacctctatttatagcctaagtgtcacac

SEQ ID NO: 254131 - DNA, 427 bp, Glycine max
ggcttcaatgattcaaggtcatagaaatctacctttctgtcttgttctgattttgattcttttgttgttgcattaaccatcacacattggttggcttcctcttcatcttcttcattagaagtgggatctcccagttttcctagttgctcacaagacttttcttatcttttggcttgaaatacttcttttatcctcttctattttggccttacatacctgagattctaacattaacattcaaaataagagaggcaaagtgaatgtataagagagttggtatgagcactctctcttttagctaacgcgaatctagtatgtgattggatgtcacttatatatattataaaatgatctgtgcgattgaataaatcatcggatgcgtttttaaaggcacggcgtatatacacctgatttacaaatgattgga

SEQ ID NO: 254132 - DNA, 344 bp, Glycine max
ctacaaactaccctcttatatcaataatccaattgtagtggcttacctgacataatttttgttcgtctattacttatatgagagctcaagaagcttcgtattcatgcatgagacacataacgcggagaacatgcaaagggaatggcgaaagggaatacaaaaaagacccgccaagcttcatccaatccaactttaagctactttgatgaaaatatggaatatgacacacaaatagttattaagaattgcttgaaagagtgagcacatcacatgaccataaatagacaatctttccattccaagcggtgaatgcattaaacgattctgcagggcacgcctgctac

SEQ ID NO: 254133 - DNA, 435 bp, Glycine max
gacactataccatactcatgctcgctggagaatatttcctattcagatgctcattatatcacctactgttgaaaggttgttctttcattagcctggtgtgaattcaatcatacttgaacatggtgatggacatctatgccttgacggtgcggccaacacatggaagatcccatgatcaccatcttgagctgcaagctaatgctatttaccatcaaacacaaaaactcacatatctgcaattcataacatacatcacacatatagccggtaaatgatgtaggaagccacctctataaggctatacaatgggaacacataattggtgcctccacataccggagaattatattatcttacgatgatgttggttgtggccaaatgaccatcaaactttaaacgaattcaacaagcaatggtcaattgtttctaccttag

SEQ ID NO: 254134 - DNA, 430 bp, Glycine max
tcagcttatccagaacttctttcttcattttggttaaaatgagataaaaaaattcagcatagtagatatacacttagactcaaatcacgaagcagtatatatataatccccagacagtcaacacatcattggtttttagcacatgatgcagaaattcaacatttacaggtcagcatctaaatgatcaagaaaattttattgaaaaaacgtgaccaaaggttcaatatattcatccagactgacatcagcactagaaggcacatcggtggaaggaaaaatcagttagttcatgctaaacatctgttcttggagtcaggataaaaataatggtaaagatccccattgactttctgaatcatttgtcggccatagagcaggagaaccagctttgaagaattggtagcaatattgcaaattaccacatggcttt

SEQ ID NO: 254135 - DNA, 437 bp, Glycine max
  unsure (1)..(437): unsure at all n locations
ttgctgtaaaaaaacacatatntaagcttatgatataaaaattttaagtgctctacgttacaaaaacaacaataatacatttcttattttaattaaatggtagtactaaataaagaagtggaccatgaattttgtcaacaaaaaaaaagtggaccatgaaaaactttctgcaacggtttctttcgtacgtgcaacaataatgcatttgctatttgaattaaatactgcataaagaagtggactaacaaaaactttttttaattgtttctcccggtgtcattattagtttgcttgtgtcatgttttgattgttctcattataatacaattaaaatattagtatatcacccactttttcactaaaaaaaatattacccacttggggctgattatactataatagtgaaagtagatatcaattcttaattaacaactaaa

SEQ ID NO: 254136 - DNA, 465 bp, Glycine max
  unsure (1)..(465): unsure at all n locations
agcttatgcgcatatnttcttacgaacgttcacttgcacaatacattctattaactaagaaaaatgcacccatatacaatcaaggcagcttcgttacctagattatttacatgtacttccaaggtgtatttgttacttacatcacacacatttccttggctaaatttacatacatgcatactcaaagcattttggggtaccaaaaattgcacatgtgcacatcttggtatttctaatacctgttcatgcccaaacttcatgatgaatcttgactatctacacaataaggtgctacatttcatgttcttttcaagattntgctacctaaagccgcatgcaaattcaagtatattttcctttgctgactcaaaatgtattcaaattaaaaggtatatattttctttgtaatgtattttcttacnaaacangcaacatttattatatatatatatatatatatatata

SEQ ID NO: 254137 - DNA, 376 bp, Glycine max
  unsure (1)..(376): unsure at all n locations
aagaacatattntcagaactagttgcatcttcattctgagcaacttgaatctctattctgaactcagaagagatcttcattcttgattctgaactaacattaataacccttttttttcaaaggaagcataaaaatttttaaaaccccaattcaacctctcttcttgtggnatttttgtcactttagttttattggtggatatgttagtgtccacaaaatacacctgacaacttacatggcacttttatacagggacttgtagctacacattatctacaaggtacaattatctactagcttttatctataagctaaaagttatcttcaacattatctacaagctaccgactattatctataagctgaaaattatttg

SEQ ID NO: 254138 - DNA, 455 bp, Glycine max
  unsure (1)..(455): unsure at all n locations
acctgangcatgcagcttggaaagaaggaggaacgacagggtagtggttcgtttaacatggggtcccaaacccatggccaatgtctatatccactgaaaatttcagtaatggagaagccctgaaccccacatttaggacattatgcgtgtgtcttaacaaatatttctaacttaatataacagtattactttatactctaataattattctatataatttttataattgcgcgtctaaaattaagtgattattatccacatatgtgaaaaaaatgacgtttactaaatcaatttatttgcttttaatcaaactgaattctacaatattaaactatccaaaattaaggctggacaaaaatgttaatttgtggcaacttcagtaacttgtttcgtaagttgaggcattgttctttacctttacataccaagccaaaggagaaagaagaaccaacatc

SEQ ID NO: 254139 - DNA, 385 bp, Glycine max
  unsure (1)..(385): unsure at all n locations
ntattggttctttgacgaagaatctctctctctctctatatgtgtgtgagtgtgtgtgtgcgtgtatctaaccttagtttagacaacatatacaaatagatctttctactaaatattctaatctaaatctgagtcaaatntaccaaacttttatgcggatgacactatcttctacattgcgttcgaatgggcatattgttctgatagttgcatacagtggaatagcttttctttactactcggaggaagaattgcacactctatatttgcaatacttggtgcaatcttacaaaactcaacttgcaatattgggcgacacagtgaattaatcgagcattttaaggtcatcaagcttattatctgggatgaagatccaatggcccac

SEQ ID NO: 254140 - DNA, 446 bp, Glycine max
  unsure (1)..(446): unsure at all n locations
agcttagaatattgcagcaatattatattccatcagcccgataactatcacgcttagttggagtctgcaaagccccaatcattcaacactttgctgaaacaatttctggtactacaactattagaagctttgatcagcagtcaagaattcaggaaacaaatatgaaactgactgatggatattctcggccaatgttcaatattgctggtgccgtggaatggttgtgtttccgtttggatatgttgncttctatcacatttgccttttccttaatattcttaatatctatcccacagggattcatagatccaggtgagttatttctatctgttacaaactcaaaattaatcttctaatgtaatataggattaaacataataggttctcttttataacttctttgtgattttgaaagccttgctggtttagctgttacatatggactt

SEQ ID NO: 254141 - DNA, 459 bp, Glycine max
  unsure (1)..(459): unsure at all n locations
tatatcntttttcttganatggtacaactgatcactattaataattgactgcngccattgttcttatatgcaatgcaacagcgaaatgcaaaaatcaaaagtctcacacggtacccacatgtccttccaatctaaaaaattcaaagaattgaagatattgaaatctattatattattttagtatttatactagctctattggtcaataattctcattaaagtgtctaatatctgaaaggtttgtacgcaaattgcggcatccatataccgactatatatatgtcaaggatgaaaaaagggtatttgatgagcataagtagaaaggcacatgaaagcactccaatgcacatccttccttatcgatccaaaagagaaagagaaaggcaagaagatacgacagaggggaagagcataccggctttcatctctattattattattataggggacctgggattc

SEQ ID NO: 254142 - DNA, 464 bp, Glycine max
  unsure (1)..(464): unsure at all n locations
agcttgtctcagcgtntatgcgagacggagaccaacatgctagctatcatcgctaagnaccaagaagaggtgggtctagccatggcccacgagcatagaatcgcggacgaagatgctcaagtgtacgcggaaaaagaggctataggaagggtgatcgactctttacaccaagaggcaaccatgtggatggaccgcgttgctcttaccttgaacgggaggcaagaacttccccgcttattagccaaggccaaggcgatggcagacacctactctcaccccaaagagattcatgggcttctcggctattgtcagcatatgatagacttaatggcccacataattagaaattgtaggaaacttgtatggtctctcacaccctgantagatatgacttcctttttgaaataaaatgagttggtcccatgtttctactccaaaaaggctgtggcaaataaattactcct

SEQ ID NO: 254143 - DNA, 334 bp, Glycine max
cctatacatactcaagcttatacggagaagaagagagcttatatggagaagaagagagctcgagcataatacggctcgcgtctgatatattttaaaatgtaagtccaacatcaattttcaatacaaaacactgatgtctaacaaatgatgtgaaagttaacatcggttttctggaagaaaccgatgttaacttatcatacgttaacatcggtgttctgataacccgatgttaatgaacttacgttaacattgattttctgaaaacccgatgtttacgaacttatgttaacatcgattccttccaaaccgatgttaactaattaatagtaacatc

SEQ ID NO: 254144 - DNA, 231 bp, Glycine max
catgggttaagagcatgactgaatatgttactcaattgaccgactgtgtgttaagaaatcactagtcacaccccgtggagggtgcgacctttaattgtgagagaacgactttcattgacttatggattttgcatgaatttccgattatggaatgagtgcatgagtttgtagactattaacgccatgattgattgagacaaccacttagccctaaagcttatcatgtgaatg

SEQ ID NO: 254145 - DNA, 246 bp, Glycine max
aaacaccacttcctcagaaccaccacgagcgcccacttcctacaaaacacccgggcagacaccacgaggaagacccacccgcaccgaggtcccagcgcatcatacgaagagacgggaaaaaaagtcaccccaaagaacatgaaagcacaccgccggagccgagcacaaaaagaacgagccagaagaagccgacgagaggaccgaacaatacgaaaacagtcacgcgaaacgaacgacgcaagccca

SEQ ID NO: 254146 - DNA, 427 bp, Glycine max
  unsure (1)..(427): unsure at all n locations
agcttatcttagcacaantcgcttcatggtacctctgattatgtaacatcacttacatgtcacaccttcacattaatcatgtattcaaaataacacatcttaagtacaacacaacatctcatactgaaacaatncattactcaccatcatgtaacaagtcacaataatcattatacaagcgttatgcaagagatatactaagactcaatcatatatgcaatgtggtaccatgtcagtgaaaaacctcatcgagcgcctaggagtacatgacaagacagatcacacactgtgaagtcaggtcactctcactagtcagggtcacgctgttttgcgagaatactccaaccatgtgggatcggcacacgcttaaaggagcactcaaatcgagtgtatttagtcccaaagcctatacttcgaagagtctgtc

SEQ ID NO: 254147 - DNA, 459 bp, Glycine max
  unsure (1)..(459): unsure at all n locations
ggttcttgtattttcctaagntctgtaacaagcttagaacaataaacttggccttctcttaattgtctttgggcttggcgaccacgatcaacaaagtactttcggcacctactatatgttgacttgaccaacgctgttattggaatgctgcgacaatctttcaacaccttattcacacattctgataagttggttgtcatgtgaccatatcgtcgtccagatgtatcggaagccatgctccatttttcctttgagattcgatcaatccatcttgctatggctggactcaattgacgaaattnttctaagttttgatcaaacacatgcttgncaggagtgtacgctgcatcaaatttgttatcatcaaaagttgacatagacatgaaactcaataaattaatgtataaataaacttcccaattcttgacatctttttgttcgcgtgtgaattgcgatgaa

SEQ ID NO: 254148 - DNA, 452 bp, Glycine max
agcttataagaaacaaaatgcctcaatcatttccaaatatgcatgtgaattaggaagcatcaacaagaatcaagccaaggctattgtgcaagcaatcaatggggcaaaacacaccaattgattatgatgatggatggctcaaattctcacaaaggtaaactcatcactttcaaattgagctttcaaaactatcatgacatgtagaggagaatcaaggatttcaagtcacaaaatgtcaagaacttttattttcaaaacaattacccatttcttgaacatatcctataattcaaagaaaaacatgcaaagtcgtacatgcacacaaaattgacccaaaatattaaactaaaaatccgacaaaactaacaacattaacaaattaacacaactaacaaattaacaaaaccaacaaaactagcaaaaccaaagaacactcccccccatacttaaac

SEQ ID NO: 254149 - DNA, 426 bp, Glycine max
  unsure (1)..(426): unsure at all n locations
tgacaagccaacaactctcgcacctgtagagtttaccaccctcgacaccggacaatacttattcaagttgaggggcttgacaaactcgcaaccctcttacttgtcaaggctactacctttgacaccataaatctcttttgccaacaagctaactcaaagcttgggggattatgtactgcccggggtccacaaaatggacgtggcaagtgacgtggcactccagtgagcacgtcagccctctatgtcaaccttggcataggagcacagacaccttgcccttagcagccaggctactgggccgataggttatctctgatacctcattatttgaatattaatgataatgttagaactcccttatcangtgacaggtacctaattatctttaaccacaacttatctactagctattaactataagctata

SEQ ID NO: 254150 - DNA, 417 bp, Glycine max
ttaagcactgagctgcagcttgagcaaacggatgattggtaacttgtgaacccaccatgccttgaatataaatttgtatctgtcgcaaggtttgatggttgtgctcctctgctgaccaccatacagacctttgccctttcatgtagcaacctggagcaattgagcagcctaaagcttatgctgcatacatttacaatagacctcctcaacctcagcaacagaatcaaccacagcagaacaattatgacctctccagtaacagatacaaccctggatggaggaatcaccctaatctcagatggtctaaccctcaacaacaacaacagcagcctgcttctttctttcaaaatgttggtggcccaagcagaccatacattcctccaccaatccaacaacagcaacagccccagaaacagc

SEQ ID NO: 254151 - DNA, 439 bp, Glycine max
  unsure (1)..(439): unsure at all n locations
ggcttgtggagcttctatggaggctggatctttgagcttctatgaggtccttcaatggtgatcttccaccatggagatgcagcggatgacaaaggacaagaggtgagaggaggcgccatccactagggaataagccatggaagaaagaacttcaccaccaagatgagccttggataagaagcttggaaggatggttcaatggaggaaaagaaagagggagagaaagagagaggggggagcacggaattgaaggaataaaagagggagagaagtggaactttgaattcggatactgattttcctgtcaacttgtgtgatgtttcgtantttttctttttatccaaatcacttggttctttttttaatttccagatgtctagaaaattcagtaaaaaatttagctcacaaatcgaagtaaccaattctcagtaatttttac

SEQ ID NO: 254152 - DNA, 492 bp, Glycine max
  unsure (1)..(492): unsure at all n locations
atctctaagcacctgcngcatgcaagcttgaactaccctcacaatacaatttcaattatatggaatatgagaaaaacaaaacatagaacaaaatacaacgtctaaatgtaaggaaatggagaaactacgataaaaaaggagtgaggaaggagaaacaaactcaatgttnggaggcacagttagtagtgaatggattcacagagtttatgatcaatttaaaggagaaaataatgagagaagtgaataaaaaaaagtgacaaggagagtgaatttaactaaaatattaaataagaataacactttttaattaaaattgagttgaccttccaccaaaacggtttaattgatgttatttcatatgagttattgatcctttcttcctaagtagtgcgtgnggaccattactctcaacgaaaatatttttttataataatatttgagattaatctttatttacaatatgtatgtaagaatcttatacaatgatgaaat

SEQ ID NO: 254153 - DNA, 493 bp, Glycine max
  unsure (1)..(493): unsure at all n locations
tcttatccaaggctcatcttggtggtgaagctccttcttccaaggcttattccctagaggatggcgcctcctctctcctcttctcctttgtcttccgcttcatctccatggtgaaaaatcaccatcaaaggacctcattgaagctcaaagatccagcctccatataagccccacaagcaagcttncatcacaaattccgcaccagcatgattggagtaccgaccttaagtgctaatatgtgattaggtatccctgatgttttcaatgagtttagaaatttaggtgtcagtaatccgaaagtaggattgagtagttcatcttatttatcaatgttatcagtgctacaatactccttttcgncattgggtatcaatgataagacaatcattntatttgtcaacaatatcttttttagaggcaagaacaactcttttttgcaagtaatctggcgtgctatagttatgtgtcaagttgggatatgttgcatcaacaa

SEQ ID NO: 254154 - DNA, 331 bp, Glycine max
  unsure (1)..(331): unsure at all n locations
accgccgntacactgcctttcccacaagtactagagaagactctcgcctttaacatgagcctcaccatattcattagggtgctatattatctatcagcagttcccatactgtcgaagtgaggagggaggatgacacttcattgaattatcgccttctctgagcaccaaagtcttgaaatacttgacaaacatattcaccacccccatctgtctcaatatctgatcgagagccacttgcgtttcgccctatattgaacttctcaagacttaatgaatcacctctccttctattaggaaacccatctccctagcaatgcacaataaggaaaga

SEQ ID NO: 254155 - DNA, 451 bp, Glycine max
  unsure (1)..(451): unsure at all n locations
agcttgtaagaatatggggtacccatcacatgtggtactatgtggcagtcgggcgacggtgcacaacaagntttccacatcggctaatcacgtataaacccaccatcccctgttgcccacctccaactgagctcacacactcctacgtagcccttatactaggtggcagtcgggcgatggtgcataaaatgcagatttcgaaaaccactctctccctcatccaattttgcccaaattgaatcctacaagtcccaaatcatgtaccaatcatgtctaaaccaaggacaagcttcaaaccacaacaacacaaaatctaggtatccagaacccctcaatttaatggattttcaagggttgagaagtgaaatngagaatgaggtaaatntggagcaaactctcacctcacacaagtctataacatctaattaaactttctcaaactggatttaca

SEQ ID NO: 254156 - DNA, 448 bp, Glycine max
  unsure (1)..(448): unsure at all n locations
tatagaatatataatataagaacaatgacaattgaagagtctatacctgtttcctttgatgagtctaatgccattcttccaaggaaggattttttacatgatatttcagattccttagaagatacacatattcatggaaatgactctaaagaaaaagatgaaggaagcattgaagattctcaagataatggaggtagagaaaataatgaactctcaagagaatggaaagcctcaagagatcatccccttgacaacattattggtgatatatcaaaaggggtaacaactagacattctcttaaagatttatgcaataatatggctnttgtatctatgattgaacctaanaatataaaagaagccatagcagatgataactggatcattgccatgcaagaagaacttgatcaatttgaaagaaatatgtgtggaactagtagaaaacctg

SEQ ID NO: 254157 - DNA, 406 bp, Glycine max
acctgagcatgcaactcgacaattgttgaatcgataaatttagttttgcctctgaagaaatttctaacttagaaaatattcttcactcacactatgatgatgcacaatgcaaaataaatatccgatgtactaagatgcattaatcaagctaataaccaatacaaatgtccctcaaaggagttggacattgtaaagccacaaaaccttttcaaactttttcttgagcttcaagctttagccttaggttgcatcaagtagttgcttcctttatctctaacaaactccccatattggctttaatgatgccaaacttgaatgcgacattgagtgcattaggagagtcttgagattggattggaaacatgatccttagtcttatctctaaaaatacttaacacttaacaaa

SEQ ID NO: 254158 - DNA, 472 bp, Glycine max
  unsure (1)..(472): unsure at all n locations
tgccacccagctcgcccaggtaagctaggatgctttctctattttcttaccccttttggaggaattttctggaaggcccaagtgggcctagttgctatttgcacccccatttttactaaatacacccccttgctcttttttggtgattctttttccataacgctatgaaagtttacgaatttcgtaacgatgcttgttttctttccgtagtgttacgaaaccttaccgattacgtaatcatcctcttttntgccttccggaacgttacggaactatacagattgcgcattaacacttccttttaatttccgacatgtcacggaacttcacagattgtgctacaatgctttcttttgacttccagcatatcacggaacttcatgaattactaacgatgcgtgcacagacctctaagtggtctacgagggcgcatcccacacagatgtccccgacaaattaggatgacactctc

SEQ ID NO: 254159 - DNA, 328 bp, Glycine max
  unsure (1)..(328): unsure at all n locations
catttttctgacctgcanaacaaaattagcataagaacttcctttttataatgcagacncaaaactaggtattttgtgccccatttgctttgctgatattaagctaattggatgaacctcgctgaattaaagacagcttccaatgcctatttcagaagcatttgtctccacaatatagggttgaccaaaatcaagtaaggccagtacatgagctgagatcaaagcttcctttaatgtataaaacgccttttctgtgtccccattccacttgaagtcagtacctttctaaagcaactgtgtcaaaggttgagctatgaaatcccataat

SEQ ID NO: 254160 - DNA, 295 bp, Glycine max
tagccaaatggacttaccttgaattaattcctttgatagcctctttgagccttgcttccctttccttggtttgaagctcactacaagccttaagtgagaaaccatgatattaccatatccttaaggaattttggagcttcggaatagtcttgggaataagtgtggcggatttttgtttcattggacaacttgttttgttggctatgcttcatgatgtaatttgggccatacttgatgtacattgtatattggcttaatgttggacatgctgaatgaaatgttgtttctcaaaggc

SEQ ID NO: 254161 - DNA, 446 bp, Glycine max
cgctttgttacctcatgttgaattatcttacattagagcgtgccatagcaccactaattgttctccttttgaagttgtctatggatttaacccactaactcctcttgatcttttgcctatgcctaatgtttctgtttttaagcattaagaaggccaagcaaaggcggactatgtgaagaagcttcatgagagagtctaagatcaaatcgagaggaaaaataaaagctatgctaaacaagccaacaaagggagaaagaaggttgtcttctaacccggagattgggtttgggtgcacatgagaaaaaaaaggttttcggaacaaaggaaatcaaagcttcaaccaaggggagatggaccattctaagtgcttgaaagaatcaatgacaatgcttacaaagttgagctgcccggtgaggataatgttagttccaccttcaatgtctctg

SEQ ID NO: 254162 - DNA, 206 bp, Glycine max
  unsure (1)..(206): unsure at all n locations
tataaatactcaagcttatacttatgggctgtcttcagacttcacgccgcgtactattctcggaagatttaatccaagcccctactcttgatgggcaactcccaccttatgataactatcccggtcaatacgatggagaaagagatacccatctntggccccccgctccacctcaaagatccatctcctgcatgaactaccccagt

SEQ ID NO: 254163 - DNA, 328 bp, Glycine max
ggacctctaagacaccgcggctgcaagctttaccagggtacttttgtatattcgttctttctcacaacccactcagtatacttgctctactaataacatgtctttacaaagctgatttttcgcgggcttttcaacacggattataattgtctttgaagctcgcgcccgggaaagtcacatttttccctgacgggtatgtgactatatatgcgaggtgtcatctctttcatggtttactaatcacctggtcttgaactagttttaacaaaaatgaaaagaaatgattctcacacaatattcgaacaaacaatgagtgagaatgatatat

SEQ ID NO: 254164 - DNA, 324 bp, Glycine max
  unsure (1)..(324): unsure at all n locations
ctcgacagtcggcatattgcttttggacgaacgcatgatgccttacatnatgttccttgccataagataactgtcccatcctatagattccttatggcgatcaaaagcagtgttgggcctctggctattcatgatgacctatctcttgggtggaaagatagccaaacgggccccaaaagatctcgaataaactcggctcatgccctgcggacacaaagggtatgatttaagaaatgacacataatatgcctctctggaagcatactgagcagcctcaatcgattcctcacttgaagcccagagtataaggaaatacctggcgaa

SEQ ID NO: 254165 - DNA, 330 bp, Glycine max
tcaacataggcagcgacgacctcattctttctagcgctagttatcattaaatcatactctgtcggaattataactgcgagaaagtgatcacttagttcactcagacaaagcttctcaaccgctgcaagggctattctcctcgtaagcgaatcactctcaagggcaacaatgtaaatcgcataatccctaaccaacagaatgccggatttcatcttcccgaacctgtgaacttaaaactctatccgcgaatagaacaatctgggccccttggatacaaaacatcattcaaaaatgtactcaatattgacactgcaaccgcctgcttaatta

SEQ ID NO: 254166 - DNA, 466 bp, Glycine max
  unsure (1)..(466): unsure at all n locations
agctttatccctttgccaaatgaggctatgtttgtgtctatcacactcgctctcttcaataactatatttattactctactctcacattagacagattacgagacttctgcatgtgtgttgaagtgctcatgctatcactcttataaaatntcaaaatgaaattacttaatcatacaagataattttgagatcatgggtgctaataaatatttcctattaagaaaactattcagccaatacttctctgacaaaaattgtacaaaaattctcgcctttatgcaagatacattaatttatgcttcactgatgcttcggatgctattaatacttatgctagccctctctctagaactgttgcagataaactttttgtcaaatttcattatcacgacccttccccacctaaactttttatattttgaattaatggccttcggcatcttattcattaaagaaaaactttgg

SEQ ID NO: 254167 - DNA, 389 bp, Glycine max
  unsure (1)..(389): unsure at all n locations
cttagggctgaacaactatataacagcaccaagggtctagtttatctctctctctctcctctctctcttntatatatcgttcttagtcttagtctctcttctctttccctnttattttcggttgttacaattccagctcaaacttctagttgtatcaataaaaattcgatctctattcgattaatggaaggctaagtccgcagcgtttgcttctcttgaggatcaagcatagttctctttgaggctctattattactgctaaattttgttccagtcttactctctactaattactctgaaatcgttgctattaattcatgcatgcttagtgcttgattaattggctatgcgccgaatttaccgaccgtcattcttaatgatcatttatg

SEQ ID NO: 254168 - DNA, 303 bp, Glycine max
caagattagaatcaagaacaattctcgactcatgaagaaagtctagagtcagaatcaagatcaagatctcatgaatcacgatcaagattcaagactctagaatcaagaatgaagagaagactcaatcaagataagtattaaataagttcttcaacaactttgaataacacatgaggttttgacaaaaccttttaccaaatagtttttactctcttgtaatcgatcaccagattgttgtaatcattaccagaaccaaattgttctgaaaagattcaattgaataaccacgtccaattatttcaa

SEQ ID NO: 254169 - DNA, 226 bp, Glycine max
  unsure (1)..(226): unsure at all n locations
cttggcaatcaaccaacctacaagcatctcttcctgtattgttcnataccacatcacacgtatgggtcttatgagaaaacaccatatctaaactcgccacaaggtatacctatggcactagattcaaatctataacgatggtagagctagaggagacacctgaacagatgaaagccgacatgtctgttctgaaagacaaatgcgctccatgatggacgccatgtta

SEQ ID NO: 254170 - DNA, 466 bp, Glycine max
agcttaaataggtggccttgttcatgctcgtgcgcttagcgcagatctggatcgcttagcgcgcatgagtggattttggcttaccgcacttgtttcgcttagtggatgagctgaagcggtgcgcttgatgacctggagtggtgcgcttagcgaacttgacagctcatcttcttctggattcttcctcgcgcttagccactgaaggttgcacttagcgaattctcgctaagccagcagcttggcttagcaaaagagtgaaaaacaacacttagccaaagttgcctatttaacctgaaattgagagaaattgattattaaacgcacaaaacaaaagtaaaaattatctattacctatatttagcaaatagtacttatagtattacaaaacaaccataaattgggaaagtttgatataatatacacaggttttatacacaaaagttagtcgtattcatcgactaacacc

SEQ ID NO: 254171 - DNA, 497 bp, Glycine max
  unsure (1)..(497): unsure at all n locations
cggacctataatactcagcttaattcttgaaagatttagctntcgcaattaaagtatattcttagaacaaaaaacaacactctaaaataaaaattgttaccttaactccctcttcctctatttctaattatccaagatttttacttattcatgcatagattttttactgaagtgcattattataagtatttatataactatctttttaattaaaactagagttttactttggtaaagtgtgcaatttttattgtctttattgtgcgaggtactaaatgaaactctaattttagtttaaaaacattagaaaaaacatctaaaggactactcttacgttttataaaaaaataaatagaatagattttggcctaaattatgaaatacaaaacaatacttagtcgataaattgtaaatagacaacaagtgaacaatccacctaactgcgaaactattaatatatactaataaaacatatggagatagaaaaatggatgatt

SEQ ID NO: 254172 - DNA, 450 bp, Glycine max
agctttgccgatttaatttttgtcggcgaatgtatctaattgtgtctaaaaagaggaaaatttgattatcctactttgatgaatgggaagcctacggcaaatggagagagtatgaatgaaggaggaacccatgctatgactgccattcctacatggccaaatttcccaccagctcaacaatgtcaacactcagtcaatatcagcttttctcattacccaccatcctatcaaccaagaacacccaatcatccacaaaggccacccctaaaacaccaaccagggaaagaattttccagcaaagaagcctgtaggattcaccccacatttggtgtcgtatgctaacttactcccatatctactcaataatgcaatggtagccataatcccagccaaggttcctcaacctccattcttcgaggatacaactcgaatgaacattaactcatcatg

SEQ ID NO: 254173 - DNA, 460 bp, Glycine max
  unsure (1)..(460): unsure at all n locations
tgcttctacatatngttgacatacaatgcattacgtagtatctattctctatgcttccttttagcttattacactaaactgaataagatatttatatatacaaagctaagtgaagtatacgaaaacataatttttaagacatgaaacattatttaaatgacttacattaactataatcaatctaacaacaaccttgaatatacttccttgatggtcgtgaaatcacttccaagcattaatttagagaaatatgcatgtgtattatacaataaaaatattgatgtcaaattgtaatcataaactaaatgtattacaaaatacaactgacctgtaataattcctttcaagagttgttgacctattgtgcatgaacaaaccaatgacacattgttctatgcatatgagacaagatgccatgtgcactgtattgaaaattaattattataaacatcatgattaa

SEQ ID NO: 254174 - DNA, 446 bp, Glycine max
  unsure (1)..(446): unsure at all n locations
accgcagcatgcatcttgtaaatggctacactgaacatgttatgtgttgttttgtcttcaagataaaagggatgccccacattatttccatgacacaaatgcaaaaatgaatgattggaaaatttaagcaaaactggtcatgcatgcacctatgtggacgctcaagtgtcaaatatttatggtcatgtgaagctagggctcaagattcatttcctttattttagtcaacccaaccgttcccaaaatatgttctatctatcacatttgtgcatctcttccgagtccatttttgggcgtctgggagaatcttcacagcattcacccttcacgtgtatacacattttttaaaaactagntatgataagtgaatttttcctaagaaaagatggaaggcatctcttttcagaaacatgttggttttcagcttgacaacctaatattttttt

SEQ ID NO: 254175 - DNA, 392 bp, Glycine max
  unsure (1)..(392): unsure at all n locations
ctctagctcggngacgcgcgtatccatacttggaaaccgcgcatccatttcatctatattactgtccaatgagtcaaagcactctctaactaaggtgtggagtccatccaacctgttaagaatgttgtgcataatagatgaataatcatctccctgtgaggtggtgatggagaacggtcttctgctgtctatgctggtgcgtccttcttcacccaagaacctattcctctctttgttctatccacaataggagaccacatttgcaccaatagagaaagatctcttgactttaacaaatggctcatagtcaagaaaatgttgcaataacaatgtgatcaaatgaggatctgaaagtcgatcatttgatcacatgccttattgatgctatattt

SEQ ID NO: 254176 - DNA, 416 bp, Glycine max
agcttgcagactaagtgctcaccaacactagatatgaatccctcagtttgtttcatgtaaacctcttcttctagatcaccattcaggaacgccattttttcatccatttgatgcagctcaagatcaaaatgagctactaatgccaaaattactcgaagagagtctttcttatatacaggggaaaaggtctctctgtaatcgattccttctctttgagtgaatcctttaacaacaagtcttgccttatgtctctcaatgttgccttctgagtctttctttgtttagaagacccatctacatccgatgggcgttacaccaacaggcaactcaacgagatctcaaacttggttagatgccatagaatccatctcatccctcatagcattataccgataaattgatcccttagaactcat

SEQ ID NO: 254177 - DNA, 437 bp, Glycine max
  unsure (1)..(437): unsure at all n locations
ctcaagctggtntgggcatagcaccccacctgacgtcctcaaggtcttcttatcaccgcgacatatctccaggtaccactctgtggtcaacaatataagcaggaagtttcacccttcaacacttcctcatctcaagcttgtaggattatggggtacccatcacatgtggtactaggtggcggtcgggcgatggtgcacaacaagtttttcacatccacaaagcgcgcataaacccaccatcctctggtgcccacctccatctgagctcacgtactcccacgtagcccatatcctcgtttctctcaacaccgggtccccatcaatcctctcaagcttccacaacatccaagcaaaacaacattcaaacagcacaagctatcacagccaagcaaaacagagcaaatgcagaaactctgctaacacatcaaccanatcac

SEQ ID NO: 254178 - DNA, 422 bp, Glycine max
  unsure (1)..(422): unsure at all n locations
agcttacacaatttatctttctcaaacttgtgtttcgaaaggccaagcatgaagnctttcctaactagatgattgagatgatgcatgcgtatgtgtgtcaccctatgatgtcacaaccaacaatcatctatcttaattatcagacaactcatctcatgagatgatgaatgctcaatgtttaacatattgatattacctattctcgtgccaatatggacaacctcaccggacatagcttcactaataagacaacgattcttactgaattcaatcttgaagccttagtcacatagttgactaatgctcaggaagttatgctttagtccatccacatagaacattctttatctgcgattttgactaatttccaatatttccttctcccattatctgtactttattggtgtcttctgtcacaacct

SEQ ID NO: 254179 - DNA, 363 bp, Glycine max
  unsure (1)..(363): unsure at all n locations
agctgcaacaggtgataataaattctgaactatagggacataacttgcatgacattatgacaaattactcaccaactttactccttctgagaaaaggaacggaagaagtctattgcatcgaacgcatgccaccatgcatgttcacgtaaattgcgtgattcgcaacaaataccttaaaggggattggtgcacaaataaggagnccattttgacattgaccaactactcttttatttagatatcaatagatattcattagatacgtcgctaatgctgaacatatgccacgaaggatcccggaccctgtgtgaaaaatagtcctctaaacccactaaacccccatctatgaaccaacaaaacaat

SEQ ID NO: 254180 - DNA, 466 bp, Glycine max
  unsure (1)..(466): unsure at all n locations
ctcaagctttgaaaccaacacgctccctctaattcatcgagtatctcattattggtnggaatcgggaatctgtccttgacggttatgtcgttcaaagcacctgctaccaccgtaaaatgccatgatccatcacgttttttgaccaataatacacgggatgagaatgggctactgcttggaattatgccactccggagcatgggttctatctaagttgtcatttcttatttctgaacataaagatatcgatagggccaaacattgatgggctcacagatgggtatcaagtgtatggcgggattggtggtgtggtatggtgggagggtcattggtgtgtggaatagggtcacgaattgtcggaatacatcggtatctctgggtattatgcttgtccaagtgggtggtgactcgccgacttatgatacgtattcgataaaaactacactgtcattctactaataaccac

SEQ ID NO: 254181 - DNA, 420 bp, Glycine max
agcatgccagcttctcagtgaggtgagctatcaatgatatgtgtgtgtgaccaacctctaacatctcaaggaagataactcaaagaagcttctcaaagaagatatctcaagaaagcatgttaaggaacctacctagactataaatagaagcatggtaacactcgttgtaacctccatgaacgagagctctgtgagacagacttttaagatccacttcgcttcctcttttattcctataatgtcgtgctccccctctctctttctctctatctttcttttcctccattgaagcatccttccaagcttttattccaacgctcatcttggaggtgaagctccttcttccatgtgtcattccctaggggatggcgcctcctctcaacccttctctttgacttccattgcatccatggggcaaat

SEQ ID NO: 254182 - DNA, 411 bp, Glycine max
  unsure (1)..(411): unsure at all n locations
tataagaacaanatcgcctcaatcatttccaaatatgcatgttaattatgaagcatcaacaagaatcaagccaaggctattgtgcaagcaatcaatggggctaaacacaccaaatgattatgatgatggatggctcaaattctcacaaaggtaaactcatcactttcaaattgagcctctcaaactatcatgacatgtagaggagaatcaaggagttcaagtcacaaattctcaagaacttttatattcaaaacaattacccgcttcttgaacatatcctataattcaaagaaaaacatgcaaagtcgtacatgcacacagaattgacccaaatattaaactataaattcgacgaaactaacaacattaacaaaataacacaactaacaaattatctaaaccaaccaaact

SEQ ID NO: 254183 - DNA, 455 bp, Glycine max
  unsure (1)..(455): unsure at all n locations
acgcttcatcaggtgctaagcccaatttcacttactcacgctaagcgcgagggtggcgctaagcgtatcgtcacgatttcagagcctatttaaagcttgtcttgtgtagaattaaggtaccacttttatgacagcttctacagacggtcagggcacagattttcagagcagccacgggcctatttagggaaaagagccctagaagcataaaagaggagcaacttatgcattgaagcctaggttttgtcatttgagagattattgagtagagagtgagtgtgagatgttgagaagaggaggaggaatcccccttcttatgtatggaactatcattctctgcttttaatctcatttattattagggtttctttgtaatggctggctaaacaccctagtngaggagttttaatgaacacttgatgtaaatacccaatatctaattgattattgttttt

SEQ ID NO: 254184 - DNA, 403 bp, Glycine max
  unsure (1)..(403): unsure at all n locations
tctatttgntccttggtcatcattatgaaggtgttcgtcattacaaagccactcacacattgcataaacactttatactttctcacttgtgatatacattattccttctctctaacacacacaatgcacacaaagaaatacacactctatggactctcaacatgagaaaacacataataatcaatccatcacttattctctttattttctcactcaacactctcatacattcattgtttcaactctctcaacaataggaccatgacaagaatttggcctactttcatacttatctaatgtgaatgatgattaaaaaattgaaagagacgatgcgaaaaaagtgattctttgagagtgtgagcgaggaaaacaaagcgctagtgattaattgattatttgtatg

SEQ ID NO: 254185 - DNA, 352 bp, Glycine max
attaaatcattataaacgcttgataaacataactattgtctctttttttgtcagcggtacaactcattattgtaacaatttatacatataacaggaaaaacacaaatatgtctatatcaatttaatttaatcttattgataaaatataccttggggtatctataattgtagtttttaatcaaggtcatactcttcgaatttttatttatagatcaactatgctttttctaagttcattaattatatataactctttcatatggggtactcttctataatcccatactatattgagaaagatattcaatccagttttaaaataaagtacaaaaaaaactccgttagcttttgt

SEQ ID NO: 254186 - DNA, 403 bp, Glycine max
tacaacaatatacttggccttcatttaactgtcgttgggctttggggtctctatcaacaaagtactttcgacatctactatatggtgacttcaccaacgctgttatcgtgttggtgcgacaatccttcaaaaccttatttatacaatctgacaggttggctgtcatgtggccatatcgacgctcttctctattataagccatcgtccatttgactcttatatgccatcaatcctagttgctatggttggactcaattaacgcgattttttaaattttgataataaaaatgacttgcaaagagtggaccctgatgaaattagtagcaaaaccatttaatatatttgaacttaaataacgtgactcttaatgaatgaatgttccaatttttacatttttttgttg

SEQ ID NO: 254187 - DNA, 453 bp, Glycine max
  unsure (1)..(453): unsure at all n locations
agcttctatttttgcttgattggctacaattctctgtgtnctaagttccttatacttgagaccttgaacctttgacattattttctccttctccactatgtagaaggaatgaaggagtcagccatttataaattatttccataaaaaaatattctagtttaatactaagtatataagaatacaataaatacatatatatttaagaaccaaaacatgaaaataaattactattcataaaaccatatattaacatttgagaggaaaatcatatacctcatcatctcgtttaagaaaggcaattttttcctaatggtaatagggatcctaactaactcacgctatcataacttgattagttgattcatgtaaaatttgaaaacaattgattcagcaggccaataaaacaaagtagagaaaatcattagtaatacaaattattcattaagcaacaac

SEQ ID NO: 254188 - DNA, 406 bp, Glycine max
  unsure (1)..(406): unsure at all n locations
ttgagcttcaaatactcccnctttgaatatgcactcatttcttacaagccanatgttccacacaatagctacccacaccaccattcacctttccttgtcntttgtgttttgtaagaagtgatcatgttggcttatatgtgcttccagtgaatttggtaagaccgattttatacccaaccaccaatagcaagctttccatactttcaccactccctgcatgtgaaaaaacaatgattcacggtctcttcacacctattacataaaacacacttgctatcctcttcatctacaatgacatttcttgcccgaagattgtctttagttggtaatttgttaagtagcaaccttcatactaaaaaaattagctgttggtcgacgcttaaaattcatacctttttcatcaact

SEQ ID NO: 254189 - DNA, 136 bp, Glycine max
tgagaccgaaaaacaacccaactactcggaaactagctaacttctaccaagacaaaagaggaaaacccaccaccagccggttcacccaggaccatgaaaacagtaagaggaccaagagttaagggagggctaaaaa

SEQ ID NO: 254190 - DNA, 465 bp, Glycine max
agctttgttcctacgcctataaatgcatttgggcactcattttatatcctttatgctgtccctatacatataaaacaggcccacaacccaaagctctcaaaaccatgctcatatctcgttgaggcatttcaccgagcacttggtgggcacatgtttaggcacgaatatcaagagaatggtgacaatgtggcatgcgccatcacttcagaatacaccctaggccaaggccatcccttacaacccctcaatccaacaaaaacaagcaacaatctgaggataaatccctcacgtttcttagcgaacacatgcaatttagagcaccaaaatacatcaatggaaagctagaaagcccaagaatgaagtacttacttgttggagacgaataatagagcaaaacggaatcaaaaacgcataaaatggtgacctaaggggctgaaaatccgtgagtcccgtgagccttccttt

SEQ ID NO: 254191 - DNA, 184 bp, Glycine max
aaacattgctaaaattatggcatgcccatgaagaatggacccaatttttgcaagccaatattctctacaacacaaaccatttatccttgtacaagatatcctagctctgtgcgtcactcaaaaagcacttcgaggaggtttgctccaccatagaatgggtccttagtgcaagagctctaacaaa

SEQ ID NO: 254192 - DNA, 325 bp, Glycine max
ctcgggcagcagccatttcccaaatcttgtacgactttctccggcgaccaatgatcagtgagaatagcagagagacccattagagaaacatcatttctttctattataagaattttaatgagcttgtcaaacatggagtataattcaattctatcaatgaatacaaatacaatccactgaccgaataaagaagaaagaacacaccttggagagtgttttctacagagcaacacatcgggtagaagtagtctttaacatagaaaatataaatagcaaaggttacagataaattcataccgccgagtccacgatcggttcccactac

SEQ ID NO: 254193 - DNA, 438 bp, Glycine max
  unsure (1)..(438): unsure at all n locations
agctntaaatatgttatgaattcgcgatatagtgcttaatgccaccctcgcccttagcacgcgtaagtggatttgagcttatcgctagtcgtgcgctgagtctggctgaagacaactgctgcgcttattgcactgatctcacgcttagcgcgcaaccttgatattgatgctctgccagaatcttctgtcaacactaagctcaactgtcacttttacaacttcatgacttatacctcttttttacctgaaattgcgcatatttcatcattaaatccaatggagatattttagagacaacctttaaccatataacaagatttatttacaatatcaaaacaaaatatccattaaatatgggaactatacaagttttggaagaatgtttctatacacaaggtatgtgtataagacgactgacaaactcccccaatttacagt

SEQ ID NO: 254194 - DNA, 300 bp, Glycine max
tctggagtaagaatgtgcactgtacagctatcatgacgtgtttgtttaggctcccattttgacgtaccatgctgatggacattctgaacaaccatcagaatagtcattatgatgctctctgagaataagaccatactcggtgaatacctttgatgaatagaacttctattcttaaggagcacaactttcttacttgtatacttcttctccggtccagccttctgatgtgattaccttctaaagactcatacgaacttattggtggctggaatggtttgccaaggcaactgagaacattct

SEQ ID NO: 254195 - DNA, 457 bp, Glycine max
  unsure (1)..(457): unsure at all n locations
agcntgtaagattatgggggacctatcacatgttgttctaggtggcggtctggcgatggtgcacaacaagttttccacatccacaatgcgcgcataaacccaccatcccctgtggcccacctacaactgagctcacgtactcccacgtagcccataaccttcttttctctcaacaccgtgtccccatctatcctcccaagcctttccaacatcaaagcaaaacaacattcaaacagcacatgctattacagccaagcaaaacagagcaaaggcagaaaactctgccaaaacaccaaccaaatcacagctgttctcacttaaagaccccatgaacaattttcttcgatccaatacgttaaccgttggatcgactccaaaatcttactggaagtctatattgcataagcctacattttgaccgttgggatctactagcaaaaatccagaactcattcta

SEQ ID NO: 254196 - DNA, 447 bp, Glycine max
  unsure (1)..(447): unsure at all n locations
tctnggccatcctcattccagcgatcagcttggtttttgcgttatagcttgaacaaccgctcacaaatggcggtgaattgcgatatgaatctggcaatataattcaagcgtcccaagaaacctcagacttgactctatgtacagggttctggcatctcaaggatagccttcaccttttctggggctacctctatccctctctggcttacaatgaaaccaagtaattaccctgatttgaccccacaggcacacttagcgggggtaaccttaatgatatttattaacctttcgaacaacttcgaggtagacaggtgtcttcctggattagattaacaatatgtagccacgtaacctgatctctgatgcatctatcaggaacaagctccatgcccgtgataattgccccgcattttgagtcaatgacattacctgatcaaacgtcctcac

SEQ ID NO: 254197 - DNA, 417 bp, Glycine max
  unsure (1)..(417): unsure at all n locations
agctntatcttgaggggatgtcctattcattgtttttacaagctggccgttcaacttctaacccatcctacatttggtaacccaacttgggtgcctttcatcaagttactattaatgttgagaacattcacttgtgttcttgattcgagggccccaatcaagtgatcgtcacgcattggtcaaaagcctggaaacaaatataatggttcattctccttataatcattctactaatttagatgtcaaaagaatattgtatgttccaaccatttctaatcatctttcaagtgtaagtcaatttataagggagaattcaatttcccttgtatttcacactaatgtgtgccttgttaaatctcaccgacccaaagagattcttcctaaagcagacgtcggatccaatggattgtaccatta

SEQ ID NO: 254198 - DNA, 453 bp, Glycine max
  unsure (1)..(453): unsure at all n locations
cctnggacctctcatgtgctccaatgatattggattcaacatccttaactctttattaaacttntgaatggagcacaggtantnannantactagtattgcttatttctttggccacaaggatgttcnncccattatttgaaacaaccagtacgctctttttatgcatgttaaccaaggcactgaaaccttcaactgggtgcatgtnaaaantcacaatgccttcctttgaatagcatttaaccttaatcaacctcttgttctcctccactggtgtcccaaaccagcttgaacagattggcaagcacatcaagtttgctaaatttatgacgtgtttacgcttttttgtttgacaaatgttaatatgtaatatagctacgtttttgttaacacgggagatcaaacctgtgacctttcctttcttctttacatctaaccatccacccccctatat

SEQ ID NO: 254199 - DNA, 448 bp, Glycine max
  unsure (1)..(448): unsure at all n locations
atccttaagtcacctgcggctgcaagcttgtcagtgtatcaaagtttgacttctttgttggccttttatgatggagggtggctacttgctagcttttctcactatggattcgngacctgctaagggttttcctagcttcctcagttatgagtgtatgccatggaaaatntactatactagtacttggtttccacaacgacaataacgaactttgaggattactgctcactcaaacagtgggtgcgtgtctttaattactatagttccgggacaaaagatgcactactcattctgaaggggtagcagggtcccacagttctcaatgaaatctcatctctataattatctccctcccagcaagcttaggtacaataatctgtggtacaagaagacaatgagaagtggaatggtctgctcccatgagatgacctcaacatgtntatgtatt

SEQ ID NO: 254200 - DNA, 384 bp, Glycine max
tcaagaataactaaatcacaatgaaccaacaacggttgacattagtgatagcaatatgtatcccttacacaagttgtccaacgctcgaatcctgattgagtattgggtatgaaataaattgtgttggaagagaaatatttaccttgtatgcacttaaagtccccgataaagattagtcacctctttcaactaggattacttcgtaccaatactatagttagcaaataaaactaaatcaaaacatggatgtcatgtgttactattttcaaagcttgcctggttcaatccaaaattcatcgtgaccatatctttttacaaaaacaaaaggtatgaagtgctgcacatgaatgttcttatatcttctatgacaagagaattatggat

SEQ ID NO: 254201 - DNA, 347 bp, Glycine max
  unsure (1)..(347): unsure at all n locations
agtttgagtttgttaaatgtgaagaagatccatgttgttacaaaaaggtcactgggagtgcaattattttcttagtggtatatgtagatgacatattactaattggaaatgacatactaacattgccaggcccgaagatttggctatcagaacaattctccatgaaggatttgggaggagcagtctatattctatgtataaagatctatagatatagatctaaaatgttgcttggactttcccaatctatgtacattgatactatcttatagagatataacatggataatctccaatgaggctatttgcctataggttttggagttactcttantagggagaattgt

SEQ ID NO: 254202 - DNA, 381 bp, Glycine max
tgtcaaaagggaagcacgttaaaaatcctttcatatcaaatacgccgtttctacttcaaaacccctcgtactatttcacattgatttatttggtccctctagaactatgagtttaggtggaaattactatggtttagtaatagtagatgattactcaaggttcacctggactttgtttttgaaaacccaaaatgaagcttttaatgcttttcacaaacttgccaaggtgattcaaaatgaaaaaggtctcaacattgtttcaattagaagtgatcaccgaggtgaatttcaaaatgagccttttgaacacctttgtgaagaatattggagtcaccacaatctttctgtctctaaaacacctacgcagaatggtgtggtgga

SEQ ID NO: 254203 - DNA, 433 bp, Glycine max
agctatataatatgaattataaacattctatatctgctggagaccgaatatcatatatgtgttatcgattacacagtacaaaatttgaattcaaatataatagctgttgtaaatcgattttggccactggtaatctattacatcctttggtaatcgattaccaaaaagtaaatctgttgaaaaaacctttttaacttataattcttggccaaaccttctgcgaattcaattggaagtcccttcctatttaatatacccttcctaagactctagagactgtcttgatcattcatcttgaataatcttgccttgaataaatcttagagaagcatgtgaattatgtaatcctttggactatcaaaacattcagactgatcccttgtctacaatctcccccttttgatgataacatacctgaaataagaaggcttat

SEQ ID NO: 254204 - DNA, 461 bp, Glycine max
  unsure (1)..(461): unsure at all n locations
ntgaatgaggctgaagaagatgctgctcatgttcaagaaggtccgttggagattaatttatctcaacctaatttgtcacaagatagtgacatggagttcatggtaaatattttgatctcctactttgtcacaagaaagtatttttatctcaacctaatttcttgtagcactccatttttatatattacaagtgttattcatgtttggcatttgcatgtaggtccctgcatctgttgttgatgttccaccagtagcaaggaataagctaaacataacaagacccacacaaaagaacatttcagacacaccaacaacaccattacttttcatgccaacaccgaggctcactagaaggaaggctactaataaagatccagtataaaaatggtaaaaagtgaagaaccatttttttgtttattttgtattacgatgcgtagtgggaatgactaaatttattttgt

SEQ ID NO: 254205 - DNA, 414 bp, Glycine max
cttttatgcctgtcaggccctagctaggggattagccactcatgaccattgagggcttacaatcggggatgaatgaaaaaacggggatattaaaacaaagaatatatagagaagagagctcacgcttatagtgctgggaatagtgctctgagacaagatgatgtttccttgggactgcctctctatttatagttgctgaagttggcttatgggccttcgtaatcgcgctcagcgccacacctcgcacttagcgcattcagatcgcgcgctgggcacgccatgcaagcttatcatgtgcttctgttggatcgcgctgggcgcctaactggacttaacgcgcgtagcggtttctgctccttcgtgcttaacgtcacgcttagcatctgcaggtatgtgttctcttagcgcctgatg

SEQ ID NO: 254206 - DNA, 426 bp, Glycine max
actaagctataccctgcccagattgataagcttctttctcatgagcagcctcatcacctatctccatatactctgcagacattctcaacggaacaaaaattctaatgaagaggcaaatcaaacttgtgctgataacattgacaaagataacaaagataatcccaaggatgtggaccctcatttgcctgaaaccggtactgaccttcttcgaacctaaaccataaaagaaaccaacgtatcgaccatcagttccatagaacaatttgttaagtcttggatcagcaaagaaaccagtgaggagtccttctaaggttcctgcaatggcatgagtgtggaacactgccattgtatcatcaaccttctgcagcagcgttgatcttttattgaccaccatcatggtgaaccatggaattgagccagaaacac

SEQ ID NO: 254207 - DNA, 433 bp, Glycine max
agcttgccttgtcccttgatatatttgagggactcatggtcactatgaatgacaaattccttgggataaaggtagtgttgccatgttttcaaagcccgtactaaggcatacaactccttatcataagttgaatagttaagggtaggaccacttaacttttcactaaaataagcaattggatggcctttttgcatcaacacatccccaatccgaacatttgaagcatcacactcaatttcaaaagatttttgaaagtttggcaacgcaagtatgggggcattagttagctcttgcttaagaacattgaaagcttcttcttgtgtctctccccatttgaaaccaacattcttcttgagcactctattgagaggagctgccaatgtgataaaatccttcacaaaacgtctataaaaacttgttaagccatgaaaac

SEQ ID NO: 254208 - DNA, 320 bp, Glycine max
gttggacatccgagtcatgagctatggtggttaatattaaccatgtgcatctatgatgcacctgtagcaggcctatgtatgaatcaggtggatctggcatctgagtgagaagttatgtgatacgagttagccgagaactattttgatcagtctgaagcggccagacgtattataggcctgggtcggacatatgagtcatgagctaccgtaggttaaattgtgcatgtgcgtccatgatgcctcttgagcagaccatgtatgatgcaccttgctcggtcatatgagtgagaggttatgccgtatgatattgctgagagctt

SEQ ID NO: 254209 - DNA, 398 bp, Glycine max
agcttctaaactttatacaagaatgatgctctgtatccacttgttacacacagtgacctcagatattctaagaaggggggttgaaataagatatcccaaactacttccccaattaaaaatctatttcactatttattcaagctataaattcccttagtaatcaacttcttaaatattgattcaaataaaacaattcgaatatgaatataaacgcctaattaccaaaggagattatgggaagaaaaagtgcacactcatatttatactggttcggccacacccttgtgcctacgtccagtccccaagcaacccgcttgagagtttcactatcttgtaaattccttctacaagttctaaacacacaaagacacatcctcctttgtgttagaattccttac

SEQ ID NO: 254210 - DNA, 390 bp, Glycine max
  unsure (1)..(390): unsure at all n locations
gacctatananactcaagcttgggtactgctgcatactactaatatatggagcggcgcactgctttgttctgaaataacaaatgcgtgaccacaactgttggaacaagtggcctcaccaaacactaaaaggaggggttgaattaaatattgctaaacccttactaatcaaaaaaccactcttctaaagctttcacttatgtcagtaacagaataaggagtggaagagaaacttaaccaaaagtaacaacggacattaaaatgcacagcggagagctacacagataggcaaagagagaccaacacccaagagttcttatattggttcagcaacaacccgtgcctacatacagtccccaagcaacttgcggaccttgagaatncttcaaccc

SEQ ID NO: 254211 - DNA, 411 bp, Glycine max
  unsure (1)..(411): unsure at all n locations
acagacactcatgtttagaaagatattggcgcggaccacggaggcacttntatgacaaaggaagtcagtgtggatgtgcatgatgagctgacaggtatgcagaacaagcgtgatgaagattacaatgaagagaaacaactttcttcaagctcaaagccagtgggagatacagctgtaccaaagcacaaaactaacgaacaagaaccacatggttttcaggctaatcaagcaaaacccaatgcaacaactaggtggattccttctaataagggtttttatcaagattcaatgcacgtctcatatccaccatcaagaaataataattcaccagctaacctttcaaaagttacctcagcaaaggagaagattactgatgccacaggaaaatctatttctggttttatggctctg

SEQ ID NO: 254212 - DNA, 425 bp, Glycine max
  unsure (1)..(425): unsure at all n locations
cctagtgtggctgaacatcattagagaatgattngactttgcttacttctacatgagtctgatagtagaataaatctcacgctagtatctgctcacaacaggacttttaagtgataggtcatttaatattatggttatacactcttcttataagcatacaactatttaaaacatgggttattgcaagctatgttgatgcaattctattgttcttggtgttaatctttcttacactttttccttttgtgagctctcatttgacaattctagtattgctgggcttcttaaaaaaatgtgatattattttttttacatcaattttattctagttctgctgggcttattattattattattatcattattattggctcttatgctgaaagacgttgtggaatcggtcatttttatctgcaatgttcttg

SEQ ID NO: 254213 - DNA, 243 bp, Glycine max
agcttcatgcttaactatgtatggcaaaactttattactgtttaagacatacaagtgagctcgtaacaaatcttctacacttggagtgatcacctgcagtcctcttgaacccttaccacccactctgtcatcatgctgagactcaggaagcccaacagctttagccttctctaagtgtgtgactctgtgagtgtgtgtgagtgtgtgtgtgagtgtgtgtgtgtgagagcgtgtgtgtgcgcg

SEQ ID NO: 254214 - DNA, 464 bp, Glycine max
cgttaatttattagcttgagctcgattatatagatgaatctttcttatatatatcatctctatgtgcaaacattcctttattctcttttgttcttatttttatcttatcctctaacatgaaaatatatattaaatacttaattaatgtgcttaaaattattaaaagaaaaacacttccctgctcaagttatgaatgagataaataagccaatcttaagctttatatttttctaacaagtcaaactcaagatttaaagttggctgatttaaatgagtcaaacttgagtaccatattattttggtcagcaaaacttgaacttaaagtatttgactcagtttgactcattcacacccctagtcacaatgtacaaaaatatcaatttccctgagtgatatccagtaactgaaattgtctcgtgattaacaatatgtaactaccaaattaatatttacttaaaagtcta

SEQ ID NO: 254215 - DNA, 446 bp, Glycine max
  unsure (1)..(446): unsure at all n locations
tcagcttgaagatgatgctttaatggaggaanataaatagggagagaaagagagaggggggagcacgaaattgaaggaagacaaaacggagagaagttgaacttttatttgtgtctcacaagactctcattcatcaaagttacaacaagtgttacacatgtttctatttatagactagtgtagcttcttgagaagctttcatgagaaaacttccttgagaagcttctttgagaaaacttccttgaaaagctagagcttatctacacacacccctcaaataactaagttcacctccttgagaagcttccttgaaaagattcctaaagaagctagagcttagctacacacacctctctaatagctaagctcatcttcttgagatgagaagctggaacttaactacacaccctctataatagctaagctcacccccatgacaaaataca

SEQ ID NO: 254216 - DNA, 463 bp, Glycine max
  unsure (1)..(463): unsure at all n locations
cgcatgcnaagcttcttatatatatatatatatatatatatatatatatatatatatatatcaaatgttaattagtatccttagagtattaattaaggaactaaaggagaaagttcttgttaaaaaatatacaaaattatgttatttatgacttttttttactcttactatttctattataaatattttttcatttagtgtcctaaggttagcaagaccatatatatatatatatatatatatatatatatatatattcctttggcggatcaaaataaataaaaaatattttgagccttgcggacgagattctatagagtaatttgaagataaagatcattgtaaacagttgtagtatttgttgctagagaaatgattatntggactcaccatgctcactagagcagactttggtttaactttcttagacagcttcaataaaattcatttttcattataaatt

SEQ ID NO: 254217 - DNA, 469 bp, Glycine max
  unsure (1)..(469): unsure at all n locations
ctcaagctttctctagtttattatcataagaccgcaccagagagctttcttggtgaccccttcnaacttctctaaaccctgcctaagatggtttgtccataagtcgacttataatctatagaattaaagataatttttctaattacaatcttagaatttaaataaaaaatagaaaacctacagcaatatctttctatcaaatataaacttaccataattgactatagaatttacaaatcatatttgataaaaatcgtctctcttccgaacatgatgatatattgttactcaataaaactaattttaaattcatgattgatttggtgaaaaaaatcttaaaacttaaaagaaagtcacattttatccctaattataccatgcaataatgtataaaattccaatgagatttacatcaattatactataggattatttaattctgatggacgcctatctaattatttactta

SEQ ID NO: 254218 - DNA, 449 bp, Glycine max
  unsure (1)..(449): unsure at all n locations
agcttgttcttgatntatcctcagttctttaacaagctctgaacaatatacttggtcttcatataactgtctttgggcttggcggccacgctcaacaaagtactttctacacctactgtacgttgatttcaccaatgttgttatgggaatgatgcgacaatcctctataaccttattgatacattctgagaggttcgttgtcatgtggccatatcgacgtccttctctatcgtaagccatcgtccatttttcctttgagatgcgaacaatccatgttgctatggctggactcagttcacgaaatttttctaaatcttgatcaaaaatgtgcttgcatggagtgtaggctgcataaaattagctatgaataaaaatgttatgtataaatgaaagtaaaataaacgtgaccatcaaatatgaaatcttacccaatttcttcaacatttctt

SEQ ID NO: 254219 - DNA, 453 bp, Glycine max
  unsure (1)..(453): unsure at all n locations
aaacaagcccctcgtcagtgtgtccttaagtctcatgggataatctcttcatttgtgtttgatgaaaaccccatggatcaatgcatataccacaaggttagtgggagtaaaatatgttttcttgttttatatgtaaatgatattttacttgcagccaatgatcggggtttgctacatgaggtgaaacaatttctctntaagaattttgacatgaaggatatgggtgatgcatcttatgtcattagcattaagattcatagagatagacctcgaggtattttaggtctatcacaggtatctatattaacaaaactttagagagattctagatgaaagattgttcaccaagtggcgctcacattgtgaaaggtgatagtgttaatttgaaccaatgcccaaagaatgactctgagaggtacaaatgaanaacattcttatgcttaattgttggaa

SEQ ID NO: 254220 - DNA, 335 bp, Glycine max
tgcaagcctgagcttggttcaaccctttttccaattattggtacttctgaacaccaatacttaaactacatcttataggagtgaatgactcgggcactctttaatcctatgcaccgataatgttattatgaaattgagatgccccaacaaacacctttttcctattaaccatgcattaagcaccaggttaaattattttgtttttatgtgaaacgggtttatgatcacaacatggttggttcctaacacatgaaactaataatgtagggtgaagtttcacgcttcccccttctttggttatcgtttgtagaggaaaacacgtagatgagcaaaca

SEQ ID NO: 254221 - DNA, 342 bp, Glycine max
  unsure (1)..(342): unsure at all n locations
tgctcgctaagccactcagccctgctggctgaataagccttggctaagcgagcttgcccgctaagcccaaggcacatatgattntatgtatattttgtcatgcgctaagcacaatatactctctatttctgtaattgttggaattgggcttagcaagccttctcgctaagccatttatgtccagtagtgttgtcgtgctaagcgcgtctggccgcgctatgcgcaatttggtttctattgcggaattgggcttatcgcgcctgctcgctaagctgattctgcaaaaaattctgatctgtgtcaactcgctaagcacgtggctgtcgtgctacgcgcttgagt

SEQ ID NO: 254222 - DNA, 408 bp, Glycine max
  unsure (1)..(408): unsure at all n locations
agcttcaaagtaagtcgatatccttctttggctggctctgcacaacccacaacatttggactaagaccctctaccatttcaatggtgtaagaagaaagttcatgttgtatgactccattggataaaggtggcattgatattgacaagtaagcctacttgnggattaaaggcttgagactgtaaacatagcacaaatagccaaatcttactgagaatgtttgttaaaactncaatttgaaatccttaacaaatctaaagatttgcacacaaccaagataatacattgagaagcacctccaactgtgtacattctctcttttaatgacattctctcttttatgcaatcctggttactattgaaaattttgttgaaatgaaagaaaagagtttacctgaaatggactccct

SEQ ID NO: 254223 - DNA, 338 bp, Glycine max
  unsure (1)..(338): unsure at all n locations
nttagatggtccaattagtaaaaatatgctntctagcgtgtgttagtgcatcatatcccgcaccgtgcgtaagcaactttttcaccatcaacgcttgatttgatgcaatcaacgttatgttagcacaccanattaaagatttattttagtcttatttgtgtaacctttatttatattatgtacgaaatacttataatggtgtaatatactttaaatgacttcaaaagtaagatctgaattgtttttacatgtttaacatcatgcatttttttacttttgttctcttaatttatagtagnggacctaagctcgatatctattttatagtctttgaatac

SEQ ID NO: 254224 - DNA, 448 bp, Glycine max
agctttaatattgtcggacgccttatattgtttttgcaactctggatcatttgatacttcttagagtttattactcttactattgaagctatcgaggtagcttgcaagtacttctccatccctattttgggtaacttttttcgcttgagtcctacgtagtccattctaatcctaaattttaatggtttattttaatccctcctaaatctaacatattcatttcgggtactataaaaacaatttacttaattataaaaaattaaaaataaacactatgaaaaattgagaataaaataaaactgtagatttttttaaatgtgagactaatatcgtgaacaacaattaagaaggcaaaaatctcgtgtataataattaaaaggactaaaattataatttaacatttattggtaagggtattaacaatatctttttattaaattgtcttttc

SEQ ID NO: 254225 - DNA, 424 bp, Glycine max
  unsure (1)..(424): unsure at all n locations
tggactgaccttatgcttcgagtagattagggaagttaaattcttgctgagaaaatcactccaagtccaaaaaacttgggtattctcacattcttcactgcgtatatcatcttgaagncgntcttcttattcttgtctatgaaccatgtatcaagcatgttgagagcagactgagagcactctccttgctttctcttggaggacttggccttcttatgagctttggaggggttgctagccatcttcagaagagaaacagagggtttagcggtagaagaaagttagggtttcaaaaatacgtgattataacaggtgttggtgtgagtgagaagaggttaaggttgtcttttatagagagataatgacattccgcgtggctgaggtangtggcgagagaacatagtggagtattcgacgtttgatg

SEQ ID NO: 254226 - DNA, 408 bp, Glycine max
  unsure (1)..(408): unsure at all n locations
ctgcatgcaagcttcagcggatgacgccgatcgaacatttcctaaccgacgtcatgcaaatttcgttcacggattgaattgaaaactcgttaggcgacatctgtcgtgaagtagcgaccgatatttttcagccgacattgcacacttctttttagaaaagctcgctggtcgatgatggtctttttaccgcagagtaagttttcttgatttggtgttgcataaacaagtaacaatgtacttncgctaggtttttcgtgcgagttcaaccgacattntagttcggccaggaaaacattagcccacctctgcaaaaaaaatatttgctaaccgtcttcatgcatatttcattcaacgattgaatagaaaactcaatagccgacgacggtcgtgaaataatcccgactgata

SEQ ID NO: 254227 - DNA, 227 bp, Glycine max
cctcgatcgggcatctttgcaggccgaggtcgagcgtcatgttattcgatacatttcggtgaatgatacttacatgccgagaagggctaatgttttcctggcctaataaatgggaaagatgccacattctgccgaaacgaaaagtctgttgggctcgcacaaaaaaacctagcccacctacattttaaatcttttatgcaacacctaaacaagaaaactttctgtgc

SEQ ID NO: 254228 - DNA, 479 bp, Glycine max
  unsure (1)..(479): unsure at all n locations
agctntgagaagataaaatntcctaataatgaggtagttatttaaaaattntaattgagggagaaattgttggagaataattcatatttcaaaataattgagatggtgaaaattcaaggagattnttttttaggaatttgatatgttttaaatctttaaaattttatctagatttttgtttttatttattttagggatttgtttctttctttaaaagactaggatatgtnnaatattaaatnttgtattgctatttagttctatatttaaatataaagccaaaaaaataaaaattatacgatatgttccatctaagatctcttgngatgtatgggtaatttgttgtgtgtagagaagttttcccaaccgtgataaanataggtaaaacaatgatgaattaaattgttggggttcacttcaccaaacaataccctatacaaaggtcacatatttagtttaaggttcaattatgttaaaat

SEQ ID NO: 254229 - DNA, 382 bp, Glycine max
tataaaactaagctcggaaacacatgttgaaaagagctaaacaggttaaagtcagttaatgctatcgaaacgaatgtttgaaagatatttcgctaaagatgcatggtgtcgtaagcattctcaactctcaagtcactcaataaataataaacctcaggttaaagcggatcttggcagcaacgtcgcccaagaatctaagggaggcgtctcgaatcaaatcagcggcatcgacctcaagcatattgacgcgatcaacggcgatgagttgtcgggtgctgtaaggctgttggaagaagtccaaaatggtggcttttcccaatgggatgccgcggtacatgaaagtgaagctggactggccgaacttgatcccaaccttgttggg

SEQ ID NO: 254230 - DNA, 486 bp, Glycine max
  unsure (1)..(486): unsure at all n locations
agctnggcttggacctattgatatgatcctacatatgagttataatttttttacgggtcatctttgagttggttatcatattaaaggaattaaagaaagaaataaaagcacatggaagttagctcaaagataaagattttatatagcaatggcacaagaattagaaaatatggaagtaaagaaataagaacaaaaaatgaaaaaaaaatggcagagaccncaaactttaaagagagtgataagtccaatgaagatttggcacaaagctatggaaacctttgataagaaccaagaaagcttcatctaagaacccacaagaggcacaacttttaaacttacaaaaggagtgaaattctaatcttattcaaatatgcccaaatgcaataaagtacaaggctatttataggcaataattagtgcccncacttaataaggctgatggctaaacctaactctaaagaagcanaaacaaagacctaagtaagc

SEQ ID NO: 254231 - DNA, 471 bp, Glycine max
  unsure (1)..(471): unsure at all n locations
ntgaatggcaagggatttatacgaagtacagacaactccatgtgctntttgacctttgtgaaagtgaccttccaggggatattccacggaggccttctagtctcttctatattgtacttttcttgaattcaaatgttagttattcaaacgtaatagagacaaatggaatttgaataaaacagtacatgtgcactttccttttctgtgatacccagtccttgagagactagacacatgaatntatcgtatgacagtgtgttatattgttatgaacaagactagatgcttactaaataaagagagctgaacactagattaaaatagagcatactctatctagttgtgggcgatattcctttaacataataatcttgtccacttgtcaaaaacacaatagaatatcaataatttatacttatgttatacatcanaatctacggtggatgagacacatgatcgttcatacctaac

SEQ ID NO: 254232 - DNA, 387 bp, Glycine max
  unsure (1)..(387): unsure at all n locations
atgactcgcgtagaacatggctatggcacagtcagtgatgtaagcttgcttgtggggcttctatggaggctggatcatatatcttcaaagaggaccttcaatggtgattcttcaccatggagacgcatcggaaggcaaaggataataggagaggggaggcaccatccactatggaataagccaaggaagaaggagcttcaccaccaagaattccttggataagaagcttgaagaggatgctntaatggaggaaaagaaagagagaaggggggggcacgaaattgaaggaataaaagagggagagaagtggaactttgaagtgtgtctcataagactctcattcatcaaagttacaacaagtgttacacatgcttctatttatagact

SEQ ID NO: 254233 - DNA, 409 bp, Glycine max
tctggatttctggggaagtgtcctgggtgatacttgttagtttacaattgggctggttttgtactcacatttgggtgaataagattctaaaaaaggcatgaaagcagcaattgtggtcacaatctttgtttttttaattatttttttattctgatgaacctgtcagaaatttatgtgagtttgcgcaaataagcaagtcatgaagtggcaaaataacttaataactctcaacgattgtggtattgcgtgctgcttatttgaaacttgaacctacatgttgttcgaagccaattattatgcaattatgcatttccagagttgagggactaaatggttcctttgttataattttggtcacgtgttctcttgagtaagggatagaatggtggccgattacactgttactcat

SEQ ID NO: 254234 - DNA, 459 bp, Glycine max
  unsure (1)..(459): unsure at all n locations
agcttatgtgcactggttctaatgcaagcaggtcagcacttgaatctgctacnaattgaactcttctccgaatttccaccgtgatagcatgaccataatccccactgttagaaacaaaatatcaagaaatgtgacactaaaaaatatataatatctatcagtgctgagaacagcagcaaaactttatcaaaccccaacctttcatatcaatattggtcctanaaaagacccaaaatcaatcacttaattctttgcacctcatccttaggcaacttgaatctctcaggtaaaagtcatacatacctgagttatgaattcaatggttntaatgcatcttttttaaacttatttataaattntagctcctgcatgaatccatattatagcaattaaacctgcaggatgacctgtgattattcatgaatggaaatgtcctaagacacagattacaacagaaat

SEQ ID NO: 254235 - DNA, 427 bp, Glycine max
  unsure (1)..(427): unsure at all n locations
tgttggttttcgaaactcganttgttgcaaggatatcaccaaattcgtatgcattcctcaaacattgctacaacggcctttcgcactcaccacgaccactgagtttaaggttatgcccttcgggctatgcaatgctcattccacctttcaggcaacgatgaacatgcttttccagccattcctctgacgatttctaattgtcatctttgatgacattttaatttatagcatcacctttaatgatcatgttcttcatctgcaacaagcttttcacgttttgttggacaatcaatgcatcttgaagttgtccaaatgtacttttgctcagccacaggtggaataccttggccatgtggtctcccaacgaggggtggagccagtcacttccaaggtggatgctgtgcgccagtggcccactccgcactct

SEQ ID NO: 254236 - DNA, 492 bp, Glycine max
  unsure (1)..(492): unsure at all n locations
agtcacctcgcggcatgcaagctttaataatgaaatcatgtttaaaattaataatatttataaccattgattataattaaaattatattatcattttcacgttcattctcaaattgattgtttcatttttttatataaactgtaccttaaagggttgtaaatatccacccaatttttttttagtgtgctttctatcttctttttcttcttttcattggtataatatgaatnctttcattcttttattttaattttaatgtatgacaaagtatacttgaatgtgttattgatcatcaaaattgacaatttgactcttttagatcggtaaggtataaggtggatctatattcataattgataaaaaaataatatatttaaatttttatttttagtgttatttatatttatatttttattntaggtttaactatttctttgaatgaattttatgagaatgaataaacatttgaatcaacatgatgttcttattat

SEQ ID NO: 254237 - DNA, 449 bp, Glycine max
  unsure (1)..(449): unsure at all n locations
atgactntcctagtgactattntattcactctggttggtacattaggattaaattgcatcaacaagtctctatgatatggatcaaatgagtcagcaaaggcatggctattctcattccgaaagtatccatttcagaggcagcaacatctctccgcctaatgtatgcacactcgtgacagcctcagggcacggaactaatctagattcccattatttactagatgcttatgacaatggtatgatgtatggaatgacacaatacaatggagttcaacatcaacataatcttgatatgggtgttccagctgctgccaacatatattattctagcatgaatccttcatctggtacagctgcatctctaaatgctgaagttaggagaggaaattatcaatatntcaatgcctcngctagttctacaagtgctccccctaacgcaagacacactg

SEQ ID NO: 254238 - DNA, 465 bp, Glycine max
  unsure (1)..(465): unsure at all n locations
agctatgagccaaaatcttgactcaccatanaccttgacccatggtgagaatgtcaatccttaccctcagaagcaaaaaaagaagagaaggaaaatttccaatcaaaggaaaaaggagaaggaaaatttccaatcaaagaggaagcaaaaaaaggaaagaaggaaaatttccaatcaaaggaaaaagagaggaaaggaaattcccaatcaaagagtgtgagaaagcataaagaagagaaagaaaattcccaatcaaagaatgggagaaagaaaaaaagagaaggagaagaaggaaagaaagctcatgatcaaggatcgaaagaaaacaaaagatatgtgcagagaggtctttggaccacacaatatctgaacaatacggaattgtcaccaaatgaacaaaagaaagaaaaggaaaccataacctaaaagtggtcttcttcctttgattaccaaccaaaatcctgt

SEQ ID NO: 254239 - DNA, 196 bp, Glycine max
cgagatgaggaagtgttgaacggtgaaacttcctgcttttattgttgaccacagagtggtacctggagatatgtcgtgggggtcaggagaccttggggacgtcaggtggggtgctattgcccaaaaccaagcttgaccaatcccgacccaacccgggcatagtcggtcagtgagaaccttgtgatgtacctaaaca

SEQ ID NO: 254240 - DNA, 473 bp, Glycine max
  unsure (1)..(473): unsure at all n locations
agctntattatgccctctcctctcggcggggatttcttcttcggcgaaggcgagatagttgttggcagtgatattattgaccagccctctgaaaccttctaccaagatgtcttgggccacgtgggcctcgttcagaacttttactagcagagcccgatgaggctcggagctcatgagtaactccaacagcgagaccctggccggggttttgttgagctattcgataaccttgaattcgctctgctgaattatacggaggaactcgctagcttcctctagcgacacctcctttttaccatcctttttctgcggaagacctttcgccggaatatctttattcgaagcgaggggtgcttcgtcatcttgttcctccaccacttttgctttccccttgacgttcacgggttggactggtaggtgcggaggcgcaaacacacgaccgctacgggtcacaccactcaatcccgtgatat

SEQ ID NO: 254241 - DNA, 455 bp, Glycine max
  unsure (1)..(455): unsure at all n locations
ggccgccacggagttttctgactatgctcttgtgtggtggaacaagctacaaaaggagagagcaagaaatgaagagccaatggttgatacatggacggagatgtaaaagatcatgaagaagcggtatgtgccggctagttactcaagggacttgaaattcaagctccaaaaactaacccaaggcaacaagggggttgaggagtatttcaaggaaatggatgtgctcatgattcaagcaaatattgaagaagatgaggaggtaactatggctcaatttcttaatggtttgactaatgatatccgtgatattgttgagctgtacgagtttgttgaaatggatgatttgcttcacaaagcaatccaagtagagcaacaattaaaaaggaaaggagtggctaagaggagttntaccaactttggttcttctagttggaaagacaaacgtaagaaagatg

SEQ ID NO: 254242 - DNA, 457 bp, Glycine max
  unsure (1)..(457): unsure at all n locations
gacatctcgatgacatgttatgtccatcttaagtaatcgggagctatcgtcgattatttgctagcctctcaacatattatgctgcccaatgctgactcggngttacaaagcataatcatgcacacttatcgggaggaaactacgacctatactcagcgattcgttcttttagaatcctggagactacatgagggagaggagtgatgaccactctagaaccataagactcgtcgttagactacttgaacacgctgtatttgtgatgcggctaaacttaacctccccatgaataagagttaccaacgcaaagttatgactaatatcaagtgtagaacatgatattggatagatgtgatatgctgcatagacttacacgaagagtgtgataccgtttgatttactagaaggtgctaaatggatctctgagataacgcatngtatgagcctagtcctcccn

SEQ ID NO: 254243 - DNA, 430 bp, Glycine max
  unsure (1)..(430): unsure at all n locations
agcttcagccaccataatctgatcatccgcaaagaataagtgtgagacattaacccaccgagaatggatgcgagttaccattctgaactgaatcttggatgagatgtgccaatctctgaatacacaacacaaatatatagggagagaacgggtccccctatcttctcccacacatgggggtgaaagaatcaaagggaataccattccaattaatcgccataaatgtggaagacatatgaacatgaatggcattagccatccaaggcggaataccaaccttgctgagggtatcaagagtaaaatcccattccaccttatcatacgccttttgaaggtccaaattcaacaccatgtaaccctccttaccacgcaaattctcaaaattaatgaagcatgacaaanaggttaatggagtatttttttttcaact

SEQ ID NO: 254244 - DNA, 480 bp, Glycine max
  unsure (1)..(480): unsure at all n locations
gtcacctgcggcatgcaagcttgtgcgaatcanatcactcctgcatttcatctctagcatgcantttttctttctttacccactcctcacgtttggttttttagggaaaaacaccataactaaacgcgccacaaggcatccctatcgcaccagatccaaatctaaaacgatgggtgatcaagaggagacacaggaacagatgaaagccgacatgtcggctctgaaagaacagatggctttcatgatggaggccatgttaggaatgaggcagctcattgagaaaaacatggccaccgctgccgctgtcagttcggctgccgaagcagacccaactctcttggctaccgcacgccatcctccctcaaacatagtagggcggggaaggaacacgctagggcatgacggcaaccctcatctgggatacaaccgagcggcttacccttatgggattgccgccaactactcaccacctggtctaca

SEQ ID NO: 254245 - DNA, 269 bp, Glycine max
  unsure (1)..(269): unsure at all n locations
ctgaaagatgtggcattgtcttgtgagcaacatgacacttatatttctgatntcaatggcacccatgtagcacatcatgggcgctctcgatattcaaaagatcctatcacaataagacatcatttcccagtgaacacaatttttattgcagttgataagcaattgcccgagttaaatgctacggttaatgagcaaacaatggaagcttaaccttcatctgcgttttagtccctaaatattttatacaaccctcaatgttgatgatatat

SEQ ID NO: 254246 - DNA, 439 bp, Glycine max
  unsure (1)..(439): unsure at all n locations
aataatgtaataaggctatttattaagtggtgataattaaggttgattaatggtgatctacatttcatagaatctgaanaggggtaattaagtcataagagttcaaagtggagggcattttcgtaaatgactatacaactagtttaaaatgtctaattatatgatgtagaataattaaaataagttagagttgtaacacccctaaaaaatacaactccaactaatagataaaactctgtgttgtgtcatctatgtgtgtatgaaatttaattcaatagttatatatatcgttttaattataaatttttttggggtgtgtgtgtgaagaattgcattgtacactacgtgtctatgtaatttagctctgtctgcggctcactctggntatatgtattactagggagactagcacaatagtcaagaaagtagcacagtaatc

SEQ ID NO: 254247 - DNA, 402 bp, Glycine max
  unsure (1)..(402): unsure at all n locations
agcttctntgagaaaacttncttgagaagctagagcttagctacacatacccctctataactaagctcacctccttgagaagcttccttaagaagattcctaaagaagctgaagcttagctacacacacctctctaatagctaagttcaccttcttgagatgaaatgctagagtttagctacacaccccctataatagctaagctcacccccatgacaaaaaacatgaaaatacataaaaaaaggccttactacaaagactactcaaaatgcgccgaaatacaaggctcacaccctatactactagaatggccaaaatacaaggcccaaacgaaggaaaaacctattctgatatttacaaagaagagtggatcctacctcgacncatgggatcaaaaatcta

SEQ ID NO: 254248 - DNA, 244 bp, Glycine max
  unsure (1)..(244): unsure at all n locations
gtcgaacataacgtataactgttctcacgcaccacgcatatacagaaaaactatgtcgttcaaacggaataataatatatattatgcggataagctactgcgttcaaagactcctaattctgctttaatagaagtagaaccgctctctgcctcacaggntatgtaaagatgtataccatttgatctttagtctctacgnatgctatcacaacatgaccttttaaaacatgatctctaatgcacg

SEQ ID NO: 254249 - DNA, 76 bp, Glycine max
acattgtagccgaagtgattattacataagtatacgattggaccgtagggatctactagcaaacatccacaactaa

SEQ ID NO: 254250 - DNA, 249 bp, Glycine max
  unsure (1)..(249): unsure at all n locations
atgttgttgtggatgatttctccaagattacctggcgtaactttatcagagagaaatcagaaacctttgaagtattcaaagagttgagtctaagacttcacaggagagaaagactgtgtcatcaagagattcaggagtgaccatggcagagaatntgaaaacagcagggtcactgaattctgcacatctgaaggcatcactcatgagttctctgcagccattacaccacaacagaatgggatagttgag

SEQ ID NO: 254251 - DNA, 463 bp, Glycine max
actaagcttggtgccggctagtggaccaattaataagtattgatagaggactctgcatgtacaaatacagttactctgtaaaggcattcgagttgtcacttgtcaatcaaatgcatcgctacttaaaaaatcttatctgacttcactttatattgtccatttggcatcaaagacaaattattaagagcaagctagtagttaaattttcttacatggtacgcgctctagcaaatactttcttagctactttacatttatttcttcttgtcttcttctcaattaacatacatatagtttgacactttctatgtgttaatttgtttcctaaacaggaacagaatcagaaaaagcttcgaaaggctgtctcggaggtgtcgaacgaaattgaatgatactacaatgagttgaagttggagaagaaacttggtgctatagaagaggtggagcaagctgaatgccaatc

SEQ ID NO: 254252 - DNA, 273 bp, Glycine max
atttgaaatacttcggatgatgcttcacagcctcttggttattactgactaacacacccttcccagtcatacgtgtcaacatgttacgctcctgtaaaaagacaaaacttctttccaccttatgatatctttctatgatccaccacctatcacgatcaaaacagaccgtcagatcgtaataatcagggggatacgcattgtggcactctcatcacgattacctatggtgatggataataataactataacaagataatcacacagcgtgtatg

SEQ ID NO: 254253 - DNA, 429 bp, Glycine max
  unsure (1)..(429): unsure at all n locations
agctnggattgatttagtctaattatggatcgaggtttagtaatttaggctacaacatagcacataanagtatgattgattagagaaacttctttatatacatcagctggcttgttagaaagacccaacacctttacctactgttgtcaatcttacttacttgcatttttactttttttagcttagacttattttaattatgttctaaatcatcaatattcaatgtttctttcaacaatgccttattnttgaatttaaccctgtctaatactagttccctgagttcaatactcgaattcatccgttttaattntaaatacttgacaacccggtgcgctttccggcataccggatttcccttgaacatatttgtataaagaanaagtggacctaaaagtaactgcagggaaaatccaacaaagtatttat

SEQ ID NO: 254254 - DNA, 424 bp, Glycine max
  unsure (1)..(424): unsure at all n locations
tgtcggtgtacctgaagatgctattatgctcagcctcgtttcattttctttatcangggaggccaagagatggttgcattcattcaagggcaatagtttaaagacctgngatgaggttgttgagaagtttctaaaaaaatatttcccagagtctaaaactgcagaaggaaaagctgcaatttcttcattccatgaagacacctgaagaagccatggacttaattgaaaatatggctgccagtgaccacgcaattttgcatgatagagttcatattcctaccaagaagtttattggagctttcatcacaagatgccttgttggccgaaaataagttgttgtccaagcaacatgaagctttaactaaaacactaagtaagttgccaactcaatttcatgctagtcaacctttaccttcatctgttt

SEQ ID NO: 254255 - DNA, 479 bp, Glycine max
  unsure (1)..(479): unsure at all n locations
agctttgcaagctggaatcatttatcctatctccgacagccaatgggtgagtcccgtctaggtagtcccgaagaagaccggccttacagtgatcaaaaatgagaaggaggagttgattcctactcgagtacagaacagttggagagtctgcattgactataggaggctgaaccaagtgaccaaaaaggaccattttcccctgccattcattgactagatgcttgagcgcctggcaggtaaatctcactactgtttccttgatggtttttctggttatatgcaaattactattgctcctgaggatcaggaaaagaccacattcacctgccccttcgccactttntcctataggaggatgcctttcggcctgtgcaatgcccctggtaccttccagcggtgcatgattagtattttcagtgatttaattagaaaatgcatagaggtggttatggatgatttcactgtatatggatcctctt

SEQ ID NO: 254256 - DNA, 288 bp, Glycine max
atgcttaccacctcgaatgactggaaagtgcgttctaatgactcctttgcggcctccacataaggcatagaggatgggcaactcaccaagatgtctttcttgcctgatacgatgaccagatgcccttccactacgaatttcaacttttggtggagtgtatagggaacaactcccactgagtggatccacggacgccccgacagacagctgtaaggggggttaatatccattatttggaaggtaacttggcatgtgtgagggcatatctgtactgggaggttgatctct

SEQ ID NO: 254257 - DNA, 453 bp, Glycine max
  unsure (1)..(453): unsure at all n locations
taaccttctttataacaccatgctgtgagctcgagaccgttaccggacttaccttcgcaacccgagttcacgattgctactccatatatgtccgtgaaatttgtagcggcgatactcttccatgcgaggactgttggcctcatggttatcggctattgctagaatgtgatattctttgcgtgacccaggaccccttcgttcgactgtttgttatgggcaaattagacttcattcatggtaagttctagttttccgtacctcgctgttgggagcttggacttattcactctcttacggtgcgacaaaagtcttgttggtgacgacttttaaattggcgagacaatgcaaaccttgtgtgtgaactctcacccattctgcgtgtccaccacacgatgacattacgtatgcctttcagatctagcctttctttaacggtgagtacgaccgcttagn

SEQ ID NO: 254258 - DNA, 237 bp, Glycine max
  unsure (1)..(237): unsure at all n locations
ggatatgaagatncgcttgcgggcgaaactctgctttgtcattgttgactacagcctgagaccagaagacatgtaactgcggtgttgtaaccattctgccgtcacgtgggagttctccttcctctccacgctgctattctaatccagagcaatggcgaggcgtattcggtctttgaagacatgcgacgtagcattgcttacgagcttcagtgagtctcattatgaacatactacaat

SEQ ID NO: 254259 - DNA, 475 bp, Glycine max
agcttgtggcctcatagattatacatatataggacccttgacaggactcctataatactgatacatggtgtgagtaacaagcttcacacactctatgtacgagggatttcaatcatggaccatatgtatatatatacgcgacgcgacatacctgtcatgaaaggttcactccaccattccacgacctatatggaagcacattggtatggaaacacattgtgtgtgcgtgtgtttgttttaaggtgacgctgcacattctaatattattgtatgcataattaactatgcatgcacgaggcaggcattaaagaatctgagtttattgaattttaaaactagtaaatctaagaatttaatttttatcccataattttgcttaaaaattaaattggcatttactaatattttgcatagtgtaattaataaacttaaccacatattaaataatacattatatgatattacatgagctata

SEQ ID NO: 254260 - DNA, 456 bp, Glycine max
  unsure (1)..(456): unsure at all n locations
tgttggaatatatncgatcatgaaactacctttactttctcttaattcagagatcacagtagaatacgcccagttacctacgagtcaaaagacatctttacttggaagaatgaacatagttaaggtaaaaatgaactcatttcacctgaagcaagcaagtccttccatctattagaaggcgagttccagctgctgcttcctttgcatatatttatagcaagaaagtgaagtataaaaactcacgcagaattcagcatcttataccttctgtcgcgttccgccattgattacttaccattgcaacacatatgcctcgtcaaaattgtaaagcataacattcacgagaataaagtgaagtgcagtaacaacaaccattgatttaatatgcagcacacacatacaaaatctgaagctatgactacatttattgagctaactanacctaaacagaaattc

SEQ ID NO: 254261 - DNA, 478 bp, Glycine max
  unsure (1)..(478): unsure at all n locations
agcttgtcatcgattacacacatactataatcgattaccagaggagattntcaganaatattctcaattgtcacatcttttcatttggttcttgaatggctatcaaaggcctatatatatgtgacttgagacacgaatttgctaagagtttttcagaacaaaaaaaggtcttatcctcttaaaaagaaaaatcgttttatcctcttacaaattccttggccaaaacacttgtgattcaataaggaattatttgagtgctcaaattgttcaatctatctctttcaagagagattatttcttttcttcttctttattctgaaaaagaattaagagatcgagggtctcttgttgtaaagaaatctgaacacaaaggaaggattgtccttgtgtggttcagatcttgtaataggctcttacaagatagtggaactctcaagtgggttgcttgtggactgaacgtangcacaagggtgtgacc

SEQ ID NO: 254262 - DNA, 466 bp, Glycine max
tgaactatattgtatagatttatgttctttaaattgaatgaaaagatgggaattagtttcagttcactaagattttacaaattgtttgtattgactcataaagctggataaagttctactatttataattataaaaagaaaaacttttccagcggataaatcctgtttggtgtatagacttttagatttactgaggagtttgatgccactgccttgattttgctgaagaaaaaatggtgatctcttgcagactctctcaaataccgctgaagaaaaggcaaaatggatcttcaacaaattgaaaggtatgtgtgttttgaccctcaaagagatgtttatggttgacatttttaaatctcatgctttccaacgtgatcaccttgcattgttttaataaacggttacatagcaccatggctaactaggataaatatgcaccaaatgaactaatcaggtagctgaatag

SEQ ID NO: 254263 - DNA, 472 bp, Glycine max
  unsure (1)..(472): unsure at all n locations
agcttggtctctgcagatcttcacacaacanaatctctcanaactctntggaacttggacctttctctctctagaaactctagacatgcaaaactttgaatcccagtccaaactccctttctaaaatctaatttcaggcttaaataggtggccttgttcgtgctcatgcgcttagcgcacttctggaccgcttagctcacatgagtngaatttggcttagcgcgtgcctttctcgcttagcggatgaactgaattggtgcgcttagcaaacctgtacagctcatcttcttccagagtcatcctcacgtttagcccatgagtgttgcgcttagcagacgctcgctaagccagcagattggcttagcgagaaggtgaaaaataacacttttcaatgctttcctaattaacctgaaattgagagaaaatgattattaaacacacaaaatggaagtactaagtatttattacctat

SEQ ID NO: 254264 - DNA, 321 bp, Glycine max
tcgtgtgtgcatttgttgaactgtgtgtaatgtaaataaatcgttgtctatttcgcattctttacactgcattctaagcacccacgggtttgagcaaaaaggggccctacacccgtgttcatgggaatttaaggagtggaggtgaatctatcatcatgctaagtctccgacttgcttgataatagtgaaacctcgtctagagctttctctctttataatgtgttgtcgctggtattccataccgccacaatattattatcttgagtgatgatacctctagaaaacagccgtgtgagttatgaatggttggggaaatagtta

SEQ ID NO: 254265 - DNA, 461 bp, Glycine max
  unsure (1)..(461): unsure at all n locations
agctntactaactntcactcacattnntgtaatcattgattaaatttatcatatttgataaatataatatttaataaaataaaatattaaatatacataatgagtaataatatatacattctactttntttgaactacctaattntagtgtgtttcttgcattaatggttatggaggtttgaaaaatatgaattctcataaaaaaaataccattttccccatttcatataaataatgaaaaaataattaatgatttagattggtccatcaagtctcaactctaaacacatagtaaaaaatgttgttctaacaaaacgaaaatcaatacaaactagaaaattcaaccccttcaaaagcagtgcaatttggctctcacttgcaacttgcctctcacttgcattgattcagaatcttaaaatatctttcctcggtgtgagacaaanatgtcaaattatgaagaa

SEQ ID NO: 254266 - DNA, 385 bp, Glycine max
  unsure (1)..(385): unsure at all n locations
gcttcttcgtgggaagaacaggttccagtgaatatccttcaatttgctgatgacactattctttttggggaaggttcaatggataatggtaaagctgtgaaggccattcttggaattcatgcctgtatagtatgcaatcattanggcaagcatgaatcttctgatacttcatacccatccaaggtcacgaatcatgtcctccaaccgatctcccatttctacatcaaacgggttaaaattgtgacctactttgcatgtctgtgacttcaccatgccatattcacgtcgtgtaattcttcttaatgccatcacacaatagatggtccccgatgtcatcgagtagttgtcatcttccatcaaacagntgatgcaaggacaataatat

SEQ ID NO: 254267 - DNA, 506 bp, Glycine max
  unsure (1)..(506): unsure at all n locations
cttgcccatgagtaccgtgatctcttactcacctcgcggcatgcaagcttaagagagatatgatggaggcntgtgacagtatttacctagactacacgacctcctgtcttggtacgggcatcacacctggacatccttaaatctctagtcgtcacaagatgtattcccacgacattatatagatgttcaagcttgcagaatgcatccaaatgagcactcgcatgaatcacaacgacaaagtttcgtatgaccatgcgacgaacataatagaaatggcgttttaagacgcctgaccggcgaagatgtatccacatcagttcgacctgatatctaaacggtggatgctttccactggattctaattatgcagcaagatgcatgcatgccacacataggtgatggatatgtcgttgcactatcattatgcataaccctagaatctcagatttatacctgcaatgtgacaaaggcttgcgcgccctctgtgcttcagagtccttacctct

SEQ ID NO: 254268 - DNA, 232 bp, Glycine max
gcaccatgcggcattcacatgatgttgtcactgacattcctatcgccctgataggacacggaagtcaaggtgtgaaggagtagacttgttctcacgttatcactctatgcgaagcgcttatacatttccataagacattccgcggcactctttgtataattggaatcagcgctcctactgacctctcgaatgcgatgctgtatgatcataatactcctgcgagttgagtgac

SEQ ID NO: 254269 - DNA, 448 bp, Glycine max
  unsure (1)..(448): unsure at all n locations
cttaatgcggcttctaacattcgagcttctgctgaggctggtgtctcanagttgagtgcctggcagacagcaaggggtggggtgggtcagagccatagcagtggtcaagtggagcaatgccctcagtgtggtgccaagttttcctcagttactactttggtggaccatgtgcaaaaagttcacgagaggagtggcaaccgatctggagcgaaggttacaattgatggttgtccaaaatgtagtaaaggatttcgagatcctgtggccctagtggaacatgttgagaaggatcacggtggaagttctagatcataggtatgagttgatattgattnattgaatgaatataacttgaagaaattacatatttttgcaataattagcctggaagaatatagtttntataaacatgaatacatngagagtgtaaacattgtcattcaatcat

SEQ ID NO: 254270 - DNA, 443 bp, Glycine max
  unsure (1)..(443): unsure at all n locations
ctcagcttntaaggcggcgagctcagttacgaaagggtgcgtgtagttaagctctagcttctcaaggaagttntctcaaagaatcttctcaaggaagttttctcaagaaagcttcttaaggaagctacctagtctataaatagaagcatgtgtaacacttgttgtaacttttatgaatgagagtcttgtgagacacaactcaaagttcaacttttttccctttttttccttcaatttcttgctccacccctctctctttctcttcctctttcttttcctgcattgaagcatcctctccaagctttttatccaaggctcatcttggtggtgaaactcctntcttcatggcttattccctagtggatggctcctnctctcacctctnttcctttgtcttccgctgcatcntcagggtggaaaatcaccattaaaagacctcattg

SEQ ID NO: 254271 - DNA, 487 bp, Glycine max
  unsure (1)..(487): unsure at all n locations
agcttgaggattatggngtacccatcacatgtggtactaggtggcggtcgggcgatggtgcacaacaagttttccacatccacaatgcgcgcataaacccaccatcccctgttgcccacctccaactgagctcacgtactcccacgtagcccatatcctcgtttctctcaacaccgggtccccatcaatcctcccaagcgttcacaacatccaagcaaaacaacattcacacagcacaagctatcacagccaagcaaaacaaagcaaaggcaganaactctgccaaaacaccaaccaaaaatcacagcttttcccactcaaagaccccagtaacaattccttcgatccaatttgttaaccgttggatcgactccaaaattntactggaagtctatagtacataagcctacattttgaccgttgggatctactagcanacatccagaactcattntacattactctntccacaaccagcaaatacatg

SEQ ID NO: 254272 - DNA, 463 bp, Glycine max
  unsure (1)..(463): unsure at all n locations
gttcgattcctttctttntcttatcgttctcctcatgctgattcagtttcattagttccatttcgtgttcctgtaactttccaaataaagttgcaagagacatgttagaaagatctcttgattatgtaatagttgttacctttggttgccattccctgcttaaacatcttagaactttattaataagatcctcattgggaaatatctttcctaatgatgcaagatgatttactatgtgtgtgaatctcttttgcatgtcctgtatagtttcattaggattcattctaaacaattcatattcatgagttaaggtattcattctagacctctttatatttgttgttccttcatgggttacttgtaaggtatcccacatatcttttgcactcttgcaatttgacaccctaaagtattcatccattcctaatgtagatgtaattgtatttntggctttttaaatata

SEQ ID NO: 254273 - DNA, 493 bp, Glycine max
  unsure (1)..(493): unsure at all n locations
atgcaagcttcacaatatgatatntacttgttgacgcatatacatcgtatttttctttgattggcaggaagacacttaatgagcttggagctattgtctccacggtgcatccaaagatgaaattccccaccctgagggggagattatgactatcaaggtagatgaaaagcaagcacaatagtgctacgcacaaagcctaaagatggcaccttatcctcccaccaaggagctggctaagcctcaccccacaatggttgaaggtactccaagtcatgagcatgaaggaaagacctctaatctgagccctaaccatataccaagccatcttagatgatgaattcgatatagatccatgcaacaacacttctaacanaggcccaaagcccattgaagagctcgtcaagctgcagttgggactcaaacccgggcaatgtacatagctcaagccatgagcacagatgcatcgctgataccctacatcagaatgtggacc

SEQ ID NO: 254274 - DNA, 444 bp, Glycine max
gcttcggaagaaagtgatgaggtacaagccctaaaggcagagcttgaaagagcccatgtagtcaaagagaagttcaagtccatagccatcaaagtctgaaaagagtaggatgaactaagggacgtcaatatggccacagctgaagccttggaacgagaaaccaagaatgcccgaaaggaagaacatgaccaaagcaaagttttgaggggctttatagggcagcaatagtgagctcaagctccgaagaggtgaaaggaatcatcacgggtcaaaggcatgatcttgaaggacgagctaaaggcttgccttatgtcgaaaagaaatttgtcccaacagctaagcgagactgaagggaatatgtgggccatcatcgatgagtgcaaagagaagctaaatctagcggcgactcacgagcaaaggctagaggatgagtacgccaagata

SEQ ID NO: 254275 - DNA, 460 bp, Glycine max
  unsure (1)..(460): unsure at all n locations
agctgcagcttcacaatatccaagcaatttaattcccactatcataaactatcctacaccaagaaaacagggcaaaggcagaaaactctgcccaaaacacattcacatattaccactttccttactcaaatatcccagtaacattctctttgttccgattcgctaaccgttggatcaacttgaaaattttactggagattactagtacataagtctacattttgaccgtcgggatctgctataaaatgtgcagaacacaatacgtactacctttcccataaccagcaatgcacaagcattttctacacatgaacaaaaattctgctgcacaaatttgacaacaagtttctgcataaaagggcatagttcgaaatccatctttcccacatgcaatnttgctcaaataggatcctaaaagtcctaaatcatgtataaagtatatttaaaccaacaacaagct

SEQ ID NO: 254276 - DNA, 452 bp, Glycine max
  unsure (1)..(452): unsure at all n locations
tcctaattgatgtttggtggatagtcaccaaataatgataagtggtggcggtagcaacaatgatagtggtgatagcggtagtgacaacaacggtaatggtggtggtaatggtgatagtggtgatgatacggtgagacgaatgaatggagatagagagagtgacaatcctatgttattgctttgttacttaactcctacctcatgataagaaatacactacatacacaggatagacaccacacaattgattacagcaggataacatagttattctggccactaaatgagccctgaatgtataatactagttaagacaatgacaagacaatgactgaatgattaattaaatgaccatagntgtaactagnggcagatatttattcatctccttaaatattataaaaactccacacatctaatgtaccttagncagtgatcagtgcagcgtattt

SEQ ID NO: 254277 - DNA, 500 bp, Glycine max
  unsure (1)..(500): unsure at all n locations
cgtgcccatgtgacaccntatcagtaccgggatcctcagaagtgaaccgcaagcatgccagctttaatggagccttgatcatttactcagccctctcacgcctatttataacaaagaaaggcacttggtggacttgcaactcgcccaagtgagttgttgcttcactctaaaataacttggctcgcccaagtgagctggttacttcaaccctaagccatattggggcccaggccaaccagaagctatccaaagcgagcctaagtccaaaaattgcttggaatgaccttttccccttcctttgggtaatttctgcatcttaaccaaaacgcgaacgatctttctcttgcatggaaccgatgcgaacgggtaattccgctaccagaataaaataccacgaatgaatccctggcaaatttggtctgcagtacaaagattatcaagctgacgaaccaaataaagaatgaacaagcaaatctgaaagacaaagtgaataacgatct

SEQ ID NO: 254278 - DNA, 409 bp, Glycine max
  unsure (1)..(409): unsure at all n locations
gtttctcaaagaagcttctcaaggaagttttctcaagacagcttctcaaggaagctacctagtctataaatagaagcatgtgtaacacttgtggtaactctgatgaatgagagtcttgtgagacatacttcaaagttccacttctctaccacttttattccttcaatttcgcgctcccccctctctctttctctccctctttcttttcctccattgaagcatcctctccaagcttcttatccaaggctcatcttggcggtgaagctccttcttccatggcttattccctagtggatggcgcatgctctcacctcttctcctttgtcttccgctgcatctccatggtggaaaatcaccattaaaggacctcattgaagctcaaagatccagcctncatagaagccctaca

SEQ ID NO: 254279 - DNA, 271 bp, Glycine max
caccaacaaggaataatggactcacacgggttctctgtatgtataccagcagcacaaatacagtgtaaccatgaaacccaaccatcatttgctgttcacgcttcgtgcgtatatgtctaagtgtgaagcaaataagcgagctatacaaaagagccaacccttaccaacttcattaacattcacgtaagttctgatcatgattataatcgatctcctttcctttacaaagagatcgaaacaatcatgacgttaaacaattcacacaagccct

SEQ ID NO: 254280 - DNA, 405 bp, Glycine max
ctaatcaattgaaatcgacggtgtgggattttccctgtactctactatgggcaatattccttggcacccttaatcatgttcaatttgttggtaagattacgtcttttaatccaaaaaaggaaacttggttaccatgtgagagtaatttggataaatgaaaatagttttggatgttatatgcatgagtatttcaatgcttgcactactacgaaagtgtgttttttatgacaggcgctctacttttgtaattatgtgtctgagaaatccttttatgatgcacattctaagacggttattgaaaaccgccttagaatgtgtgttcctcataaaaaattatgacgggttctattaaaatcccgcggtatctcaattgaattcaaaagcccaattaatacgagtccacgt

SEQ ID NO: 254281 - DNA, 468 bp, Glycine max
  unsure (1)..(468): unsure at all n locations
gatccttaagcacctgcaggctgcagcttgtgatcaactnttcttctgtggcgacattctgtcaaaccagttatcaagtcccattgacttcagcaattcgtcacaaatccacagattccgctctgcttcctctctaaagatgattgtgagctggcattgagaatccagcttatgaaagttggagcaacaggatctaaagctcctcacatcgtttcaatcgactctctctacatanattttatagcaagttctaggatgcacccactcctatgaggattggaacgcattcatgattatcttcacaagcaaacaatagccacagcttgtcaacttcgcactcagcttcgtgctacgacacttgcaggcgaatcaatacatgaatttgtcatagattcaagcaatttctcgatttcttgcttccatgggaagctcaattatgcttcacgagcatattgattctattcttga

SEQ ID NO: 254282 - DNA, 448 bp, Glycine max
  unsure (1)..(448): unsure at all n locations
tacaatattgcttattacacatgagagatgaatatatatcaaattgcactcgtataactttgataagtcttacatcattnttataacttgatatagaatgtgattcttattaatcaacccgccgaattatatctatgcattattaaaatcatctatgtcaaagtttgtcaaaattgaataacaataataaggtaatcaaatgatttatattctaatatattttaaaatatttatattacgtcgactttaatatataagaacaagataacaagtgattttggattaatatcaaattttacatatgtgacctatgtgaaaaaaaaaaacttttaatccaacgatgagtcttaagaaaacatatccagttgaaagctataatatgatataaaaattatcacagctatatacatcgaattcgatctctcctctctatttctctctctatata

SEQ ID NO: 254283 - DNA, 419 bp, Glycine max
  unsure (1)..(419): unsure at all n locations
ngctngagaaatattataatttgtgggatctaattcttggttctggtgtggacgaggtaatttgcatttagaaattcatgtcttggtttcatactcagttaaattctgtcttcgataagtgtattgcctacgaccactgcctactgttagcgctttcttaatcaattgcagaatatgtgatcaaaataccaaacaattaaaatggctaatatttatctatattggaaattcttattgcactaatgagaagcttgatccataagaaatatagatggatttatactttgcgcctagagtgcagcttgtgaactaatgaaatgattcattagcaagatgcaaattacaatccttagcatccttatctccatccctaaatgaccaggtagtactgtttttcaacctcagtttcaccttgctca

SEQ ID NO: 254284 - DNA, 448 bp, Glycine max
  unsure (1)..(448): unsure at all n locations
tattcttgtctagctagatatttgtaaatccttaataatccttctaaaggattgagtcttgccctccgtatttatgttatagacacttaaggtgtgtttgatctgttaagaagacagaataaatagaataacattgaaacaagtaattgaatcacaagataatttttttgtattgtacgataatggccgatgaaatatttaaataaattaacaacttatgccaacagccaaggtggtcctctctggcgaccaaaatacaacgtttgaagagggggacacatgcaaaaaagaaaaaaaatgtatggataataaaaagttaaaaaataagaatagtattgtatgcttattnttattagatataaaacagtttatacgggttaataaattacaagtttctgaatatctgtgtaatctattatcttttattatgtacttttcctttattata

SEQ ID NO: 254285 - DNA, 464 bp, Glycine max
  unsure (1)..(464): unsure at all n locations
agcttggtagtttcatagggcttgagtcttaacttatccagctcattcaattgttgctacctgttgctacctacaagcctaagatcaaagtttataaactatagagcccacatggctttgtgaacaagttcaacaagcaaatggaaattcttgccataaactagactaaagggagacatcaaagtgggagtcttaaaggtttttttgtatgcccagagtgtggtcatccaattcaatgaccaattctttctagatgctctcacagttttctctaaaaccttctttagttacctattagatacctcaacttaaccaattgcttgagggtgataaaaagtaataaccttatgggtaacaccatatttagccaaaaggctatcaaacaatttaatgcanaagtgtgttcccccatcaccaatgattgctcaaggtataccacagagtgtaaaaatgttctatttcag

SEQ ID NO: 254286 - DNA, 428 bp, Glycine max
  unsure (1)..(428): unsure at all n locations
tcttagttntcgatgatgcagatgagtttgtggctacctcatgcactcctctaatgactatagcatcattcctagcgctaaactgttgggagttggaagccatcttcttaattaaattcctggcttcagcaggggtcatgtctccaagggctccaccactggcagcatctatcattcttctctccatgttactgagtccttcataaaaatattggagaagaagctgctcagaaatctggtggtgagggcaactagcgcatagttttttaaatctctcccagtattcatataggctctctccactgagttgtctaatgcctgaaatatcctttctgatggtcgtggtcctggaagtagggacatttttttctaagaatactctcttgaggtcatcccagctcgtgatggaccttggcagcaggtaatat

SEQ ID NO: 254287 - DNA, 216 bp, Glycine max
tattgaacgagccatgctctttctcgggatcatgccttactttctatgcttgaaacacacattgttggtcttgaatgtatgaaaactatgtatgaacaagatgaaacctttagagaatatttgaaaaattgtgacaattcttcagaagaaaggtttctttatacatgaaggccttcttttcaagaaaacaaattgtgtgtgcctaaatgttctact

SEQ ID NO: 254288 - DNA, 443 bp, Glycine max
  unsure (1)..(443): unsure at all n locations
tcgtcctcaaatccctcttgttggattgagctcaattagacagtcctnctaggtttagactaacttaaactaagtttcatcctcaaatccctcttgttggacttgacttagtttagcctaatttagcctaagctttgtcctcagatccctcttgttggactagactttgaccaaacagcattattgtaacaacatacttaaaaccaaaacttaatctgcagattcctcttgtgagaccgaagttcaattctgcttcattcaagttctaagtgttggatcaagtggccttggaataattaagaaggcggggttgaattaattattgatgaacctttactaattaaaaaacttatccttcttaattactagattcaattacgcttttactataatgttaagaaagtcaagaacagaaatataacttaaccaaagtaaagcgataa

SEQ ID NO: 254289 - DNA, 471 bp, Glycine max
  unsure (1)..(471): unsure at all n locations
agcttgtaggattatggggtacccatcacatgtgtgtactaggtggcggtcgggtgatggtgcaagtcaactctccacatccacaattcacacataaacccaccatccccagttgcccaccttcactgagctcacgtactcccacgtagcccttatcctcgttcctctcaacgccgggtccccatcaatcctctcaagcttgcacaacatccaagtaatacaacatccaaccatcgtgaactatcaaaaccaagaaaacagggcaaaggcagaaaactctgcccaaaaacacaaaccactatcacagcttttctcacttaaataccccagtaacattctcttcgttccaattcgttaaccgttggatcgactcgaatattntactggaagtctctagcacataaatctacattatgaccgttgggatctgctagaaaacgtccagaaccaaatctgtactactctttccac

SEQ ID NO: 254290 - DNA, 461 bp, Glycine max
tccccccatttacgaatggatcctaattctgctgtgattacgactatgggctaccaatagacgctggaataccatcatttccttgaattaaattctgcacggaatatgttaacacatgctccgcatactcagtgatacaatgccatactcagtgccattaatcaataacctagggactacaagtgacaaagggcaacacttgtaagacaataaattgatattcattcttcatgaattgatttatttaatcagagctaaagaagttaagttaaaagaaccagaaacaagaataatttactttgacattctacagtcatcattcatgaagatagtataatgtttcaacattaggaaacagatcaccatgcagcttgcacttgagagagaagaattcaaaataacaataatacgcagtggtgatgacattacattggcaacaacattctaactcaataacccta

SEQ ID NO: 254291 - DNA, 471 bp, Glycine max
  unsure (1)..(471): unsure at all n locations
gatctctgagtcacctgcggcatgcaagcttctcctcttcacttaattatttgtatttgttgctattaatccatgcatgcttagtgcttaattaattgtctntgcgcttaatttacgttcatgcttaatgatcgttcatgattaattggtgtatgtgttgcttaatcacataatgaatgccttatgttaaatttcgcttagtaatttaatttaaggctcaattaagtggttgaacttgataaaggataaattctcgtaacctatgataagagacttgcttgtaatcaaggggaagcaacgtgttttaattgatattttctaattcaactttattcgctgtttaatttacaaaaaccaaacaacccccccccccaattcgttattggtttattactatctattacgaacgttntggtgatcattgctcgttgggagacgacctangatcacttcctagatactacattttta

SEQ ID NO: 254292 - DNA, 458 bp, Glycine max
  unsure (1)..(458): unsure at all n locations
aacacatcaatagccttgcatcctttctcaccatgttctctccaaaaatcaaaacttggaacctcattcttccccattgagcatgagatcttcaaagaggaagaggccacaattttcatcttcttccaagctccatcatattgttttgactctttctctcaaagccttggtaagaagcccttaaacctttcttttccttctaatctctttctcattnttatgaaaaattcttactcgaggttccaaatatatttgtcatcctttggaagcttgagacttcaacatctaagcgtttttttcttaaccattttgtggaagcttcactcaacgtaaggggagtctttccacttcttaaaccctaaccttgttgcctttggaagctacgcttcattacatgttgtgatgttaaaatttcatatatgccgctggacaacccaatgtgattcttgcagcaactc

SEQ ID NO: 254293 - DNA, 451 bp, Glycine max
  unsure (1)..(451): unsure at all n locations
agcgctatccgcagactcaacagaagtcagttggggaagaaatcagaccatgtgcatgaatcttacacccagtgggttattgataggaccaagagctttggcctaccctaccacttacctagatacctatcgtccaccatcccaccatcatccttgcctatcccctttgacactaaggaagagtttcatgaacaattaacccaaggaaaggcangaaaaagaaacttgggagaggagatgccaggagctcgagcgagagaatgagactnttgaggggaagatagcccaacagagccgtgagctttttatccagaaccagagggtgattgagaaggacgacttgcttcgccggaaagacgctttgctccaccaagatgctagaaggaagaggagggttatggatttgttctcccgtgcacattcagattccgaggatccatctactccggga

SEQ ID NO: 254294 - DNA, 388 bp, Glycine max
  unsure (1)..(388): unsure at all n locations
tnctcggggccattcctgcgaagggcaaacattggaaagttagtttacaagatatataacaatcattacaaacaaaggccaaacaacacttctcatggcacgagtgtcaacatgcactttataaaataatcatattggggtcgtgctattttatgacacatacgtatttgcacacataaaaattctgtgtgaaacattttacaacacctatccatgtatatatttttttgacaaaccttttcaatgctacatcctatatatatacacacattnttntggaaggcttcttttgttacctactcacaaatacacantatttgaaaaacacttttacgctacccatccaacactttgtaaggcactttatgctatatatattcatattatg

SEQ ID NO: 254295 - DNA, 447 bp, Glycine max
  unsure (1)..(447): unsure at all n locations
ctgcagcttactgaattgctggtcttattgaagaacatgtcttctgaacaaaacactttgccgaanaatcactacgaggccaaaaagaatttgtgtccagtgggaatggagtacaagaagatccatgcatgccctaatgattgcatattgtatagaaatgagtatgcagaactacagcaatgccccacgtgtggggtatcacgatacaaagtgcaacatgatgaattaactgatgatgcangaaccaaaaattgtcatcctgccaaggtgtgctggtatcttccaataataccaaggtttaagcaattgtttgctaatgcacatgatgcaaaaaacctttcatggcattcggatgaccgaaaatctgatggattactgcgacatcctgccgattcgccgcagtggaagacaattgatcgtttgtatccagagtttggggatgagcca

SEQ ID NO: 254296 - DNA, 449 bp, Glycine max
  unsure (1)..(449): unsure at all n locations
tctntgaganaacttccttgagaagctagagcttagctacacacacccctttcataactaagctcacctccttgagaagcttccttaagaagattcctaaagaagctagagcttagctatacatacctctctaataactaagctcaccttcttgagaagcttccttaagaagattgatgtgccatcattttcttctattttctaaaccctttttgcaccattttaattactggatggtcttaatcgtcaattaatcaggcagttttattatttgggctcatttagctaatttgatgtttttaatctaatttcaggaattaatgaaacattgggcttaatccggattttggttatggacttgaagagggaaaattaagcagcgcttaccttagttaatttctaattaggaagatttcgcaatttattntatgttgttcagtgtttatttc

SEQ ID NO: 254297 - DNA, 522 bp, Glycine max
  unsure (1)..(522): unsure at all n locations
cgtgcgcattgtgacaccctatctctagcgtcacctgctgctgcagctttnctattactaatacttggtcnacatttgaacggagatcacttgattataacgactataacgcagccaatctattacactaccaccttgtaagaataacttcaagaatatattgactcttgagaagctgcttcttttcgttacgataaatgtgttcgctgccgcgtaacttttcaaagatcctgatacttgatgctcacagattttgccgttatcgaataatgacgctataaatatatttacttatacacacattatgctcatatgttacaatgtatgtatagcatgaattaaaatattctccctcttctgtctaacatattttcatttattaaagtgtcgattctacgaagaagacatcactactcctgctattgacgtgtggcctttaatcaatatatctctttattctcattgatgaaaacgaccttgactgacatgataaatctcaccactggtggtcgaaagttgtcg

SEQ ID NO: 254298 - DNA, 346 bp, Glycine max
  unsure (1)..(346): unsure at all n locations
atgtgctcggatcgctcatgatgagcatggtttgaagcaagacttatagcataattattatcataaaagtacatcacagagggctcatcaaccccaaagtgaagaatctacttggtgaaccgatcgatttcactactaacagaagacaagacaccatatttctccttcgtggatgacttcgaaaccgtggataattccttaaaacncccaaaaagaaagttattttccaaatagacacacaagtcagaagtggatcttatggtatcaacacaacgggcccaatcagcatctgccaatgcagcgatggcgagagagtactgagcagggaacaacactccttgtccat

SEQ ID NO: 254299 - DNA, 467 bp, Glycine max
agcttcaccttctggtcctcctcatagttgtggcatgagaaaacatgctctattttcatctcccactccaagtaggcctccggatcattctttcctttaaatggaggaatgttgagtttaataccatcaattcggttttgtctaggaacaccatcattccctcttctcctcctttcttcttcattatgatctctattctccatttgatccaacctctcatggagcgcatcactctcgtgtttcattaacctctccatatgttgcatcaaagcttgcatttggaattgcgaaagccccactccatcattaggattagtacctgacatctcaaacaaacaaatcaaacgtaacaagacaattatagttgctggttgaatacctcacccactcaagtgtatcacacaattatggcttttctctaatgaaacactcttgccttttaccactctaattccccttgagttctt

SEQ ID NO: 254300 - DNA, 428 bp, Glycine max
  unsure (1)..(428): unsure at all n locations
tactcagcttaacattcaatttcgtgcgtctcgatatgttacgggactcaatcacacatccgagtaaaaagttatggacgattgtatcggctcatagcttcaactttcaatgataagcgtctggatatgttacgggactcaatcacacatccgagtataaagttatggtcgtctgaattggcttagagcttcaacattcaatttcgagcgtctcgatatgttacgggactcaatcagacatccgagaaaaaagttatcgtcgtttgaattggctcagagcttcaacattcaatttcaagcgtctcgatatgttacgggactcaatcagacatccgagtaaaaagttatggtcgtttgtatcggctcagagcttcaacattcaatttcnagcgtctnnatatgttacgggactcaatcagacatccgag

SEQ ID NO: 254301 - DNA, 367 bp, Glycine max
acttaattagactgaagggacacttgacacactcaaactaagtaccccgtttgacaacatattcacatattttatacagcacgtcttgaccctcaacatatatggacaatgagaatcactcagccgtgattatcaccaataaactcacttaaggataattacttgattagaagtggctcaacatgattaaaaggtgtattacacaactggtaatcagccattgcagcagcacttcacttctcttttgacgtatgcaactatccaacactattagaaaatatgctttctacatcggttatttatgactttcaacatcggttcttgaccgatgttgaaagaccgaccgtgatagtattatcgataacat

SEQ ID NO: 254302 - DNA, 428 bp, Glycine max
  unsure (1)..(428): unsure at all n locations
tataagcctcattatctggcgtggtagatttcccacattcaccatcactctccacccctgcaatagtactcacaagcaccacaaacccaacaaggcatagcaacttcacacaataagtacaaccctccattatttctcaatattatgcttatgtctctctattagcgaaatgtttctctgttgatttcacaatgcaataacccctttggctctcatggcgttttatagcctaacatgctccaaaaaagtgcttggccttgtcaccctctgattaatggagcttgcactangacaaagggtgagttttattattgcaccacttatgaacataaagcacgtggtaacacaattttgctccacttatntgtccaatcaacgtaggtgtgtctttgccaacacaattctttttgttttcttacttccaaatg

SEQ ID NO: 254303 - DNA, 399 bp, Glycine max
  unsure (1)..(399): unsure at all n locations
agcttgtagaatggccagacatgatacatgtcaagtgttggtttggttcaagggtaaaagggatgccccacattatttccatgacataaatgcaaaaatgatgatttggaaactttatgcaaaactggtcatgcatgcacctatgcggacactcaagtgtcaaaattttatggtcatgtgatgctagggctcangattcatttcctccattttagtaacccaatatttccaaaatatgttctttatcaatttggcattcatccgagtccattntcgggcgtccgggaaaatttcacagcattcacccttcaggtgtacacattnttttttcaaaaactagttatgatcaacgatctttttcaaaaaaaagttggaagtcatctcttttcacaagcatgt

SEQ ID NO: 254304 - DNA, 418 bp, Glycine max
  unsure (1)..(418): unsure at all n locations
gggagagaatgcttcaatggaggaaaagaatgagggagagaaagagaggcggggagcacgaaattgaaggaataaaagagggagagaagtggaactttgaagtatgtctcacaagactctcattcatcaaagttacaacaagtgttacacatgtttctatttatagactatgtagcttccttccttgagaagctctcttgagaaaacttccttgagaagcttctttgagaaaacttccttgagaagctagagcttagcaacacacacccctctcataactaagctcacttccttgagatgagaagctagagcttagctacacacccccttataatagctaagctcacccctatgaaaaaatacatgaaaatacaaaaaaatccctaatacacagactactcanaatgcctcgaaatac

SEQ ID NO: 254305 - DNA, 457 bp, Glycine max
  unsure (1)..(457): unsure at all n locations
agcttgccattcaaagcgctntgngcctgngaaaatgcggtgtagttctaggttaaggtggtagagccctgtgtgagacgagtcactgcttcaagttggtcaatggtgggctgacagatattgtgttctggcatggtgaggtagaggaggaggaggctggtcagaccaattgttagtgttgacagttgtatgtctatattaagaattaattagacaactgggatgttatttctgcaattaattttctagaagaatgaataattcagatcaagatcatattattccaatcttgatatgcttttattattattttgggtcagaatcaaatctctcttatttgatctgatccctttttatttacttttctttctgcatttattatgtaattggtagccttgcctatatatgtaaatctcttattcctaaataatatacaagaattattcttcctctccta

SEQ ID NO: 254306 - DNA, 466 bp, Glycine max
  unsure (1)..(466): unsure at all n locations
tatgggatnggcatagagaaagatccaaataggcattntatggcttaaatattattattntggttntattatttttaatttaattntcagaaaaatactagttgatatgacatgtatggtcgctattttttgtgaatccctaatgaacatacgatatgcactatgtagtgaatcatcaaatgaaggaagagtattaattttatgtttatctcttgaaattttaattgtagaaattaggagtagtggtagcatagtcttttaagcctgtcaaaagccatgcataaaaaatctacaaatgagctaaatggttgttgtgttaacaaggttgcggactcaatagcaacattaattntaaataatggtgaataaaaacaagtaggaattatttcccgcaaatttaagaanttagctcaactaaataaagcacatgtaatgcattatgcanagcanaacatgagtgaagtgt

SEQ ID NO: 254307 - DNA, 437 bp, Glycine max
  unsure (1)..(437): unsure at all n locations
agctngccattaattgtacatctggtgtggaaaatattttctctttgtgtgtcgtccagtggctgcatctgacttcacaagagccttctcaccattagcatatcaccctgcatagctttctcctcaagctcttcttccacctcttcttcttcactgatttcagattcactggtgatttctccatctgccttcatgatcatggttctcctggttggacaggcaaaagcaatatgtcctctgcctaagcatttgaagcattttatgtttctggtaccggtgttggatcatggggtagaattatgcttagttctagctactgacattccatgtgaagactgtgttgatgggctggatgagttgcctccctccttcttggatctgctggtccacgtctagttgaaggtgctggatgagttccttcttggctgcgcttttct

SEQ ID NO: 254308 - DNA, 360 bp, Glycine max
  unsure (1)..(360): unsure at all n locations
cgagtgagcgaaagagagagaggcacaggcttgttgctcgtgtgctgaagtgtgtgtaagctctacatgtgagcgaatatgttgaggatttgatggaacctgctatttataggagtggagcgtagctgtgggtccctgtttgtaggggttgctatagtctctgcagataattaccgacttatagataatacccgagagcttgtacataatgttagagaaaaaatgtagcttatacataaaagctaaaagataattgnaccttgtagatagtgtgtggctttatagataattaactacctaccaatagataaagatattcatatattaataggctagagataacctgctagttacggaacc

SEQ ID NO: 254309 - DNA, 472 bp, Glycine max
  unsure (1)..(472): unsure at all n locations
agcttcctaatgtgactatgactcataacatattttttgagagccaatcatgtaattgtgtacatatattagtattgtacattcaagaataattgaaacacattatagatagagaaaaagtgcattaagagagtgtgcattaagagagttgcattgtcttatatttttcttatatcataaaagtcttttcaattgtatgcctatttttttatgtctagataaattcgtgatgtaactaactacgaatattatgcaaaatatcatttaaaactttttcaatcaagaagaatcattaaactctgcatacaattataagtttgtaacaataaacagacaatattaaagaagaaaaataagtttatttgttgaacaagtttattttaatgtggtttttgatcttcatcgagaattcatacagtggataaaanacgtgacaattagaagtaatatagtggatttggtccatgtcttc

SEQ ID NO: 254310 - DNA, 437 bp, Glycine max
tcgaccgatcgtttaagccgttatctcgcataataaatgataaaatgaatttcaaccgatcatttgtgttgtaatctcggttaatcactgttaaaataaaattcaaccgatcattcacactgtaacctcgggtaataaaaaaagggtaaataagctccaatcgaacactttactttaaaagttcttataaatgagttgataaataatcaatgtttagttcttaaagaactacgtaggtctgatttcctcaccgcaattgaggatacataggaacaaaagccacgcttttgtcgaccccaaaaagggagagattgttaaaggtccaacgccttaacatttctctccttccataaaatcaatagatcgttaaaggtccgacgccataatgattctctcctttcaaaatcaagtgattattaaaggtctaaggcctgaac

SEQ ID NO: 254311 - DNA, 455 bp, Glycine max
  unsure (1)..(455): unsure at all n locations
agcttattattattattattatgtcgttgttgctgtttcctgacagacaaaagagagtactcattctgttgatgaatctgttggtgctaatcaataattgaagacttatatnttgttggtgaatataatttatacggaaaagttcctgcaggtgaagaaacatttcggtgctttatatggtgacaaagtattttttcccgaagtgagatactgagnttctttgtagggcattcttaaattttctaatcatttaaaaatagaacttatggaaaaaacgcactccattagaagtnttatatattcaacacctaccacaacatcttgacttgagctttngcaattaatttgatttacccttatcttgactattagtgctttctcaatttaaagcatattaaactaattgatttacatcgataagctggcatatatgcctacttggttgcttagatata

SEQ ID NO: 254312 - DNA, 349 bp, Glycine max
  unsure (1)..(349): unsure at all n locations
tgtccgaaccatggaccgngtcatggtatgccacatcaacggctctcttgttcctttcctcaaagaagccggtgctctctggctctgaaaagtagacccacccaactaacgctatctaagtataaataaacaaaaaaaatatatatgagagaggaaaaaaaacaggtttattaaacagcgcttattattattattattatcagaggaaagggatgaagtggtccttttgtgagtctcttcttctctcattccattctggatacactactactactactacttgcagcagcagcagcagcagcttcttactgacttgttaatcaatcttctttctttaactcccttcttt

SEQ ID NO: 254313 - DNA, 431 bp, Glycine max
  unsure (1)..(431): unsure at all n locations
agcttctttgttagacctcgatcggtcatctttctatgccgaggtcgaccgtcatttttttcgatccatttcggtgaataatattcttttgccgagatgggcaaaatgccagtttcggccgaataaatgggaaaatgccagtttcggccgaaacgaaaagtcggttgggctcgcacaaaaaaacctagccgacctacattntaaattntttatgcaacaccaaaacaagaaaacttcctgtgccgtaaaaaaataacattacatgacagcgagcgttttgaaaaacaaaattgcgcaacgtcggctgaaaaatatcagtcggggctgtttcacgaccgatgtcggctattgagttttcaattcaatccgtgaacgaaatttgcatgatgtcggttaggaaatgttcgatcggcatcatcctgtgaagcttc

SEQ ID NO: 254314 - DNA, 391 bp, Glycine max
  unsure (1)..(391): unsure at all n locations
tcaccggatgacgccgatcgaacatttcctaaccgacgtcatgcttatttcgttcacggattgaattgaaaactcgttatgcgacatctgtcgtgaagtagcgaccgatatttttcagccgacattgcacaattctttttagaaaagctcgctggtcgataatggtctttctacggcagagtaagtattcttgttttggtgttgcataaaaaagttacaatgtacttcggctaggttttcgtgcgaagtcaaccgacattttgtttcggccaggaaaacattagcccacctctgcaaaaaaatatttgctaaccgtcttcatgcatatttcattcaacgattgaatagaanactcaatagccgacaacggtcgtgaaatagtcccgactga

SEQ ID NO: 254315 - DNA, 455 bp, Glycine max
  unsure (1)..(455): unsure at all n locations
tggtatctttatcagtgttaggaaaattattaagaagcagtttctcatacgactnttatttgatcaaagagtttgagaagttattgaaaccataaaaggaaaatatggtgggatgcaagaaatatctgctattatgtttctggtagataatggtttcttacctatatcttttcatctgcatatatttctttctgccttctaatgttaccaaaaataacaaactgattagggccatttcagctatttgtttagaagccaacaaaatgcaatagttaatcaattttctgcaattaagaaggcatcaattaataatttaaaagaaaggacaatctgttatcacatctnctttcttttattgagtattttgttggaatccgcaacagatgatgcataggacaattttctatcttgtcttccactgatatttttgttctttactacattggtaagccaca

SEQ ID NO: 254316 - DNA, 475 bp, Glycine max
  unsure (1)..(475): unsure at all n locations
catgcaagcttcccgggacattctccaagatgttcattagagaaggtgttgtgcatgcagtggaccaacttattntatcctcaaattcaaccaatatctctacacaggcatcttctgctgagaaggataatgattctatatctggagcatcatctcgctctangcgttatcggcgacggagtgggaattccaatcccgatggaaatcctttggacgatttgaaaaactccagtttcagtaaatgttggttcacctccaagttctgtggatatgccaacattaaatttcagtattcggctatctggtagtacagctgccaaagcttttaaagataaatactttccttcagatcctgcggctgctgaagtgggtattactgatgatcttttgcatctganaaatctttgcatgaagttaaatgctggtgatgatgaacaaaggactaatggaaaggcggaatctacaacttctggat

SEQ ID NO: 254317 - DNA, 423 bp, Glycine max
  unsure (1)..(423): unsure at all n locations
ntagccaactgagtactccattgaacatgggttctgaaagggtaataatgacctgctctgctcgaaaacattttctccattttcagttgcttggggttggaaaatgactcacggaaaatccaaaaaatttaaccaacagagttctgtgagctgcagtggagtatggtttgtaccctttaaggtattgacgaggcctgaatgcctgatggtttgtgcattgcattagacctctactaacaccccnttttctagaattcctatccactgtttgttttttgtttaagattatggtgtaactgtcaagagaatggagaaatgcacaaaagcttttattattgccatttaagattacacgtttgtagatgctataatacagactagttggatatcagtttaagtgctgtagaatgaactgngtcttga

SEQ ID NO: 254318 - DNA, 433 bp, Glycine max
  unsure (1)..(433): unsure at all n locations
agcttgtagcatattcaaacgaccataacgtttaactcggatgtctgattgaggcccgtaatatatcgagacactcgaaattgaaaacagaagctctgaggaaattcaaacgactataactttttactcggatgtccgattgtgtcccgtaatatatcgtgacgctcgaaattgacaacataaggtctgagcaaattcaaaccgacaataacttntactcagatgtccgantgaggtccgtaatatatcgagatgcttcaaattgaaaatagtagctcctagcaaattcaaaacataataaatctttactcggatgtccgattgagtcccgtactgtatcgagacgttcgaaattgagaacagacgctctgagcaaattcaaacgacactaactgttntctcggatgtacgattgtgtgctttagtatatcta

SEQ ID NO: 254319 - DNA, 219 bp, Glycine max
  unsure (1)..(219): unsure at all n locations
catctgtgcggtatttcacaccgcatatggtgcactctcagtacaatctgctctgatgccgcatagttaagccagccccgacacccgccaacacccgctgacgcgaaccccttgcggncgtatcgaatataaccttcnataatcgtatcctgatccacagtattacgcgatgcagctccgaccttcattcgtcagtccaccgatcaacacacacatacg

SEQ ID NO: 254320 - DNA, 473 bp, Glycine max
  unsure (1)..(473): unsure at all n locations
atggatgatagtaagaagaatgactttatgattatatatgttgtgaagaatgtgagaatacccaagtatctagacttggagtggttctctcagcaagggtttaacttccccaatctgctcgaagcacaggctctatccaagcttgtgtagatgaaaggaaccttttatccggagctggtgaaagtcttctacacatgttctcatgtcaatttagaaggtaatctcttttctacagttaatggagtagaaatgattatcgatgttgaagtttggaaggcagtagccaaactggacatgagtagagtccaaaagtttgaagaatctactaataggtacaacaagatgcaaactnttagaggtatgatccttgacccaaaaaggaacccgaggaatcgcctaggtgtagggtggttaactacagaagacagaatgctcgtgtagctcataacctatattctcactccaaggtcaag

SEQ ID NO: 254321 - DNA, 468 bp, Glycine max
  unsure (1)..(468): unsure at all n locations
tggctctcggccgacttagctaaaataatgcatcttgattacagaggggtagttgcttatcgaattatggagcgcttagcgatgacattgctgcaacgaattgagcttagctggcatgagtggtgcttagctcgattaaacccagtttaggccgcaaagaattgagcttagttgccatgagtggcgcttagccatagaatgcaatgcgcttatcgggatggtcatcgcttagcccaattcaaaccgaattgagatgggcttagctcagccttgggtagcttagtggaccaagtcagcctgagatgcaagggttgagtgctaagcgccagagactctctgcttagtgcatgaccaaagatgcacttagcgcgagtcttgcgcttagcgaaaggactacttttcagaanaaaatctctgagttattttttagtgccttcctcaagaaatttgacacccttatatgtatca

SEQ ID NO: 254322 - DNA, 466 bp, Glycine max
  unsure (1)..(466): unsure at all n locations
agcttgatgtggcatcttatgtctatgcacgacaaatctccgtgagggtcgatgttgcacatggacgattgagtgtcaagagcatctaccacttgattttcctctctaggaatgtggcgaaatgatatatcatcaaagaggcccatcgattccttgatgtacgcctgataaagcatcaacctatggtcatgggtctcccattcacctttcagctgatggatgacaaacgctgggtcttcacacactttgatcaacttgaccctaaagtctattgctgctcatatccctaaggtgcattcttcgaactctgccatattattngtaaaatcaaaacacaatctatccgagaaaggcatacattagttgtgtggagaaacccacactgccccaattccatgatctagtgcagtagacgcaccatcagagcatacagtccactcattcttgcttcatctcaccttttgct

SEQ ID NO: 254323 - DNA, 136 bp, Glycine max
tattctcttctccctttgccaaaaagaattggacaacgactaaccgcctgaattcttttcgtgtctctcttctccctttttcgcaagaacaaatgactaactgcctgaattcttttgtgtctcccttctccctttt

SEQ ID NO: 254324 - DNA, 408 bp, Glycine max
agcttgcaagctgtctctctcctaattgtatatatatatgttatttgaatgaaataaaaaaaagcaactgagggaaaaagtttctctcctcacatattcaaaacttcaagttggtaccagagcgggtcgtatccaccgccgtccgccgccgccgcgccgccgtccgccaccgtccgccgccgtccgccggccgtttcaaccggcgactacagggttttgtgtgcctcgaggagcgcaactcagcgcaactaaccgctgggccaggagcttccccacgcgccgtcacgcaccatcttcgtgcgcgccaaacgccggcgcgtgaccaccacgcgccgccctccccttgccggaaacgcgcgcgtatgcttccggccgtctcgtcgggctctcctgagtccatatcagtca

SEQ ID NO: 254325 - DNA, 443 bp, Glycine max
  unsure (1)..(443): unsure at all n locations
tatgagcagttccaaaagagagactctggccggnngtttgttgagctgctcgatgaccttgaactcgctttgctgaataatgcggaggaactcgcctgcctcctctagcaatacttctttcttgccacagccatcctttttctctgaaaaacctttcactgaaatattctcgtttggagcggcgatcactttgtcattntgttcttccgctatctttgccttccctttaacgcttgcgggttgtgtcggcaggtcagggggcgcgaacacacgaccgctgcgggtcacgctgctcagccccctgatattggttatcttggccgacaacgagctgatgtcagnggcttcttcctttcttttgcttggaggcgcatacctncacggaactgcgtggctggtttgtangggaatggaacaggtctaactactgaggngtactggag

SEQ ID NO: 254326 - DNA, 464 bp, Glycine max
  unsure (1)..(464): unsure at all n locations
agcttcttatccaaggctcatcttggtggtgaatctccttcttccatggcttattccctagtggatggcgcctcctctcacctcttctcctttgtcttccgcttcatctctatggtggaaaaccaccattaaaggacctcattgaagctcaaagatccagcctccatagaagctccacaagcaagcttccatcaagtggtatcaaagcacaagagcttcaagtaggtgctccttanacctccattaattttttgctttaccttctctttcattggtgtttcttcatttttctccatgtatctcctcacatgtttagtgctaaatgttgttaacatgattctttagaatttccaccgattaaactagctatagaagctagatttgattttctatggttcaacattcttgttcatgttcttgaaccatgagttgtggtgagtttaggttcctttgagttttggctt

SEQ ID NO: 254327 - DNA, 422 bp, Glycine max
  unsure (1)..(422): unsure at all n locations
cgcgtactgatgggtaccatgaggtgcttgctggggttgacccacgcgggtgttgaagagacggcatgggcatctnctttcttcctttntgcccctgttgccccgattcttttggcattcacgtttgtggaggaaacgtaatcaaactttcctcttttcaatccaacctcgattctttccccggcaaacaccagatccgcaaagctggacggcatgtacccactagcttctcatagtagaacactggcagagtgtctaccatcatggtgatcatctctctcttaaccatgggaggagctacttgtgccgccagatcccttcatcgctgcgcatattctttaaagggttcaccctctttcttgaacatattctgcagttgagtacggtcaggagccatatcagaatngtactgatactggctt

SEQ ID NO: 254328 - DNA, 571 bp, Glycine max
  unsure (1)..(571): unsure at all n locations
cgactccccaaccgacgatactnctttctgntaaaannnnnnnnnnactgtgacattgaactgttccctcgcgacccagagcaacctggcatcagcatggaacgccattgatggttcagctgccgactgccacccggacgaatccatagctctgaccacccgcatgccgaaatacaatgaagatgcttaaacacttatggttgctagtacacaatactacgtcagaacggcgctgaaattcaacgcctacaaccctatactactagaacggacccaatacaagggccaaaaaaaggataagaccatttctaacagttacacagaagagtgagtccaaccacagaccatgggcgcataaatctacactcaggttcatgagaaccctatggccttctgtataactctagcccaatcctattggagtcttctatccaataccctaggtgggtaagattgcatcgattcttatggtgtatgctgagacactaaacccctgatagctgatgacagtgaanactatatctgatcaacgcctctgtcgcagattctctcttgcgataactacacctag

SEQ ID NO: 254329 - DNA, 430 bp, Glycine max
agctatacagataagctagtctcagaaccaaaatgttaaatttcaatacaatttccacacaagctagatgaacctgtacactacccaagcttgaagctcaaaaactgtgctctcacttaacagattaagcttttggaacaagttcatgacaatttatgtctcataacaagaaactgtagattctgttgtagaaaatttaatattagttacttatttaagctttctattaactcttattttttttagcttatcagttccattttatcaaagacgcggtagtttccagttttatcacatttggaattttgataacttgctggaactccatccttggcaaaagataatgttcatatatgaacacgaaatacagagatcataatgaacagaaattgcaaattaatacatagtacactcttaaatccagtacacc

SEQ ID NO: 254330 - DNA, 424 bp, Glycine max
cgctgctccactggcagaagagacaccttgaaggatgacaacattggtagcatgactatctaaaagattcatcaattggctatattgctgggtagtaagctgaaactagcaacccgagtcaccagaggaaggttgtgagtgagacatatcaacagttacttgttgagcaaccttgtgtggtggttcataagaagaagaatgtttctttgcttttgaggaaaaaccattcctcttataattcgcaggataaccatgtaacttgaagcaacgatcctgagtatgacccatcataccacaatgagcacacaaggtgcgattcttggaagatcctttgaagcaattttcaggatgattgcatgcaacagaagaagtcttcaatgcaaaagcatgtgatacttcactagttgaggtggaagcaccaact

SEQ ID NO: 254331 - DNA, 460 bp, Glycine max
  unsure (1)..(460): unsure at all n locations
agctntgtgtggagcttcaatggagaatgagggagaagaaaggcaacgtgagggagagggagagagaaggcttctgcaatgttttctgctgagtgaagagagagagagttgctttttggtttttaaaaggctttttcctcttttcttattattttattcaagctctgccacatgtccctatttgattggagcaaaaagggcccactttctcttttgactgtgacccatactcagtcacaaaagtgagaaaaatctgacctttgaaacgctaaaatcctgcctcggtttgcgtgccatttctctggttccagtttctcgtgtttctctgcgtccatcggggccagtnttcgaaagcaagcaatatgtatatcanaacgctcagaataaaaccccgagcgtggttcagaggttggtttcgttaaattctaagtcacacgcaaaacgatgaattttaactaat

SEQ ID NO: 254332 - DNA, 446 bp, Glycine max
taaagtatgcccgagtcattcatccctatgagatgttgttgaagtattggcgatcagaattgccattccttggattatagggttgaaccaagctcatgcttttacaaaaaaggttcatcaagtcaagttgaaatatggaagtaaccgtcttgcaaaattggggcaaaagatgaatcgagtcacatcactgcttcgtctactgccaaacatatttaggattattgatgcccttgttacttccagtttcaccttgacaaagatgtcatggaccatgttgaaaatctaaattgattcaaccccatatcttgtgtaaaaattcgcaatacttcaactgtacatcattcgcatgcatccatgcttttcattggttgcattgctcgtttgcattctttcttgaaaaataaaataaaatgaacttaatcatttgtataaaaaagaaagggaca

SEQ ID NO: 254333 - DNA, 441 bp, Glycine max
  unsure (1)..(441): unsure at all n locations
agcttccttgagaagattcctaaagaagctagagcttagctacacacacccnctataatagctaagctcacccccatgccaaaatacatgaaaatatataaaaaaaaaaagtccctattacagagactactcaaaatgccctgaaatacaaggctaaaaccctatactactagaatggccaaaatacaaggcccaaaagaaggaaaagccaattctaacatttacaaagaagagtgaatccaaccttgacccatgggcttaaaaatctaccctaaggttcatgagaaccctagggccttctttagtagctctagcccaatcctcttggagtcttctatccaatacccttggggggtaggattgcatcgattcttatggtgtctcctgagatactaaaccctgattcctcatgatagtttagcctaatcctgatcaagcatc

SEQ ID NO: 254334 - DNA, 479 bp, Glycine max
  unsure (1)..(479): unsure at all n locations
aggagcgtgcttgnatgaacctctttaggccttaactagctgctcaataccggagggtaactccggatgtggtggactggaagaggaccattgcctaggtgacatctggtaaataactcaatggagatagtttggtgtggccatgactatagttctaataccacccatgatattaaaagtccctttttgtcaacctaaattcagtttatttaaaaaaaattcagtccccttgtccctaatttttatctcatggtttccaactttttctctccactctctcttcattatctgattttatttcaatgattcaactcctccataacctgtcctgacatgttggaatttccttaacctagttagattgaagacaaggaatatcactattgaggcataatatttttcctacatatagttcattctatacttcaaattaaaatttgaaaactcttgaggctgctagttagaccaccgacaaaatg

SEQ ID NO: 254335 - DNA, 471 bp, Glycine max
  unsure (1)..(471): unsure at all n locations
tagtgaaaatgagttgtgtataagtgagactcgttgttgtttgtgaatgatctaatgttgttntatttctttgttttacatgtcttttcaaataaaagaaagaaatntttttgatttaattacacttttagcctctcaacttagcataattgaaatttgaagatcaaaatcacgaaattgtaaatctagatttgaatgtagaattagacctatttttgtttaaaatattcaaatgaacgctaagttctaacaaaaagaaaaatattactcctccctaagatttcatttcatctgtattgcatattaattattttttgactaaaatattttaaactattttctctcttctctaatggagattggaaaaagatgaatagattctcaataaacttaagaatatatttgaaaaaatattaacagtatagtcaaaattaatggtaataaataattaacttttctaataagcataaa

SEQ ID NO: 254336 - DNA, 315 bp, Glycine max
aagcttaagggtaacacccatgatagctttgatcaacctaattcttttggctgtgtgtcacaaagcttcttggtcatggtgcttgagcaacgactgggagttccaaaaatgtttttgccaagggtgtgtgctatttcacatctctatggctgagtggagattctactttgaacgaaagcttgaggatcttgcacatgactggcctaagcatgctagtggggacattgcattggccacattctggcctttactattatgtgtacatgtggagggagaagtatgaatagttagctattgtctcaagtactataaatg

SEQ ID NO: 254337 - DNA, 437 bp, Glycine max
  unsure (1)..(437): unsure at all n locations
aaccgccgagccagatggaaaaccaaacaattggagagagattatggtgtcctcaaagccaattatgatgctcttaagcttaactttggcaccctcaatcaggacaacgaagccttacgaaagcaggtagaataataatacaacatagtataatatctagaagagttgattttgagtctaattaatttaaaataaaaagtataggtgaattttgagtgagaaaacaaacttcatgcctgaatttcctattannattttttctgggtcgtgcctttcaatctagaaactatgctcgatggatctaacctcatgcttgaaatgatcagtagttttctaattaagagctntcttctcttaatctaaccttcttttaataataaagaanaactcttgttgagaaaacgattatctaacaagaaatatttatatttgattat

SEQ ID NO: 254338 - DNA, 438 bp, Glycine max
  unsure (1)..(438): unsure at all n locations
caatttggtagcattaataatcaatatctatcgacatcccatggtatgtttattaatgctatatatatggatgcaaattgtaacgtacgaggaattggacaatctctttgttcattttgttactctttttaatttctttttgcgtttacccttttgaaagaaaactttatttttgtttatttattcatttaaaagatgaagataacattatctcttttcaattacgtccttatttttatctcatccttaaacactttacatatatttattataaataagagagaaataaaaattaatagagatcatattaagaagttaaatataattcaagaagactattaatatctatctttacgtacctgataaggaactaaaagtaaaaaacatttataagagagtgtngtaaattaatgtacttctataataatctctaatgca

SEQ ID NO: 254339 - DNA, 216 bp, Glycine max
gtcgtccgcgctgataccgattttatgttgacagctaattacatatgtccgcacgcatccgctattatcacttatccatcgaattgagcattctttaatgacaccgtggctgccgtataaaattacccctgcctgtcctgaatcagaactgttgttctcaatgagatcagccgactgtgagcatcataacggatgatcgacatgaatactaagcct

SEQ ID NO: 254340 - DNA, 469 bp, Glycine max
  unsure (1)..(469): unsure at all n locations
agctngactagacgagttgattntagccttagtttcaccttagttattagtcaattcggttaagaatgagaaatcccaaagagaaaatgtccagttgattntccgctttattttactaaaaaaggatgtttttttgattattatattattntttacctctttttgatttccaatgtggttacggcacgaacgaacggtcggaattcattttaaccgaagttaacggataatacaattcatacgatcggtggaaacttatttatttttaggttaagcaagaaatggcttaagtaaaatggcttaagcacgtcaaaagggggtataataagtaaatgaaacaagaatagaaatacacaaaacacaatgtggaccaccatgggtacatagaatgaatcgaanagcttggttcgaggtacttacccgttgaagatcgaagaacgaatgaagaacgtcgaagaacggttgaaac

SEQ ID NO: 254341 - DNA, 468 bp, Glycine max
  unsure (1)..(468): unsure at all n locations
gcggattggtcttcgccggtgaaagggatcaaaatggattggaaaatggaaaatatgattatcctactttgatgaatgtaaaactggngcaatgaagaggatgagaatgagggagaaacccttgctatgactgccattcctacatggtcaaaattgccatcagcccaacaatgtcattactcagccaataatagtccctctcacccaatcatccacaaaggccattcccaatcatccacaatgcctgcccgctgcacatctggtgccaaaacaccaaccaaaaaggaatttcgtagcaaaaagcctataggattcaccccanattccggtgtcatatgctaacttngctccatatctacttgataatgcaatggtagccatagcccttgccaggggtcctcaaccttcatttatncgangatacgactcgaacgcaacacatgcatatcatggagaagttctgggaca

SEQ ID NO: 254342 - DNA, 353 bp, Glycine max
atttgactctgcagctctcttgagatactgtatttcttattttccttgactttttgacttcttttttgaccacaatgccactgtattttaagtttggccatttatctttagttaaaatatgttgttatccctccccttgccaaccaaaaaggtaaaaaagcataatattaatcctattgccaagtcctgtgctactgcacgtgttatgtgtgagtgataaatgttacctctcctttcagtcatctaccttctttgaaaacataacaatttacgctgttgaggaatgtggctaagtgtttgaaacttgctcttattatgttcagagaagagtccagacttaaagaagatattat

SEQ ID NO: 254343 - DNA, 461 bp, Glycine max
  unsure (1)..(461): unsure at all n locations
tagacttcaacatacatcttgcagttaaacattctattttcttagacaaactgaacagcagcacaggccagatacttctcatattgccactaatcacaatcattgttacaattacgcattagcaataagatcaacatttgtttaatctaacccgcccccaaaacaacatttgatataataaaattgcaagggtctccatcccaaaatttatgtagctcaacagcaaataaccaatcaaaaagataccatatgggtagctcaaaggtctattaataagagagcgatgtcaagcaaaacattagagtccatgtgtgactgaactgggaaaaataaaacaatagaagattntagcacgtctaaagaaaactagatttgaagtttctttactacagaaatcgtaaatntaaatgataccatatgggtagctcaacagcaaataaccaatcaaaaagataccatat

SEQ ID NO: 254344 - DNA, 403 bp, Glycine max
agcttatctccttgagaagctttcttaagaagattcctaaagaagctagagcttagctacacatacctctttaatagctaagctcacctccttgagatgagaagctagagcttagctacacaccccctataatagctaagctcacccccatgacaaaatacatgaaaatacaaaaaaaaatccctactacaaagactactcaaaatgcctcgaaatacaagctaaaaccctatactactagaatggcaaaatacaaggcccaaacaaaggaaaaaactattttaatatttacaaagataagcgggctcatacttagcccatgggctcaaaatctatcctaaggctcatgagaaccctagggccttcccttggatctctggtccaatctacttggagtcttata

SEQ ID NO: 254345 - DNA, 374 bp, Glycine max
tcgcatggagctacatcaaataaaacaccaaatagacttagtcccaggaacaagccttcctaataggctaacttataggactaatccacaagagaccaaggagattgaatcccaagttaaggaattgttggagaagggttgtgtccaatagagccttagtccttgtgttgtgcctgtgttgttggtgcccaagaaggatggttagtggagaatgtgtacagattgtacggccatcaacaacataactgtgaagtataggcaccccattcctaggctcgatgatatgcttgacgagttgcatggtgcacacatattttccacaattgatcttaaaagtggttatcaccaaataacgatgagagaaggtgatgagt

SEQ ID NO: 254346 - DNA, 191 bp, Glycine max
  unsure (1)..(191): unsure at all n locations
agctnggaaacaagangaagctatccgagtgacttctaactgtgaggatagatatgcatggcattgcaactcgaaatgaatatttttacaacaactacattatttttaacatgacattcacacagattctgatcttatatagccaatccaatgcgcccgatcttttgttgtagtgctccatgtttcataga

SEQ ID NO: 254347 - DNA, 76 bp, Glycine max
  unsure (1)..(76): unsure at all n locations
tagagccataatcntgactcaccatatacctctactcaaggtgttaatgccgatgcttaccctcggtagtcacata

SEQ ID NO: 254348 - DNA, 473 bp, Glycine max
  unsure (1)..(473): unsure at all n locations
agctntatatttgtacccaacttcccatttagagtggtgtcttgtgagatctattggtgctngtccttggccatttaattgtcagaatatgaatatggctttagtttcatccttcttgtactcaaatgctagaaagagagttgtgaactatttgctgagatgtgaatcattcgggcttctaactttatatttttatgctatgatctctcagtggaagcaatgctaaagctgaagaccaatctctggaagcatggtaaatttgtcaataggaatacaccttttctctctcctgtaagcatattgctgctaggcatttttaaggttgataatgtacgatacaaatgggcaggcttgagcggaaactctctgagcaaaatatgggcgctcctcctagctatgaagaagctgtcagtgaatctcgcagccctcgtcacagtgaaaggtatgaacttttatactacagaaagcactta

SEQ ID NO: 254349 - DNA, 461 bp, Glycine max
ctcattacatggagactgaaaaagagagaataagctttattagtatttggtttcttttcagctcctactactttgatagctacgcctgtgacactgaaaaggattgagaaaacacgcttcttatttttatttatttatatctataagatatgagatagagagagctgcgattactattactattgagacatccaatacttgctcatctcaaagccattcctgccatagggatagtcttcaattgtgttctcaatctcagactgcgtgttcatcacaaaagggccatgctgaacaactggctcattaagtggttggcctccaatcagaacaaatctcaaaggctgtgaagagttattccatacgctgaggccatcaccttgagtcaaaacaaggacatggtgtggcacagttggggatgatgttggagacccgaacacttcttcaccttcaattatataaac

SEQ ID NO: 254350 - DNA, 457 bp, Glycine max
  unsure (1)..(457): unsure at all n locations
agcttgtangattatggtgtactcatcacatgtgtgtactaagtggcggccgggcgatggtgcacaacaagttttccacatccacaatgcgcgcataaatccaccatcccctgttgcccacctacaactgagctcacgtactcccacgtagcccatatcctcgtttctctcaacaccgggtccccatcaatccttccaagcttccacaacatccaaacacaacaactattaaacagaacaagctatcacagccaagcaaaacatagcaaaggcagaaaactctgctcaacacaccaaccaaaatcacagcttttctcacttaaagaccccagtaacaattcctttgttgcgttcattaaccgctggataactccaaactttactgcagtctatgtacataagcctcattggaccgtgggattacttcaaacattagaactatttacattctcttttc

SEQ ID NO: 254351 - DNA, 461 bp, Glycine max
  unsure (1)..(461): unsure at all n locations
ctgatcctcataaatatgaaaggtaaagagctctcatatccggtgaattttgatatagcgaagaagctttatgcttgagaaaaaagctcgctagattgaaaacccaaaagggctatttaggcaaaaggtagagcttaaaaaattaggttgaaaacccgagagggcgatctatgaaaagttggagtaacctgccaagttgaaaggagcatcttgagaaggaagacgtggaacaagaaattatggcaaatgtgtgttaaaaatcatctttctcttaagtctattgtcgaccaatcaaagctactaacatgtgtactagcattaatattcggaaagcgtcacttcatcaacaaaatcatccacttatgttgtcattctctacatctatcgcacatattattattttctcttttctttggtggattatccctataactatntcaccttatcttgaataaaatcat

SEQ ID NO: 254352 - DNA, 453 bp, Glycine max
  unsure (1)..(453): unsure at all n locations
agcttattttctttcttataatttcatggcattgtattattttggaagattgagtggatttattcttgattctattgtcttatatgttttgtgtcaatctatttagcatttcccctctttaatctattntattgtcttccattaatggttttagagtcaaacaaatgacaatagaattgctaatattggtgcaggtgcatccatatacttaccgaaatgagttcccaattttgcacttctacttcaatcaagatttgtatatcaagtatgactactggatcgacaagataggcgttggtggtctcattacagacttcactagtagtcttcagcattattatgaatggacctctaaccataaagatgatgattcctttttaaaagtcttgattcttttctgcatcattattcttctatgctgaagatgggattgaattcattccaacatcaatc

SEQ ID NO: 254353 - DNA, 467 bp, Glycine max
  unsure (1)..(467): unsure at all n locations
tcaagaagagtagaatgcanactcaattgtagtagatgcaacctaccaaacccatttggacaagattgatggggttgagatgatatggagagaaaaaaactccattcgtcacacaaccaattcagagagtagcaaacactaacactcagctacatccctttgttgatgggatcacagaggcacacctaaatggaggacgttgactattgattgttatgatagactccgggacccggatgaacatgtggatgcattcgttacacaaatgagtttgtttacaaatagtggcacaatcatgtgttgagaattcccaataatgttgaaagggacaacacatcattaatatactcacctttcgagaaactccattgactcatttgtgactcttagtatgcattttagagtgcagtacacaacaattagatcacatcacctgacagcagtggcactcactaacattcgacaag

SEQ ID NO: 254354 - DNA, 466 bp, Glycine max
  unsure (1)..(466): unsure at all n locations
agcttcgttggtgccctgngttntgttatattgatgatttgtgatatcaatcaacatgttcaattntgtggttttatttatttatcttaaatatattttttatagttnttttttcttttccttttttttgctgaatgttcaaatttggtacttttgaatccatggtccatgatgctagctagctacctcgagttttgaaatgcagtttgatattgtgatattattgcccccaaccgggaaaagtagtggttcactttattgagctgagttttcaagtgcttatggaagtggtgttaggttttatatgttctagcagcagtgggactgggaatggagctgctaatcgcttcttgatagtgtgaataagtaataagtagtgttttatgtgttcatatcattttgtatttcatttccttgtagatctgtccttccctcttttaaagaacatcgactatgtgaggaatgc

SEQ ID NO: 254355 - DNA, 445 bp, Glycine max
  unsure (1)..(445): unsure at all n locations
ggctcacaaaatttcaaggtcattggatatcatttaatggtagctgtagttcaaacctacattgttacttgcataagaagacaactagttgtgtgcatgctgaatgtagtgtatgactagaggcaatccatctgacttacaatcctttgaacctaatatagataggacatttcatagattagttagacatcattttataccttttgagcatcctgagcattctgttactggagagtatgtgcattctgttattggagattttgaacatcttgattttgagcattataattntgaacattttgattgtgaacattntgagaacatggcacaacctccacctcgtgagaggactctaagggaaatggttgcacctgatttcacctacgaaagcctatgcatncagtaccctgatgaggatgtcccatatgttcttaanactggactg

SEQ ID NO: 254356 - DNA, 470 bp, Glycine max
  unsure (1)..(470): unsure at all n locations
agctntaactatattngatattggatttaccatcatattcaaatgcgaggctatgagtgtggctattatgtcatgcaatggatgtggaccacaatcatgtgggtttgaagaatgaatgaaacatggtgtactagtttactttaacaagtttcaattattagacttttgtcgcaaccaacctcacgatgggacaacaaaggaaaatagaagacacatcttctaaaaaagaaaatgagtgggagtcgccaccaatgtttatttgaggaaaatgttagaaagaaaccaaaacaagaggtctacgaattttgaaaataagggttcgggagttgtttacgcatggggaggatattagcacccgatgcgccctcacaagggatgggcagcctttaatcgagtgtgcacaacgtgacttcaaaattatttattttcccaagagttgtgaaatggttttattacattatcttattggt

SEQ ID NO: 254357 - DNA, 458 bp, Glycine max
cgcttctacagaaatatctttagtgctatataactcactggtttaattgactaccgcatttgtgtaatcgattacataagtcttcgagaagttatagatagatctaatgtagctccatgtagagcttgtagtccttggatcttcttcatcaatggagacctttgcttcttgaagatcaatggcagcgaaatggaggaggaggaggaaaggtgattggagacgccacttcaaggagaagatgagttaagaacaagctcaccaccataggaaaccatggataatagcttgaaggtaggagatgatgactagaggaagagggagagagggagaatgaggtctgaactttgaagtctaatttctcaaatgatcaaagttgaaaaatgcacatacaaggcctttatttatagccacacaaaattggagggaagattgaatttctattcaaatttcacttgaat

SEQ ID NO: 254358 - DNA, 390 bp, Glycine max
ttaacaaggccttcatataataatattgcatgccaatgcaggcacaacagcagggtcaagcacagcagcagcaggcatccgcagatgcgccgccaccacctctagggtagctaccatccctggtgttcatcttcgctcacctacggaggatgtaactacagatgcacgcatatatgcaacatgtgaccgaccaacatatagctaatacatagggtcaggtgcagttgcatggcctatagataaggccaatgttcagacaggggcagaacccgcaggactaccggagatggagatggagcacaagatgatgatgacatggccgatgtgatggacttcattctttgaggagatagagtcgcttggatgggatcgcctataactgtgaactag

SEQ ID NO: 254359 - DNA, 437 bp, Glycine max
gcccaatagaatgattcaggagtagacatcaagaagaatcaagattcaagagaagatgaattctagattcacgagaagaaatcgagaagcaacacgtcaagacttaacaagggaagtattgaaaaggatttttctaaaaccaaacatagcacaattttggtttaccaaagagttttctcacatttttctaaggtaccagagtatttactctctggtgatcgaccaccagtttcctgtaattgattaccaatgataaaatttgatttcaaaaagatcttaactaagattgcaacgttccaaatgagtcttaaatggtgtatctgattacaatatattggtaatcgattacgagtgtatctgaacattgaaattcacattcaattgtgaagagtcacatcttttcatataatgcattgtgtaatcgagtacatgattat

SEQ ID NO: 254360 - DNA, 450 bp, Glycine max
  unsure (1)..(450): unsure at all n locations
agcttgcatgatttacatctcccctttctcaagctaattcttcttgatatcatcaaagtcttcatgatttacanttctcccctttntgatgatgacaaccacctgtaggttaggagcaacaacaaagaataaatatctatttgcatatagtttactctcccttggttttgcaatgattgcttatatgagacagttgaagacttcatatctttcatatgtgtcgcaacgtgcctttctcgggcgagcgatggcgaggcttacgggtgcgctttccaaaggaggagagatgcgcggagtcgccaccaacgtttatttgtggaaaacgtcgggaaaaccgaatgaaaccggtcaaaatgaaaattctaagttcgagagttgtatttacgcttgaggaaggtattagcacctctcacgtctgtctcacaggacaacagcttattttttagaatt

SEQ ID NO: 254361 - DNA, 108 bp, Glycine max
tctttttttccatacatgaacaagagccttcgatatatctcttggatcaaaaactcattcctatggtattattaatatgacacccttaacatagcactaccatattat

SEQ ID NO: 254362 - DNA, 472 bp, Glycine max
tacccatcacatgtggtactaggtggcggtcgggcgatggtgcacaacaagctttccacatccacaatgcgcgcagaaacccaccatcccctgttgcccacctccaactgagctcacgtactcccacgtagcccatatcctcgtttctctcaacaccgggtccccatcaatcctctcaagcttgcacaacatccaagcgaaacaaccattcaacagcataagctatcacaaccaagaagaacagagcaaaggcagataactctgctcaacacatcaaccaaaatcacagcttttctcacgtaaagaccacagtaacaattccttcgatccaattcgttaaccgggggatcgactccaaaattttactggaagtgtatagtgcataagcctacattctgaccgttgggatctactagcatacatccagaactcattctacattactctgtccacaaccagcagatacatggat

SEQ ID NO: 254363 - DNA, 476 bp, Glycine max
  unsure (1)..(476): unsure at all n locations
ngctctanattacattgatgttggtatttattgtaggaggttgtatgccatttttgttttaagggtagcatttcttggtaaaactaactttccaaatgtttgccttcgcaggaaatggccccgaggaagcttgtctcaaagaggtccaggaaggacaaggcggccgaaggaactagttccgctcctgagtatgacagtcaccgctttaggagcgctgtacaccagcagcgcttcgaggccatcaaggggtggtcgtttctccgggagcgacgcgtccagctcagggacgacgagtatactgatttcctggaggaaatagggcgccggcggtggacatcactggttactcccatggccaagttcgatccagaaatagtccttgagttttatgccaatgcttggccaacagaggagggcgtgcgtgacatgagatcctgngtaagggtttagtggatcccgtttgatgccgacactat

SEQ ID NO: 254364 - DNA, 485 bp, Glycine max
  unsure (1)..(485): unsure at all n locations
agctntntagcttataatccaacaccataattggtatgcaacanaaagggaactggctcaaaatttctagtagaaaagaatttcccaaggtctttcttagtaattgggtaacaactcacattgatattcccagttaacaatttttttattttttttacaaccccattgattaatacaattctctttgcagaagaataatttcttgattggctaatgtaggagtctcatcacatattggtattgttgacaaaaagaaaattaatcttatccccaacaaaattcaaatgttgctaacgaatgtctatctttattaacaattcatttgtcactagtacaaagtcactgcgaattaataatcttcagccttatagggaactaagcttataagacaccaattacaagtattaaagctactgatcttagttaaattaagtgaaagtctgtgccaaaatgatcaacagatggcaccccaaaatccatattca

SEQ ID NO: 254365 - DNA, 400 bp, Glycine max
  unsure (1)..(400): unsure at all n locations
ctaagcttccatccgctaactacaaaagatgtaaactcaaaactaatatttgtttgtattaatcaaaatatttgaagaatctgattcgtcttataactcaaacataatctattcctacccaatttcatctttagaagaatcacaggtgaaattcatgtgtaagagtgattaatttttgtataagcatccaatttttaagataaaattttaatattctcaccaatgttgtaaaaattgacccgatcactaacctaattaaagtactggggtcagagtatcaaagtcagatntaataatatggttctcaattttcatatttcaagagacaaaataacgaatgcctactagaaatcaaataatataggaaattaaacaaaatattgtgacaaattattttttt

SEQ ID NO: 254366 - DNA, 481 bp, Glycine max
  unsure (1)..(481): unsure at all n locations
agcttctcaagacagcttacatcatgtgatatcatagcaccagatcttcaagtatgtgctccttaaacctctatttatttttagctttacctttccatccattggtgtttcttcatttttctccgtgtatctcctcacatgtcttgggctgaatgttgttaacatgatttttttgaatttccaccgattgaacttgctatagaagctagatctgattttctactggacaaatttcctgttcttgttcttgaaccatgaattgtgttgagtttaggttcctctgagttttgtattgctatcttttgtggctgaaacctgaaccatataattcttacaaaaacattcaagtagaagaaaatctccaaaatctagagtggcatgttcacctatcatagttntgtcatagaggtcatgtctagtcttgaaacttgtcacataagattccttatgtcgtgctgaatttatcttttctttttctttg

SEQ ID NO: 254367 - DNA, 485 bp, Glycine max
  unsure (1)..(485): unsure at all n locations
actcaagcttatccttatggctggcctccggacttcactccccgtgccgctccggaagatgtgagccaagcccctacctttgaggggcaacttcctccttatgccgattaccccctgcaagaagacgacgaaggagatacccatctaggccctttgcttcccctcaaggatccatccccccatgaattacctcaaccaaacatagtccgccatgtcccatcttcacccgcacccgtaaaagaatcttttcccttcacagaagataagggaaagattgatgcgcttgaagagaggctaagagcagtagagggcctcggcaattacccgttctcagatttagtggacctatgtctcgtgcctaacatcgtcatccctcccaagttcaaagtaccggatttcgataagtacaaagggacgacatgtccgaaagggcatcttcggatgtattgccgaaagatggnggcgtattctgcggacgaaaagct

SEQ ID NO: 254368 - DNA, 449 bp, Glycine max
  unsure (1)..(449): unsure at all n locations
agctntcctacaagtcctaattgtacatttanactatgatcaactcactntagactccaatttacactaaccccaaatttagcttttcaaaccctcaaaacctcacacttttccactcatatcactaccattttcacatttaaccctaggttaactctcccgatcatctctaccagttttctaccaacaatgtcagcacacaaacatcacaaagcatcatcatataaaccctaaaacagaatgggtagctttactcacatcaaacatgtcaagtttagcatgctttcaacaaattctttcacaaataactaccataaggcataaacctagtagaactacccatcatatctcccagaaacccaatacccacgaatttcatgtgaaaacaagtccacccatacctgaaagtaggcaatatatatatcanaacactcataatgaaaccctga

SEQ ID NO: 254369 - DNA, 416 bp, Glycine max
  unsure (1)..(416): unsure at all n locations
cgcttgagccacaatcctgacacaccatanaccttgaccctaggtgagaatgtcaattcttaccctcggaagcaaaaaaaaaggggagagggaaaatttccaatcaaagacgaagcaaaacacgagagaaggaaaatttccaatcacaggaaaaaaagagaggaaagggaattcccaatcaaagagtgggagaaagcaaaaagaaaagaaagaaaattctcaatcaaagaatgggagaaagaaaaagagaagaagaaagggaagacagttcccgatcaaaaaaaaaaataatatgcagaaaggtctttggaccggacaatatctgaacaatacagaattgtcaccaaatgaataaaaagaaggaaagggaaccatgacctaaaatggtcttccccctatagttgccaggcaaaatc

SEQ ID NO: 254370 - DNA, 470 bp, Glycine max
  unsure (1)..(470): unsure at all n locations
agctatcttgagaaaacttccttgagaagcttctttgaganaacttccttgagaagctagagcttagctacacacacccctctcataactaagctcacctccttgagaagcttcattaagaagattcctaaagaagctagagcttagctacacatacctctctaatagctaagctcacctccttgagatgagaagctagagcttagctacacaccccctataatagctaagctcacccccatgacaagaaacatgataataaaaaaaaaagtccttattacaaagacaactcanaatgccccgaaatacaaggctaaaaccctatactactagaatggccaaaatacaaggccttgacgaaggataaacctattctaatatttacaaagataagcgggctcatacttagcccatgggctcgaaatctaccctaaggctcatgaagagttatgtccatttgaatttctcga

SEQ ID NO: 254371 - DNA, 462 bp, Glycine max
  unsure (1)..(462): unsure at all n locations
ntctatctcttctntaaataaagatttggtggtagagaccccaactagtggttctgtgttaacttctaatgtgtgtttggattgtcctgtggaagtttctggtaaaataattatgattgatctgatttgtttgcctttgagccaaattgatgttattctaggaatggactggttatcttccaaccatgtcttgttaaactattttgataaaactatggtgtttgatggttttggagtgagtaaggatatgatgttcatctctaccaaccaagttgtgtgatgaggacatgaccaagagcaagggcaaggatccacttgaaggacttggaggacctatgacaagggctagagcaaggaaatccaagaaagctcttcaacaagtgttgtccatactatttgaatacaagcccaagtttcaaggagaaaagtccaacgttgtgagttgatgagaatcctgaaact

SEQ ID NO: 254372 - DNA, 475 bp, Glycine max
  unsure (1)..(475): unsure at all n locations
agcnttctcagctttgtcttcttcactctntcatgaactcatcatcatcttcatccaatggatccttctccacttcatcatctgcataatctgagtcagactcttcaccaggaattattctgccaatagacttatttgaaactttccttgactgtgcaccacgattntgctcattccctttatccttgggttttacgtcgatggctttaccagaaagtgacgatgtcacagcattgtttagcttttcaacttcaggtagaaccatagaattcatgaaagcatccaatggatctatttcctcatcttcaggagcaccagcaggtccatcctgtaaatcagatgcaattgtcccattaacagtatctaccaccatcacatccttaggctccttatcagcaggtttgtcatcttcatcaacatccatacctgtctgcttcccagtacctggtccttcttcatcatcagaatccccttc

SEQ ID NO: 254373 - DNA, 468 bp, Glycine max
  unsure (1)..(468): unsure at all n locations
tanacctgcagcattgcattagtaaatagttggcacatgtaataatgtaagatatgatacacttctggcagtagtattagaactacgaattaatattgctgaaaataatcatgttgttgaagatactcctcagcgtcactttgttggatggagtcgtacaaaaataaatttgattaataaaattcgaacatctaattaataaataaataaacttcgattaaaaaaagggcttttntgtcctttaaatatatatttgacttaactactcattttaccatcatcatccaactatatattatcatttcacaaatactatcactcaaagttttttttttatgaattntacctgtctaattaattnttaaatttaacaattgtatcacctaagttctttaagttnttttatgttttaatttcttttatcatcccgtgggtaataaaatgataattcttttctagtgacacgtc

SEQ ID NO: 254374 - DNA, 431 bp, Glycine max
  unsure (1)..(431): unsure at all n locations
agcttcaccttctggtcctcctcatagatgtggtatgagacaacatgctctattntcatctcccactccaagtaggccttcggatcattctttcctttaaatggaggaatgtagagtttaataccatcaattctgttttgtctaggaacaccatcataccctctcctcctcctttcttcttcattatgatctctattctgcatttgatccatcctctcatggaacgcatcatcttgttgttcattaacctctccatatgatgcatcaaagcttgcatttggaattgcgaaagccccactccatcattaggattagtacctgacatctcaaacaaacaaatcaaacgtaacaagacaattatagttgctgtttgaatacctcacccactcaagtgtatcacacaatcatggcttttttataatgaaacactc

SEQ ID NO: 254375 - DNA, 449 bp, Glycine max
  unsure (1)..(449): unsure at all n locations
tcaccttctggtcctcctcatagttgctgcatgagataacatggtctattttcatctcccactccaagtaagcctccggatcattctttcctttaaatggaggaatgttgagtttaataccatcaattcggctttgtctaagaacaccatcattccctcttctcctcctttcttcttcattatgatctctattctccatttgatccaacctctcatggagccgcatcatctcgctgcttattaacctctccaaatgttgcatcaacgcttgcatttggaattgcgaaagccccactccatcattaggattagcacctgacatctanacaaacaactcaaacgtaacaagacaattatagttgctgtttgaatacctcacccactcaagtgtatcacacaattatggcttttctctaatgaaacactcttgcctcttaccactctaattc

SEQ ID NO: 254376 - DNA, 449 bp, Glycine max
  unsure (1)..(449): unsure at all n locations
agctntgagcanattcaaacgacaatataattttactcggatgtctgattgagtcccgtaatatatcaagacgctcgaaattgaataccgaagctctgagcaaattcaaacgacaataactttttgctcggatgtctgattgagtcctgtaatatatcgagacgctcgaaattgaataccgaagctctgagcaaattcaaacgacaatcactttttactaggatggctgattgagttcactaatatatcgaaacgctcgaaattgaatgttgacgctctgagcaaattcaaacgacgataactttttactcggatgtctgattgagtccatgaatatattgagacgctcgaaattgaataccgaatctctgagcaaattcaaacgacaataactttttactcggatgtccgattgggcctcgtaatatatcgcgacgctccaaattgaa

SEQ ID NO: 254377 - DNA, 415 bp, Glycine max
  unsure (1)..(415): unsure at all n locations
tcaacattcaatatcgagcgtttcgatatattacgggactgaatcagacatccgagtaaaaagttattgtcgttttaatttgcttagagcttcggtattgcatttcgagcgtctcgatatattacgggattcaatcagacatcagagtaaatagttattatcgttttaacttgcttagagcttcgataatcaatttcgagcgtctcgatatattacgggactcantcagacaaccgagtaaaaagttattgtcgtttgaatatgctcaaagcttcggtattcaatttcgagcgtctcgacatattacgggactcaatttgacatccgagtaaaacgttattgtcgtttgagttttctcagagcttcggtatgcaatttcgagcgtctcgatatatttcgggactcaatcagacat

SEQ ID NO: 254378 - DNA, 395 bp, Glycine max
agcttccattgttcaatttcgagcgtctcgatatattatgcgcctgaatcggtccttcgagttaagacgtatgaccatttgaatttgtcgagagctctcgttgttcaatttcgagcgtctcgatatattatgcgcctgaatcggacctccgagtgaatagatatgaccatttgaatttgtcgagagcttccgttcgttaattttgagcgtctggatatatcatgcgccagaatccgactccgagggaatagctatgatcaattgaattgtcaagagcttcattggtcatgtcgagcgtctgatatattaagccctgaatctgcctccgaggaatagtaccaccatttgaatttctcagagcttccgttgttaatctcgagatcttgatatttatg

SEQ ID NO: 254379 - DNA, 454 bp, Glycine max
  unsure (1)..(454): unsure at all n locations
ctcgagaaattcannatgtcataactnttcactcggaggtccgattcaggcgcataatatatcgacacccccgaaattgaacaatggaagctctcgagaaattcaaattgtcataacttttcactcagaggacccattcaggcgcataatatatcaagacgctcgaaattgaacaacggaagctctcgagaaattcaaatggtcattacttttcactcggaggtccgattcaagcgcatcacatatagagacgctcggaattgaacaacggaagctctcgagaaattcaaatggtcatagcttttcactcggaggtccgattcacgcgcataatatatcgagacgctcgaaattgagcaacggaagctgtcgagaaattcaaatggtcataactnttcactcggagatccgattcaggcgcataatatatncagacgctcgaaattgacaacgg

SEQ ID NO: 254380 - DNA, 587 bp, Glycine max
  unsure (1)..(587): unsure at all n locations
cttactactaccttcggtcggatcgtgatggtaacaatttctatangagtaaactacagtgcgcctctgaacttgataccctctnanaaccncgtatatcttcctcatcactcctgcatcgcaactcaggatactcttactcttacttcatcctgcggttggataggaaccaggtctcactggatgccctcaaattacatctcatgatacaaatgccaatatgatgagttggtaactttatgccacgactggcatgcatgtaccgacgcggactctccagtgtcacatcttaagtgccacgcgatgctatggctcagcatttttttcccatatatttgaccaacctaatgtctccagaatatgtccttttatcaattcgtgcgttcatccgaggccatctctggcgttcggtaagatttcacaagcatctctctctacgtcgggacagcgtttccacaacattgctatgaacagcgaattattcacataataagcactacaccatttaattctttaacacgtcatgattgagcaaacagctcattgtcgacctcaccacccgtcttagcagcgtcttgtccgatacg

SEQ ID NO: 254381 - DNA, 321 bp, Glycine max
  unsure (1)..(321): unsure at all n locations
tatgcccaagtatacccggaaaaagacgctagaggaagggtgatcgactctttacaccaagaggcaaccatgtggatggatcgcgttgctcttaccttgaacgggagtcaagaaccttcccgattgttagccaaggccaaggcgatggcagacacctactccgcccccgaagagattcatgggcttctctgctattgtcagcatatgatagacttaatggcccacataattagacatcgttaggaaacttgtatggtctctaagaccttgactagatacgacttnctttctgaaataaaatgagttggtcgcatgttctac

SEQ ID NO: 254382 - DNA, 478 bp, Glycine max
  unsure (1)..(478): unsure at all n locations
agcttccncaacatcaaagtaaatcaacattcanacagcacaaattaccacagccaagaaaacagggcaaaggcagaaaactctgcccaaaacaccaaccaaaatcacagcttttctcacttaaagaccccagtaacaattccttcgatccaattcgttaaccggtggatcgactccaaaattttactggaagtctatagtacataagcctacattttgaccggtgtgatctactagcaaacatccagaactcattctgcactactctttccacagccaaccacacacaagcatttttctgcacaaagccaaaatcctgctgcacctattttgacagcaaaattctgcataagtgcagatttcgaaaatcacccttnctctcatccaatctttgccaaatcaaatcctacaagtcccaaatcatgtatcaatcatgtctaaaccaaggtcaagcttcanaacanagcaacacagaatc

SEQ ID NO: 254383 - DNA, 286 bp, Glycine max
  unsure (1)..(286): unsure at all n locations
tnctcgtggcttctttgagaagctntctcaagaggcttctttgagaagctagatccttatctatccacacccctctattaactaaattaacttccttaaaaataattacggatgaaaataacgcaacaaatattcaaacatcaaacataattactaatagtatatagatatatatatattaagggtgtacaactctcccacccttttagaaatttcgtcctcgaaatttaccttactcaaacaaggatgggtgagcttctcacatctgactttctatattccatgt

SEQ ID NO: 254384 - DNA, 456 bp, Glycine max
  unsure (1)..(456): unsure at all n locations
cttctatggaggctggatctttgagcttcaatggggtcctttaatggtgattctccaccatggagatgcagcggaagacaaaggaaaggaggtgagaggaggcgccatccattaaggaataagccatggaagaaggagcttcaccaccaagatgagccttggataagaagcttggagaggatgcttcaatggaggaaaagatagagggagagaaagagggagggggagcacgatattgaaggaagataatgggagagaatttgaactttgagttgtgtctcacaagactctcattcatcanagttacaacaagtgttacacatgcttctatttatagactaggtagcttccttgagaagctttcttgagaaaacttccttgagaagcttctttgagaaaactttcttgagaagctagagcttagctacacacacccctctcataactaagctcacc

SEQ ID NO: 254385 - DNA, 243 bp, Glycine max
tatactgaagattgtcgtcaaaataacgtacacatgctgatttcagagcctgatgaagcctgaaatgtcagaaatagggtacacacagacacaactgaatggctagagtacaatactgggctcagaattcgagagagactctggagcagctatgcagagaagcctagggttctacattctttgagagattagtgagtgttacaacgattgtgatgtgcctcgaagaggaggagggatccccct

SEQ ID NO: 254386 - DNA, 487 bp, Glycine max
  unsure (1)..(487): unsure at all n locations
agcttgtcacttttttgagtcactcaggacagccttaagtttacttcaattggtgtctttatagaacttgtcttttcttaatacacttaagcaaactcataaataggcattaattgaaaaggtttatgatttgtgtttagaaggtttgtaataattaaagcatcaagggttttggactcaacaaatttcccataaaataagatgtaaaaacaattatcaaagagacattggagaacattcaccatacaaggatagagagcaaatatgaactaatcaaactgaatggtacacatactgaaataataagggactaaacaataaatatctaaacttcatataaccggttaaaattacctgctacacacaagtcaatttggtgattcatcgtgcactacccatttcaaaacatttctaaaacttatgatggngtgaaggggttacattgttgaattcaagaacccgttacatgcaatgctcttggtctgat

SEQ ID NO: 254387 - DNA, 471 bp, Glycine max
  unsure (1)..(471): unsure at all n locations
cttcaagttgtggtcatgtaacactaaggcttangattcattnttcctatntaaaatcaacctagtgtttccaaaagatgctcttttattaatttatgctcacatccgagcccatttaggcatttgaaaaaaatttcacggcattcacccttcaggtgtacacacattnttttttcaaaaacctttgtgttctgatcagtgaaaccttttttcaaagaaaaactggcagacacttctttccanaagcatcttgactnttcagtcaaaatttaactatttttttgttttgcgcttgtttactttaattcctatgattatgagaaaactaggcgtattcaactatgacttaagaaacataggtaaataactaacaagcagaaatttaaaaggtattaggctgcctnctagtagcgcttctttaatgtcttgagccagacgtangacgacaacctgtcgatcacgggcccaata

SEQ ID NO: 254388 - DNA, 469 bp, Glycine max
agcttctaagttagtgtaccagatgaatgctgccctagccaaacaatcttgaaagaaacgcatcaataacttctcgttcctggaatatgcacccatctttcgacaatacatttttaggtgattcttaggacaagtcgtccctttgtacctatcgaagttaggtaccttgaacttcggagggatgacgacgtccggcaccaagcacaggtcggtcatgtctgcgaatggatattccccaaatccttcaacagccctcaatctctcatcgatgagatcgagtttcccctttctttccactgccgggggtggccctcccacggacagaaacattggctgtgttgggtggtttcgaggctctaccgtgatgttgggttgaggtaatgcgttgggtgatggcccctcggcgggaaatgtggagtaggagtcaatgtctccctgagcgtgctcttaaggattctcgaggactgtg

SEQ ID NO: 254389 - DNA, 460 bp, Glycine max
  unsure (1)..(460): unsure at all n locations
tgaacgtgtatagctcaccatcctttcatagtagaatactggtcatgtgtctactatcattgtcctcattnttttgtcgtcattgagggtgccacttgggctgccatgtctctacacctttggtctgagcccctttttgctcatgttctgtagttgcatgctatccggaaccatatcaaaattgtactgatattgcctaacgaaggcaaccattatgtccttcctagaatggactccggaaggcttcaagttatcgtaccacgtaacagctaccccagtacgactgtcttggaagaaatgtatcagcagatactcatctcttgcttatgcccccatcttgcgacaatacatctatagatagctcttgcggcaagtagtccccttgtacttgtcaaagtccggcacctcgaacttgggaatgaccatgtttgggtactacgaacaaatcttgtactttaat

SEQ ID NO: 254390 - DNA, 464 bp, Glycine max
  unsure (1)..(464): unsure at all n locations
agcttataaaccaactagcttattagttaattttatcaaacataatcttagaatttttaattatcatacttaggacaataatttaggtttttttttttacttttttagctaccctaattatataattaattaagatttattatttcctttttaatttttgacatgtttcttttttaatctatgttctactttgtatataatacgatgtacaatagatatgtacatacaaatagaaaataatcatctattattccgtccatgtttcttgcattggttcactattttcttcctactaccctcttcttaagaatttttaacgaaatcgtaaaattatttatcaatgtgggtgttttagaaaattatttacctttaagagtgatttttgtcaactaggatttgggaagtgccactntaagtagtgacatctagtgttttcatttgtcctacaataggaggtgtcactt

SEQ ID NO: 254391 - DNA, 377 bp, Glycine max
cgagatgaggaagtgtagaagggtgaaacttcctgctcttattcgttgaccacagagtggtacctggagatatgtcacaggggtcaggagaccttgtggacgtcaggtggggtgctattgcccaaaaccaagcttgaccaatcccgacccaacccgggcatagtcggtcagtgagaacctgtgatgtacctaaacaggcgagctcctggcagtcaacagataaaaggaacaaagaccacaaagcaaggaggcttgtggtggctggccagctgtgaattttgtgtgatatattgtttgtggtctctggtaatcgattaccaagggtgggtcatcgattacaagacttaaaaatgaagacaggaggctcagatgatctc

SEQ ID NO: 254392 - DNA, 459 bp, Glycine max
agctttgtggtatagatatattctttggctacagtatgcactataaggtgcattcttttgtcttcaatgttatatatttactaaaacatcaagtccatttacttcgaaaggatttaataagtgataaacggtgaatagcggaattgactatgcattatatctcatatgggaaagacttctaaatgacctcataatgatcctcctagatgagtgagaatttgaagagcgatctcgccatatcgatagcgtgtaacctaaacaaagtccacaataaagtttgaatgatcgaatgctgcttaaagcctttatagatgttgttagacgatcggcatttcatgcatgcgcttttagaaaacatgatgatagttggggatctataactgtggtaactttcttgagatgatactgctctatgcttcttttaattaggacaatgatgattttgtctatgaaaatgcc

SEQ ID NO: 254393 - DNA, 252 bp, Glycine max
  unsure (1)..(252): unsure at all n locations
gtaatataatacttctttaaacanaacttagatgttattctctttgtgtagctatggcgctgtattacaattaaaattatagttttgttcatctcgatcatttatgctaacctcttaatacaaacatttatcttattaatcacagaatagcaacacctaagaaactataactaggcttttctaatacttctggcgatatatacatctatttatatgtgtatgaaattagatagatagatgacataaattatg

SEQ ID NO: 254394 - DNA, 480 bp, Glycine max
  unsure (1)..(480): unsure at all n locations
agcttgtacctataaagatctcatctcattaattgtaagatacaatagtatcaagcgtgcctgtaggtatatataatatgtagattaggatgtctttgtagaaaatgcccaaaataaaacaaactatgaaaaaaattcagctgcaaattcttaactggacacaaaacaaacttgaaggtgatcatatgccaaaaatatatgctagtaagctacttagcaatgatattccagggtataaaatgaatgtacctccatttaagcattacttccttctggtaatgtaatcaatcttgtttttgaatcatacaccattttagtttcacagctgaggcaaaatataactttggatggttaaactaatgaggaatcataattaataaatcatattagtttaatgatatgaanatgaatagtatggagagacagggtgcggatagtgcaaggctaactagttntatacttacttttcacatttgactt

SEQ ID NO: 254395 - DNA, 467 bp, Glycine max
  unsure (1)..(467): unsure at all n locations
ntgacaaggattcacatgatggattctcttcaaaccaaaaatgaattaatgtataaaactcanaacattattaattaattaacaattaatgttggatatttctaaccctgtatttacggcaaagaacaatggccattcctttgtctagttgaaaattttccgcgagtgcatttctacctaacaaactaattcgtacatggagaggtcaatatcatagtactataattaagttggggagaaatatttttctcttgtcaattatcattactacaactctngtaatatagttaacaacacatcacataagacaaaagaattatagtaaactcaaatagatattggttntaatttctagctagagtgccaaaagaatcggaagcagaatagtatataaatctgtggaagtttctctattagctattttttttacatattattntcattgttttattattatcgacagaaat

SEQ ID NO: 254396 - DNA, 423 bp, Glycine max
  unsure (1)..(423): unsure at all n locations
agctagtagaatggctagacatgatacatgtcatggcttggtttggttcaagggtaaaagggatgccccacattatttccatgacacaaatgcaaaaatgatgatttggaaactttatgcaaaactggtcatgcatgcatctatgcggacactcaaatgtcaaatttttatggtcatgtgatgctagggctcaggattcatttcctctattntaatcaacccaatgtttccaaaatatgttcttttatcaatntgtgcattcatccgagtccatttcgggcgtccggggaaattncacagcattcacccttcaggtgtagacacattttccaaaaattggttatgatcacatgaattttttcaaagaaaagttggaaatcgtctcttttcaaaagcatgtcattgtttagctagacaacttat

SEQ ID NO: 254397 - DNA, 462 bp, Glycine max
  unsure (1)..(462): unsure at all n locations
tcgtaagacgcctgaacataacatcactaaagctccttttcccttcttttattggagggcacaaccggttaaaaagagccttatctgactgtgttgactcatggaaaattcgggtatcaattgcagcagctagaagattgtttgctgcagttattgcatgaatatctcctgttagatgaagattgaattcatccatgggaataacttggctatagccaccaccagctgcacctnctttaattccaaaagtaggtccttgcgatggttgacgaaggcaggtgactacctaacaaaaagagataagatgggattatgtatccagcataactttgacatacgattaaagattgtagtttttcaataatatcttgaacccaaataaccagtgaaggcctaaatgatgaatgagcaattcctacatcctgtcatctcatcatcacataagcaaaaaaaanaaacaca

SEQ ID NO: 254398 - DNA, 470 bp, Glycine max
  unsure (1)..(470): unsure at all n locations
agcttatggtggatgataatatgtgaatgaatgacattataaaaaccttngacactcttgaatgataatgtgtagactgttttactctaatcttaatggtttttagtacattatgggcacatgaatttgctttttttttttttttttttactttcttgcttttatgggggatgtaagggcaacttacctctgatgctatgattactgctgcgtcttgttttgaattcgccttaatctttacgcgatgtaacagagctgacgattgttctatcaatgttgctaataaataataacagtttgtagggaggattaaaactgctattttcgttatgattcctactattttacgcttttggtttatttcggattgggctttctgatcaagtctaatttatagatacattttatgctaatcttcagatctggagatgtcgctaaactctccaactaccagtcaaatgatgctcacc

SEQ ID NO: 254399 - DNA, 459 bp, Glycine max
  unsure (1)..(459): unsure at all n locations
ntagacaaaggacaacagtggaaatcaaaatcaacactttattgtcgcttctctgtaattctaccattggaggtaaccctaacgactgcgtgtagattttaatcataaaatcattgggccctaccaattaacattgatttgggaaagttgcctatggtgtgaaagaaactttagggccatctaatcaaatcatagaagaaaaaagataatacaattaatgcaatgaagaacttgctcttattaatcaattcaatatattatagttaaactcttggtaggagacaagttcctctcataatggacgaagatgggtatgatttctgctctctgtcaaaagctatacttcaataatgaatacagcttcaaccaaaaaaatccaaaagaagaaccacacaattctatcttggtatccagttaactccacagaacacatacaacctagtcaagttctgatgttga

SEQ ID NO: 254400 - DNA, 472 bp, Glycine max
  unsure (1)..(472): unsure at all n locations
agctngtgcgaatcanatcactcctgcattntatctctagcatgcattctctttttctttacccactcctcacgtttagttntttagggaaaaacaccataactaaacgcgccacaaggcatccctatcgcaccagatccaaatctagaacgatgggtgatcaagaggagacacaggaacagatgaaagccgacatgtcggctctgaaagaacagatggcttccatgatggaggccatgttaggaatgaggcagctcatggagaaaaacgtggccaccgctgccgctgtcagttcggctgccgaagcagacccaactctcttggcaaccgcgcgccatcctccctcaaacatagtaggatggggaaggaacacgctggggcacgacggcaaccctcatctgggatacaaccgagcggcttacccttatggattgccgcccaactactcaccacccgtcctgcaagacgatgc

SEQ ID NO: 254401 - DNA, 425 bp, Glycine max
  unsure (1)..(425): unsure at all n locations
tcttatccaaggctcatcttggtggtgaagctccttcttccatggcttattccctagtggatggcgcctcctctcacctcttctcctttgtcttccgctgcatctccatggtggaaaatcaccattaaaggacctcattgaagctcaaagatccaacctccatagaagccccacaagcaagcttccatcaagaggtatcagagcacaagagcttcaagtaggtgcttccttaaacctccattaatttttgctntaccttctcttccattgttgtttcttcattnttctccatgtatctcctcacatgtcttgtgctaaatgttgttaacatgattctttagagtttccaccaattaaacttgctatagaagctagaattgattntctatggttcaaatntcttgttcttgttcttgaaccatgaa

SEQ ID NO: 254402 - DNA, 446 bp, Glycine max
agcttgcagcatatgctaacgacaatatcatttcactcggaagtccgattgagtcccgtaatatatcgagacactcaaaatttagaaccgaagctcgtagaaaattcgaacgacaataacatttcactcggaagtccgattgagtcccgtaatatatcgagacgctcgaaatttaaaaccgaagctcgtagcaaattcgaacgacaataacttttcactcggaagccgattgagtcccgtaatatatcgagacgctcgatatttaaaaccaaagctcgcagcaaatgctaacgacaataacatttcactcggaagtccggttgagtcccgtaatatatcgagacgctcgaaatttaaaaccgaagctctctgcaaattataacgacaataacatttcactcggaagtcgagtgagtcccgtaaatatcagacgctcgaaattaaac

SEQ ID NO: 254403 - DNA, 232 bp, Glycine max
  unsure (1)..(232): unsure at all n locations
tcggttntaaatttcgagcgtctcgatatattacgggactcaatctgactttccagtgaaaagttattgtcgttagaatttgctgcgagcttccgttctaaatnttgagcgtctcgatatattacgggactcaatcggacatccgagtaaaacgctattgtcgttcgaatttgcaacgagcctctgttttcaattttgagcatctccatatgttattggactcaatcagact

SEQ ID NO: 254404 - DNA, 446 bp, Glycine max
  unsure (1)..(446): unsure at all n locations
tgctttaagactgtatattgatatctttagtatgcacaccatgtgttcatttccttcaactgagaaccccattgggtggtccatacaaacattctcctctaaatctccattcagaaaagcggatttcacatctatttgatgtagctccaagtcataatgggctactattgtcatgataatcctgaaagaatcctttcgtgagaccagtaaaatgtctctctataatcaatgtcatctttctgagtaaattccttagcaacaagtctagccttgtaacgttcaaagttgccatgagagtcacgtntagtcttgaagacccacttacaaccaactctcttacaaccccttgttaattctacaaggtcccaaacaccattatgttccctgaaatctatctcttctttcatggcatttaaccacttctcagaattatcacaacttatagc

SEQ ID NO: 254405 - DNA, 319 bp, Glycine max
  unsure (1)..(319): unsure at all n locations
gtaaaatggatcatttttaaaggccaacgccttataatgatcaccacttaagtaaagaatcgcttgataaaaaagaactacgtacgtctgagttcctcattaaggatacgtaggagcaaaagccccgcttttgtcgaccaccccaagagatcgttaatggtccaatgcctttacgtttctctccttttaaaaacaagagatcgntaatggtccaacgccttaacgtttctccctttcaaaatcaaagaccgttaatggttacaccttaatgacctttgtcatanaactatttgcaaaagacaaaacacttacaaacact

SEQ ID NO: 254406 - DNA, 272 bp, Glycine max
tcatggtgaatcaagagtgattcaaagatgtcttgatgataacatttatgataacaaaagatgatgacaaaggtgatgacaaaaagctcacaggtctatcaaagaatgagttcaagatgttcaagatagagtcaagaatacttctagattcaggaggaaagttgaattcaagattcaagagatcaagattcacgagatcaagattcaagagatcaagattcacgaatcaagagaaggcttaatcaagataagtatgaaaagggttttctcaa

SEQ ID NO: 254407 - DNA, 145 bp, Glycine max
ttataataaactcacccctcgcaatttttgtaccgtgtggttggtacctgtgatgatcgctaacctttgctcgttagagcagaatgacaacagtagtggacaagaagtgagattcttttgtggagccggcgagctgacatgatga

SEQ ID NO: 254408 - DNA, 332 bp, Glycine max
  unsure (1)..(332): unsure at all n locations
agctttatgggggtgttcttgagcttaataaggtccttcaatggtgattntcagccatggagttgcagtggaagataaaggagaagaggtgagaggaggcgccatccaataaagaataagccatgaaaggagaagcttcaccaccaagagagtgccttggataagaagcttagagagaaaacttcaatggaggaagagaatgatgtagagagagagagaggaagtggcatggaaattgaacgagaagagggagagaagttgaactttgaagtgtgtctcanaagtttctcattcatcacagttatgacaagtgttacacatgtttctactta

SEQ ID NO: 254409 - DNA, 405 bp, Glycine max
ctcgcccaggcaagctaggttgcttcctccagaaggcaccgccttctggaggaacttcctggaaggcccaagtgggcctgtgtgctatttgcacccccatgtttacaaaatacaccccctcaccttttttgctaattctttttccgtaacgttacggaactttacgaattccgtgacgatacttgttttccttccataatcttacggattacgtaatcatcccttttttggctttcggaatgttacggaacctcacggattgcgtaacaatgcttccttctgatttttgacatgttacgaaacttcacggatcgtgcaacaatgctctcttttgacttctggcacgttatggaacttcatgtatcgtgcaacaatgggtgccaagtagctcgaagcgatcaagca

SEQ ID NO: 254410 - DNA, 438 bp, Glycine max
  unsure (1)..(438): unsure at all n locations
ntatgctctagctctatgggtaggtgacaattntatcaaacacaagtctatattgagacataccaatgagagttttaaatgttgtcctataagcccaaagtgcatcatctagtttaattgcccaatctttcctagatgcactaactgttttttcaagaattatttttaactcgctattggacaattctatttggccactagtttgtgggtgatatggngttgcaagcttttgagtcacccatatttagccaagaggccatcaaacaacttattacagaagtcagtgcctttgtcactaatgatngctcgaggtgtgctaaatctggtgaaaatatttntctttgaaattntnttaccaccagagaatcattaatggggagtgctactgctttttccctcttagacatgtaatccaccacaacangtatatattcatta

SEQ ID NO: 254411 - DNA, 465 bp, Glycine max
  unsure (1)..(465): unsure at all n locations
acggatgcttgagcaattactgaaactccttccagcagcaatcataccttntaccccanaccaagcaccgtaagtgaagcatactccccaagaaccatacctgtttagcagtttaagtgattagaggtctactgaacagagaaagttcaatttcatgcagaaatagaagctggcagaaagaaagaaaaataacatagagtagaacatacttgagattcatgaatacccncaaaaaaacacttcaacgttataaacaatatcaatagaaaaggttatganaaaagactcccagatgggaggagcataccatgatccatctgaagcttgtattgtttcaatgaaggtagtggctttatcgatacaatgttgtatctcttctcggcgatgcccaggatataatttcctaaatgatgccaaagctcgaatcgctgctgatgtacattccacataactatacgccataca

SEQ ID NO: 254412 - DNA, 369 bp, Glycine max
  unsure (1)..(369): unsure at all n locations
tgtttagagttcttgtggatgaggggaagcttgataaggtgttcttcttttgaagcagatgcctaagatgggatgcccgcccaacttcttgttttattgcatagtgatatgtggactttgtaaagtgaagggtatgatgcaacaagttgaagagctcatttcgaatatgcttcagaatgggcataacctggatgccactatgtataattgcttacttgcgggatattgtgaagacggngatgaagaaatgacaccaaagacagttatgacataatggacaagaactttgtaatcaaccaagacattttgttcacttttgtgaaggtgctgtgtgcacagggaaaattgaaagatgcagaaacagtatct

SEQ ID NO: 254413 - DNA, 468 bp, Glycine max
  unsure (1)..(468): unsure at all n locations
gcttatagagctntgtagtgggttgtaaatgaaataatgatttaaatagtagaaataatatattcttaattgaaagagattaaaatagtacatatttattgaaataacacactcgacaaatagtacatagaatttattaatgaaaaaataattattttattcaaatataaaatttcaaaaaaatgcatttgactattttatcaaaataagaaattttgaaataaagaaattcaatttctttatccaaatacaaaattctgaaaataatgaaatttaatttgtttatccaaacatagaattttgaaaatgaaagaatttcacatgaagcatttgaaatttttagaattctaaaattagaaatttatattgcctcatccaaacaaactctaaatgtaattntgatcccnctatntttcanaatatgtaattttggccactctatttaaaatagaaacatttatttctcta

SEQ ID NO: 254414 - DNA, 344 bp, Glycine max
  unsure (1)..(344): unsure at all n locations
ngcctanagagatccagganagacaaggcggttgaaggaaccagttccactcccaaatatgacagccatcattgtatgagcgctgagcaccaacagcgcttcgaggccatcacaggatggtcattcctccgggagagacgtgtccagctcacggacgacgagtatactgacttccaggaagagatagttcgccggcggtgggcatcgctggttacccccatggccaagttcgacctagacgtagtcctcgagttttatgccaatgcttggcctacagaggagggtgtgcgagatatgcgatcttgcgtgaggggtcagtggatccctttcgatgcggatgccct

SEQ ID NO: 254415 - DNA, 241 bp, Glycine max
  unsure (1)..(241): unsure at all n locations
ctgcagctgcatttacagctactctttcttcctcttggtggacatttctatgaaaggaaatattctacttcaattgcaagaaatgatccaaaatgctactctaaatangagagtgtgtgtctttggtctttcgctgggccattaatatactaaattagaagtcattataacaagctttttccactctcataattgaggcatttactagtgaaagaggggaatgatcttaacggattgaaat

SEQ ID NO: 254416 - DNA, 396 bp, Glycine max
  unsure (1)..(396): unsure at all n locations
ttgttcctgatagaatcattattgataatgcggctatatgaattgcaaggcaagtgaaagaaagggattcatgactntaaagctagatatgtcaaaggtatatgacaaggtggaatggaagtttatagaaagggccattttccatataggcttttcttanaaatggtagaacttaattttgaagtatttcacaatagtctcctttgttgctatatcaatggngagcattataggaaatntaagcctcacaaggcttgagcaaaaggatcctatatccncatactttntcattctttgtgttgaaacattgtcaacaataatctctcaggcaattcaagcaacagcaaattgtggtattatggtatgtcatagagctccaatggtctctcatgtact

SEQ ID NO: 254417 - DNA, 474 bp, Glycine max
  unsure (1)..(474): unsure at all n locations
aaaaatgattgcattatgataggaatttccctttaggccagcggctgaattttggggctgcaccatggtttggcacaataccttgagcatgcatatatgaattcttttcaatatatatatatatatatatatatatatatatatatatatatatatatatatatgtttgatagccatcgtttcaggagcactgagcaccagcaacgtttcgagaccatcaaaagatggtcgttccacatagaaagacgcgtncagctcagggacaatgagtacacagaattttangaagaaatagcttgccgacattggacatcactggtcactccgatggctaagtntgacccaaatattagtctgggagtntatgctaatgcttgccccataaaagaaggagtgcnggacatgcggtcatgggtaaagggtcaatggggatccttttacgcanaatgccctcaattaagttctgggtgaccg

SEQ ID NO: 254418 - DNA, 281 bp, Glycine max
gaagtatgtccgtattagcttcattgaatcctcatgtgatgaaaggcatgataatgactccaatgggacttctcatatggaccctaactgtcttatggacgacacacggttataattaaacaacccctcatcgacatcctatggacattcataaatccttcagctgagcacgatgctcctgctaccacttattttcatctggagaaccaactaatggaggatcctgtcgcacctaccatcaactctttccaattacttcgtttttcctagcacatgcgatg

SEQ ID NO: 254419 - DNA, 291 bp, Glycine max
agcttgtgaaatcaatggaatcctatattccacttgacacaagtcgttcaattctgttcttagaaatgtgacctaagcgcttatgccataatgcttctgagtttgtattatcaattctacgcttagtaccacgcaattctgcattaaaggattcaccagaggaagctatagtatcaagtaaatatacattatcattaaccaagagtgaaccagttccaacaatatatgaattaatagacaacctgaacacattgtttccaaatgaacacaaataacccaatttgtcaaata

SEQ ID NO: 254420 - DNA, 379 bp, Glycine max
  unsure (1)..(379): unsure at all n locations
gtattgatagaggactttgcatgtacaaatacagttactctgtaaaggcattcgagttgtcacttgtcaatcaaatgcatcgctacttaaaaaatcttatctgacttcactttatattgtccatttggcatcaaagacaaattattaagagcaagctagtagttaattnttcttacatggtacgcgctctagcaaatactttcttagctactttacatttatttcttcttgtcttcttctcaattaacatacatatagtttgacactntctatgtgttaatgtgtttcctaaacaggaacagaatcagaaaaagcttcgaaaggctgtctcggaggtgtcgaaggaaatcgaatgatactacaatgagttgaagttgga

SEQ ID NO: 254421 - DNA, 284 bp, Glycine max
  unsure (1)..(284): unsure at all n locations
gagtattcactataaggcgcattctttcgttctcaatggtatatattttctaaaaaatcaagtccatttacttcgaaaggatttaaaaattgtaaaaaggtgaatagtggaatatattatgcattttatctcatatgggaaagaattctaattcacctcataatgttcctcttagatgtttgaagattatgaacagcaatcttgccatagtgatagtgtgttatctaaacaaagttcacaataaatnttgaatgatcgagtgcgtcttacagcctttatagatg

SEQ ID NO: 254422 - DNA, 424 bp, Glycine max
  unsure (1)..(424): unsure at all n locations
ctccacgaggtacgtaggtcaacttcgtgttctttgtgggttgttgtacctatgtgcacgatggtagaagtatgctaagtttgagtgggtgttcatgttttatagttttttttatgctaagttgctacttttattgatttgtctttgctttttttttttttctgtgtgcatcccatacccagcacaaggccacataaacccaatgctcaagctagcaaaactattgatttcagttaaacttagatgctccacattctcaaaactacccaagctactcttctcaccaatgatgttggtctagttctgttatggctattctgtgacgtatattggattctatntttttttggctttgaattcaataattttcatagaatagaatgacaaatggtttgaaatctttggttttcacacctttttgact

SEQ ID NO: 254423 - DNA, 353 bp, Glycine max
  unsure (1)..(353): unsure at all n locations
atagtattacaaanactctatatatggtgcccagtgtgagtatggatcttcatttagtaaaccatgaaacaaatttctctgtattagctatatcaatgaacgtgggaatgttaagttttgtgcctgaacctctggccgtgcaacacttgagaaatattgcggcactaaagtacttaagtaatcttccaaggtcactcgtctaggatgactcacaagagtgagcctcttcaaagactgatgctactgttctgtcgtgcaaaagctttctttttctctctacattgtttcttctaaaggtgacttcaatttctaaatccaatggaaccaattcacctgcataagatctacgcata

SEQ ID NO: 254424 - DNA, 307 bp, Glycine max
  unsure (1)..(307): unsure at all n locations
tggtcgtattgacatctcttagtntattgcattctttcctgaccttgatggccgtcgtcttgaattattccttgaccgcttgtgctctttcaagttcttcctttaagacttgcacctcctcactctactcgggggtttcagcctctgcctcgcttgagacctttagctttgggagccaatctaactcttgcatccgagccttcagccacttatgataaccatcaatgatcccattgctgcttcctctaagctccttgtatttcttttgcaccacgctccatgacttgtggactccttgaagtatctg

SEQ ID NO: 254425 - DNA, 197 bp, Glycine max
  unsure (1)..(197): unsure at all n locations
taacataaccaataatctgacatcgcacataattactaatatatatatatatatatatatcanggtgttacacgcccatgttgtgctatcggtgtaacctctaattcaaaaaagtgctcagatatttctctacaatcccaagagtttgatccatcaaacgcaaggagattgaattgcacgtgttctactattgatcg

SEQ ID NO: 254426 - DNA, 368 bp, Glycine max
  unsure (1)..(368): unsure at all n locations
tgaccgtcagtgtagctcatataataatttccncttaaatgtgatgctcactggctgttcttgaatgaaagacaaatctttgtcaaaatttaggccaaatagaatgacaagaacatatggatttgttgcatgaatcgcttctgctcctttcaccatgtatcttttgttcagaacaacaacatatcagccacatgagatttctctttatttcacttttttctttctaatttcaactaaaccttggttnttccctcataaaatacatntacaagtaaaataaatggtatttactctagcactagccaccagcttaattataaaaaaaatttaaagtgtttgagggctataatctcattaacatgatctta

SEQ ID NO: 254427 - DNA, 311 bp, Glycine max
actaactgatgctttcttcaagaattgtcactcatcctgtaactttacaagttacaagttacaagtatttgtcactaccactgttggctcaacctgatgcacaaccattcttagatttacctactttaatatttaaagcaacatacaaacaataacgattgattttaccatagttgtacaatgctgataaagactattgaatcgttcaaaaacaaatttactacggaatgctatatcacatgattaaccaaagtcgaactcagagatatgattcgatatggttcctacattcattcacttataaacacaaa

SEQ ID NO: 254428 - DNA, 352 bp, Glycine max
  unsure (1)..(352): unsure at all n locations
ntagcaagggtgatccaatctatgcaaaatctacattttctcttgttgaggtattgccctgaagcttgaccacacttatccaacaagccaacaatgcaattaattttagagatagaggctttgcaaaacaacataatcattttcgtaaagggactgagttggaaaaacttgcttccttagaccacaaatgggggacaaagcaccaaaagaaacaagtcgatgaatgcccctactaagaacttcatcagcaaggtaggaaaggattgaagacaacaaatctccttgtcggaccccacacacaagagaagaagctaactggttntccatngataagaaagaaaagcttagttga

SEQ ID NO: 254429 - DNA, 258 bp, Glycine max
  unsure (1)..(258): unsure at all n locations
aagttcacgaagattatcatataataatattgtcgtggatgataatcttatattatcanacaatcattattagtataactaattatntctaacagattatcatctaagactgactacactattactcaataacttatattctgatattaaaatggtcccatcatattgagccagtattccacacatatatgcataaaggcataacagggaaaataatagggtgcaattctatagaacagattcaatggctgctcattt

SEQ ID NO: 254430 - DNA, 196 bp, Glycine max
  unsure (1)..(196): unsure at all n locations
gacactaccgaanactaagactactgtcgctcgtactcncttgcttctgatattattaattctccatttacgtatgttcctactacgaaatagataagatagaactaaatatgtgcttagtttagccgtacctgattggaagaacacctggatatgttgcatggatcagaacagctgctgcatacgtgtacgtttt

SEQ ID NO: 254431 - DNA, 470 bp, Glycine max
  unsure (1)..(470): unsure at all n locations
gcttgacttgagtcatcaaaatattataaatatgtgaccatgacatgtattttattaagagatcaatcatctatctttcaatcttctctcaacatcattcaatatctttcaactctttctacaaaattttctgattctttttctcttcatctttctaaaaatttttgttcaaacactttcttttccaagaaaagttctttgttcaaaaacttgtgctattcatcnttttcattctcttctccctttgccaaaagaacgaaggactaaccgcctgataattcttttggttcttccctttcccttaagcaaaagatttcaaaggactaaccgcctgagatatctnttgtttcccctaacaaagattcaaaggactaaccgcctgagaattctttgtcccaaccacatggagggtacatcctttgnggtacaagtagagggtagatctactttgggattgtatactgagaaca

SEQ ID NO: 254432 - DNA, 371 bp, Glycine max
  unsure (1)..(371): unsure at all n locations
gtgagatcaggtgcagccatttcccttagagtcctctctcttgtgtggaggttgagccatattttcagaatgctcaaaatcagaatgttcaaaatcaggatgttcaaaattaccaataacagaatgctcagactcaccagtaacagaatgctcangatgctcaaaaggcacaaaatgttcagggtaatcaagatgcacactctgcctaactaatctatgaaatgttctatctatttcatgatcaaagggttgtaagtcacctggattgcctctagtcatgcactatatgcaacagttcatgtgtttctgaaacaaggcaaaagaggtgggttaaaactacagctatactcaaatgatatctaaatgagctg

SEQ ID NO: 254433 - DNA, 573 bp, Glycine max
  unsure (1)..(573): unsure at all n locations
cgacgcattgaaccccactcagtcgacgccattctatagaccctatctgcacgcgtgcacgctatgaataatctaatgcaagctcttagagttccatacgttggtccagatctatggctgttgatagaatgacattagtcactccactacttgccatctattttccatcatcgatgttgtcaagttccctagctgttattgtcggatcgagaggcctcataataattactactggagggttgaatgaatcattcctacaccttcactagattttacctactcttccaatgcttgtactaaattgttgaacgaatgaagagcagaatacaaactgaacctatagtaaaagcgtaaatcaaaggcacaccggaaagtatgagagtatggaggaacgacactcactcacttgagttctcatacgtggtcgagttcatcctgtgcctacgtccagtccccaagcgacctgcggtccttgagatttctatctaccttgatgtcgcaacccacccttctgcgggagggctacgcgagactcgctggtgcgtgttctcacgaacgactacacacggattn

SEQ ID NO: 254434 - DNA, 461 bp, Glycine max
  unsure (1)..(461): unsure at all n locations
tactaagcttatgcattggttgcttgatcaattganaagctntagttntataactttctactttgcaattntcatctatgaactaaaatgattaataagaatactcctctacatccttctgctcagtattacaggaaaggctaatttggagaagtcagatttggagccagctttgaaagctccaaaggacaggctcatgaccaagaatgtggtaagcatttaccctgaacaaaattaatatgtatatggttacccattgactgccttttcctattctcaagcttgctaattttgtttgcattctgtgtctcttgtaggctgaggaaatagttgagaaactatatgagcttgtggcaacaagtcttataggcaaaaagctagcttcatttacaaggatatcttcaacaatgcatgttngttcatatccttatatntatgcttccataacattcatactgata

SEQ ID NO: 254435 - DNA, 175 bp, Glycine max
cttaagcgacgcagctgcactttagaatagctgagatgtggagtttgcttctttatgaccagtttgaacgagcttaacatgacacgttaatactagtgtccaaaggctgcccagagttttataagtacagcttcacactgcaccatggaccacccgtgaactacagaacagttgc

SEQ ID NO: 254436 - DNA, 410 bp, Glycine max
tatggtaaaatctgggacctagccatggtagaagtctccacagaggccattgcctccctcgcccagtattataatcagccgttgaggtgctttacctttgggaacttccagctatcacccatggtggaagaatttgaagagatcctaggatgtcctctagggggaaggaaaccatacctcttctcagggttctacccctcattagccagaatttctaaaatagtccaaatctcggcgcaggaattagaccgccaaaagcaagtcgaaaatggggtggttggaataccgagaaaatggttggaggcaaaagcaagaatcttggcaggtaaaggcgaatgggccctgttcatagacattctcgcactgttgatctttggaggagtcctctcttcaaatgtggatggggtggt

SEQ ID NO: 254437 - DNA, 404 bp, Glycine max
  unsure (1)..(404): unsure at all n locations
tcctgactcaccatanaccttgacccanggtgagaatgtcaattcttaccctcggaagcaaaaaaaaaggggagagggaaaatttccaatcaaagaggaagcaaaaaaggagagaaggaaaatttccaatcaaaggaaaaaaagagaggaaagggaattcccaatcaaagagtgggagaaagcaaaaagaaaagaaagaaaattcccaatcaaagaatgggagaaagacaaaagagaagaagatagggaagaaagttcccgatcaaaaaaaaataatatgcagaaaggtctttggaccggacaatatctgaacaatacagaattgtcaccaaatgaataaaaagaaggaaagggaaccactgacctaaatggtcttcctcctttagttgccaggcaaaatcttg

SEQ ID NO: 254438 - DNA, 292 bp, Glycine max
atgaggaagtgttgaagggtgaaacttcctgctattattgttgaccacagagtggtacctggagatatgtcgcgggggtcaggagaccttgtggacgtcatgtggggtgctattgcccataaccaagcttgaccaatcccgacccaacccgggcatagtcggtcagtgagaacctgtgatgtacctaagcaggcgagctcctggcagtcaacagataaaaggaaaacaagaccacatagcaaggaggcttgtggtggctggccacctgtgaattttgtgtaatatgtggatt

SEQ ID NO: 254439 - DNA, 446 bp, Glycine max
agcaagagattaggtgcatatagagctccagatgtctcggaattgatacatacagacatttgtgggtcattacatacaccttcatggaatgatcaacaatattttatatcattcatagacgattactccggatatgcatacttgtttcttatacatgaacagtcacaatctctggatgtgttcaaaacatctaaagttgaaattgatgatcaactaaacaaaagaataaagtgtgtcatatctgaccgtggtggtgaatactatggtagatatgacgatttaggtgaacaacgtccggtgcctattgcctgtacctagaggaatgtggaatcgttccacagtacaccatgccagggtcacctagcatgaatggcgtggctgaaagatgaaacataactttaaggatatgtgaagaacatgatttgcattctaactaacatagtcac

SEQ ID NO: 254440 - DNA, 201 bp, Glycine max
  unsure (1)..(201): unsure at all n locations
agcttctcgatatattacgtcccatattcggacatctgtgtganaagttatgaccattcgaatttctctagagcttccattggtcaatttcgagagtctagatgagttatgtacgcgaatcggacatccgtgtgaaaagttatgaccattcaaatatcttgagtgcttccgttgtgcaatatcgagcgtgtcgatatatta

SEQ ID NO: 254441 - DNA, 302 bp, Glycine max
  unsure (1)..(302): unsure at all n locations
ngagggagtgatgaattccttttcttgaggactacgtcgagtagtctgcccttctttcttttatgtgtaggtgtctatttgaagtcttgggtctcattcttgctttggctgctttccaatgtgctcttcttgagcactcgaacgtggccccttctcaacttcacccaaatagttgggcaatggtgtgggcctttaaaattctatgccctttcttcaacatccgacctagtgtgtcggtcttcttggttgtcttttagatgaagctgactggcaagattggctgggtctccttgaatagcatg

SEQ ID NO: 254442 - DNA, 430 bp, Glycine max
  unsure (1)..(430): unsure at all n locations
agcttaaagtatgcccgagtcattcatccctatgatatgtngtcgaagtatgggcgatcagaattgccattccttggattatagggttgaaccaagctcatgcttttacaaaaaggttcatcaagtcaagttgaaatatggaagtaaccgtcttgcacaattggggcaaaagatgaattgagtcacatcactgcttcgtctactgccaaacatatttaggattatngatgtccttgttacttccagtttcaccttgacaaagatgtcatggaccatgttgaanatctaaattgattcaaccccatatcttgcgtaaaaattcgcaatacttcaactgtgcatcattcgcatgcatccatgcnntttcattggtgcattngctcgtgcattctttccttgaaaataaaaataaatgaactaatcattgtat

SEQ ID NO: 254443 - DNA, 344 bp, Glycine max
  unsure (1)..(344): unsure at all n locations
ngagggagtgatgaattccttntcttgaggactacgtcgagtagtctgcccttctttnttttatgtgtaggtgtctatttgaagtcttgggtctcattcttgctttggctgctttccaatgtgctcttcttgagcacttgaacgtggccccttctcaacttcacccaaatagttgggcaatggtgtgggcctttaaaattctatgccctttcttcaacatccgacctagtgtgtcggtcttcttgtttttcttttagatgaagctgactggcaagattggttgggtctccttgaatagcatgtcgaagaagttgtttgagtttgacttaaatgtttttcgccac

SEQ ID NO: 254444 - DNA, 390 bp, Glycine max
  unsure (1)..(390): unsure at all n locations
agcttctagccaaatggactnacctagacttaattcctttgatagcccttntgagccttgtttccctttccttgttttgaagcgcactacaagccttaagtgaaaaaccatgatatcaccatatccttaaggaattttggagctttggaattgttttgggaataagtgtgggggtttttgtttcattggataacatgttttgttggccatgcttcatgatatatattgagccatacttgatatacatcgcatattgcgtaaatgctggacatgttgaatatgatgtttgttctcacaaggctatagagcaaacaaaaaatcgaaaaagaccaagaagaatagtaaagttgagtgaataagaaaagaatgatgagactctcggttctactc

SEQ ID NO: 254445 - DNA, 160 bp, Glycine max
gctatgatgtacatcacgaggtatgattccactcttacctgctctgacctagcgcgacatgtctaatatggatggatgatgacaaatatgtgctcatgactcaaacgaattttgacaagacatatgtacggtgctttatattcgtgacatctaccttgat

SEQ ID NO: 254446 - DNA, 580 bp, Glycine max
  unsure (1)..(580): unsure at all n locations
tatgtgcctcattctactacgtatatgtaattgttatggtatatncnnnnncaaagcagagctgaacattatgacgcattgtaaacgcgatcttagatcgactgcagcatgcaagcttccatcaggatgtcttatttgagtcccgtatatatctagacgctcgcaactgaatgttgaacctctgagcatcttcaaacaacaataacggtatactctgatggctgagtgagtcccggtatatagctagacgctcaaattgatgtgaacctttagccattaaacgacacaacctttaactcgatggctgattgacgcccgaacatatcgagaccctcgaattgaatggtgaagctttagccatcatacgacaatacttttactcagagtctgattgggcccggatataacgaacgctctaattgaatgttgaactctgagccatgtaacaacaataacttttactcgacgtctgattgagcccgtaattatcgagacctcgaattgtaagtgaacctctagctatacaacgacaatacttttactccgatgctgactgagcccgtatatatcagacccccag

SEQ ID NO: 254447 - DNA, 278 bp, Glycine max
  unsure (1)..(278): unsure at all n locations
ctaagctaaacattcactttcgagcctcacttcaacattcaatttcgagcgtctcgatatatgacgggactcaatcagacatccgagtaaaaagttattgtcgnttgaaatggctcagagcttcaacattcaatttcgagcgtctcgatatatgacgggactcaatcagacatccgagttaaaagttattgtcatttgaattggctcagagcttcaacattcaatttcgagggtctcgatatattacgggactcaatcagacatccgagataaacgtt

SEQ ID NO: 254448 - DNA, 265 bp, Glycine max
  unsure (1)..(265): unsure at all n locations
ggagatgataaggactaaattatgacgtctcatgacntgtttgtctacactatgattaatgagctaagatgtagatattatgaacaactgtcttgttctgacgtttaataccaagcgattgtgtgatctctagcccatgaacgttgcacgattatgactttgagcttaacattagggattagggctaggcgtataagatctataacctattatatacattgtagactatgattgatgcttaataggtgtattgtgcactaacctg

SEQ ID NO: 254449 - DNA, 283 bp, Glycine max
aaattctgaactcatcatggtatctaaaaaaccttggggtggatccaagtgctccgatcattcatttgcatgttcatgtgttggtggcatactcaccattgtttatctctctatgaattttcaaaacaccaaggcacccctataacactcgatccacaaaaattgatgatgaagacggcgtgcaagaacacatgaaagccgatctatcggctctaaaagatcaaatggctttcatctcggaggtcatgttaatactccacacaactatagaggataaagccac

SEQ ID NO: 254450 - DNA, 418 bp, Glycine max
  unsure (1)..(418): unsure at all n locations
cacacaattctaatttaaggttgttgtcctttgtgacaaacgtgagaggtgctaataccttcctcaaacgtaaatacaactctcgaatctggaatattcttcatggccggtttccttcggtttttccgatgttttccacaaataaacgttggtggcgactccgcgcattttcctcctttggaagacacacccgtgagcctcgccttgctcgcccgcaaaagggtaggttgcgacagttggcgactccactgtggactgtttttgtgagttaggcctattntaggaaatggtggaattctgaaactttgtgtgtgcattntttttntgaactgtgtaaatataataaatgctgtctttccacattttacactgattctaacacccagggttgagtaaaaaggggcctatacccggtatg

SEQ ID NO: 254451 - DNA, 369 bp, Glycine max
  unsure (1)..(369): unsure at all n locations
taaataatggttgaaaaagctattggtgctataaggaaatngagtaaagaacatgctgattggctcttacataaagacaaaccaaagcatacatgggctaggcacacatttgaccctcaatgcaagagtgacaatgtaacaaacaacttctgtgaagtatttaatgctttgggggggacgataggaaatagactgtcctatcaatgatgtaatctataatttgtagattaatgacactntntgacaataggagagacaagggctgcaacttaccaattactattacccctagggtcaaaagtgtcttggataannatgtggaagatgggaggtattggtgtgtcacacatggtggcaatgatgagtatc

SEQ ID NO: 254452 - DNA, 327 bp, Glycine max
cgacacggtcctatacggttgacatatcccaccgaagacgcgcccctattccatcgcttgacaaaccccacgttcatccatggtgagccctgtacataactaagttacatcccctcagggaactcatatacgcacagactacccttgacgatgttcgatatatctacctgtacatcggtgcatgaatacatgcttatcaaaaacccaaggtgtatccttggtactcagatcttcgacacccaaggtcctacctaggtacaaactctggcaaaatcctatgttcgcacttggtaccaaaacctaatgcagaccttgtacatacttctc

SEQ ID NO: 254453 - DNA, 106 bp, Glycine max
aatatataccgatggtacgggttccaactcataatagcaagactcttctactcgcacttaggagtgctatacttggatatgattggaatctaacacataaacatgc

SEQ ID NO: 254454 - DNA, 458 bp, Glycine max
  unsure (1)..(458): unsure at all n locations
gcagctaatggcagatataatttaaatgattttatatactcggaaaaaacagattatgtaaaanaaaattgatttacagtccttaagcaaaattcttaatgagagtaaacagaattatggaaaaacgaagaaaccaatggcatgaaatgctttggaatacaactctagattgatcacactcttgtcccttctcactcccccaaatttccattttcatcccagaaactaacgtcgtttggattcatgaccttcaacagcgtacaccttanatatgtaacttacttgttcttctttccatctttttctgcctcttgttngaattgcatgtactgttcaagcaattccatcgtaatcctctacttctgctcgtcttccaacaacctcattgcctcagnttcatagttntcctctgggtntgctntcttgatctgcaccaagccatcaatacatataaaaca

SEQ ID NO: 254455 - DNA, 481 bp, Glycine max
  unsure (1)..(481): unsure at all n locations
gacactatgatactaagctaagaaatcttatatggtttanaacaagtgccctgtcaatggtactcttaagtttcatgggataatttcttcatttggttntgataaaaccccatggatcaatgcatataccacaaggttaacgagagtaaaatatgttttcttgttttatatgtaaatgatattttacttgcagccaatgatcggngtttgctacatgaggtgaaacaatttctctctaagaattntgacatgatgggtatgggtgatgcattgtatgtcattggtatttagattcatagagatagacctcaaggtattttaggttcatcataggaaacctatattaacaaaattttagagagattgcagatgaaagattgttcactaagtgtcgctcccattgtgaagggtgataggtttaatcagaaccaatacccaaagaatgactttaagagggaacaaatgaaaaacattccttatg

SEQ ID NO: 254456 - DNA, 408 bp, Glycine max
  unsure (1)..(408): unsure at all n locations
catcaacttgaaaatccttattgcttccttctcattttcctatagaatcttttccatgaatgtgcatttcttctaaggaatctgaaatgtcatctagaatatcctttcttggaagaatagaattagactcatcaaaagaaacatgaatagattcttcaataatcatagctcttttgctatatactctatatgccttactttgcaatgaatatccaagaaagatgccttcaaattaagctgcactaatcttctttcttcctcagtccactctnttctaggcttntctattgntgtatttccagccaaggtcttatttcaattggcttccaaatgcttaaatctatagcctctataaaaatttgcatgcangttttccaacagtggtaacccacttcattaaaaatggga

SEQ ID NO: 254457 - DNA, 394 bp, Glycine max
  unsure (1)..(394): unsure at all n locations
gagattataaatatgtgaccatggcatgtatctcacatcatctttntcaacatctgtttcaacaatcaagaaatctatctttcaatcttctctctcaacatcgttcaactctttcaacagattntttctgattcatcttctcttcatctttctaaaagtttttgttcaaaactttttctttcaagaaaagttctttgatcaaaaacttgtgctactcatcttttttattctcttctccctttgccaaaagaacgaaggactaaccgcctgaattcttttatgtctctcttctctctttccaagagaatccagaggacctcaactgagaatatctttgattcttcccttccccttaaactaaagatctcaaaggactaaccacctgagatatctt

SEQ ID NO: 254458 - DNA, 385 bp, Glycine max
gccggcgaacctctgtactcctcactatcacaggatgaaaatggagcatctgcatgctccatcgaggaacgcacgtggatatttatgacagtatcagccacaacaccaacggcgataaaagcagctgctccaatagcagtaagagcagagatacttagtatgatcttatgccgatggttgtgcaaggaaatgctggagatggaaccataagagtcggtgttgagaacaatagggttgggatgaacagaaggacaggagtggttgacaacggaaccacacaacaatgggttaccggagacggatgagaaggagatggtgttgaataagcctcccacaggtagatcaccttcaaggtgggtgtacgatacattaaatgagacaagat

SEQ ID NO: 254459 - DNA, 264 bp, Glycine max
tttgatctggaggacatgttaatagcttcagctgaagttcttgggaagggaagttgtggaacaacatacaaagccatcttggaggatggaacatcagtggttgtgaagaggttaagagatgtggcaatggggaaaaaagagttttaacagcaaatggagattgtccacagactcgatcatcatcaaaatgtgattccccttcgtgcttactactattccatagatgaaaaactattggtttatgactactcaacagtcggcagt

SEQ ID NO: 254460 - DNA, 414 bp, Glycine max
  unsure (1)..(414): unsure at all n locations
agcttatagctcgaattgtggtctgtttttgtccattcccgtganaagtctaagcaccttgaaatggtgttgatggatggaatggtatgttgtgatttancctttgtttcgattcctaatgtcacaaagattatgctctagtttgatggtgttctagagggatacagtccatgccatttttaagaaagatgatatggaaagttgtgaagttgaacttatggaagggatagcgtattatatgtacactgtatggttgttccgaatcatggnctgtgcaaagtttgagcacattcattcaagctgtatttcactggtggtacaactctgaggcaagtcgatctagctgaaattcctgcttaatcatacgagtgtatgagtgttgaatacatcactcatcgcaattatgatcctatt

SEQ ID NO: 254461 - DNA, 329 bp, Glycine max
  unsure (1)..(329): unsure at all n locations
actcagcttatgatgatgaatcaagtataaatcaagtagttntgatgattaattatagcccaaaagaatgatttcaagattaagtcaacaagttcaagatcaagattaatttcaagtttcattagaagaaatcaagaagaatcaagattcaagagaagatgaattcaagattcaagagaagaaatcaagaagcaacaagtcaagacttcacaagggaagtattgaaaagaatttttcaaaaaccaaacatagcaccaatttgttttacaaaagagttttctctatattttctaagttaccagagtatttactctctgataatcaattac

SEQ ID NO: 254462 - DNA, 317 bp, Glycine max
agcttctacattcacattcgagtctttcgagatatttctggactctatctgacatgcgagataaaagaaattgcagtttgaatacgctcagggctacggcattccatttcgagcgtctccatatatgacgggactcctttggacatcggagaaaaaagttactgacgcttgaatctgctcatagctgctatattacatttccagcatctcgatatattaccggactcagccagacatcccagcaaaaacttaatgttgtttcaatatgctcagggctctcacattccattaccagcgtctcgatgaatacgggactc

SEQ ID NO: 254463 - DNA, 345 bp, Glycine max
  unsure (1)..(345): unsure at all n locations
ccggtgagagtgtgatcttaaactgtgagtgaacgtctatctntgagtaatagtctttgcatcaatctctgaantttagaatgaaatgtatgaataaggacatgatgaaggccatgattgtatatacacgccaattgaccaaaaagcttaccttgaattataattgtatcctctgcaccctttgtgagctgaattacattttcaaaattaaaccctgaacttgaatgaatatctccagataccttgtttagattctaggagaacagatagttcaaggcaaattaccccacattgggggagtttattggaatgtacagtacaaggtatagcattagcacacacaac

SEQ ID NO: 254464 - DNA, 439 bp, Glycine max
  unsure (1)..(439): unsure at all n locations
gctttagccaatggcttttcttgataatttcttgatagcccttgtgagccttgttttcctttccttgtattgaagcgcactacaagccttaagtgaaaaaccatgatatcaccatatccttaaggaattttggagctatggaattgttttgggaataagtgtggggggttttgtttcattggataacatgttntgttggccatgcttcatgatatattttgagccatacttgatatacattgcatattgtgttaaatgtggacatgttgaatatgatgttgtttctcaaaaggctatagagcatataaaaaatcgataaagaaaaagaagaatagttaagttgagtgaataagaatagaatgatgagactcatggtctactctctatgtgtaaatctactattactcctcttatttgctatagattcttatatgcacta

SEQ ID NO: 254465 - DNA, 471 bp, Glycine max
  unsure (1)..(471): unsure at all n locations
cagatgacctttgtcacgtatgcatcaatattatatctctgactataaccaacagtgaaagtcacaaggtacnttggctctgatgttaaatcctgcaagcagcaacttaatcaaatactctgtatatagatgatataccgcaataaaaacatcagaggcctctccagtccaaaaatttacagactggcctcataacaaacagaaaaaaaaaatcaagctcgaagaataaatgcacgtggcaagcaacataaattttctatgtcactattctttcccaaattatatcaatcttagattcggggtgttatatntagtttacttcatcgaaacaaacaaagaatctggtgaaagcatgtaagtcttctttaacaagtntattaacaacagtagcaggaccataattngtatttagatgtatntntctatgcattgcaaacgaaacatgtntctagtgttcaacccccatatact

SEQ ID NO: 254466 - DNA, 393 bp, Glycine max
  unsure (1)..(393): unsure at all n locations
ngatggtaatgctgtatcatgtntagcctattgaanaatgagacaactctgaacaaactccttgatgtcttgctgcataccatgcaaataaaactaagaagcaattctctgtaatgttctggtaaatccagagtgtcctcccaacaatntactgtgaaactcatacaaattnttctttaccacttcatggcctcgtggtaacaccagacgacctttccaatacaacaacttatcagaaaccgaataactcggatttggaggcttattctgcaaacaaagctgcataattagactcaattgtttgtcctgtgcaagggcttccctcaattctagaatcagctacaacttaggttgagatatagccatcataaaggatctagaaagagaatcagt

SEQ ID NO: 254467 - DNA, 359 bp, Glycine max
  unsure (1)..(359): unsure at all n locations
agctntgagccanaatcctgactcaccatanacctttgacccaggtgagaatgtcaattcttaccctcggaagcaaaaaataaggggagagggaaaatttccaatcaaagaggaagcaaaaaaggagagaaggaaaatttccaatcaaaggaaaaaaagagaggaaagggaattcccaatcaaagagtgggagaaagcaaaaagaaaagaaagaaaattcccaatcaaagaatgggagaaagaaataagagaagaagaaagggaagaaagttcccgatcaaaaaaaaataatatgcagaaaggtctttggaccggacaatatctgaacaatacagaatttgtaccaaatgaataaaaag

SEQ ID NO: 254468 - DNA, 290 bp, Glycine max
  unsure (1)..(290): unsure at all n locations
gttgaccacagagtggtacctggagatatgtcgcggtggtcaggagaccttggggacgtcaggtggtgtgctattgcccaaaaccaagcttgaccaatcccgacccaacccgggcatagtcggtcagtgagaacctgtgatgtacctaagcaggcgagctcctggcagtcaacagataaaaggaanacaagaccacaaagcatggaggcttgtggtggctggccagctgtgaatattgtgtaatatgtggattgtggcctctggtaatcgattaccaaaggtgagtaatc

SEQ ID NO: 254469 - DNA, 352 bp, Glycine max
  unsure (1)..(352): unsure at all n locations
tgatagaagtctccacagaggccatcttctccctcgcccagtatatatgatcgaccgttgagatgctatacctttggcgacttccagctgtcacccatggtggaagaatatgaagagatcctangatgtcctctagggggaaggagaccatacctcttctcacggttctatccctcattagctagaatttcaagataggccaaatctcggggcaggaattagaccatggaaagcaagtcagaaatggggtggttggaatatcgagaaaatggttggaggcaaaagcaataaccttggcaggtaaaggcgaatgagccccgctcatatacattctcgcactggtgatctttgg

SEQ ID NO: 254470 - DNA, 294 bp, Glycine max
  unsure (1)..(294): unsure at all n locations
agaggcaacgacattgttatcttattcataatcttccttatcagccggtgtattatcctcttacaatcctcctcatgcacatnttgcctaatcacttgactcagggtcatcaaatctcggctaccagccttatggtagtcgtggaggtatccatagaggctgtagcggccacattgcagggcatatcatagaccgtggtggctgaatgtatgttcaatgttcaggtgtagcataaatttggccacaatatgtccatatgctttgactgtttcacgaatgacttcattccactag

SEQ ID NO: 254471 - DNA, 437 bp, Glycine max
  unsure (1)..(437): unsure at all n locations
gtgcaagcttgaagttatgatatatttattattataatactatgcttatctatttgntaagtatgttttgtagttagttaattgagacttgtgggtgtatatcagtgtnttatacttactatnttgatttggttagtgtgtgtatattacatagagtttatattttattaattaattgacactaaagatgttatagttttgctatgatatgattctgaaaattattcgagtcgatgtatatgtatatgggttgggtcttgtaaacattgctacgaatgtataatatgatatatgagaataagtgaagtatgcgatgaattgtgagctatgaactgtgtagtcacacaactataataccctntaagggcgacgagttcatgcgcaatgagttttgtgatgggctccactatgggaactcgacgaagttaatcactgga

SEQ ID NO: 254472 - DNA, 394 bp, Glycine max
  unsure (1)..(394): unsure at all n locations
ngagctctcatgagtgtctcaatctttagtgatatttcttgcatctacttttccaatntagtatgggattcatctatctccacctggttgacgcctctctttataatgctcatatcccttaagttgtggtaggggttagaacacatatctttaatgattttgatggcatcaataaggggttttaaaatgaggttacccccataagcagcatccaaactcatcctataatgtgaggacactccaccatagaaaatatgaactagctcttattgagtaatgtcatggtgtggacaatttcttatcatctcttgcaatctttcacaagcttcangtggactctcttgctctctatgcacaaagtttcccatgcccctgatgtattgatccatcttca

SEQ ID NO: 254473 - DNA, 422 bp, Glycine max
  unsure (1)..(422): unsure at all n locations
tcgagtcctactagntctagtcctcttcatattatntattctgatgtatggggtccaacttcaataaattcaataaatggatattcctattatgtcatttttattgatttattttcacattatgtttgctggttgtatccaatgaaattcaaatccgaaatttccattatttttccagttnttaaatcctttgttgaaaaccaataaaatgtcaaaattaaaattttttatactaacaatgatgatgaatacattaagttacggtcgttccttctaacttatggaatttctcatttaacaactccccatacccgtgaatattacnggaattttgaatcgtaaaaattggtggacaagtggccttaataacttaaggagggtgaattaagttaaaaaatttctcgtttaattgacttctaaat

SEQ ID NO: 254474 - DNA, 366 bp, Glycine max
  unsure (1)..(366): unsure at all n locations
ntctcacnccaataccatcttcatcttcctcgttcctccctagtgtgtcattatcccgactcacaactcataggctttctcactccctcgttttatctcattaggttgttactagcgcatgagagtgtcactgtcacaaggaagcctttctcatagtctatcggtgccactgattcatcttcttctaacaactatttcactagttcacatgtttaacacaagtttttctggtttctatccagttctttaacaaggtggttctatggttcatctggaccggccatcaaggtgattcacagttgaaccggctagtccgatccgattttgataaccttgaatatatgctaatngttatgagtctctctg

SEQ ID NO: 254475 - DNA, 554 bp, Glycine max
  unsure (1)..(554): unsure at all n locations
gagtatggaccgtggtctcngatttgtgacccatcagangcatgcaagcttatcactcggagatctgatgcaggcgcataatatatcgagacgctattatatgatttgcggaagctctcgagaaattgcaatggtcattacctataactacgaggtgcggtttacgcgcattatatattacgactctcgaaattgaaccgcggaagctctctatatagtcatatggtcattaactttcactccctagtacgattaagtgcttgatatatccagactctcgaaattgcacagatgaagctctcgataataggatagggccataacctctaactccgaagtgcgtattatgcgcatgcataatcgagacgctctgcaattaactatggacgctctagctgcgttccaacgcacataacttttcacttcgaggtacgatatttgtgcgcaatatatcttgactatcgatatcgtaatagtgaagctactgagctaatcacatgaacatgcactttacctcgaggtccaaagtagccgtaatcttcagccgccggtcg

SEQ ID NO: 254476 - DNA, 385 bp, Glycine max
  unsure (1)..(385): unsure at all n locations
ttgagaganaatgattattaaacacacaaaatgaaaatactaagtatttattacctatacttaacaganaatacttataacactacaaaataaccataaattgggagagtttgatacaatttatataagttttatacaaaaaagttagtcgttttcatcgactaacaggtacctgcaattacacttcgacgctcaagttagtggcgtatctctatgaaggtgcaagtaataattaggttaataatagaatgaatacttttaatgcatgctagctatatatataggtattacttggtgggccttggggcgtaatatatgtggataaatacaaggagaatcttaagagataaagatgttattctatctcttatttcccttatctttg

SEQ ID NO: 254477 - DNA, 273 bp, Glycine max
gagaatgttagagagagaattaaagtggcacggaaaattgaaggaagaaagggaaagaagttgaactttgaagtgtgtcacacaagtttctcattcatcaaagttaccacaaatgttacacatgcatctatttatagcctaggtagcttccttgagaagctagtgttacacctcttcaatagctaagctcaccaccatgccaaaatacatgaaggaagaaggcttctttgagaagcttcctgggaagcaagtgtacacccctcaatagctagc

SEQ ID NO: 254478 - DNA, 363 bp, Glycine max
  unsure (1)..(363): unsure at all n locations
ctcaagcgcttccattgttcaatatcgagcgtctctatctattatgcgcttgaatcggacctccgagtgaaaagttaagaccatttgaattgctcaagagcttccattaaccaatttcgagggtctcgatattttatgttcctaaatcagacctccgagttaaaagttatgtccatttgaatatctcgagagcttccgntgtttaatttcgagcgtctctatatgtgatgctcctgaatcggacctccgagtgaaaagttatgaccatttgaatatctcgagagcatncgtggttcaatttcgaagcgttctatatgtgatgcgcttgaatcggacctccgagtataagtaatgaccatttga

SEQ ID NO: 254479 - DNA, 123 bp, Glycine max
ttacacattgtaaaattaaactcacatatctaatgactgttgtaaatattttcaactgctggtaatcaattacaatcctcatgtaatccattacatgctttcaaaatattccaaatcatttta

SEQ ID NO: 254480 - DNA, 343 bp, Glycine max
  unsure (1)..(343): unsure at all n locations
agctnggactcatgagtggtaagtggatcggtccttttgttgttactaatgagtttccttatggtacagttgagatcaaaagcgactccacaaacaagagcttcaaggtcaatggacatcgacttaagccattcctcacaaacccttctttagcggacgtagtggtggaagagacttccttactccaccctactcttcctccaccatgacttagggagtttttctttcctatctccttatttacatttattacatctgtccgattctatttgatggtctaatggcttttaatcttttaattgtgctacattgaagacaatgtgttgtttatgtatggtggggt

SEQ ID NO: 254481 - DNA, 342 bp, Glycine max
  unsure (1)..(342): unsure at all n locations
ctcagcttcacatcagaccacttccagagtgctggagctacttcacatggtcttgatggngcctatgcaagttgaaagccttggaggaaagaggtatgcctatgttgttgtggatgatttctccagatttacctgcgtcaactatatcagagagaaatcagaaacctttgaagtattcaaagagttgagtctaagacttcaaagagaaaaggactgtgtcatcaagagaatcatgagtgaccatggcagagagtttgataacagcacgttcactgaattctgcacatctgaaggcatcactcatgagttctctgcagccgatacaccacaacagaatggcat

SEQ ID NO: 254482 - DNA, 356 bp, Glycine max
  unsure (1)..(356): unsure at all n locations
agctnggttgtctaagtgttatacctttatgtcaatgctntntgaacaccaagataatcttgagtaacagttcagaaaagttaaaatttcaagaaaagttgataaaaccacaattcaacccctcttcttgtgacattctgatcacttcatatatctctttagaaacaattgtccaccaagtaaggaaagtgaccttagaatccttatccaccacgcaaatagttcctaagactttcttagatgtcttatccacacccanttttattactttcatacaaagagtactattctaagaaccaaatccacccattctcatgtaggcccacagaangattgtctgaatcatgaatctaaac

SEQ ID NO: 254483 - DNA, 305 bp, Glycine max
tgagcaacaaacccaggatgttgctccatataaatatcctcctcaagatcaccatggagaaaggcattcttaatatcaagctgatggaggggctagtgacggatagcagccatagcaagaaacagacgaacagtggtgagtttggcgacaggagagaaagtgtcacagtaatcaatgtcatatacctgtgtgtagcccttagccaccaagcgagtcttaagccaatcaaccttaccattgtgcccaactttaacagtgtagacccatctacaacccacagtggtcttatcaggaggaagagaaac

SEQ ID NO: 254484 - DNA, 165 bp, Glycine max
gcaaaacaaatgaaagttttattgctttaacaaacaataattttgtatgatattaatgatattcattaaactttaatcatatatatcctattatgtacaaattaatatatttacatctcgatacattttggcatcctgccgctattactgacgaatattgcatta

SEQ ID NO: 254485 - DNA, 490 bp, Glycine max
cttgacccattgacacgctcaagcgcttccagcgaacaataccgagcgtctctatctactatgcgctggaatcggaccaccgagcgaaaagccaagaccatctgcaatgctaccgagcatcgagagagcaagatccaggcgcacgagatcatacgcaccatacccagacctccgagttaccagacatgcccaagccgatacccaacagagcccaagtcgcgcgacgccacgccacacatcgcggagacacaccctgaagccaacctaccagcgacacgctatgagcatgcgaccactcgaaaacgccgccgaacagcccccgcggcgcaacaacgggggcaaaggatcaggcgctccgcaaaacgctacggcacccgacctctacgagcatacatcgcgaacactaccgcgcgcaatctaccgcccaaacgaccccgcgacaacgaaagcatgcggtaaccaaagattccgtgaacatcgccgggcaccc

SEQ ID NO: 254486 - DNA, 280 bp, Glycine max
  unsure (1)..(280): unsure at all n locations
tacaacatagcacataagagtatgattgattagagaaacttctttatatacatcaactggcttgttagaaagacccaacacctttacctactgttgtcaatcttacttacttgcatctttacttttnttaacttagacttattttaattatgtgctaaatcatcaatattcaatggttctttcaacaatgccttatttttgaatttaaccctgtctaatactagttccctgagttcaatactcgaattcattccgtttaatattaaatacttgacaaccc

SEQ ID NO: 254487 - DNA, 389 bp, Glycine max
  unsure (1)..(389): unsure at all n locations
tctactcaaatgtgtatggaccatccaaattggatctcttggtgcaaatatgcattgtgtttccttcattgatgatttaactagaaaagtgtggatttatttgattaaaatgaagagtgatgtgtttgatgtgttcaaaaagttcaaaaggttgatttagaaacaaaataacaaacagataaaagtgttaagaacaaacgaaggtggtgagtatgtattagatgtgtttcgaaacttctatgaggtagaagtgatagtgcatgaaataacattatcctatactccacaacacanaggaactattgagagaaagtgtaacgacccgcctcgtcgctacgatatcacttactataaaatatgacattntcaattagaagtaaaagcttcat

SEQ ID NO: 254488 - DNA, 465 bp, Glycine max
  unsure (1)..(465): unsure at all n locations
gaactattgtgctaaccttgctatcaagcttggagaacggctgaccaggacagtatgaaattgtgcctgaccatccattgaaaccagctgagaactggttcatctaggcgaaaagatgccactggtagtcctagaattgcgatactctgaagatccatcctagaggatcgtggccgtcaaagcggggcacgtcaagcttgactggtggctgtgggtgcggagaacgttgtgacgacgctggtgaggcatacgtaacgtgggagagactctctcaccatgcttcgtacttattgggcnagacagaatgtctgtctgagagggctgctatggcttcgtcaatgcggaccgaggttgtggccgagtgtcgagctcagcttactattaggtctgaccagagttatcgacggtagttgtgaagattactatacagatcctaatttgtcttatggagatntcggcgcttcg

SEQ ID NO: 254489 - DNA, 528 bp, Glycine max
  unsure (1)..(528): unsure at all n locations
atganccatggtgacgcattgatacgcttcgtcncgcgatcctcttagtcacctgatgcatgcgagcttgatcatctttctgtgtgagcctttagactatcattatgcggagactctctgacacagatgttgaatttagtcacatgaggagcatggcgcatcgtgcttttcatggggagagcttctctagctggtaagacttgaacttggttagaagtgcctatttcgagtggcaaattaggatcatgaaccatatttttatgagtagcatgagagatagatataacattttgatgtcttctcctcctttctctaaggatgtctgatgtgagatctttcttactcaaaggagactaacccttgtcaatgatgtccccatgggcacatcttgagatgccaaggggtcatatgtcaatgaggctttatggctcacaggtgtctgtgacccatactatgtctgagagttgacggaagaaccttgcttagaagcctattcttcagttggtaagactatcctccaacactccg

SEQ ID NO: 254490 - DNA, 297 bp, Glycine max
tagaacaatatacttggccttcgtttaattgtcattgggcttgtcgaccacgaccaacaaagtactttcggtacctactatatgttgacttgaccaacgctgttattggaatactgcgacaatctttcaacaccttattcacacattctgataggttggttgtcatgtgaccatatcttcgtccagatgtatcgtaagccatgctccattgtttctttgaaatgcaatcaatccatcttgctatggctggactcaattgacgacatctttctaagtgttgatcaaacacatgcttgc

SEQ ID NO: 254491 - DNA, 403 bp, Glycine max
  unsure (1)..(403): unsure at all n locations
agcttcctaatgtgactatgactcataacatattttttgagagccaatcatgtaattgtgtacatatattagtattgtacattcaagaataattgaaacacattatagatagagaaaaagtgcattaagagagtgtgcattatgagagttgcattgtcttatatttttcttatatcataaaagtcttttcaattgtatgcctcattttttatgtctagataaattcgtgatgtaactaactacgaatattatgcaaaatatcatttaaaactttntcaatcaagaagaatcattaaactctgcatacaattataagtttgaacaataaacagacaatattaaagaagaaaaataagtttatttgttgaacaagnctatttaatgtgtttttgatcttcatcga

SEQ ID NO: 254492 - DNA, 427 bp, Glycine max
  unsure (1)..(427): unsure at all n locations
gtatcttccaccaaagaaggattccaaagcttccacctccacctcctcttatagcccanaataagtcttcccccatggcttctctatcaagaattcttccattggcatcaacaattttagcatctaagacattatcaactccaaggccatattttctcatcatggctccatatgctcctcctgtgatatgccctccaatgcctaagcttgtgcaaaggcctgcagggaaaccatgaactgaactcttctcatatattctgtagtaaacttcaccagttgtggcaccagcttgaacccaagcagtgttgctttttacatcaacgtcgatgccgcggagcttgaccaaatccacaactatgaaggggctctcaatttcggagacgtacgaaattccctcatagtcatggcccgcacttcgcactctaat

SEQ ID NO: 254493 - DNA, 456 bp, Glycine max
  unsure (1)..(456): unsure at all n locations
agctnntagagagttatcctttgtaatatacaaagtttcattgagagattaagaacttcattatgcattcactctttgagtgttgtaaagaatttatgattctaaaaccaaacttccgtttgtgaaagccaagagtgacttagtgattaaataatacttgagtgttcttagattgaagggaagcctaagggttgtgtcagtagtgacattaagaatacttgtaaggcanaagtgatagaaaaaaacatttgttgtaatcgagtttgattagtgaaagttggtaaaggaaaaatagatgtaactcaggttaagtgaaccaatataaaatgaagtatttttagtgctcttcttagctggttaaagtgttntttatgtccatcattgacacattntgcacacaaggttttcactggaaaataatntatatatatgtcatttgacgacagtacacctatg

SEQ ID NO: 254494 - DNA, 320 bp, Glycine max
ccgtaatcatttccaaatatgcatgtgaattaggacgcatcaacaagaatcaagccgaggctattgtgcaagcaatcaatggggcaaaacacaccaaatgattataatgatggatggctcaaattctcacaaaggtaaaatcatcactctcaaattgagctttcaaaactatcatgacatgtagagaagaattaaggatttcaagtcacaaaatgtcaagaactcttattttcaaaacaattacccatttcttgaacatatcctataattcaaagaaaaacatgcaaagtcgtacgtgcacacaaaattgacccaaaata

SEQ ID NO: 254495 - DNA, 428 bp, Glycine max
  unsure (1)..(428): unsure at all n locations
agctttctctctattcagatggtttcaggtgtcatattcttctgcgtggttgttttaagctctagctctcaagcttagatactcaatgaagtttattcttactatgatgagttcgataccttatatactgggtgtctcttctcttgtaggtgccatagcagcagacacatcatccatttcacaatcccaatccctcagttacggataaaccatagtttccccaggtggaacctttgaacttggtttcttccatcttggaaatccaaacaaaagctacctcgggattaggttcaagaatattccgtcgcgagacattgttagtgttctcccaagcaacaattcctctgccctcttgagcctaagaagttctggacacttggtccttacacacaataacactgtagttnggtccacaagttctctaaaag

SEQ ID NO: 254496 - DNA, 380 bp, Glycine max
agcttaacatcgaaatctggtaaagcttcttggctggtgcattagaggacatgatataatactagtatatgaatacatggttaatggcagccttgactcctttgtttttggtatgtaattgaagaatgctttgattagatgcactagcgttatttttttttttttaacttcagtcacatttaatttaccagcttatgaatcttgattaacttatctgctttgcaaataaaaaacagaccaaataaaaggtaaatttctggactggcctcaacggctcgacataatatttggaatagctagggggctgttgtaccttcatcaagattcccgattaatgattattcatagagatctcaaggcaagtaatcatttactcgatg

SEQ ID NO: 254497 - DNA, 420 bp, Glycine max
  unsure (1)..(420): unsure at all n locations
tcaactcctctttcagaaccatgctatgtgctctcgactggtccctttcttcccttcgcaacttgagttcattattgctaccccatagagctccgcgaaatttgttccggccatactcttccttgcgagccctcttggtctcttgtttaagggctcttgcggtaattgcattctcttcccgtaacccggcacactcctttcgaacgtgtgtagcagccaacttgaatntctccttggcgagttttgcctttcctaactcgcttttgagagcttggacttcttcgtcctcttccggtgcttcaaaattctcttcgttgacgacttttaacttggcgagccaatctaaacctcgtatgtgaactttcagccattcgtggtacccaccaatgatgccattacgaatgcctctaagctcttgat

SEQ ID NO: 254498 - DNA, 352 bp, Glycine max
  unsure (1)..(352): unsure at all n locations
nganatgacgaagtgttgaagggtgaaacttcctgctnttattgttgaccacagagtggtacctggagatatgtcgcggnggtcaggagaccttgtggacgtcatgtggggtgctattgcccaaaaccaagcttgaccaatcccgacccaacccgggcatagtcggtcagtgagaacctgtgatgtacctaagcangcaaactcctggcagtcaacagataaaaggaaaacaagaccacaaagcaaggaggcttgtggtggctggccagctgtgaattttgtgtaatatgtggatggtggcctctggtaatcgattactaagggtgggtaatcgattacaaggcttaaaaat

SEQ ID NO: 254499 - DNA, 343 bp, Glycine max
  unsure (1)..(343): unsure at all n locations
cactcggagctctgattcangcacatcacatatatagacgctcgaaattgaacaacggaagctctccagatattcaaatggtcataacttttaacttggaggtccgattctggcacataatatatcgagacgcccgaaaatgaacaacggaagcacttgagaaaatcaaatggtcattacttgtaactcggaggtcccaatcaagcacatacatatagagacgctcgaacatgaacaacggaagttcttgagatattcaaatgattataacttttaactcggaggttcgattcaggcgcataacatatcgaaactcttctaattggacaatggaagctcttga

SEQ ID NO: 254500 - DNA, 494 bp, Glycine max
tgtacacatcttaaggctcaaggtcaaatattatataccctttctttatatttaccatgaaaatgacgtatcaatgagaaataaagcacaattaataagatggatcaattaagaaactgatttaaagtaaataaaataaaatttagttcttaaaaattaaattaatttatatatatatatatatatatatatatatatatatatatatgtgtatagataacttaacgtttgtaaatttcactccttaaaatattaaatattatttttaattaattataatattattttgatgatttgcaacactttttaatatatgctttttatattataattaatgagttatatgctttaattttatgcgttaaatagtttctatttaaatattctaaaaattcaaaattattaacatgaatattcatgaatatataaatactaccactaaatgagagtcatattcattattataagtctttaaagttccatattaaaaaata

SEQ ID NO: 254501 - DNA, 403 bp, Glycine max
  unsure (1)..(403): unsure at all n locations
tattatgtgcatgttagaaatgatgtgacttggtgatcgaggccgtacccgaatcaaataaacattaaaaatgcagtatctaagaagtgatcctaggtcgtctcccaacgagcaatggtcaaccaaatgctcataacagatagtaataaaacagtaacgaattggggggttggttggttttgtaaattaaacagcgaataaatttgaattagaaaatatcagaattaaaacacgttgcttccccttgattcacaagcaagtctcttattctagggtacgaagaattatcctttatcagttcaaccacttaatccaaccctaaattaaattactaagcnnaaattaacataagacattcatttatgtgataagcaacacatacaccaattaatcatgaacgatc

SEQ ID NO: 254502 - DNA, 237 bp, Glycine max
cacctaaattagtgttacctaggagctgctatattcgatattttcccagcttctgaagctgtttgttccgtgcctcctctatgattgttcaacatgatgagaatctgcaaggcttgtttattcatgaccacactcgaatttaatctccattatccttctaatggcttccgccatgtctaaccgctgttgagggttgcttttagtgcaagcagcaccaatgtggaggagttgctccat

SEQ ID NO: 254503 - DNA, 459 bp, Glycine max
  unsure (1)..(459): unsure at all n locations
agctcggactcatgagcggaagttggatggccttttgatgctactaatggctttccttatggtacgagtgagatcaaaagcgactccacaaacaagagcttcaaggtcaatggacatcgacttaagccattcctcacaaacccttctttagcggacgtagtggtggaagagacttccttactccaccctactctttctccaccatgacttanggagtttttctttcctatctacttatgtactattattacatttgtccgattctatgtgatggtctaattgctgttaatcttttaattgtgctacattgaggacgatgtgttgtttatgtatggtgagcttgtaaannngttttatgccatcattgacacatttgacacaatgtttcacttgaaaataattatatatatgtcatttgacgacagacacctatgcttataaaaactatctcggcactag

SEQ ID NO: 254504 - DNA, 516 bp, Glycine max
  unsure (1)..(516): unsure at all n locations
atactaagcttaacatcagaccacttccagagtgctggaactacttcacatggacttgatggggcctatgcaagttgaaagccttggaggaaagaggtatgcctatgttgttgtggatgatttctccagatttacctgngtcaactttatcagagagaaatcagaaacctttgaagtattcaaagagttgagtctaagacttcaaagagaagaggactgtgtcatcaagagaatcacgagtgaccatggcagagagtttgaaaacagcaggttcactgaattctgcacatctgaaggcatcactcatgagttctctgcagccattacaccacaacagaatggcatagttgaaaggaaaaacaggactttgcaagaggctgctanggtcatgcttcatgccaaagaacttccctataatctctgggcttgagccatgaacacagcatgctacatccacaacagagtcacacttagaagaggcactccaaccacactgtatgaaatctggaaagggag

SEQ ID NO: 254505 - DNA, 310 bp, Glycine max
  unsure (1)..(310): unsure at all n locations
agcttagctcgcctgggcaagcaccctctgcacaatataatttattagaaaggggggagtgcagttntttcacccaaaacttatccccctcactcaagaacgcagcacccgtgggattgagggtctttttctgacccttaggccaccatttgtgctttntgcttccattntagtgtccttgatcactccatacaagtaagtacattattctttggtccctagcttttcgttgatggtattttatgctctaaattgtacatatttggtcaatttcgtgaggcaatttgngacaaattcatgctntgattca

SEQ ID NO: 254506 - DNA, 240 bp, Glycine max
tcaattatctcatacttatttgtcacacgatagtgacatcgatgtgatggtaaatatatttcacaacacagtagttatatgcacacccgatatgttgcagcactccatttttatatattacaattattcatgttaggcatttgcatgtacgtccctgctactattgttccaccactagccaggaataaggttaccatatcgagagccctacacaggaaggctgcttgataagatgatgca

SEQ ID NO: 254507 - DNA, 306 bp, Glycine max
  unsure (1)..(306): unsure at all n locations
ggagcacgaaattgaaggaataaaagagggaaagaagtggaactttgaagtgtatctcataagactttcattcatcaaagctacaacaagtgttacacatgcttctatttatagactaggtagcttccttgagaagctttcttaagaagacttccttgagaagcttctttgagaaaactctcttgagatgctataagttagctacacacacncatctaaaaactaagctcacctccttgagaagctntcttgagaagctagagcttagctacacacctctataatagctaagctcactcacatgac

SEQ ID NO: 254508 - DNA, 292 bp, Glycine max
gagttacagacgaagatgagttatttagtgaaacatgtgggaggggaaagaagattaaaaccgcatttgcgagcatataatcaacttcctgtgatcactaacaactttctccatgttggccaagagataaagatgtagaaagtcatgcgagatcgtatgaacgacattacgtgaactctagtcgacctttctgggagtaatcctgccatttgcatgcatatgattttatttgaggatgagttcacactagtgagatagccatagaggtgtctcaatcgcagaatctatgatg

SEQ ID NO: 254509 - DNA, 346 bp, Glycine max
  unsure (1)..(346): unsure at all n locations
gcttcacatggagctgcatcatgtggtatcaagagcatcttcatcttcatgtggtatcaagagcatcttcatcttcatgtggtatcaagagcatcttctccttgaagtggcgtctccaatcatctttctccttcactttaattacttgttattcatcctattctccatatatatcctccattgtcttatggtttggtgttgnttagagtagaatcaaaaaaataaaccaattanatcttagatctatacttgttcttgcatttctatggttcacattctatagatctactcttgaatcatgtgtttgtgttgatttaggttctatcatttttcagtcataatattc

SEQ ID NO: 254510 - DNA, 399 bp, Glycine max
  unsure (1)..(399): unsure at all n locations
cgtcggtgtacctgaagatgctattaggctcagcctgttntcattttctttatcangggaggccaagagatggttgcattcattcaagggcaatagtttaaagacctgngatgaggttgttgagaagtttctaaaaaaatatttcccagagtctaaaactgcagaaggaaaagctgcaatttcttcattccatgaagacacctgaagaagccatggacttaattgaaaatatggctgccagtgaccacgccaatttgcatgatagagttcatattcctaccaagaagtttattggagctntcatcacaagatgccttgttggccganaataagttgttgtccaagcaacatgaagctttaactaatacactaagtaagtngccaactcaatttcatgct

SEQ ID NO: 254511 - DNA, 353 bp, Glycine max
  unsure (1)..(353): unsure at all n locations
agctgtagaaataattgggaagcggtaagtttatttctaagaagatcgatttatttataagttgtattacattattaacttaatatgatttatttaatcatgcagtattttaacgaccctagaccattggagcccgagagattaaaagcattgcggattcagtgggcacagttttatctccgagttagagatcaagcctaggatatagggacattntttnntaacattttgacagttttgacattntctatgtaacacgaacattgaattcatttgttgattgttctttataatatataaatcaattatttgatgtttattatcattaaaactgcttgaaagcagaataaaat

SEQ ID NO: 254512 - DNA, 542 bp, Glycine max
  unsure (1)..(542): unsure at all n locations
cgatgattgctgcctcnacntaagtgacacatagaattctcaagcatgcgcggcagctcgcccaggcgagctcagctagttcaggcgagcatggttgtttcctccagaagcaacagccttctggaggaaggatctggaaggcccaagtcgccacattgctatttgccccaccttttactagagcccccctttatttttaggtgttctttgtgcgtggcgtggtgaaagcttacgaattacgtaacgatgcttattgttcttccgcacggttgcgaaaacgtacggattatctcattactctctttctagctttcgaagaagtaccgaagcttactgattgcgtaaaacacctctttctgtgtctgtatgtctaagacttcattattgtgcaacagggacgccagtatcttacaacgctcaccaacggttgatgtcatacagtataatccccggaccagatatggtgggacaggtgcgccctctacttacctctcttcgagatatgaggaagacaagatagtactcgatttctccgtctgccg

SEQ ID NO: 254513 - DNA, 445 bp, Glycine max
  unsure (1)..(445): unsure at all n locations
cataccatatctggaatgggtgtgaaagtgtgatagacacgactgctatcttgccgagacaacatcactcataacattgggatgaatgatgatgccttgacctgtctgcaaagatgctctctatgtgctacaatcttgccacatcatggcgactcatacgctgaaaggctaatcaattcattctagttaatgaacatatagctagacagagcatataacatgtccttcctatctgactatctacaaagaggtgaanggcttatcatatcgttgagaatatatcctaatatgtagttcagaaaaaatatattgttatatctattaagaaacttttgtcttatagaaaacgacctctctttctaaaggcgcancttactcctcaacttgttaggaatgcgaatatgccctcacctaacctatgatgagactgctttaattagaaaan

SEQ ID NO: 254514 - DNA, 183 bp, Glycine max
gaaagaatgttaattaaaagattaatgtctattttcgctcatcaattatgtaataaccctgatgctcatgcacatcctttgggtatgatttggttgtgagtagacttgggttgtcttgggatcgggccttacaacgtgtggcgcctactatggccactcatatgtgtacacaatcagtgcatc

SEQ ID NO: 254515 - DNA, 432 bp, Glycine max
  unsure (1)..(432): unsure at all n locations
gcttaatatgatactggttgactcaattacgacgattggatagtaatattattaaataataatagactacatgattgtagtttgtagaccaagtaactgttgtgatttgtgaaaccacgaggtggtcattattcgctattgtattatactgtatccgcagtaacatatgccaatgagcttctttctgtcaaaaacattgaattacactatattatgattaatcatttcattgcaacattgttttcaacgaagactatgataaccatgctgatcccatgcacaaatatatcatattaatttaagtatattntttgaattggaacctatatccaataataccacaacccgtaagatatgccattggaactatctcaatataagccatagcaataagtcagtcattgaactatatcataagatacagccattgag

SEQ ID NO: 254516 - DNA, 449 bp, Glycine max
  unsure (1)..(449): unsure at all n locations
tcgaccgatcgtttaagccgttatctcgcataataaatgataaaatgaatntcaaccgatcatttgtgttgtaatctcggttaatcactgttaaaataaaattcaaccgatcattcacactgtaacctcgggtaataaaaaaagggtaaataagctccaatcgaacactntactttaaaagttcttataaatgagttgataaataatcaatgtttagttcttaaagaactacgtaggtctgatttcctcaccgcaattgaggatacataggaacaaaagccacgcttttgtcgaccccaaaaagggagagattgttaaaggtccaacgccttaacatttctctccttccataaaatcaatagatcgttaaaggtccgacgccataatgattctctcctttcanaatcaagtgattattaaaggtctaaggcctgaacttttctttcttt

SEQ ID NO: 254517 - DNA, 401 bp, Glycine max
  unsure (1)..(401): unsure at all n locations
aacacccgccttcctaatgctcgaccacttcctccactgtttaattttaaacctcagggtgagtttaagtactttctcatagatcagcacaatttattagtgaagtttatttggaatagctntatataaagccaacaatggatttatttcactacacacgtgatttgttggtgtgagtgttagtcctatgacgtgggccttgtgaggtcagggttatatagcaaattctgtaaccaaaacacaatgatagtggccattttagcacatacaagagtgaatgacaccagatttatctctntaatttcctgtntgttgttcattcatgcagaactttctggtgtaccccctgatgtcatcaatcggcttataccagagcatgcgcgtaaacagaactttattat

SEQ ID NO: 254518 - DNA, 281 bp, Glycine max
  unsure (1)..(281): unsure at all n locations
ctatataagctctcaaggagcttagctatctgctgtttatcttgtgacccctacaaacagattgaactatttagtacactaattaactgcgaataatcacactggcaagttaatgtaactgcattctaggatgtgatctcttgccgatgggtggcgcaaatgctgtcatatgctagaacacacagtnggcgaaataccttgtgtttattctgttgcttgactgacacagaccgtacttaatgttgcatatgtctagattcatcatgtagagcggctgcatc

SEQ ID NO: 254519 - DNA, 386 bp, Glycine max
  unsure (1)..(386): unsure at all n locations
catcttggtcttcctatagtatggctatatgntatttgtcatccagcaactatacgtgcttaaacaagagttgaagcaaggaataaaactagagttataccaaattgcatcacagtactcatcgccacttgaaccacctaatatacaagtggtagctgcacgtgtgagaaccaaggggagttatgctgatgctgacacaattctatcagctaaagagccttctaatctgcacgttgacactatgggcttgtacgtagttcatgaccagtgtactaaactagttgcattgggaaaagtgtatgatagtatgtcgaccatacacaatgtcccttatgcagatgatgtggttagggtgagtgttgtcaaagtttaccacggtgacgctc

SEQ ID NO: 254520 - DNA, 359 bp, Glycine max
  unsure (1)..(359): unsure at all n locations
actattccttgcacaaagcttcattagtagcaccaaaaactatgtcatgaacataaatttgcacaagcaacaactcattgtttgatctcttgataaacagtgttttgtcttaacctcttacaaaagattgctcaattaagaaattgctcaacctttcataccaagatataagtgcttgtttgaaaccatacagtgccttttctagcttgtaaacatgattaggatgtttgaagtctacaaaacctagaggtttctcaacatatantctcttttcaatgtatccattgagaataacacttttcccatccatttgatataacttgaaacccataatacaagcnatagcaagaataacctaa

SEQ ID NO: 254521 - DNA, 333 bp, Glycine max
  unsure (1)..(333): unsure at all n locations
agcttccatcactccgtgacanaattaaaccctccatcatccctaaatcatcttaaacatagccagacctgcatgataaatcccgaaattgagactcaaagaagaagcttgatgaacttgattntcaaagaggaagagcattatcaatgagacttagcgtaggtgtcatcattgttgtgatcatgaaggtgtcacgtgtagaagcatatgtaatatgaagttttgatgatgccaaagatgaaagctattcaagtntgatccaagtcaagaatcaagaaattcaagaggaacgatgaaattagtccataggatgttaaaagaattccttaaatg

SEQ ID NO: 254522 - DNA, 353 bp, Glycine max
  unsure (1)..(353): unsure at all n locations
tcctgactcaccacaatccttaccctcggaagcatataagaatataagggaaatttccaatcaaagaaaaagagaaggaaaatttccaatgaaagcaaaaaaagaaaagaaggaaaattccccaatcaaagaatgggagaaagtaaaataggaagaagaagaaggaaagaaagctcctgatcagggatcgaagganaaacagaagatatgtgcagagaggtctttggaccggacaatatctgaacaatacagaattgtcaccaaatgaacaaaaaagaaggaaaggaaaccacgacctaagatggtcttctccctttgattaccaaccaaaatcccgtgcgctagcgactttt

SEQ ID NO: 254523 - DNA, 338 bp, Glycine max
  unsure (1)..(338): unsure at all n locations
aactggtgtacactttcactaaaggataaacatatatggacacccttcaagtgtagacaccttgagagataaaaattagaaagagtagatagatagataaatgattgatataattgatatcatgatgttacaataagtgatggccatttgtatagtcctcatgtntaattgggtagtttctgttttgattacattcagtctctttgaaatcaacttattgggctttttcacgtgacatgcaattatgcatatgtgcacctgctaattgaaaactcagtttaactattttgtactttgggcatggtgatatttaacgaggataagaatgagcacttagt

SEQ ID NO: 254524 - DNA, 410 bp, Glycine max
  unsure (1)..(410): unsure at all n locations
ngaacgcatgtaacccacccatcttcttatagtagaacaccggttatgtgtccactatcattgttatcatctccctctccatcattgtgggcactacttgagctgttagatccctccacctttgggtgtattctttgaaagattcatgctccctcttacacatgttctgtagctgcattctattcggagccatatcagaattgtactaatactgtcgaatgaaggcaaccattaagtccttccaggaatggacccgagaaggttccagattagtataccaggtgacagatgtcctagtaagactttcatggaagaaatgaatcaacaatttntcatctttcgtgtatgcccnncatttcctgcagtatgtcttcaagtgattcttatggtaagtagtccctttgtactta

SEQ ID NO: 254525 - DNA, 483 bp, Glycine max
  unsure (1)..(483): unsure at all n locations
acctagatttctagttccagtatctcttctaacaaattctttcttcctacacctatacttgtcactcctttcacagccaattaacacaaacgaagtctttcctctactaccagtgtttatgtcagaccttataatcaccgccacaaatccgttttcatgagcaacagatcaaacccaccgcagaacatcctctcggctgtcaaacacctacaaagcantccagataattgtagttntctacaacatattcattttattaaatcactcacaatcatgaacattattacctgaaaagtattgaacgcattcgaacaatcaacatgtggttcattcataccacattcttcttcattntgataattcatatccacttctntagacattatactttcatacatgcactgatctttgtcatcttacaataaatcatanatttcacacaggcatcaacacactagcataacatacaaactatcataatac

SEQ ID NO: 254526 - DNA, 388 bp, Glycine max
  unsure (1)..(388): unsure at all n locations
attccttcatctgacttagcatataattttcctaagttttcttttccattgtttaatacagaacatntgcaaccaaagacatgaagatgtgagatgtttggtttcctaccattgaacagttcatatggagttttctttaagatgagtcttattaaagccctattcatgatataacatacaatatttacggcttaagcccaaaaatattgtggaagtgaagtatcattcaataaggttctagaaatttcttctaaagatctatttttcctatcaacaacttcatttttgtgaggagtcctatgtgcagtaaaattatgtcaatgccatgcttttcacaaaatagatcaaattccttattttcaaactcaccccatgatcactcctaata

SEQ ID NO: 254527 - DNA, 373 bp, Glycine max
  unsure (1)..(373): unsure at all n locations
agcttacccaccagttgtgatttgtaattagtttatgcaaaaatgtaactgatgatgcggcaactaacatcaatatccaacgtataatataaaatgaatatatatatatagatagatagatatatacaactaattcctagaagtggaatgttgtacacacctgtggtttaacctctacattgttctggtcactcttgactgttactggttcatttgcaagcacactctcaagatgagcaaggagttccttagcttggcacgatccanagtctggatctgcatcctcatagcaccaaacaagtgcagtctgcttggcttcaatggtggatccatcagttgtttcagtgtatagattcattacaggttctgcaat

SEQ ID NO: 254528 - DNA, 452 bp, Glycine max
  unsure (1)..(452): unsure at all n locations
atgcctcaatcatttccaaatatgcatgtgaattatgaagcatcaacaagaatcaagccaaggctattgtgcaagcaatcaatggggcaaaacacaccaaatgattatgatgatggatggctcaaattctcacaaaggtaaactcatcactttcaaattgagctttcaaaactatcatgacatgtagaggagaatcaaggatttcaagtcacaaaatgtcaagaacttttattttcaaaacaattacccatttcttgaacatatcctataattcanagaanaacatgcaaagtcgtacatgcacacaaaattgacccaaaatattaaactaaaaatccgacgaaactaacaacattaacaaattaacacaactaacaaattaacataaccaacaaaactagcataaccaaagaacactcccncccccccccccccatacgtaaacaacacat

SEQ ID NO: 254529 - DNA, 371 bp, Glycine max
  unsure (1)..(371): unsure at all n locations
agctngtggaatanagcctggacttgtatttatctttgctagcctgtttgcagtccattctcctgcagagaatgggattttcaaagttttaacatagtgttattgcaagcataattatgccagctcttattgcctttcttgatgaaaatattgactttaaaaactatcctgcttcaggtggaagtgagtgatgctgctcttcttataatgtgtggctttatcaatgactattaatctctaattgaggataaataatctatatataatgatagtataatttctctagcagcaatctctttctcaatatattgctttccttgatatatcactatatagctcttattctctntttttatgtaatatatctcttc

SEQ ID NO: 254530 - DNA, 257 bp, Glycine max
  unsure (1)..(257): unsure at all n locations
tngagcaaattcatacgacaatgactntatactcggatgttagattgagtcccgcaatatatcgaacagctcgaaattgactgttgcagctctaagcaaatccaaacgacaaatactctgtactcggatgtctgattgagtcccgtaatatatacaaacgctcgaatgtgatagcagaagctctgagcatattcaaacgacaataactctatactcggacgtntgattgagtcccgtatatatatcgatacgctcga

SEQ ID NO: 254531 - DNA, 351 bp, Glycine max
aattactaattaatggatttaattgatttcatttggtggagtatacttgcttacctaatagagtgaccattaatttatatcacaagatttatgaccatgtcctttttttatttggaagcgccgggtacaaattctctatgttcggatatttttttttgcaaatacaattaatattaagtaagttttctttagtgaaaaatattatattgtaacgaccatatacatatgtaagaaagctgttttttttttgtggaaattgatatgggtaatattataaattaaatattattgtgaaattattattttatttgcttgcataaataaactaaatattggtggtgaaatattatt

SEQ ID NO: 254532 - DNA, 344 bp, Glycine max
  unsure (1)..(344): unsure at all n locations
ccagctcgcccaggcgagcagggttgcttcctccataagcaacagccttctggaggaatcttctggagggcccaagtgggcctggttgctattcgcacccccattnttactaagtacacccnctgcctttttttggtgattcttttttcgtaaagttacggaaacttacgaatttcgtaacgatacttgttttctttccgtaatgttacggaaccttgcggattacataatcatccccttgtttgacttatggaatgttacggaacctcactaattgtgcaatgatgcttccatctgatttccggtgtgtcacggaaccttacggatagtgcatcaatattttc

SEQ ID NO: 254533 - DNA, 367 bp, Glycine max
  unsure (1)..(367): unsure at all n locations
tgagcctctggttgtgcctagtccctccggtcctcgattgagcacaaaggggagttgtgctgatccctcacgaaatgatcctgagacgggtgactctgacaggtgcggcttgtacatataagcatatcttgcccgcctggttgccgtggggagagtttatgagggatccactcttgttcataacactcctttgttgcctggccaagtaaaggtgagtgtggacgaggttaaagatgcagatgctccagntcatgtacccactgatgaggtttccttagtggggcaggcacttcacaccttccttgcttggccaacacatctggtcaagtctttatcacaccaggnacttatcggccttactatatgt

SEQ ID NO: 254534 - DNA, 305 bp, Glycine max
actggacgaaatataaaattgtctgctctcttcaagtccaagccggttcagcccaattgcttataattctcctgaaattaaattaaaacacagaattagtcaagtatgcccaaatgataaaactgcataattaatttgacaatcaaggctaatcagtaattataatggtgatagaaaggcgtaagatataggagaaaataatgacacatcatattcccccacacttagctctttgcactcctgtgcaaaatcaaaaagcagagcacggaacaaatccagagacattaatgagagacaaacaaaca

SEQ ID NO: 254535 - DNA, 334 bp, Glycine max
  unsure (1)..(334): unsure at all n locations
agctngacagacctgcanaccttggatctgtcaaggttaccaccctcgacatcgaacaacacttgtccacgcttaggggctcgataaactcgtgacccttctacttgtcaaggctaccatcctcaacattagacaacacttagccacgcttgagggcttgataaacttgtgacccttctacttgtcaaggctactgccctcgacactagataacctncattgacattagacaacctctnttgcccacaagctggctcagagaatgtggggcttatgtacagtccacgtcccacaaaatacatgtgacaagtgacatggcactccaataacacat

SEQ ID NO: 254536 - DNA, 436 bp, Glycine max
  unsure (1)..(436): unsure at all n locations
ggtctcagcgtttatgcgagacagagaccaacatgttagctatcatcgccaagtacgaagaagagttgggtctagccacggcccacgagcatagaatcgcggatgagtatgcccaagtatatgcggaaaaagaggctagaggaagggtgatcgactctntacaccaagaggcaaccatgtggatggatcggttcgctcttaccttgaacgggagtcaagaacttccccgattgttagccaaggccaaggcgatggcagacacctactccaccctcgaagagattcatgggcttctcggctattgtcagcatatgatagacttaatggcccacataattagaaatcgttaggaaacttgtatggtctcttagacctngactagatatgactttctttttgaataaaatgaagttgtccatgtcctactcataaaaaa

SEQ ID NO: 254537 - DNA, 303 bp, Glycine max
catgcaagcttctagccatatggacttaccttgtcttaatatcttcgatagcccttttgagcctagattccctttccttggtttgaagctcactacatgccttatgtgaagaaccatgatatcaccactttcttaaggaataatggagctttggaattgttttgggaataagtgtggaggtttatgttacattggataacatgttctgttggccatgctccatgatataatttgagccatacttgatatacattgcatattggtcaaatgttggacatgatgaatatgatgttgtctctcaaa

SEQ ID NO: 254538 - DNA, 411 bp, Glycine max
  unsure (1)..(411): unsure at all n locations
atcaagtattgngacctatatgtgcatcttcgtattgattgtgtgtgaatattatatatattttttaaatgcatgaggttgtttgacatgttgctctanttttatattcttttttctactggttattattttcttaaattagcaagagagagaacggtatgaatacattgagcgtgtgggcaaaattatcgactagcaatatggagattngcttcacacaaatgaagattctgaagatgcaaaatggatatttgtaatgagcaagaaactntatgttgtcaaggtaacaattcaagggtagttacantttaaagttacttattttctttaaagacaattaccatgtctttcttgtaccactattacatttgcattaatcttgtagaanaagaaacattatttcatcattct

SEQ ID NO: 254539 - DNA, 440 bp, Glycine max
  unsure (1)..(440): unsure at all n locations
agctngaagtctccagtactccagaatacctctactttgccactagtggttaagtngaaggaaaagataaaggtagattggaactcaacgtggaggatcaaaagatctctttcgacctctttgaggccatgaaatactcagatatgggtgatgcctgtttcgaagaagaagaggtggagcaggaaatagcattgttagcctcaaccatggtactacagtctcctttggaaaaagaacctggctacaggagagattgcttagctcgtgatgaagagctcgatgattcaaaagacagtggtgttgaccaggtgcgttttgaagaattgtaaaaactgagaccagcagaatagcccaaagcagaattaaagaccctttcggcatatataaagtatgtatttttgggagaagatgagaccatacctgttataattagaaactct

SEQ ID NO: 254540 - DNA, 320 bp, Glycine max
  unsure (1)..(320): unsure at all n locations
tctccccaattntctatatatagggggagaagtgaagtgaanattggttcttctctcttangcactactatctctttcgaatttgcttggacaaattgtttccgtgaagaaaatccatgccgaggcatattcgaaacgtttccgtaacattatcgtgaggaatttctagaacgattcgaccgttcttcgacggacttcattcgttcttccatcttcagtgggtaagtacctctaaccaagcttttcgatgcattcgatgtacctgcggcgtgccacattgtgtatagagtatttgtattctcgttcattgactctttata

SEQ ID NO: 254541 - DNA, 493 bp, Glycine max
  unsure (1)..(493): unsure at all n locations
ttagagccacctgcggcatgcaagctngaagacaagactatacgaggtatcttccttgtgtatagcaatatctctaagggctaccgtgtctacaacttgcaaactaagaaactcgtcatcagtcgagatgttgaagttgatgaatatgcttcatggaattgggatgaagaaaaagtggagaagaacgttcttatactcgttcaactacctcaagaagaagatgaggaagaaaacccaggtgaaccaccttcacctccatcacaacaacaagaagagatggagtatccatacagaaaaatttgcaccagtagctcgtcttaataagacaaagctcaactctgatggcaccatacagaaacacaaggcgaggctagtagctaagggttacttacagcaacccggaattgactacaatgagacatttgcaccagtagctcgtcttgataccataagagctctaatagctcttgtgtcacacaaaggatggagtatc

SEQ ID NO: 254542 - DNA, 396 bp, Glycine max
  unsure (1)..(396): unsure at all n locations
agatattcaagatggatgatcatgatagtctctagagtcttagaaagggtatatttaataggaagggaattccaattgaagtagcaaaaggtttggccaagaaatttaagttaaaaagtctttttcaagaaatttactctctggtaatcgattaccagaggatgtaatcgattaccagtggccaaaactgattaataacagctattaaaatctgaattcaaaatttgcactatgtaatcgattacacatatatggtaatcgattaccagcagtttctgaatgttttaattcacatttaaagcttgtaattgattacatacatactgtaatcgattaccagaggagtttntcagagaacattctcaacagtcacatctttttatctgtttcttaaat

SEQ ID NO: 254543 - DNA, 358 bp, Glycine max
  unsure (1)..(358): unsure at all n locations
agatgaggaagtgttgaaaggtgaaactttctgctnttattcgttgaccacagagtggtacctggagatatgtcngcggggtcaggagaccttgtggacgtcaggtggggtgctattgcccanaaccaagcttgaccaatcccgacccaacccgggcatagttagtcagtgagaacctgtgatgtacctaagcangcgagctcctgcagtcaacagataaaggaacaaagacacaaagcaggaggcttgtgtggggctggccactgtgaatttgtgtgatatatgggtatggctttggtatcataccaaggtgggtatcgatacatgcttaaaatgaaacaggaggtacattaatgta

SEQ ID NO: 254544 - DNA, 428 bp, Glycine max
  unsure (1)..(428): unsure at all n locations
tctagaacaagcaggtacactntacagttgttatgaagtgacaacatgcttagtctttctgaggtagtcattatgaggttcccattctaagaaactntnttgatgggcattttgaaaaacccatcagaatattcattctaatgtatgatgagaatgaatccatacttaatgaatntagttgatgaagttcataccgatatcccaatctgaagtagcataacttcatcactcttaacacttcttcacaggttcaagaattctaaagttgattacgtcaacaagactgagtacaagttcaattgttggggtgttaatgtattgtccaaggttagactgagtggcattcttcagtctatcattctgatgtttctcatcaatgcttctcatggacaacttcaattntcaacagagttgcatcttccttatgt

SEQ ID NO: 254545 - DNA, 189 bp, Glycine max
tacccatcttggccccctcctccacctgaaagatccatccccgcatgaactaccccagccgaacatagtccgccatatcccggcctcacccacgcccatgaaagaatctgttccctttgcggaaggtaagggaaagattgaggcgcttgaagaaaggtgagggcagtcaagggcctcggcaattaccca

SEQ ID NO: 254546 - DNA, 261 bp, Glycine max
  unsure (1)..(261): unsure at all n locations
taaaaataaattctgcaaaagctcttttggtgcttttggtanggatgaccagtggaggcaaatggcagctacctaccttaattgtagtcagttagctcttcctttttgttatcgtggtatacccattggggctaacccgaggcaagctcatgtgtgggaacctattatacaaaaattngagaggagactagctacttggaagaagagatatatctcatatggngggagagtgattcttatccaatcagtccttacttctct

SEQ ID NO: 254547 - DNA, 314 bp, Glycine max
aacaacagatatggagttccacaaaaaaatatctgaaggacaactcatggatgttgacgaagtcaaggaatattgctagatagagagagtagaatatccatcaacctatgaaaaccaagttccaactatcttaaaaccatcatttggaagtttcaaaccaatattttgaagacaactcagagatcttggtgaaattagggaatattgctttgaaaagagagttggaaaacacatcagcctcagaaggttcaaagcaagttccgactttcttaaaaccaagagttggaagctttagagccaattgtggactggag

SEQ ID NO: 254548 - DNA, 407 bp, Glycine max
  unsure (1)..(407): unsure at all n locations
agctttcttgagaanacttccttgtgaagcttctttgagataacttccttgagaagctagagcttagctacacacacccctctcataactaagctcacctgcttgagaagcttcattaagaagatgcctaaagaagctagagcttagctacacagtacctctctaatagctaagctcacctccttgagatgagaagctagagcttagctacacaccctctataatagctaagctcaccctcatgacaagaaacatgagaataaaaaagaaagtccttattacagagacaactcacaatgccccgaagtacatggctaaaaccctatactactagaatggccaaaatacaaggccttgacgaacgaaaaacctattctaatatttacaaagataagcgggctcatact

SEQ ID NO: 254549 - DNA, 356 bp, Glycine max
acactataaaactcagctattatctcttctgtaataaagacttggtggtagagaccccaactagtggttctgtgttaacttctaatgtgtgtttggattgtcctgtggaagtatctggtaaaataattatgattgatctgatctgattgcctctgagccaaattgatgttattctatgaatggactggttatcttacaaccatgtcttgttaaactattttgataaaactatggtgtttgatggttatggagtgagtaaggatatgatgttcatctctaccaaccaagttgtgtgatgaggacatgaccaagagcaagggcaaggatccacttgaaggacttggatgacctatgac

SEQ ID NO: 254550 - DNA, 407 bp, Glycine max
  unsure (1)..(407): unsure at all n locations
agctngcggactataccttcgactcgaacacggccgtgtttctgtctatgcccggattcaaggcgggctgcagcaccggctccgcttccctaattgtactggaggcgttttccgtggctttatcctctatggttttctggagttntaacatgacctccgagatggaagccatttgatcttttaaggccgatagatcggccttcatctgttcctgcacgcnctcttcattatccatctttctggatcgagtgttataggggtgccttggtgttttcttagttatgatgaaattcctaaagaaataaacaacggtgagtatgccaccaaaacatgagtatgcaaatggatgattggagcacttggatccaccccaagggtttttagaaaacatgatgagtcagaagttc

SEQ ID NO: 254551 - DNA, 486 bp, Glycine max
  unsure (1)..(486): unsure at all n locations
tgtttagagcttcaatggagaatgaaggaggaaagaatggcaactcgagggagagaggaaaggcttctgaaaaatgtggggctgagtgaggagagagagagttgctgtttaattctaaaaaggctttttcctcatttcttattattatattataaactatgccacatatctccatttgagtggagcaaaaagggcccactttctcttttgattgtgacccatactcagccacaaaaagtgagagaaatctgacctttgaaacgctaaaatcctgtctcggtttgcgtgtcgtttcactgattccagttcctcgcgtttctctgcgtctgtcagggccagttttcaatgtaggcnatatatatatcataacgctcagaataaaccccgagcgtggtcagaggttgtttcgttaattctaagtccacgcaaacgataattttaaacattaattaaggtaacccgtactttcagtatgacttatcttct

SEQ ID NO: 254552 - DNA, 387 bp, Glycine max
  unsure (1)..(387): unsure at all n locations
gtgtgtaaccaaccatttctcattgtagaacaccggtatcttgtatactatcattgtgatcatctttttctctgtcattgaaggtgccacttgagctgtcaagtccctccacctctgggcgtattccttgaatgactcatgctcttntttacacatgttttgtagttgcgttctatccggagccgtatcataattgtactgatattgcctaacgaaggcaaccattaggtccttccaagaatagactcgggaaggttccaagttagtgtcataccctaatttcgtccggggattattacttgacgacatgcaacctttgattggccgttcaagatacttggcacccttgttgacaatatgtaagtcttgagacgcaccggaagtcaa

SEQ ID NO: 254553 - DNA, 455 bp, Glycine max
  unsure (1)..(455): unsure at all n locations
aaaggaatactatgttgttccatctactctcaagtagaccagcagataataactgttggaaacgcgtgcaatcagaaatgcattggctattgaaatctctgaagaacaggtttatgaagttgagaaaatcttgatggcaatatagcagcctatacctgctaaagaactgtaatactgacggagggctgctatgtatagttcgctaattgtctgtcataacaaagaaaatattattatgcaatgaatattnggatagtcgtttgaacaacaagttttacacaagacttagtgatggtcgacactgatgtactctggatatgttgcattggaactcacacgatgacaatatcacaattgattctccccgcccttaacaacccctcatttggtaatccaaaaggtataccatcgacctcttcatttttgccctggaatgtacacaaaacctgtttgcn

SEQ ID NO: 254554 - DNA, 345 bp, Glycine max
  unsure (1)..(345): unsure at all n locations
agctcgcccaggcgagcagggttgcttcctccagaatcaacagccttctggaggaatcttctggagggcccaagtgggcctggttgctatatgcacccccatttttactaagtacacccnctgcctttttttggtgattcttttttcgtaaagttacggaaacttacgaatttcgtaacgatacttgttttctttccgtaatgttacggaaccttgcggattacataatcatccccttttttgacttatggaatgttacggaacctcactaattgtgcaatgatgcttccatttgatttccggtgtgtcacggaaccttacggattgtgcatcaatattttcttt

SEQ ID NO: 254555 - DNA, 303 bp, Glycine max
  unsure (1)..(303): unsure at all n locations
gtacaataccgacatggcttccgatcggaaccagcttcacggtattactaaacgagagcatgagtgcattaaggaatatgcccagagatggagagatctctcagcccaagtcgtaccacccatgacggaaagggagatgatacaattatggtatatacattacccacgttctactattaaaagctgataggctatatgccagctaactntgcggatctcgtcttctgcggagaaaggattgaatccacgctacgaaaaggcaagtttgaatatgctgccaatatgtgccccaacaacaacaga

SEQ ID NO: 254556 - DNA, 224 bp, Glycine max
  unsure (1)..(224): unsure at all n locations
tgagccanaatcctgactcaccataaaccttgacctatggtgataatgtcaatccttaccctcggaagcaaaaaagaaaagaaggaaaatttccaatcaaagagaaagcaaaaagaaaagaaggaaaatttccaatcaaagagaaagcaaaaagaaaagaaggaaaatttccaatcaaagagagagcgaaaagaaaagaaggagaattctcaatcaaagaatgg

SEQ ID NO: 254557 - DNA, 229 bp, Glycine max
  unsure (1)..(229): unsure at all n locations
agcttcaccttctggtcctcctcatagtttgtggcatgagacaacatgctctatttgtatctnccactccaagtaggcctccggatcattctttactttaaatggaggaatgttgagtctaataccatcaatacggttatgactaagaacacacatagaccctcttctnctgctatcgtcttcattatgagctctattctgcatctgatccaacctctcatggagcgca

SEQ ID NO: 254558 - DNA, 353 bp, Glycine max
tcaccttctggtcctcctcatagttgttgcatgagattacatgtgtctattatcatctcccactccaagtaggcctccggatcattctttcctttaaatggaggaatgtagagtttaataccatcaattcggttttgtctaagaacaccatcattccctcttctcctcctttcttcttcattatgatctctattctccatttgatccaacctctcatggagcgcatcatctcgttgtttcattaacctctccaaatgttgcatcaacgctcgcatttggaattgcgaaagccccactccatcattatgattagtacctgacatctcagacagacatatctaacgtaacaagac

SEQ ID NO: 254559 - DNA, 413 bp, Glycine max
agctttgaggattatggtcttgccagtgaaaggatctatgtggggctgataaaaggcaaatatagtcattctgcttggacgaatgagacaactgcggcacatgaagagggtgagaaagatggagaaacccatgttgtgactgccattcctatatggccaagtttcccaccaacccaacaatgtcattactcatccaataacaaacctgctccttacccaccgcgcagttatccataaatgccatccctaatataaccacaaagcctgtctaccgcacttccaatgacgaagaccacctttacacaaaccataaaacaccaacatataggagatttgcagcaaaagcctgtatggttcaccccaaattacattggcatatgctaaacttgatcccgcatcactcaaaattcaat

SEQ ID NO: 254560 - DNA, 393 bp, Glycine max
  unsure (1)..(393): unsure at all n locations
atatgcatgtgaattaggaagcatcaacaagaatcaagccaaggctattgtgcataatcaatggggcaaaacacaccaaaagattatgatgatggatggctcanattctcacaaaggtaaacttatcactttcaaattgagctttcaaaactatcatgacatgtagaggaaaaacaaggatttcaaatcacaaaatgtcaagagacttttattntgagaacaattacccattacttgaacatatcctataattcanagaaaaacatgcanatntaacacaacacaactaataaaattaaactagaacccaacaaaactaacaaaagtaaacctaattaacacaactatcaaaacccataccaaagaacacttcctcccatacttaaacaacac

SEQ ID NO: 254561 - DNA, 421 bp, Glycine max
aatatatatcataaaccttgattaagacacttatgctaattgtatgaagttcgactcgttaaagttatcattgatctgtatcatagctacacgatgcgcatatggtggtgaacattaatatattacgcgagtggtgtcatgcatgattaacaaaaaagagtgccaaccattgttcatgacatgcacgcttaccttcaccatacactataaaaagtttgtctagacaaggacgactaatgtaacattattaaatccagtaatttagcttcaatcaccatatctaagaatacttagcattatagctataatcatacgcccattcaaatgtgatataattaatgatcagccacgcaccacgagtccaaatcattctattttatgctcttagctagttacacacatacgtttgataatatatatt

SEQ ID NO: 254562 - DNA, 510 bp, Glycine max
  unsure (1)..(510): unsure at all n locations
acactatgatactaagctaagaaaaaatcgaagaagttttgaatatggtttgactnttacatgcctaactcccttaagtcacttgtattggttgttatttagtgtattacatcatagtatcattaatcatcatggttagtatgaagaaaaatttctaagttagaaaagtttctttagagacaaaaactttttgttttaatcgattacaaagttgtcctaatcgattatagcaaattgtctgaagcttaaagagttaactctcgtatcagtttaatcgattatagtagtctcataattgattatactgttgtttgagacaatgactgatgtattcaagagtctctactctaatcgattaccaagtgaatcaattgattccttctctctcggttagttggtcagaggtgaacaagaacatcttaatcaagtacttagatcattaatcaattgcatattattgaatctatttccgatgttgagatgaatactttaatcgatacttagataatc

SEQ ID NO: 254563 - DNA, 469 bp, Glycine max
  unsure (1)..(469): unsure at all n locations
gcttcaatggaggacaagaaagatggagagataattatgaggcgggagcatgagattcaaagaagagaaacgggagagaagatgaactttgagttgcgtatcacaagactctcattcatcaaagttacaacaagtgttacacatgcttctatttatagactaggtagcttccttgagaatctttctagagaaaacatccttgagaagcttatttgagaacacttccttgcgaagctagagcttagctacacacactcctctcataactaagctgacctctttgaggagcttgcttgagaagattcctaaagaagctagatgcttagctacacacacctttctaatagctaagctcacctccttgagatgagaagctagagcttaactacacaccgcctataatagcgaagctcacccncatgangagatacatgaatatacacaaaagtcactactactaagactactc

SEQ ID NO: 254564 - DNA, 412 bp, Glycine max
acactatgaatctaagcttctatccaggctcatcttggtggtgaagctctctattccatggcttattccttaatggatggcgcctactctcacctcttctcctttgtcttccgctgcatctccatggtgaaaaatcaccattgaaggacctcattgaagctcaaagatccagcctccatagaagctccacaagcaagcttccatcaagtggtaatcagagcacaagagcttcaagtaggtgctccttaaacctccattaatttttttctttgccttctcttccattgttgattcttaattattctccatgtatctcctcacatgtttgttctaaatgttgttaacatgattctgtagagtttccaccgattaaacttgctatagaagttaaattgattttctatggctcaaa

SEQ ID NO: 254565 - DNA, 285 bp, Glycine max
  unsure (1)..(285): unsure at all n locations
acttacccgttgaagatcgattaacgatgaagaactaatgaagaacgtcgaagaacggttgaaacctttgcgaaattcttcacggaanatgttacggaaacgtttcggaagcgcctcggcttatattttcttcacggaaacaatttttccaagccaattcgaaagagagagaagtgcctaaggggctgaaccnncttcttcttgccttcctcccctantatagcanaataggggagggtggtgccgcccagctcgcccaggcgagctcagctcgcccaggcgagc

SEQ ID NO: 254566 - DNA, 403 bp, Glycine max
  unsure (1)..(403): unsure at all n locations
gctttctcttagctntgaaaagttttaatatcgggatcaagaggagttataatggtcattttgcttcttgtaccttgcatgtaagcataagatagaaacttggaataggcgtgagtagagtggttagtttaattagcttaaatacaaaataaaagatataaaaagattactaatttttaaaaaattaactaaaaaaggaaagtattgaaatctgaaaaataaaagataaatatcctaagtacaaaaaataaaaaaaataaaagatataattctaattaaagtttttgaaaatttttatataagagatataatctgaaaatcaaagtgctaattatatctagatnntattaaggaatattgtagcatttaattaagggaaaatataactagaagatatagttat

SEQ ID NO: 254567 - DNA, 565 bp, Glycine max
  unsure (1)..(565): unsure at all n locations
tgattgaaccctgngtgacncattcttgagccgacctgcnggcatgcagcttggtaatcgaatacaccccgtggtaatcgattctcagagaccatcttatcctnctgtcttcatttctaagccctggtatcgaatacccacccttggtaatcgattaccagaggccataacccatatatcacacaagaatcacagctagccagccaccacaagccctcttggnttggggtctttgttccttttatctgttgactgccangagctcgcctgttaggtacatcacaggttctcactgaccgactatgcccgggttgggtcgggattggtcaagcttggttttgggaaatagcaccccacttgacgtcctcaggtctcctgacccccgcgacatatctncaagtaccactctgtggtccacgaataaaagcaggaaagttcacccttctacactttctcatctcaagcttgtaggaatatggngtacccataacatgtggtactaggtggccggcggggcgatgtgcacannacaagtttcacattctcaaatcgngcattaacccct

SEQ ID NO: 254568 - DNA, 230 bp, Glycine max
  unsure (1)..(230): unsure at all n locations
acctgcctggcaccgacctgatatgtgattatcctgaagaacacctctgtgttccaaaccctgaatgagtctcctcacaatggcatcaatttccgcaacggctcgagtgattngagaatcatcatggccaacctggtgaccctgatgatcagggtcttcaaaatagagcgtaataaaggaaggaacttgatgagagggtaaatcgaaatagctgagaacagtgtctactc

SEQ ID NO: 254569 - DNA, 309 bp, Glycine max
  unsure (1)..(309): unsure at all n locations
agctntntgtacaagcaaacaaacaactacactactgtaatntaaatgctgaaatttaaagaaccgaaacataaaagctgagatttaaatgacataaatcataaaataactaacaataaactaaagtgttcataatgcaaaaatttaaacgtcctgctcctcctgtggatggtcttcattatgatccaatgctgatggctgagtctcctcangagcaagtgcacaggatggagaangctgtggggtttggtctggagtaaaatgctcctctgctgctgctggtgttggtgttggaggctcctcagtcac

SEQ ID NO: 254570 - DNA, 154 bp, Glycine max
aatgacttagttttctaagtatctcgtagaatggcttagccttttctatgagcttcatgaggaacctatacaaagacaccattttgccattcaactatcaaacttccctgtcgttggtaaggctgtgcatttctagtatcgatgtacatttgtc

SEQ ID NO: 254571 - DNA, 419 bp, Glycine max
  unsure (1)..(419): unsure at all n locations
agcttcgataatatttttttatatcctatcgtctatataatagtcttacgttactttattntagataagatatagaaataaatttataagcataatgtctttatcattaatttcccaatcagttaaagcatgtgtatttattcttccactcatgtaaaataaaataaaatattttttcttattctaaagtgagatgatgtctataattatatttgttcattagagacaaaaaatttctgtcaaaatatagattctaaataataagagtgaaaaaaagattatactactttctaagatgacatgttatctattatactaattattctaaaatttatatctaaagtatttntaatctacttaatagtgctaaacatatnntatgtaacaatgtataaaaagtaaccttttttaatttcata

SEQ ID NO: 254572 - DNA, 465 bp, Glycine max
  unsure (1)..(465): unsure at all n locations
taagctccttcaactgcataaggctctntaatattgaagagtatccttgtggaaccttcacccgacgaagacattgacaaaaacttatcttctccttcttggacaaagtatggcaggctgggggcaagtaaattttcttcccatcagacattggatgcaactgtgatcgtatacccatatcagctagatcttgacgggtattcaagccatccttcatcttgccttgaatgttaaagagcgtcccaataacactgtcacaaacatttttctccacattcataacatcaatacaatgtctaacgtcaagatcacaccagtacggaagatcaaagaanatggacctcttcttccatatgcaactctgactnttatccttcttttgggtcttcccaaatatagtattcaggtgtngaacccgctgatatacctgctcaccagtcaacgctatcagcgcaatatcatgct

SEQ ID NO: 254573 - DNA, 399 bp, Glycine max
  unsure (1)..(399): unsure at all n locations
agctgtctttcaacaaagagaagagacaaatgaatgattgaagatataaaagtagtggggatgtctgctccacctctagaacctcacaatcactcacagaatcatctcatgctctcaggatggcgttctcttcaagctcagttctctgcctttcttcgcacagtaaaagctctaaaaactctctagaacttggacctttctctctctagaaatctctaaacatgcaaaggcttcgagaattgcccaaacttcccactccatttatgattntaggattaaataggtggccttgttggtgcttgcacgcttaacgcaacactggctcgcttagtgaccataagtgaatttcggcttagtgctcagcgtctcgcttagcggatgcatgcaagcggtgcactt

SEQ ID NO: 254574 - DNA, 418 bp, Glycine max
gtacttacccgttgaagatcgaagaacgatgaagatcgattgatgaacatcgaagaacggttgaaatctgtgcgagattcctcacggaaaacgttacggaaacgtttcggaagcgcctcggcttagattttcttcacggaaacaatctttccaagcaaattctaaagagagagaagtgcctaatgggctggaccccttccttcttcatttgctcccctatatatagcaaaataggggaggtggttgccgcccagctcgcccaggcgagctcatctcgcccaggcgagcagggttgcttcctccagaagcaaccgacttctggaggaatattctggagggcccacatgggcctgggtgctattatgtcccccatttttactagtatcaccccctctgctgttcttaggcgatttatttt

SEQ ID NO: 254575 - DNA, 343 bp, Glycine max
  unsure (1)..(343): unsure at all n locations
cacatggatttgatggggcctatgcgagttgaaagccttggaggaaagaggtatgcctatgttgctgtggatgatttctccagatatacctgggtgaactttatcagagagaaatcagaaacctttgaagtattcaaagagttgagtctaagacttcaaagagagaaagactgtgtcatcaagagaatcatgagtgaccatggcagagaatttgaaaacagcaggttcactgaattctgcacatctgaaggcatcactcatgagttctctgcagccattacaccacaacagaatgggatagttgagaggaanaacaggaccttgcaagaggctgctcgggtca

SEQ ID NO: 254576 - DNA, 311 bp, Glycine max
  unsure (1)..(311): unsure at all n locations
ttacttgtgaaagagagccatgagggtgagctcatgggccactctgggatagacaagacccttgtcgtactcaaagaaaagntttgttggccccatatgaagaaagatgtccataagcattgcactaggtgtgtggcttgtttacaagccaagtctagggtgatgcctcatgggctatacacacccttacccatcccatcttcaccttgngtagacattagtatggactatgtccttgggcttcctagaccccaaacaggtgtagaatctatctttgtggtggtggacagggttagcaagatggcacactt

SEQ ID NO: 254577 - DNA, 437 bp, Glycine max
  unsure (1)..(437): unsure at all n locations
agctntgttacanattatntgaatgtttaatttgactaataanagtaaatgttcttcatgatttcagatcatggttagaacacgaggtctangtcgtgtgttaggcacaggtagaggcagagacatcagtgaggatgtgcttgaggttgatgttcctcggcgtcgtaggcccactgcctcagcatgtangcaatgggttcctgttcctgttcctgaggacgttacctagagagtcgaggatgttccttagttgcctgaggatgtgcctcatgtgtctgatggtagcccagagatgacaggcgtcgtcgatggtggtgagagagatcgagtggctagtgatgggagcttgtnggcacctgctgatcatgaagnngttcccggtgggccacacgatccatctgttttgataggatttgttgatcatgtggcacacaaca

SEQ ID NO: 254578 - DNA, 393 bp, Glycine max
acttagatgtaattctgtatgtgtatgtttggtgttgttttaaaattaaaattatagttttgtttatctcgatcatttatgttaacctcttaatacaaacatttatcttattaatcacagaatagcaacacctaagaaactataactaggtttttctaatacttttggttatatatacatttatttatatgtttatgaaattagatagatagatgacataaattatgttaaactctttgaaacagctccatagagaccaaattaacgcaggattttaattctagggaatttagttatgaaggagacacatccttgtggaagaacaacacaaatagcagcttcagatttattgagtttgtgacttcaccaaacaatccagatggaaagttgaac

SEQ ID NO: 254579 - DNA, 369 bp, Glycine max
agcttcatggtgaatcaaagatgattcaaaggtgtttttatgataacaatgatgataacacaagatgatgacaaaggagatgacaaaaagctcacagatcaatcacagaacaacttgagtgaatcaagaacaattcaagagttcaagataagaatcaagaagaattcaagactcaagaagaatgtttagagtcaagaatcaagattcaaggttcaagatctcaagaatcaagatcaagattctagactcgagattcatgaatcaagagaaggcttaatcaagataagtatgataaggttttttcataaattgagtagcacatgattcttctcagaacatggttaccaaagagtatttactctctggtga

SEQ ID NO: 254580 - DNA, 176 bp, Glycine max
gattggatgagaggaagtgtgattttcgaaatctgcacttatgcagaatttttgctgtgaaattatgcagcagaattttgcaccagtgcagagaaaatgcttatgtgtggttggctgtggaaagtctaatgcagaatgagttctggatgtttgcagtatatcccaacggtccaaat

SEQ ID NO: 254581 - DNA, 424 bp, Glycine max
tatttattgtaggaggatgtatgccatctgttgctataagagaaacattccttggtaacactaaattatcacatgctcgccttctgacgaaatgtgcccgatgaagcttgcctcatagatgtccacgaaagacaacgcggcccaatgaactacttccgctcctgagtatgacagacaccgctataagagcgctgtacaccacaagcactctcacgccctctcggatggtcagttcttgtagcgacgcatcatgtcagggacaccagttactgatttcaggatgaatatggcccggcggagacatacttgtgctcccatggcattacgaacacaacagcctgacttataccaaagcttgcctaaaggagggccgcgaatatattcgggtatggtagcgcacccatgaagcgccctacaaagctct

SEQ ID NO: 254582 - DNA, 412 bp, Glycine max
  unsure (1)..(412): unsure at all n locations
ntcgtttacaattacgagcgtctcgatatatttcgggactcaatcttacatccgagtaaaaagttattgtcatttgaatttgctcagagcttctgttttcaatttcgagcgtctcgacataatatgggactcaatcatacatcctgtaaaaagtaatcatcgtttgatttttctaatagcttctgttttgaattttgagcgtctcgatatactatgggacacaatcggacatacgagtcaaaagttattgtcgcttgaattctctcagagcttctgttttgaattacgagcgtctcgatatattacgggactcaatcggacatccgagtcaaaagttattgtcgttgatttatctcagagattcagttttcaatttcgagcgtctcgatatactactggacacaatcggaca

SEQ ID NO: 254583 - DNA, 243 bp, Glycine max
gtgctctaaacgaactctgaaatctgaagcttaatattcaaatgatctaagtgtgaaaatatgcacacacatgacctctatttatagcctaagtgtcacacaaaattggagggaaattcgaatttcacttcaatttcacttgaatctgaaattgaatttgcggagccatactttggagccaaaatttcactaattatgattagtgaagtttagttatgggtcagcccactaatccaagatcaa

SEQ ID NO: 254584 - DNA, 315 bp, Glycine max
  unsure (1)..(315): unsure at all n locations
tcatgtaatcgagtacacaatgcantttatgaaaagatgtgactcttcacactngaatttgaatttcaacgttcagatacactggtaatcgattaccaatatattgtaatcgattacaccatttaaaaaacatttggaacgtcgcaaattcagttaaaagcttttgaaatcaaactttatcactggtaatcgattacaggaaactggtaatcgaataccagagagtaaatactctggtaacttagaaaatattgagaaaactctctggtaaaacaaaactgtgctatgtttgattattgaaaatcttttaatact

SEQ ID NO: 254585 - DNA, 430 bp, Glycine max
agcttatgaccattcgaatttctcaagagtttccgttgttcaatttcgagcgtgtagatgagttatgtccccgaatcggacatctgtgtgaaaagttatgaccattcgattttctcgagagcttccgttgttcaatttcgagcgtctcgatatattatgaccccgaatcggacatctgtgtgaaaacgtatgaccattccattttctcgagagcttccgttgttcaatttcgagcgtctagatgagttatgtccccgaatcgaacattcgagtgaaaacttatgaccattcgaatttctcgagagcttccgttgttcaatttcgagcgtctggatatataatgttcccgaatcgggcattcgagtgaaatgttgtgaccattcgattttttcgagagcttccgctgttcaattacgagcgtctcgatata

SEQ ID NO: 254586 - DNA, 240 bp, Glycine max
  unsure (1)..(240): unsure at all n locations
atggctgagtgatactgaaactgtggctacaaatagtcagtccaacagccaacaagtcaatcaccatttggtctcccataaggctgatgcctacgttgccaattgtgtccttattacaacttgaactaaacctaaactaagcccttatagttgattaaccccaaatacatatgttnggtcacccaactttacaaggattgtgccactatttaaacaaactgaacactctaaaattgaaac

SEQ ID NO: 254587 - DNA, 200 bp, Glycine max
  unsure (1)..(200): unsure at all n locations
agcttagttacttaagtacttactaataatgatattcaaatgatttataagtgccatttcaatgccattacaaattataaattccatcataatctctaaagtgaaatatttatttacacattgccggctntgatatcataaaaaaatgagtagtgataggctcacccgagcaagggacactgggctacacaaagtaatcg

SEQ ID NO: 254588 - DNA, 379 bp, Glycine max
  unsure (1)..(379): unsure at all n locations
cccggaatgggtttatgcaaagacaacggcggcataactagcttgataaatgccaaaggaaatcgtgggaagtatggtttaggctataaacccactcacgcggatataaagagaagcattgtgggaagaaagagcggtggtcaaagctcgcgggtgaggcaagaaagtgaatgaagcccgccctgtcacataagtagaagctttataagtgcaggtctgggagacgaaggtcaagtggtcgcgatatacgaagatgatgttccgagtacagttggattggtacgaccatgccctnctgatttccagctgggaaattggcgagtggaggaacgccccggcatttacgcaacgagcataatgtaaacccttacggggttta

SEQ ID NO: 254589 - DNA, 459 bp, Glycine max
  unsure (1)..(459): unsure at all n locations
agctntactctatgttnttgcagccaatataactccataacacctactatacagaaattggaatgatgttagaattctaattattcacataacaagaagcaatagaagtgggaaaatccaacaatttttattgacttgatcacaaaatatacctatgcacaataattatcatttgtcgccgtgggattagtgtctttggcctccatgatgacttccatggccccgaccatgacctcggtaactgtttgtgttgttgttatgggtgtagatgtaattggcaagggcaccctactgtattaactcctctatctatgccctcaaggaacacattactttataatatgattgaagtattaatgatatcaacacgttttctttcttgccgctgagttgactaaccttgatagagctagtaacgattggattttcgcatatgatgctttctcgagtaaacgcact

SEQ ID NO: 254590 - DNA, 370 bp, Glycine max
  unsure (1)..(370): unsure at all n locations
ccttggttacatttgatagtctntacttgaatcttngaaaagcatatcaaaaccatttcctttcaggccctgatcaattcttgcaaatgccaccattgtaagctntgcttcttttgatgcttgaacttcattccattgttccttgcagcattcttgaacggcatgcacaatctcgtgacgagaagtataggctacgcaaatcaaaagaactctctggttgttgtgagcagtaactctcattgctttttccacagaagccctgacaggctcagtcaatagttgcaagtctccaatgaaatgtaatcgaacaccgtattcattgataagactnttcttgtgaagtaactcttcaatcttttcccgcatcaat

SEQ ID NO: 254591 - DNA, 429 bp, Glycine max
  unsure (1)..(429): unsure at all n locations
agcttatgataaacttgagaaggttngaacctcatattagttgttgatgatcttcatattctatagtagaaagcaatttatttttggcctcatgtctgttcaatatctttgaaattttcctgttagcataattactttaattttctcattagtaaatgatagatttataagccaagattatcatttcaaatatagaatagagaattcttctttatttttctcatggcaattcttacactattaaaaaatatactgtcaacatcaattttaaaaccgatgttgaaagtaccaatgttaaatgtaatattgttaacatcggttgtgaaaaaccgatgttaacataaaaattctaacatcgggtatcaaaataaacgatgttatatacaaagaactacaacagaataagtgtatgcattatgaatattgaca

SEQ ID NO: 254592 - DNA, 440 bp, Glycine max
  unsure (1)..(440): unsure at all n locations
aactaagcttacagcacattttagtaatgacccactaacctagaattaaaataacttaatgtccattaacctaggaattaatacaaacttaaaggctgagtgtaactgatattgtggcaaccaaaagtcacccccaacagccaacaagtcagccaccatttggtctcccaaaaggctgatgcctaggttgccaatagggcccttattacaacttgaactaaacctaactaaagcccttttaattgattaaccaaaaacatatttttggtcagccaactntacaaggattgggccattatttagacaaactaaacactctaaaaattgagacaaagtggtgtcatttagtccttctccatttgggccatgatacaactcacaaccttggacttttctccttgaaacttgggcttgtattcaaatagtatggacaacacttt

SEQ ID NO: 254593 - DNA, 139 bp, Glycine max
agcttctcccccaattttctattaatatggggagaagtgaagtgatataaggctcatcctcttaagcacttctctcactttctaatttgcctgggaaaacttgtttccgtgaaaaaaatccaagccgaggcgcttccca

SEQ ID NO: 254594 - DNA, 336 bp, Glycine max
  unsure (1)..(336): unsure at all n locations
tgtagaatggctagacatgatacatgtcagggtttggtttggtttaaggataaaagggatgccccacattatttccatgacacaaatgcaaaaatgatgatttggaaactntatgcaaaactggtcatgcatgcacctatgtggacactcaagtgtcaaatttttatggtcatgtgatgctagggctcaagattcatttcctctattttagtcaacccaatgtttccaaaatatgttcttttatccatatgtgcattcatccgagtccattgtgggcgtccggggaaattttcacagcattcacccttcaggtgtatacacatttttcaaaaacta

SEQ ID NO: 254595 - DNA, 419 bp, Glycine max
  unsure (1)..(419): unsure at all n locations
gctttaagccaattcatacgacaatatctttntactctgatgtctgattgagtcccgtaatataacgaaacgctcgaaattgaatgtctaagctttgagccaattctaacgacaataacttcttactcggatgtccgattgagtctagtaatatatcgactcgctcgaaattgaatgtagaagctctaagcctattcaaacaacaataacgttttactcggatgtccgatttagtgacgtaatatatcgggacgctcgaaattgaatgttgaacctctgagccaactcaaacgacaataactttttactcagatgtctgattgagtcccgaaatatatcgagacgctcgaaattgaatgttaaacctctgagccaattcacactacaataatcttctactcagatgtctgattgagtcc

SEQ ID NO: 254596 - DNA, 321 bp, Glycine max
tcatttcagcgctcgcatatacgggactcgatctacatacgagagagaagatgttgtcgctagaatttgctctgagctctcaacattcagtctctagcgtctcgatatattacaggactcgctctgacatccgtgtagcaagttattgcacgatgaattggctctgaggttcaaaattcaatttcgagcgtctcgttatattacgggactcaatcagacatccgagtaaaaagttattgtcgtttgaattggctcagagcttcaacattcaatttcgagcgtcccgatatattacgtgactgaatccgacatccgagtaaa

SEQ ID NO: 254597 - DNA, 574 bp, Glycine max
  unsure (1)..(574): unsure at all n locations
tcttacgcctcactcntatatatactcgtattttttatatttattgtataaataatannaananaagccgtttgaaccgtgtctctctgcaatcngngannngntanacnagcatgcaggcatacacactctacatatgtcctatctcagatagtatgatactataagtagaccagcacccatgctttctatgtcaatatgtatatatcagaagtctcatatgactaaaaacatgactcttgaggtggcctttatccacgagtaggctgcagaagcctagactatcattaaatagagaacctaaaatagacctggcttccctattcataagccactcccaaacgcaacaaaagaagattttatgcaatagggaattacggcatcgcatctgaacaacaagctctctataagacacagtgaagttcgagaataaagcttgttatcaataaacatctctttctcatccagggacacctaagaaaggaggttatttctaagaacggtccgaatattaaataaatatgaaacaaatgtgggttggttaagggaaaccttaaagtggggagccgcgtcg

SEQ ID NO: 254598 - DNA, 378 bp, Glycine max
  unsure (1)..(378): unsure at all n locations
taccctgatgaggatgtcccatatgttcttaatactagactgatacacttgntgtccaagtatcatggttntgcangtgaagaccctcataagcatctaaaagaattccatattgtctgctccaccatgaaacctncagacgtncaaaaggtcacatctttctgaaagcctttcctcattctttagagggagtggcaaaggactggctatattaccttgctctaaggtccatcacgagctgggatgacctcaaaagagtattcttagaataaattttccctgcctccaggaccacgaccatcagaaaggatatttcaggcattangcaacttagtggagagagcttatatgaatactgggagagattaaaaaactatg

SEQ ID NO: 254599 - DNA, 446 bp, Glycine max
  unsure (1)..(446): unsure at all n locations
agctntagccttaggttgttccatgttgcttatgttgttcccgttatctctaatagtattttattattatgattattgaatgatacaatttgcgaagtgtgaactccaacaattatatctatgacatgtgaatttattttctatatgtgtgtgtgtgtgtatgcatattgtcattttttatctgcacgcattgtggtttgggtctggggtgtttgaccctcgacaaattatttttatgtttgtttagatagctataattacaattgttatgttgtccaactattttgtgtgacaagtggttttaccatttaaggagccatgactggttccctgagagtagtatgtagacctgagcctcgtctctctttcttgttctgttgtttctttgtatgtgttagttgatgcacgtggcacaagggctatgcacgcgatgcaatgacaataat

SEQ ID NO: 254600 - DNA, 364 bp, Glycine max
  unsure (1)..(364): unsure at all n locations
tatgccacggaaatgtaattacgaaattgagatgcccaaagaaacaccatttcctagttaaccatgcattangtaccatgttcaattantttgttntgttgttgtgtgttgtttttttttttttttttttgagaaatgggtttatgatcccaacatggttggctcatggtgcctaacacatgcaactaagaatgtagtgtgaagtttcacgcttccccttttttgtttttgttttgtagaggaaaacgcaaggatgagcaaacatgaaaacaaatggtatgcaattttgcagatcaaaaagtttgttgaacgcatatgcatgacgatgccatgactcatgcaaaatgtgaggctgtaatatgat

SEQ ID NO: 254601 - DNA, 454 bp, Glycine max
  unsure (1)..(454): unsure at all n locations
agctntntattntcagtagatgaagatgaatctgtggccacctcatggacacctctaagagcaatagcatcatttcttgcactgagttgttgggaattggaagccatcttctcaatcaaattcctagcttcagcaggggtcatatcaccaagagctccaccattggcagcatcaatcatactcctctccatgttgctaagtccctcatagaaatattgaagaaggagttgctcagaagtttggtggtgaggatagcttgcacacaatttcttgaatctttcccagtactcatacaagctttctccactaagtttcctgatgcctgaaatgtcttttctgatggcagtggtcctagatgtagggaagaatttctccaagaacaccctcttaaggttatcccagctgaaaatggacctgngagcaaggtagtatagccaatcttttgccactccct

SEQ ID NO: 254602 - DNA, 347 bp, Glycine max
  unsure (1)..(347): unsure at all n locations
ngactntggtttagaacatgatngatacatgattgngacttgtatgaattgatttgggcaagattggatgagggaaagtgtgattttcgaaatctgcacttatgcagaattttgctgtcaaaataggtgcagcaggattttggcttgtgcagaaaaatgcttgtgtgtggttggctgtggaaagagtagtgcagaatgagttctggatgtttgctagtagatcccaacggtcacaatgtaggcttatgcactatagacnttccagtaaaatttggagtcgatccaacggttaacgaattggatcgaaggaattgttactgnggtctttaagtgagaaaagctgtgat

SEQ ID NO: 254603 - DNA, 462 bp, Glycine max
  unsure (1)..(462): unsure at all n locations
agctntanacctgagattggatagtttgcaatctctcattctaatctagaagtcgtagacaatcaacttcagaaaaaagaagaggagtattcagatgcaagaagtcatgaaagaagacgaagaggcgaaccaaggagagataatcatttggggagcattaagatgacaatccctaagttgaaggtaaaaatgatcctcaaatgtatttggagtgggagagaaaggttgaacatgtgtttgattgccataattattttgaggagaaaaaggttaaaccagttggtgttgaattcaccgataatgctagtatatggtgggatcaacttgtgactagtaggcacaggaatggtgaaaggcctattagtatatgggaggagatgaagaatgtcatgaggagatttgcacctagccactatcatagggatttgcacagattacaaactntaattcaaggttccatga

SEQ ID NO: 254604 - DNA, 394 bp, Glycine max
  unsure (1)..(394): unsure at all n locations
tgctgtgtaactatgtataaaatttaatggaaaacctttcatttaaaaacaatcaagaaaataaactntcaataaatagacataaataatgggaacactaaaatgaggtaaagacggaaaaactaaaacaacacttacgacaagcttctaacagtgctttacaacaagatgcggngactggagaagatggcaattcgcgaattacatgctgaaaatgtatagaaataagaaataataataatgtatgaccaacataaaggaatcaatacttcagttttccatgagaataccttaacacagtcaccaacaacatgtgcatcctcgtctggagaaaactcaactnttnctgcaaccatatggcanacccaagagcataagaattgatgagtaattt

SEQ ID NO: 254605 - DNA, 326 bp, Glycine max
  unsure (1)..(326): unsure at all n locations
agcttttgttccttctntaaaataaagaatntctgtaactcatcaccgtgtctaaaaaatggtcttgaggtggatccaaatgctctaatcattcattaacatattcatgttttggtggcatactcaccactgtgtgtttctttagggaactcacccttaataaaaaagccccgaaggcccccttttacccttggttccgtaagtaagatggataacgaacaaagagtgcacgaacaaatgaaggccgacctatcggccttaaaagatcaaatggcttctatcacggaggccatgctaaagcttcaaaaaactatagaagataatgc

SEQ ID NO: 254606 - DNA, 368 bp, Glycine max
tgaaggtgcgcagcccaccatctgttcatagtagagtaccgattatgtgtctaccatcacgattatcgactgcctttccattattgtaggtaccacctgagccgacagatccctccaccttttgtgcgtgatctttgaatgatccgtccacctttgtgcacatgttctgtagttgcatcatattcggaaccatatcaaaattgtactgatactgcctaacagaggcaaccattatgtccttacaagaatggactcgggaaggttccaagttagtgtaccaggtaacagctaccccagtaagactatcttggaaggaatgtatcaacaattgctcatcttttgcgattccccatcttctgacaatacat

SEQ ID NO: 254607 - DNA, 442 bp, Glycine max
tagcttataagaacaaaattgccttaatcattgcctaatatgcatgcgaattacgacgcatcaacaagaatcaagccaatgctattgtgcaagcaatcaatggggcataacacaccaaatgattataatgatggatggctcaaattctcacaaaggtaaaatcatcactttcaaattgagctttcaaaactatcatgacatgtatagaagaatcaagggattcaagtcacaaaatgtcaagaacttttattttcaaaacaattacccatttcttgaacatatcctataattcaaagaaaaacatgcaaagtcgtacgtgcacacaaaattgacccaaaatattaaactgaaaatccgatgaaactaacatcattaacaaattatcacaaactgataatccgacgaaactaacaacattaacaaattaacacaactaacatct

SEQ ID NO: 254608 - DNA, 405 bp, Glycine max
  unsure (1)..(405): unsure at all n locations
agcttctttntccgtcattaattctcctcctctgattcctaatatgtttcatgcgttttatctttatattactcctctccctatctagataaagcaatgttaactataaaaactttggcaacttttagtaatatgagttgctttgctaactaccagggaagaactagagaaaatgtttgaaggtatgccagcagtattcactggaatgttaggaggagaagaactgtcccaagcatatgccagtggagatgtatttgtcatgccttcagagtcagagacgcttggttntgtagttttggaggcgatgtcttcagggatacctgtggtggcggcacgtgctggaggtattcctgatataatccctgcagatcaagatggtaaaactagctatctgtatgatccacg

SEQ ID NO: 254609 - DNA, 398 bp, Glycine max
  unsure (1)..(398): unsure at all n locations
tctatatattagtaatattntntaaagaaaataactactacatatgtgttaaatatataataacttctaaaattntgtttttttttataagattttttttaaattatcatttgtattaatttttttattaaaatatccttaattatttgactataaatgctatagattaaaaagataaacacatttctctttcttataatgactggataagaagactaaggcacattaattattagatagaaagtaataaagttgaaaaggagaaatgatgagtccaataaatntaatattattaattaaattaattattntaaaaaaaaatacttaaaaaatcttatatttagatacagagataagatataagataaataaccaatttcatccttatagttttcact

SEQ ID NO: 254610 - DNA, 431 bp, Glycine max
agcttcaagaattattttgatgatgccaaggaatttcaaagatcattcaagatgaatttcaaggatgaagaaagcaagatgtcaagcaaaagatctcaagataagatataagatagactcttagaaaagtttttgaaaagcacaaatgattgaccaagtgagtttctatcttaacaaaaattttccaagcattttactctctggtaatcgattaccagaaggttgtctggtaatcgattacaagaagcccaaaaatttctgaacaaggtttctcaaaggtgtaatcgattaccatggcattgtaatctagtgcttataacgttcaaaaatattttaaaaaaccttgtaatcaattacacaaaacatgtaatcgattaccattggctctaaacgttagaattcaaatattttcaaatgaagagtcacatctt

SEQ ID NO: 254611 - DNA, 411 bp, Glycine max
  unsure (1)..(411): unsure at all n locations
acactctngttcaaacctccatcagtacacccaanaccttgtccttaaattaagctngcacttcttctgctntcccatcatcaacttccatttttctcatcatctgttccaccatcagtttccatgcctagatcttcaacaaaatcacagatcagagaaatgcatntgtgtctgtttccttcagtggaccttatgaaagttttagtgcccgctcagtctagtagttttttttttttcaaagcaaatataggacattttttttacctataagttgaaccaagggtcttgttttatcntgttgaaacaaattgtaaggaaatccatccttatccttctgcgtagcttcaatacaacacctctacttgaagcaatcgaattgcaaactaaaacaatcaaggaaaataaaaaata

SEQ ID NO: 254612 - DNA, 462 bp, Glycine max
agcttgtttcatacgtaattaactcgaggacttcaaagaatcttggtgaaaatgttaacagctactcactgaaacagtgagatgaaagaagtgatcatttctctaggacggctcttctccctcacaaaatgaaaatcaacctacaggtgttttattctttcatgaaaccttggatttgaagctttatgcagggaagctagattatcacacacaagcttcatgaattgccatttacaaacacctaactccttaagaaactattttagctatacgagttcacacattgcaactgccattgcttgatgtcagcttcttctttcccaagatatcagattaactccaaaatgaaagcagtatcttgaggaagaatgcctaaaggagaacctgccgccggatcagcatcgtcatagtcatagagtaaccatcttcctatagctcttttatgtatctaagacctgaaca

SEQ ID NO: 254613 - DNA, 371 bp, Glycine max
  unsure (1)..(371): unsure at all n locations
gcttatcgtgaattgttgtcctggatgtgagaatggaatcgactgcttcattggtggaagagcccatgatgtagtgtggaagagctggtgggggctcgccgtaaatcacttcgaacggcatgagccccgcgcttgaatggaatgaggtgttgtacgaccattctgctaatggcaagatctagaaccagtccgtagggcgatggtgcacaaacgaacggaggtactgctcanagacacgattgatgacctctatctgaccatcagcttgtggatggtaggcggtgctcattcacaatgaggtgtcgctcatgcgtgataattcacgtcagaaatggctaagagagatggtgtctcggtcggagaccatactc

SEQ ID NO: 254614 - DNA, 486 bp, Glycine max
  unsure (1)..(486): unsure at all n locations
aagcacctgcggcatgcaagcttgtaggaatatggggtacccatcacatgtggtactaggtggcggtcgggcgatggtgcacaaaaagttttccacatccacaaatcatgtataaacccaccattccctgttgcccacctccaactgagctcacgtactcccacgtagcccatatcctcgtttctctcaacactgggtccctatcaatcctcccaagcttacccaacatccaggtaattcaacatccaaatcatcacaaactacaaaccaagcaaaacagggcaaaggcagaaaactctgcccaaaactcaaaccaaaatcacaactgtttctcacttaaagaccccaataacatttccttcgttccaattcgttaaccgtttgatcgactcaaaatttttactggaagtctctagtacataagtctacattntgaccgttgggatctactagcaaccatccagaacttattctgtactactcttt

SEQ ID NO: 254615 - DNA, 442 bp, Glycine max
  unsure (1)..(442): unsure at all n locations
tatgaatggtcaagtgagatatntacttcatatgtgagggattgatattcaattaatattcttaggattctcaaatgcgatggatcgattccgggtaatttaatgtgcatatcagtaatgttagaaaatgattcatatatattaatcttatttggatactgaaagtatgaacgatgaaatccagttctacgtctttcttgaattaatttaatctaatttaattgtttccataagtttatgtatttccgacacaggaatttcgctatatccgttatttcctctattttgtacttttggtattttgcgtatttctattaaagccataatatttcgaataaatntgtatataactattgaactgtttacttttatctggaggaattaactaactcaagtccctgtggaattatctctttatacatctataactgcacgatttgga

SEQ ID NO: 254616 - DNA, 448 bp, Glycine max
agcttctttaggaccttgaacaggcaactaactcctctttcaaaaccatgctatgtgctcgcgactggtccctttcttcctttcgcaactcgagttcactattgctaccccatagagctccgcgaaatttgatccggccatactcttccttgcgagccctcttggtctcttgttcaagggctcttgcggtaattgcattctcttcccgtaacccggcacactccttccgaacgtgtgtggcggacaacttgaacttctccttggcaagttttgcctttcctcactcgcttttgagagcttggacttcttcgtactcttgcggagcttcaaaactctctttgctgacgacttttaacttggcgagccagtctaaacctcgtatatgaactatcagccattcgcggtacccaccaatgatgccattacgaatgcctctaagctcttgatc

SEQ ID NO: 254617 - DNA, 178 bp, Glycine max
gtgttgaagggtgaaacttcctgcttttattgttgaccacagagaggtacctggagatatgtcgcggtggtcaggacaccttggtgacaacaggtgtggtgctattgaccaagaccaagcttgaccaatgccgacccaacccgggcatactcggtcagtgagaacatgtgacgtacct

SEQ ID NO: 254618 - DNA, 394 bp, Glycine max
agcttcttatccaagacacattcttggtggcgaatctccttcttacatggcttatgccctagtggatgacgcctcctctcacctcttctcctttgacttctactgcatctccatggtggaaaatcaccattgaacgacctcattgaagctcaaagatccagcctccatagaagctccacaagcaagcttccatcactttccctttgaaccgcaaaagctcgtgccgtcagcttcttaatcactcacccaaccctttcttcttcccagcgtcaacaatgtaactagatttcattcgctaaagccttcttgtgccgcactttcgtcgcttgattcaccaaggtagtgtacattctcttcctgtttgattccatcgtcgttcgatcttgattcaata

SEQ ID NO: 254619 - DNA, 425 bp, Glycine max
  unsure (1)..(425): unsure at all n locations
ctcatcttggtggtgaagctccttcttccatggtttattgcctagtggatggcgcctcccttctcctcttctcctttgccttccgctgcatctacatggtgaaaaatcaccattgaatgacctcattgaagctcacagatccagccttcatagaagccccacaagcaagctttcatcaagaaccctanggccttctttagcagctctagcccaatcctcttggaggcttctatccaatacccttgggggtaggattgaataaaaacataaggctntgggatcgatcttgcaccccattgaaagatggcaatggattgtcacactttggtatgtgaccaagtgaaactttcttgatttaaagtcatagagtgatctcaagggtctgtcgatccactaaaatgggttgatccaaagaattatacaca

SEQ ID NO: 254620 - DNA, 450 bp, Glycine max
  unsure (1)..(450): unsure at all n locations
agcttgtagtgaggcttggctacaaaaataattggtttntctaggattgaaaggctgggattctaagagagcacaaatcccaaacttatccaagtagtcttttcaatacaattagcttattcactagcctttcattttaacttgtatttgaccttattacaacaacacacactttctttgattgctttttttttttcctcttcttttttattatgtttattggtatttaacacaacttatttgttgtgtgtgctgatgtgctttgccttccactttacatcgcggttaactcccccaaatttagggaaaatttccttgaaccatcttgatgcaatcctaccctcaaggacattggatagaagactccaagaagattgggccaaagatgcaagagaaggccctanggttctcatgagccttagggtagatttcgagcccatgggctaagta

SEQ ID NO: 254621 - DNA, 441 bp, Glycine max
  unsure (1)..(441): unsure at all n locations
tatgcgcatatttccttacgaacgttcacttgcacaagacattctatntaactaagaaaagtgcacccatatacagtcaaggcagcttcgntacctagattatntacatgtacttccaaggtgtatttgttacttacatcatacacacctccttggctgaatttacatacatgcatactcaaagcattntggggtaccaaaaattgtacatgtgcacatcttggtatttctaatacctatacatacacaaacttcatgatgaatcttgactacctacacaataaggtgctacatttcatgcccttttcaagtttttgctacctaaagccgcatgcaaattcaagtatattttcctttgctgactaaaatngtattcaaattaaaaggtatatatttttttgaatggattttcttacataacatgcaacatanttatatata

SEQ ID NO: 254622 - DNA, 437 bp, Glycine max
tgaacacgcttctaactcttctttcaaaaccatgctatgagctagcgactggtccctcacttactatcgcaacacgagttcactattgctaccccatagagctccgcgaaatgtgctccggccatactcatacttgcgagccctctaggactcttgctcaagggctcttgcggaaattgcattctcttcccgtaacccggcacactccttccgaacgtgtgtagcggacaactagaacttctccttggcaagatctgcctttcctaacacgctattgagagcttggacttctttgacctcttccggagctacaaaactctctcagctgacgacatttaacttggcgagccaatctaaacctcgtatatgaacattcagccattcgtggtacccaccaatgatgccattacgaatgcctctaagctcttgatctttct

SEQ ID NO: 254623 - DNA, 336 bp, Glycine max
  unsure (1)..(336): unsure at all n locations
ngagatgaggaagtgttgaagggtgaaacttcctgcttttattgttgaccacagagtggtacctgnagatatgtcccggggtcaggagaccttgggacgtcaggtggggtgctatttgccaaaaccaagcttgaccaatcccgacccaacccgggcatagtcggtcagtgagaacatgtgacgtacctaagcaggcgagctcctggcagtcaacagataaaaggaaaacaagaccacagangcaggaggcttgtggtggctggccagctgtgaattttgtgtaatatgtggattgtggcctctggtaatcgattaccaagggtgggtaatcgatta

SEQ ID NO: 254624 - DNA, 314 bp, Glycine max
gtgaagtggacgcaaaagtctcctctaatttggttttcattatgtgatgggataagtttggcttcaccaaactctattccacacctattaaagaaaagagaaagaagtgtctatatgatagttgatacagtatgatacacaataaaaactaaaagaaaataatatatattgaagaaatgtatatgtaatatataaaaggtgtctacatcattcatcaatcttaactcttctttcaatcctcttgtagatttatacttagaaaaaaggtttatattttaatttgcgccttgtgatttatatataaagacgttata

SEQ ID NO: 254625 - DNA, 391 bp, Glycine max
  unsure (1)..(391): unsure at all n locations
ngaactccttatcctacacttctgcagaagagcttcataggttgcttccttcaatgatgcaacaccctctacatatacaaatgcgacgataactaatatgattatattcaattaacataaaagagttcatgtgagtaaaagagtcatattngctctaatattatcaaataaaacttattaatacatatccggtttataaaagaaatcttgttaaattattgagataaaataaaaaataatatcatgcaattaaaataaaaacttatccctgatgtcatatcctttagagcattgtgtcttaacatcctttagcacgatgttctttaaagtcatgcagctagtcatctacttccgttcgagattatcacgggatccaaacatatataacaca

SEQ ID NO: 254626 - DNA, 418 bp, Glycine max
  unsure (1)..(418): unsure at all n locations
agcttaatgagtgcatgaggatctgggtattatatgcatttctggaaaaaaaattatgaactccctaagtcagcggtgcacgcttagcgaggtcatgcgttctgggtttttgttgaagttctaaaaaaatttctggatgaactcactaagccaacctcgcacgctaaacaggttcataagtttatgtgtttgtgttcttcgtagctaagtgttcatcatcattaatagagctgggaatttcccaaactctgctgcttgctaagtgccaatacgcgctaagcgagcatcttgatattttntttaggtacttgggcttagcgctggttgcatgctaagcccacatttcgttttaactgtctgggcgtccttttgnttttttgtgcaagagcttagcgccagcttcacgctaagcccaagt

SEQ ID NO: 254627 - DNA, 424 bp, Glycine max
atgcccgagtcattcatacctatgagatgttgctgaagtattggcgatcagaattgccattccttggattatagggttgaaccaagctcacgcttttacaaaaaggttcatcaagtcaagttgaaatatggaagtaaccgtcttgcaaaattggggcaaaagatgaatcgagtcacatcactgcttcgtctactgccaaacatatttaggattattgatgtccttgttacttacagtttcaccttgacaaagatgtcatggaccatgttgaaaatctaaattgattcaaccccatatcttgcgtagaaattcgcaatacttcaactgtacatcattcgcatgcatccatgcttttcattggttgcattgctcgttgcattctttccttcgaaaataaaataaaatataataagatgaacttatc

SEQ ID NO: 254628 - DNA, 436 bp, Glycine max
  unsure (1)..(436): unsure at all n locations
tgtacgaatgtaagaaacatcttctntgaccttggtgatccttgactccatctcattgaatcgaatgtccactagtaactccaaagtatcaaacctttcaccaacaaaggtttgaagaccatcgaacctgtccaaaatcttttgaagaagagaggaatcttctccaccatgtaaatgtccttcttcatcaatgggttgagcaccctttttcacccaaaagccatcatgctctttacggtaaccaaaggatgcaacacaacagcgcctattagaaaggatctcttgattggaacataaggttcagaatcaagaggaatgttgaagtgttgaaggaagagagtgactangtgtggatatggcaatggagcatttaatcacaatgccttatgcatgcgatatcggactaagtgtgcccaatcaatttgtcggcctttat

SEQ ID NO: 254629 - DNA, 448 bp, Glycine max
agcttctttggaccttgaacaagcaattaacttctctttcagaaccatgctatgtgctcgcgactggtctctttcttcccttcgcaacttgagttcactattgctaccccatagagctccgcgaaatttgttccggccatactcttccttgcgagccctcttggtctcttgttcaagggctcttgcggtaattgcattctcttcccgtaacccggcacactccttccgaacgtgtgtagcggccaacttgaacttctccttggcaagttttgcctttcctaactcgcttttgagagcttggacttcttcgtcctcttccggtgcttcaaaactctcttcgctgacgacttttaacttggcgagccaatctaaacctcgtatatggactttcagccattcgtggtacccaccaatgatgccattacgaatgcctctaagctcttgatct

SEQ ID NO: 254630 - DNA, 393 bp, Glycine max
  unsure (1)..(393): unsure at all n locations
tcaagaaaaagatggcctcagcaaattccttatttccagaagggaattctatcaatagacctncaatctttaatggagagggttaccactactggaaaacccgaatgcaaatttttattgaggcaatagatctaaatatctgggaagccatagaaatagggccttatatacccaccacagtagaaagagtttcaatagatggtagttcatcaagtgaaagcataactatagaaaaacctagagatagatggtctgaagaggatnnaaaacgagtacaatacaacttaaaagccaaaaacataataacatctgccctgggaatggatgaatatttcacggtttcaaattgtaagagtgctaagaanatgtgggacactcttcgattaacacatg

SEQ ID NO: 254631 - DNA, 459 bp, Glycine max
  unsure (1)..(459): unsure at all n locations
agcttgtaggaagttcaaacgacaataacattnttctaagatgtccgattgaatcgggtaatatatcgagacgctcaaaattgagacttgaagctctaagataattgaaacgacaataactttatacacgggtgtccggttgagttccgtaatatatcaagacgctacaaattgaaaacggaagctcttagaaaattcaaacgacaataaatatttacacggatgtccgatagagtggcgtaatatatcgagacgcttcaaattgaaaaaagaagctcgtaggaaattcgaacgacaatatgtttttactcggatgtccgattgagtcccgtaatattaaaagacgctcgaaattgagagcagaagctctgagcaatttcaaacggcaataactttatactcgtatgtcctcttgagtcccgcaatatatcgagatgctccatattgataacagaagct

SEQ ID NO: 254632 - DNA, 395 bp, Glycine max
  unsure (1)..(395): unsure at all n locations
ggcagcaagctntacaaaaaggttcatcaagtcaagttgatatatggtattaaccatcctgcaaaattggggcaaaagatgaatcgagtcacatcactgcttcgtctactgccaaacatatttaggattattgatgtccttgttacttccagtttcaccttgacaaagatgtcatggaccatgttgaaaatctaaattgattcaaccccatatcctgcgtaaaaattcgcaatacttcgactgtacatcattcgcatgcatccatgcttttcattggctgcattgctcattgcattctttccttgaaaaataaaataaaataaaatgatcttatcaaaaagaaaaggaaatgctttacggcgcccttaccgaactcgtgctagatctagagtaat

SEQ ID NO: 254633 - DNA, 444 bp, Glycine max
  unsure (1)..(444): unsure at all n locations
tggataatgattngtatacaaaagttagtcgtataaagtgactaacaaactcccncaaatntacagttttgcttgtcctcaagcaaagaaagaatagttcacttgtcctcaagtgacaaagacagtggccaatcaaaagaaaatggtgtttgattcatcaaggacatcaaccatatgaactgaatatcatggaatgcttaaatcaattacttttcacaagcatacagtttttcagagataagagcacaagcattagagtcatagctgaaataagctagtaagcatgacagaaatcaaggaaggatcatcaaccaaaacctcacagtcattgtttcactcacactcaagtgtttaggcttattccatcatanacaaccaacacaagttccaacctttgcttttcatctcttataatacaacaatgaacacacaaaaatgaatccg

SEQ ID NO: 254634 - DNA, 460 bp, Glycine max
  unsure (1)..(460): unsure at all n locations
agcttgcattcatccattttttgatgaattgagggacccaaacacccgtcttcctaatgctcgaccacttcctccactgtttaattttaaacctcagggtgagtttaagtactttctcatagatcagcacaatttattagtgaagtttatttggaatagctttatataaagccaacaatggatttatttcactacacacgtgatttgttggtgtgagtgttagtcctatgacgtgggccttgtgaggtcagggttatatagcaaattctgtaaccaaaacacaatgatagtggccattttagcacatacaagagtgaatgacaccagatttatctctttaatttcctgtttgttgttcattcatgcagaactttctggtgtaccccctgatgtcatcaatcggcttataccagagcatgcgcgtaaacagaacttatntatggctntgcacacctagcaa

SEQ ID NO: 254635 - DNA, 376 bp, Glycine max
  unsure (1)..(376): unsure at all n locations
tgtggttntcactatataagctctcaaggagcttagctntctgctgtttatcttgtgacccctacaaacagattgaactatttagtacactaattaactgcaaataatcacactggcaagttaatgtaactgcattctangatgtgatttcttgccgatgggttgtgcaaatgctgtcatttgctagaacaaacagttggggaaataccttgtgtttcttctgttgctggactgccgcagattgtccttcttgttgctttgttctatattcatcatgtagagcggttgcatcaccaacatttgatttctcttccaaggttccaccatgttttaaagtttcattcatctctcccttctggctgttcatttcaatctc

SEQ ID NO: 254636 - DNA, 465 bp, Glycine max
  unsure (1)..(465): unsure at all n locations
agcttgataagtggttggcatgttccaacaagatgcgtcattcaatatggcatacccaatgcaattcttggtaatagaagccataaatattgtgttaattacaaagcagatccaacataaactcaaaaactaaaaaagaagaagcattaatattaaaggaaagacatcaaacaatattattaaatgaaagccaacaagcccaatttgcgttgaaattacaaggaacgattgttttgattgttgatttaagtcaatgacccatgttttcccttacctttgcatggattgaaggaatcgtgaaagttaatgtgtacgattttaactgcacaaatttgtgtgatgtcgaaagaaatgcattgaanaacaccatatatgatatcgcctccatgcaagatgatgcctctgtctacctttgcaacccaatgggtaatgggaagatactttacccctcacctaactaactat

SEQ ID NO: 254637 - DNA, 390 bp, Glycine max
  unsure (1)..(390): unsure at all n locations
tgaacgcatgtaacccaccatcttttcatagtagaacaccgataacgtgtttactatcattggtatcatcttcctctccatcattgggggcgctacttgagctgacagatccctccacctttgggcgtattctttgaaagattcatgctccctcttacacatgttccagaggtgcattctattcggagccatatcagaattgtactgatacttcctaatgaaggcaaccattangtccttccaagaatggacctgngaaggttccaaattagtataccaggtgatggctgccccagtaagactttcctagaagaaatgcatcaataagtgttttatctttcccgtaccaccctatgttcctgcagtacatctttatgtgattcttggggc

SEQ ID NO: 254638 - DNA, 444 bp, Glycine max
  unsure (1)..(444): unsure at all n locations
agcttgatgcacactgaactgatacagtgcattttttgaggaggaaaaaagatacaatcatgtaattagcagacaatatttaccatttattcatttcagcatcattgggataatgctgatacaccatttaaatttgcagtgcaataagtattcattcttacaggtcacataccatcaaactagagtaatgcacaacttattaaaaacataccagataacattgcctctgagtgtgttgatttctccattgtggcccaatacacgcataagttgagcacgatcccagctagggaaagtatttgtagaaaaccgtgaatgtatctgcacatatgcataccaaattgtcagtaatcatgattatattcttataacaaaataaaatagtgtagaaaatcaaatgcacaaatgttntttctctcaggtacaatacacagcatatattaa

SEQ ID NO: 254639 - DNA, 227 bp, Glycine max
  unsure (1)..(227): unsure at all n locations
aatgcttttctataatacctgaagggaagggcaaggtcaaaagttaagagaaaaaatgaggagagaagaaaaaaaaaacaagtcagcctacgatccaccaggatcattcctacatccttctcttgtaccttatccctatcataccagtagtcttttctttatttattttcttagagtgatgtatccatgtccctgtctacctaatttcgccggngatataattgatg

SEQ ID NO: 254640 - DNA, 238 bp, Glycine max
  unsure (1)..(238): unsure at all n locations
agctntgganaatgatttctatacaaatattagtcttataacacgactaacaaactccgccaaatatactgttttgcttgttctcaagcaaagaaagaacagttcacttgtcctcaagtgtcaaagacagtggccaatcaaaagaatatggtgttagattcatcaaggacatcaaccatatgaattgaataccatggaatgcttaaatcaattacttctcacaagcatgcagtttttt

SEQ ID NO: 254641 - DNA, 280 bp, Glycine max
ataaacaggatgccgcacattatttccatgacacacatgcagtaatgatgatctggaaatattatgcaaaactggtcatgcatgcgcctatgcggacgctcaagtgtcacattcttatggacatgtgatgctacggctcaggattcatttcctctattctaaatcaacccaatgtttccaaaatatgatcttttatcaatatgtgcattcctccaagtacatttcgggcgtacggagaaatttcacagcattcacccttcacgtgtagacacgtgttttt

SEQ ID NO: 254642 - DNA, 386 bp, Glycine max
  unsure (1)..(386): unsure at all n locations
cctgcagctgaaacttagcacccccggtntctcatatataacatgttttattcttactctaacaatctcaaacaagctaaaacctaactatatgcgatgattcagaaaacacatataatgaagacaaagaagaggagttgggttgcctcccagaaagtgcttctttaacatcattagcttgacgcatgttacctcaagggtctggagcaagcttggctctagccatcagaatcatttcattctcaacctcatccatcttaagacaaacattccggtcaagtgagtactttgctgcatcaaacaagtcaaatgagatcttctgatcatctattcccatttatagagtatatttcaccatgtacaccacataattgggcattaacatg

SEQ ID NO: 254643 - DNA, 320 bp, Glycine max
attatatattctgtattaccttgtgatattgtactctttgtgaaaatattagaaattatttcttgcccccactcagaaaaatatatggatctgccactacttagtgttatgcttgatgatctcttgaactctatagtgcattttctttatgattcgatcatcgacatatttagaagtgtgatcttgagattgtgtggcttgatgtgtgtgaaagcaaacttgtgtcttggaaacttgtgattggtcatagtacttggtcttgcaataatctaacttagcttctacagtttagttgttcttttgcttaaggacaaacaaag

SEQ ID NO: 254644 - DNA, 331 bp, Glycine max
cactgaatgaaacttccttggctctcagatgcagttaacaataccattaaatattatagaaaaccaatccttcatctaaaggaaaactttacatgtttatcttctagcaaatatttaatcactcaacgatgattttaacttgatgatcagtagtatttactggaagtggactgttctagaattcaatggcaatggtgtaggatgtggagtacacctgttaaacggaccattctatcgttactattacgcatctttcatgttttgatgaagtcactaacggcgtgcttaatgtgaattgctgcattcggctgcaaacttgcatccaaaacac

SEQ ID NO: 254645 - DNA, 358 bp, Glycine max
acataacctgactaggtgatatgcaacctacctggagcaaaagaaaaagaaattccatcaagaaagcaatagaaagactgaaatctccaatcaaagagagagcacaatgatcagaactgaaattcccaatcaaagagtgggagaaagcagagagaaaagaaagaacattcccaaccaagaatgcgagaaagttaaacaggaagaagaataaggaaggagagaaagttcctgatcaaagaaactagaataaatgtgcagataggtcttttgaccagacaatatctgaacaatatagcatctgcacctaatgaacataaggaacgaaagggaaccatgacctaaagtggtcttctccctt

SEQ ID NO: 254646 - DNA, 142 bp, Glycine max
  unsure (1)..(142): unsure at all n locations
agctngaagtangcaatcgctcagcatttcaatttactgcttaagtcttctgaacacacctgcgactactgactgatacttgagagcgtaccaccaacctatgatattgccatcatctctcatgatgatgtgatatttactt

SEQ ID NO: 254647 - DNA, 548 bp, Glycine max
  unsure (1)..(548): unsure at all n locations
agtcatttcattaacaacgatatcaatatcgttatagcgctgtctgctcgntcaaaacccacccctganctgaatcctgccctcggaacttgaatctcagcttaacctgatgccgtgtgaactaattccttgctagtgtcaggtttcccaccccggagaacctaacagaagttatatgctatgacacgtgaaaagtaatggggaaactaaatcacatttcgttgaccttccaacagaaactcgaacctttatcctcttatacggaccaatagcataagaatagcacatgactggaagactctgttcaacagaattcacgatgcaaagctatgtctggtgaaacccatatattaccacgaaactgagcttcaaagcttatgactgagcagcatagaaacacagtagtataaaacatcctcatgttccaccaatacaatattacaccatatacatggctcaatataagttccatggcatgagatggcacgcgttgcgcatgactgctgaaagaaatgcaactacctcatggtcatggattcaggatctcc

SEQ ID NO: 254648 - DNA, 402 bp, Glycine max
gtggcctcagatatcttaagaaggggggttgaattaagatattacatactattttcccaattaaaattctatcaagttataaattcccttaataatgaacttcttaaatattgattcaaatagaacaatttgaatatgaatataaaacaataataaataaaggagtctaagggaagagatagtgcaaaaatagatttatactggttcggccacaccattgtgcctacgtccagtccccaagcaacccgcttgagagatccactatcttgtaaattccttttacaagttctaaacacacaaggacaatcctttctttgtgtttagaatatctttacaacaagataccctcggtctcttaatcccttagtgaattagaaaaagaagaagaatgaatctctcttg

SEQ ID NO: 254649 - DNA, 235 bp, Glycine max
atcttctatagaaatattatatactatgtttctgttcccacactacaacaaaactggtatttcgcgttagttgaatgcatgaactactggcagttacaacagacgctatctcgaattccgacagctccaaaatcgtcgatgaaaatggtgacgcaaagccacttatcgtcgttctacgataaccaccggaacaaccactgctaaagtgttttgtgattcactagcatatagtagt

SEQ ID NO: 254650 - DNA, 431 bp, Glycine max
  unsure (1)..(431): unsure at all n locations
agcttatctatgtgcttttttatatgagtgttttccttacctttcccttctcttttactatatgattttgattattttccccttttccccatcttggttatattggtaacgttagggattagataatgatttataatggatgtttggttgtgagtaatagggttgatcttagatctcaagttaattgtgtagtttacattttgatttattataattgcttttaatttgattagacgagttgtaattaccctaaaatactctttcttgttgtcatgaattgatggtttgtgtttggtaatttacccattttttatgttcttagaattgatttctatgatttgatgactgtatgcatttaatttgttcttcatgtgtatcttgtgtnttgcgatggattaaacttcaatcctacacgcttatagtgagttatg

SEQ ID NO: 254651 - DNA, 301 bp, Glycine max
tgcttacaaagttgagctacccggtgagtataatgttagttccaccttcaatgtatctgatttatctctttttgatgtagatggagaatctgatttgaggacaaatccttcttaagagggagagaatgatgaggacatgaccaagagcaagggaaaagatccacttgaaggacttggaggacctatgacaagggctagagcaaggaaagcaaaggaagctcttcaacaattgttgtccatactacttaaatacaagcccaagtttcaaggagaaaagtttaagggtgtgagttgtatcatg

SEQ ID NO: 254652 - DNA, 451 bp, Glycine max
  unsure (1)..(451): unsure at all n locations
agcttctaaaacntttggaatttgtatttggttttaaatagttttttattttttatttacttttggtccctatttttttattttatattttatctatgtcattagattggctttgttaagtgatctttgaaatattttagaaattttcctttgatccttgattttttctgttattatgtttatcatcaaatggtaacatatcaagttatcaaagccaatgtaacaacagaaataaaatataaaataaaaaaattcagggaccaaaagtaaaaaaaaaattatcaaagaccaaatataaaatttgattttttttcaaggataatatcatatctattcctttcacaaaatagtatttgctagtttgtagatcttggcaccaacataatgtagcatcaaccatggctacttaaactagcattgacttttattntnntattttttaatctatttc

SEQ ID NO: 254653 - DNA, 323 bp, Glycine max
  unsure (1)..(323): unsure at all n locations
agagaaccagaacagaagttaatatgcttatgagacagtgaaaaaggtaaggtggaaaactaaattcacatttatattaaccacacatacagaaactgaaacttttatccaaggtattaaggaccaaaagcataagatatagcacatgacaagaagactttgttcaaaagaattcaagatgcaaagttatgtctggtgaaacccaaatattaccaggaaattgagctttaaagcttatgacggatcaacatagaaacacaatagtattaaatatcctcatgtccaccaatacaatatacaccatatccatgcaancatatgag

SEQ ID NO: 254654 - DNA, 411 bp, Glycine max
agcttcggtattcaatttcgagcatttcggtatattacgggactcagtcgaacatacgagtaaaaacttattgtcgtttgaatttgctcagagcttcaacattcaatttcgagcgttttgatatattacggcactctatcggacatccgagtaaatagttattgtcgtttgaatttgctcagagcttcggcattcaagtccgagcgtctcgatatactacgggacacaatcagaccttcgagttaaaagttattgtcgtttgaatttgctcagagcttcggcattcaagtccgagcgtacggatatattacgggtctcaatcagatatccgagtaaaaagttattgtagcttgaagttgctcagagcttcaacattcaatatcgagcgtttcgatatattacgagactgaa

SEQ ID NO: 254655 - DNA, 468 bp, Glycine max
  unsure (1)..(468): unsure at all n locations
tctatataagctggaaccatttatcaataaacacaagttgagttgtattcagaaaattagagtttatctcttttatcttagtgagagtgattctcctaaattcttgagtgattcaagaacaccctggctgtatcaaaggactttcacaacctttgtgtgttgccctcgttggaaagagtgattctttccttcctatcatctccacccttgttctttcaaaccacaattccagagaatccacctctgcccagaattatctcgtggccataactcccattgtacgcactcaaattaagtgattcttgagcctaaatggactctcaaaacgagacctttcacctcgttgtggaatcacctcattnggagccctgtagcttcagttattgccatttctatatttctgtccagccaccacttaacctacantttaccatgccattcatccattttatgtcaagaaccacctta

SEQ ID NO: 254656 - DNA, 457 bp, Glycine max
agcttccattcaataaatcgagtcctactagttctagtcctcttatattatttattctgatgtatggggtccaacttcaataaattcaataaatggatattcctattatgtcatttttattgatttattttcacattatgtttgctggttgtatccaatgaaattcaaatccgaaatttccattatttttccagtttttaaatcctttgttgaaaaccaataaaatgtcaaaattaaaattttttatactaacaatgatgatgaatacattaagttacggtcgttccttctaacttatggaatttctcatttaacaactccccatacccgtgaatattacggaatttttgaatcgtaaaaattggtggacaagtggccttaataacttaaggagggtgaattaagttaaaaaatttctcgtttaattgacttctaaatccccttttaaatctataag

SEQ ID NO: 254657 - DNA, 425 bp, Glycine max
  unsure (1)..(425): unsure at all n locations
cttcatcttcctcgttcctccctagtggtcatcattccgactcacaactcataggctntctcactccctcgttntatctcattaggttgttactagcgcatgagagtgtcactgtcacaaggaagcctttctcatagtctatcggtgccactgattcatcttcttctaacaactatntcactagttcacatgtttaacacaagttnttctggtttctatccagttctttaacaaggtggttttatggttcatttggaccggccatcaaggtgattcacagttgaaccggctagtccgatccgattntgataaccttgaaaattatgctaattgttatgagtttctctgaatttcattanttttgagattntttgtatagttntctttgaaatcaacatatanattattaccagcactagtatcaa

SEQ ID NO: 254658 - DNA, 441 bp, Glycine max
agcttcactgaattgctggtcttattgaagaacatgcttcctgaacaaaacactttgccgaagaatcactacgaggccaaaaagattttgtgtccagtgggaatggagtacaagaagatccgtgcatgctctaatgattgcatattgtatagaaatgagtgtgcagaactacagcaatgccccacgtgtggggtatcacgatacaaagtgcaacatgatgaattaactgatgatgcaggaaccaaaaattgtcatcctgccaaggtgtgctggtatcttccaataataccaaggtttaagcaattgtttgctaatgcacatgatgcaaaaaacctttcatggcattcggatgaccgaaaatctgatggagtactgcgacatcctgccgattcgccagagtggaagacaattgatcgtttgtatccagagttcggcgatgag

SEQ ID NO: 254659 - DNA, 318 bp, Glycine max
cttccttgagaagctagagctgagctacacacacccctatcatagctaagctcacctgcttgagaagctgccttaagaagattcctctagaggctagagcttaactatacatacctctctaatgactcagctcaccttcttgagaagcttccttaagaagattgatgtgccatcatgttgttctatagtctaaagcgctcttgcaccatgataactactgatgtggcgaactcgtcaaccaatcacgcagggtgattagatgggctcattcagctaatgcgatgttctgaatctaagttcacgaattaacgaaacatt

SEQ ID NO: 254660 - DNA, 449 bp, Glycine max
agcttagacatcttggtcttcctatagtatggctttatgtattttgtcaaccagcaactatacgtgcttaaacaagagttgaagcaaggaataaaactagagttataccaaattgcatcacagtactcatcgccacttgaaccacctaatatacaagtggtagctgcacgtgtgagaaccaaggggagttatgctgatgctgacacaattctatcagctaaagagccttctaatctgcacgttgacactatgggcttgtacgtagttcatgaccagtgtactaaactagttgcattgagaaaagtgtatgatagtatgtcgaccatacacaatgtcccttatgcatatgatgtggttagggtgagtgttgtcaaagtttaccacggtgacgctcaggtcccttttttgacatcagagattcaatttgtgaggcacgtccgtgggacatt

SEQ ID NO: 254661 - DNA, 447 bp, Glycine max
  unsure (1)..(447): unsure at all n locations
cattatagcaccaaagactacttccttggcacaaagcttcataagtagcaccattatactatgtcatggaccataattngcaccagccacaactcattggttgatctcttgttaacagtggtttgtcttaacctcttacaaaagaatgctcaatttagaaattggtcaccctttatacccagatataagtgcttgtttgaaaccatacagtgccttttttaacttgaaacatgattaagatgtttgaagctaccaacctaanatgtctcgcatatatatctcttcatgtgtccctgagataacactctttccccccttggatacctggaccctatacaccccagcgcagaatccctattgctccaccttgcacgagcatggcttatatagtatgcctctctggtgatcttagcaccaatatgcttgtctacttgagctgatataact

SEQ ID NO: 254662 - DNA, 541 bp, Glycine max
  unsure (1)..(541): unsure at all n locations
cactccctacttctctccactcgtactctttaattattaacnnnnaagcgggtggcctgtgacgcgtctaaccgccgcagcatgcactttagaccctgctattgtggccgggttaatgctcgcttcatcccaaactgccaccttgcggagcccctctgatgatcctccaccgactacccgcatatttattattttgctcacgggacttaccatctgccgccttcgggcacacgcttgtggcccacctccatcgagtgcttctcgttttggccacctcacttcccacaccacttcgggatatgtgagcgtgacctgatgtacaactggcatctggctcgtcatgctcacggtgcggacggttaacaaacaaataacaggtcacacgcgctccttgagctgcaatcaatttgatgtgcattatcgacgaacggtggtcaggcgaaacctcctccttcacggtcacttctgcaacaacactccccaccccgctccatgtaattaacttcaggttattactcccatgtatcacacgaccaccgcc

SEQ ID NO: 254663 - DNA, 279 bp, Glycine max
acaaattgcttatgccctaagaatagaagactgtgttggttgtcaaaagtgccaatctatttgtccgaccaatttcttaagtggtagagtttatttattgcatgaaacaactcgaagcataggtctagggtattgatatacaagcatgtttttggttacaatgttgatgtataattctttttctctatgataatacacatggtttaacacgaatgataatacccttagaaatattctcatttaagaataacttctcgaacccggcttattcaaatatga

SEQ ID NO: 254664 - DNA, 451 bp, Glycine max
  unsure (1)..(451): unsure at all n locations
tgcatatgatgcagacattcataatagtatccctcttcatcaaaaccaacaacagcagagtaagtatgatatttcaagcaacagatacaatccaggttggagaaatcatccaaatctgagatgggcaagtcctccacaacaacatcagtctgtccctcctttccagaatgttgttggtccaagcaagccatatgttcctcctccgatgcaacagcagcagcagcagtcacaacaaagacaacaagcaactgaggctcctcctcaaccttccttagaagagttagtgaggtaaataaccatccagaatatgcaatctcagccagagacaagagcctccattcagagtttgacaaattagatagggcagatggctactcagttgaaccaagctcagtcccaaaattntgacaaattgccttcacaaactatgcaaaatccgaaaaatgtgagt

SEQ ID NO: 254665 - DNA, 385 bp, Glycine max
  unsure (1)..(385): unsure at all n locations
tttaccaagaaatgctacccttaaaacaaaaatggcatacaaccccctccaataaatacaaacatcaatgtaaatttagagcaagcttatgcgcatacttctttacgaacgttcacttgcacaagacattcttataactaagaaaaatgcacccatatacaatcaaggcaccttcgttaccttagattatttacatgtacttccaaggtgtagttgttacctacatcacacacatttcctttgctaaattcacatacatgcatactctaagcactttggctatcaaaaattgcatacgtgcacatcttggtatttctaatacctatacatacacaaacttcatgatgaatctngactatctacacaataaggtgctacatttcat

SEQ ID NO: 254666 - DNA, 190 bp, Glycine max
agcttctagccaaatggacttaccttgaattaatttctttgttaacccttttgagccttgtttccctttccttgttttgaagctcactacaagccttaagtgaaaaaccatgatatcaccatatccttaaggaattttggagctttggaattgttttgggaataagtgtgtgtgtgtgtggggggggggg

SEQ ID NO: 254667 - DNA, 364 bp, Glycine max
  unsure (1)..(364): unsure at all n locations
gctgaagcgtgtaccaccatctttcnagtaaacactgtagtgtgtcactatcattggtatcatctccttctccgtcattggggtgctacttgagctgccatatccctncacctttgggcgcatctnttcaaagattcatgctcctttttgcacatgttctgtagttgcattctattttgagccatatcagaatngtactaatacggcctaacaaaagcattcattaggtccttccaagaatggactcangaagggtccagattagtgtatcaggtgtcggctggcccagtaagactntcttggaagaaatgcatcaataatttttcatctttcgcatatgctccctttntcctacagtacacct

SEQ ID NO: 254668 - DNA, 440 bp, Glycine max
  unsure (1)..(440): unsure at all n locations
agcttcatgatgatgaatcaagttgattcaagaagttntgataatgacaaagatgttgacaaaaagcccaaagaatgatttcaagattaaatcaagaacaaattcaagaatcaagagaagtttgatttcaagattcaagaaaagatgaattcaagttccaagagaagaaatcaagaagacttcacaagggaagtattgaaaagattttttcaaaaaacaaacatagcacaatttttttttcaaaagagttttcataaaattttctaagttaccagagtttgtactctctggtaatcgattaccaatttcctgtaatcgattaccagtgggaaagtttgatttcaaaagttttcaactgaatttgcaacgttccaattgatttcaaaatggtgtaatcgattacaagatattggtaatcgattaccagtgcatctgaacgt

SEQ ID NO: 254669 - DNA, 159 bp, Glycine max
  unsure (1)..(159): unsure at all n locations
gctgcatagcagtttctactacttaagctgaatacatagttgtaggaagttgatgtactcaacagtcttggatgaagcaacaacttgaagactntggagtanaccttgatcacattcctcttaaatgtgacaacacaagtgctaccaatctaacaaaaa

SEQ ID NO: 254670 - DNA, 442 bp, Glycine max
  unsure (1)..(442): unsure at all n locations
agctctatgagaaaccataaaaactaatgttgntcttaaacaaaaatcaattgaggaaacttcgccaaaaatccccattgaaaaacctttattcaaacctttcaaagttagtgagaaggctaaaagaaaaattagggaacttagaaaaactaaatccttaattgaaggcgtaggtgacaaccatagtgaattattaaacaagattggtagtttacttaaagtcattccagataccccccaagcctcggaaaatacttccaaaatggtaacaagaagtacctccaaattaatcaatgttattaatgaagatagtgaccaaaactcatataacacaactgagataggattagtgtcagaaaagaatataaatccaattaattccaaacactggaagacaccctccatattatattatcaacgtccaactgtccctgaccttcta

SEQ ID NO: 254671 - DNA, 335 bp, Glycine max
  unsure (1)..(335): unsure at all n locations
ctcaagctgtaatatttattggtataattcgcctgttccactatgctcttgttgtctttagaggttacttcttcgctgacatcttttgtcttgaatgggattgccatgacacgtntattgttactgtctntgatattttgcacttgatattgcgttgcgggaggtaatttcgattggattaactcaccatccttaacttgccaatttgctatgacatttgctgttggatcacctatgacgtcttgtttcccagggtaatctatatcctttctgatggcataagcatgaaaccaatcacagaaaaggacattagttttgacttgttcgaaaaattc

SEQ ID NO: 254672 - DNA, 449 bp, Glycine max
  unsure (1)..(449): unsure at all n locations
agcttatcccatgtctccttaacggatgttgcatcataaatattctcaaatgcatcatcatctaatgcttgatagatgaggaagagagctttcttgtctctttttcttgaatcctttaaagtctcctttttgtgcttgggatagtgaagtcttatcttgcatctccttatagcctttttcaaccattttccaaacatcatgtgctccaagaagggacttcattttgatgctccaattatcataggtgctcccctttagaagtggaacttggaaggatgtcgctccattgcttgtcataactatagaggaatttcttatcagaacctaagctcagataccactttgttggaaaagagaatgttatatgaagtatntgaaagagatggaggaggagagaatatttgaaagaaggctagttcttatttcttgagaaatggtttggttttgac

SEQ ID NO: 254673 - DNA, 442 bp, Glycine max
agcttgaagaggaagccgtcttgcagaactttggatgagattttgagagattgtgaggtttctagacgtggaggagacatccccactacttgtatttcttctatctttcatcttctcttctccttgttgtaacagaagcttccccgctatggagagctaaatcctcagttggttcttcctatggggtacttgatgtaaatactttcatatctatctaatgatgttttatgtgttcactgtgctatcaatacttaattctagtgtgcattttccttgatcacgcacttgcatgcttaattagggtcactcaacattgggaaatggtttgatccttagaacttgataggaccaggctagcttatcgtattttcacgagacatcggggtacgggagcttagtttttgttatgctatgtcttaatacgggtttggttaagtttatt

SEQ ID NO: 254674 - DNA, 380 bp, Glycine max
  unsure (1)..(380): unsure at all n locations
ccttcgaccgaacacggccgtgtttctgtctattgcccgattcaaggcgggctgcagcaccggctccngcttcctaactgtactggaggcggttgcggtggctttatcctctatggttttctggagttttaacatgacctccgagatggaagccatttgatcttttaacgccgatagatcggccttcatctattcctgcacgcgctcttcattatccatttttctggatcgagtgttataggggtgcctcggtgttttcttagttatgatgaaattcctaaagaaataaacaacagtgagtatgccaccaaaacatgagtatgcaaatggatgatcgaagcacttggatccaccccaagatttttagataacgtaatgag

SEQ ID NO: 254675 - DNA, 458 bp, Glycine max
agcttagaggaccttgttgtgtcgagaatactctattatttatttggacaagtttgaatatgatgtaaaagaaaatgaatgtgaacctttttcccctttgaaagacttgtaaaaaaaaatgttttaaaaatacttttaattaatatttgaattttttattccttattagtatatatgtgaggggtagagggtgtcacataaacaaactaattatatttagcaaaataattatattaaaaattttaaattttttactaaaataaatatattattatacaaaatttagaatttaaaacaaatattcatccaaaaaatatcttaaataaattaaataatataacaaaaataattaaatttaataatatcattttcttaataacaaaattaatttaatcaacccttaaaaaatcaatttaataattaagtaattttaaaaccaattaaaaataattttatat

SEQ ID NO: 254676 - DNA, 398 bp, Glycine max
  unsure (1)..(398): unsure at all n locations
ntgtgtggagcttcaatggtgaatgagggaggaagaaaagcaacgtgagggatatggagagagagcttctgaanatgtggggctgagtgaagagagaaaggctcgctttttggtttttaataaaagggttttctctctttctattattttattcaagctctgccacatgtccctanttgagtggagcaagacaggcccactttctctttttgactgtgacccatactcagtcacaaaagtgaggaaaatctgacctttgaaacgctagaaatcttgcctcggattgcgtgccgtttctttggttccagattctcgcgtttctctgcgtccgtcggggctagttttcgaaagcaagcgatatatatatatcacaacgctcagaataaaaccccgagcgt

SEQ ID NO: 254677 - DNA, 452 bp, Glycine max
  unsure (1)..(452): unsure at all n locations
agctntgagataattcaaacaacaataatatttgactcgaatgtccaattgtgtcccgtaggatatcgagacactcgtaattgaaaatggaagctctgagaaaaatcaagcgacaataacttttaactccgatgtccgattgagtcctgtaatatatcgagacgctcgtaattgaaaactaaagctctgagcaaattcaaacaacaattaattttgactcgaatgtccgattgtgtcccgtaggatatcgagacgctcataattgaaaacgaaagctatgagaaaattcttacgacaataacgtttaactggggtgtccgattgacgtctgtcatatatcgagacgctcataattgaacactaaagctctgagcatattcaaacgacaataacttttgactcggatgttccactgtgtcctgtatgatatcgagacgctcgtagatcaaaac

SEQ ID NO: 254678 - DNA, 296 bp, Glycine max
  unsure (1)..(296): unsure at all n locations
tactaagcttagttacaattacgagcgtctccatatattacggggtactcaatcgtgacatccgagttaataagttattggtcttttgactcttcttagagcttccgttttcaattatgagcgtctcgatatattaataggctcaatangacatccgagttaaaacttattgtcgtttgatttttctctgaggttccgtnttcaattacgagcgtctcgatatccctccggacgcaattggacatccgagtgaaaagttattgtcaattacgagcatctcgatatattatgggact

SEQ ID NO: 254679 - DNA, 454 bp, Glycine max
  unsure (1)..(454): unsure at all n locations
agcttgtgtaaaatgtaaagaatcactgaaggctggccaagtgtgtaagattatcggctcgtccaaaatttatgatatattctgatcaggattatgaatctgactgagaatatcagtatcttagaaattaaggggaaattaattggattccctaatactgggtctcctattccttggctctatatagaccattaactttttgatcaagacattaacacgagatattttatatgcttttgtataatgcaagtgtaaccttagacactagacaaatgattttgacccatgaaaaaatatataatttttgttataggaccttgtgctaaatcctagatggacttatgtcacattgttccttaatttaatcataatgttgtattttctttatatttaaacagctctggcgtgtttgttagtgcttctgaggataaaacagggactntagctgtcattg

SEQ ID NO: 254680 - DNA, 376 bp, Glycine max
  unsure (1)..(376): unsure at all n locations
ntganaaccaacaggctccctctaattcatcgagtaactcatcaatggttggaattgggaatctgtccttgacggtaatgtcgtttaaagctctgtagtcaacgtaaaaatgccatgatccatcacgttttttgaccaataatacaggggatgagaatgggctaatgcttggaattatgccactccggagcatggtttctacctaagtttcgatttcttatttttgaaaataaggatatcgatagggtcaaacattgatgggttcagagttgggtatcaagtgtatggcgggattggtggtgtgggatggtgggagggtcattggtgtgtggaatacggtcacgaattgagtgagtaaacttggtatttctgggta

SEQ ID NO: 254681 - DNA, 453 bp, Glycine max
  unsure (1)..(453): unsure at all n locations
agctngccttgctccttgatatatatgagggactcatggacattatgaatgacaaattccttgggataaaggtagtgtcgccatgttttcaaagcccgcactaacgcatacaactctttatcataagtagaatagttaagggtaggaccacttaacttttcactaaaataagcaataggatgaccttctggcatcaacacagncccaatcccaacatttgaagcatcacactcaatctcagaagattcttgaatagttggcaacacaagtatgggggcattaattagcttttgcttaagaacatagaaagctgtttcttgtgtctctccccatgtgaaaccagcattattcttgagcacttcattgagaggtgctgccaatgtgctaaaattcttcacaaatcgtctatataaacttgctaacccatgaaaactcctcacctccggcactgac

SEQ ID NO: 254682 - DNA, 445 bp, Glycine max
  unsure (1)..(445): unsure at all n locations
agcttgtttacacgcggagatttacgtcttcttctgtactcacaagatctgtcatactcacattagagtcacgctgaccggcggaaatacccgagtggttagccgtataaacattcttcttgctatctgtaagacgaaaagcctgatagcatgcgaagactgacatcgtcttctgcgcccttcgtcaatcgcggccgacaagcccattgacacgcggagatttacgtcatcttcggcgctcacaagatctgtcatactgacatttgagtcacgctgacgggcggagatacccgagtggttatccgtataaacattcttttttgctgtctgtaagacgaaaagcctgatagcatgcgaagactgacatcgtcttctgcgcacttcgtcaatcgcggccgacaagcccgttgacacgcggagatttatgtcatnttccgcgctcaca

SEQ ID NO: 254683 - DNA, 433 bp, Glycine max
  unsure (1)..(433): unsure at all n locations
tcctcggggccattcctgcgaaggcaaacattcggaaagttagttttaccagtgggacattactcttaaagcaaaaatggcatataacctcctcccataaatacaaacatcaatgtaaatntagagcaagcttatgcgcatatttccttacaaacgttctcttgcacaagacattctattaaccgaaaaaaaaaaaaaatgcacccatgtacaatcaaggcagcttcgttacctagattatttacacgtacttccaaggtgtatttgttacatcacacacatctccttggctaaattcacatacatgcatactcaaagcattntggggtaccaaanattgcacatgtgcacctcttggtatttctaatacctatacatacacaaacttcatgatgaatcttgactatctacacaataaggtgctacatttcat

SEQ ID NO: 254684 - DNA, 448 bp, Glycine max
  unsure (1)..(448): unsure at all n locations
agctcggaaacaatntgaagcgaccctagtgacactctaactgggaggttagttttgcatggcattgtaacttgaaatgaatatttctacaacaatttcattattttcaacatgacattcacaaagatactgatcttatatagtaaattcaatgttactgatcttttcttgtattgttctatgtcttatagacgatactggctgagttaataggtcctgtatgatatgatttgataataagagttataaataaataaaaatatcaaataagtgtttataatatagtatttttatataattgctttttattctttgagaaattgattttaaactttatatttaataatcaacttctgccccttaaacttaagtctctaaattaattgttgacatgcataatgtgagcatgatgtcatgagctttgaacatccatatgaaagcaatacct

SEQ ID NO: 254685 - DNA, 350 bp, Glycine max
  unsure (1)..(350): unsure at all n locations
ntgagccataatcctgactcaccataaaccttgacccagggtgaaaatgccaatccttaccctcggaagtaaaaaaagaagagaaggaaaattaagaggaagcaaaaaaaggagagaaggataatttccaatcaaagaggaagcaaaanaaggagagaaggaaaatttccaatcaaagagaaagcaaaaagaaaagaaaaaaaaattcccaatcaaagaatgggagaaagaaaaaaagagaagtaaaaagaagaaagctcctggtcaaagaaaccagaagaaatgtgccgagaggtccttggaccagacgatatctgaacaatacagaattgtcaccaaatgaacaaaaa

SEQ ID NO: 254686 - DNA, 452 bp, Glycine max
  unsure (1)..(452): unsure at all n locations
agctntgaattctagtaaaanaactcctcgaacatattctaatactcatgcaccttttacattcaaaaccagaaacttagattcctaggcatgagtcatccttttggcactttagtctagcttctacaaactacccacacactcacaatgcgcacaatttatttcgcaagctaaattccacaaaatcatgcgcaaatgccattgaggaatttcaccgaacacttggtgggcgcatgtttaagcatgaaaatcaagggaatgggggcaatgtggcatgccccattatctcagaacgcaccctaggtctatggccatcccctacaacccctcaattcaacaaaaacaagcaataattcaaggataaatccctcacgttntgagcaaatatgtgcaacttagagcaccaaaatatatcaatggaaagccaaagagcccaagaatgatgtacttac

SEQ ID NO: 254687 - DNA, 165 bp, Glycine max
  unsure (1)..(165): unsure at all n locations
cttgaaagtgttgttnttcaccttctcgctaagccaatctgctggcttagcgagcatccgctaagcgcaacactcatgggggctaagcgcaaggaagactcttctaattaagaaggngggttgaattaattattcctaaacctttactatttaaaaatttactct

SEQ ID NO: 254688 - DNA, 409 bp, Glycine max
agcttgctagtacaaagaagaagaaacaacattgttcgatcatccaagaaataatattagaaccaagcctatacaaggttgtggcgagtgtaactcttattgaaagcgaatggatgactaagatttatgacttcctagagaaaggcccactcttggaaaatccaacaatcgtataaaggcttaagagaagtgttaactattatgtaatagagggaggagacctgtacagaagagacttcatgaccccctattaaagtgcttgactcgggatcaattcatatatgtaataaataagatgcatagagggatatgtggaatgcactcaagatcttgatcaatcacaagccgagttctcatactcaggtactattagctggcattgagaagagactatgcatagtatgtaaag

SEQ ID NO: 254689 - DNA, 415 bp, Glycine max
  unsure (1)..(415): unsure at all n locations
aggacacctaaatactcagcttttgctctatggtcaaggagaaaatcacgaattcaaacatttgttgtggcattgggcctgctgcaatttagggaagatgaganatgaggcttatgatgggaaanaatgatttcaacattctaacattatctgtgttgggcttgatgtacgataggccacagatagtgctatgccctgttttcttgggcttgatgtttgcctatttcaaaaatggataagctgcaaaaccaattggagaaagtcgagtctcatactcacgatcttgaagaagggcttgaagttctatttaggtgtttgataaagactagacttgcctttgttattcccctaaaacactaacaagtacccttaaataactacactgtcccgtaaataccaacattatattaactac

SEQ ID NO: 254690 - DNA, 426 bp, Glycine max
agcttatccggcctcccatcagcaaagccttcattgagaaatatcgcaagcccagggaggcacaacagcaggaggagggccagtatcatccagccgtagatgtgtctccataacctctacaggagacaccatccctggagtccatctccgctcacatgcgaaggatagagctccagatgcacacgtatatgcatcatgtgactggccagcaggcggccaatcattggggtcagatgcaactaaatgtgaccttcaactgatacactatgcaccataatgtattacctatcaccataatgtattatctatcaccataatgtattacttctgataccctaatttcatccggggatgattgattgccaacatttgcaacccgtatgggtttgtgacgtctcaaaaggaaatgttcaacatattcaaaag

SEQ ID NO: 254691 - DNA, 368 bp, Glycine max
  unsure (1)..(368): unsure at all n locations
gtcatttcaatttctcactaagtaaaatggatcattntcaaggtccaacgccttanaatgatcacctcttaaagtaaaaaagaatcacttgataaaaaagaactacgtaggtctgatttcctcatcgcaattgaggaatacgtacgagcaaagggaaacacccttgtcgaccacaaaaagaaaaaaatatgagaagggtataaaggatataaggacataaaagggaacataaaaaccaaagtcacgtttgcacattctattaaaggctgtcgtcccttgngacggacgtatggtgtgctaataccttccccgtgcgtaaataaaactcccgaacccttcacttaaaagttcgtagatcgcgtcttttc

SEQ ID NO: 254692 - DNA, 318 bp, Glycine max
  unsure (1)..(318): unsure at all n locations
tgcttgtacttggttagacatgtttgattcattatttgggacttgtcngattcactctgagtaagactggatgaaggtaacagcggttttcgaaatatgcactatatgcagaattatgatgcagaaaagtgcaacttaattatgtatatgagcagaaaaaaatgcttatgtatggctggttgtggaaagggttgtacatatggggttctggacattttctagcagatcccaacggtcaacatgtaatacttatgtactacagacgtccagctatatgttcgagtcgatccaacggctaacgaactgtaacgaagagaa

SEQ ID NO: 254693 - DNA, 395 bp, Glycine max
  unsure (1)..(395): unsure at all n locations
taacanatntagaaatcaagtgatcatgtattccgaaatatagggggagtaaacggatgcatattntatctatatacaattgtttgttgcttgcttgaatcttgatttcagatattgtattgtcatcatcaaaaagggggagattgtagatgcaattggctttgatgttttgatgatgatcatgatgatgtgttgcaattgatgcaaatgggcttttcaagattaaaattcaagacaatacttcaagattacaagtcacaacatcaagatgatcactacaatattaggaagggaattcctaattgaattagcaaaggtttggccaagtgatttacaataaaaagtgtttctcacaggttttactctctggtaattgattaccagaggatgtaatc

SEQ ID NO: 254694 - DNA, 425 bp, Glycine max
  unsure (1)..(425): unsure at all n locations
tatcgtttattanatgatgcttctttcattcctaccttagtaaaagatggacgatcatccaccaaaatgatacctgacttgcttctcaaaacaatagatcttttatgcaacatgcacagctctcattggctcaaatgaatcccatccgctcatagcaaaagttaatagttaggtatatcatccactataacaaaacgtagaatacatggatttccgcccattcgagagtgtggctaccaaaactcccaatgttgatcagctactacaatgaaatgggatatcttgatctccatggagatcaaatcatcctacctcttacccatttgcctcagcgtgttagaggcctgatgttaaaataataccaccatctaaaaagactctagcacatgggataccattgatatatgctttaacatacacaagct

SEQ ID NO: 254695 - DNA, 377 bp, Glycine max
  unsure (1)..(377): unsure at all n locations
nttcctctggttgctctactagggtttccaagcattagagagattaataagggattgaagcctattcagtgtctccgtacgaagaatgtntctctcaccacaaacattattttgccaatctcaatggtagggatgtgcagaaattattttccaaccacgtgtttaaatttacaacgatccaacggttaatgagtctgagattgtagttntaatgagacatatttgggtgtatgctagaaaaaagagagttctatgagagggacatttctttcaccacaaacattatatcacanatcccaatgacaggattatgacacaatgagttccaaacctggtgttcanatttcacaatgatcaagcggctggngagtctggga

SEQ ID NO: 254696 - DNA, 459 bp, Glycine max
  unsure (1)..(459): unsure at all n locations
agcttcatgatgatgaatcaagttgattcaagttgttntgatgataacaaagatgatgacaaaaagcccaagagaatgatttcaagattgagtcaacgagtttcaagaatcaagagaagtttgatttcaagattcaaaagaagatgaattcaagattcaagagaagaaatcaagaagacttcacaagggaagtattgaaaagatttttcaaaaaataaacatagcacaattttgtttttcaaaatagtttttctcaaaattttctaagttaccagagtttttactctctgataatcgattaccagcggcgaagtttaatttcaaaagttttcaactgaatttgcaacgttccaattgatttcaaaatgatgtaatcgattacaagatattggtaatcgattaccagtgtgtctaaacgttgaaattcaaaatcaattgtgaagagtcatatcctttcat

SEQ ID NO: 254697 - DNA, 360 bp, Glycine max
  unsure (1)..(360): unsure at all n locations
tagacaatagggcatacaagttataggaacctagatggtaaacaattccaagaacatggaatgatacccatctaaatntctacttcagttaatcgactacaagacctggtgttgtactttttttcctgctcttttgtcccaaagagaaaaatcanggttttggcttaagagggtttaacgaggcacacctacggaatgaaagggaatttgtactcaattggttacattgaataaaagttctatctccctttagttntataattntcttgtgtcaaccttacaaaggcttgtcaaacctaaggtctgcccttagtgagcctcgacaaaacccaggacagacacgtcactggtcgattctct

SEQ ID NO: 254698 - DNA, 432 bp, Glycine max
  unsure (1)..(432): unsure at all n locations
agctttcgttntcaattacgagcgactcgatattctacgggactcaatcggacatccgagtgaaaagttattgtcgtttgaatttactcagagcttccgttttaaattacgagcgtctcgatatcctacgggacacaatcggacattcgagtcaaaagttattgtcgtttgaatttgcttagagctttagttttcattttcgagcgtcttgatatattacagggctcgatcagacattcgagttaaaagttattgtcgttagatttttctcagagcttctgttttgaattacgagcgtctcgatatcctacgggacacaatcggacatccgagtcaaaagttattgtcgtttgaatntgcttagagcttcagttttcaattacgagcgtctcgatatattacgagactcaatcggacatccgagttaaaagt

SEQ ID NO: 254699 - DNA, 382 bp, Glycine max
taagctttacagcacatttagtaatgacccactaacctagaagagagatatcttactgctcttaacctacggaattaagataaacttaatggctgagtgtaactgaaattgtggcatccaatagtcaccctcaatagccaacaagtcagtcaccatttggtctcccttaatgctgatgcctatgctgtcacttggcccattattacaacttgaactaaacctaactaaagcccttctagttgattaacccaaaacatatttttggtcatcctactttacaaggattgtaccatctattatacagactacacactctagaattgaagcaaagtggtgtcatttagtcctcctccattagggccatgacacagctcacaaccat

SEQ ID NO: 254700 - DNA, 461 bp, Glycine max
  unsure (1)..(461): unsure at all n locations
agctngaaggcatgtaacccaccatcttctcatagtagaacaccagtaacgtgtctactatcattgttatcatctctttctctgtcattgggggcactacttaagctgccagatccctccaccgttgggcatattctttgaaagattcatgctctttattatacatgctctgtagctgcatcctatccggagccatatcagaattatactaatactgcctaatgaaggcaaacattaggtccttccaagaatggactcaggaaggttccaaattagtataccaagtgacgactaccttagtaagattttactggaagaaacgcatcaataatttttcatctttcgagtatgcccccattttctgatagtatatcttcaagtgattcttggggcaagtagtccctttgtacttatcgaaattcggcaccttgaacttcgaaggagatgaccacgttggtact

SEQ ID NO: 254701 - DNA, 312 bp, Glycine max
  unsure (1)..(312): unsure at all n locations
cggcgaaaggatcagagtgggtttgataagaggaatatttgatcgtcctgctntgatgaatggngagcctgtggaaaatggagagaataatgaggagggaggaacccatgctgtgactggcattcctacatggccaaatttcccaccagctcaacaatatcaatacttgaccaatattagcccttctcattacccaccaccctatcaaccaagaacactcaatcatccataaaggccacccctaaatcagctacaaagcttgcctgccgcacatacaataccaacacaatccttatcacaaaccagaacacc

SEQ ID NO: 254702 - DNA, 321 bp, Glycine max
  unsure (1)..(321): unsure at all n locations
agcttagtaagccacttgtactacccaggtgtcttgaaagactgcgtcaataaatgtacaaggctctatttaccactaaaaacatagaaatggtggcaagttgtgtattgtcgccattttcttattgtggaagcaatgtcttccaagaacattttgatgatgccaaagaatcaagagttaagcaaattccaaagattcaagaatcaagtttcaagaccaagattcaagaatcaagagaagacttaatcaagataagtactataaaatcttttcaaaacattgagtagcacacgaagttttcacanaataattaccaaagag

SEQ ID NO: 254703 - DNA, 428 bp, Glycine max
  unsure (1)..(428): unsure at all n locations
tactaagcattgagccaatatcctaactcaccatanacctggacccagggtgataatgtctattcttaccctcggaagcataaaaggaaagaaggacaatttccaatcaaagagatagcttatagaaaagaaaggaaattcccaaatcatagagcgggagaaagcaaaaagaaaagaatgaaaattcccaatcaaagaatgggagactataaaaagagagaatagaagacaaggatgaagaagaaggaacgaaagttcctgatcaaagaaacagaagacatgtgcagaaaggtcttttgaccagacaatatctgaacaatacagaattgtcaccaaatgaacaaaaggaaggaaaggaaaccatgacctaaagtggtcttctctcttagaataccaaccaaaaatctgtgcgtcagtgacttgttcgc

SEQ ID NO: 254704 - DNA, 440 bp, Glycine max
gagcttgtgcctcttctcgtgtggaatatgaatgttgcatatttatccaaagacccttaagtgctttgctgatggcttcttcccgttccaagcttcaaatggagtgttgtattttacagacttaactggacatacagatgagtatgtaaacagcatagtacaccgcttcagcccagaaagtgctaaggagtacctgtttcttgagcatcgatctaaccatctccataactgagcgaagctttgtatcggacactccatgttgttgaggagaagatgcgactgtcaaatggatcttaatgcacttcatcctcacaaaatctgtcaaactcacgagaggagtactctctgccgcgatcactcattagtacttggagtccgtttgcacttttgagtacaagaagggcctcgaacttattgaatactccaaagacttttgattt

SEQ ID NO: 254705 - DNA, 219 bp, Glycine max
agcctcacaagatatgcactctatctctctagtgtcgggactactgcctactctcagagctcccatggagacagagggcgcatagactaggcgggactctcaaattgacaagcacatcgcaagcacatgctcatgatgatgaaaaagagcttctatgttggaatggggccaacgacacggtacatgaaagtatgggatgggagctaatacctaaagaaa

SEQ ID NO: 254706 - DNA, 421 bp, Glycine max
  unsure (1)..(421): unsure at all n locations
agctngatcttttagttnttatctttaatctctaatccctgaacgaactcttctagtttgtaattcgaactttaattatcttttaattcgttcctaaagatagatcatcttatctgctgctaactgcacaataatccgttaaagatataacagatttatgtgtccagtattttcgggccagatgtcctggacatcgtatccgacatcgtggatcctgcagcttcacttcttttatcttgccttgtgcattgtgcagcaactccagtattttcgggcaagatgtcctggacattgtatccgacatcgtggatcctgcattgtgcattgtacagcaactccagtgttntcgggcaggatgtcctggacattgtatccgacatcgtgaatcctgcagcttcaattcttcatttgacatttcatc

SEQ ID NO: 254707 - DNA, 478 bp, Glycine max
  unsure (1)..(478): unsure at all n locations
tgctattacggacactatgaaactaagcttacatggagctacattagtaagtgtcgaggtcacattgtcatgcacaggtaactcccccccatggtgatcaccctgagtcttaagggagttccaaaaccgagtgacatacccncaagtacaagtatttccccttatgagaaacttcaagtacttactcgcaaagtttatactatttccatgcaacatgaagtatgaaacatgggtaccatcaatgcacaaactgtggataattaaagattctaagtcatcccccttcatagatgcttaaaactctctaaccactctttcctccaccagggatatccatcatggtaactgaaccccccatgtacatacacaacatacatcatcacaatgacattntcaacatcaacaacatttcatctcaatgtcattatcaacatcaacatcatctcatctcaatgccattctcaacatcaatatcatc

SEQ ID NO: 254708 - DNA, 408 bp, Glycine max
agcttactggagagaacttcgttgagaagctctgtcgagaggacattcttgagaagctagagcttagcttcacacacccctgtcataactaagcgcacctactagagatgctcgattcagaacattcctagtgaagctcgagctcaacgactcatgcctctatagtagctaagctcacctccttgagatgagaagctagagcttcactgcacacccgatagaatggctaagctcagccgcaggactggacacatgaaccttaacaatgaggtccttatgtacaaagacgcctccgcatgcgccgacatgcagcgctagtaccctgtactactacaatggccataaggccggccttgacgaaggagacacctattctaatatttacgaagagatgcgggctcatactta

SEQ ID NO: 254709 - DNA, 272 bp, Glycine max
  unsure (1)..(272): unsure at all n locations
tgctatctcttctttgactcacgagtnggcggtacagacctcgactagtggatctgagctaacatataatgtgtgtccagattgagctgaggaagtttctggctaaataattaagactgagatgatgtgactgactttgagccatatagacgttattctcagaatggactggatatcctacaaccatgtcctgtttaactgttttgctaaacctatcgcgtatgacggttttagagtgagtaaagatatgatgttcatcgctaactaccaag

SEQ ID NO: 254710 - DNA, 457 bp, Glycine max
  unsure (1)..(457): unsure at all n locations
agcttggtacctaacattnttcttcctagntntgtgtcttcggcttctccttcaatgttaaaaagttttagaagtaaaggacaacttatttgctaaattttagttgttttaacttttttaaaaaaaataaggagagaagagagaaacaaaagagatctaggagagtgaaatgaaggaaaaagagaaaagaaaagttattatttaaattatttaatctttgtccagtttaacttcaatattaactgagaatttttcttatttttttaattgatttttactgaactttaagaagaaaaaaaacaagaaaggaatggaatagcattttcagcagaagtaattntttcaaaaacaaaataaaatatgatactattaattatcatcgatagcatgaattaactaacagaagaatattcaagctaaatagtagttctcgagcgtatgtttctttttacctata

SEQ ID NO: 254711 - DNA, 323 bp, Glycine max
  unsure (1)..(323): unsure at all n locations
tcatcgtccctacgcatcgtaggcatatcaaatnttaatttcactggtgcaagttcacatnttcttaacacagatccttgtccaaagtagacaaatgatttttgaagtgttaacatctggatacattttaatttcaacactaaaatatattcataaaatgatcaaaagaattgcattttatgaaaatatcttgagatctcactagagaattaaatgttccaattaacataggtataaaaaaaaaatcatgatttgagataggagtatagtagtattttaattttaaatgtnccaattactcctttagtggccactcaatcatg

SEQ ID NO: 254712 - DNA, 427 bp, Glycine max
agcttgtccatccacgatgtctccaatagaaaggttcactcctaaccatttgctcacacgaacatgaaattggacatcaccataatcaaatccatgtgtcccacactcaaagataagcttacaaaataattataattaaaacaatttaagaaacatcaattaactatgacataaactctatcatctttagatcatggtatttgaaagtaaataaaaccaataacatccagctcacataagccaaacatctcatattcaactatcatgaaacaattcaagaatcaacatcatgcatcaactatcaagcattatcaacatgagttcatcaatcatcatcaacatgaacaccaaacatcaacaccaacgacagactctactccatggatatttacaccacatgatgaattaaccaaagtacatcccttaa

SEQ ID NO: 254713 - DNA, 463 bp, Glycine max
  unsure (1)..(463): unsure at all n locations
tattacggacctataaaactcagcttcaggtcctatatganaatgctgaatatagaggataacagggcacccaatatcctaattccacatgggcaacaaatagaaagccacaggtgtatttatttgattgggcaacaaggttaacaccaaagattgtcaaccttcaaataaactaatggcataacaaaatcaatacatgatatcttgcaccctataaaaacacaaccaattgcacaatgtgcttaacacatgataatgcctcttatccacatgataaaagttcctgtccagcctctgctattctgagaaaaatgaagagtgctacataaggctaaaaaattctatatttgtttatttttaagtacaacggatctttatacattagtgctgaatgggcagagtaaaataagagaggacacaggagggaaatatcttanataaatataagaaaaaaattacccta

SEQ ID NO: 254714 - DNA, 467 bp, Glycine max
  unsure (1)..(467): unsure at all n locations
gtcacctgcggcatgcagctatgttaacttgtgggcacaatttaaacatcagttgtcatcaattgacaacacaggaacataatatatcaacaccatgctgccccataatataatatatactgtcccaagtataaaccttgagggtacattacaataattatgaaaatactgttcatttggaatgcaagctgacctagtatatttgtacaaataacaacaaccagtttggactacaaatttccagtttaacttgtataacaattataacatgagtacttgtgtgaaaagtaacaccaaatctaatcatgtccttatagggcctgtttataattaagataatttattggatatacttgtggcacttattggatttacttttggcacttatgatgaaagccattacanaacctaccttccacaaattctgatgtcataattacttcaacaagaatgaagtatctacatat

SEQ ID NO: 254715 - DNA, 356 bp, Glycine max
  unsure (1)..(356): unsure at all n locations
tctaggagatanaanactgaagacanagagcaagtggttgaccaacctgtacgttgctccagttgaagagactattgtcgaacagcctgaaactatgaaagttaatcctcctcatcctgatgttaatttgataaaagtcgaacaagaaaatgtgggtttcgacaatgcccaatcaatcgaaccaaatgtcactgtgccttcgacaaaagacaataaatctccaatttctaaagctaaaggagaaaaagaaagttctcataatgataggtcagcaaaaccttttgaagaaagcaacatgttcgaattagatgatgagggatacacaantttgcatagatggaaaaagtatgaaactc

SEQ ID NO: 254716 - DNA, 450 bp, Glycine max
agcttagcagccaactcctgaggatcaggcctcatgagtgcaaatctggaataagtacacaagttctccccctcctccaaaattactggggtcttcaaaaatgtgtttaaagtatcctcatcaaacttcactaagtgacctctcaccttcacctgcttaggtgatttatcctcagggtcatagaggttggcataaaattccttcacaatagcaatgtctatgatactgtcagcaaaatcagtcagcttctcatcccaatgtcttctttcaagttcctccttgaactcgtcgaactcagtgtaataaactaccacatttctctttggtagtagctattgaggtaccacgatgtctgtatacctctccctagcctcttagaatgtgaacctggatctatcaaatctggcttgggtaggtatagagggtgccttccttttcttagatgccatc

SEQ ID NO: 254717 - DNA, 376 bp, Glycine max
tatgacttgactactgtcaccagttatggcattaggcttgtctagctacctagaagggggatatggttccactttcaagctttcaacatagcattgtcgggcctgcttttgatctaccttgacagtcatgatctctcccatcaaggttgggaatttcatcttgagatgtggtgtcgagacaatggcttcaagtttgtttagcgttttgttgccaatcaaagcaaagtagaaggtatctacatctatgattaaatacatgacggtgaagctccttgagagttggccttggccgaaagtggtcatagggtcgatgtagcctttggtctctactctttctctggaaaagccaaggagtggtcgagagtatggttggact

SEQ ID NO: 254718 - DNA, 381 bp, Glycine max
  unsure (1)..(381): unsure at all n locations
agcttgtaagaaattcacacgacaataactctattcttagatgtctgatctgtcggatcgagtggcctcagaataattaagaaggggggggtgaattaattattcctatacctttactaattaaaaaaattactcttttaaggctattactaaattgtctatagaatgaggagtataagataaacttaacagaaagtgaaagcggaaattaaatncaccgcgcgacgtacatgagtcgggaataaggaaacaaactctcatgagtttgtatacatgttcgacaacaacccgtgcctacctgcagtatccacacgacttgtagacctctagatttctttcacccttgtcataatcccttccacacacagatccacatgagat

SEQ ID NO: 254719 - DNA, 239 bp, Glycine max
tcaaattgagctgcaaaactatcatgacatgtagagaagaatcaggatttcaagtacaaaatgtcagaactttattttcaaacaatacccatttttgaaatattctatattcaagaaaacatgcgagtctacgtgccatgaattgacccaaatatagactgatatccgacaaactacaacattacaaataacaactaacaattacaaaccaacaactagcaaacaaagacactcccccc

SEQ ID NO: 254720 - DNA, 479 bp, Glycine max
  unsure (1)..(479): unsure at all n locations
tccttaagtcacctgcggcatgcaagcttctcatagtagccctccatgtcgttcccgaacactaatgcgagccccatcccgtgataatcacgcgcttctttgggtccttctgccgctgcgcggggacacctttggcgccaccgtggcggacacgaagaacacgcgcttcgcagaggtggtgcgtcgcttggcggcggcattgttggggccctaaagagggtccaagggagaaccgtggagggtgatgatcacgggaggacaggaggcgcggtagagagagaatgttctcgcggtggcattgttcgtcggagtctcgatggcatcggcattgttcgtcggagtctcgatggcgccgccacctacacatgaggttctcgcggtggtttgggggttggagatggggaggacangangcgcggtaaaaagagaatggaagggattttgtaattngtgattttagagagagaaataatctagct

SEQ ID NO: 254721 - DNA, 366 bp, Glycine max
  unsure (1)..(366): unsure at all n locations
ttcttgaatagggcatctattggtttacacatganagaaggtacatctcttaagggatcatctgatgnaattaaatttattttgatggaattaagagatatagatgttaagatagaggatgaagatgctgccatgattctgttagcctctctatcaccattgtatgaaagctttgtcaattctcttagtgttggtaaggaatgtgtcaccgtggaggaggtgaaatctagcttatactcaagggaacttcgatctaaagcacctggaaattctaaagaatcaaatggatctggccttgttgcctctaactctaacaagaacatcaagaanaaggtgtttaaaggaaagaagaagactcatgtcaat

SEQ ID NO: 254722 - DNA, 460 bp, Glycine max
  unsure (1)..(460): unsure at all n locations
agctntgtgtaatcgattaccattgattggtaatcgattaccagtgatagtttctgaacaaatcaaaagatgtaactcttcaaatagtttttgactttttcaaattggttttaaggttttctaaaagtcataactcttctaatggttctcttgaccagacatgaagagtctataaaagcaaggctttgttttgcatttcatttatcttgaacaacctttacaatacaatcctttacaacctttgaatctctttgaacttcttcttcttcttcttccttttgccaaaagctttccaaagttttctggtttttccaaaccttgaaaacttgtgctattcatctttttcattcccttctctctttgccaaaaagaatttgccaaggactaaccgcctgaattctttttgtgtctttcttctcccttttccaaaagaacaaaggactaaccgcctgaattcttt

SEQ ID NO: 254723 - DNA, 431 bp, Glycine max
  unsure (1)..(431): unsure at all n locations
gacacttgaaactaagctataagcntttgatngattactaactccaagaaagatgcanttttctcccttatcatctagctntgtcctcctttgaattggaatgtgggcataggcgacacacccaanaattctgaaatgacctactactggtctttgtccactccatgcttcctctggtgtcatattttgaacagcaagtgtgagtcttttattcaaaatatgaacgctccaatttacagcttcaggccagaaagttttggaaacactactccttgtcaaaaggcaacacaccatgttcataattgtgcaactcttcctctcacaaacaccattttgttgaggtgtataggcagctgtaagtttcctcttgattccatgggcctcacaaaaatttacaaattcatgtgagttgtattctccaccacgatctt

SEQ ID NO: 254724 - DNA, 465 bp, Glycine max
agcttgaatcccctccctaggatacaaagcttagcagccaactcctgaggatcaggcctcaagagtgcaaatcaggaataagtacacaaattctccccctcttccagcactacaggtgcctttaagaatgtgttcaaggtatcttcatcaaacttcactaagtgacctctcaccctcacctgcttaggtgatttatccttggggccatagaggtgggcataaaattcctttacaatagcaatgtctatgctactgtcagaaaaattagttagcttctcatcccaatgtctcctctcgagttcctccttgaactcgtgaaactatgtgtaataaactaccacattcctctctgatagtagcttgcaaggcaccacaatgtcagtgtatctctcccaagcctcttgggatgtgaacctggatctttcaaatatggcctgggtaggtgtagaaagagctttccttttc

SEQ ID NO: 254725 - DNA, 340 bp, Glycine max
  unsure (1)..(340): unsure at all n locations
tccatcagagagtgcagaggcaaggtttctgtaatctgganaatgtaagtgtaactgctgttacactcacttaagcaatttcgatactttcgcttagcggaccgttgcgctaagtgagcaagagagacgtttggtttctcaaccaggctcacttagcgaacacgtgcgcttagccgatgtttcaaattcgagaatttttttttttaaaacagaaactcggcttagcgtgagagtaagtccgcttaagcgaggtctacagattagaaaagctgcaactctcgctaagcctggctctagccagcttagctaaaatgatgcatcttaagtacataggagtatg

SEQ ID NO: 254726 - DNA, 454 bp, Glycine max
agcttatgtttggtcgagtacaaaattgcttccatttgttttcgttccagatcatttctaggacattgtgtgagactatatttgtctcctttctaaattggaacgattgatgttgagcacttttccatcctaaatatctctagtactttattgatatatactttctgagataagcctaacaatccttgtgatctattttagaatatttctatccctatcacatagcttgcctcacccatatcctttatttctatgttactagaaagaaacttattagtctcatgaagaagaccaagatcattagttgcaagcaatatatcatcaacatacaggattagaaagataaccttactcctactgaccttaagatatatacaccgatcaacagtatgttccttatatccaaaggaaacaatggtatcattaaacttcacataccattggcgggaagctt

SEQ ID NO: 254727 - DNA, 419 bp, Glycine max
  unsure (1)..(419): unsure at all n locations
ngatgatgttattaaaggctttgcacctacctctggcagtaacagtgacaaagatgatcataagtacgtttacaacttgacatcaaattntacttgagattttatagtttctgatacttggtttacttggacataacagtggggagcaattgatggaagatgaatctcaaattgctctaaggagaaggaagaaacttgttcttgatggtgatttggaaagacaaatcatagatctccatgagaagtaggtttgaccagatcaaacttttgtctgaactttggagcatgatttaaattagagccttgccaaacaanaattcagtcttttttttttntacatcattggtacagacattcttaaaaggagtgagcaagatagatcaattcatagcttttcaatattntggtgaatttcatta

SEQ ID NO: 254728 - DNA, 414 bp, Glycine max
caagcttcatcatcttcactggcaaataccattcccattatgtgttcttctatcaattcaataaagctattgaatatagaagacgtcgagtcaatatctgagtcatcaaatttaatctcaatatcatcatgctcttcggtatcactagatttactaccctcataatattctatgttgataaagctaaaatcattgtcatcatctaaaatctcaaactaatcctgctcaacattctcattacacttgtccatttgaaaattaatcaaataatattatataattttcaaaatccaaaatcaaaacctcataccttgcaaactaagtataacaaagcaacacataaaagatcacatgtaacaagtagaagggacgaaatatcaatatcaggaataatatattaaccctctgaccaca

SEQ ID NO: 254729 - DNA, 530 bp, Glycine max
  unsure (1)..(530): unsure at all n locations
cggattgggcctttgattcccctgacactatcgatactcaagcnnttctattcgctnggtacggctagaaatgattcctttctagatattagtgaaatgaatgtgctgtatatgaataaacaagactttacttatttgctataaattatgaattggtttaatagataaaaaatgatgagattgttcttaaaatctatctaataaaggtatgccacaatatcttttttttttgtctaactaacagaaagaatgatgcatatatatatatatatatatatatatatatatatatatatatatatatatatacatcgcgctataaagcgatatggctggttttcctgaccattacatatcaaataaagcattgtctagtacacaatctctaagttaactcatgaaaatatgaaacaggttgtgtttgaatcctataccactgctttggttcacagttgatatgcaggaagcaatctcattgtggaaatgtgcactactagcctatcagaactcatatgttcatgttgtcccaa

SEQ ID NO: 254730 - DNA, 453 bp, Glycine max
  unsure (1)..(453): unsure at all n locations
agctttaggagaaaccattaanactatatgttttcctaaacaaaaatcaattgaggaagcttcgccaagtatccccattgaaaaacctttattcaaacctttcaaagttagtgagaaggctaaacgaaaaattagggaacttagaaaaactaaatccttaattgaaggcgtaggtgacaatcatagtgaattactaaacaagattggtagtttacttaaggtcattccagatactccccaagcctcgaaaaatacttccaaaatggtaataagaagtacctccaaattaattaatgttattaatgaagatagtgaccaaaactcagataacacaactgagatagaatcagtgtcagaaaagaatataaatccaattaattccaaacactggataacaccctccaaattatattatcaacgtccgactgcccttgaccttctattagaagagag

SEQ ID NO: 254731 - DNA, 458 bp, Glycine max
  unsure (1)..(458): unsure at all n locations
tgctattacggaccttagatactcagctttctttctcatcaatctgtctactgactaacaattctaattgcaagttcacattnntgttctttctttgtctaacatacacacttgctcaaactcatgaaaagaaacacanactccatcagaatcatgcactcaactcaaaataaaagcatacaaccatntttcacaaaaagataaaagtgttttactgccatgtcatagaaaacaagtcaaactgttcaaaatgcttaaggatgagcaaactaactgcccaaaaataaaactagcaaaaaggaattattgtactaaaaccatgaccataataataatagtctaagaggaaacaacagaagaacacaaaatcatcaggaatatcaacattcttggtagtatgagccatagcttcctcaacagtccatccagtcagaaaagtcagaaccatagtctatgat

SEQ ID NO: 254732 - DNA, 448 bp, Glycine max
  unsure (1)..(448): unsure at all n locations
agctnggttcaagaacaaattgtcccaaatttgggggagttatatgtcaaaacaaatttgtcccaaatttgggggagacactgggtaagaaataaaatggtcaaaatagagcagcatatacacactgttttctgtatatatatatcataaaaaaaactggaagtacaaataaaagtgtgtgtgctgcaaatcaatgaaatgaaagctaagttcctaaaaagaggcaagtattggggtgggaatgaatgaaaagtaaaggtttatctatggatgatggctctcctagaatctaagctttttgaatcctagaaaaacaatgatttgttggcagcccaacctcattacaagcctagaaaatccttcggattcattttgtgtgtctatttctgtatgggatgagatgaaatgcaaaggttacgacttgtgttagttgtttatgatggaatga

SEQ ID NO: 254733 - DNA, 407 bp, Glycine max
  unsure (1)..(407): unsure at all n locations
gctattaggacctatgaaactaagcttacaacctacatttaaaagaaaaatatattaggttcanaataatcgtgtcaaaactacaaaccagatcaggacatggcaaatacatttatatatacatatagttgaacattntgacaacattaagtgatatgacaaacaatcatgagtttcagcaggttcttagttgaaccatgagttttttgacaatattttccttgtactaaggattattttgattaggctatatttttattttgcaaacacaagttacatcaaggacaggtaatgagaagtgagttgtaattgacattntcccaatcaagagcgtgccttaattcatttagagttctcttatcaggttgcgtgaatatgaagttgatgttgatcgttctaaaagacgt

SEQ ID NO: 254734 - DNA, 411 bp, Glycine max
  unsure (1)..(411): unsure at all n locations
acctctcatttacaataagaggttttggaagctaaattcagactacacagtggtagggatgtctcctccacctctaataacctaaagatcactctctaatntagaatcctctggaaagatgatgtttttggtgctcccttgccctgttatgtcgctctattgcataggctctcaagcatatccctactatatcccaactttagcttttagggctttctatcctcgaacgctcacttagcaccattttcgtgcttagcgcaagtaaatgatctttcattgaacgagctgggtgcgcttatcgcgagagaagacaaacgactcgctcagcacgttgatgacccattgggcgcgtagatgcttgacaaattctcctccagattctcccaactcgcttagcgggctgagtgcctc

SEQ ID NO: 254735 - DNA, 378 bp, Glycine max
  unsure (1)..(378): unsure at all n locations
tgtgcattcaatatcctaatgagggtgttccatatgttctcaatactggactaatacatttgcttcccaagtttcatggtcttgcaggtgaagatcctcacaagcatcttaaggagttccatattgtttgatccaccttgaagccccctaatgtccaagaagatcatatctttctaaaggcttttcctcattctctggagggagtggcaaaagattggttgtactaccttgctcccaggtccatctgcagctcggatgaacttaagagagtgttcttggagaaattcttccctgcatctaggaccactgccatcagataagacatttcangcatcaggaaacttactggagagagcttgtatgtgtacttggaaagat

SEQ ID NO: 254736 - DNA, 451 bp, Glycine max
  unsure (1)..(451): unsure at all n locations
agcttatctatccagtcaagttcagctccctttctagaatattatgtgataggttgagatgcacgagcttgtggcagcgcctcaagtcctcaggaatctcatcagagagcgtgttctgagagagatcaagatgtgtgagttcagtgagctgcgagaaattcttaaatatctcaccagtgatgtcactattagaaaggtctatgcccaccaccctcttcgtagcactgcatgaaattcctttccattcacaaggattggagctattggtgttccaatatatgtaccctcctctgtctgcaagaattttgctggccaggtacaatttcagcttcagcagaacctctttgtctttgtccaaagattcccctacaacagctttacctgccaaaaccaaacacaaaagcaaaaaanaaaaaatcctcggtaaacacaaagacacaagtttataact

SEQ ID NO: 254737 - DNA, 428 bp, Glycine max
  unsure (1)..(428): unsure at all n locations
cttggttatattntatttatactcttgtagaaggtataaataaaaagtaaccaatggctgctggttggttgcaggtatctgtttgtatatctctntataaatggatttgaggtaactcttgtatttttttttattagaaattaattctacttgtcatacataattatttaattaaataaattatttttataatgtgaacataacataatcttatatcagntgtatttattataaatataatttctttgttgataaaaaatgaaaactagaatttaatatcaagttatttttgttagcatttgacttatagtgagttaggttctccttttgtgatttaagatggaattcaataatagaaaaggtgaagaaaataaaataaaaacagaactaagttgaactcaatctcctcatgatagtctgctctaact

SEQ ID NO: 254738 - DNA, 445 bp, Glycine max
  unsure (1)..(445): unsure at all n locations
agcttgaagcttggagaacagcttgaaaatgtattgtcttttacatgccctactcccttgagtggaatttgtattggctgttttattaaatgttgcatcttagcccatatcatatcttttgtgcatatgcatcattgtgaataagggggaagaaaatttttaagttagaatagtttcttcagaaggcaaaactctttgttttaatctattacagccttattgtaagtgattacaaaagttgtctaaagcttgtagagttatgtctcgtatcgatttatttacaaaagntgtcatttacacaattgtttctagacaatgattggtttattcacgagtctctactttaatcgattaccatgtgatataatcgattacttctcttctataagtgtgtcaaagtgaacaataaaactttaatcgattactttgagtatctaatgaatta

SEQ ID NO: 254739 - DNA, 353 bp, Glycine max
tcttagtttcagatgatgcagctgagtttgtagctacctcatgcactcctctaatgactatagcatcatttctggcgctaaactgctgggagttggaagccatcttctcaattaaatttctggcttcagcaggagtcatgtctccaagggctccaccactggcagcatctatcatacttctctccatattactaagtccttcataaaaatattggagaagcagctgctccaaaatctgatggtgagggcaactagcacatagttttttaaatctctcctagtattcatacaggctctcttcactgagttgtctaatacctgagatatccttcctgatggctgaggtcctggaa

SEQ ID NO: 254740 - DNA, 452 bp, Glycine max
agctcgaaattgaataatggaagctctcgagaaatacaaatggtcataacttttcactcggattgccgattcaggtgcataacatatcgagacgctcaaaattgaacaacagaagctctcgagaaattcaaatggtcataagttttcacatggatatccgattctgtgttataatatatcgagacggtcgaaattgaacaacgactcgagaaattcaaatggtcataacttttcactccgatgttcgattcaggcgcataacatatcgagacactcggaattgaacaatggaagctctcgagaaatacaaatggtcataacttttcactcggatggccgattcaggcgcatcacatatcgagacgctcaaaattgaacaaccggagctctcgagaaattcaaatggtcataacttttaactcagatgtccgactcggggatgaaacatatcg

SEQ ID NO: 254741 - DNA, 353 bp, Glycine max
tccgttgttcaatttcgaggatctcgatatattatgtacccgaatcgtacatccatgtgaaaagttatgaatatttgaatttctcgagagttgtcgttgttcaattctgagagtctcgatatattatgtgcctgaatcggacatccgagtgaaaagttatgaccattggaatttctcgagagcgtcagttgttcaatttcgagcgtctcaatatgttgtgcgcctgaatcggacatccgagtgaaaagttatgaccatttgaatttctcaaagagcttccattgttcaatttcgagcgtctctatatattatatcaccgaatccgacagccgagttataaattatgacccatt

SEQ ID NO: 254742 - DNA, 465 bp, Glycine max
agcttgcaaatctgttttaaatcctgttggaccttgtggcctcaataatcttacgagggataggcttagaatacagaagaagcaacaacaatcaatttaacaatgttctttaaacatgcaagacacaattgattgcaacaaaataaataagataagggaagagaaaatgcaaacacaattttatactggttcggccacttcccgtgcctacatccagtactcaagcaacccacttgagatttccactatctttgtaaaatcctttacgaagtctgaaccacacagggacaacccatcccttgtgttcagatgctttacaacaagagactcacagtctcttaaccaatctcattgaataagaagaatggaagaagaattctctcttcaagagaagaatattacaatgaagatcatgtaagaatccttatagattttgcaagtgtttggtcaaggatttcttttgag

SEQ ID NO: 254743 - DNA, 414 bp, Glycine max
  unsure (1)..(414): unsure at all n locations
ggggaggatngatggngacccggtgttgagaganacgaggatatgggctacgtgggagtacgtgagctcagatggaggtgggcaacaggggatggtgggtttatgcgcgcatngtggatgtggaaaacttgttgtgcaccatcgcccgaccgccacctagtaccacatgtgatgggtaccccataatcctacaagctngagatgaggaagtgttgaagggtgaaacttcctgcttttattgttgaccacagagtggtacctggagatatgtcacggnggtcaggagaccttgnggacgtcaggtggggtgctattgcccaaaaccaagcttgaccaatcccgacccaacccgggcatagtcggtcagtgagaacctgtgatgtacctaaacaggcgaagctcttgcagtcaaca

SEQ ID NO: 254744 - DNA, 276 bp, Glycine max
agcttggataacatggctgccgccatcggtccatatgggccacatttgcccatgcctagctatcatgacatcacagttgcactcttgaacaacgaacccgaatatactgaaaacttgatgaaaggccataacgaccactgggtcaagtatggatgcactattatgtcccatgcatggactgatcgcaaacaaagatgcatcattaattgatcgaacaactctcaagctggtaccatgtttttgaagtctgttgatgcgctctgatattgtgaatac

SEQ ID NO: 254745 - DNA, 329 bp, Glycine max
tgttcgcacatcgttcgcgtgtatgacatccactcgacagggtgtgaagaaatgagaccttaatccgttcgcaagtggcgacgagtcggcgctactgaatggcttatgacatgctgaggaattatgcccatgactattcatgctgacatatgatagcaccttgtggctacctgagcctgatctactaccaatctaattgatggtgggatgcaaatgagcacatcttaaaagcttactccccacaatggtggcctcttgggaatgaagcggctattcctccttctaatgacgcatggacacttatccctgacccaactacaattcgtgcg

SEQ ID NO: 254746 - DNA, 464 bp, Glycine max
agcttgaaggtgtgtagcccaccatcttttcatagtagaacactggtaatgtgtctactatcattgttatcatttctttctccgtcactgagggaaccacttgggctaccagatccctccccctttgggcgtattctttgaaagatccgtgcccccctctttgcacatgtttttgtagttgtatcctatccggagccatatcagaattgtactgacactgcctagtgaaggcaactattaggtccttccaagaatggactcaggaatgttccaagttagcgtaccaggtaacagctaccccagtaagagtttcttggaagaaatgtattagcagttcctcatcgtttgtgtatgcccccatcttccgacaatacatctttagatggttcttggggcaagtagtccccttgtacttgtcaaagtccggcaccttgaacttgggaggggtgatgatattgggtact

SEQ ID NO: 254747 - DNA, 365 bp, Glycine max
  unsure (1)..(365): unsure at all n locations
ntgttgttatattgaatacctangtctngttgggaactcgtggttaatccaagggacctttttggtttctgctgcaaggattgcggaagttgtggtgacctgaggtatgttttgtgtcgtggtcattggtactcacaggctctcatttcaattgaggtaagcggtgctcactctgcaggtctttgaatgcttaatgtctattgtaaaaatagggtagcatagcgctctagtgtattgtagtgcgctttattttgattaaggtagcgccactgtatgttcattatgtttcatgtgcattgatacaaactgcattgtatggaanaatagttaactngtatgaactttcttctttttctgtatgtatc

SEQ ID NO: 254748 - DNA, 445 bp, Glycine max
  unsure (1)..(445): unsure at all n locations
agctntaacgtactaatgatacaacanattggctgtggggacaatcattaactggcacttatcatggacagaatggtggtattggtttgtggaacaggttgtgattaatggagcaaccaaggaaatgggaaaggcagcagtagtggcagtgactaaggcatgtagaatggaggtagcacgagcggtggatacttgtcatattagggaaaacattggaaagattttctattttttttatttttcctttggtgtcattatccaaaccaacttatttgttatgttctccttaatctatttttagattggttttaattcttttagatatgtggcatggaagagatccttcaaatacccatcataaatggccttactatgattntgggctccatatctcaagtaacaaagatggtatttttnttctcttaatctggtttcttgaataaca

SEQ ID NO: 254749 - DNA, 102 bp, Glycine max
tgctgtgttgcttctaataagtcgagggatactctctgatcctactcatgcaattctaactggacattaccccaaactactatacttttcgtcgaggacatg

SEQ ID NO: 254750 - DNA, 456 bp, Glycine max
  unsure (1)..(456): unsure at all n locations
agcttattaatggctnggcagcaaagtctgatcattcacccataatcatccacctccatgggactaatcgtagaagcttcaaaagacaatttagatttgagaattcttggcttcttgagctagacatggtcaatattgttgatcttgcatgggaaccacaacaaacgagtgactttattcaaataagatttcaataccaggaccaaattgatatatgtaagcatgaattggagtagagaaagaattcaaatgatgatgttaatggtgcggcctatttggaaacaaacaacaagttttgtactcttattgcgctagaagaagcttattggagatagaggtccaaggtgttcttgtgacaccctctacctcgacatacatataaataagaaaaacatatcanaatgtgaaatttaattaaatcaattntattcagatcatgtaaacaaattcacgtgg

SEQ ID NO: 254751 - DNA, 539 bp, Glycine max
  unsure (1)..(539): unsure at all n locations
ttgacccatggatttgatacgcttctattacgtgacactatagtaatactcaagcttagtgcataattgatagaagggtcacagagatgaagatgcgcgatatagggtacaccgagatgaagaggcgcgagcaaaatagatcgcgtctgatataatttaaaatgtaagttcaacattggttttcaatacaaaaccgatgttaaaaaaataatgttaaccgtaacatcggttntcaatacgaaaccgatattaactaatcatacgttaacatcggttttcagaaaaccgatgttaactaacttaggttaacattggttgtgttcaaactcgttgntaaacgaagagacgtnnaannnnntatnnngattnnacanntttgcatatatggaaagttatgatacttatacttaagatgcctccagacccaatgccaacaactctctcatgttatgaaatgatgaagctgggatcaattcgcacacctttctttggttatcagacctaatattctttctcctccaatgttgaaacaatacatt

SEQ ID NO: 254752 - DNA, 408 bp, Glycine max
ataatgtaacgcagtcggttattagagaacacatttatgcataagacaactagtcaacatttcacactgatcttgtgatgagcaataaagagctactagtacaatgataattaattatgaatttgataaaactactccattctcacaaatagctatccccgtcatatatgtttgtcacttatgtaaacagggaccttgatagccatgaccaataaggtcacgcgcattataatataataaccataaattcacaaagaatttagatattattcggttaattatgagccacactacaataagaaatactgcgaagagggactgattgccatacaatatctaggtagtagtaaaccaaccaataggcacctctctcaatattgatggtgatatgctccaactttgcatgtg

SEQ ID NO: 254753 - DNA, 455 bp, Glycine max
  unsure (1)..(455): unsure at all n locations
tatatgcaatgtggtaccatgtcagtgaanaacaacaccagggcgtntagaagtacataacaagacacgccacataatgggtatatcaggtcacntttactaagtaaaatataaggtgaccagtcagagtcactctantttgcgagaatactcncaccatatggagatcaacataggcttatnggagcactcanaccgagtgtatntaccccaaggcctagattctgaagaatccgttagggtctcacctttnttattcaagttcaacccctaaaacaactnttgcacacagacactactcatgaattatacaatacccacgacctcacactngttttcaaatatgtntaacacattgtgctatanatttacacattnggttcctaacttgaaaccttacactntttctttaacatctcatgcattgcgctacaatntaatacctcatgttccta

SEQ ID NO: 254754 - DNA, 414 bp, Glycine max
agcttctttgagaaaacttccttgagaagctagagcttagctacacacacccatctaaaaactaagctcacctccttgagaagcttccttgagaagctagagcttaactacacacacccatctaaaaactaagctcacctccttgacaaaatacatgaaaatacaaaaaatccttactacaaagactactcaaaataccctaaaatacaaggctaaaaccctatattactagaatggccaaaatacaaggcccaaaagaaggaaaaacctattctagtatttaaaaaagaatagtggatccaaccttgacccatggactcaaaaatctaccctaaggttcatgaaaaccctagggccttctttagtagctgtagcccaagtctcttggagtcttctatacaatacccttggggg

SEQ ID NO: 254755 - DNA, 394 bp, Glycine max
  unsure (1)..(394): unsure at all n locations
tcctaacananactntcatgcangtggaccttcttctagtaattctgacttactacagccgcctgtccctcttccattcccacctagagcaattccaaacaaaaaaaatggaagaagcggaaaaggagatcttggagaccttcagaanagtagaggtgaacatacctctgctagatgccatcaagcagattccaagatatgccaagtttctaaaggagttgtgcacccacaaaaggaagttcaagggcaatgaaaggattagcatgggcagaaacgtgtcagcattgataggtaaatntgttcctcacattcctgagaaatgtaaggacccaggtactttctgtataccttgcattatngggaaccagtaaattgataatgccatgctagatct

SEQ ID NO: 254756 - DNA, 456 bp, Glycine max
agcttggagtttccaagtgccaattcgtcttcttctttagtccagtcttcttctggcttcaattcttcagtgggctttccttctgtgtccagcatcttgggatgttcccagcctttgatgacagctttccaggttctgctatccagtgatttgaggaaggccaccattcttgctttccaatattcatagctgcttccatcgagaattggtggtatgttcactggtccgccttctttctccatgttcatcagaatttatctccctagatctcactctgtgatttcgagtgttggctctgataccaattgaaattctgataccaggggacagatgtcgtacaggatgtcacgacatcacgcttcagaacatgcagattatatgtgtccgtatgaacagattaaacaagtaaataacacaagagaattgtttacccagttcggtgctacctcacctaca

SEQ ID NO: 254757 - DNA, 409 bp, Glycine max
  unsure (1)..(409): unsure at all n locations
tggaagtactaagtatttattacctatacttaacagaaaatactcataacactacgaaataaccatgaattacgagaagttgatacaatttatacaagttctatacacaaaagttagtcgtttttatcgactaacaattaccacacatgataatcgattacccaaacaccacaaaagaaacaaatactcaaactaaaatgaattaattgattaccccatttgataatcgattaactagtttttggaaatgcagatcacatgggattttgacgaattaatcgactacccgattgtataattaattagatatattctaaactgtcgatntataaatatctntgtgtgcttctaaagaattgatcgcattagtctgaagatgaagtgatcaaaaaatattcatctacatcat

SEQ ID NO: 254758 - DNA, 247 bp, Glycine max
  unsure (1)..(247): unsure at all n locations
agctntatgactatgcaagcacacggtttgatcattttatatatttgtcaaaatcattcgtacctttgattgtcttttatatcatgcaattggagtaattatcattatgtatgtgtatccaccaaggtttgtcatggggtcgcgcctcaaattcttatatagttgtggagaaagccttagaaacacaaggaaaattacgagactgaaaaaaaattgaggtgtataagtatgacaaataatagtgttt

SEQ ID NO: 254759 - DNA, 354 bp, Glycine max
  unsure (1)..(354): unsure at all n locations
gctattacggacctatgaatctaagcttaacaatccaatatgttatgtcctaccaagtgactgctggctccaatacaaatcanaagatctattgttggattgctcactgactagatcttaatcgtctaacacacaagtatgcaagctaaacacttaggcatttctctgaagatatttaatgtgttttgaaagatatgatctttacaagagaataaactagaagtgttttacataaagaatttgaatgtcagtgtaagatggtagcccatttctttaaagctgtagggatgtgtagggcttcatctttaagtgctcgtctctaaatggataaaattcttcacttgagctctgcgt

SEQ ID NO: 254760 - DNA, 451 bp, Glycine max
  unsure (1)..(451): unsure at all n locations
agcttgatgtcattcanaacacactatgtagacctatatgaagactaaacatgcattgtttatgtaattgtattcattatgcgatataatttgttgtaacccattactaaccaattaatattatcaagtactcgtttggttaagcaaggaaattgttggtccaacaaaaatcatttacgcgtgcagcatacatcattgtcataattgacaacacataatgacatgcatgcgtattacagtttgagtgcgacaacacattggctgacttgagtacacattctgaaattagcagtcgctcgacaacacattgttgactacacattggcgacaacacattggctgacttgactacacatttacgcgtgtctatttttttgtaaacaaagttaaacaatggctcggtcacaaccatctatatatatggcagactaggctactanatcacacatta

SEQ ID NO: 254761 - DNA, 453 bp, Glycine max
agcttataggagctagaataagtactcaaatgtgacttaggcctaggaacccaagcttttgatttcgaatgcaaaagagcatgaaagtgagggcatgttggtgaggattcccctttagaccaatgcttggtttgggctacatcatgatgatttcttggcgcttaaatggtgtgaaaatgttcttcaccatgtacatgtgtatatagaataggtagcaagaggcaaatgcctttcaaataaagcgtatatatgttgaataggtagccaagtgcttttgcaaatgtgcatctatgttaaatatggcacgaaaatgcttctcaaaataggaacatattacatgaaattgcctttcaaaaatgtgaatgggtagtacaaaaatttcctttccgatgaatgtgtaacataaaaattgcctttccaatgaatgtctatatgcgtgaatgcatgacatgg

SEQ ID NO: 254762 - DNA, 379 bp, Glycine max
  unsure (1)..(379): unsure at all n locations
nggtggtggtctcttcatgagcagaatctggaggctgtagaaggaagccaaaaacagctgaatgctgttgtgagtcaattccacactgtatttcaggatcacatcatacttcctccccagaggtctcaagtgcatcagattaagttgttctcagatcagaacccagtccatgtaaggccatatagatatccacatcaccaaaaagaagagattgaaagacaagtacaggagttactggaggcaggggtaattcgtcctagcatgagtgctttttcaagcccagttatcttggttaagaagaaggatgggagttggaggatgtgtgtggactatagagctcttaacaaggccaccataccagataagtaccctataccta

SEQ ID NO: 254763 - DNA, 401 bp, Glycine max
gctagcttctacaataagaacatacctacctaatgagtccctatgcatgtgaatcatgaagatgttggatgcatgggtgattttacaaaagaatatttcatcactcagcacattcatcataccacttatcatagggatttggtgcctaataatacctatgttggcaccaactaagcacaaggattgaagctcttgcaaaccaaactcttatccgacaactcctttacttgacgaataaactctataccatgaggtgtgacaatgctaactggtgtctctttacaaaggagaaaatgtggaggttgtctaagacgggatgtttctttaatgtttcgtgttattgtaaaatgactttcctctctaactaacctcttggaggatacacttagccttttacactc

SEQ ID NO: 254764 - DNA, 373 bp, Glycine max
  unsure (1)..(373): unsure at all n locations
gtgtcatcgactacactgagttggttatcgataagcagtgatagtttctaaacanaatcaaaagatgtaactcttccaatagtattcatgttcttctaacagctataactnttccaaatgcgtattaagcttatctaaaggttataactcttctaatggtctcttgactagacttgaagagtctataaaagcaaagctttgatttgaattctaatcattcattctttatacaacaaactntagccaattgatttctgaatctctttgaactccttcttcttcttcctttgccaaaagctntctaaagttttctggttgtccaaaccttgaaaacaaaacttgtgctattcatctttgtcattcccttctccct

SEQ ID NO: 254765 - DNA, 233 bp, Glycine max
  unsure (1)..(233): unsure at all n locations
agcttaataaattcatctatggattgaaacaagtctctngctaatagtatctaaaatttcatgagatcatcaattcatttggttnttaaaagaacatcataaatcaatgtatataccaaaaggttagtgggagtaagatttgttctcttgtattatacgtgaatgaatatttgcttgcaactaattataaagatttgctatatgaggtgaaacacttttcttcatagaacttt

SEQ ID NO: 254766 - DNA, 423 bp, Glycine max
  unsure (1)..(423): unsure at all n locations
agtcactcccgcatttcatctctagcatgcattgtatgttggtctcgtcctttgtcacgggaagccggaaggtccatatcaccttcttaattgtacacatggggcactgcgcccccaaatgcgcaagtaagaagagataattntccgggctctcgtgtccgtaaaatgcattcatatcatgcatcgcataagcatctcttcataacatcataatggacatatcctgcatttgtccgttatcatattccggcctcacattntgcatgagtcatggcatcatcatgcatatgcgttcaacaaactttttgatctgcaaaattgcataccatttgttntcatgtttgctcatccttgcgttntcctctacaaaacaaaaacaaaagagggggaagcgtgaaacttcacactacattcttagtttca

SEQ ID NO: 254767 - DNA, 453 bp, Glycine max
  unsure (1)..(453): unsure at all n locations
tggcctccataagagaantttgtcttctccgcatcatanaagtttgattctctagttacatgctctacctccttaatttgtcaagttttagcagtggcctcaatgtacttgaagtgaatattaggatcctcactttacaagacagaacaaaaaaattactataattgaaaaacaaagtgaagcagaccaactagtgaactgaggtcatgttcactctacaataagaaagaattggagctcaagtatgcacccaagaaaaggtatagtccttcataagatttgaattgctcaaagagtttgatgcatgcatcaacacccacttgctcaaaatattccttagtggtatgtaaatcatgtactagtaagattcccttatagatgaattgtgaaattcaaaaaattaaatagaacatgaatcttatggcaacattatccaaaaacagtacctgcaca

SEQ ID NO: 254768 - DNA, 440 bp, Glycine max
  unsure (1)..(440): unsure at all n locations
agcttgtctcagcgtttatgcgagacagagaccaacatgttagctatcatcgccaagtaccagagaagagttaggtctagccacggcccacgagcatagaatcacagatgagtatgctcaagtgtatgcggaaaaagaggctagaggaagggtgatcgactctntacaccaagaggcaaccatgtggatggatcggtttgctcttaccttgaacgggagtcaagaacttccccgattgttagccaacgccaaggcgatggcagacacctactccgcccccgaagagattcatgggcttctcggctattgtcagcatatgatagacttaatggcccacataattagaaatcgttaggaaaattgtatggtctctcagaccttgactggatacgacttcttttcttcaaatcaaatgagttgagtccatgtctctactccaa

SEQ ID NO: 254769 - DNA, 114 bp, Glycine max
tactcctgctggttgaacggctagacatgatacatgccatggttcggttcggctattgatacaagggatgccccgcattagctgcatgactcgcctgcacacctgacgattcgc

SEQ ID NO: 254770 - DNA, 453 bp, Glycine max
  unsure (1)..(453): unsure at all n locations
ctaagggagaagccttcaggttgtttcatataaaccctcttctctaaatcaccattaaaaaagggttgttttacctccatttgttgccaatcaaaggtcaaatgaaccactaatgcccagataatatgaaaagaatctctcttagatacaagaaaaaagtctgtgtgtaattgattccttctttttgagtaaatcacttagcgacgagtcttgccttgtatctctcaatgttgcctaatgaatcccttttggtcttaaatacccatttacaaccaatggccttttccccattaggaaactctacaaggttccaaactcccgtactctacatggaattcatctcatccttcatggcatcataccatannattgactatttacaatntatggcttgatcaannagtntggaatcattttcaactccaatatttatatcagattcttgcanagatn

SEQ ID NO: 254771 - DNA, 433 bp, Glycine max
  unsure (1)..(433): unsure at all n locations
nggattagttgagtcaattctcaaaacaataaaattaaaactctttttcttagtaaacaagtctagatacatacatgacttaaggaaaaaaggatacaaccaagtaaagggaagctacaacttactacatacatggatagtacggatacgctacaagctaaaccatatgctaaaaaaatggtattgtcaaaatattaattattaaatttcaactcacctctagttgggattgtttgtagcttgatgatttttactagtagaaccatttgtaggtacctaaattaaaagaatgttttttctttgtaaattatcatatcatagttaaatatttgaataggttgaattataaattcatacctcttgatctatagcttctaagacttgattaatttggggatcttctacaaatcgcactctaaggacaacaacaaga

SEQ ID NO: 254772 - DNA, 313 bp, Glycine max
agcttacttgtgaagcttctatggaggctggatctttaagtttctatgatgaggccccaccatggacatgcagcggaaggctaaggataacatgatacgggaggctctatccataacggaataagacatggaacaaagagcttctccaccaataatgtgccttggataacaaactcgctaacccatggaagcttctaatatctaccacactttgtggggtgggccattcatggatggacttgatgttctcagggtcgaattggaccccatctctaccaactacagatcctaggagaactgtactatctacaca

SEQ ID NO: 254773 - DNA, 410 bp, Glycine max
atccatcacatgtggtactaggtggctgtctggcgatggtgcacaacaagttttcgcacatccacaatgcgcgcataaacccaccatcccctattgcccacctccaactgagctcacgtactcccacgtagcccatatcctcgtttctctcaacaccgggtccccatcaatcctcccaagcttccacaacatccaagcaaaacaatattcaaacagtacaagctatcacaaccaagcaaaacagagcaaaggcagaaaactctgccaaaacaccaaccaaatcacagcttttctcacttaaagaccccagtaacaattccttcgatccaattcgttaaccgttggatcgactcccaaattttactggaagtctgtagtacataatcctacattgtgaccgttgggatcta

SEQ ID NO: 254774 - DNA, 369 bp, Glycine max
gactgcgtgaaccagtcccccattggaaatgtgacatgagaagcgagaaagtacaattccgagtggagggtaggtcagtcattgcgcttcacagaatctgatattgatgcatatcatgactcactcggacggttagttgttgcggcaaaccaacccaatgcgtgatggaatggctcactgctccacatccacgccaccgccaaatctcgccctcttaagagcctattcgcttacaactactactttcaccgtcataatattaacatttgtatagtaatatcatggataacttactactttttgtcatatgaggaatacaacttatagtctatagccatctcctcttactgatcgatttaaatatttata

SEQ ID NO: 254775 - DNA, 324 bp, Glycine max
  unsure (1)..(324): unsure at all n locations
gcttcactggtgtctgatgttatgaaaagcgttacaacgaacagggcggngatgcaaaanacaccatatatggtgtttgttttccacgtcttgatttggtgcggcatccggatgctgactctgacttgatccgtgttagttggaaagagagaaaaatgaatggatatcatcaactcacatcaaatagctacaattagctacgtaagataaattcgntcaactgaattaatttgtatgaatccttcttcttaattatattaatggtacagagaattacttttgttaactaattaaatgtcgactggcttaaatatcgtccaaaat

SEQ ID NO: 254776 - DNA, 444 bp, Glycine max
tgtagacaaactatactagaagaaaaaaaaagtttaatagccatgttgaagtgtaaacctacacactttttttttttagttgccacataatattaaatcttaattatctcttcaacaaaaaggtaattagaattaaacacatgctaagcataaaataagaaaaatatgtttaagaaatcactatttgaaaagagttgttgtgtttaagaatttataacaattttttctcataaattactgactatttgaaaatcactaaaatgttgcgatatttctattttgattgaaaagattagctaaatgaagtaaagtagagattatttgaccatgaaagcgaaaaataattcttatattacttttttttttataaaaatacatttatcattcattattctttttaatttatttaaacaataaaaaatatatttcatccacacacaattc

SEQ ID NO: 254777 - DNA, 418 bp, Glycine max
  unsure (1)..(418): unsure at all n locations
agctctgatgatatggtcttcgccggctaaaggatcgatgtgggtctgaanaaaggcaaatttagtcgtcctgcttggacgaatgagaaaactggggcaaatgaagagggtgaggatgaaggagaagcccgtgctgtgactgccattcctatacagccaagtttcccaccaacccaacaatgttattactcagccaataacaaaccttctccttacccaccgcccagttatccacaaaggccatccctaaaatcaaccacaaagactacctactgcacttncaatgacaaacaccacctttagcacataccaaaaacatcaaccaagaaatgaatnttgcagcgagaaagcctgtagaattcaccccaattccggtgtnctatgctgactangctccttatctacttgataattcaat

SEQ ID NO: 254778 - DNA, 367 bp, Glycine max
tccacaacatccaagcaaaacaacattcaaactgcacaagctatcacagccaagcaaaacagagcataggcagaaaactttgccaaaacaccaaccaaatcacagcttttctcacttaaagaccccagtaacaattccttcgttctggttcattaaccgttggatcgactcgaaaattttactggaagtctctaatacttaagcctacattttgaccgttgggatctactagcaagcatccagaactcattctgcattactctttccacagccaaccacacacaagcacttttctgcacaagccaaaattctgctgcacctattttgacagcaaaattctgcataagtgcagatttcgaaaatcaca

SEQ ID NO: 254779 - DNA, 380 bp, Glycine max
  unsure (1)..(380): unsure at all n locations
agcttctacttcaccagattcctagagaatgtgttctatatggacctatggggcatctttggagagtagggacaagttcgagagatattcatccctacgcgtangaacaaagatagaagaaagtacggcttccagagatttagcggtgtgatcgcacgaaacatgctagagcggcaacttgacaaccttgtgatcggacgcctgatgctacacatcaacgtaccaaagtacgaacgtcagaacgagtcacgaccacaattaagactagggctcgaaacgaggagaggcggtggaacacaggtaaacattgcaccatggcagaatcacagggtatcttctatgtcctataagaatgccctactcacaacgccaacgaccct

SEQ ID NO: 254780 - DNA, 533 bp, Glycine max
  unsure (1)..(533): unsure at all n locations
ccccccaacaacaaagagataacgagcgtangagctaaaaccaatcnnnnncnnnnccgccgggnnttgtaccctgtacaccctaaaaaccacccgataggcgcacagacgcgcacagcagaagaacactcttctttttagaaaacaagcctacagacagacgggacttaaagaacaaaggaaacaaccaagcacagggaacctacaacctactacatacatagatagcacggacacgctccacgctaaaccatatgctacacacacggcacggacaacaaatgacctatgaacacttaaacaagacccaagctgggatcagcaagaagcgtgatgaccactactagtacaaccatttgccggaacccaaaacaaaagaacgtaaatgcttcggcacaatcacatcctacgcaacaagttccagacgtagaataataaactcgcaccccgcgatcataacctccaagactgaccaatctgcgaacttcaccaaaaaacttctagacacaacaagatctccaacaaagctcacc

SEQ ID NO: 254781 - DNA, 343 bp, Glycine max
  unsure (1)..(343): unsure at all n locations
agctnggatntccttntagtagggaatctatctttcctaagatggagccaaacccagtcaccctcattaagaactagctatnttcttcctctattgcctttagttgaatacacctttgtttggttctctatttggttcttaaccctctcatgcaacttctttacaaactctgacctagattccccttctttatatataaaagaagtgtccagtgggagaggaatgaggtcaaatgatgttatgggattgaacccaaagacaacctcaaaaggggactgcttggtggttctatgaacccccctgtagtaggcaaattctacatgaggaagatactcatcccaag

SEQ ID NO: 254782 - DNA, 396 bp, Glycine max
  unsure (1)..(396): unsure at all n locations
ccgctcggatagaccctatgcttngagtagattacggatgttaaacctcttgctaagtgaaccactccaagtccggatacctgagtattctcacattcttcactgcgtatatcatcttgaagtcgctcttcttactctcatccgcgaaccatgtaccaagcctgttaagagaaacctgagaacactgttcttgcttactcttggaggtcttagctttcttctgacctctggagtggttgctagccatttttagaagagaaatacagggtttggagggagaaaaaaggttgggttcataaatgggtggttagaagagatattggtgtgacatgtgaacgggttagggttgccttttatatagaggtagtgaccgtttggttggctacagttgggggc

SEQ ID NO: 254783 - DNA, 196 bp, Glycine max
ctacctcatgcactcctctaatgacaatagcatcatttctgacactaaattgctgggagtttgaaaccatcttctcaattaaatttctggcttctacacgggtcatgtctacaaaggctccttcactggtagcatctatcatacttctctccatgttactgagtacttcataaaagtattggaggagaagctgctc

SEQ ID NO: 254784 - DNA, 440 bp, Glycine max
  unsure (1)..(440): unsure at all n locations
agcttattcaatcaatccaataatagattctntctgactcgagtagaaattcatcataaaaaaaggaaaccataaaaaataccaagcaaagcataattgagaaacaatgacactaaacaagtgtgaacggagtttgcttttgtctagagaggcagcaaccctgagcttctttgaggaacaacatagatatacacaaacaatgtcaaaattccaacccacaaggccaaagtgataatagcaacagtgaatgagatgatgatcaaagccagaaatgaagcagcaccttcaacaataagcatggcacaagttatcaaaggaagaagattatgttatgtttctgaagtattgtttcaatgatcaccaagaaggagtatacgacaatgctcaaacccagaagcatcatcagcttgngctatttcatgaacaaagagtatgttgat

SEQ ID NO: 254785 - DNA, 402 bp, Glycine max
taagcccagttaagggagaacagtagtggcttcttatagtgaacacatagttcattttcatcatttttttggtattgactttatgtggagagcatatgcacacacacaaaaaaataaaaaataaaaagaaacagaaggggcagggacggggatggagcataggtaatttagacttcaggatattcccttgtactatgggcacgatgaaattgtcaacctgccatcataaagataggtgttacgaagacaaccacatgatcatactaagaatgaaaaacgaagttcattaaaactttgaaccctttttctttataaataaaatacatccttttattagtgaaactaaaagcatttatacttaagcaaactggaagaacagccaaatattctaaccttcaactc

SEQ ID NO: 254786 - DNA, 343 bp, Glycine max
  unsure (1)..(343): unsure at all n locations
agctttgagccaaaatcctgactcaccatanaccttgacccatagtgagaatgtcaattcttaccctcggaagcaaaaaaaaaggggagagggaatatntccaatcaaagaggaagcaaaaaaggagagaaggaaaatttccaatcaaaggaacaaaagagaggaaagggaattcccaatcaaagagtgggagaaagcatacagaatagaaagaacattcccaatcaaagaatgggagaaagaaaaaagagaagaagaaagggaagaaagttcccgatcaaaaaaaaataatatgcagaaaggtctttggaccggacaatatctgaacaatacagaattgtca

SEQ ID NO: 254787 - DNA, 452 bp, Glycine max
  unsure (1)..(452): unsure at all n locations
agatgaggaagtngtgaagggtgaaacttcctgcttttattgtttaccacagaatggtaactggagatattgtcgcggggtcaaggaaaccttggggacgtcaggtggggtgctatggcccaaaaccaagcttgaccaatccgaacccaacccgggatagtccgtcagtgagaacctgtgatgtacctaagcacgcgagatcttgtgtctgcacacatataaagagaacacaacaccacaacgcagggaggctgtgggtggcgtgccacctgagatatttgtgaaatatgtggagtgcggcctggtgatatagtaccccaagtgagagatctcgtatcacgcgtctaatattgacgacgggactgctagagggtctgtggtaatctattaccgaggggtgtaatctattacccctcttgaccacaacatgagaattatggaggctcttgtgg

SEQ ID NO: 254788 - DNA, 347 bp, Glycine max
tgtgctgtgctggcgcccttgtgctcgtgagctgtcgtccgcctggttttaatggcatccatgcgtcattcgtgctttcatcttacatactatactccatcatcatgcgagggactaccgcttcatacccattaccatttgcatgctttgaaccttatgatagacgatttcttgcaccgttaccttgccttgctgatcaagttacggtctctagctctacggttcgctatcttacgattgaagtggagttggacgccaatgatgagctatgcttctcaatagggtgaagacccctgtgcttctatatatacattgcgatggacactctacgtgcgcctgctacgctt

SEQ ID NO: 254789 - DNA, 420 bp, Glycine max
  unsure (1)..(420): unsure at all n locations
agcttagagcggtcttnccatcatgtgattaagatatatattccaatcttccagatggggtaatggcacttgactcattctcacccaattggaaaaacatattttggaagcaaaagtcatttttgacagcaagattaaaaaggcttacatctcaagactaacattgattctatctgattctaaaattccattttagtttcagcgcaagccatttccagtactcatttcctttatggtggcaataaacaacaagttaaggacaaatgatgaaccacatccttggtttgaatttatgacaaaccattagcaatgcagattgtaatgatgatgatgtagctccatgtggagcttgcacgccttggatcttcttcatcaatggatgcctttgcttcttgaacgttgatggcaggataatggaga

SEQ ID NO: 254790 - DNA, 410 bp, Glycine max
gttcgagtcattctatgtacccgtaatggtccacattgtgtttcgtgcattatgattctcgctttgtttacttcttataccccatgaagacgtgcttaagccattttacttaagtcgattctcgcttaacctaataatagaataactttccaccgaacggttgaatcgtataaggcattagcttcggataaaataaattccgaccgttcggtcatgccgtaaccacgttggatatcaaagagaggccatgaataatataataatcaaaaagacatctcttagtataatgaagcggaaaatcaatcggacgttatctctccgggatttctcattcttaaccgaattgattaataactaaagtgaaactaacgctaaaatcaactctcctatgctagctcgtccacaaaaat

SEQ ID NO: 254791 - DNA, 443 bp, Glycine max
  unsure (1)..(443): unsure at all n locations
agctngaatgtatatttaataactgttaatgaataatatgtatatgtaataggagctcgtctccttgtatatattgatgtagtcatgtgtctgtgtaaaattttagaatctaaatttaagttgaattcaaccttagtttagcttaattatattattaattaatgtgaaatttttaatattttaatttaaatttaggtctaattcaatctataaaattgacttacaagatgacttgcaagataacagagttatttttcatttatatatttaatcgatcatatcattagtcaatatgcatttctagtagcataagattcataattatttgaaattgctgaggaaatattcttatttaattagcaatttgaggggacaaaatggccgaattgaccaaattatgatggcgagttaaacaaattatataagtgaaggcgttctaatgg

SEQ ID NO: 254792 - DNA, 417 bp, Glycine max
ctttgtgatgttgactatgttggagacaaagttgaaaggagaagcacaactggaagatgtcacttcattggtggaaaattggttgcattgatatgcaagaagcaaggttcaactacgttgtccattgttgaagcataacacatgctagctaccagctgttgtgctcaactactttggattaagtaccaacttgaggactacaacatctatgaaagtaaaattcccattttttgttataacaaagttgtcagtagtctttcaaagaatccaacattgcattcaagggcaaaaacatatagaaagtaagcatcattttataagagaccatgttcagaatgggacaatggatctacagattgtacccattgatgatctacttgctaatattttcacaaaacccctcgttgaggaaaaact

SEQ ID NO: 254793 - DNA, 56 bp, Glycine max
agcttctacattcaatgactagcttaccgagatatttcaggactcaatctgacata

SEQ ID NO: 254794 - DNA, 265 bp, Glycine max
  unsure (1)..(265): unsure at all n locations
tcgagcgaatgcatacgacaataactttctactcgtatgtcatattgtatgccgtaagatagcgcgacgctagaaatggaataccgaatctctgatcctagtcatacgacaataaattgatacgtcggatgtcagatagagtcccgtaatatatcgagacgctcgaaattgaatacaatagctgtgagcaaattcatacgattatacctctntattcggatgtctgaatgaatcctgtactatatcctaacgctcggtattgaat

SEQ ID NO: 254795 - DNA, 514 bp, Glycine max
  unsure (1)..(514): unsure at all n locations
acggcnattgaactgttgccatccgnacccgngatccttagagtcacctgcngcatgcaagcttgagtagcattaaaggtaaagactcttcctgtggccttatgaaggccagntcgaccctccaagcctctaacattgtgctacatactgagttgtgtacaatatcttacagtgtggacctattcgccataattaacacatgttacgcctatatctgagacagtatgacgagatgtgccctagcataccacatctgtaacagatgatataagtgggaaagattgggtctgctaccattaccacctagtaaaatcctagcaacaatcatatgattgtcatggcggctaccatattgcttaagaggagtcaaataagatactcccaatgctgggcgcattctgttagatcgagttggacctgtactctatatanggcacctggtccggaggttctgccgactgtccatgtaattaaaggggactgcgaagacctgggaataaagttattcacttcg

SEQ ID NO: 254796 - DNA, 301 bp, Glycine max
  unsure (1)..(301): unsure at all n locations
ttcgtcttcttctttagtccagtcttcttctggcttcaattcttcagtgggctntccttctgtgtccagcatcttgggatgttcccagcctttgatgacagctttacaggttctgctatccagtgatctgaggaaagccaccattctggctttccaatattcatagttgcttccatcaagaataggtggtctgttcactggtccgccttctttcttcatgttcatcaaaatatatctccctagatctcactcagtgatttcgagtgcctgctctgataccaatgaattctgatactgggac

SEQ ID NO: 254797 - DNA, 445 bp, Glycine max
gtgcgaagagcttgcctctggagctgacccatcaactgccctatctctcttagactggtgatacctaggctattaaccttgacttgatagaacctcgctttaagtgaaggcatttgacttgatcccatgttctactaaagtgaacaaatatcggtgcgaatcaaaactacgacatctatcatgggtggaatggatgaatgcatgaagatatgcatatgacacagatgcaatttatgaatacgggagcccgggaaattgtctccttcttagatacaacgtcttggggtaacacagtgcccgacgtatgtatttaagaaggtgacacggaccctccattggtttgccaaagagaggggattaagacagaacccgtgcatgatgcatatgcgaaaggcacaacacgaaaatattaacaaccaaatataagcaaaggggtacatgtcac

SEQ ID NO: 254798 - DNA, 437 bp, Glycine max
  unsure (1)..(437): unsure at all n locations
agcttgtaactgtcagggaaaatgtcatctctattatcttgtaagcatagtgattagaattttatgattcctgattcgaatcctacattccgataaaattcagctacttattgattcatattattaatattagacgaatctcaatttttgtatcttacggtacatgaatgaatctgcacaatttcatatcatcaatacaaatcacatgattcaatagtttgattttcttttatttttctttcaccaattctcatgaaaagaattgaaaagtcatttaagtgaaattgataaatgaaaaggaattagaggaatatatttntaaaattgtcctatntgattatttcacaacattanttgtcattcatttattcagtgcatgcactgtatttgtctatttcagctgcttcatttttttctaaaataaaagcttcacaaat

SEQ ID NO: 254799 - DNA, 342 bp, Glycine max
ccatgaacgctagaaactcagcactggcctaactaaacagaatcgaatgtatctagagtagcaaaaaacaccaacagacctgttaatttcaatcctattatgaactaaagtactaaccttaaagttcattctaaaatccatgcccctccaaatatgattggtacaaataaaaataaaaataaaaaacttttgccctctatcatattcttcagtttcagaaagtaacacaatttaagtcaagttataaaggaaaattgacgattacccaattatgtaacagataagtacttggtttcaacaaacacacagaagaataccctttgagctttttctttacttcaa

SEQ ID NO: 254800 - DNA, 445 bp, Glycine max
  unsure (1)..(445): unsure at all n locations
agcttatcttattatccagttagcactgaggcttgtctgtatggaaaacgcatgacaaattggaccctacagattgacacagccatcgaacatgggattgagattgggatatagttgggcttggcctaactaacccacaaccagaaagcctcttcttactaacactatcgaatgtaaggatagtggagtgccatcatagtttgattagagaagggaaagacagtgagagaaatccaagcactggtctagcccgaaacgattacaatgttgttagcactgctgttcttgggacccatcaactacaagagacaattttcatttttcaataacaggacccatcgaggaatatgaattctttctntaagtctctatcaaattggtttggtaacggtcctattcaactcactattcattcattagcttcatgccgttttgattttctagg

SEQ ID NO: 254801 - DNA, 410 bp, Glycine max
gtacatgcctcatgacacctaagcacacttagtggagaatgttgtacttgatcttgaattagtgggctgaaccatggctaaaattcactaatcataattagtgaaattttggctccacaaatcaatttcaaattcaagtgaaatttgaatggaaatttaaatttccctccagttttttgtgacacttaggctataaaaagaagtcatgtgtgtgcattttatcaactttgatcatttgagaattacacttcaaagttcagacctcatttgaggcacaaaatttagtgttccttctctccctctccctccactcatcttctcctttcttcaagctcttatccatggcttcctatggtggtgagcttcttcttgactcatcttcttcttgaagtggcatctccaatcatctt

SEQ ID NO: 254802 - DNA, 310 bp, Glycine max
cgaaataccagacagcatctctctgttatcgtcattgctattcttaagcttcttgcatagcaacatcataagctcacccgatagcctgatgtatcttacaagactgcatcgtctttgtgtcggtgaatgtgaaatgcttcgacgtatacctgcacttgcacaagccattcagagctatctcgcctggaactgccaatctcttcagacggtgctaagttcaacgatcgaaccattggaatcacccaacggcacttttctgctcgctactgcataaaattggatgaacattcatttgatgcaataattggcg

SEQ ID NO: 254803 - DNA, 445 bp, Glycine max
ttagtgaagatggtgtttcatgtttccatattcgattgctattctggtatcgtggctgttggagaagaagaagaagaaaagagagagaaaaatggtgccgctgccgagaatcgctttcggtgacgacacagacggagagacagtgaaagattggggaagaaaattggtgtgaacttattttatctatttttaatttacattggtttctaaaattttaaaactaaaaataaaattgaaacttaaccttcaaaattgaatctaaatttaatttttaataactttaaaattaaaaatagaaaaccacccgaacgagcttaagttttagtttctataaaaaaaaaatagttataatctcgacatcaacataaaagttaaactttgatctctaccttattatcatcatcagtaatgtgttaacgtgttaacctgatagatatgttgctta

SEQ ID NO: 254804 - DNA, 237 bp, Glycine max
  unsure (1)..(237): unsure at all n locations
gcttatgcaatggcgaccaagagaattaagcattatatcttctcttagaatcttaaatcataaggcatcttttacacatctttcaataaatttatttctaaccaatgcgtgacttatgacttattactcacacttctgttccaacaaatgcactcttcccctctgagtctatgaacaaatacataanataagccacagataattatctcttatagatngatacaagagataaagatg

SEQ ID NO: 254805 - DNA, 443 bp, Glycine max
  unsure (1)..(443): unsure at all n locations
tgtaacgcgttaatccatcaaaacattntttattcatatatgctcgtccaacttcctgatacactttcaatagaatatgcaagccgttgtattgggatatttgggtttttcatagcacaggagtttttaaattcaaatcaatttaacataaaaataaaaaatcattaaaaaaaactgaaaattgaactaaattgattttttgttatttttttggatgatttttctcttaaattaatcattttggtttaatttattatttatgtttttgaaattgaaccaaaccgtaatatttttattaacactcgtattattttaatattctatgtatatatcatttgaattttataatatttgtagtggtgtgtatacaatataattttttttaaataacttttttaatatatgtttgatttaaaatggataaaaattatatagatttttat

SEQ ID NO: 254806 - DNA, 204 bp, Glycine max
ctgcggttatgacacacaaatcaaaatgcacagcagccgtttgagcatgaaaaaattcgacacataaaattctactcatattattagtatctctgagcaactatgacatatccacgaacttgagttttttgttcttaatctatacactttactatatttattatttgctcggctgcatggatttatgtacgaagtatgtgactg

SEQ ID NO: 254807 - DNA, 441 bp, Glycine max
gaactcagctcgagtcccaaaggttatagggtagttctttatgtagacttgcagtgatagggtatagcctaacgttaaatgctatatgatcataggacatggccggtcgcgtcaattgttactgacatcatcacgacttgaacttaatggtgaccaatctactgttttttgagcaagtcaaggcgcgaagagagaataatcgagctatagctctcgtcataatattgaatagagtctacaagtactcgcgttgagtgcaaggctgacatattagatcatgtaccattgcattcattacatttattcacatggatcaactctgagcacatgttcctcgattcatatgaaaaccaccccaaactatatttctgcctccatatggccgcaaacagcaggcttacaactttctacgatgtttctgtatgagtaacaactaacacc

SEQ ID NO: 254808 - DNA, 285 bp, Glycine max
gaagtgtttcacactaacttgaactacatatcctacgttataatgatacatatgtaactactttgttttgtaaaaaaatgacttgtttcctaatattttaattcattctatatttggacctttcggacacatgtttatttattatttttttcttcgatgcatatcgtgacatcaaaggggcttacttgctttgtgactctggagttgttatgctaactgatgttgggatggctaagcatgtgacgttcaagtatcccccctctctatgatttatatattctactc

SEQ ID NO: 254809 - DNA, 445 bp, Glycine max
  unsure (1)..(445): unsure at all n locations
ngccgtaccttatcgcccgccacttaggcgtagcctctttctacgctagtaaatgtctaagcgcagggggagttgattacttgttcaatcagcaagcctctatgttcgtgtgatgcatctgagacatgtgttatacagaccaatgtggactgatgtggactactcactgtgacttagtcgctgagcgtgatgccactctggttgcagccatgcgatgacatggctgtgtctatgactactttgcgatgacactatgatcgcggcttgctctacggagtctacaggcgcctgacacagatgcctctccttagtttcacgtgagcagacattcgtgcaaaacatgcagctgtggccctgatgcatcattctgatgatacatcgggtgatcataacatagctattgatcgatgacataccgttactgtcgcacatgacgacctatcct

SEQ ID NO: 254810 - DNA, 65 bp, Glycine max
gaaaccccatgtgttccttatgcggatggactgacggacattgtaactcttgttgcgcatgctta

SEQ ID NO: 254811 - DNA, 448 bp, Glycine max
  unsure (1)..(448): unsure at all n locations
cacatgtggtactatgtggcggtcgggcgatggtgcacaacaagttntccacatccacaatgcgcgcataaacccaccatcccctgttgcccacctccaactgagctcacgtactcccacgtagcccatatcctcgtttctctcaacaccgggtccccatcaatcctcccaagcttccacaacatccaagcaaaacaacattcacacagcacaagctatcacagccaagcaaaacaaagcaaaggcagaaaactctgccaaaacaccaaccaaaaatcacagcttttcccactcaaagaccccagtaacaattccttcgatccaatttgttaaccgttggatcgactccaaaatttttctggaagtctatagtgcataagcctacattatgaaccgtgngatctactagaaaacatncagaactcattctgcactagactntccatag

SEQ ID NO: 254812 - DNA, 389 bp, Glycine max
ggtcctgtgcttgtgcccttgtgctattgtgctttcttctgcctgcatttcaagtcatccctgcatcattcttgctttcatcttacatcctttactccatcataatccaagtaagtagtgcttcattaccattgtcattttcatgctttgaaccttaggatagacgatttcttgctttgttagcttgccttgctgtttaggttagggtttctagctatagggtttgttattttaggatttaggttgagttgtaagcccattaggggcaatgctgctaaaaggggtgaagacccctgtgtttctatttagaaattgcgatggacacgctaagtgcgcctgctacgcttagcttgtttatcacagctgttaaattgtttgatttccagatg

SEQ ID NO: 254813 - DNA, 420 bp, Glycine max
taagctcttatgtgaactgaagactcaatattggttcttatatcactaacatgtcccatccagcatggacaaagcacatgcctgttttatcttgtgctaaaatgcaacttttgctagaataacggggaaagcaggaataaatcctgaatactttattcaaagaggtttgaggatcaattatctcaaaatattaagctattagggaagtttagtttagtatctctgataggaatctatactttaatgaatgcgtgtaaatcatcctttaatatgattacatttcttagtccgagggaggggtttttatgtaataggttgaaatacctcttgtattcccattcccatatgatagactgagggaagaaaatacaggtgtagaactgcccatggcatatggagtgctacagaacgatgatttac

SEQ ID NO: 254814 - DNA, 323 bp, Glycine max
gcttacagcagattgtagtaatgacccactattctattattaatataactcaatgccattaacctagggaattaaaaaaaaaaaaacttaatggctgagtgtaactgaaattgtggcagccaaaagtcacccccaacagccaacaagtaagccaccatttggtctcccaaaaggctgatgcctaggttgccaattgggcccttattacaacttgaactaaacctaactaaagcccttttaattgattaacccaaaccatatttttggtcaaccaactttacaaggattgggacattatttagacaaactaaacactctaaaaa

SEQ ID NO: 254815 - DNA, 415 bp, Glycine max
  unsure (1)..(415): unsure at all n locations
nttcgattcattctatgtacccgtagtggtccacattgtgtttcttgcattcttattctcgttctgtttactttttataccccctgttgacgtgcttaagccattttacttaagtcctttctcgcttaacttaaaaataaaataaatttccaccgaacgtttgaattgtattatccattaacttcggttaaaataaattccgaccgttcggtcgtgccgtaaccacgttggaaatcaaaaagaggtaaaaaaaataatataataataatcaaaaaacatcctttagtaaaataaagcggaaaatcaatcggacattttttctttgggatttctcattcttaatcgaattgattaataactaaagtgaaactaaggctaaaatcaactcgcctagtcaagctcgtccataaaaaat

SEQ ID NO: 254816 - DNA, 104 bp, Glycine max
  unsure (1)..(104): unsure at all n locations
ttatcataatacgcgccagcctgccaccatngcagtactgacgcacgccataagctatctgcctgaatggagccatcacaacactcattaagaacgataaccct

SEQ ID NO: 254817 - DNA, 440 bp, Glycine max
tcttatccaagacactctcttggtggtgaaacttcttcttccatggcttattccctagtggatggcgcctcctctcacctcttctcctttatcttccgttgcaactccatggttgaaaatcaccattgaaggacctcattgaagctcaaagatccaacctctatagaagcttctcaagcaagcttccatcaattactgctatatgtaattgattacacaagtctttaagaaacttatagagagatcataattatggtttaatcgattaccatatatttgtaattgattacacggttcttttgagaccatgtctgtttttgtaggtctatggtgaagaacatttttgtttcttggagctttcaaagggaaagtgagttgtaaatacacttgagatcaagaaaggtgcattcaatcaagtcttttgttcttacatttgaatg

SEQ ID NO: 254818 - DNA, 380 bp, Glycine max
  unsure (1)..(380): unsure at all n locations
gcagctgaatatgcaccacttgctttcattcactgcttanatatccaaaatacacctgccacttctgacttatacttgagaaagtaatccaacacattctagtgaaatcatctataaagatgatgtaatatttactttttttaagcgaagtagtcctttgaggttcggccaaatctgcgtgaatcaattgcagcttctctgttgctctccacgttgattgtttgaagggtaatcttgcttgcttgccatattggcatgcttgacagcatggtaatttagaatctaagtgaggtaagccatgaaccaactcctttcgtttcatgttcaacacagttgcatgatgaaaatggtctaatcttttgtgccaagcttctgtacta

SEQ ID NO: 254819 - DNA, 433 bp, Glycine max
tagattgtaagcaatggcaagaaactatggaatctgaaattgaatcaatgaagatcaacaaagtatggactttagttgaagcttcaaaggatataaaaacaattggttggaaatgggtttacaagaaaaaggatattggagcatattggaaggttgaaacctacaaagtttgtcttgttgccaagggatattgtcaaaggaaggtatagattatgatgaaacttttcaacttttctcccgcggcaatgctcaaataaattcaaattcgtttttctataatagcatactatgatcatgaaatatgaaatggatgtggaaaatggttttccttaacgatgaactaaaagaagatgtgtatatgacacaacctaagggaatcacatccttgtctgatcataataaaagctacaagtttcaatgattcatttatgga

SEQ ID NO: 254820 - DNA, 450 bp, Glycine max
  unsure (1)..(450): unsure at all n locations
gcactcaaaccgggtgtatttacccccaaggcctanacttcaaagagtctgtcacggcctctccctcctgatttaggtccaacacaaaaaacattttaacacatagactctatctatgaactatacaaaacacacaacccctcaattgttctcaaaataattttaactcgtcgagcctcaaagtaattaaactcgtcgggttaccacagtggatcccatcacaatactcattgcgcattaactcgtcgcccttaaaaggtcttacagttgtatcattgtacagttcatagctcacaattcaatgcgtacaatatctcaatgcacgtgtatcttacaattcaatacatactcaatttatcacatgcacccaatctcaatcacaatgttataattgcaaagcaatatgttatcacacctcatgaatcatatacccatcacacaatagtaata

SEQ ID NO: 254821 - DNA, 310 bp, Glycine max
aaaagccatgggtaactgtcttccaattgattcatctgcaacaacacaatatgctggaaaagtccgaaagttcgatattttagaacactaccaaactcaaagaaaaattaaggctcatctatacaaaagcagtatcagttgataaaattagaacttataagagaaccatataagcagatatgcagaagcatagttatcaatcttcgatagaggcactttgcagctccataagagctataaccagataacagatagctgaatgactgcaattctgaagattcttgtccaaattaaatatttttacaacata

SEQ ID NO: 254822 - DNA, 377 bp, Glycine max
  unsure (1)..(377): unsure at all n locations
agcttcaaggactntaacacgtacctgctagttgtatttggctgtagtgttntaatataggttntaatacatgatttacacatatgcatgtatatataacaagtagtaacaatgtgctttacctggacttgatataatgaaacagcttccacaagaacaccaatggacaaaccaacttcaactacaacaaagtaattcagcttcacctggagttcatataacgagtaatggcattagaagaactcaaagccaaaccaagttcaagtacaacaaactaattcagctttttctcaaccaaactatgtcaaactgcttggtggctattaaaagtgtgtgttattcatgtgacaggcatacctatttagtttctattcatg

SEQ ID NO: 254823 - DNA, 416 bp, Glycine max
acagctttataagcgcgggtctgggagacaaaggtcaagtgttctctatatgctaagatgacgctccgagtactttggatatggtacgaccatgccctcctgatttccggctgggaaattggcgagtggaagaacgccccggcatttacgcaacgagcataatgtaaacctttacggttttaaaagctctatagatgggcctacgctttagagtttttccttttgctaacgctctgtgtcttttgttttcgaatttataatacgaggatctttcttcatctgttcctggtctctacccattctcattcatttgcatgtgtacttctttttctgaaacgacagatccgatgacgagtcccccgtatgtactaatacctgggacccgcctatcgactttgagcaagatatgaatcaaa

SEQ ID NO: 254824 - DNA, 356 bp, Glycine max
  unsure (1)..(356): unsure at all n locations
agctntaaatagcaagcattttcgtataggaacctttcattncaattgattaagcatctcatgctctaaattggagacccctattcctcctacctacttatctctctcctcttacttctacctttatgtgtttatcttcggagacctgagacctttaaactttcaagagaattcaaaaggcgtggcgaacagaaacacttagaatatgattattattaaaaatacttaccatccttatttgttgatgaaaggcacattacaatcacgtcaaatcttggtaccttggtcaaatgctccaaatactgacaccagatcctgtccccctgcaagagcanattcctatcatgataaagctc

SEQ ID NO: 254825 - DNA, 432 bp, Glycine max
  unsure (1)..(432): unsure at all n locations
tccaagctcaaagtttgaagtcattaaaccgatattntgatgatcataattcgcctgagaatttcatagcgtgtatgtatttggttcaaactcacgatgatttaatattgatatcatccatagatataaatgcagtataccattgttcttttggtttctcttcggtacagttggtacctcgtgttaatgaagatgttttctgtgccgattttcacaaaaaaaaatcaatcgtttaatactaccatggtatacataatcgttaatgccacatgttccatattagttaaagtgataaagaatgagacgaattgtctcacaactttactcagagtagaaaaaatggatatgatctacacacgcaaacacatgaatgtggttttcaacgaagatatctagaatcgtatggtcacatctcacaattgatccattata

SEQ ID NO: 254826 - DNA, 499 bp, Glycine max
  unsure (1)..(499): unsure at all n locations
ctcacccccctctccaacgtanttgtaaaactttctcaccaccctncctcccaccacccacctgatctacttgaacctttgacccggacctaatgactgagctgcagctatagaacaaatgccatctttttatatccgggaatagacgctccaagattagcccaggttttgttgcagcaatctatgggggcaaacacaccacatgatcttgatgatgggtggctcacattctcaccaagggaaactcctcacttttaatttgagctttcaaactatcatgacatgtagagaagaatcaaggatttcaagtccacaatgtcaaaactttattttcaaacaaatacccatctttgacatatcctataatcagagaaaacatgcaattctactgccccaaatgcccaatattaactgaaatcgcaaattcacttacaattaccacttacataccaaccacaactgcaaccaaaaactcccctactaaaaacatgtctaagtc

SEQ ID NO: 254827 - DNA, 392 bp, Glycine max
tgtgcatccaataccctgatgaggatgtcccatatgttcttaatactggactgattcatttgcttccaaagtttcatggccttgcaggtgaagacccgcacaaacatttgaaagaatttcacattgtctgctccaccatgaaacccctagatgtccaagaggatcacatatttctgaaggcttttcctcattcattagagggagtggcaaaggactggctgtattaccttgctccaaggtccatcacgagctgggatgaccttaagagagtattcttagaaaaagttttccctgcttccaggaccacaaccatcaggaaggatatctcaggtattagacaactcagtggagagagcctgtatgagtactgggagagattaagaaactatgtg

SEQ ID NO: 254828 - DNA, 479 bp, Glycine max
  unsure (1)..(479): unsure at all n locations
agcttagtaagcctnctagtncattggcagtttattgagttaactagtcatttgagtaagaaacaatttagaattttgtcccttgtatagcatatattagacaccgagtatgacagtttgcatgtcgagatataatcttgattttgacaggttgaaagcttgatatagtaataggttttgttccatgtcttcgtgaaatgcatntttaggatgtttagaaacagtgtaattattaattaccaactattagtatgatctcttaattggtaatgtgcatgttctgctgttcatagccaatcaaacattatgaaaggtgctctanaagcaccttctatcatgtatctctttctttatataaagcaaatgaataatttatcattaaaatgtgctaattggacttctcatgaatcatgatcttatcctactacagttggctcttacactgggagaattntatatttatcttttaacaagggata

SEQ ID NO: 254829 - DNA, 421 bp, Glycine max
tgcagaacgcgcactaagcgcgcgatctacacgcgctgagcgttgtggtttctcgttaagcgcgcctacgaaagctgaaagcccacttcagcagctctcaatagagagttacttcaaaggagaactacacaccaccacagaacccctctcccaacggtcgcatttactccctctatttctttcacccattctcattgtaaagtcctctatgaccatgagtggctaaacccttagttagggcctatcacgcctaaaagcaaacacgatgtatgatgtactcttcactatttatcaatgcaatatcagggcatgctttcctaatttggtggtcgccaatatctggcatactcatccttatattttgttaaggactagatgctcgggaacgggtaacttctatataagatttaacgaagatatg

SEQ ID NO: 254830 - DNA, 483 bp, Glycine max
  unsure (1)..(483): unsure at all n locations
cgccggggnattagacacgtagcacacggaactatgatactcagctgcacggccattccgaagagaggaagaggaatttttttcccgcagacaaactctgaaaaaaaaagcgagacagacctctcctcataaatacgaaccaccaatgtaaatcctagagcaaagcttatgcgcatatttccttacgaacgctcacctgccccaaagagtcctttaactaagacaatacgctcagcaattcaatcaacgcagcttcgctctctaaatcatacacatgaacttccagcgtgtattcgctactcacatcacacacatctcctaggctaaacatacatacatgcatattcaaagcattatgggggaccaaaaattgcacatgtgcacatcttggtacttctaatgcctatacctacccacaccttcacgaagagtcttgactatctactcaaaaggagccgcattcatgcattctcaagtctcgcg

SEQ ID NO: 254831 - DNA, 459 bp, Glycine max
  unsure (1)..(459): unsure at all n locations
tatatcttcgttcttcactgaagaccttgcctggngatcactcaccatggagatgcattgtgatgatcatatgagatgaggtgagacgaggcgccatccactatgtgaatattcatggttgatagagcttatgcctcaagaatgcgccttggctcacacacttggagttgatgcttcaatggacgacatgatcaaatatctgatgatgagaggagcgaacacttttcttgctgacgaagagggggagaaaatttcaacttttgcataggtctcacaatactctcatatatcacatctaccagaagagctacacttgcttctatttataccctaagtatgattgttgataaactttcttgagacattctcttgagaagactactttgagatcgtttcgttacaagactatcgttgagagcctctgtgccatacgttctcgatagactacagttaactacg

SEQ ID NO: 254832 - DNA, 262 bp, Glycine max
tctagagagagactcactagactagagcgcgcgagagcgctcttaataattctacacttatccatacggctccagaattttctagaatctctactgctaacgagggatcccattagtttgagtggcggatagaatggatagacaaatcgctatgtgatactaagctcgataagactgtctcgctctctctatctatatattaaggaatgatgagggcagattaacgaagactattcgcagatatgtactatacgatcgggta

SEQ ID NO: 254833 - DNA, 470 bp, Glycine max
  unsure (1)..(470): unsure at all n locations
agcttataagaacaaaattgcctcaatcatttccaaatatgcatgtgaattaggacgcatcaacaagaatcaagccaaggctattgtgcaagaaatcaatggggcaaaacacaccaaatgattatgatgatggatggctcaaattctcacaaaggtaaactcatcactttcaaattgagctttcaaaactatcatgacatgtagagaagaatgaaggatttcaagtcacaaaatgttaagaacttttattttcaaaacaattacccatttcttgaacatatcctataattcaaagaanaacatgcaaagtcgtacatgcacacaaaattgacccaaaatattaaactaaaaatctgacgaaactaacaacattaacaaattaacacaactaacanattaacaaaaccaacaaaactagcanaaccaaagaacactcccnnccccnccctccncatatntaaacaacacat

SEQ ID NO: 254834 - DNA, 404 bp, Glycine max
  unsure (1)..(404): unsure at all n locations
nnttggagtaganacatgagaccaactcattntatttcaaaaagaaagtcgtatctagtcaaggtctgagagaccatacaagtttcctaacgatttctaattatgtgggtcattaagtctatcatatgctgacaatagccgagaagcccatgaatttcttcgggggcggagtaggtgtccgccatcgccttggccttggctaacaatcggggaagttcttgactcccgttcaaggtaagagcaaaccgatccatccacatggttgcctcttggtgtaaagagtcgatcacccttcctctagcctctttttccgcgtatacttgggcatactcgtccgcgaccctatgttcgtgggccgtggctaggcgtaactcttcttgatacttggcgatgatagctagcat

SEQ ID NO: 254835 - DNA, 275 bp, Glycine max
  unsure (1)..(275): unsure at all n locations
agcttgatagttccncaatgtatggntattttgtagtaaactttgtaaataaatcttattttatggttaatgctgtctctagaacatttccattggatttaatgatgaaatctgtgcattttcaggtgaaaaagaggatgagttttgaattgcaaaaagttgcagttgggctaaacgcttattcaccgctaagcacagcttcagtgcgcttagcgcaaaggagaatctggcagagcatcagcatcaaagccgcaccctaagcgcgagatcaatgc

SEQ ID NO: 254836 - DNA, 447 bp, Glycine max
  unsure (1)..(447): unsure at all n locations
tcatgatgaatcaagattgattcanagatgttttgatgataacttagatgatgacaaaggtgatgacaaaaatctcaaaggtcaatcaaagaatgagttcaagatgttcaagatagaatcaagaacacttcaagattcaagaggaaagttgaattcaagaatcaagaatcaagattcaaggatcaagcttcaagaatcaagatcaagattcaagactcaagattcaagaatcaagagaagacttaatcaagataagtatgaaaaggttttttcaaaaactgagtagcacatggatttttctcaaaacatgtttaccaaagagtttttactctctggtaatcgattaccagattgttgtaatcgattaccagtagtaaaatggatttgaaaaagttttcaaatgaatttacaacgttccaattgatttcaaaaagctgtaatcgatta

SEQ ID NO: 254837 - DNA, 458 bp, Glycine max
  unsure (1)..(458): unsure at all n locations
gcttgttgaagatcacagaaacttctttgctgttatcaatagttgacaatatttgctttaaagtactttcggtacatgaatctttgatttctaactatgttattcttttgggatgagattctctagaatagggattttttgcttggttattatttcactttttcaaaaataatgagttagttaggaatgtactaatgatgtaaaatagctctacactgtcattaaatttaaattattgtctataaagttaacaaatttattataaataataatttttgattggacaatgtaaaatgtctttattgtatcaatgcatagtcattcttctcataaatgaaattatgatgagaaactctagtaatcattcactcaattatcgtgagaattattaattctcacttcataaatattctaagaatctctttaggaaatatttntattctattgtagccatatgg

SEQ ID NO: 254838 - DNA, 435 bp, Glycine max
  unsure (1)..(435): unsure at all n locations
tcctcggcgccatttcctgcgaaggcaaacatttggaaagtttttntaccagcgggacactactcttaaaacaaaaatggcatacaacctccccccataaatacaaacatcaatgtaaatttagagcaagcttatgcgcatatttccttacgaacgttcacttgcacaagacattctattaactaagaaaaaatgcacacatatacaatcaaggcagcttcgttatctagattatttacatgtacttccaaggtgtatttgttacttacatcacacacatctccttggctaaatttacatacatgcatattcaaagcattttggggtaccaaacattgcacatgtgcacatcttggtatttctaatgcctatacatacacaaacttcatgatgaatcttgactatctacacaataaggtgctacatttcatgctc

SEQ ID NO: 254839 - DNA, 426 bp, Glycine max
tggaatatacatgtgtgaggcaagggacaattggacgacccacattgaatccatgacacacccgcaaaataaagaatttagcgaataatagctattctgctcaagcatctacccatgctaacacttcaggggcacttccttattgtcattgtatcatcgtgctccggatacatatcctcgtttagagtcagacctatatcctcaagactcatgaatgttcacttaggcgatctactttcaacttctcgcgcactctccatagaccaccatcagtcacgagtcaagaggtgcacctccactggaaggaataggctcatataccttcttgttcattggacgtaatagaacaatatcccattgctcccgttcaaaaacgcacatcctgaactaattctctttaataagcagatcgattcttggtctccg

SEQ ID NO: 254840 - DNA, 260 bp, Glycine max
gcttggaacaaggcctctcgagaggtgaaggacgcagctcatatttgtttcgcgggagcgctactttgagagaatctatgagggagagagagacttactcagacgtctgttggagtgcattttgattgatccaagtttgactcagtgctacacaagccgagactaatagagtctggagattgcttgcttgacctgctctgtcgagctcctgtccttgggagatttatcgataaaactacctcgataagatgcagcttacc

SEQ ID NO: 254841 - DNA, 445 bp, Glycine max
  unsure (1)..(445): unsure at all n locations
agcttgatataactcaatattntntgtcctaccttaccgttgctggctntatacaaatcaaatagaattgttgtttgattgcacaatgattaattctcaatcattttacagacgagtatacaatctcagcccttaatcttttctcttaagatgttttaagagcttttaaagaactttacataaatatattgaaagttttttttacagaaagaaagcgaataagagcgcgttagttcctcgttcatgtcttcaaaacttctaatatttataggtcttttcagtaagtgtttgtagtctctaagcgattagatttcttcacttgagctcgcatctaaagattgtggttgttggagcatttaatgctttcatttaaatgcaagtactcctttatgttgggacatcactcttgtgagctttcatgtcgatcacttcagtagaaaatcac

SEQ ID NO: 254842 - DNA, 588 bp, Glycine max
  unsure (1)..(588): unsure at all n locations
tcactcccgctctcacntacccacntnttcgantctngctcgantctntctatacttantcntancttttccnnnntntnnnnnccacagccgcggcntttgtgaccctctactatcaggcgacactatagaatactgcagcttgaactctagcaccagatctcaatcttaatccccgatctatctattcaagattggaagtcgaactgtaaatatctcttaaatcgctcctaaagatagagcggcacatctgttgctaactgcgcattaatctgctgaagatataacagatttatgtggccagtatatacgggcaagatgtcctgtacatcgtatccgacaacgcggatactgcagctatcaatcttcatgtcacatcctatcgtgccttgcgcattgagcagcccaatctgatcccttgacataacgttggacatcatgtgcagcaaccccagccttgcttcatcgtctaacggctcatgtcttaacaaaaccttagctcatcttctacagctcaagacagcgcagcactaccaatatccccctcagcaaatttgggtaaacacacactaacaccttctggacacc

SEQ ID NO: 254843 - DNA, 177 bp, Glycine max
ctgcagctaaagagtgcggtctctgtccttgatgttctagcgcacgggactaaagcaccaatggtatgtggatgacgatcatgaaatgatcctgagacgggtgactttgacaggtgccgttagtacatacacgcgtaacttgtcctccttgttatcgagatgagagattattaaaga

SEQ ID NO: 254844 - DNA, 344 bp, Glycine max
  unsure (1)..(344): unsure at all n locations
acggacaaaatttctanagggtgggagagttgtaatgttctatcattttgctaactataaatcgatggctaattgtatttattgcgttatttgattatatgatcgacttaaataagttgagatatggtgtgaattagtcatgtgtgatttgcttgatgtggatgttgagttatgtggagatttattgacataagttgatgatgcaatcctacccccctagagcattggataaaagactctattgcgtcatggatgcaggagaaggccctacattagcatgaaccttatggtatattttgagcccatgggctaagtataagcccacttatcttagtacctattac

SEQ ID NO: 254845 - DNA, 374 bp, Glycine max
  unsure (1)..(374): unsure at all n locations
agctngttccttggtagtttaagcttatctntgcatcttttctgactntggaaccatcattgtacgttttacgcttcctttgaaaaaacttagagaaaaagactttgtaaaagttatctttntatgaaatggatgttattttcgtgaccttcactgaactctggtcacattggcatgatcgaaatttcaaaatgatattccttttcgtaaaatccgaaacaaccctcagccctttcatgtagtgacatgagtatttgactcagagtattgttgttaactctatttctgaaatccatagtaatttccttcgttntggcgtaatagagacttgcgttggaccgacaagcgtgaacaagagagagacctctaagtga

SEQ ID NO: 254846 - DNA, 399 bp, Glycine max
  unsure (1)..(399): unsure at all n locations
tgcactatgtatntgaatataagaatgttagtcctgtattgtattattttcacacctccatcttatagatatttccttaatataaaaaactaaaaagacaggaaaaatcactttctctcttctagcttttacattttttatagaaagaaaatgtaagaaataatgattaggagtaacatttgaattttgagttcctccaaatgcaataaggaaaatgaaaacatgaactttcgtgtttgcgtgtatagaagactatatcacttattgctaatgctagctgtatgtaccatgagtcgaatttctattcgaagcttcatccccctttgacagtataatataaaatcaaagggtgcacagtgcattaaatcattagttgtttcattcaataatattacgatg

SEQ ID NO: 254847 - DNA, 409 bp, Glycine max
  unsure (1)..(409): unsure at all n locations
agcttcttcttgactcatcttctccttgaagtgatgtctctgatcatctntcttccttcttcattccgctaccattaaacttcaagaagcaaaggactctattgattaagaagatccaagtcctacaagctccacatggagctacatcagggcctgaatgactattgtttgtgaacaaactccttcagaaggctgagcttgataagctcttctatcttatccttcagagcactgcattgttttgttgagtggccatgcttgcaatgtgtcgcaacctacccttttgcgggcaagcgaggcgaggctcatgggtgcgtcttacacaggaggaaaatgcgcggagtcgccaccaacgtttattgaaaggaaaatgttagaaaaatccacaggaaacagtcatgaagaatac

SEQ ID NO: 254848 - DNA, 447 bp, Glycine max
  unsure (1)..(447): unsure at all n locations
ntgcttctacaccacctactctagaatttgcaggttgaggtctaatcctttggagattgaagccaggctctgtattccccgcaaggggcttgttctgaatgctgagatccaaccatggaaactccttagaaaggatctggctacactagcccagacatggagtgtcttctcttactccaacttagctcccatatcccacacctcagatttgaacatggacagagacaggttggtttatggcttggtaacccacatggatatgaacattagtgccctgatctcaagtcaaatctcttctattgctcagagtaactcctctaggcttctatttccagccttgatgactgccctttacagagctagaggagttacctctgatagtttaacttatgagagcctgagcccgaccattaacttggcctacattaagaaaaactattggaatgt

SEQ ID NO: 254849 - DNA, 595 bp, Glycine max
  unsure (1)..(595): unsure at all n locations
ctctctccctcgcntcccntccgcttgttgtataaaatgtaaatatacaacaacccaacngtancgagccncnnnncnnnnccaaggcacagacanntttgaattcgtagcctgancgccgatcggagagactcnaccagcaggcatgcaagctgcgaggattatgaggagccgagcacacgtgtctctatgcggctgcctggcgatcgggcacaacaagcatctcacatccacaaagcgcgcataaacccaacatgacctggagccggccgcaactgagcgcacagactcccacatagaccagatcctcgttcctctgaacaccgaggccccaccaagcctgccaagctcgccgcacatcaaagtgaaacgacattcagacagcacaagctatcacagccaagcacaacagagcacaggcagagcactctgccaagcaccgaccaatcacgctgttgtacctaaagactcaatacaatgccttcgtccgatatagccggcgaacgactcaaaaagactggagtagtagcatagccaaacagacggcggacacggacaactccaaccattacatactcgtcgaaccgcaaacacg

SEQ ID NO: 254850 - DNA, 595 bp, Glycine max
  unsure (1)..(595): unsure at all n locations
acactccccgcgcnctcnctctcctnctngcgtgcgtatcccagataagcacacacctatcatcctcactacctcntnntantnnnccaccccacggcnnnttttgtgcacgcactagcacgcccactatagaatactccagctntacgcacacaatcttctaaacggtgggagaggcgtaatgtcttatttatttgctaactatcaatccgagggatcatcggagagagcgcgctatctagactacatcgatcgacctcaaaacacccgagacacggtcgagaagacagccacgaccgatttcgcttgacgccgacgctgagctaccgcggagactcattgacataagtcgacgatgcaaccctaccaccccaaagccacagaaaacacacctccccgagacacggacgcacgaaaacgcccaaatacccacgaacccctaagcataccttgagcccatgggctcagcataaccacacctaccctgcacataccaaaacacggcttaataacctcagggctcctcctaagcgacactcttataccgacggcccccccacataccccacgctacaactccatcccccacgttacc

SEQ ID NO: 254851 - DNA, 442 bp, Glycine max
  unsure (1)..(442): unsure at all n locations
agcttctcaggaagttttctcaagaaagcttctcaaggaagctacctagtctataaatagaagcatgtgtaacacttggtgtaactttgatgaatgagagtcttgcgagacacaactcanagttcaacttctctccctttttcttccttcaatttcgtgctgccccctctgtctatctctccctctttcttttcctccattgaagcatgctctccaagcttcttatccaaggctcatcttggtggtgaagctccttcttccatggcttattccctagtggatggcgccgcctcttacctcttctcctttatcttccgctgcatctccatggcgganagtcaccattaaaggacctcattgaagctcanagatccagcctccatagaagctccacaagcatggcttcatcaagtggtatcagagcacaagaagcttcaagtag

SEQ ID NO: 254852 - DNA, 450 bp, Glycine max
  unsure (1)..(450): unsure at all n locations
ntgacttgagttatcaagagattataaatatgtggccatgacatgaatttcaagaatcaataatctgtctttcaatcttttctcatcatcattcaatatctttcaactctttctacacaattttctgattcatttctcttcatctttctaaaagtttttgttcaacactttctcttccgagaaaagttctttgttcaaaaacttgtgctattcatctttttcattctcttcttcctttgccaaaagaacgaaggactaactgcctgaattcttttgtgtctctcttctcccttacaaaagattcaaaggactaacagcctgagaattcttttgattattcccttccccttaagcaaaagatttcaaacgactaaccacctgagatatctttcgtttccccttacaaagaatcaaaggactaaccgcctgagaattctttatcccaacaca

SEQ ID NO: 254853 - DNA, 384 bp, Glycine max
  unsure (1)..(384): unsure at all n locations
ggcttattctctagtggatgatgcctcttctcgccttttnttctttatcttcccctgcaactctatgctgaaaatcacaattgaaggtccttatcgatgctcaaagatccagcctccatagaagcttctcatgcaagcttccatcaagatgggagtgtcactcatggactcatcctctaatgatgacgaagcttgatcatcctttntcccagtgaaggaaactgcccactccttgtcaccaatcttgggattggctntggtctccctcatcttgatgcatcttggtatcgtagagagatgacagatttacgtggttcaagggctggtctaattttcttagcttcttttttgtaggtctggacgatcatgtgtcttaatcaacct

SEQ ID NO: 254854 - DNA, 454 bp, Glycine max
tgcttatgtggcttctatggaggctggatctttgagcttcaatgatgtcctttaatggtgattttccaccatggagatgcagcggaagaataaggagaagaggtgagaggaggcgccatccactagggaataagccatggaagaaagagcttcaccaccaagatgagccttggataagaagcttggggaggatgcttcaatggaggaaaagaaagagggagagaaagagaaaggggggagcacgaaattgaaggaagaaaaatggagagaagttgaactttgagttgtgtctcacaagactctcattcatcaaagttacaacaagtgttacacatgcttttatttatagactaggtagcttccttgagaagctttcttgagaaaacttccttgagaagctagagcttagctacacacacccctctaataactaagctcaccttcttgagaaact

SEQ ID NO: 254855 - DNA, 463 bp, Glycine max
  unsure (1)..(463): unsure at all n locations
agcttgaggattatggngtacccatcacatgtgtgtactangtggcggtcgggcgatggtgcacaacaagttttccacatccacaaagcgcgcataaacccaccatcccctgttgcccacctccaactgagctcacgtactcccacgtagcccatatcctcttttctctcaacaccgggtccccatcaatcctcccaagctttcccaacatcaaagtaaaacgacattcaaacagcacaagctatcacagccaagcaaaacagagcaaaggcagaaaactctgccaaaacaccaaccaaatcacagcttttctcacttaaagactccaataacaattccttcgttccggttcattaaccgttggatcgactcgaaaattntactggaagtctttagtacataagcctacantttgaccgttgggatctactagcaaacatccagaactcattntacattactc

SEQ ID NO: 254856 - DNA, 399 bp, Glycine max
  unsure (1)..(399): unsure at all n locations
tctatataagctcgaaccatttatcaataaacacaagttgagttttattcagaanattagagtttatctcttttatcttggtgagagtgattctcctaaattcttgagtgattcaagaacaccctggctgtatcaaaggactttcacaacctttgtgtgttgccctcgctggaaagagtgattctttccttcctatcatctccacccttgttctttcaaaccacaattccagaaaatccacctctgcccaaaattatctcgtgaccataactcccattttacacactcaaattaagtgattcttgagcctaaattgaatttcaaaacgagacctttcacctcgttttggaatcacctcatttggagccctgtagcttccgttattgccatttctatatt

SEQ ID NO: 254857 - DNA, 358 bp, Glycine max
  unsure (1)..(358): unsure at all n locations
agctntgagccaaaatcctgactcaccatanaccttgacctcaggtgagaatgtcaatccttaccctcggaagcgaaaagaatagaagggaaatttccaatcaaagaaaaggaaagaaggaagatttccaatcaaaaagaaagcaaaaaagaaaagaaggaaaattccccaatcaaagagtgggagaaagcaaaaagaaaagaaagaaaattcccaatcaaagaatgggagaaagtaaaaaaggaagaagaagaacgaaagaaagctcctgatcaaggatcgaagganaacagaagatatgtgcagaaaggtctttggaccggacaatatctgaacaatacagaattgtcaccaaatg

SEQ ID NO: 254858 - DNA, 391 bp, Glycine max
  unsure (1)..(391): unsure at all n locations
ntgcggatntggtcttcgccagtgaaaggatcgatgtgggtcctaaaagaggcaaatttgatcatcctactaggacgactgagaaaactggggcaaatgaagagggtgagaaagagggagaaacccatgctgtgactgccattcctatacggccaagtttcccaccaaacccaacagtgtcattactcagtcaataacaaacctcctccttacccaccacccagttatccacaaaggccatccctaaatcaaccacaaagcctgtctaccgcacttccaatgacgaagaccacctttagcacaaaccaaaaaaacaccaacaaaaaggaattttgcagcaaaaagcctgtagggttcaccccaaattccgttgtcatatgctaaacttgat

SEQ ID NO: 254859 - DNA, 447 bp, Glycine max
  unsure (1)..(447): unsure at all n locations
agcttataananagtcaaagttatataaatatttatcttatgtcataatctgtgacgcatatgacgcatccactgaattaaatcacttttaatagcattttttctcccacttgctctgagtatttacattagagtacataagccttttaatatatgaaactctataatattctcatatgaatgactaaaacaaaagaaaatcaatctttttactattttattcacaatctaaatgtaatcacttactatgagtttaatccttaaatatatattcatatgattattctaagatttaaactaatatgattggaaaactgcatgcatnttgaatgaattatcttaaaaattggtagtttgaaggaattaatggtnttttagattaacaaaataatttaatcatttacgctccttgaaattcacactggaaatgacatgcttatgtaatac

SEQ ID NO: 254860 - DNA, 392 bp, Glycine max
ggtattgattagtctataatagaggagtgcatttgattagtttgtttcagtgcattaaacatgttatctaaatccaaataataactcggtccggtttaacaaattttaaatgatttaatttgttaaatttagtttggttggattttttttttcacatacctaagtcaagttgacaagacaatgaaatgagtaaacgacaaggttatcaatggaggttggccaaaattctgtcataaagatgccattctgccatatggcgctgccatagcatgccttcttttacaaattggctatggcgaatgggtgaaaaaatgttacattatactattatagtgttatggcgacattatgattattatttaacaacattggtaaacactaagcaatcacct

SEQ ID NO: 254861 - DNA, 337 bp, Glycine max
  unsure (1)..(337): unsure at all n locations
agcttggactcatgagtggtaagtggatttgttctttngttgtaactaatgctnttccttatggtacagctgagatcaaaagcgactccaccaacaagagcttcaaggtcaatggacatcgacttaagccattcctcacaaacccttctttagcggacgtagaggtggaagagacttccttactccaccctactcttactccaccatgacttagggagtatttctttcctatctccttatttactgttattacattcgtccgattctatttgacggtctaattgctgttaatcttttaattgtgctacatcgaagacaatgtgttgcttatgtatgg

SEQ ID NO: 254862 - DNA, 115 bp, Glycine max
tgatggggcctatgcacgatggaagccttggagggaagagtatgcctatgatgttagagatgatttcttcaaatttgcctgggtctactttattacaagaaaatccaaaaccttt

SEQ ID NO: 254863 - DNA, 388 bp, Glycine max
ctgcagcttgtagcgttggaaaataacttggtatctcttatacatcctaagagtgagtcgatattttcgactaactcttgtattgaatactctcatgaaattagtctttttccccccaatttatggttctttatagacgaattgtacatattctcatgtttagtttgattttacacagtacatacgcccatattgtgaattaatgttgaaaccacttctgcttcaggccaaaagaagagaaggtcaggcacctattatctcgctaagcgaggcatatgcgcttagcgagtgacatcctttaagcgaggcacacaacttgcttagcgtgataggaaaccctataagacgatcaaccagatatgtgcttgtccagcacaccgcaagctca

SEQ ID NO: 254864 - DNA, 370 bp, Glycine max
  unsure (1)..(370): unsure at all n locations
gacactatgaatactcagcttacttcntacttaacattgtaaggaaagcttctcctttgtctttatataagagtctttgtacctataatatccaccaaatacacattcttctcttctcttctgattgagtgcttcgagttttgggagttcaagtttgtggtgttcgaaacaaaatttgactggtggtggggttatagaaagcttcaattaagcatgacgtgaatcctgatatgatgactattccatcttaggtactaattgttttagttagtaatgattgtacccagcaatgactggagttagtcattatattacttaaattttcaatcaggtaatataattacaattgctcttgaattattcgtaagta

SEQ ID NO: 254865 - DNA, 348 bp, Glycine max
agcttagtaaagctaggcactaacatatctctttgctcggatgtctgatagagtcccataatctattgagacgctcgatattgaattctgaacctcacagctaatgtaaacgacaataacctgttactcggatgtctgattgagtcccgtaatatattgagacgatcgaaattgaattctgaagctctgagctaattcaaacgacaataacttttttactcagatgtctaattgtgtcccgtaatatatcgagatgatcgaaatctaattctgaagctctgacctaattcaaatgacaataacttcttgctcggatgtctgatagagtcccataatctattgagacgc

SEQ ID NO: 254866 - DNA, 367 bp, Glycine max
tcctctaccgtaaaaaacattgtcggccagcgcttgtattttagttgcgcaatgtcggctgaaaaatatcagttggggctatttaactaccgatgctggctactgttttttctattccacccctgaataatacttggacgatgtcgatttggaaatgttcgatcggagtcatccggtcatgcttctttttaagacctcgatctgtcatcttttcttggccgatgtcggctagcatttttttcgatcaatatcggtgaatcatgctttttgccaaggtgggctaacgttttcgtggctgatgaaatgagagcatgccagtgtcggccgaaacacaatctcgcacgaaagaccctatccgacctacatt

SEQ ID NO: 254867 - DNA, 390 bp, Glycine max
  unsure (1)..(390): unsure at all n locations
agcttaagctccttcaactgcacaaggctcttaatatttgaatagtatccttatggaaccttcacctgacgaagacgctgagaaaaacttatcttctcctttttggacaaagtatgacaagctaggggcaagtaaattttcttcccatcaaaccttggatgcaactgtgatcgtatccctatctcagctagatcttgacgggtattcaagccatccttcgtcttgccctgaatgttagggagcatcccaatcacactgtcacatacattnttctcgacatgcataacatcaatacaatgtctaacgtctagatcagaccaatacggaagatcaaagaanatggacctcttcttccatatagaagtcttacttttatccttcttttgggtc

SEQ ID NO: 254868 - DNA, 295 bp, Glycine max
  unsure (1)..(295): unsure at all n locations
tgagggtancgtacgatcagggttagcgccatgcaaaatgtgtctattgttgacaaactgcatggtgtcttgctgcttgccgagctaactagactaggaagcatttatctgattagttcggctatagacagagtgtacttcctccaattgactgtgaggctgatccaaatacgcctttaccacttgatgggctcgtggtaaccgcacaccagctgtgcgattcgtctacatatgtcatgccgcatatctcaggtttagatgcttatgcttcaaacaacgctgtgcaattctactc

SEQ ID NO: 254869 - DNA, 414 bp, Glycine max
agcttgatgcacaatttcattgaagagacaaatattactatatgaatataacatgtatataaaatgttgagataaattataaagactaagagaagaattatgacaaaaaaaatgagatgaatagtattggagttatgattatgatcatgtcgagctttgcacaagttaacaatgtacctattaaatttgggtgtgattccaaatgttgagaaaaatgtctagattcaatttccatttttccatatcaagtgtggttctgcatgtgtatgaaaaaatgtcataaaaagtcgaataagaatggtattcattctcttaccactttttaagggtgtgtaattattattttataatcgaattaattataatcttacatgttcttatcattgacttatttcttagatgctgatcatacat

SEQ ID NO: 254870 - DNA, 435 bp, Glycine max
  unsure (1)..(435): unsure at all n locations
tgaacgagaaaaggtctgtcttatatcgcatgtctgatttaccttttagaactacaaaagcttttgccaagacttgaacacaataaatttttactctcgtattgctttcataatttttctcttttaaattgaagttgcaaaaagttattgacactgctcaatatgctatgcttggttttcttttatctaggctgcctggattaaagctgaagaggaggaaaggaagcaagcaaagaaagcaatttgattgtaattttccgtacaattcattcattcatcctttgttgataaaaatgtgcttacatatatcgattacaatgtaataacattggcttcttgattgtacttcagcttctgatgaatttgcttccatattattatactggcctgngccaatctcatagtcatcggnttatatatgccctttnttgtttg

SEQ ID NO: 254871 - DNA, 336 bp, Glycine max
  unsure (1)..(336): unsure at all n locations
taatctttctttggtgatattcatgataaagttaattcttgttataaacctattgaagttatccaatatgaaattagtcatgttgtattttgtgatgcttggaaggacaatgaggctaaagcccaattagatcttgatcaagctctctcttgcatgagactttntggaaggaaaaggctttgtgaaatggaattgccattgtaatacatcctattttcacatgactcaggtacatcaaacatcaaaacggtttctatacttcgtaatggagactccctgttaacctctcaactagatgtgaaaatagaggttctagactatnttaccaacatttat

SEQ ID NO: 254872 - DNA, 388 bp, Glycine max
cggacgggttgatggcgacctggtgctgagaggaacgttgtttatggctacgtaagagtgcgtgagttcaatttacaggtgggccactggggatgatatgtttatgtttgattcgtggaagtgggagagttgatttgtgccatcgcccgatcgccacctagtaccacatatgacgggtgccctataatccactaagcttgatgtgagaaagcgtggaagagtcaatcttcctacttttgtttgttgaccacagagtggtacctgtagatatgtcgcgggggtcacgagaccttggggacgtcacgtggggtgctattgctcaaaaccaagcttgactatctcgacccaacccgggcttagtctgtcagtgagaacctgtgacgtacct

SEQ ID NO: 254873 - DNA, 366 bp, Glycine max
  unsure (1)..(366): unsure at all n locations
agctntaattacgaatgaatcattgtcaattgaacacaaatggtacaagtaattaagatctggtaagtattaatcgagttttgcttataaaaaaagcactataagtaaaaggaaaatatatattaaaagtgataaagtcagtttttttttttatcaacattatctattgataaagttaataaatattttatatcttttnttatatcctatatcagataaataaaaatactgtttgcgatatatggttgctgttcacctaataaaataaaattttgtatataataaaaataaaatttaaacatttccattagataaattatgttacaaacatttaaatgcaatgaagtcttataacatgtgatgacc

SEQ ID NO: 254874 - DNA, 383 bp, Glycine max
  unsure (1)..(383): unsure at all n locations
ntgacaaagacacgattttctgacaatcatttaaataaagctttatcaacgacgatggaagttctggttgtgacgccctctaacccaacatgcatacaaatgaaaaaaaaacatataaaatatggaatcttattaaatcaattttattcaataaaattgtcagtaaatgcacatggataaaaggtccacatttgcttcactgttaccaaataaaacttctcataaacatttccaggtcaaaacaaagccattcaattttacaattgaactcaagttaagcaataaaataaaataaagtaaaataacatgttcgaaacatcatgcaattaaaacaaaaactcatgccctaaagtcacatcctatcacaacattgtgtgctgacg

SEQ ID NO: 254875 - DNA, 469 bp, Glycine max
  unsure (1)..(469): unsure at all n locations
gacagttgataccttngcatganatattctgctatgtgtttggcattgtagaagaaatgcagtttcttaattaaatcaaacgacatgtaaatggttctcaaggtgctgctgccctcctttttataaaagaatagctggtcactgatgtcataaaatacgttttttttttggatgatatagaataagaattattcaatatttgcacaaactccacgtaacattnttcgtaaatgacgaccgaaatggattaccttttacaacttgtgggagcagtgtttgtagtgacggctgcttctaaattaagttttttaatttatgagaagtgcacgatgcagactntnttccttagcatgatttgaactactatattntatttctntgtcaactntagtgataacttcaattcatatatggaaatccaagtttttctttctntaagaaaganggtcatatcatgtcactcataatc

SEQ ID NO: 254876 - DNA, 346 bp, Glycine max
acacactatcaccacatgcatgtcttcatcatgtgtttcctatgtaatatgacacttctgttttgtgcccatttacatatatattatgtacttcctcttgcgcatactatgacatccgaataaccatttgcatatcttcactcatcggatgttagaattgatgtcggttgaaagatatcataaaaaattaagtttttgggatatttttgggctcaagcgtaatatttattttgtgatataaacttttaaagcggttagctagatatgaaagtctcaagctcatgagttcgggccaatggacttgctgtagagcaaatctattgattagtcacccttggaccgcgat

SEQ ID NO: 254877 - DNA, 336 bp, Glycine max
  unsure (1)..(336): unsure at all n locations
catcacatgttttactatgtggcgatcgggcgatggtgcacaacaagttntttcacatccacaatgcgcgcataaacccaccatcccctgttgcccacctccaactgagcacacgtactcccacgtagcccatatcctcgtttctctcaacaccgggtcccgtaatatatcgagacgctcgaaattgaattctgaagctctgagctaattcaaacgacaataactttttgctcggatgtctgattgagtcccgtaatctattgagacgctcgaaattgaattctgaaccttagagctaactcaaacgacaataacttattactcgaatgtctgatt

SEQ ID NO: 254878 - DNA, 410 bp, Glycine max
  unsure (1)..(410): unsure at all n locations
tcagaattcaatntcgatcgtctcgatatattacaggtctcaatctgacatctgaggaaaaaagttattgtcgtttgaatttgctgagagcttcaacattcaattttgagcgtctcgatgtattacgggacttaatcagacatccgagttaaaagttattgttgtttgaatttgctgagagcttcaacattcaatttcgagcgtctcgatattttacgggactcaatcagacatccgagttaaaagttattgtcgtttgaatttgctgagagcttcaacattcaatttcgagcgtctcgatatattacgggactcaatcagacatccgagtaaaaagttattgtcgtttgaatttgctgagagcttcaacattcaatttcgagcgtctcgatgtattacgggactcaatc

SEQ ID NO: 254879 - DNA, 412 bp, Glycine max
  unsure (1)..(412): unsure at all n locations
agcttgtaggattatggngtacccatcacatgtggtactatgtggcagtcnggcgatggtgcacaacaatttttccacatccacaaatcgcgcataaatccaccatcccctgttgcctacctccaactgagctcacgtactcccatgtagcccatatcctcgtttctctcaacaccgggtccccatcaatcctaccaagcttgcccaacatccaggtaattcaacattcaaacagcacaaactaccacagccaagaaaacagggcaaaggcagaaaactctacccaaaacaccaaccaaaatcaccgctttttctcacttaaagaccccagtaacatttcctttgtccaattcgttcaccggtggatcgactcagaacatttactggaagtctctagtacataagcctacat

SEQ ID NO: 254880 - DNA, 388 bp, Glycine max
cttgaacaatatacttggccttcatttaactgtctttgggcttgtcggccacgctcaacaaagtactttcgacacctactatacgttgatttcaccaatgctgttatgggaatgttgtgacaatcctttaaaaccttattgatacattctgagaggttcgttgtcatgtggccatatcgacgtccttctctatcgtaagccatcgtccatttttcctttgagatgcgatcaatccatgttgctatagctggactcagttcacaaaatttttctaaattttgataaaaaatgtgcttgcatggagtgtacgctgcataaaattagttatgaataacaattttaagtataaatgaaagtaaaataaacgtgaccatcaaatatgaaatct

SEQ ID NO: 254881 - DNA, 540 bp, Glycine max
  unsure (1)..(540): unsure at all n locations
cccccctcctccccctcgctccataaccactggccctgccaccccccacatccgggatgattcgtgcnctcggaccgtagacnacctagcgctgcagctgcacttttgcctgaaactatgaacattttatactctgccaattgccacacacagaagtggtctgccaccacttctgcctcaattgaggtggtgacacttgtgacgcttaccatggaatgagcaagacattagatcgtggtgacatgcctaatagtggcactatgccctctcactcgggaaacgttaccttactcaataactagaccatggcggaaacaccttgcatggtgagatgcgcacgaatttaatcagctgatctcgctgaagttactcacttgagccacaatgcatgtattggaaaagaacacaatggattgaggattataacgctgccaatgaacacctgaaatacgactctggggaatctccgatctttgctacctacatgcagacacatgtagggcacaaatcttaagaacgtcccctgacaggccatgcccn

SEQ ID NO: 254882 - DNA, 409 bp, Glycine max
  unsure (1)..(409): unsure at all n locations
ctcagctcttccnagccataatgacaatttcttcgagccttgataccttttcacaaacaggttctacaattcaacatccttccctcaatccttcgacccagacctttatcttctctgttaaaatccatgatctgttctagtctctcctccattgaatggtttgaattaccattcttagactcatgcaatgcataaagttattctctccaaaaataaattgaagttcatcatttattccattgttgttccttctgaaattgatcccactttcagtagtgtctgggaaagatgcaatatcatgtgggtttgttaactttgaaaaaaaaatattttgtcttcattttctgttttcacttttaattataaaattgtacattatttccaatctgtttgttgctcttacatattt

SEQ ID NO: 254883 - DNA, 421 bp, Glycine max
  unsure (1)..(421): unsure at all n locations
agctngcctatccgatgcagcagtaatgatggcccgagttatgttggggaacggttacgaacccggaatgggtttaggcaaagacaacggcggcataactagcttgataaatgccaaaggaaatcatgggaagtatggtttaggctataaacccactcaggcggatataaagagaagcatcgcgggaagaaagagcggtggtcaaagctcgcggttgagacaagaaagtgaaggaagcccgccctgccacataagtagaagctttataagcgcgggcctgngagacgaaggtcaagtggtcacgatatacgaagatgatgttccgagtacattggatttggtacgaccatgccctnctgatttccagctatgaaaatggcgagtggaggaacgccccggcatttacgcaacgagcataata

SEQ ID NO: 254884 - DNA, 452 bp, Glycine max
  unsure (1)..(452): unsure at all n locations
ntataagtgcgggtctgggagacgaaggtcaagtggtcgcgatatgtgaagatgatgttccaagtactttggatttggtccgaccatgccctcctgatttccagctgggaaattggcgggtggaggaacgccccggcatttacgcaacaagcataatgtaaacctttacggttttaaaagctctatagttgggcctaggctttagagttntctttntgttaaggctttgtgtcttttgtttttgaatttataatacaaggatctttcttcatctgttcctggtctctacccattctcattcatttgcatgtttacttctttttctgaaacggcagattcgatgacgagtcccccgaaggtactaatacctgngacccgtctatcaacttcgagcaagaaatgaatcaaacggaagatgaaggagatgaggatgtgggacttccttcggaact

SEQ ID NO: 254885 - DNA, 421 bp, Glycine max
  unsure (1)..(421): unsure at all n locations
agctngcactggatgtagctgntatgttatggtattnttctctagctaacttcattttgcattggacttgattatatatatttatatttgctgaaattaaatatggtgttaaatgtgaactcttgcagcttggagttttggtatttgatgatactggtggtgataacagggcgtttgaaaaatcctctaataccagttgatgccatatctatctggtaaaaatttctctaccctccctcttcagtccctcccaattcactttgtgttggagaagttgaaacttgaaaatataacgggttaaaaagtttttttaccgctagttcctatttattaaatatttattgtttttagtcttcaaagatacaanaatgttatgctttgagtccttgatagagactaaaatgcatcgtttttattcata

SEQ ID NO: 254886 - DNA, 324 bp, Glycine max
  unsure (1)..(324): unsure at all n locations
nggcagaatatggagtagccatcacatgtggcactacgtgttttgttgtcgatggtgcgaactatgggctgaacattctgattgcgctcgtaaacccaccatactctgatacgcacctacgactgatctcaggtgctacgacgagggcaatatactctgctctgatcacgaccgggcctgactaaggactatcaagctgccacgacattcaagctacacaacattcttacgatacaagctatcacagtgacccgacttcagagctcatgcgaagtactatgctcagacaccaaccaaaattagagcttttctacacttaaagac

SEQ ID NO: 254887 - DNA, 431 bp, Glycine max
  unsure (1)..(431): unsure at all n locations
gcttctatataagctgaaccattttatctatattcacaagttgagtcttattcagaacattagagtttatctcttttatcttagtgagagtgattctcctaaattcttgagtgatttaagaacaccctggctgtatcaaaggactttcacaacctttgtgtgttgccctcgttggaaagagtgattctttccttcctttcatcttcacccttgttctttcaaaccacaattccagaanatccacctctgcccagatgtatctcgtggccataactcccattttacgcactcaaattaagtgattcttgagcctaaattgactttcaaaacgagacctttcacctcgttttggaatcatctcattttgagccgtgtaagctcagtattgccatgtctatatttctgtccggccaccactaacctacatttta

SEQ ID NO: 254888 - DNA, 443 bp, Glycine max
  unsure (1)..(443): unsure at all n locations
tgccgccacggagttntccgactatgctcttgtgtggtgtttgttattatgcaagttgaagtggacgtttccattgggaaatacaatgataaggtactttgtgatgttgttcctatggaggccagtcacttacttttggggagaccatggcaatttgataaaagagccaatcatgacggttacaccaacaagatctctttcattacttttggtgttgcataaaaaatgtacaatgtaggtcggctaggtttttttgtgcgagctcaaccgacattttgtttcggccgaaactggcatgttcccatttattttggccaggaaaacattagcccacctcggcaaaaaaatatttgctatccgacttcatgcatatttcattcacggaatgaacttgaaactcattaaccgacatctggtcggaaatagcccgactgaacattccc

SEQ ID NO: 254889 - DNA, 475 bp, Glycine max
  unsure (1)..(475): unsure at all n locations
agcttcagtctgatcgctaagcgacaacttatccgtggctaagtgtgacctattgtcgccaagcgcaattccttacagccataattgaggtccatgaagctaagcgccagtcatggcagctaagcgagattcattgcggcaatatgagcgctaagcgtccctcttaactaagcgcatgctcctctgtacttaagatgcatcattttagctaagctggctagagcctggcttagtgagagttgcaacttttctaatctgcagacctcgctaagcggacttacccttgcgctaagccaagtctttgtttgaaaaaaaaaactaattttgaatttgaaatgttggctaagcgcacaagtccgctaagcgagccttgttgagaaaccaaacgtctctcgtgctcccttagcgcagcggtccactaagcgaaagtatcgaanaactgcttaagtgagtgtaacagcagttacactcacat

SEQ ID NO: 254890 - DNA, 431 bp, Glycine max
  unsure (1)..(431): unsure at all n locations
nttcaattcattctatgtacttgtggtggtccacattttgttttatgtatctttattctcgttttcatttactttccgtaccccttttgacgtgcttcagtcatttatttaagtcgtttctcgcttaatctaaaaataaaataaattcccaccgatcatttgaattgtatcatccgttaatttctgttaaaatgaattccgaccgttcggtcgtgccgtaaccacgttggaaataaaaaaaaaggtaaaataataatataataatcaaaaaatacctttttagtaaaataaagcgaaaaatcaatcggacgttttctctttgggatttctcattcttaattgaattgactaataactaaagtgaaactaatgcttaaattaacccgcctagtctagcttcgtcacacaaaagtcactaaaataagggtttg

SEQ ID NO: 254891 - DNA, 416 bp, Glycine max
  unsure (1)..(416): unsure at all n locations
gcttaaggacgacgaatntccagtagcaaagtacatcctagcacctccccaaacgtactcatcccagtaactggtagaattgtaaaatattgaagcctctgaactcccagcactgtacctgcctctctgatccctggaaaacttgaacagcgtggtcgcaccatgcaccagtttcttggaataggccttgttgtccttgaaaacaatggaagcagaagccaaggcagcagccatctcagccgcgagatcggaacaactgtggcattcagtcacagggcggtcatagtccatgtccttcggacgcatccagcaatagtgatcattcngactgtcaccaccagaagtatctccaagcccaacctgtcaaacaagcccaaaaaacataattgagaaacatctacccacagtcacaccac

SEQ ID NO: 254892 - DNA, 372 bp, Glycine max
taacactaagaaagcagaagccatgattccagcaactgcctctggactcatttgtggagaaggcctgtgggctcttcccgcttccattcttgctcttgccaaagttaacccgcctatctgcatgaattttcttgcttcctagaacttgatcaactacatcaaaccaatgaatgccataattagttagttaattaatactactatatatgttagcaggtacacttcatacataaccaaaatgctataaatattccaagtgtctggccattgggcttaagaacattgtattattgcttactacaactctgtaggaaaagtcagttcctgttaattgatctctcggaagggaatttcttcttcacaggagtcata

SEQ ID NO: 254893 - DNA, 350 bp, Glycine max
  unsure (1)..(350): unsure at all n locations
agctntgagcaaattcaaacgacaataatcctttactcggatgtctgattgagtcctgtnatttatcgacacgctcgaaatagaatgttgaagctctgagcaaattcaaacgacaataactttttactcggatgtctgatattgtcccgtaatataacgagacgctcgaaattgaatgctgaagctctgagcaaattcaaacgacaataacattntactcggatgtctgattgagtcccgtcatatatcgacatgctcgaaattgaatgttgaagctctgagcaaattcaaacgacaataactntttactcggatgtctgattgagtcccgtcacatatcgagacgctcg

SEQ ID NO: 254894 - DNA, 407 bp, Glycine max
  unsure (1)..(407): unsure at all n locations
tanacattcaacttcgagcatctcgatatattacgagtctcattcagacatccgagtaaaaagttattgtcgtttgaattggctcagagcttcaacattcaatttcgagcgtctcgatatattacgggactcaatcagacatccgactaaaaagttgttgtcgtttgaattcactcagaggttcaacattcaatttcgagcgtctcgatatatgacgggactcaatcagacatccgagtaaaaagttattgccgtttgaatttgctcagagcatcaacattgaatttcgagcgtctcgatatgtgacgggactgaatcagacatccgagtaaaaagttattgtcgtttgaatttgctcagagcatcaacattcaatttcgagcgtctcgatatattacgggactcaa

SEQ ID NO: 254895 - DNA, 335 bp, Glycine max
agtctacacgaacttcactactgaatcggtagtcttattatgtcgtgtcttaaaaaccttatggcctgcttgttgctctaggttctgaatctttctttttgtaaacccctaattatatctgtgtcctgattatcttctatttgagtcaatgacatcgatttgaccttctagagatgcaccaccattgctacggccatattcattattctgtggcttcatggacaaggcttctggattttctttcagcgcctttttactcttattagcgcctttctgtctttaggatttgtgttcttgacgggattatccgattgacactcgcacacccaattcac

SEQ ID NO: 254896 - DNA, 411 bp, Glycine max
  unsure (1)..(411): unsure at all n locations
ggctgcagctttagtctcaatttgagcgtctcgatatattactcgattcaatcggacatccgagtaaaaagttattgtcgtttgaattccctacgagcttcccttnntcaattggagcgtcttgatctattacaggactcaaccggacatccgtgtaaaagttattgtcaattcaattttctcagagcttcggatctaaattntgagcgtctcgatatattacgggactctatcagacatccgagtaaaaagttaatgtcgttggaatttgatacgagcttccgtattcaatttggagcatctctcgataaattacgacactctgtcgggcatccaagtaaagacttagtggccgttgaattttctaagagtttgcgtttcaattgggagcgtctcgatatattacgggac

SEQ ID NO: 254897 - DNA, 405 bp, Glycine max
  unsure (1)..(405): unsure at all n locations
tgtagggaattcaaacgacaataactctctactcggatgtcctattgaatcgggtaatatatcgagacgctcaaaattgagactagaagctctgagcaaatttaaatgacaataactctatacacggatgtccggttgagtcccgtaatatatcgagacgctcgaaattgaagacggaaactcttagaaaattcacacgacgataactttntactcggatgctcgacagagtgtcgtaatatatcgagggatgctccaaattgaaaacggacgctcgtatcatattcaagcgacaataactatgtactcggatatctgatagagtcccgtaatatgtcgagacgctcaaatattagatgcttagctctgacaaaattggattgacaataactttatacacggatg

SEQ ID NO: 254898 - DNA, 448 bp, Glycine max
  unsure (1)..(448): unsure at all n locations
gatccttaagtcaccgcngctgcagctntgtctttatttctctanagtatgatctatatgccaaattatcctatgcgtagaanacatgtgattcttctaaaaaaataaaatcacaggttagctcgcctangcgagcataccctactcaaattagttaanaaagagggggggagggtgagtttcttcacccaaaacttctccctttcactcaagaatgccatcacccatgggactggccatccttcactcctagttcaccattctttngcgtttccaatcccantttgcattgttgatcgtccccaacaagtaagttcctcattcttggtctctctagctntcaattgatgcttttggtgctntgagttacatgntttggtcaaaaagaaaaagaatgcgagcanaagtatccttgaatngtactcattttttgtgagttgaaggatct

SEQ ID NO: 254899 - DNA, 440 bp, Glycine max
  unsure (1)..(440): unsure at all n locations
tcanaacacaacaacacagaatctaggtgtccgaaacccctctattcaatgggttttctaggtttgaaaagtgaaatttagaatgaggtaaatttgaagcaaactctcacctcacaccagtccataacatcaatttagacttgttcaaactggatttacacctaaaatctcaccgaatcaaaatttgactcttcaacacccaaattttccctagaaatggctctttgttcactttggtcatttatttttctctctagcacagtccaagctttctcataagtcctaaatgacattccaagctatgattaactcactttaacctccatttaccacagaattcagacttaaccttccaactctcaaagcctcactccttttccactcataacatcacattctcactctctaaccctcaagtaactctaccattcatctctaac

SEQ ID NO: 254900 - DNA, 352 bp, Glycine max
  unsure (1)..(352): unsure at all n locations
agctntaacctcatcgtctctcacagtctntagaattgggagccaatccaatccttgtgttcggactctcagccacttatgatagccgccgatgatcccattacggcttcccctaagctctctgtcttttcttcacgccgcatcccatgccttgcgaactccttggagtaccctcgcgttgtggtcactgaaaccccgtgcgatgaaaggcgtgatgctttcgtctgatggcactcctctcatgaggtagccaagctgtcttatggcgaggacgggattataattaatacaaccccttgttccatcaagggaacctttagacatccttcgtatgaagatagaatcccgattc

SEQ ID NO: 254901 - DNA, 369 bp, Glycine max
  unsure (1)..(369): unsure at all n locations
tgaatcggacctcagtgtgaaaagttatgaccatttaaatntttgagagcttccgttgttcaattccgagcctctcgacatattatgcgtccgaatcggacatccgtgtgaaaagttatgaccatttaaatttcgcgagagcttccgatgttttatttcgagcgtatcgatatattataagcctgaatcggacatccgtgtgtcactatatgttataagcatttgaatttctcatgagcttgcgttgttcaattttgagcgtctcgatatgtgatttgcctgaataggacatccgtgtgaaaagttatgaccatttgaatctctccagagctttcgttgtttcatttcgagcatcttgacatattatgc

SEQ ID NO: 254902 - DNA, 338 bp, Glycine max
  unsure (1)..(338): unsure at all n locations
atggaatcaagcattatggatgcatggntgaccttattgggcagagcanggagattaaaagaggcttatgacttgatagtgagaatggcaatgaaacctaacgacacagtttttgggggaatgcttggagcatgccggattcattctgatatgaagatggcagaacaagtaatgaagttgatctgtgaagacnctgttactggtgctagttctcacaatgtgcttttgtcaaatatctatgcagcttctgaaaaatgggagaaagcttgaaggatgaagagcatagatggagggtctcagaggatacccggatgtagttcaataatcttcagtgactt

SEQ ID NO: 254903 - DNA, 451 bp, Glycine max
  unsure (1)..(451): unsure at all n locations
ctaagctnacaatgtctntnttcaggtgcttaacgaatggacagtggttacatataaacataacctgcaagaccacaaaaaagaggagaaacaggcattttcaaaaccaagcaagggaaaatatcacatcgtcactaaattagcaagtagagaaaggtttttatttagaatttccaattccaaaagactcatgttttattcatcatagttcataaggaagaaccaccagaacagttagccacaaaatggtttccctcaatttttgccgcatatgcaactggaactaaatagcttacatgaacgaagagataagaatctcataattaagcagacaagaaattacttactagctggtagctggtattctgcaataactactttaatgaattattgcatgaatagtaatacaaaacttgcatgaaaatgaccactttgacaggtaaatgcactc

SEQ ID NO: 254904 - DNA, 359 bp, Glycine max
  unsure (1)..(359): unsure at all n locations
agctngcacactcagagggacatttcacctatatctttatgataaaatatcatgtacatctctcctttacacaaaaataacaccatctaagcaaacttaactgagtagagacttgtactctccttcttccataccaatctgtcctcctcactcagaatcaaattaatacttccaaagtcatggccttttatctaagcaaattattatatttatttctcctactgatatagagatttctccattcccatctccacaatcaatttccctccctctggtcacgctaaattggcattctagattntatggttactacaatgttgtataatctagtatacttcctaaatatgaaaataaaccac

SEQ ID NO: 254905 - DNA, 417 bp, Glycine max
tgcttgtggggcttctatggaggttggatctttgagcttcaatgaggtcctttaatggtgattttctaccatggagatgcagcggaagacaaaggagaagaggagagaggaggcgccatccactagggaataagccttggaagaaggagcttcaccaccaagatgagccttggataagaagcttggaaggatgcttatatggaggaaaataaagagggagagaaagagagagggggaaataagtcaagatgaaagaaagaaaataagagaggaagaaagaagcaaaataatgaaagaaatgaaaagagaaaaacatgcctcctatagtagtcatgactcttgcaagagtttaagtgaagaacttagcaactattatagagggcgccatagttcacatactaaacatcactcccaaag

SEQ ID NO: 254906 - DNA, 477 bp, Glycine max
tatcaggcgatactatataatactgctgcttctagcgtacccgctattggtgctcatacaataccaaacttttatacctgttattactagctatattgaattctttagatcctgaatgtacaaccttcaaattgttgctcgttcccgtatatgttatttgcaaaaaataaaattaatctgaaacaattctagctgaattgctatcgatattattactcataccataacgaataacagctaaacaagtaatttaaaatgtaactgtcaaataatgtggtatctttttaattacaatcttacttcaatatctaattttgttaatctacttatgacgatctttaaatataaatatgaatttaaaggtgatctactgataatataaagtacttgctcatcacaaattatgatacctatcaatttaaatcttaacttaattctataagtattaattaacatataatacgacaaatttttaac

SEQ ID NO: 254907 - DNA, 437 bp, Glycine max
  unsure (1)..(437): unsure at all n locations
agcttgtcaaacaagaaaacgttattttcagcatataaaattgagaagcaatcttattttatctgattgagataaacaaagttatgtgatgcatgtatctgctataccaaaacacaccttaattaattaactgatttggcatgatgtgaccattgttattactctttcatcactacaacatttttagctntagaacacgcttttatttctatggttcaaaaactgaggttagaagattaaaaatgtcacaattctttactgtggctaggaagcgtgggctatttatattatgtcatgattntataagtgtgatctaaaatagtccacacttttgtattggagtacattaagtcacaattagataaccgtgattataaaatccgtggtttattcaaaatcattgatatataagcccacggctaaattaatgtagctta

SEQ ID NO: 254908 - DNA, 277 bp, Glycine max
  unsure (1)..(277): unsure at all n locations
ntgacgtcggccggtcatttcgtagtgccaaactgaagtcttatatgaatacatagatcttggcagattgacactgacttgaccacttattccccattcataatttataaaccacttatggatggaagatcacaacttatggtaatagaaaaactaggcttgctcatataatttgaagtgctattcattattccacacaggatatcacgaatgctggctcatgtgtctattaagtataaatggatcagaatatatcactctaatctgattaataccg

SEQ ID NO: 254909 - DNA, 203 bp, Glycine max
ccaaaattacgctccggcctccactcattgcagactgctgtatgcattaagcttatgccacatggagtcatagaagcggcagatgaacctgattgcatctgcacacaccttgtcccttggtataattgtgacctggcgaaaccgggcgaggagtcgccatttggcccgctactcagactgtgaactcacacaggatgctggcg

SEQ ID NO: 254910 - DNA, 370 bp, Glycine max
taaagtcttcctctattataacatggtcttcagggagaatttcgtgctggacccccagctaacaaaaccaacaagaacccatcaaaagaagccttcatcacctcagtaattacatgcgttatgactctatcatgcaccgtagacaatataatcttcaagcattggttaagctcctcaagaaaaggctcaattctcgtggatgaaacttcaccaacatacaggccatcccaaagaacataacgcagatcctggaaaatcactttgtatgccatggcctcggagagttgacggataccttccacagatgcagctttagaaagcttgaacttcaaccccttctctataccatcctcttttgttgatttagaat

SEQ ID NO: 254911 - DNA, 401 bp, Glycine max
  unsure (1)..(401): unsure at all n locations
agcttgcattggagaggttccatcaaccgccctaattccttgatgctggtggtatctaagcttttaaccttgacttggtagaacctcttgccggtttgatttgttcccatgcttgctaaagtgagacaaaagctggtgcaaatcaaaactccgatatctatgggtggaatggatgaatgcatgaaggaatgcatataacacagatgcaatctatgaatgcggnggtccggggaattcatcctcttcttagacacaacgtctaggggtagcanagtgccccaacgtacgtttntaagaaagcgacacggaccctccgttggtttgtttatacaagggatcaagacagaacccatatgcgatgcctatgcaaaagacacaatgcgggaatgacatagtatgac

SEQ ID NO: 254912 - DNA, 397 bp, Glycine max
  unsure (1)..(397): unsure at all n locations
tttttgttatgcaacgtccgacttaattttggttatagaacgaccattccgaaagctttgctaattcattaacgcctaatacgtaattctaagtaaacgcgaaacgcgccncnccctnnccccccccnccctncctccctccccccccccctccccttctccctcccttcccttcccccccccccccctccccccctcccccctnccccccctcccccctctttcccccccccctcctctccccgcccccccccccttntcccccccctccccccccccccntccctccccctcccccccccctccccccccccctcgccccccccccccctccttcccctccccccccccccccccccccccccccccccccccccccccccccccctcccccccc

SEQ ID NO: 254913 - DNA, 389 bp, Glycine max
  unsure (1)..(389): unsure at all n locations
tatgaagagcttgctcgacaagggatacttctgtcgtgaagagggaaaaatgttatgcaatgctggtatgggcatgaaggatttcaacgtcattagaaccaagtgtgcctcaatttcggtagacaccactttcatcttttaagggaaaatatacattctaaaagaaagtgttccttggattgcttatggcacatgatataatctgtttgatgtttagataatcattggtgtattctgtctgtacaaaggattggcagtgcttcataactctgtcagactgtgatattcaattgaacaagaacctangcttgatttataccatctttatattccatatttgaagtttatatagtctggagccgaggggttattatgacaatttattctta

SEQ ID NO: 254914 - DNA, 360 bp, Glycine max
cgccaattctgttagttagttgttagccaattctgttagagactaacaaaattcactaacaactaactaacagaatagagtcaataaatggtattttatttctccattctctctcaattctcttagtcgagaaactctatgatggtatgtagagcttagttgatcatcaatggtgacaaactgtatcgcatcttctttcgcttccgctttttcaaattcaatctcaaagaagcttgataaactaaattttcttctttggcgacaataaattgaacctgtcatcaagtcatacaaacttcaaaggtttgtcgcgaatccacaaattcccttacaattccttactgaagcaaatcacgatgt

SEQ ID NO: 254915 - DNA, 356 bp, Glycine max
  unsure (1)..(356): unsure at all n locations
agctngcttgtggagcttctatgaaggctggatctttgagcttcaatgaggtcctttaatggtggttttccaccatggagatgcagcggaagacaaaggagaagaggggagaggaggcgccatccactatggaataagtgatatgaaccctcatggcacaagggctgacttangatcgtctangattaaaccttgatgaaaaatgcggaaattgattaaggaaaggatggaaaataaggtggttaatctcgtgggtcttaataaggtggtttctggcataaaatggatgaatgggatggtaaaacgtaggttaagtggtggctggacagaaatatagaaatggaaataacggaagc

SEQ ID NO: 254916 - DNA, 407 bp, Glycine max
tataagaacaaaattgcctaaatcatttccaaatatgcatgtgaattaggaagcatcaacaagaatcaagccaaggctattgtgcaagcaatcaatggggaaaaacacaccaaaagattatgatgatggatggctcaaattctcacaaaggtaaacttatcactttcaaaattatcatgacatgtagaggaaaaattgggatttcaaatcacaaaatgtcaagagacttttattttcagaacaattacccatttcttgaacatatcctataattcaaagaaaaatatgcgaagttgtacatgcaaacagaattgacctaaaatattaaactataaacccaacaaaactaacaaaactagcaaaaccaaaaccaaagaacacttcccccccccatacttaaacaacac

SEQ ID NO: 254917 - DNA, 437 bp, Glycine max
  unsure (1)..(437): unsure at all n locations
ccgcagagtggatatctagncatgacattctttttttatgggaaaaaaaattatgtgaccatacttagtcatgacatcatcatagctgcactacactgcgagtacatatgtattttataattctaagagattcacaagcatctatgataatcacaatcataagcatgatgtaggttaagttttgataaatcttctcagttagttnttaattntttattaattgacaaaattatttctcagtctgataaataaattctttaatagattttatcattgtttaaaatgttacttacaaattaattcttttagaatactgactatntaagttcggatctttntatatgtttttttatcttcaatatatctattcaagtttgtagttattctttctaaataaatcaaccatgattttatcgaatctttcagatatttaatag

SEQ ID NO: 254918 - DNA, 406 bp, Glycine max
  unsure (1)..(406): unsure at all n locations
tgcatacaaataagttgtgcttagcaaataataaacaatgtgatctcaagtgtatcgctgatcgaagtcgtacccaaatcaaataaacattaaaaatgcaatatctaggaagtgatcctatgttgtaccccaacgagcaatggtcaaccaaacattcataatcgatagtaataaaatagtaacgaattgggggttgtttgctnttggaaattaaatagcgagcaaattctaattagaaaatacaagaattaaagcacgttgtttccccttgattcacaagctacgatcttatcctacgctacgagaatatattctttatcagttcaactacttaatgcaaccctaaattaaattactaagcgaaatttaacataacgcattcattatgtgattaagcaacacatac

SEQ ID NO: 254919 - DNA, 454 bp, Glycine max
  unsure (1)..(454): unsure at all n locations
atatatgttattgttcattgctttgcctgaaaatagacaatgggtgaccacaacagcgccgggggcgggaacagacaatggtctttgcaataaacctgctgtacatgaaacaaacttatatcatgcgctgaccgtgcctaaacaacaagcgaagtccttgcataattggtacactaactatatccaatgtacctgaacaaaatgatttccaaacacatgaccgacacatatgatgcggtggccagaagagtcatgtggtgcgtgacttctaatagggaaaaatgtcatgctctgttgttgggacaacgatactatgattacgttatacccgtgagcaatcacatatcctatgtatgatatatccatccaccttgtcacactaacctgaatgaaccaaacatacacatnngtagtaattatacattcgcattcagaaatactaacctaacaactg

SEQ ID NO: 254920 - DNA, 378 bp, Glycine max
  unsure (1)..(378): unsure at all n locations
ntataagtgcgggttttaagacacgaaagccaagtcgccgcgatatgcgaggatgactccccgaggagatcggatttggtacggccatgtcctcctggtttctgactaggaaattgacgagtggaggagcgcccagatgtttacgcgacaagcataatgtaaccctttgtagctttaaaactctatggttgggcctaggctgtagaggttccttatgttacggcattatgtcttttgttcttgaatttataatataaagatctttcttcatctgttcatgcgcctctaccctattctcattcatttgcatgtttatttctttacgcttaaaacgccatatccgatgatgagttcctcgaaggttctaatacccgggac

SEQ ID NO: 254921 - DNA, 465 bp, Glycine max
  unsure (1)..(465): unsure at all n locations
agcttgtgcaaagttntggtgcaacatattntgacatcatcgctacaatcatcaaaccactaattgatggaagtagtggttaaacaacatgatgatgttagaacaatctattntttcaatattgagtttcacaatgaatatatttatagcttgtagtaggtatctaaccttcctatatttggctaacttgatgtcagatatggactttgtcaagctcagtcggagaagatttatcttggcctgaagtattagacaatgagtttcgaagttcacaaatattagaaaaagattaaatntagacttattctatagaactagagagtggtaaattaattagaatcaaatatttaaacatgataaaataaaaaatgaatacctacccttcatgaaggtatgcgttcaaaagtggtttagaaccaacacaccacanagagcagctagcatccttacagatcctgaacatat

SEQ ID NO: 254922 - DNA, 445 bp, Glycine max
  unsure (1)..(445): unsure at all n locations
tgagctggatggtcactntccgaaacatatattttctcttagatcctaatccagcacctgcagtgttcagaaaaaggtcacatgtttagatgaaaaataacacattntgcaggaagaaatagagtaatgaattggtgattgtgggtggcaaccatcctttccaaagaaatctccccaggaagagtctacttgaataaccatggaaaaacaaatctatagcctaaagtacctggcctaatcctctacatatatctctactatccttcaggattctagacatatcacttaatattctgcccggtaatagttttagtaccttattatatatccctccttttccttaaatggtaataattgaagtttgtaaaaattatagataacattagtgcaagagactcgtgaaacttcggataaaactcgcagtgacagtattatgcacatgttg

SEQ ID NO: 254923 - DNA, 192 bp, Glycine max
aaaaaatgaagtcaagtcggatagacgtaaacatttacaaatgattgcatatcacaaactcactcttaggagcttcatgttccgctaagggaaagtcaaacatcctaatgtcatcctctataatccagatgaggcatatctgctatcatcggtgcaaaatgatgatcagataaccttgtgaactatgcatca

SEQ ID NO: 254924 - DNA, 431 bp, Glycine max
  unsure (1)..(431): unsure at all n locations
gtgcggatntggtcttcgccagtgaaaggatcgaagttgatctgattagaagcaaattaaatcatcctgcttggacgaatgagaaaactggggcaaataaagagggtgaggatgagggagaaacccatgttgtgactgccatccctgtacggccaagtttcccaccaacccaacaatgtcattactcagccaataacaaacctcctccttaccccaccacccagttatccacaaaggccatccctaaatctaccacaaagcctgtctaccgcacttccaatgacgaagaccacctttagcacaaaccaaaaaacaccaaccaagaagtgaattttgcagcgagaaagcctgtagaattcaccccaattctagtgtcctatgctgacttgctcccatatctacttgataattcaatggtagccataacccta

SEQ ID NO: 254925 - DNA, 348 bp, Glycine max
agcttgtagaagggctagttatgatacatgtcatgagttggtttggttcaaggataaaagggatgccccacattatttccatgacacaaatgcaaaaatgatgatgtggaaactttatgcaaaactggtcatgcatgcgcttatgcggacgctcaagtgtcaaatttttatggtcacgtgatgctagggttcaggattcatttcctctattataaatcaacccaatgtttccaaaatatgttcttttatcaatttgtgcattcctccaagtccatatcgggcgttcggagaaatttttacagcattcacccttcaagtgagacacgttatttcttcaaaatcggtatg

SEQ ID NO: 254926 - DNA, 360 bp, Glycine max
tggatttcctttgctccggagacctctcctctctcatgtttacccaaaaccaatctttgggttggaaaacaacctttttgcgccccttgtttgcatgtttagcataactctcattcctcttttcaatttgggcctagactctttcatggagctttttcacatagtacactttggcttgtccttccttatgctttaaaactgaaatattatgccttggcaacatatcacgaggagttagtggattgaaaccataaacaagctcttaaggagaacaagtagtggtgctatgctcactcctattataagcacattcaatgtgaggttagcgaactctcccattcttaagattctttttcaaaa

SEQ ID NO: 254927 - DNA, 372 bp, Glycine max
  unsure (1)..(372): unsure at all n locations
agcttgtagaatggctagacatgatatatgtcatggcttggtttggttcaagggtaaaagggatgccccacattatttccatgacacanatgcaaaaatgatgatttggaaattttatgcaaaactggtcatgcatgcacctatgcggacactcaagtgtcaaatatttatggtcatgtgatgctagggcttaagatttatttcctctattttaaatcaacccaatgtttccaaaatatgttcttttatcaatttgtgcattcattcgagtccatttcgggcgtgcggagaaatttcacagcattcacccttcaggtgtagacacgtgttttttctcttcaaaatcggtcatgatccatgaattttnttttc

SEQ ID NO: 254928 - DNA, 399 bp, Glycine max
tcatcagatgctgcatttcggtatcagctcctcttattgaagatcgatatgcacttcttgcattgtaaatttgctttatcgtggtgtaactgtcggcattgtgttccttcaacgttagcaagatgtttttcggtttcaccatcgactttgtcatatcagcaataattttcttttcttccttagtcaatcgcccggcgtatggatgtccaactaaggacttcgccaattcatgattatgaatcccacagatcaacttcaccatccaaccttcccctccacgcactggtttcccacgaagcctgaagggacaaccacatttcctactcccggtgtcttttctaacgaattctttatttctacacttgtacgtaccactcctttcacacccaattaacacaa

SEQ ID NO: 254929 - DNA, 358 bp, Glycine max
  unsure (1)..(358): unsure at all n locations
ngtgggagctgtaccatgagaccaactcattccatttcgtattgtattgtcgtagctactcgaggtctgagagaccatacacgtttcctaacgacatctacttaagcgggtcattaagtctatcatatgctgacaatagccgagacgcccatgaatttcttctggggcggagtatgtgtccgtcatcgcctggtgcttggctaactatcaggagacgttcttgacttccgttcaccgtgagagcataccgatccatccacatgggtgcctattggtgtaagagtctatcacccttcctctagcctctatgtccgcgtatacttgggcatactcgtccgcgaccctatgttcgtgggcc

SEQ ID NO: 254930 - DNA, 327 bp, Glycine max
  unsure (1)..(327): unsure at all n locations
gatatattatgtccccgtatctgacatccgtgtcanaagttatgaccattcaaatatgtcgagagtttccgttgtgcaatttcgagggtctcgatatattatgccccatattctaacatccgagtgaaatgttatgaccatttgaaattctagagagcttccgttgttcaatatcgagcgtctcgatatattatgtaccacattccgacatccgtgtgaaaagggatcaccattcgaatttctcgagagcttccgttgttcaattttgagagtctagatgagttatattcgccaatcggacatccgtgtgaaaagttattaccattc

SEQ ID NO: 254931 - DNA, 378 bp, Glycine max
tgtgacggactataccaagctctatgaaccagggacggtgttatatctatatataggcttgctaagggtagagagaggaagactagagatttggatcaagtgaagtgtgttaaggatgaagaaggcaaagtcttagtgcatgaaaaagatatcaaggaaaggtggaaggcgtatttccacaacttatttaatgatggatatggatatgactctagcagtctagacacaagagaagaggaccggaactataagtactatcgtcggattcagaaacaggaagtaaaggaagcgttgaaaagaatgagtaatggtaaggcggtggggccagacaacatacctattgaagtgtggaaaactcttggagatagaggtcttgag

SEQ ID NO: 254932 - DNA, 448 bp, Glycine max
gtacgtgctatgaaaacaaattacgtgacaactaatacgagctttaattttgctatatttcattcaaatcaatataaaatatacaccaagcttataagtgagcttttcaagcagattgatcttacttccttattcttgatcctttaagttatgcttcacaatatatttcagtttgttgttaatttttttattaattaaaaaaattgtttgactatttaataaataattcttttaatactttcaacattttttagatgttacttgaagtaacataaaatgttctaattttctatgttttattttctttttattcttaatatatttgtcaaattctatgattatattttttaaataaaatataattttattattttttacaccatacaactattttaacaattattttaatagttaattgtatcaaatacttatgaattaataaattaac

SEQ ID NO: 254933 - DNA, 343 bp, Glycine max
agcttctagagaaagctacatgaagctgcctctgtaaaacgctgtccagccttcattaaccggtggatcttctcgaaatgtagtctgcaacttcacaaaacacttttccattatctgaccgttgggatcgttcagaagatgtctggagtgtgctagaagcctcttaatgaagcttctggaggaagcctcttaatgaagcttctagagaaaactacatgaagctgcctcggtagatacgctgcccagccttcgttaaccgttggatcttctcgaaatatggtttgcaacttcacgagacactctaccgcgattaaccgttgggatctttgagacaatatatgga

SEQ ID NO: 254934 - DNA, 439 bp, Glycine max
  unsure (1)..(439): unsure at all n locations
tgtctcgctaagccgctagtgttagcagtagtcaatctcgcttagcgcccactggtgctaagcctagatagtttgtcagctaagcgccattagctctctatcttagaataaggcttagtgagtcactctcgcttagccacagttgtgttccagctaagtgagagggtctctcttagccattgttagtgtttttttgttgtcgtgctaagcgcgcnctgcgcgctaagggcatgtctgttatttctgtaggcgcgctaagcgagatgggctcgcttagcgcccaacccaatttactgtttgtttttcttaggtctgtttttcaataaaacctatctaacttcattcttttgttgtgttttggtgtagatggcctcaaagaagagacgcgcctcatcctgtagacctcaggagccatatgatacatctagatttgtgtctg

SEQ ID NO: 254935 - DNA, 403 bp, Glycine max
  unsure (1)..(403): unsure at all n locations
agatgtcgctatcactgatggaacacatgtgagcccgcttagaggtaagggatgagttattcacaattggagagtagtgagaacatgtgtagggattcttagaataccaattgaaatgggtttttggggcattttttgcaaatttgattctatctttacaattataattgtgaattatacatgtttggcagaccaattaatatcccaatgagaaattgtcatgaaattgatgtgtttntgtgttgagtatgaaccctacaaattgagtttttttgttaattaacatgaattgtactctaaataatattctcttcaattgtttattttatacaaattattgtaattctttctgtatgatcatgtgaactgtttgannggatttactcctcgtgtngtgagaaac

SEQ ID NO: 254936 - DNA, 428 bp, Glycine max
  unsure (1)..(428): unsure at all n locations
ntaatgtgttctcccttgtagaactactaactgcagtaacagttacaacccaactattcgatagtgataacaatagaatcaatgtcttcacctcatccttaaatttaatctgcactgactctaactggacaagaatagtattaaattcattaatatgatcagttatagagataccttctcccatcttgaggttgaacaaccgacgcatcaagtatactttgttggctgctgaaggcttctcgtacatatctgataacgccttcattaagcctgcagtagtcttctcatttacgatgttgaatgtgacgttcttggctaatgtcaatctgatcacgcaaatagcctatcgatctagcaagtttcattcttcttgcttcatgtcgtctggcttatcccctaataacggttgatacaacttcttctaatat

SEQ ID NO: 254937 - DNA, 371 bp, Glycine max
  unsure (1)..(371): unsure at all n locations
gctttataatgctgcattatactaatatatggagtnggcaactacttcaccttaggatgacaattgctagaccataacaatgctaccggaggtaaaggacaacggtcttttaaataaatctgtggtacatgcataaaaaataaatattaactcaatcatacacaactgatttcataatttttntaaaaaaacttgatatctacaatgtacctaaacaaaatgattgccatagacgtgaccgatacaaattatgtgatgcaccacagaatctctcagtggttgacttctaataggaaagaacgtcatgctttgttggtaagacaatgatacaanggatacattataccttgatgcactcacatatnccatgt

SEQ ID NO: 254938 - DNA, 566 bp, Glycine max
  unsure (1)..(566): unsure at all n locations
tccgcacctcnttgtctcacanacantaactacctatatatacccataccntttantatttctcctccacagccgcnnttgatcatnctatacacgcgtgacatataaaaaccgcgtgcgcgcaaagaaacctaantacagcgacgacgataacgatttattaaattcgccaccctacatacatgggaggctacaatgaagatcacgctccaacgaagcttatagagcagctcaatcctaaactcgaatgaccaagacaataaaacatgcaactgatgcaagaaacactagcacgtcattcatatgatacacaaaaaaatgaggcgacatccaaaggctaaagctgactacatcataccgaagtatacaacatgcaactgggacaaacacttgaaggaccaagaccatgaaacatcacaacggtgtaatgaagattgataagccaagacatctctgataagttatcaacaagcatataaacaaactactaatgtcggccttcaacactctgacaaatgaaccctatactgaaaggtggcaaaccccaaacttaccccatcactccg

SEQ ID NO: 254939 - DNA, 280 bp, Glycine max
caccactaattgctctccttttgaagttgtttatgggtttaacccactaactcctcttgatcttttgcctatgcctaatgtttctgtttttaagcataaagaaggtcaagcaaaggccgactatgtgaaaaagcttcatgagagagtcaaagatcaaattgagaggaaaaataaaagctatgctaaacaacccaacaaagggagaaagaaggttgtctttcaacctggagattgggtttgggtgcacatgagataagaaaggtttccggaacaaaggaaa

SEQ ID NO: 254940 - DNA, 399 bp, Glycine max
  unsure (1)..(399): unsure at all n locations
ttgattcagctctcgatataccggactcttttgtcttttagtaaaagttattatcggttgaattntgataccaagcttctgttttcaatttccagcgtctcgatatattccaggactcaatccggcatccgagtaaaaagttatcgtcctttcgatttgctacgagcttctgtttcaatttcgagcgtatcgatatattaggtgactcaatcggacatccgagtaaaaaattaattgtcgctctgaatcttgatatggggcttcccgtttcaatttcgagcgtgtcgatatattacaagacataatcggagtaccgagtaagaagttattgttgctgcattatgacgagccttcgttttcaatttgagtatctcgatatattacgggaatcaatcagac

SEQ ID NO: 254941 - DNA, 363 bp, Glycine max
agagtggtacctggagatatgtcgcgggggtcacgagaccatggggacttcaggtggggtgctattgcccaaaaccaagcttgaccaatcacgacccaaccctggcatagtcagtcagtgagaacctgtgatgtacctaaacaggcgagctccggtagtcaacagataaaaggaacaaagaccaccaaccacggaggcttgtgtgatggctggccacctgtgaactttgaatgatatatgggatatggcctctggtaatcgattaccaagggtgggtaatcgactacaaggcttaaaaatgaagacaagagactaagatggtctctggtaattgattaccaagggagtgtaatcgattaccac

SEQ ID NO: 254942 - DNA, 301 bp, Glycine max
aaaaagtctttttcaagagaattactctctggtaatcgattaccagtggccagaaattgattacaacagccattaaaaatttgattcaaaatttgcactatgtaatcaattacacatatatggtaatcgattaccagcagttattgaacgttttaattcaaaatttaaagcttgttatcgattacacacatactggtatcgattaccagaggagattttcagaaaatattctcaactgtcacatcttttcatttggttcttgaatggctatcaaaggcctatatatatgtgacttgagaca

SEQ ID NO: 254943 - DNA, 474 bp, Glycine max
  unsure (1)..(474): unsure at all n locations
acttagagagacccaggccgcaagttatcggaagccttggctgctaatctttgttgttatatttcttagcaccttggaccactgcactctccattattccattggcatgggacatgtcacttggactccatgcatggcatcaccctctttgataacaattggtgtgaaacccaggaggtaaatatcgtaaagatattcaccaatgagccatgaaaaaccacataagtgaatttgacaccatactttaacttcaaactttaagggccaggtttatgagccttcttttcacttatatggcgcttaattttcccattcctacccaatgtgaaattttatgtcacacctgtactcaaacagaatgaattggcttcccctctntaatttttatttattaatttcggctgacataaaacaattattgtgatatttgacgactaaatactctggcataggaatgaaattttctcaaaccta

SEQ ID NO: 254944 - DNA, 286 bp, Glycine max
tattattgtgtcttgatgtgtaagagatagagaatacccaatcttatattgcagtgttgcacactgaactctaatgtgctttttgtccgtaaaaatggtggttggtgtatgcacgatgaagctgcaacacactacatagacatgattgatcataccacttgggccatcgctttataaggaccaatttaacaagacttctacttgtggatggcaaattgatccatttggtcactcttctgtgcaggcttacctgctgggagctgaagtaagtaagcccattacgtat

SEQ ID NO: 254945 - DNA, 402 bp, Glycine max
  unsure (1)..(402): unsure at all n locations
catggatttcaatctcggggtcatttacttcttatacccccgctctgacgtgcctacaacatttatttaaggcatttctcgcctaatctaaaaataaaataaatttccacccgatgcttgaattgtattattccgttaatttccgttaaaatgaattccgaccggttggtcgtgccgtaaccaccgttggaaatcaaaaaagaggggaaataatactataataataaaagaataccttttagtaaagtaaaagcgaaaaatcaatcggacgttctctctttgggatctctcattcttaatggaatggattaataactaangtgaagctaaggctaaaatcaaactcgcttagccagctcgtcacaaaaataggtttttgaaagttattattcagtttttacc

SEQ ID NO: 254946 - DNA, 283 bp, Glycine max
gagcttagctacacatccctctctaatagcttagcccaccctcttgagatgagaagctagagcgtaacggcacactcctctataatagccaagctcacccccatgaccgaatacatgaaaatacaaaaaaaaaatgcctactacaaaagaactactcaaaatgcccttgaaatacaatgctaagaccctatactactagaatggccaaaatacaatgcccaaaagaatgaaaaacctattctaatatttacaaagataagcgggctcatacttaacccatggg

SEQ ID NO: 254947 - DNA, 397 bp, Glycine max
gctgtgaggctatctgaagatacagtggaggctgatgatcagtttggcgagcttggtgcacatatgcgaggaggttgattaatttgctagaaggatatcatacttgtttcccacaacttgtttcccggaacttggttcttacttgtctttaactgaatacctgcagaacgtattaacttgttgagccaaggatgctaattagcaattactgtgattaccatttgaagatagatagttatctttcacattttattttacttagcttgccagaaacagtggctaccatatggtatttttttaatcacacaaactggagctctattctcttgtcatctggcttggggagagggataggattaaacggattaagcagttctccaaagagttaggatcactt

SEQ ID NO: 254948 - DNA, 350 bp, Glycine max
  unsure (1)..(350): unsure at all n locations
caaatacatttgaaccgngaaacatagcaaattagtgaagatgataaaatcacgccaatgttatttgttctcatatccccatacacaattcagtaatcagtaattcaaagagagatagatatccttggatattctctccatcatttcttaccttatatgtgaaagcggagaaacacgctagcagcaatctgccccgaatccagtaatataactaacagtacgaatgaatctgcatcgaatcaaatcaaaccaaaagttgattatttaaaagagataagaaacacaaatcgaaagtgacgaaccgtataaacaaaagggaaatagagaacagcataaggcaacgatggagc

SEQ ID NO: 254949 - DNA, 268 bp, Glycine max
gaatgttgtatctttgaagactttaatttaagccttctcaatttgatatattaactaagagtggaaggatctgattctgatgagagttcaggtgttatttacctctctcgattcaatcttcgtgtaggttgcattaacaagtggctttttttttctctcataaatagtgtcagtctctagactatagacttttgctttggtgagactttttggacttctataggtagctttgctgaggctgatctcctatacttaggacttgcctgct

SEQ ID NO: 254950 - DNA, 358 bp, Glycine max
  unsure (1)..(358): unsure at all n locations
ttaaaanaacttaatgccattaacctatggaattaaaaaaacctaatggctgagtataactgaaattgcggcaaccaaaaatcacccccaacagccaacaagtcagccaccatttggtcttccaaaaggctgatgcctaggttgccaattgggcccttattacaacttgaactaaacctaactaaagcccttttagttgattaacccaaagcatatttttggtcaacacacattacaaggattgggccattatttagacaaactaaacactctaaaattgaaacaaagtggtgtcatttagtcctcttccattngggccatgatacaactcacaaccttggacttttctccttgaaac

SEQ ID NO: 254951 - DNA, 424 bp, Glycine max
  unsure (1)..(424): unsure at all n locations
attttcataccaacattatgtacatagagagagccacacagcttacaggtagtaacttagaaagaatgtgtattttggagctgctaacatgaagctgccctgcattgatgtactcgtccttgctcatagncaccgaaacatttacagacaaagaacctagcagcaattgaaaatttaagacacagtaaagtcatatattctttgcaggaaatgaaagtctctggtgaacttacagtcatagttagcccatccaattcgttggtgagctatgtcatacacaactatcttatcctttatgacaagatctgcaagtaaatcaatcttattaatctcaaaacatcatagtagatcactagttgatgtgatatatttgatgcacaatntacagaanacaagcacggataggacaacttatgattagcat

SEQ ID NO: 254952 - DNA, 451 bp, Glycine max
  unsure (1)..(451): unsure at all n locations
gcttaaatggtgaggatgttatacatattttatataacaccatgcgattcttgtctactatgaaagtgaccttcaagggaatattccatggaatccttatattctcttctatactgtcattttcttaaattcaaacattagctattcaaatgtaagagaggcacatagaatttgaataaaatagtacatgtgcacttcccttttttgtgatactcaacctttgagactagatgcatgagtttaccttatagcactgtgttacactgatatgtacaggagtggatgctcactgaatatagcatgtttgcatgctaggttaaaacatagcatgctcttgatagtcgtagatgatatttaatgttgcacatccctttaacatagtaatcatgtctactcgtcanaactcattagaatatcaataatttatacttatctgtatacatcataatct

SEQ ID NO: 254953 - DNA, 418 bp, Glycine max
  unsure (1)..(418): unsure at all n locations
tgctaagcccaattacacatatcttcaaacagatatggatttgcgcttancgcggatagaggcgcctagtgcgactactctattggacaacagtgacttaatgagcaagctcgcttagcccaaatccaacaatgtgaaaaacggagagataagtgcgcttactgtgatacggcatgcttagcgcatagcgaaacacaaaaattctaagtgtttgagaacacaacacttgcttagtgtatagacacgcttaacgaggtcatacgcaatagaattctcaatcatagaagatgaacgcgcttagagggacatggccacgcttagcgagttcatctggaaatccagatattcaacacataatgatgaactcgcttagcgcacagccacgcttagcgcgctaatcgcgatttccagatgaagc

SEQ ID NO: 254954 - DNA, 353 bp, Glycine max
aagcaagagagtccggacttggaaggacacatccccctattcggtggaatggcatggaaacgcccgctaccacgacaaagaaaccttcgggttaaagctctaagttggcctaggcttacagtcttccttatgctaagggtttgtggcttttggctttgaaattataatacaaggagctttctttatctggtgctggtctctacccattctcattcatttgcatgcttacttctttttctgaaacggcagatccgatgacgagtccctcgaaggtactaatacctaagacccggctatcaacttcgagcaagacatgaatcaaacggatgatgaaggacatgaggatgtgggac

SEQ ID NO: 254955 - DNA, 436 bp, Glycine max
ttaaaaattgtctttttactatttttgaataacaatgtcttcgaattaaattatggaaaatcaaatataaattcataactaactacacataccaaaatgtcatcctatattaggttctctagagattcacggacaactttccaattagagtgaacagttggaatattatcttgagctacgacctctagatagctatgaaacttttctttatgtgggcatgatcctctcccagtggtaggattgacattaaccattggtcttggctgatccaagcttctaacattaagcttctcagtcgggtcgatcgtttactactccgagacatatcctccgaaggatcatctgaatgtagaggggaccttgggggttgtgccttactctgtgcaaataaaacacatccattattgtactaataaaccaaataacgtgtacgtat

SEQ ID NO: 254956 - DNA, 472 bp, Glycine max
  unsure (1)..(472): unsure at all n locations
atcctctgagacacccgcacgcatgcaagcttgtagaaaatcttgaagatgttttgtcttttacatgcccaactcctttgagtggcgtttgtactggttgttatattgaatgttgcatcttttgtgcatcatgcatcatcatgaataagtgagaagaaaattttctaagttagaaaagtttcttcataaggcaaaactctctgttataatcaattacgcttaggatgtttaattatccacggtaagtgcactgatgattccatgtctcatacttcatattgcatggaaatagtataaactttgtcagcaagtatttgtaatttttcatgaggcaaaatacttgtacttgggggcatgtcatttggtttttaactcccttgtgacttaggctgatcaccattgggggggggagttgtctttgcacgacagggtgacctcgacacttgctgcctagttnttctaagtgagagtg

SEQ ID NO: 254957 - DNA, 463 bp, Glycine max
  unsure (1)..(463): unsure at all n locations
ntatcaatngtcattattgagttgattaactaatttgctattattgggttgctnggatgattntcacgaatgtcttgaccctgtggatctcttcatgttagatgttacccattccttgatgttcattgagaaatatgtaaatgttttgtctgtctctctttgatatccttggattttgttctttatttcattttgcccaggagtacaaaaggctaagtatggggggttttgatgtgtcattattttctcctatttcttaaccctttttgcaccattttaaatacttattagtcttaattgtcaaatttatgagacagttttattatttgggcccattaagctaatttgatgtttttaatctaattncaggaattaatgaagcattgggcttggacttgaagagggcagactaatttattctacaaaattagatcttatcttatcttatcttatctagatatta

SEQ ID NO: 254958 - DNA, 350 bp, Glycine max
  unsure (1)..(350): unsure at all n locations
aataaatattcatccctagagtgtgccctcatcttgcgacaatacatcttgagatgggtcttaggacaagtcgtccctttatacttgtcgaaatcaggtaccttgaattttggggggatgacgacatccggtaccaagcaaagatctgtcatgtccgcgaacggatagncaccaaatccttcaatagctctcaatctctcctcgaggagatcgaggttccttctttcttctgccgtcgggggtggtccttctgtggacaagaatattggttgtgctgtgaggttgtgctgacccaatgtgctgggtgtcggcccctccacgaggatcggaggggtagttattgacatccc

SEQ ID NO: 254959 - DNA, 385 bp, Glycine max
  unsure (1)..(385): unsure at all n locations
gcgcgtactgatgggtctatgattgtgttgttgggntttgacccacgcgggtgttgaagagacagcatgggcatctccctccttcctttttgcccctgttgccccgattcttttggcattcgcgtttgtggaggaaacgtaatcaaactttcctcttttcaatccaacctcgattctttccccggcaaacaccagatccgcaaagctggacgacatgtaacctactagcttctcatagtagaacactggcagagtgtctaccatcatggtgatcatctctctctcaaccatgggaggagctacttgtgccgccaaatccctccatcgctgcgcatattctntaaaggtttcaccctctttcttgaacatattctgcagttgagta

SEQ ID NO: 254960 - DNA, 349 bp, Glycine max
  unsure (1)..(349): unsure at all n locations
aggggaagcgcgaaacttcacactacattcttaantgcatgtgttaggcaccatgagccaaccatgttgggatcataaacccatttctaaaaataaaaaataaacactcaacaaccaaacaaaataactgaacatggtacctaaatgcatggttaactaggaaaaggttttcttcgggcatctcaatttcataattacattttccatgcatagcttaaagcatgcccgagtcattcatccctatgagatgttcgtgaagtattggcaatcagaattgtcattccttggatatagggtcgaaccaagctcatgcttttataaaaaggttcatcaagtcaagttgaaatat

SEQ ID NO: 254961 - DNA, 288 bp, Glycine max
  unsure (1)..(288): unsure at all n locations
tctagccaaatggacttaccttgattaattcctttatatccnctgtgagcctatnttcccctttctttggtttgtagctcattacaagccttaagtganaaaccatgatatcaccttacccttaaggaattntggagctttggaattgttttgggaataagtgtgggggggggggggtgnctaatctctcattctcataaactcaactctgacactgtatctacttctttctcttattctttctctcgttttccactattctctatcccttattacgattcttctcta

SEQ ID NO: 254962 - DNA, 427 bp, Glycine max
  unsure (1)..(427): unsure at all n locations
tcagtaacaatctaatagtggaggattttcttttagctcttcacacattaaccaaatgggtactataactaagcctcagatagggtaagttctttcatttacttgtagcataagcaaagctgaccatgtngcttgctctttaaaaatctttttcatacataaacgaattagtcccgtaatagttcaattgcccactggtcaacaagtgatagccatatattcaagaactgtgaaattttaagactatctttaccttgaagatgtgttgtatttgccaagtttcaatttcaacctcatatctatttccaaactagttgcaaatttgagatgccaatngacttcttttggtgatcattgctngatacaggatgtgaccaaccagaagatgattggacaactgagtgtgtgcaagaaacttacaacagat

SEQ ID NO: 254963 - DNA, 338 bp, Glycine max
  unsure (1)..(338): unsure at all n locations
ctttgttttggcaaggaagttaatccaaatatccttcaactatgttaaacataagcataaacacaatttaacttcctttggcctcaaacatctcaaagatcatcataataaanaatttgagtattttgctactttccagaggatgaatgaagatagaactcaatagaaaaaagagcagacttatcataatcaaagggctatagtggctggcttgaaccacttttgaacactttatcttttataattcattccacatggaaaaataatgacccttttaagtattcccattaatactcgggtttattctttaccacccacatccattattcgatatgaac

SEQ ID NO: 254964 - DNA, 363 bp, Glycine max
tacatgaaagtacaaaaaaaaaaaacactattacaaagactactcagaatgccctgcaatacaacgctaaaaccctataatactagggggtccttaacttgtagggcatggtgcctttaattagtagggtaccttaccaaccttaaatgacgaaaatatcatgcccaaaagaaggacaacctattctaatatttacaaagaaagatgggctcatacttacctctactttcatgtgtggtcttctaggttaccctaagactatctgctgctgtatatctctcgccacatcttttgaaagatagaacatgagtcgagacttagtcctacttgtgcttaaacctgtcagtatggatacctaacctt

SEQ ID NO: 254965 - DNA, 393 bp, Glycine max
cccaactatccggtagtgatgacaatagaatcaatgccttcacctcatccttcaaattaatctggactggattccactgggcaagaatagtattaaattccataatatgatcagttatagagataccttctcccatcttgaggttgaacaatcggggcatcaagtatactttgttggctgccgacggcttctcgtacatatctgataacgccttcattaagcctacagtagtctcttcatttacgatgttgaacgtgacgttcttggcttatgtcaatctgatcaccccaagagcctatcgatctaacaagttccattcttcttgtttcatctcattttgcttaacccctgataagggctgatacaacttcttatgatatagataatccttta

SEQ ID NO: 254966 - DNA, 415 bp, Glycine max
  unsure (1)..(415): unsure at all n locations
gctgtactggccccatgagaaaatcacacgtcacatttattctctttatttgggagacaactggcaagcaacgacgcatcagcgttcctactattatcgaccatcgtgacaccatcattgtgcgtaagcccgcactctcttcttacctttggttcttgtacgggcgcgatcttcacccgctaacgttctgttcacacctcgatagcgcgttgagggtgcaaatactggcttccctatcccatctcaaaatcaaccatggcaaacctacttgtcttcgtttctcctcaaatgcggcttctagaatcacaagattcgcccgcatgaactctaccgtgaacacaccgagttctccaaagcatctgagtcgaataacgtgctcattctaannagctcgtgatgcnggtatggctgggta

SEQ ID NO: 254967 - DNA, 453 bp, Glycine max
  unsure (1)..(453): unsure at all n locations
cttgattaattcaagaatgggatatatattatatgcgttgtgttcaacacttcaaaatctttcaatcattacgttcttggtacgcatcggaaagaaaatgatcaaatttggaggatctttatcctaattctgcactttcttacatccattggattgatgatcacttgtattattggcctagagttgtatcgatattacccattccatatgcaatcatatatatcatcatttatgattattattacaatcaaacccacaaaattatatagtgcccaacaaaatagtgattatattgtacaacaaaaatgtatttatgttttggattataatgaggcatacaatgaaaatatattnttaagtgtgtcttattatagttcagaacggaaatatattttctttgtatatctaaaaattatatatataatgaaaataaaattttattagtatttgcct

SEQ ID NO: 254968 - DNA, 427 bp, Glycine max
  unsure (1)..(427): unsure at all n locations
aacatcttcttcgaccttggtgattcttgacttcatctcattgaagcgcatgtccacttgtaactccaaagtatcaaacctttcaccaacaaaggtttgaagaccatcaaacctatccaaatattttgaaaaagaggatcttctcaccatgttcttcttcatcaacaagtcgagcaccctttttcacccaagagccatcatgctcttttntataaccaaaggatgcaatgacagcagcgcctattagaaaggatcgcttgattggaacataaggttcagaatcaagagggatgttaaagtgttgaaagaagagggtgactangtgtggatatggcaatgaagcatttaatcgcaatgccttatgcatgcgatatcggactaagtgtgcccaatcaatttgtcggcctttatgaanagcccacataac

SEQ ID NO: 254969 - DNA, 367 bp, Glycine max
ttatgaaccacggaaagtctattctggatctttaaaaaaaacacgattacttggatgcaaggctgcagaaacacccatggaggccaacttaatactacaatcagctgacccaaagatatggtggacaaaggaagataccagcgactagtggggaggctaatatatttatctcacacgcgtccagacatagcctttgctgtaagcatggtaagtcagtttatgcatgcaccatgacatgaacacttggaggcagctttcagaatcctaagatatttgaagggatcacctggaaggggactctatataaaccatggacatcttcacgtacaaaaggctacactgatgcggactgggctgggagtgtgac

SEQ ID NO: 254970 - DNA, 321 bp, Glycine max
  unsure (1)..(321): unsure at all n locations
gactttggtgatattggatggtctccaatctctgaagagcgctttgtcacaaggcatatgggtgggtcaaccactatcaatcaaccaactttcactagattcattactcaagtaacatgtggccacaaaacagggatcttcctcctcttgattagcagtctgagctccttcaccttgatgattcttattgtggaaaatcacagcttcatgccccatatggntgcacttattgcatattgcatcttgtctctaccaacatctgaatggagggtgacctattttgccgcaatgctgacaaggtggggtaactcttcttttacc

SEQ ID NO: 254971 - DNA, 413 bp, Glycine max
  unsure (1)..(413): unsure at all n locations
ataatggatgattctaacaaacataaatcaccttgttaataattgtttctatcattncatatgacaacttaatttcagcttcacaaagaagtgcatttagcatttgctcgacctgtaaaaaatatcaccaaatacatatacaaaccaatgaacttatgattaaggataataatgcacaaatttgaggatgaatgtcacaacaaacatttttataacaacacttaaatatatagattgcgattgtcattataaaaaaatgtatatctacataaattggctttttattaggttgcatctgaacaaaacacttatttatgtatattgaagatacatgaataagcaattagcgccttacctcttgacgctctataaatcccgtattgtctaagtcgtagagcctaaatgaaactgta

SEQ ID NO: 254972 - DNA, 448 bp, Glycine max
  unsure (1)..(448): unsure at all n locations
ttgatacctcttctgtgagtcgcttctcttccactgtactcttcgtgcaatcagtttgaactttgaagttccatttttattctttaatttgaatntcgtaattttatgtatttagtcataatgccatatattgtatcttatgtgtcaagctggaatcccctcgtgggttgggtccctatgcaaagaaacttcacatacttgaaacagaaaagcttaagaaacctgattaagaggatttctatgggtggcttcacttgatgtcataattcttgggttttgtgacagcattaattccatcttgttgatgcaataactactcgtatgnggcagtacttgctgcattggaggaaacaacgtangagtagaaattgagaaagctagaagcctagaaaaccatattgagattgataagtaaagacaaaatataaaattgaaatcagtgaaacat

SEQ ID NO: 254973 - DNA, 452 bp, Glycine max
agcttgaaattaaacatggaagcacatggcatttttatacagccacaacttttcactgggatgtccggttcaggggcataatatatcacgatgcccgaaattaaacatggaagaataaggcaagttcaaagggccataacttttgactcggaagtccgattcaggcgcatgatatatcgagatgctcgaaattaaacatggaagcaagagaaaaattcaaatggccacaacttttgactcggatatccgatccaggccaataatatatcgagactctcgaaattgaacaacggaagctctctgctaactcatatggtcataacttattactcagatgtctgattcaggcgcataatatatccacatgcttaaaattaaacatcaaagcgcaaggcaaattcaaatagccacaactcttgactcggatgtccaattcagaccaataacatgtc

SEQ ID NO: 254974 - DNA, 441 bp, Glycine max
  unsure (1)..(441): unsure at all n locations
tcctccgtgcttatgctcccagtacctggaaggcctctcantttgtacatgacaatcttggacgagtcaatggggtgtatgctggggcaacatgacgaatccggaaagaaagagcgcgctgtctattacctaagtaagaagttcacgacctgtgaaatgaattactccttgctcgaaagaacgtgttgtgctttagtatggacatctcatcgcctaaggcagtacatgctgagccatactacctggttgatatccaagatggacccagttaagtacatctttgagaagccagctctcacgggacgaatcgcccggtggcaagtcctgctatccgagtttgatatagtttacgtcacccaaaaggcgataaaaggaagcgccttagcagaatatttggctcaacagcctcttaacgactatcagcccatgcatcccgaattc

SEQ ID NO: 254975 - DNA, 424 bp, Glycine max
agcttgtacaagcaaaaggccagttatggtcttcattgtgaattttgaaaaggcctatgactcagtctcatgggcttttttggattatatgctgcaaagaatgggcttttgtcccaaatggagacaatggatttctacctgcctcaattcagcaaccatttcaattcttgttaatggcagccctacaaaggagtttgctcctactataggcttgaggcaaggggaccctttagcccccttacttttcaacatagttggagaaggcatcacaggattgatgagggaagcagttcacacaaacttatatagaagttacatggttggaaagaaaaaggaacccactaatattttgtagtatgcagatgacacaatatttatgggagaggctgcttgggagaatgttcttgttttgaaggctatgctc

SEQ ID NO: 254976 - DNA, 423 bp, Glycine max
  unsure (1)..(423): unsure at all n locations
tggaagtttgacanacttggtgatactggatctttacatgttttgtttngngactgaaagagtgaatctatagttgtagacagaattttgaaaccttgatctgttgactttcttcattttaatttaattcattntactaagcctggtattattaaaatttaaaactaaaactcttacaagttaattataaactntctctagtttactttgaagtggtaatgctctatcatacaacccctttnactttcattttgtccttttgtgtcatcattttgcttagtgaaattcttgcttagttgatattagtcactggattaagattgcatgccttcaaagatcatatttattactcccgtggctagaagaagcaaacttgtgtgacatggaatgtttgggctatgatttgatttaccttttattatg

SEQ ID NO: 254977 - DNA, 264 bp, Glycine max
ttttactcgctaaacaagggcaccacaagaaatcacataatatggaaaaccgaatgataggttctttccactattataatcattacgttgaacttattactacctaacattcttatacttacccgattctaacggttagataaaacctcacgctccgaagttgctactgtatagagaactttatctagtaataaataaagctcgtatttaaataccaacaaaaaaaattcgaatggatacatgtttatcgcgaggttaatcaaa

SEQ ID NO: 254978 - DNA, 475 bp, Glycine max
  unsure (1)..(475): unsure at all n locations
ntcagaatgacaatnnttgtaaataaagaaaatatctaaatgtctttagctcaangaatganctatttggaagcaagattgtaaatctagaacatacttatctaaaaatgtatttaaatatcctacaaagggggttccgaaaatcagtattgcacttacgaaaaatctattctaaaagtaacaatttgaatccagagtagtctttccagaaaggtatttcgcatctttcacaaaatatcgtttcaaaaagtacgattttgacttatggaagaaccattttatgaacaaaaattgtaattcgaaatagtttttcaaaagtacattttgtacattctggaatgttcgttcgagataacactatttttgcttatgaaaaaggtgttccatcaaactttctctattagaatgatcattttgtaagcaaaattattttcttacgaataaatctgtctaaaaacaagtccacaacatgaat

SEQ ID NO: 254979 - DNA, 423 bp, Glycine max
  unsure (1)..(423): unsure at all n locations
agcttgccgccacggagttttccgatctatgctcttgtgtggnggaacaagctacaaaaggagagagcaagaaatgaagagccaatggttgatacatgggcggagatgaaaaggatcacgaggaagcggtatgtgccggctagttactcaagggatttgaaattcaagctccaaaaactaacccaaggcaacaagggggttgaggagtatttcaaggaaatggatgtgctcatgattcaagcaaagattgaagaagatgaggaggtaactatggctcgatttcttaatggtttgactaatgatatccgcgatattgttgagctgcaggagtttgttgaaatggatgatttgcttcacaaagcaatccaagtagagcaacaattaaaaaggaaaggagtggctaaaaggagttttaccaacttt

SEQ ID NO: 254980 - DNA, 474 bp, Glycine max
  unsure (1)..(474): unsure at all n locations
tactcagcttgaaagtaacgaggtatatgtttaagggaaactatatctttgtatcgtcacatgtatcagtacatttatgnttgtgttaagctattgtccttcttctagtttgtttcatggttttaagtattcaagaaggttgtataaccatttgtattctatgtattggtatgcatagtttatcagttaatttataccagtagaaataattatcttaattgttttttgttgaagggtgtcatttcgatatttgtagttggaataaatctatttatgaaattgtgttcaattttttgtttgtgcatatagatttcaacgtgttactatttgttttttttcaaagatatatgtttacgctatgcaagccctcaagtgtctaaaacactcaataaactacactgtctatattntccaagctccaaaaatttgatatggaatatgatgactcttctggcgggtgcaatagaatgtggt

SEQ ID NO: 254981 - DNA, 401 bp, Glycine max
actgagatccatacctatatgtttgtccatgcagacttcctcctctaagttcccatataaaaaggcattcgttacgtcaaggtgttgtaatcgccaatctaaatttgcagccaatgataagaggactctaatggtgttaagttttgcaacaggagcaaaagtttttgagtaatcaataccataagtttgggtgaagcctttggcaactagcctggccttgtacctctcaacaaacccatttgcgttatacttgatagtaaacacccatttgcatcccacggctgtttttcctcttggtaggttcaccactctccaagtctgagttttatctagagctctcaactcctccatgacagctctcttccacttaagaacccttagagcttcctgtatatctcttg

SEQ ID NO: 254982 - DNA, 430 bp, Glycine max
agctgggaagaattgcaagatcatcttctttgtcttactccttgaaaattattgccatcaataagaagccgtgacaatttagagagggatccaagactctctaatggatttccgctgaatttattaatagagagatagagatattttaaatctatctcccataagttgcggagattacacaaaaaagtcggaattgttccttcaagctgattacgtgataaatcaagttcaacaagagaagtcaaattctccaaagaagttggaatggttccttcaagttgattatatgacaaataaagtccaacaagagaagtcaattctccaaagaagatggaatgcgtccttcaagttgattatatgacaaatcaagttcaacaagagaagtcaaatttcccagggcatcagaaatagtcccatgcaagttgctgga

SEQ ID NO: 254983 - DNA, 470 bp, Glycine max
  unsure (1)..(470): unsure at all n locations
tataggagatggagctctggtggagagataagtccttgtttggctgatttaaagcatttgaattacttggacttgagcgccaattatttccttggagaaggtatgtcaattccttctttccttgggacaatgacttccttgactcacctcaacctctctcatactggattcaatgggaagattcctcctcagattgngaatctctctaagcttcgatatcttgacttgagcggcaattatttacttggaggaggtatgtcaattccttctttcctcgggacaatgacttccttgactcacctcgacctctctggtactggattcatggggaagattccatctcagaattggaatctctccaatttggtgtatcttggccttggaggtgattctgatgtcgaacctctcgttgctgaaaatgtagaatggctatcaagtatgtggaagctagaatatcttcatttgagtta

SEQ ID NO: 254984 - DNA, 214 bp, Glycine max
actaaatcgcttacaaatttttttttttatgtagcattaatggagtcaaattccaccccaagcaattctatatatccaaattgctctgaggaaaggaaaacttagcctttagtgacaaaataaaaatagaaaatgcttcatcacaaagcattaaagacttacgctatgaatattttcataaaagagaacatcttatattgaccacgtgttacaa

SEQ ID NO: 254985 - DNA, 388 bp, Glycine max
  unsure (1)..(388): unsure at all n locations
tgagtggttgccaaattgattttcaaggtaagtgatttatatttggattcttttttcttggatacaagtttactttaaaacttatgggtaatttttcaacctaatggtaaaagtaactttcatcacttctagtcaaactgaggttttaagaaaaatcaattttacccaacaaaagttggaatacccaaacatctatattntgacaaaatcaagtttgactggaatcaaaatcaattctcatgacctcccccatgagaccaaacacactatangcaatctgcaaaaagtcttcatgtggtgatgattaagtggagagtancataattgactttgcttctttgtgaaatatanatttgtgaagagctgatcaaccaataaaatgagtttg

SEQ ID NO: 254986 - DNA, 414 bp, Glycine max
  unsure (1)..(414): unsure at all n locations
tggaaaaaggcaaaactgatcatcctgctttgatgaatgcgaatattccggcaaatgaagaggatgagaatgagggagaaacccttgctatgactgccattcctacacgggcaaatttcccataagcccaacaatgtcattactcagccaataagagttcttcttacccaatcatccacaaaggccatccncaatcatccataaagcctgcctaccgtacatccggtgtcaaaacaccaaccaaaaaggaattttgtagcaaaaagccagtaggaatcaccccaaattctggtggcatatgctaacttgctcccatatctacttgataatgcaatggtagccataatccntgcccagggtcctcaacctcctttttcaaggatacgactcaaacacactatgtgcatatcatgg

SEQ ID NO: 254987 - DNA, 425 bp, Glycine max
gtcagaagaaacacatgtttgttcttcttaagggggagaatgtgaatggatgtatacatgatcttgatgatgtcaaaaaagaatctaacaacgctgcttctaatgataagcatttgcttcaagaataaattaagattggtccaacacaccaagcctttgtttaagaatcactaaagaccaagccttgccttaaaacaaagtgctttcaagacatgcaaggctctggtaatcgattaccaaaagacagggttgagaaatagctgttgaaaaagggtttgaatttgaattttcaacatgtaatcgattaccatatgtcctgtatcgattaccagcaacgaaacctttggaaattcaattccaaagtcatatttcttcaattataactgtgaatcgattcacaaacattgaatcgataccaatggaag

SEQ ID NO: 254988 - DNA, 424 bp, Glycine max
  unsure (1)..(424): unsure at all n locations
tgggattgcgattgggcatctatttcgactttnctatgctgtctctttatacacaaaacagccccaccatcccaattntgcaaaatcatattcatatatcattggggcatttcaccgagcacttgatgggcacatgtttggacataaattggcagaagatgggggcaatgtggcatgccccattgcttcaaaatacaacatangcctaaggccttctcattcaaatcctcaactccacaaaacaagcatggatttagatccaattgcttcacgaattttgaaaaaatgagcaactaaagcaccaaaacacatcaatggagagccaaataaccaagggaaattgcacttacttgtggggagtgaattaaagcatgaaaagggaagcananacttcacaatggaagctttggggttgttgtctcgt

SEQ ID NO: 254989 - DNA, 361 bp, Glycine max
  unsure (1)..(361): unsure at all n locations
atgacaaaaagctcaaagatcaagaacaattcttgataacaaagatgatgatcttcagaatcaaagaatgaggttcagaatgaaacaagaacacttcaaggttcaagaggaaatttgatttccagattcaagaatcaaatttcaagattcaagttcccagaatcaagatcaagattcaagaatcaaaagaagacttaatcaagataagtatgaaaaagttttttcaagaactgagtaacacatggatttttctcaaaaccttcttaccaaagagttnttactctctggtaatcgattaccagattattgtaatcgattaccagtagcaaaatggttttgaaaaagttttcaactgaattta

SEQ ID NO: 254990 - DNA, 467 bp, Glycine max
  unsure (1)..(467): unsure at all n locations
gtgtctgaccactcagctgaaacttcccatacatatattatatgatctaaggtccacaagtacatgagatgagagggtgcagactgcaaccccctgatcaaacagttacagcaagtgaaaagagaaaagagtggtacagacgtattaaataataacacaaaggtgcatataaactaacagattttgagagaagagagaaggagaaagagaattgtattggggaattcaacccaactgaagacagtttacaattctgtttatataacagttacagttatgtaactgccaactgaccttagttagtgacagctgtcctaactaacaactaaccaacagcagtcctactaactatagttagacttactgacttagctanaagaaaatacagtgtcgagtaagtatactccaatacccctcacaagctcatgagggggtggcagaaatcctttcaccactgagcttgatct

SEQ ID NO: 254991 - DNA, 352 bp, Glycine max
  unsure (1)..(352): unsure at all n locations
tcattaagaactagctcttttcttcctctattgcctttagttgaatacacctttgtttgactcttatttgggtcttaaccctctcatgcatcttctttacaaattctgacctagattcaccttctttatgtataaanaaaattgtccattgggaggggaatgaagtctaactgtgttaggggattgaacccatatacaaccttataaggggactgcttggtggttctatgaaccccccttgtgtacgcaaattctacatgaggaagatactcatcccaagacttatggttgcctttcaaaagagcccttaacagggtggataaagacctattcactacctctgtttcccatc

SEQ ID NO: 254992 - DNA, 461 bp, Glycine max
  unsure (1)..(461): unsure at all n locations
tctttganaaaacttncttgagaagctagagcttagctacattcattttctcttataactaagctcacctncttgagaagctttcttaagaagattcctaaagaagctagagattagctacacatacctctctaatagctaagctcacctccttgagatgaaaagctagagcttagctacacacccactataatatctaagctcacccccatgacaaaaaaaacatgaaaatacaaaaaaaagtccttactacaaaggctactcanaatgccccgaaatacaaggctaaaatcctatactattagaatggccaaaatacaaggcccaaacgaaggataaacctattctaatatttgctaagataagtgggctcatacttagcccatgggctcaaaatatatcctaagggtcatgagaactctagggccttccttggatctctagcccatctacttggagtt

SEQ ID NO: 254993 - DNA, 461 bp, Glycine max
  unsure (1)..(461): unsure at all n locations
agctngaagcaatgcttaccctttgaagcaactcttgttgattcttctttggcatcatcaaaatcatgtatcatacattcacattctttaggtaccaattcaccatttacagggtgaattggttttcaaaacaaaacaaaattttaaaaccatagttgcaaaaactttttttttgtacagatcgtatcacaaaaatttcataaactgtactcaatcaatactgaatcaatcctccctttacaaaatatccttgttaaagttctttctttcaaaaggatgttntcttgaacctttagaaaactgatcaagactagaatgagaaagaaagataagatcaagagaagaagtccacaacatntttatattggttcactctctatcactagagaagctaatccagttatctaatccaaaacctaaattagatnttcactatgcatatagaatccttacaagcaatc

SEQ ID NO: 254994 - DNA, 400 bp, Glycine max
acagagtggtacctggagatatgtcgcgggtgtcatgagaccttggggacgtcaggtggggtgctattgcccaaaaccaagcttgaccaatcccgacccaacccgggcatagtcggtcagtgagaacctgtgatgtacctaaacaggcgagctcctggcagtcaacagataaaaggaacaaagaccacaaagcaaggaggcttgtggtggctggccagctgtgaaacttgattgatatgtgagatatggtctctggtaatcgattaccaagggtgggtaatcgattacaaggcttaaaaatgaagacaggagactaagatggtctctggtaatcgattaccaaggggtgtaatcgattaccaggcttggaaacgaagtcaggaaactaagggagcctctg

SEQ ID NO: 254995 - DNA, 444 bp, Glycine max
gcttggaggagatggtggtgtggttttgttgtgtattgcagtgttggagttattattccatctggataaaagattgtggacagaacacaaaacaaagaaggtgaaagcaaccattaatgggaggaagaaccacgatgaagagttttcaagagaggttaacattgggttttagttgtagtgtgtagtatcttttccttaatgcggtgcttaaatatcaatacagattaagatatttataagcgttggaagtcattgcctgctacgtgtgtttgtgaagaatatgtttacgtttcatgattttacacacgagctacgcgtgcaacacttttttgaaggaaaattattgaatgatatagatattttattattttaataactcttctaccatttcttatttattagtaatattttttataacatcataaactctcttatacttatatt

SEQ ID NO: 254996 - DNA, 420 bp, Glycine max
  unsure (1)..(420): unsure at all n locations
atctaaatggaatcatgtgccctaacccacatcacacttatcttcgtttgttcatcgtccttcttcgtcggcagctaaggcatcacatccatctattaatattgaaagagcaaaagaaatcaagagaaaaattgtggaagcgaanaagagctaaagtgaaaggtatagtgagggagatggagtgtttgggttaggtctagtcgattgtgatgttggatcgattgtttgggttcgaagaaggaacggttcatggtggcctagtcaaatacttggccttgatcacctttctacttctaatcttacttctcctcgttcaggaactcccgttaagcttctcagaaaggaagatcccaacatgntaatggctttttttttccttttattacatttattattcctattcaataattcatatcacac

SEQ ID NO: 254997 - DNA, 462 bp, Glycine max
  unsure (1)..(462): unsure at all n locations
gcaagctttctctctccagaaaaactgagttgcttgaattggtatattcagacgtttgtggccctttgaaggtgaaatcctttagtagtgcaaatatgatgactaagacattactaagagggaagtttgaagcttgctgtaagatcgtcggtttggcggtcacctccacatagntgtgagggggagatttgttgggttcccttcctatatggagtaaaggcccaaaatgagaaggtctatatatatcacttatttaagtgaagagaggtcagattatagagtgagatgcaatgagagggactcatttgagaggaaaaaacagttacaaatcattgagagagaaagaaggagagagaaaatcactgtgattttcgcatacccactagagaatgtttttcagattgcaactacggattcgttcactgttggatcgggctcagttttggacagcatggtctatgc

SEQ ID NO: 254998 - DNA, 496 bp, Glycine max
  unsure (1)..(496): unsure at all n locations
cattacggacctatgatactcagcttacaaaagttatatggcttgaaacaagcaccgtggcagtggtacaagaagtttaatgagtttatgagcaactcaagattcaacagatgtgacatgggccattgctgctatgttaagaaatatactaatagttatgttgtccttgtcatgtatgttgatgacatgttgattgcaggatctagtatggcagaaattaacaagttgaagcagcagttggcagaaaactttgaaatgaaggatcttggtccagctaaacaaatccttggtatgagaattcttagaaacagatcagaaggaattttgaagctgtctcaggagaaatatatacacaagttgcttgacatgttntaccttgaagattctaagaccaggaatacccctttaggatctcatttgaagttntcaaagaagcaatctttgcagacagatgaagaanaatgctacatgtcaagagtaccatatgcattagaag

SEQ ID NO: 254999 - DNA, 433 bp, Glycine max
agctttgcatactttcatgtataggttatatttttgcttgctcttgatatggaggttgtctattggaagaacttgcttcttgtctccatccaaagttctgatatggattatttctccaaccttgcatgaacttctccaaggtgtcttcaagctttgcatcctttcatgtataggagaaaaatatgcttgcttttgatttggaggttgtctattggaagaacttgcttcttgtctccatccaaagttctgatttggattatttctccaaccttgcgaaaaattgtttgtataagatttattggagagaacattgaccacttggatggttgcctccacaaaaatcacatctaagactttgtgaatctgaacctacaagaacagaatgtaactattgtggaagtttgaccatttgctctgcgaaggcctcaatctg

SEQ ID NO: 255000 - DNA, 451 bp, Glycine max
  unsure (1)..(451): unsure at all n locations
aacttcgtagcttttttgcttgtctagtccaacaagagggatcttagatgaagcttagtttaagttagtcaaaacctaggaaggctatctaaattgagcctagtccaacaagagggatccgaggatgaagcttggattgattcagtccaactagggatcgaggtttagtaatttaggctatagcatagaacacanaaaataggattgattagagaaacatccttatatacatcaactggtctgttagaacttcccaacacttctacctactgctgtcaattttacttactttcatttttactgtttttatcctagacctagtttaattctattttaaaccatcaattatcaatgtttctttcaacaatgccttatttctgaatttaacccggtcttagactagtttccctgtgttcaatactcggattcatccgttntaatttttaaatac

SEQ ID NO: 255001 - DNA, 446 bp, Glycine max
  unsure (1)..(446): unsure at all n locations
agcttcgagaattgcccaatctctcttctatattctgatntcaggcttaaataggttgctttgtttttgctggcacgcttagcgcgactatggaccgctcagcgcgcattagtggatttcggcttagcgcatgtttttctcgttcagtggatggactgaagcggtgcacttagcgggatgacccttcgctcagcgcaaatgcacagctcatccttcttccagattcttcctcacgcttagccgaggagtgttgcgctcagcggatggtctctaagccagaagattggcttagcgagcggatgaaaatcaacacttcacaaacttgcctaattaacctaaaatagagaggaaatggttattaaacacacaaaatgggagtactaagtatttattacctatctttaacaaaagtaattacaacactacaaaataaccataaattggag

SEQ ID NO: 255002 - DNA, 473 bp, Glycine max
  unsure (1)..(473): unsure at all n locations
tcagttcaggtctcaagaaaggggncntgtgatatttngttatgtccttcattaaaacaacaccccatactaaaatgttatataaaatcacaaaattatattagtctgaaaatacctcacgtataataaataaagtcaaataagtaagtttgtacttaaataaaaatattattctcaaatatgggcgtctaaaaataatcgacgctaaaagtataacgtaattagccacatttgacatattaacaaagctaaaaatgtatctaaaggtaactaagtcttcaagtctcctcaattccgacagtttcttcctcgtgttttgaaaacacttttaatgagatgattatcttagtaaataaaacaataatagagtatttgtaaatagtgttgttcttagccggtgtagtaatccggaaaatcaaccatagtatctgcaatggaattaagataagattatatgtttatatatatatact

SEQ ID NO: 255003 - DNA, 456 bp, Glycine max
  unsure (1)..(456): unsure at all n locations
tatgaaccatgctatgtgaacttgtcagtgccatgttaggaagaagatgctttgccatagaaacctgtcatagaggtagttatcattctaaaagtagttaatgtagtgaatagaagtagttatcatgtagtggatagtagtagttatcatgtaatgcaatcatcggctataaataatttcttctgtattaaataaagcacgcaaaaatatattcagtaatatctctttcttgctttctttgcttaacgaagattcccttgatctcgaatacaagggcgaacaacctaacaattggtccgacctgccgctcttcaatggcatacatcgaacttttcgtcgcctaagtggaccacctcgaggctgtcacggccaaactcgctgcagcccaaactttcatggcttccanacttgatgccattctctggatattgcataccatggtacccagacaaccct

SEQ ID NO: 255004 - DNA, 356 bp, Glycine max
cgcatcacatatagagacgcacgaaaatgaacaaccgtagctctcgagaaattcaaatggtcatcacttttcacactgaggtctgattcgggcttataatatattgatatgctccaaattaaagatcggaagctcttgagatattcaaatggccataactttccacacggatgtccgcttcgggcgcataatatgtcgagaggctcgaaattgaacaacggaagctctagagaaattcaaatggtcataacttttcacacggatgtccgattcggaagctctggagaaattcacatggtcataacttttcacgcggatgttagatgatggcgcatgacatatagatacgctcgaaa

SEQ ID NO: 255005 - DNA, 338 bp, Glycine max
  unsure (1)..(338): unsure at all n locations
ttcattttcaacttggagccgttcgatatattacgggactcaatcggacaaccgcgtataaagatattgtcgcttgaatttgctaagagcttcccgtttcaatttgggagcgctcgatatattacaggacccaattggacatccgtgtataaagtttttgtcgtttcaatttgctacgagctttcgttttcaatttggagcatctcgatatattacgggactcaagaggacatccgattatgaagttattgtcgtttgaaattctcagagcctctgttctcaatttcgagcgtcttgatatattaccggactcaaatcgacatcccaggtanaactta

SEQ ID NO: 255006 - DNA, 233 bp, Glycine max
  unsure (1)..(233): unsure at all n locations
ctggaggaagagaatgagagagagagagagagagaaaaaacaaagtggcgtgggaatgaaggaaagatagggagagaaattgaactttgaagtgaacaccctaaaatatttacagntataaattcatgttaattgcattatcttgtattcgacatatattgacttgatgatttaggtatgactgagtagttgtgatgaattctcgtgggatgtgagtcttggatttgtgaact

SEQ ID NO: 255007 - DNA, 385 bp, Glycine max
cctaaatttacaggtttgcttggcctcaagcaaagaaagaacaattcacttgtcccttagtgataaaaacaagggccaatcaaaacaaaatggtgtttgattcatcaaggaccttaaccatatgaactgaatatcatggaatgcttaaatcaatcacttctcacaagcatgcagtttttcaaagataggagcacaagtattagagtcacagctgaaataagctagtaagcatgacagaaatcaaggaaggatcatcaacccaaacctcacagtcattatttcactcaaactcaagtgtttaggcttattccatcataaacaaccaacacaagttccagcctttgcatttcatctcctatcatacaacaatgaacacataaaaatg

SEQ ID NO: 255008 - DNA, 403 bp, Glycine max
gaatcattgtaagacttgatcgctttcatatttaccttttttttgggtactatacatagaggccaaaaaaactgttttggtgtacaagagtgtaggactttgtttgaattttccaaattctcctaccactaaactgatcctagtggttggttgaagaaactctttgagcacaagcttgaacacccagtttgcaacttaaaacacctagtttgcaacttagaaatattaattatgctttgtaaactaaaaaaaaggaaaaaaaaggcacaactatatttgtatatttattgtgcttttggaaaaggtgaaaatggaaggaatggatggaaacaactttgtgtcattgaattaccttacagccatatgaaaaatgtgtgtttcaattttttttgttgcacaactg

SEQ ID NO: 255009 - DNA, 244 bp, Glycine max
gatataacttctaacgggaatgtgatatgcttaggcgcctaattaagctatttactcaaatgcaccttacatgtaattgtacacatattatttgcctatatttgatgtttggcgtttttttaaatattgttgttccttagggagcttgaaacattaacgtgcggagtaaaaattgcatttttgtttaatgttttaacaaaacctttttttcttatttttttggggggggggggggggtgctcct

SEQ ID NO: 255010 - DNA, 399 bp, Glycine max
  unsure (1)..(399): unsure at all n locations
tttgtttattttcgacccaccatcaagaatttcaactataaaaaatctaaagacattacccattttttatgcattttgaaatggcgaacactatgatacagtggatcatgagacaaagaataaagtggacttaactcaagcacatacatgcacctttcaaaatatttcttttaatggtaatactattagaaatatgattaaataaaatattataagattggcataataaagatttcttaccataatcatatttaccactctgcaactngaataacaagcttagaaatatgaatgacttactcaatgtcaccatgataatttctatgtcaatcgacanatgcctttaacagactaaagtattgaaagattaatagggtggattaaangaatcaactctgc

SEQ ID NO: 255011 - DNA, 377 bp, Glycine max
  unsure (1)..(377): unsure at all n locations
cacaaaccacaaacccttgcgacaggtatagatttctgattcaaggccagctaggttaccaagttaaccaatgcatccagtttgccttcaagcttcttagtctcagatgatgcagctgagtttgtagctacctcatgcactcctctaatgactatggcatcatttctggcgctaaactgcttcagcaggagtcatgtctccaagggctccatcactggcagcatctatcatacttctctccatattattgagtccttcataaaaatattggagaagaagctgctccgaaatctgatggtgagggcaactggcgcatagttntttaaatcgctctcagtactcatacaggctctctccactgagttgtctaataccta

SEQ ID NO: 255012 - DNA, 403 bp, Glycine max
catagctgagaagtccgtggatctcctcggtggtggagtatgtgtccgccattgctttggccttggctagcaatcggggaagttcttgactcccgttcaaggtatgagcaaatcggtccatccatattgttgcctcttgatgtaatgcgtcgatcacccttcctctagcctcctttttcgcgtacacttgggcatactcgtctgccactttgtgcttgtgggccgcggctagatttaattcttcttggtacctgctgacgatggctaacatgttggtctctgtctcgcataaacgatgagacaagtttcttttggaccttgagcaagcagctaactcctctttcaagatcatgctatgagctcatgattggtctctctcttccctttgaagctttagctcact

SEQ ID NO: 255013 - DNA, 405 bp, Glycine max
cacaaaatgtcatatcaatggggaatttaaaccggcgaaataacttaaaagaaaaggggaaataacttttctctaaaacttttttaaatcacctttatattacactttgtttttgttaaaaaaattcaacaacacctagaccatactatcctgtcatgtgcatgaaccatatcaataaagctattttttactacctttcttcattcttcacttagtcaataatccattaatcttattcttcacactaaattaataatatgttttgtttagcctcaagtataaataaatgagtttcactgttcattttatccttgcactgccatcatgaaaagggacaacgcagtttgtaagaatgctacatgcattaacaactatatatgatgtaatatgctctcttacctagct

SEQ ID NO: 255014 - DNA, 483 bp, Glycine max
  unsure (1)..(483): unsure at all n locations
tactcaagctggtttggatgcaagagaacgcaagagtgggtgcatattatgtgaagctnacccttttggccagcaatcagctatgggctacgccataaatagtttccttacacctagatgtttagaaattttgttcatcatgaacatgtaggtgtagaataggtagcaaaatgcctttagcaatttacacctttggatatggtagcaagatgcttggatttgtgtacatgtaattntttggtagtcaaaatatctcacagaaatatatatgttgcatgttatgtaaagaaataccttacaaagatacctttttgatttgaatgcaattntaggtagcaaaaaaacacttgaataaagcatgaaatgtagcaccttattgtatgggtagccaagattcctcacganatntgtgtatgtataggtattagaaatacctgaatgtgcatgtgtgcaattttcggtagccaaaataccttgagtatg

SEQ ID NO: 255015 - DNA, 277 bp, Glycine max
ggccacgccagggaggcgcgcaccactcgccccagaccccgcgaaaacaggggaaacaccataaaggccccttgagtaaagaccgccttataaacccccaagcagttcatttgggacaaggataagctgaagtttgagtgccaagatcacatcgttcaagttattcaacaaaattaagatttagaggtgacacaagcctaagctaaagggattaaatagaggatccattgagacaacagtgaccaaattaataaagtctttcacaatactcttggac

SEQ ID NO: 255016 - DNA, 455 bp, Glycine max
  unsure (1)..(455): unsure at all n locations
tcaacgaagccagntccaatctcggtggtactctatngggtatgatattgactgcaggtggcagacaacttctagaaaagctgaactcagctagaaagaacatccctttgaaagtattcctgctactcttgggtttctacacggcaaatgcactagctacaatccttgngcaaaccggtgattgggatgttctggntgctggtgttgtggtggctgcaatcgaagggattggcatgctaatatatagaaagctacctaccgcgaggactgggaggttgcagtctnttctagtgctggtgaactactggaaagctggcatatgtttacgtctctttgtagatgctcataagttgggaagctaagaacccgcaaaatcttggcccttgtttggctttcaatantttgctgtaagtcataaaactctgtaagccataatgttgaccgaggctcttcta

SEQ ID NO: 255017 - DNA, 457 bp, Glycine max
gcttatgctgaaatatttacaaagacctcttctttctcagcagcaaaatcaaccacagcagaacaattatgacctctccaacaacagatacaaccctggatggaggaatcaccctaacctcagatggtccagccctcaacaacaacaacagcagcctactccttccttccaaaatgctgctggcccaagcagaccatacattcctccaccaatccaacaacaacaacaaccccagaaacaaccaacagttgaggcccctccacaaccttccctcgaagaacttgtgaggcaaatgactatgcaaaacatgcagtttcagcaagagaccagagcctccattcaaagcttaaccaatcagatgggacaattggctacccaattgaatcaacaacagtcccagaattctgacaagctgccttctcaagctatccaaaatcccaaaaatgtcagtgccatt

SEQ ID NO: 255018 - DNA, 474 bp, Glycine max
  unsure (1)..(474): unsure at all n locations
ntagatntatgcttcatcatgaatacncatgtcatcctagattaatcatngatgacagagaggatctacctttcccttcctagtgattgaactctcgaaggcctttaacagtcagaatgggcatagttcaatatggcctttgtagtgtgcacaaccttcaggaatttcatctgatgttgcttcccaaagacatagtgctcacaaaactaaagaggccctaccttatgttttccaagtaagtctcacttgcttagaatttccattcccttttcacttatgcagcctagacgcagatggcacaaagaattatcattggacaagccattaaatgttgataattgctaaataagaaatttttttataaaaatagagttaanatatcttntaaaataattatttagcagttatacatgcttaattgttaggaattgattttttttatggctggtagatataaaaaatggagggattaaa

SEQ ID NO: 255019 - DNA, 441 bp, Glycine max
  unsure (1)..(441): unsure at all n locations
tccatgacaatgagaggctatacccnctttgttgttaactttgtatccaactactcttgatgtaatttctcttcttatctatttatgaatattacatttacattattttttttatgcttaatattattgcttgtggctaaatcacccatttgcatggtaagttttaggggaagcgttgggagacattattttctaatagaactagaaaagagtatctaaataaagtcatcactagggataggttgacatttgtttagcctgttatacatctttattcttaatgcaacttactattttagctctgtaaagggatttgagagagaaaatagataaattatggtctttcatgtgagggccaaagttagagtatattagtagatgcaggtgtaaattggaataattataaataaacaaaaattattaacattatatccagaagta

SEQ ID NO: 255020 - DNA, 433 bp, Glycine max
  unsure (1)..(433): unsure at all n locations
atcacatgtggtactagggggngggcgggagatggtgcaaaacaattctccacatccacaaatcacgtataaacccaccatcccctgttgcccacctccaactgagctcacgtactctcacgtagcccttatcctcgttcctctcaatgccgggtccccatcaatcctcccaagcttcgacaacatccaagtaattcaacatccaatcatcacaaactaacacagccaagaaaacagggcaaaggcaaaaaactctgcccaaaacacaaaccaatatcacagtttttcacattcaaataccccagtaacattctcttcattcctattcgttaaccggtggatcgactcgaaaattntactggaagtctctagtacacaattctacattntgaccgttgggatctgctagcaaatgtccagaaccccatatgta

SEQ ID NO: 255021 - DNA, 423 bp, Glycine max
  unsure (1)..(423): unsure at all n locations
tctctgaagggcatggntatttccagtttctggataatatctaagaatcttgccaaatgacggtccttctccttcctggaagtaccacaggatatggtacttccgcaccttcattcatagctttttctcttttcttctctctagcctgttaacttctactcctctcatcattcttatttttttcatcattttcaattttttcattntctttntaattttctacttctttttctttntcttggtcattaaattcttttttcttgaccattatttgtttttctttttcctaattgctttcacctatcacatcatctttcttttcatcagtacttttcttttcagcaactttcttcttggactctacattatccttatccttcgcctccacaaacctcttactccttgtcatcacaactttgcatt

SEQ ID NO: 255022 - DNA, 432 bp, Glycine max
acggaaaatctaggacctagccatggtataagtctccacagaggccattgcctcccttgcccagtattatgatcagttgttgaggtgctttacctttggggacttccagctgtcacccatggtggaagaatttgaagaaatcctaggatgtcctctagggggaaggagaccatacctcttctcagggttctatccctcattagctagaatttcaaagatagtccaaatctcggtgcaggaattataccacggaaagcaagtcgaaaatggggtggttggaatactgagaaaatgtttggaggcaaaagcaagaatcttggtaggtaaaggcgaatgggccccgttcatagacattctctcactgttgatcttcggaggagtcctctttccaaatgtggattggttggtggacctagcagcaatcgacgcttt

SEQ ID NO: 255023 - DNA, 401 bp, Glycine max
ttgagccaaaatcctgactcaccataaaccttgacccagtgtgagaatgtcaatccttaccctcggaagcgaaatagaatagaagggaaatttccaatctaagaaaagagaacgaaaatttccagtgaaagagaaaaaaaagaagaaaggaaattcccaatgcaagaatgggagaaagataaaagaaaagaacgaaaattcccaaccaaagaatgggagacagtaaaaaaaggaaggaagctcctggtcaaagaaaccagaagaaatgtgcagagaggtctttggaccagacaatatctgaacagtacagaattgtcaccaaatgaacaaaaaggaaggaaaggaaaccacgacctaatatggtcttctccctttaattaccaaccaaaatcccgtgcgct

SEQ ID NO: 255024 - DNA, 463 bp, Glycine max
  unsure (1)..(463): unsure at all n locations
gcaagcttaaagatgcccgagtcattcatccctattatatgtgtttgtagatnggcgaacagaatggccattccttggattacggggttgaaccaagctcacgcttttacaaaaaggttcatcaagtcaagttgaaatatggaagtaaccgtcttgcaaaattggggcaaaagatgaatcgagtcacatcactgcttcatctactgccaaacatatttaggattattgatgtccttgttgcttccagtttcaccttgacaaagatgtcatggaccatgttgaaaatctaaattgattcaaccccatatctggcgtaaaaattcgtaatacttcaactgtacatcattcgcatgcatccatgcttttcattggttgcattgctcgttgcattctttccttgaaaaataaaatataatgaacttaatcattgttataaaaaagaaagggacacgctttaccaccc

SEQ ID NO: 255025 - DNA, 364 bp, Glycine max
gatctcctcggggcggagtaggtgtccaccattgctttggccttggctagcaatcggggaagttcttgactcccgttcaagggaagagcaaatcggtccatccacattgttgcatcttgatgtaacgagtcgatcacccttcctctagcctctttttccgcatacacttgggcatactagtccgccactctatgctcgtgggccgtggccagatttagttcttcttgatacttgctgatgatagctaacatgttggtctctgtctcgcataaccgctgagacatgtttctttaggaccttgagcaaaccttcgactcatctttcaagatcagactgtctactcgtgattggtccctttcctctc

SEQ ID NO: 255026 - DNA, 410 bp, Glycine max
tacttggaaaatgagagaagttagtgaaacttggtgtttggacaacaactgaaatcttaatgataaagacgaaccactacgtataactctatatgtttgaagcttacttgatttcctttctgctttcaactgacccaatgtttgaatttgtttttagacatttgaaaatatgttgtgcttaacatgtttattttccattgtcagactatgtttctcaaaagatttgatatttgtgtttggaaaattttttcttcatacaaaaaacttgtgtttattgcaaaagattttaaaaatctctaaaatcataattcaatccccttcttatcatatctttctttacaatgtatctctctttggcatcatattatatttatattttttcatccctctaacctcaaataattatgatg

SEQ ID NO: 255027 - DNA, 370 bp, Glycine max
  unsure (1)..(370): unsure at all n locations
atttctttttacctttcgttcttttccgttggtcctcgttgatgttaagtgttgggctttgatttcgccagtggggtgcgttagggtttctgacgttgggttttctttttttcttctttgatgttgcatgttgggcttccatttcatcaatggggtgggttagggtttctaacattggattttctttttttcttctttgatgttgcgtgttgggcttcgatttctccagtagggggtgggttaaggtttttgagggtggttttttggttggtcctctctgatgttgggtcttacgcttcgattttgttaatgtggtgggttaagggttctaacatttggcattanntttcgtgtttgtttggccggttta

SEQ ID NO: 255028 - DNA, 462 bp, Glycine max
  unsure (1)..(462): unsure at all n locations
gctngagtaggagtgttggaaatagaatatatttaatgcttcccttttcatgtatcattagaatttattgtatcttaggagttaaagctatagttttaatttctcttctagtaaattgtactcatcatgtatataaacagatgctttgctgggttactaacacttgagcattagcattcagaaattcctatctcatttttctcaagctctcaaataagataaatatgaaaacaatatttgtgctagataagacaaacaatgttgtagattttttaaccaagatggatagtgatcccacaaatatgattatataaaatcaaattcaacaactgattcaaggctttagggaagacataagagccatgcaacctaataaatatactttaagtgaaaggagaagcatggcagagtgcaattcattggctcaaanaatgatgctactcaaattagttaacaacaatg

SEQ ID NO: 255029 - DNA, 443 bp, Glycine max
  unsure (1)..(443): unsure at all n locations
cttggcttctacattcacaatagcctggctggactctngtttatactttttngnttcacatgcatgttgggagacgatntaggcattntgttcttataagcctctagccaaatgagtataccttgaattaattcctttgatagcccctttgagcctatgttcccctttctttggtttgaagttcattacaagccttaagtgaaaaaccatgatctcaccctacccttaaggaattttggagctttggaattgttttgggaataagtgtggggggggtatgtttcattggatgatatnngttttgtggccatgcttgatgatgtantttggccatgcttgatgtatatacatatattgcctaatttttgctttatttttcaattgctttcaattgctactgttcacatntaaaanaaacaaaacagaaattaaacaagaaaacg

SEQ ID NO: 255030 - DNA, 467 bp, Glycine max
  unsure (1)..(467): unsure at all n locations
gcagctgaagcttttgatgatgagacaagttgtantatgttgttttgataangaccaagatagtgacaataagcccaaagaatgatttccagactaaatcacgaacaaattcaagaatcaagagaagtttgatttcaagattcgagaaaagatgaagacttcacaagggaagtattgaaaagatttttcaaaaaacaaacatagcacacgtttgtttttcaaaagagttttcacaaaattttttaagctaccagagtttttactctatggtaatcgattaccagtttcgtgtaatcgattaccagcggcaaagtttgatttccaaagtttctaactgaatttacaacgcttcaattgatttcaaaatggtgtaatcgattacaagatattggtaatcgattactagtgtatctgaacgttggaattcaaattcaattgtgaagagtccatactttcataaaagcttt

SEQ ID NO: 255031 - DNA, 434 bp, Glycine max
  unsure (1)..(434): unsure at all n locations
ctccttaagaagaatcctaaataagctagagctttttctcttatttctctctaatagctaagctcacctccttgagatgagaagctagagcttaactacacaccctctataatagctaagctcacccccatgacaaaaaacatgaaaataaaaaaaaaaagtccttattacaaagacaactcanaatgccccgaaatacaaggctaaaaccctatactactagaatggccaaaatacaaggcctagacgaaggaaaaacctattctaatatttacaaagataagcgggctcatacttagcccatgggctcgaaatctaccctaaggctcatgagaaccctagggcctttccttggatctctagcccaatctacttggagtcttctagccaatgcccttgtggggtaggattgcatcagccatcgctcgtgtact

SEQ ID NO: 255032 - DNA, 406 bp, Glycine max
tgaattcttgcctactgaatccccttcccaggcctcctggattgcacacatgatggaggcccagtcccaacacattaaaggcgtgtgcttgtccttggaagaagaacccaaagaggagttcaaagtcaccacaacccactactgcaactgggacagtactgccaccagtacttatcaggcacatgaccaggtcgtgtttggggaagaatctcacactcacacatttggtgggaagcgtggcacaaaaccaggcgagaagagacgaaccaaggccgagaagactatcagcttgccagttctaagacagtactttgcaggaagcctaaaagatgcggcaaagagcattggcggtgagatatgatccattaataattgcattctttgtctctctctactccagctcttg

SEQ ID NO: 255033 - DNA, 392 bp, Glycine max
ctttattcatctgagacaccaattctaattcttttaattaaaaaaatattagcctttgcttctcatcgtaacttaagttttactttgttctagctaaagctataatcgatcgcttaagtgccaaaacaatatggcttaaattgtagactcgaatctcacataagtttcaggactcatcgcttaagcccgagaccctaatgcttaagttgtaggtcaaaatatgcacttcataattttgggtttcgtacaaacccataacccttgacaagcctcacatgactcttaaccatgccaatcaatacctaaacactcatacaacatatgctaacccttaatcatccacatgtaagtttgaatcactcacaatcatcctaaaaccatcaatccctaac

SEQ ID NO: 255034 - DNA, 339 bp, Glycine max
gacaaatataaaacgcatgtcacataagagagccagataaaaagccaatatataatgcccgtagcattatcttctgcaaagactctgttttatttatagaacaccaaaacctgagggactatgcagacgttcaacaggatgtgacatcaataaataacataataagtatggggcacagaggcgagaagaatagctgcagcatacatatgattgacatattcaatagtagaataaaactacaaaaacaaagcatatttctcataatcaaaggccagggagaaaagttaaattccagaatgattagaagaacaacaaatcctacgcagaaattggtaaaaa

SEQ ID NO: 255035 - DNA, 68 bp, Glycine max
acgcgcgcagcttaaagaaagacgttcctttttttttatggtcagcaaaagttgggcaccaaattcgc

SEQ ID NO: 255036 - DNA, 450 bp, Glycine max
  unsure (1)..(450): unsure at all n locations
agctntatcctcagatccctcttgttgtacttgacttataccaaacaacattattgtaacaatatatttaaaaccaaaacttaatccgcagatccctcttgtaagactaagtttcaattctacttcattcaagatctaaggcaacaatacatttcccaatgctaaaatcacctaaccaagcacacaaatggttgattagaccaagagcttacataatttaagcactaaaagggctttagttaggtttagttcaagttgtaataagggctcaattggcaacctaggcatcagccttttgggagaccaaatggtggctgacttgttggctgttgggggtaacttttggttgccacaatttcagttacactcagccattaagntcttttaattccctaggttaatggcattaagttattttaattctaggttagtgggtcattactaaaatct

SEQ ID NO: 255037 - DNA, 444 bp, Glycine max
  unsure (1)..(444): unsure at all n locations
gggatttactctgtgatggaaacctttcttttctcatatgctccctaacctaatcaccaggttgaaatacaaccttntttcttcctttgttatcatgtttagaaaaactttcacttgttcatgtaacttccttacatgttcagcctttatttttccatctttatgatttaagacaaaagtgttgagcaatggcaataagtcaagaggagttaaggtattgaatccatacactatttcaaatggagaatgttgtgtagtgctatggacaactctattatatgcaaacacaacatgaggtaaacattctttccaagtctttatattctttntaatcaccactctaagaagagaagaaagagctctattcactacctcggnttgtccatcaatttanggatgacatgtaatggagagaannaagctttgtacttagcttacccaata

SEQ ID NO: 255038 - DNA, 451 bp, Glycine max
  unsure (1)..(451): unsure at all n locations
agcnttgaaagnatataatgactaaatacactcttttggaccaaactgggacaatatttgactaatagcattaatggtttcaatgctaatacgatatttttattttatatagaaatatagtattgtattagcatgagaaaacataaataaaattaagacaaagattaaaacaacttaaaaaagaaaaaatacagataatttaatttaataaattatgtgagctaataattaatgtttttttgtattgaataattagtttatatataataataaatttaattatatgatataagttggatcgggttgggttaaaaaaatataacttgttatccaacccgtatatgattaggtcttaattgggttgggtcgaattcaactcaatccgaatacttaaaaaatccaactcattataattgagttgggttagaccacatgttcacttagacatgtg

SEQ ID NO: 255039 - DNA, 412 bp, Glycine max
  unsure (1)..(412): unsure at all n locations
tactcagctatgatttatagcctatctcagtgtctgttctatctcacaaatagatttattcacttaagcatgtgcctgattcttatggccattggagcatntaaagtttgcattaaatagatatccttcatcatgcaatgaaaccattttggttgacttttgtgtaaaacacttcagtagaaaaccacttctctttggttaaagcaagtctgtcataatagagtgtgtcttttgatggaatttgataactntcagatcttgagcttcatttattctccctaggatttgataaatccttggagaatgtttttgaaaaacaaatctcagacacagtattaaattaagtctttaagtgtcaactcttaaatgttgtattagatcacgaacttagcctaatattntctaatgtttc

SEQ ID NO: 255040 - DNA, 74 bp, Glycine max
  unsure (1)..(74): unsure at all n locations
gttttagaaactgatttctttattcancaaacccagcataaaaaccgcatagtgttacaatagaccaccctctc

SEQ ID NO: 255041 - DNA, 353 bp, Glycine max
atgcactgacataaaagtattcccctttttttttttttttgaacaaaaggagagaaaacaagtgtcttttatatcacactaaaataaaactgtgtataaaaaaaaacctgttgaaatgctgaagtgtcaaataaaaatttactactaaaggacttggctagctatcatgtaaacactcaagtttgctgactatgcagtcatcaattaaatatccttggcctgccaagtatccaagaatatctttcgttttaccagacttttggaccaatacatccagtcctctttgtgggtttctggccgatgaacatgggtaaacctgtctacacagttgtctatttcaggtttttaaactg

SEQ ID NO: 255042 - DNA, 349 bp, Glycine max
  unsure (1)..(349): unsure at all n locations
ttaccctcggaagcaaaaaagaagagaaggaaaatttccaatcaaagaataaaaaaagagaaggaaaatttccaatcatagagaaagcacaacaaaaagagaaggaaaatttcctatctaagagaaagccnacaacaaaaagagaaggaaaatttccaatcaaaggaaaaaagagaggaaaggaaattcccaatcaaagagtgggagaacgcgaaaagaaaagaaagaaaattcccaaccaaagagtgggagaaagtaaaaggaaggaaagaaagctcctgatccaggatcgaaagaaatcacaagaaatgtgcataaaggtctttggaccgacaatatctgacaatac

SEQ ID NO: 255043 - DNA, 396 bp, Glycine max
  unsure (1)..(396): unsure at all n locations
ctcctataggcagccctattaggaaatgaaactccgagaacaagatctatttgatgctcaattcctcttaaaggaggcaagccatggggaatgtctngtgggaagacattctataactcctttaagagtgtatcanaaccatgaggcaactcaaaggcactagaagataaacacttataatttggaatgagtaaatacatcgattgtctagctagcatcactctttttacctncttaggtttgatgaataaactctcttttattattaattggtnnttcactctttttctcttttcttttaatttttcttggcactcttctttccttccnttttcttttggctttccctctcacaagaagttttccttctttgatttcttttctctttctctttta

SEQ ID NO: 255044 - DNA, 414 bp, Glycine max
  unsure (1)..(414): unsure at all n locations
tgagctttgggaaagaaatggggtgaaaatggcttcaccccccnccccccctttaagttttctcataaaaccacgctcgcccaagcgagctgatttcaattttttttttgcaaaaatattttttgcagaggtgcgttattcattgttataatttctctctaaaaatcctataattgcatataaacttaggcgaattcaggatataattcaagaaaacgaacaagtatgaaaaaggaaattaaagagcaaatttagagatactaggctgcctcctaggagcgcctctttaatgtctttagccgaacgcagggtgatgatcaatcgatcatgggcctaacacctattcgtacttgcccctaagtngggacaacagaaagtggcattatgcanaacatgcaaaacattaatacaaga

SEQ ID NO: 255045 - DNA, 380 bp, Glycine max
  unsure (1)..(380): unsure at all n locations
ccatatacaatcaaggcaccttcgttacctagattatttacatgtaccttccaagggtggattttgttacctacattacacacatttcctttgctaattcacatacattcatactctaagcactttggcctatcanaaaattgcattcgtgcacatnctggtatttctaatacctatacatacacaaacttcatgacgaatcttgactatctacacaataaggtgctacatttcatgcctctttttttcaaagttttttttttactacctaaagccgcatgcaaattcaaagtatattttcttttgctcactaaaattgtatttcaattaaaaggtatttttgtaatgtattttctttacataacatgcaacataattat

SEQ ID NO: 255046 - DNA, 361 bp, Glycine max
cctggagatatgtcgcgggggtcaggaaaacctggggacgtcaagtggggtgctattgcccaaaaccaaacttgaccaatcccgacccaacccgggcatattcggtcagtgagaacctgtgatgtacctaagcaggcgagctcctggcagtcaaccgataaaaggaaaacaaagaccacaaagcaaggaggcttgtggtggcttggcaactgtgaatttgtgtgatatgtggagtatggtctctggtaatcgattaccaagggtgggtaatcgattacaaggcttaaaaatgaagacaggacgctaagatggtctctggtaatcgactaccaccgtgggtaatcgattaccaggcttaaaa

SEQ ID NO: 255047 - DNA, 403 bp, Glycine max
  unsure (1)..(403): unsure at all n locations
gctctagaacattttcattggatttaatgatgaaatctgtgcattttcaggtgaaaaagaggctaagttttgaatttgcaaatgtagcagtggggcctagatcagcagntgggctaagcgcatatccaccgcctaacgcagattcagcgcgcttagtgcaaaggagaatctggcagagcatcagcatcaaaggagaatctcccttgcatttgttttcgtcatcttcgccacgggaagccggaaggtctgcatagttntcttaattgcatgcattggacaccatggtaatgactgtaaatgagccatgatacccaatgcattgtgggtaagaaagggtggtcttctgggctcttgtgtccatagantaacgtgttttgcatgcatagcataaacattccctgat

SEQ ID NO: 255048 - DNA, 344 bp, Glycine max
  unsure (1)..(344): unsure at all n locations
cttgaatatcttgcccctagggttattttgtttcttcctcacctaatcgttacatggtgactttttttgctaaagcgagtttaccgatggtaagctgtgactccttatcatgttaaataaattcaccatcggtgggcttaacctgggtatcataaaaaataagttaaccggtctttacttgaagtttattaaagagtggaaataccagttaaccaaactaaaatcactctaatcagcttttgtccaaaaaatggttgaatcgtcaaggccaatgcttaaacgcttttgttttatantaaacaaccgttaaagctaaatcacactcaataatttttgttttaaaa

SEQ ID NO: 255049 - DNA, 477 bp, Glycine max
  unsure (1)..(477): unsure at all n locations
ttgaattccaagctcaatntgaccatcaaaatggtagaaattgttaattcttatttgtnacaaaatntaatatcattttctaagatttccaaggactactcactcgttccatttagagttctgtagtgtcctataagccctgcataaggaagatacatcaagttagcacaaaatttgaaatttagctataattctcaattaagctcaatcattcgcctaagatcaaaactgagttaaggtgagaaaataagggtcaaatagatgtcaattgagttaagaagaatagataaatattaaactacgaatgctcaatcactcctcattggtcaaaacttttcgtatgtagccatttttgagacatcagcaatcagctctgacacaactcgattgttctcaggattattgactgtccncacaaatcaatacaagaattntcagcctactttatcctcactcacatttttcatgaaactttct

SEQ ID NO: 255050 - DNA, 442 bp, Glycine max
  unsure (1)..(442): unsure at all n locations
ctaagcttgcaactttcatcctcgcacagttgtcaagtattanatattcttgcactagacgaagccaaccaaccaatcctcaacaaggtcatattccatcaactattttggtcatttaaagcatccattgatgcatttgcattttgaaacccattgtccaaatcaatggaacatggctatatggaagatacaaatggacgttgttagttgcagttgcacaagatggcgctaacaacatatttccattggcatttgccattgtcgagggtgagataacagatgggtggcacttttttttgcaaaacttgagaacgcatgtgacaccacaacatggtatatgcttaatctttgacagacatgagtcaatcaaaagtgcatacaaatgacctgataatgggcgggcagctgataacctctcacatgtgttctgtatcaacacata

SEQ ID NO: 255051 - DNA, 454 bp, Glycine max
  unsure (1)..(454): unsure at all n locations
agcttctatgggtttgaaataatctattattttattatacagagagctcctaaagnttcccgtcacaatctaatcaattatgaaatgcagtaattgatgatctcgagtctcagcgactttcttctactgaaattggattaggtaatcgatttcaaaacatgataatcaattaatttgataaaacttgtcaatatttcaagagaaatgagttttaatgcttgttttaacactntataattgattactaaacttagcaattgattatacagtgttaaaccaattgtttctaagaaacttcaatacatttatcttctcatatttgattaccattgggcatggataataaaactaagtctaaaacgtttaacatgtctagtctaaaaacatataatacaaatgccacatctttacaaacatgtttggcattataaggttattaaaaccaacaaatcat

SEQ ID NO: 255052 - DNA, 227 bp, Glycine max
  unsure (1)..(227): unsure at all n locations
aggacgatgagtataccaatttccaggaagaaatangtcgccggcggtggacatctctggttacccccatggccaagtttgatccagaaatagtccttgagttttatgccaatgcttggccgacagaggagggcgtgcgtgacatgaggtcctangtaagggggaagtggatcccgtttgatgccgatgctatcggccagctcctangatatccgttggtgttggaa

SEQ ID NO: 255053 - DNA, 333 bp, Glycine max
gtgaaccacctaggaaaatgccgattgaaaaccctaacactataccttcagataatgcagttggctcaagatcaatgggaagactgattactcttggcaacagggtgtgattggattccttcaaggatatctgcatgttggatgtattctttgaaagccaactgaaaatgctactgagggaggcattctattcagtcaaggaagaagcaaacattggggaggaactgtgattgaagcttcttcaagcttaaccccacacaggactgctttatgggattctcgtactgcttcatgaagcatagaggatgctacttgcaaaccgtcagttcttca

SEQ ID NO: 255054 - DNA, 482 bp, Glycine max
  unsure (1)..(482): unsure at all n locations
agaaactaagctggcccagttggtaacaagacaaacttagtttgttctttatttgctgtacaattaanaggaccattaactataaaattgagataacattaaatgctacttttaatgcaggtcgattttaataatgatagattattcanactagtcaaggaatattcacacacacacacacaaaaaatcaaggaaaataacagaaaagttagatgaaataattagttgaaaattattaggtggacaagtgaaatggataataactaataggagtctggaatttatttatttttttgaaaaaactctttttactttttacttttttgactcatctaaaaaatacaaagaaagaaaaataaacaaaagcaaacagtaaaaaggtcaataatgtaaattaatcaagtaattgagggattcaatccttttacaaacatgacaaatngaatcacaaatcctcacttccacaaacataattcaccaac

SEQ ID NO: 255055 - DNA, 238 bp, Glycine max
agaaaagacatccacaagattggagattcaagagaagatgaactcacgactcacgagaagaaatccagaagcaacatgtcaagacttcacaagggaagtatgaaaaggatctttcaaaaaccaaacatagcacagttctgttccacaaaagagctttctcacactgttctaaatcactagagaatttactctctgggaatcgagcaccagcttcctcggagccgagtaccagcgataa

SEQ ID NO: 255056 - DNA, 405 bp, Glycine max
aaaatgtgaatgtttcaaaatatggggattaaaatcgaaaaagaaaacagtgaaactaaaaccgaatatcaaatgaaggtgaaaataaaattgcaattgagccaaataaaatattgtcaatgattattatctaaaaatttataaatgtgttatttatcctttcctgcttgatatcaaagtatttatctcaaatcaaacatttatattgctccaattaatagataattatagttatattgaaaacgaaacatactctgggatttgaaacaaataagataaagcggaaataaattaattataattttattgaaaataaaacatcattctctgctttgaaggagataatattaagtgaaaataaattagaatatataatacaaagttagaagacctttttctatttac

SEQ ID NO: 255057 - DNA, 459 bp, Glycine max
  unsure (1)..(459): unsure at all n locations
agctttatttatactttagagctatgttccttttatttatcccaactagcggttggctaatagcttaggcattttacacaaagtcgttactgtgcaaagagagtgtggcgccacaaacactttctacagcatatcttcagagaagtacagcttggcagcgtcgccttgtgctcagaactgactttcagcgtacaaattgaaaatagcgttaacaacataagacaaaagaaattaagaatgtcaagacaagacaattcanatcttcccttttgtgcgctatggcataaattgctttaccgatcttatggacattactttctgatgattactcttagtacttgaggatccgagaattgttccattgcctttgtactttgagccaagtgctaaaacacttgccttcttaggactggacgtntaggcagtatcatccaatgactgatactttagctatcttct

SEQ ID NO: 255058 - DNA, 469 bp, Glycine max
  unsure (1)..(469): unsure at all n locations
tgagagatcttcaactctcacatctgtcgaggtttctcctctcgtctctgaacaacatgtgtccatgcttaagggctcgataaactcgtctcctttatacaggtcaaggctctacacccgacatctcgccaacttccttgatgtgaaacaacctctttcgatacatcagagcttagaaggcttatgtactatacaacatccaccaaatacacgtggcatcttacgtggcactcccaaacacatgtcaaccctccatgttagccttagcataggagcacaaacatccagcccttatcagctgggctccccaaccaacaggttatctctgacctctaattatttgaatatattgncatcttntatctcttggcaggtattgaattatctacaaagatacacattatccataaggtacaattatcaactagcaattatttataaggttacacattatctgtnagtaataata

SEQ ID NO: 255059 - DNA, 453 bp, Glycine max
  unsure (1)..(453): unsure at all n locations
agcnttgagccaaaatcctaactcaccatattatctgacccagggtgagaatgtcaatccttaccctcggaagcaaaaaaggaaagaaggaaaatttccaatcaaagagaaagcaaaaagaaaagaaaggaaattcccaaatcaaagagcgggagaaagcaaaaagaaaagaaagaaaattcccaatcaaagaatgggagaaaaaaaaaagagagaaaagaagaaaaggaagaagaagaaggaacgaaagttcctgatcaaagaaacagaagaaatgtgcagaaaggtcttttgaccagacaatatctgaacaatacagaattgtcaccaaatgaacaaaaggaaggaaaggaaaccatgacctanagtggtcttctccctttgattaccaaccaaaatcctgtgcgtcagtgacttgttcgcctcgcgtcaaacaagaaacaaaaaaaaagg

SEQ ID NO: 255060 - DNA, 356 bp, Glycine max
gcctattactatggtttttttataaaaaaaaaaccgcctttggctcatttataattattttatttcatgctttttagaactcatactgcctttccatctcccctctcccttcacgctgctgtcgtgacctccgcttcaccctgtcgtgacctccgcaagctcgtcattgaaaggggaaggaaggaaggcaaggaaggagagtggatctccagaaggatccttctacctcttgcaacgccggtattatttttttagtagttcatatgttatagttctgtgtaggtaacaatgatctaagcttccactctcttcttcagcgattccatttccatggcttcctccctcgacgacaactt

SEQ ID NO: 255061 - DNA, 318 bp, Glycine max
tgcatgcctaggcaggcacagggccaggcaccacagtagccacaagaggaataacagcaggcagctgtagacgtatcaccaccacctttacgggaaccgccatctctagagtccatctctgctcacatgtagaggttggaactctatatatgacatgtggctgaccagcaggtggtcaatcatagtggtcaggtatagctgaatgagagcttttaccagtacaccatgcatcaatggagctaggatcccaacccttatgtgtggcctactcctgagcagttcggagccacaatggcatggcctggagatatgcccgat

SEQ ID NO: 255062 - DNA, 458 bp, Glycine max
  unsure (1)..(458): unsure at all n locations
tgtgcttaagtaagtaagacatgtgcctgagatgcatntataccttatctcaacaggaaagctagctaatgttgggatgataaaccagttcggtgttggcaaatggaagcttagtagaggaagcatagtcgttactcgaggtaagaaggaaggctccttgtacatcatgtagggaactatatgcaaaggggagacaaatgttgctcaagatgcagccaaagaattatggcacaagagattgggtcacatgagtgagaaaggtttggagtttctagcaaaggatcactttccaaacataaagtgatgtaagctccatgtggagcttgaaggcctangatcttcttcatcaatggattcctttgcttcttggaagatgaatggcagcggagtaaagaaggaagagagagaggagacgccacttcaaggagaagatgagtctagaagaagctcaccaccat

SEQ ID NO: 255063 - DNA, 332 bp, Glycine max
  unsure (1)..(332): unsure at all n locations
taaataaaattggctgagccgggtcaacccaattccgaattcaagcccaattgcttattattctcttcaaattaaattaaaaacacaaaattagtccagtaggcccaaatgataaaactacattattaatttgacaattaagggtaatcagtaattaaaatggtgacaaaaaggggtaagaaataggagaaaataatgacacataacttagccacaggtatctcctcaggaagatgaatgttcttccccaaaagatgaactcgcttagcgcgggtggtgcgcttagagagttcgtctgaanatgcaaatattcaagcaatattgatgaactc

SEQ ID NO: 255064 - DNA, 387 bp, Glycine max
attccaacacaattcaattcccaggtgaatcttcaaagaatgaatgaatagtatatacccattggcgtggcgggtagcgtactgatcgtgagctggcttcatgaaatctgcaattcaaattaattaattaattaattattctcatcagaattaagtgttaaccgaactagaatctgcaattcaaaatattataataataataatatttacattgtatttacctggcataagagtttggttagttgactcatcattagcttgttcctcagcattctcattttgatcagtttggttagttgacttctggatcatgccagcctcctcatccaaatcaaggagatccaagaaaaaataagaaaactgcataacatcccagtggaagcaaat

SEQ ID NO: 255065 - DNA, 266 bp, Glycine max
  unsure (1)..(266): unsure at all n locations
catttctgattatttttctcgagtattggtcgtggtccatccacttaaaagaaatggtgaaaattgtgatgatgtgaaggtcatggaaaaaatactttcaactttaaatccccagtttgacttcattgntaccaacatttgagaaaacaaggattaaagaccatgactattgagcaactcatgggctccttacaagcatacgaagaaaaacaaaaaagaaaaatttaaccaaaggaggctacggagcaactactacaactcaacgt

SEQ ID NO: 255066 - DNA, 324 bp, Glycine max
cctttttttttttcacgcagcctgcactggcttcttacggaggctctttcagacgctgaggggcttatgccaaacctactccacattccttggtttttcccactatatgccccactgcttttcctaacccatcctggttcataaccggttcccaacataaactcggccatcacttaccgccctatctgacagacaaggttgcccaaagagggagtccactgaggaaacgctgaccaccctcaaagacttgaaagcgcgttctaacgattcttctgcggcttccacataacgcatggaggataggcaccttaccaagatcttttc

SEQ ID NO: 255067 - DNA, 401 bp, Glycine max
  unsure (1)..(401): unsure at all n locations
aacccatttcacatcaattggtgtctttccttttggaaaatcaactaattcctaaagttcaattttctctattgacttcaattcttcttccatagcatctctccaatgagcactctaagaagcttcttctttgactcactggtntttgattcaccaccccagggcanaatggactaattctctttttgcactgatggttgtaccacaataaacttcataatctatgagtgcttgtgatgcctgcctctccctttgtgactttctgagttgaatatcaattgattcaacattctccattgcactatcttcattgtcaagatgcataatcacattcctttcattgctattagttgntggnagcagacaatcctaaccttttgattcatcaatcaacacatctc

SEQ ID NO: 255068 - DNA, 446 bp, Glycine max
  unsure (1)..(446): unsure at all n locations
aaactcagcttcatcacctanatccaaggttcttganactcatggattctttctctatcacctgntaaatgaattaaaacatatgtattattgatgttgggtatgttacagtaggttgaggactcaaaacccctttcctggccatcttcccatgagagaacatagttcctcaccaactcaatgagtggtgctacaagtatagaaaaatatgggacaaaccttttgtaaaagtttggtaagtcattgaagccctaaatntcccttatacttggtggagtaggccactcaggaattacctttattctcttatggtccatgggaagcccttgatcactatttaaaaagttaaggaaagtaatggaataaaacatacctttttctttattttcatgtngattattcctacaaaaaattacgacaaacctaaggtgcccatatgagcacct

SEQ ID NO: 255069 - DNA, 452 bp, Glycine max
  unsure (1)..(452): unsure at all n locations
agctttgaaggtgcgtaacccaccattttcattatataacactnggaacgcgcctactatcattgggataatctctttctctgctatggggggcgctacttaagttgccaagtctctccatctttgggcgtatcctttgaaagatccgcgccccctttttgcacatgttctgtagttgcatcctatccgaagccattatactgacactgcctaacgaaggcaaccactaggtccttccaagaatggactcgggaaggttccaagttagtgtaccaggtaacagctaccccagtaagactttcttggaaggaatgtatcagcaattcctcatcttttgcgtatgcccccatcttccgataatacatctttagatggttcttggggcaagtagtccccttgtacttgtcaaagtccaacacttgaacttgggaggggtgatgatattgggtact

SEQ ID NO: 255070 - DNA, 385 bp, Glycine max
  unsure (1)..(385): unsure at all n locations
acgctgcttcgatgaattctggtgataagaggctnggggcaaatggagggaataagaaggagggagaaacccactttgtggctgtcgttcctacatggccaaatatcccattagcctgacaatatcaatactcaaccaatatcagtccttctcattacccatcaccctaccatccaagaacgcccaatcatccataaaggccacccacaaatcggccacaaaatccacccgatgcacatccaagaccaaacaccacccctaataccaataaaaacaccaaccagggaaggaattttccagaaaagaagcctgtagaattcaccccaattgcaatgccatatgctgacttacntccctatctacttgataatgcaatggcagtcat

SEQ ID NO: 255071 - DNA, 440 bp, Glycine max
gcaagctgaatcggacatccggtgatagttattatcttttgaatttctcaagagcttccgttgttaaatttcgagcctctcgacatattatgcgcccgaatcggacatccgtgtgaaaattcataatcatttgaatttctcgagagtttccgatgtttaatttcgagcgtatcaatatattaaaaccctgaatcggacctcagtgtgacaagttatgaccatttgaatttgacgagagcttccgttgttcaatttcgaatatcactatatgtgaagcgcctaaattggacattcgagttaaatgttatgaccatttggatttctcaagagcttccgttgttcaattctgagcgtctcgatatgtgattcgcatgaatcggacatccgtgtgaaaagttataaccatttgaatttctcaagagcttccgttggtcaatttc

SEQ ID NO: 255072 - DNA, 249 bp, Glycine max
tcgccgagctttcgacgcggatgtccgacgtgtcgcattatagtcgccaggctcggacatgcgcgacacaagctctggccatatgaaactggcgagagctttcgcagtgcagctcccagcatctccatatggtaagcgcctcactcgcacatgcccgagacaagttatgaccatatcgatacactcggaacttccgatggtaactctgagcagatccaatggtatagcttgaacacggcatgccgtgaa

SEQ ID NO: 255073 - DNA, 446 bp, Glycine max
catgcaagcttacccctatggctggccacctgacttattttttgtgccaccctggaagatatgagccaagcccttaccttcgaggggcaactcccaccttatgccgactatcccgtgcaagacgatgaggaaggagatacccatctggcccccctgctccacctcaaagatccatccccccatgaactaccccaaccaaacatagtccgccacgtcccatcttcacccgcacccgtaatcgaatccgttcccttcgcagaggataagggaaagattgatgcgcttgaggagagcctgagagcggtagagggcctcaacaattacccattcttggatctagcggacctatgtctcatgcccaacatcgtcatccctcccaagttcaaagtaccagactttgataagtacaaagggacgacatgtccgaaagggcatcttcggatgta

SEQ ID NO: 255074 - DNA, 444 bp, Glycine max
  unsure (1)..(444): unsure at all n locations
ctttttggagtagaaacatgggaccaactcacngtatttcattaagttttntctagtcaaggtctgagagaccatacaagttntctagcgatttctaattatgtgggccattaagtctatcatatgctgacaatagccgagaagcccatgaatttcttctggggcggagtatgtgtccgccattgccttggccttggctaacaatcggggaagtacttgactcccgtcaaggtaagagcaaactgatccatccacatggttgcctcttggtgtaaagagtcgatcacccttcctctagcctctttttccgcgtatacttgggcatactcgtacgcgaccctatgctcgtgggccgtggctagacctaactcttcttggtacttggcgatgatagctagcatgttggtctccgtctcgcataaacgctgagacaagctccttttg

SEQ ID NO: 255075 - DNA, 452 bp, Glycine max
agcttatgataaaatctgggacttagccattgtatatgtctccacagaggccattgcctccctcggctagtattatgatcagccgctgaggtgcttcacctttggggacttccagctatcaccaatggtagaagaatttgaagagatcctatgatgccctcagggggaaggaaaccatacctcttctcagggttctatccctcattagctagaatttccaagatagtccaaatctcggcgtaggaattagaccacaggaagcaagtcgaaaatggggtggttggaataccgagaaaatatttggaggcaaaagcaagagtcttggcaagtaaaggtgagtgggccccgttcatagatattctcgcactgttaatcttcggaggagtcctctctccgaatgtggatgggttggtggacctagcagcgatcgatgcttttctcgcctatcataa

SEQ ID NO: 255076 - DNA, 375 bp, Glycine max
tgtccttcttcaccgtagaactctccacactgccaaccaattctttcgtcactgtctacaagatcttgtggcacccaaacaactcatctctatccaatctggtgcgtatcaacttggaaaggacaatgccaaccttggaagatagttggtggtttgacttcacagcttcagtgaaggcaacggtgacattagctaccttaagggacttcactctccagactgtgcgagcagcaaccctacatttggctacctcaacctccaaggatgccaccttgattggtgcctcttggcgcctatgtccattctctcttaggaacatcaaacttcaatggaggaaaaccttggcagaatccatggcatgctggaccccaactg

SEQ ID NO: 255077 - DNA, 338 bp, Glycine max
aacacgtacttctttcttgcctaaactaacgctgtactctatcaaatccttagacatgaatatctcccaattggaaacaagtttattccacatgtaaagattaccccgcaacttcctagatcaacaatcttttttcacactcaatcattcgctcaacaaatctaaactcggagacttgtaaaatgtacaacttattttatcctattaccaaaaaggaaagcatatcacgatggaaaataaaatgaaattttcaaaaaatattatctttcatttataaaaatgtaaactgtaactctagaaataaaatgagaaatcaaaacattattatttccacttaa

SEQ ID NO: 255078 - DNA, 422 bp, Glycine max
  unsure (1)..(422): unsure at all n locations
atcgatcaaccaacttgcgaagggaatcaagatgatggttcaaattaaaggaaaaccaacgagtttggctcccgacaaacccacttcagaaatgatatctaatgcatatttccgttgttacaagaaaatgctagttagactttgagctacctcaatctcccaaaaatattttatacgtctaagatccttcatatgaaaatatacacaaaaataggttttgaaggccttaatggcatcaccattactgcccaaaataatgagataaccaacgtggaccaatacattaagttgcagattgtcatgttgcatagcaaaaagatagtagttagagtatgatngcttgaaaccatattgtttcaaagcacggaccaactttgctaactaatactgggaatgcttgtttaaatcatgtaatggacttt

SEQ ID NO: 255079 - DNA, 304 bp, Glycine max
gaactgttgtactcttgtgttgtatgtgccaaccgccgcggcgcacaaagcgcggtgagaggagaagggacaggaacgagggacgaatagaggtttgcggactgaacagaaagcaagtgctgttgttgttgctgctgcgtaaggttttgttcggaggcgcctatacgctattgcgattgatatggttcttgcggcgcccacgccaatgcgaccagccatttgcttgttggcggtggtggtgcctcgccgaccacaccctactcactctccgacaagtcgtcttatccccgcgtttagttgtttc

SEQ ID NO: 255080 - DNA, 446 bp, Glycine max
  unsure (1)..(446): unsure at all n locations
ngaatctcaaaattcaatctgcaaatatggatggtttgcattctcaaatatgaacccaggggtcagcacaatcatgacatccgatgcaccaaatctggcaataacccagcccatatccagagaaaacccacaaaaaactagtccttcatccataccagagcaattgaaattaaacccaggaaaaagaaaatcttagccctgggctgatacaaattgcaatgagctcaaccggaagtctggacttcggttttataactgccaaatgaatgtcaagacattaaagctgcaactcaagtcctgngaggaccgggtgcggcaattcccccaacttctgggttccttctgcttctaagtactgcatttctcccatgtttgtaggtcccttggtgattacattgntatttggaagtggaagtgacaaaaggagtttggttcactatagcatc

SEQ ID NO: 255081 - DNA, 420 bp, Glycine max
  unsure (1)..(420): unsure at all n locations
agatatcttaagaaggggggcttgaattaagatatcaaagactattcccccaacttaaaagtttaacctctctgttctgaatctattagatggcacccttcatatatgaagttacctaaacaatacatattccaaaataaagactctctttatacgcaaaaagataacatgccaatacaatataaggaaagtttaagtggaaggagagacatgcaaacttcagttttatatctggtttggccaccaccctttgtgcctactgttcagttcccaaagcaaccccgcttgagacgttcactatcttgtagaattcattntacaatggatcaaccacataaggacaaccattcctttgtgttcagataaccttacaacaagagaccctcgatcgcttaatcagttctctttgaataagaaagg

SEQ ID NO: 255082 - DNA, 332 bp, Glycine max
  unsure (1)..(332): unsure at all n locations
aattggctccttttacccccaattttttttttaaaatgcactcgaagctccttctcattttaaatacttttacccttcaatttggtaacggcgctaactaaaatcaattaaaataagggaaaaagtcacttttggctttcaatgtgtaatcacttacaaatgcgttcctaaagataaaatataaatttagtcctacaagttaaaagtggacaaatatattgactgtaattctcgtccgtactggtgaaacatagcctacgtgcacacagagataacttgcactgaatgatgtaacatgaatggcncatagaacatattgcataatattttga

SEQ ID NO: 255083 - DNA, 420 bp, Glycine max
  unsure (1)..(420): unsure at all n locations
gccatggcgattttaattattctacgtacgacagctacctatatnaaggtgtaatgaacagccaccatatagttaaagttggcataaaatgtgcttattcagccacctgtatttgtatttgtagcataaatgaatcagttaagaaacagaacttaataaaatttattttgatcaacacctgtttattagctttgcttctgagcgtagcatttatattgatatttgtttttcggaatgatgattgatgtaagtgtccattcagctatttctttgaatcttacttttattttggaccgtgctgcccattatcacaggtacaaatgtttgtaccaatgaatattttattatgtgtcactgcattattgaaattgaatatgtatacaaatggttatgatagtgaacctaattctcgttgagatg

SEQ ID NO: 255084 - DNA, 467 bp, Glycine max
  unsure (1)..(467): unsure at all n locations
gaaactaagcttgaatcgatacacaggcttgtatcgataccaaagtttgatgtttaaacacccttaaaattgaatttaatttcagtttgtatcgattatagagtggatgtaatcaattaccagagttaaaattcaaatttcaaatgtgaagaatcacaactcttcaggaaacaactgtgtaattgattacaccattttggtaatcgaataccagtgaggaaatctctaaaataactcccaaaagtcacatcttttcaaatgattttgaatggccatcaaaggcctatatataggtgacttgggacacgaattttctgagagagtttttctgaactgaaatgtcttatcctctcaaaaaggattccttggtctaacacttgcatattcaataaggaatcttaattgatcttcaatngtaatatccttctcttaaagagagaaacttcttcttcttcttcttcttattc

SEQ ID NO: 255085 - DNA, 406 bp, Glycine max
gccctgggactatgaagaggcgatgataattccttatgaacaatccccaagttttgaagaacataattggacttctggactttggattctggtcttttggtaactagccttcgaagaaagcaatatttattcaccgtggtaccgcccaaacccattatataataattagaaagaaaagagtggcttaattattttacttggaaaacattatgttttctaccacccatatatatgtaaactttaaggtacaaagacgaagtcgtaggtttttgtactgcccaagaaattgaccaaattttggccaaaagatcttctatgagatgataaagatggaatcttaactccaccaagttttcccattagaataaacatgaaaagaaaactacaatgttcgttcaatgattta

SEQ ID NO: 255086 - DNA, 372 bp, Glycine max
  unsure (1)..(372): unsure at all n locations
atcacagtactgaagaaggccatgcctatgtcaatacatttattatgcacagnactcacataatcaagaaccttgtgcaacctctcactctgcaatgcgaagcacagtagcaaaaaccctaacgtattgattagaaaatcacaccaaaagtttcaattttttactaatcgatacattctttgatggtatacacaagtacctgttccctttgaagttctaggagttgggattgatattcatccaacttcttcatggacaagtcagactcatcaactgcaaatgatcctgattcggtctgatcagggttcaagtccccagttatctctccacatattntttggatctgtaactctacatctgaaaactccttta

SEQ ID NO: 255087 - DNA, 407 bp, Glycine max
  unsure (1)..(407): unsure at all n locations
cagctaagagcacatcactgcactaagccccacatcttcacggtaattgcactttaaccagtgggcttaaagtggatgatgcgctaagcgccacttcttctttggaaaaattttattgtagcagcgctaagggcgctatctagtgctaagccccagatccattctataacttcagtttttaagctaggcttagcgggctaggaagcgctaagcgccaatctcttacgggtttggaattcttggaagtccgcttagcgcacctattgcgctaagcctgaaccactctctgtaagttgaagcttgatggtacgctaagccttacatctcaggctaagcgcatattgtagaannaaatttgtgttgcagaaaggaagaggcactttgggtgttaaactcaaatgtcactt

SEQ ID NO: 255088 - DNA, 389 bp, Glycine max
  unsure (1)..(389): unsure at all n locations
gtgggcctggttgctatttgcaccccctggttactaaatacaccccctgccatttttgctgattctttttcttgaatgttatggaactttacgaattccgtaacgatacttgttttctttccgtaatgttacggaaccttacggattatgtaatcatcccctttttggctttcggcatgtcacagaacttcacggattgcctaacgatgggtgccaagtacctcgaagcagtcaagcaaaggttgcatgccatcaaacaatggtccccagatgaaattanggtatgacagttgcccctctttacttaccttttatcggagataggaggaaagcaaagataaaacactgatttcgttcgtcttagcctctttccgtaatcaatctatgat

SEQ ID NO: 255089 - DNA, 446 bp, Glycine max
  unsure (1)..(446): unsure at all n locations
agcttatattctaggagagcattcatccatattacaaccttcactntttcattcattcctctcccatacttgccccttttttttaggcacttaactttcatacctgaaattatagcatacacacttagtaactttatttatacttacaactttttttttttgaaacacaaaaaacagaaaaatgtgtgtatatactattttctttgaccatttcaatccttacccagtgcctctcccaaatttggaacaaatttaccttgataataactcccccaaatttaggacaaatatgccttgaaccatcttctgtggatgatgctcttctacaacctaaaataaggtagcagaagatacaactgaataggctcgaggttcaatcaatcaatcaattcattcagctcaaactgggtgcaagggataattcattcaatcacaaggttagcttt

SEQ ID NO: 255090 - DNA, 440 bp, Glycine max
  unsure (1)..(440): unsure at all n locations
ttataagcgcgggtctgagggacgaaagtcaagtggtcgttatatacgaagatggtgttccgggtacattggatttggtacgaccatgccctnctgattccagctgggaaattggcgagtggaagaacgccccggcatttacgcgacgagcataatgtaaacctttacggttttaaaagctctatagttgggcctaggctttagagnttttcttttgttaagggctntgtgtcttctggttttgaatttataatacaaggatctttcttcatctgttcctacgtctctacccattctcatccatttgcatgtttacttctttatttctgaaacgacagatccgatgacgagtctcccgaaggtactaatacctgggacccgcctatcaacttcgagcaagaaacgaatcaaacgggagatgaagggaacgaggatgtgag

SEQ ID NO: 255091 - DNA, 440 bp, Glycine max
cgttgggaaacatcatattctctttggtcggaactgaggttctgggattgccttcgcttttcggatcgctggatgggtcgctggatcgctcggggttgccatcgtcggcatgtccacctactattgcatgctccttcttgtgggtcatctcttctctcaatcattgcatcaatcatttttagttgaatacccgaataatcttttcttttttcccgatttctttaagaatttcattataccgcattatactagtttctgattactttatttcttttattgggtgcgacttgacactaagaatttattaaaatacactatattgtcatccaagtttatattcacaagtagtgatatctaggatgatgtctcattagttgacaatgatgttgttgttgtttatgatgcctcattagctgacaatgatgctcgtgttgttatga

SEQ ID NO: 255092 - DNA, 459 bp, Glycine max
  unsure (1)..(459): unsure at all n locations
ntgctagtaaaaatcttaatgtgcacgacctgtttgtttattatgtacattnntaatttttgtcttgcttaccttaatggactcataagaaattaaaagaaaaaagtatttaatataaaaatcacaagagaatgctaaaaatatcatgagcataattttttgtttatcccaataaaaatatttttactttaccttaactagtaatcgaagagttcttattagcattnttttatttataaattcatgccaaacatgcataatattagtgataaataataaggacaaaacttagatgatgttcctttcttttggaactgctttcacatcaatattgggatttcacttcagtgattcatacagcacaatcatctattaaaattaggggctaaattaacctattggctatgtgtgtatataggagctcacacaatngggataggtcactgtaacttattcagt

SEQ ID NO: 255093 - DNA, 458 bp, Glycine max
  unsure (1)..(458): unsure at all n locations
agcttaagcctgacctatntaatntaataggtttntaaaaaagtctgagcctagccttttaattaaataggccaagccagactttatataagtcaggtcgtaggctcctgtaggccggtctagcctattcccacccctattcataatgttgtaagtttttcagcaaaagcatcctgccacaagctacataattttggaatacacattcaataatagtctagctattaactccgtcatgtttcaaatgtacttcccttgatttttcctgtatggattatggctcagttgtttgaggagaatatggcacattccatcgtccataagtatgaaactagttatgatatttaagattcaatcctaagagggccatgtaatcttttaaaaatgtatatatgttatatgtaattaattttcttaatactataagtgttttattaaaagaaaaaacacaatagaga

SEQ ID NO: 255094 - DNA, 404 bp, Glycine max
  unsure (1)..(404): unsure at all n locations
ttcgaaattcatcttaacaagaatttttaacaagccaagctatgaagcattgtacataaatatttgtattgccttcaacgacaagagaataaattatgtatgatgggagaaagaataaaattcattaagataactgactggaaaaaattaaagaatgagaagggtaggataatcatgtaaagttgcaagttaaaaaataagatatacttaatatataattaatatatagtgagaattgaatttttattattaaggtttaatacatagtaagaattggaattttattattaaggcttaaatgacttaaatgtaaagtgaaagattatattttactaaatgaaatttattggaatagatgcattggannatgttttgtntaacttctacgagatttatttattata

SEQ ID NO: 255095 - DNA, 396 bp, Glycine max
  unsure (1)..(396): unsure at all n locations
gatgatggtacagagggtgaaccaccaactgaagtttcttttggtgaggtagccatggaaaagcacagcgtttggaatgatttcgtgaatttctgagagctattgggaaatgctgatgaaaacaccaatgccacgaaaatataaatttgaatgaagaatgtagaggggcgtgtgaagcaacggtcaaatctgttttggcccagtaatgaacgtgctattaattntaagtgattcgtttgggcacgttcagatatcagtagctgctataattcctctagcagacaaatgcccagcttgcccctcagttnttcaaactgatttgcatccaatgcctttgtgaaaatatctgcgatttgttcctcagtgtcaacatgcttcagtgtgataactttatca

SEQ ID NO: 255096 - DNA, 480 bp, Glycine max
  unsure (1)..(480): unsure at all n locations
ctatgaaactcagctntcacaagtttcttcacaaataactatcatgattcagattacttgcaagaccacccatcatatctcccaaaaccccatacccacgaaatttaagagagaaagaagtccacccaaacctgaattntcgaagtcccactcgtagccacgcacttcacgaccccgaaaatgccctcctttcgcgaattggagcagaaatgatggccaaaggttggagctttgttggggtttcaatggagaatggaggagaaggaaaaagcaacgtgaggaagagggagagcttcagaattttttctgctttggctgagtgaggagagaggaaagctttttggttttaaataaaggggtttctctttntctattaatttattcaagctctgccacatgtccctatttgagtggagccaanagggcccactttcccttntactgtgacccacactcagccacaaaagtgagaaaaatatg

SEQ ID NO: 255097 - DNA, 479 bp, Glycine max
  unsure (1)..(479): unsure at all n locations
ttagagncacctgcggcatgcaagcttcttcatggtggctcccctatctctaattatgtttacttccaannnnctcttaaagccaagcntgtgatattgttattatatgttgatgatattttgataacaagtaataacaaaagtgaaggtgaaaaattgaaatttgagctgagcggggaatttgaaattaaggatttccgagcactcaggaggatattgggaatagaaatcaaacgagacagataaaggaaattgttgtatttgtctcaggggctatatctcagaaaagttcttgaaaggtttggaatgtcaaattccaaacctgtaactactcctatgtctcaacagtttaagctcaatacaagtcaagcacctaagacacatgatgatataatttacacggaaggtattccatacgctaatgttgtagggttagtgatgtatgttacgatatgtacttgccttgacatagcatatgc

SEQ ID NO: 255098 - DNA, 455 bp, Glycine max
  unsure (1)..(455): unsure at all n locations
nttccattacaccattgaaacaaggagatgccaatgggtgtttttaaggttgntccatatgcccataggcaatcatcaagctttgcagctcgatccgtccttgaagtagctatggtctattctagtatcctcttgatctccctatttgaaacttcaacttgtccatttgtttgtggatgatagggtgatgctactttgtgtcaaatatcgtagtgttaaaggacctttcagagttgagcatttaaaaaatgtgtacctccatcactaatcaagagtttaggcattccaaacctaacaaagatttttcattttaagaacttaatcatcgtcttcgcataattgtttggactagcaattgcttccactcactttgagacatagtccaccactaccaagatatattcattgcgacacaaagatggtaagggaccaacaaaatcaattccccaacaatc

SEQ ID NO: 255099 - DNA, 454 bp, Glycine max
  unsure (1)..(454): unsure at all n locations
tatccattacatttagattaaaaatatatataatgtgtttataatctgctgctcaatgagatatttctgacacaagattagcaagctggaagatattgcatagatgtatgcaaattntatactcaaatactcagaaaatggttatttatttaaacaatttggaaagctactctggtaattgtgcaggtgttgtatttttaaagctgttacagaacctataccaacaatgtcaactgaaagaccaaggcaaggccaaagtctatgcaacctaatagaaggtacctcaatacatatgtgccaaatgtccccagttntgttcaaatcaggatccaaaaccatttctatcatgccaccatccaatgtgtcaatacatcccctaagtgtggaaaacaaaaaggaaaccgatattttatggtatatcgagtaaaaaaactagagcagagataatgttaat

SEQ ID NO: 255100 - DNA, 454 bp, Glycine max
agcttgaagccacagaattccatatggttaatatatatgaagtcttggctgtggtaataatcatgaaaggagttttttaacacaagcaatttgtatcacaatatatgtagctacttcccttgagaaaaaaattatggaaaatatattttgattttatatttacttcaatttttttggcaatggccggattgaaaaatatttaattgaataaggttgttatattgttgaatttgtcaataatacatgtgttgaatttattttgttttttttttacttgattacttagtacccttctctatattaacgtttattataaataagttgttttataactatgactaattgttcatattaaaatggttaaccacattttttagagagttaatttaatgttgttaaaatctaagtcatcacaatctatttttctataagtaaatgaggaatttatatataa

SEQ ID NO: 255101 - DNA, 467 bp, Glycine max
  unsure (1)..(467): unsure at all n locations
actcagcttgtggaatatggggtacccatcacatgtggtactttgtgtctgtcgggccgaggggcacaacaagctgttcacatccacaatgcgcgcataaacccaccatcccctgttgcccacctacaactgagctcacgtactcccacgtagcccatatacttgtttctctcaataccgggttcccatcaatccttccaagcttgcacaacatccaagcaaaacaacatttaaacagcacaagctatcacagccaagcaaaacagggcaaaggcagaaaaactctgctcaacacactaaccaaaatcacagcttttctcacttaaagaccccagtaacaattccttcgatccaattcgttaaccgttagatcgactccaaaattttactggaagtctatagtgcataagcctacattntgaccgttgggatctactagaaaacatccagaactcattctgcactac

SEQ ID NO: 255102 - DNA, 373 bp, Glycine max
  unsure (1)..(373): unsure at all n locations
acttctggaggaagtaagcagctcacctgggcaagctgttgtgcaacctccacccctcatttcctataaataggcatgaggggggctgaaggaagggtctatcatctaaaatcaacaagactcgagtgaaattagtgagaagaagaaaaatcaaggtccaggcacttctgtaaagcttccgtaacattntcgtgatcgattccataatcattcttcatcgttcttcattctttgaccggttagtttctatttttgaagctttgaattcgttctatgcacccttagggggccatccttgctttatatatcttcatcttcattcttctaccatcagtgatctttttctttgtttaaagcgagttttgaccaattg

SEQ ID NO: 255103 - DNA, 419 bp, Glycine max
  unsure (1)..(419): unsure at all n locations
atatggaggatggatctttgagctttattgattgtcttcaatggcgattctcaaccatggagatgcagcaaaagtataaggaggagaagtgagaccagacaccatccattatggaataagccatggaaggaggagcttcaccaccaagagaatgccttggataataagcttagagagaaaactttcatggaggaaaagaatgacaaaaagaaaggggtgaagggaccaaactgtaagagaaaaagagggagaaaagttgaactttgaagtgctcaccaattcacattcatcaaagttatgacaaggggtacacatgcttctatttatagccgatgtcactaactaaatgaaagctttcttgagaaactatagtntagctacacaaacctcctctattagctatcctacctccttaaaac

SEQ ID NO: 255104 - DNA, 365 bp, Glycine max
  unsure (1)..(365): unsure at all n locations
attaactcattcatgcgtgcttttggatactatttctttcaattaccatacaaattggggacacacaatctatgttctacgtcatcgccaagctccttgattacctcatccaactcctgaaaataacagtgaatcaattaaattatagaaacaattacaagcccaacataatataaatatttaccttttgctggtcaaaaatgaaagccctacatccttcctgaataccatgtaagtcttctattataatatcaacaaaccaccnctaagacaaataattattaaattccactacagcgtaagcaatgtgaaacattcgattggttccatcattacctactccagacaacaattggccaccatat

SEQ ID NO: 255105 - DNA, 474 bp, Glycine max
  unsure (1)..(474): unsure at all n locations
ggatccttaagtcacctgagcatgcaagcttagctttaaagctatggaatgtttatatgaaaccatgtttttgtcaccttatgattatcatgagattatccgaccattttcatgaaataacagctttctaaatatcttggctctttcaaagataatgaagatatatgataaggtggaaattcaattaccctccactttattttacccattaaaatttttgaaaatacaaacttattgtcttcgctatcactcatatagtaacttcataacgcagatcacaccaagagacggatcanaagcttatatggaaatggtggacacctcctaccttggaagctttgatgtggtgagagtgctaaatacaagaacgcctaacattgaaattcattattctagggttaaatatacatttttgatcttgcactttaacaccttccatttttgtccctataatttcttttaaatcctctaaat

SEQ ID NO: 255106 - DNA, 443 bp, Glycine max
  unsure (1)..(443): unsure at all n locations
cgcaagctttttgctgcanaaatcatttcttggttggtgctgtggattgcgctaaaggtggtgctcgtcattggaaaggcggttgacaggctttgtggttgatttaaggatggcctttgtggataactaggtggtgggtaaggaaaaggtttattattggctgaattatgacattgttgggttggcgggaaacttggctgtataagaatgcactcacaacatggagttcttcctcattctcacccttttcacttgccctagtttttttgcatttatcaaagcatgatgatcagaattgcctctttttagacccacctctgatcatttctgcagccaagaccaaattcacaaagcttgaaggcgtgaacccaccttttccatatagacactaggatatgtcactatccttatatttctttttcgccatgaaggaacacttggct

SEQ ID NO: 255107 - DNA, 337 bp, Glycine max
ctggagtttccaagtgccatatcgacttcttcttttgtccaatcttcttctggcttccattcattagtgggctctccttctgtgtccaccatcttgtgatggtcccaccctcttatgacagctcttcaagttctgctatccagcgatttgaggaatgccaccatccctgctttccacgattcataattgggtccatccataattggcggtctggtcactggtcctccttctttttcatgttcatcagaaattatctccctacatctcactcaccgatcttgagtgcccgctctgattccaattgatattctgataccaatggcatatgttgcacatg

SEQ ID NO: 255108 - DNA, 439 bp, Glycine max
tgagcatcaacttgcctattctagattagaaaattttttactttcagagatgcataccttgtgcttgtcaatattattcgcgagacacatattggcagcctactcctcatctttctcagaagataatgaatctatgccatcccatgtggccatcattaccttcatctctggaccttttctttagaatcctttctttaggaaagaaaactaagacttgatataccgagacttggtgtattcacagcatttgactcgcccagaggtctctccttgatggaagactctcttgaagtacgtccttcttgtgccttttctcctgttgagcaatttcgaaccctttcagtcgtaaaggccaatactttcttatcttcttcttcttcttcttcttcagaaagctcgccatcactattctcaacatcaaaattggatactaagttta

SEQ ID NO: 255109 - DNA, 434 bp, Glycine max
  unsure (1)..(434): unsure at all n locations
taagctcttcatanatggagaaaagctcacgctgactttatttgttaatccacaccaaccataatagccaagcgtctagtgcccatgataattttgaaagaaaccactcataccagatatgccaggaataccaattgaacttccataggtgttgagcttaacaacttgaatttggtttataatatgccatggtgaagacgcaagcattcttagctctccaaatgaaccaacaacctacaccaaccaattacctcttggacctcggcaaaaacaccaaatgggggcacttttacaaattatntaccaataatgggctcttttgcaattatttacctgggggtttgttttttattacaaagcgcccccagacaggcgcctccacttgtcacgtgacacaacaagtagcgcccctgacgctggcgcgtttggtagtg

SEQ ID NO: 255110 - DNA, 370 bp, Glycine max
tgcagctttttaggagactaggatcttcaggtttttctttcatcgtgatctgactcaaactcttctgatactctatcagccattggataagaagttggcgttcttcattttcctcagaagatgatatggcttctaggccttcccaagtactgattaaacccttcttatctttcaatttgaagctcttttgtcttgtcctctggtttgatctaaatatgacatttggacttgaagtgcccttggaatgtggctccattggggacttgaggccttggatcttcttcatcaatggagtcatttgcttcttgaaaacaatggcagcgatagagaagcggaaaggtgattgcagatgcacttaaggagatgagtc

SEQ ID NO: 255111 - DNA, 309 bp, Glycine max
  unsure (1)..(309): unsure at all n locations
ctcttaccccttnaaccactcacattaattaacataaataaaaactttctgatcgcatgcaaaaagtgtcactaccaatcaatttctttaacataaaaatgtaggggaggtgagccggcacacctctatatttactccaatacgccaccttgtgcttaatcaattcatatcggaaaccttaatgctgcattaaacaatgaaaacttgtatcaataacatacaatatggatatatgtagaggtgaagaagcagaaaccaactacagccatcttggttacatccatacctcccctatggataacaagatgc

SEQ ID NO: 255112 - DNA, 283 bp, Glycine max
atcacctgcatgcaacactgctgaaaacttaaggagctgtattattcatcgaaaggcctatctggagattagcgccggactaaatttgagataaagaaaataggtagaggagtgccatctccttagaaaacgcacgaagagaaattcacccgaaaatagagccggatacaagtcacagaggaagctcaaggaggtgcaacgtaatataagaataggaaagaatagacgtggctcggaattgaaggaacttagggaaaagtgaactttagggaatgttgtagac

SEQ ID NO: 255113 - DNA, 462 bp, Glycine max
  unsure (1)..(462): unsure at all n locations
cttacagcgactgcagcatgcaagctatctcataagngctaaatggcatttcatgctatgatttacttcctctgacctctagatactacacaattcatgattggccttccaaccccctaaaattcacttcttatccacatctataaccacattctcactttctaaccccaggctagctttacccttcatatctaacaggtatccataagcaattttagcaattgaacattacaagcctcatcctaaaaaccctagaaacagatgggtaatgttaactcatacagacgtggcgaattgcgataagcgtttaagaaggagtctttcaaataactatcatgaagcctaaagcttacactactaccgatcttattttcccaaaccccatacctccaaacttaagggaaagaatcccccaccctgaaattcaagtccctcgtggacgccttacgacccgaaatgctt

SEQ ID NO: 255114 - DNA, 344 bp, Glycine max
aaaaactcacctgaaatctctcgaaaactgatgccatgattgtttataatacatcgtgaagtccattatacatttaattggatgtgatttagagacatcctggctcatatatttgttgctactaaccacagttatctacttcatgcatttaaacattgtaatacatacttaactatgtccaattccattattcgtataactctaacgctggcacaatgtaatacatcatgtttgtggtacatgtctgcactttaaattattgaaataacggtcgatatctcgaatcatattttgctcgctagctatatagcaactgacagataaacgatgactatttataccat

SEQ ID NO: 255115 - DNA, 396 bp, Glycine max
atcttgcttcttcactatagagagcatgttctccaccaaaatctcgaggtgaattcagaggattccactctgaataagactcccctctccgcgtggaggtccgacagcaagcaactgttactcatgtgggccaaccatggtgatagttggtggaggaagagcttctatggtggttagacggaattttgatagatggaggcatgagaatctggcattcatgctaaaaatcatatttataacctacaaatgttgcttacgagacaagtctcgctaaacgagaattcactcttggcgcttagcgcaactcttcacgttgagtgcaaacccctctctggatggaattgtgcttaccgcacttattgcgctaagtaaaacgtcaaacattcgtatatcgca

SEQ ID NO: 255116 - DNA, 376 bp, Glycine max
  unsure (1)..(376): unsure at all n locations
ctatanaaactcaagcttntgacggactataccaagctctatgaaccagggacggagaatgatctatatatangcttgctaacggtagagagaggaagactatatatttggatcaagtaaagtgtgttaggatgaacaaggcaaagtcttattgcatgaaatagaatataaggaaacgtggaagacgtatttccacaacttatttaatgatggatatggatatgacttctaacagtctagacaccagagaagaggaccgaaactataagtactatcgtcggattcaaaaacaggaagtaaaggaagcattgaaaagaatgattaatggtaacgcggtggggccagaccacatacctattgaagtgtggaaaatctt

SEQ ID NO: 255117 - DNA, 334 bp, Glycine max
  unsure (1)..(334): unsure at all n locations
agcttgctctaaatttacattaatggttggttgccatntttgttcaagaataggtcccctggttaaactaactttccatatggtggccctcgcaggaaatggcccccatgaagcttgcctctaagaagtccaggaaggacacggcacccgaaagaactaattccgctccgggagatgatagtcaccgctttaggagtgctttctccagcatcccttcgagggcataaagggatggtcgttatccggagcgacgcgttctactcaggaacgatgagtttactgtattccaggaggaaatatggcgctcggggtgggtccactggttactcctatg

SEQ ID NO: 255118 - DNA, 436 bp, Glycine max
agcttgtaaaacgacctatcaaatgtgtttttgttggatatggatcaactcacagaggttatcgtgtttaccatccaccataaaagaaattttatatctctatgggggtgacatttaatgagcacaatttcttttaatgtggattctacactctagggaggaaatgaaagtgaagcgcataatcatgatattagactgtttgatatctcagatataaaattatattgtgacaataaattatcgtgtgaggatcattctgctagaagtgaactaaccccaaagatggaaacatcttttttggataatacagcgtcttttgatcataaccaattggctcaatcttttccacaagttcgggttgactcttcagagggaccttctgatcctatctcttataatacctaatgagatgaaactcatcatgaaattggttctc

SEQ ID NO: 255119 - DNA, 389 bp, Glycine max
ttgaacccaccttctggccataagaaagtttctttggagtgatgagatccagatccatgggagtgtaaaggctctgaagcaaaggggaccaaattgtgctctgagagtagtcaaagtcataggcatagttatctggaaacttgcacagaagctcaattgacatctttggcaccaaatacttcaccacttttgttgttttcaacactagggcgtgttcttctttcttatattctctttgtgagtccattgcaaaaataacacaagtgggcccttgcttttatttctctctcactctctcactctctttactttctatacacctaacactatttaaagctgttgttgggttatgatttgccgcgtcatgcgaaaaaacgtagagagagaga

SEQ ID NO: 255120 - DNA, 260 bp, Glycine max
agcttatgcacgggaaatgttattatgaaattgagatgcccgaacaaacaccatttcctagttaaccatgcattagggaccatgttccattatttgtgttttaagtgaaacgggttatgatcccacatggttggtttctaaacatgaaactaagatggtgtggggagattcccccttcccccttcttgtttttggtttggagaagaaaaacccagggttagacaaccttaaaaccaatgggttccaatttggcgaaaaaa

SEQ ID NO: 255121 - DNA, 426 bp, Glycine max
tctggtgagacatcttgacttgctttccaatctgacattctccacagattctgccttcttctattttcagattggggatgcctttaacagcacccttgtcaatgattttcttcatgcctcttaagtgcagatgtccaaatctttgatgccatattctgacttcatcttctttggaggatagacatgtggaggagtaactggtttcttggggtgtccataggaaacaattgtcctttgatctgctgcccttcattataacttcactcttctcatttgtcaccaagcattctgactctgtgaagtttacattgaacccttcattacacagctgactgatgctgatcaagtttgcagtcagtcccttcaccagcagtacttttgttagactaggaaagccatcatgagctaacttttccatttcaatga

SEQ ID NO: 255122 - DNA, 249 bp, Glycine max
tcggacatccgcaggaaaagatattgttggttgaaatttctacgagcatctgtttttaaattggagcgctcggatattaaatggactcaatcggacattcatgtataaaggtattggcacttcaaatttctaagagcttagattaaaatattggccgctctgtatattacatgactcaaccggacatccatgtataaagttattgtgtatataaattttaacaagctaccgatcaaaaatttgagcgtc

SEQ ID NO: 255123 - DNA, 498 bp, Glycine max
  unsure (1)..(498): unsure at all n locations
ccggatccttaagtcacctgaggcatcaagcttacaattatattttatcttcgtcaagttagtgactgcttgatattgactttataggccacattggtgcaagttgctgccactgtacctcttaactgttcaagtcaacaagatggcttaagggtgtggttggataaacaacttaattaagtgcttattaaataagtacttatcatgtaagcccttatgtataagctatttctataataaaagtagaaataggattaaactctttcaatataagttgttagttattttcatgaggtatcatggagaatggagatcttattgataagctgaaaacaacttatggacaaattataagctatgtccataagctctcccaaacacttacaagttcttatgtgacaaaataaactgtaaataagtagttccaaagacaccctaattcatcattcatagcttagagcagttagtctgtatnttccacaaccacaacgcatagca

SEQ ID NO: 255124 - DNA, 467 bp, Glycine max
  unsure (1)..(467): unsure at all n locations
agcttattaaaggtagtcatatctctcaacataaattaattatacaagcaaatcttaaattgcatatgctttttttattattcattactttngtctctcatactctctctgttatttcctcttattcaaatatgcatcccattcaaattgacatttaagttgtttgcttgctttaatgtaaaaaaaaaatagttaatggcatgcatggttatattttaaatcaacaacttatatagaaagaaaagtattaaaaaaacatgtattttatcagtttttcatctgcttcctttcaattagtcttattttttctctaattataattgatcattagatatttgtaatggttttcatgtgaaatcttcggcatcaaataatgttagggaaaaatatcatactaatactgcatgcatcanaataaagtcatatctcagatggtgaaaatggtcgtttacacatatgatcgatat

SEQ ID NO: 255125 - DNA, 291 bp, Glycine max
ccgtgtctttttccccttcaaccacttattcttaataattataaccaggtttctgtctaattatcctacagcccaatggacatgacaggctaatgcaaccttaacaatacctgttactaaataccactagcgtaagaaactacgcagtcatgtgcaaaaaagattcagaatcattttcacttaaaaatataccatataaactgggaaacgagtttttcataagatgatccacctatgttcgataggagattaaaaaaaatattgtaaaaaataatatacttacatgctttc

SEQ ID NO: 255126 - DNA, 463 bp, Glycine max
cggaccctaagcgactgcagctcagctcgcttggtctaggcaagacactcttggtttgcaacacttagtcacagagaacatattggaacttcaactatattgaatgtgaatcggcttgacctaagttctaggaggagtctaacaaacgaaacctcgattttttcctcttcaccatagcttaggcgtctacaatatcccgaccaacaaatatcagatagtccgttcacaattcgcacagttatgaaatatattaattaacaggcctaaactttgcgacaaaacattgttggcattaatcctttgaaacaagaacgttcacatcgattgttaaatcttccagagaaatctatacatattgcgcttatcggcagaaaatatattgatccataccgtaagttgaattcctaacgtttattgacaacggaactcaacatttaccagttctattaagatactctaacaa

SEQ ID NO: 255127 - DNA, 443 bp, Glycine max
aactatatcatgctaaactgccttagttgttttgtgctaagtctatttatatgaacttggacttgttttcctatggctgggccgctattgaaaagctgcatgaataattctatacatgaatttcatggagacaagctcctaaaatcattcctgttttgtggcatcctccccggacagaatggataaaatgtaattcgagcgatgtagctcatggtactcccgggcctacagggtttggctccctgctctatgatagtaatggtgtccttctatgggtatttgttaattcaagaaatatttatatcttaaagaccaatgaagatttgtaattatttttactatataaaataaatataaacggttaaagtacttctaatactatatcaaatcatatttctcgaatctgcaagacaaatggatatcatgatctcaatacactacta

SEQ ID NO: 255128 - DNA, 430 bp, Glycine max
  unsure (1)..(430): unsure at all n locations
agcttcanatcatagaagattctatattaatcatctcgagcaccctctcttatagacgggtgttcaaattaaaaaacattaggccattattgtttcataatataaaatagtaaaccatatgaaaaattatttaaaaccaatctttgtaaccacttttctggcaatctgatttggtttgaaaccacatgacttggtcatcaacacactccttttatctctatgtttcatcttgggttacttgacccatgacatggacatctcatgtgtctcccaaaaaataaaattatggttacatcattttcaatgaactgactaaaattttctatatgttccatatataataagatatgctaactcataaacattatatttataaaaaggaacttttaatgtaaaggcattgctttatctaaatatggagattgtaata

SEQ ID NO: 255129 - DNA, 159 bp, Glycine max
aaataattacttgctgagtggcttctaactttaataatctttatacaattcttaattaacgaatgatgcccattgttgattgcatgaacaaatgaaatggaatcctttcaatcctttgaataaccttctcatgctatcatgcatgaagaatatattgca

SEQ ID NO: 255130 - DNA, 446 bp, Glycine max
  unsure (1)..(446): unsure at all n locations
agctntttcttcctctcacattctcactanaattcaatatctctaaccttttttttttaatttctgatctaatattgatttcccctaatttcatttggccaagagatcatatattggtgcttggatcgcatccgaaaactcgcagacaactgcactagtctccaaactcacttccttaaggtttgatggcactatcaatgtagatattactgagttccacaccaaccttgtgccataccccagggtccacttcatcatttctttgtatacttcagttatctctaccgccaaggcctaccatgagcagttgtcgattttagagatcacgaatgccatgttcgagcccccgagcatgatggccaagtgtgaccccagacacggcaagtacatgggttgctacttgatgtaccatagtgatgaatgtcctaaagattgtcatgccattg

SEQ ID NO: 255131 - DNA, 407 bp, Glycine max
agctttgaatgcactattcaatggagttgacatgaacatcttcagactgatcaacacttgcacagtggccaaagatgcatgggagatcctgataatcactcatgaaggaaccctccaagtgaagatgtccagatagcaactcttggctacaaaattctaaaatctgaagatgaaggaggaagagtgtattcatgacttccacatgaacattcttgaaattgccaatgcttgcactgccttgggagagaggataacagatgaaaagctggtgagaaagatcctcatatccttgcctaagagagttgacatgatagtcactgcaatataggaggcccacaacatttgcaacatgagagtagatgaactcattgtgtctcttcaaacctttgagctaggactctcggata

SEQ ID NO: 255132 - DNA, 287 bp, Glycine max
ctaatcccctcagcattgactggtggaggtagctatctcgatgatacccatttatgctttgccacctcatcgccttgagctcaaaccttgagacctaaccctattcgttcttggaccatgaagagacactactcccagtacaccaccagatccgcttcaatacatcttggcagcacatgctataaatgtagtaaccagcattcagggagggcctaataattgagatatggccatgaagacctctatgctcttttccaccaatttagcgaagtagggctacatgcacc

SEQ ID NO: 255133 - DNA, 363 bp, Glycine max
tactatgaatctcatctaaatgtttaccttacctctatgcgagactcgtaatatagtactttaatcatgacattatatatatatcatttgatacgacctttaaagataattactttaattaggcacactatagataaagatatctaatacgatccttaaagatcatttctttaatgaggtgcactatagataaatatttcggttagatccctacagataattactttaattatactcctaaagatagtttccttaatttagatcgctatggccatggtaatatccaccattatcattatcgaacacctaatgctgaagcttgagatgttgtgaaagatgaacgtctcctgaatgaccacaatc

SEQ ID NO: 255134 - DNA, 334 bp, Glycine max
aactcagctatgccatatttcttaccaacttcacttgcacaagacatttatctaagaaaaatgtccccatatactaacaatgtagcttcattacccatattatttacaaggtctttcaaggtgtatttgttatttacatcacacacgcctccttggctgaatttacatacatgcatactcaaagcattttggggtaccaaaaaatgcacatgccctcatcttggtatttctataaccttacatatacaaacttctcgatgaatcttgactacctacacaataaggtgctacattccatgctcttttcaagtttttgctacctaaagccgcatgc

SEQ ID NO: 255135 - DNA, 343 bp, Glycine max
taatatacattgactttggcaacaacataactccaccggagaatctatctaacgacctttacccaccaaccatgttctcttctatccagctagaacccgagactttggttaaggaatctatgctcaattccactccattttctttcatttgaacttatgcgtatataccttaccgtataagtgtacatcactaagcacaaataattgcttgaattctctatattggatatctatctgtgtggaattaataaggaagtttattttttaatcagatatcaggtagctgatttcctggacagtataaaaggggcaccaaattctgccagtatatgttgttgcttaa

SEQ ID NO: 255136 - DNA, 419 bp, Glycine max
  unsure (1)..(419): unsure at all n locations
tagctngtacgcacatcgttcgcgtgtatgatttccactccacaaggtttgaagtataggagagcttcaaccctataacgcaacgtggcagacaaaagtgggcagtaaacttgaatgatcgtcattgtcaatgcggaaggtattctgcgcttcactatccatgttcacacattattgcagcttgtgggtacgtgagcatgaactactaccaatatatagatgttgtttatacaaacgagcacatattaaaagcttactccgcacaatggtggcctattgggaatgaagcggctatctctccctctgatgatgcatggacacttatccctgacccaactacaattcgggcgaaaggttggccaaaatcaacaaggataagaaatgagatggattgggtcgaaccatctgagcaccgaaca

SEQ ID NO: 255137 - DNA, 396 bp, Glycine max
  unsure (1)..(396): unsure at all n locations
tgaagggacacccacattttctagtctcaggaactcttctaacgaattctatcttcctacacctatactcgccactccttttacacccaattaacataaacgaagtcctttcctctactacctgtggttgtgtcaaaccttacaatcaccgtctcaaatccattttcataagcaacggatcgagccaatcgcagaacatnctctcggcttgtaaacacctacaaaccaatccatataatttccagctcctatagcatattcattttattaaatcactcacaatcatgaacattattacttgagaagaattgaacgcctctgaacaatcaacaatgtggtcattcacaccacaatcttcttatatttataatccatataccctctttatgcatatac

SEQ ID NO: 255138 - DNA, 429 bp, Glycine max
tgccaagaagagaggagttggtgataccagctatgcggatacctatagctcccatttgcttgggacgcgtgactggtcctatttcgcacgattccaaaccttcgtataccagaagaagaccaaacgaagttgtgagtttttctatcaatggcggcctagattgacttaagccgcccgaatatctgcataatgtacattggaagggaggattggacatatttagctaaacaaaagtattcagccctattcaaaaggttcccttttcatgaagctagccttttatgaattttatccccgataaaatccaaagattgatggtggtgtctcccttgtcccaaagaaaacactatatagcgggcacagtggaacactccgatgccccaacatcctgaataattctcatgccgttggattccttggactcatctc

SEQ ID NO: 255139 - DNA, 446 bp, Glycine max
tagagtacattgaagaatcttgagcctttgttctcaatgatcaagttgataatattggagaggtggtctttatgctttcttcaaatattgagaatccattctgtatgtacaatatttatcctaaagatatgataaaggcttcaaatctataatgtggacttatcatttgctaaaagtattatgattccatacatagaaaaattaacaccagttacttcttgaatacatgtggccatgtacatttgatgttttgcttaaaaatactaattatctgtcccgatgtcccatatgtgcaatacaattttgtcaaagaagaatcatattttcattatattgtgttccataaagaaatctactatcaaaattattgcatacatttgtataaaataccaccattacatctgtgtacatcccttttgttaagtaataaaatgattatctaaata

SEQ ID NO: 255140 - DNA, 421 bp, Glycine max
atgctttgctcggatgtctgattgagtcccgtaatctattgagacgctcgaaattgaattctgaacctcagagctaattcaaacgacaataactttttactcggatgtctgattgagtcccgtaatatatcgagacgatcgaaattgaattctgaagctctgagctaattcaaacgacaataacttttttactcatatgtttgattgagtgccgtaatatatcgggatgatcgaaattgaattctgaagctctgagctaattcaaacgacaataacttcttgctcggatgtctgattgagtcccgtaatttattgagacgctcgaaattgaattctgaacctcagagcagattcacacgacattaactttgtactcggatgtctgagtgaggccccgtatatattgagagaatcgaaattg

SEQ ID NO: 255141 - DNA, 318 bp, Glycine max
gcctcaatagaatacgggacttattcttacattctagcacaacattattggcggttgaattaactcagagcttcagaattcaattgcgatggtctcgatatattacgggtctcaatcacacatcttgattaaaaagttattatccgttgaaattgctgagaactttaaccattcaatttcgagcgtcttcatgtattacggactaatcagaatccgacaaaaagtatcgcgttgaattggtcgagcttcacattcatttaagcgcttatatattacggactaatctacatccgagtaaaagtttatgcctttgaaaat

SEQ ID NO: 255142 - DNA, 281 bp, Glycine max
  unsure (1)..(281): unsure at all n locations
gacctctaaatcnacctgcagcatgccanctttcacaacattcaatcaaaacaatattttaacagctcaagctaacacagccagcgcaaactaagcatgggataaactctgcctcacacatttaccaaaatctcaggttttgtcacttaaagaccccatgaacaattccttctaatccatatgggaaccggtggagcgactcccaaattttactggaagaccataatgcataagcccacattgtgaccgccgggaacgactaacaaacattcagaactcat

SEQ ID NO: 255143 - DNA, 328 bp, Glycine max
cggaccctgatactcagcttgctacccctaggccattagaaatacttgtgaaatatagccttgagggtgggctcatgggctactttgggatagacaagacctttgtcttactcacatgaaatttttaatatccccatatgatgaaagatgtgcaatagcattgcacttggtgtgtggcttgtgtactagccaagtctatggtgatgcctcatgggctatacacacccttacccattccatctgcaccttgggtggacattaccatggactttgtccttgggctttctagaacccaaagaggaggtgaccttatctttgtggtggggga

SEQ ID NO: 255144 - DNA, 377 bp, Glycine max
accataaatacctatctaacctatctaacacaggccacaatatctcctatctttttgccccataacaaaagaatgcattttattaaatctatgctacctaatagatgagctaactattataggccttatctaattaaaatccctcggataaacgccaaaccaagtcaatgccccaacaatcttaattatcaataatgaacggcgctccgactcttacctttgattgccattatatgataaaatgaagggttaatttcttgcaatttatataacactatcacgcaccatatattacatacctatactctacataatataccccactatatctacatatctactcctctacaagatactgctaaccttatttaaaaata

SEQ ID NO: 255145 - DNA, 397 bp, Glycine max
cctcggtatcatgctttcttttttaacttacccacgtggtctgctttatgttctgctggtcatttattattggggaagggaaaggtggactaacgaaccattgaattatcaattgcattccaactatatggactatggacatataacagcagtagtagtagtctcttacacgttgcttgtgattttttgtatttgagatgacatggacagatgacgaggcaatgctgaattgggtaacttacttctaatgaggagtacatgaatgaacttgtgaaagggcataagctgctttatttggtggattcataacagcctgccagcgcaaatgctactatttctattttccagcgatttgatttgagagttctttcttaattcttaaatatcgcacccatac

SEQ ID NO: 255146 - DNA, 326 bp, Glycine max
  unsure (1)..(326): unsure at all n locations
ctagcatataactctcataatgtgttgatacataatgaataggaaacaaagttattttattttattgtgttgatgcagcataatagtatataaatttcttcgtattttatgttatatttatttctttgtaaattttcatctggcctccacccctttctactccagctttcttttatataatgttgtcagtagtataatacactnttatttatttatctcatgttcggttaaaaaaacattcaaatcatattgagacaaaagtaaactaagtggcaaatggcaaatttactgtaaaatgctggaagcatgccgctcctctaatttgg

SEQ ID NO: 255147 - DNA, 291 bp, Glycine max
  unsure (1)..(291): unsure at all n locations
ccaaacgtcgaattcatcgacgatatatgctatctgttccattacaggaacgcgcagagaatcctgctccatggagcaattctaaagttgtattgacactgcttcacacaattagaacccatagacattgccatatattaagacattaaatacctaactcagacatatgctcatcacactatcaaattgtatgtcattctatcaaacagagcatgataactcaccttatgaacgactattaatctcactgctaagngtgactacagtgcgcaagaaagcctttgacatata

SEQ ID NO: 255148 - DNA, 471 bp, Glycine max
  unsure (1)..(471): unsure at all n locations
agctagaaggtaaactacatgcctgggttaatctggtaacccaactggccatgaataanaaatctgcacttgctgccagactctgtggtttatgctcctatgctgaccaccacacagacctttgcccttctatgcaacaatctaaagtaattgaacagcctgaagcttatgctgcaaacatctacaatagaccttctcaacctcagtagcaaaatcagccacaacagaacaattatgacctctccagcaacaagtgcaatcctgggtggaggaatcatcccaaccttagatggtcgagtccttcacaacaacatcaacaataagagtagccttattttcaaaatgctgttggcccaagcagaccatacgttcctccaccaatccggcagcaacaacaacaacagccccagagacaacaaacaattgaggcttctccgcaaccttcccttgaagaacttgtgaagcaaatga

SEQ ID NO: 255149 - DNA, 328 bp, Glycine max
tcaagcattatgattttcatggacatccacctagtcatacgctcccctaaacacaagttcgggatcatcacgtgatgcatacgcaccttcacaccaaggaatggagttatctcatttcccaggctgttgtgagaaatcgagacagttgaatatacgtattatataaatgagattcgcacttgcttaaacatatctaacgtaacttcaccaattcgtcattcaaaattcacttttcaaccataaatcacattacgcaggaatcccacgctccgatcaagatataataacacatcaattagtaagcatatgcaacaattatgctaagact

SEQ ID NO: 255150 - DNA, 333 bp, Glycine max
  unsure (1)..(333): unsure at all n locations
actatanaaactcaagctcgaaagaatctcctataatcattcagtgatataaagatataatgtatacttgtgtctattacagacaaataaactatattttacacacctgtattcccttatacaagaagaatctaaaacagatttcatatttgcatatggacatcaactacgagagtgggatgacaacactcttttataggaagaggtcagagcctcttgtataatctacgaaaaagcatctcttataagggaaaaatgtaaacaaagctcatgcttacttcaacacagaatgaatctatactgccacagctcttgaaccaaattgattcacaa

SEQ ID NO: 255151 - DNA, 436 bp, Glycine max
  unsure (1)..(436): unsure at all n locations
gtcactgcagcatgcaagcttnatatattcaatacaattatctcatcttgttttgacaatggtttgagagttaagttaagaatatgatcttgtaaaaattttcatgtgattgctgaagaagaaaatattgtatatatgtgttgtagtactccaaaaaagagatgtaactttatgataagagttaatcctatcacgaagtaccaaatttatactatgacaatcacatggagtataaaatgattgagagttaatgtttaaaattctttttttgcatcccttgatgttttcctctcatatttaatcccttattataatcttgtactcttaagatactaatatcaagtccaacattaattgttccattcataataacacatccaaactgactgtttcaatggttcatttattgttaaaattctaacaatattcaaaactt

SEQ ID NO: 255152 - DNA, 458 bp, Glycine max
  unsure (1)..(458): unsure at all n locations
atctagacatgttcactccaggcttggcaattatttatatgctcacaatcgcaccaaatgcaatgaggccatctgtgatgagagacagaatcaatgctgtcctgttagatgcataaccagccatctgaacaatggtgggactataatacattacagtgttgattcccacaaactgctggaaaaataagaggcccacaccagcattataacctcttttcacagctgacgttcttaaaagtttgactatgttgatcttctctgatgattctgcttccttaanttccatgtcaactgattctttcaaggcctgaatttcgccttcaactccatgtggtggataaatcttctttagaatcgaatttgctttctcttccttaccctgtgggaaccaaaatggaacatcagttaagatttaccattttacacacatgaatgacagttgactactatgatgaact

SEQ ID NO: 255153 - DNA, 384 bp, Glycine max
  unsure (1)..(384): unsure at all n locations
ttaagtgactgcagcatgcanctatttgaaatgagaaaacaaacatgtgttatgcttccttcacaggaaaacaaaccaaaatccatttttaacttaagatgctactgatcatcacgtcccttcttggaaaaacgccaaggctaatagaagatggctcggctgcgttaattaatatattcttggaccctcactcctcaaagttggtccatctattctggcacttaatgtgaggtcttaatgaaaaatgataaatgcttgcgtgacctaggattggacggtaattgcacttaaaaactacgcagatttaaaccctactatccatttagagcctatactatggngtctttataaagtcaattccattaggatttagggctcaatttt

SEQ ID NO: 255154 - DNA, 456 bp, Glycine max
  unsure (1)..(456): unsure at all n locations
atccctgagtcacctgaggcatgcaagcttgaagacaacagaatgtttgaatactcttatacgttccttccactcagtgtagtttcttccattgaaatatggtggcctcgaaatacagtgcccttcaatgatgatattactcatcaaattcacaactgttgaacctacaaggatatattctcttatactatattatgcccaggaatgttaaggataaaatttatttagtggtcatctaacttgaccactcaaataaaaattaataatttatctttngtagttacatataaagtatatgttatgatctttgtcctatccttaattaataaatgaattaacgaagagtgaaatatgaaaccaagaaatatatgagaacaaactatgacgaatatattatgaatcatgaagttttagatcttgatgatgtccacaagaattctgttaataatgattatt

SEQ ID NO: 255155 - DNA, 380 bp, Glycine max
ctttcttttctttcttttctttggcgaataacaaataaactacggagatgacaataaagccgcgattggcatccaataatatatagcctttcttcgttttcttaagaaaaagacaaataaaggaaggagagatgacaactaagcggcgattggcctcccaaattatattgctaagtgataccttggttgctaaaacctaaagcaattcttgctcacttctattggagcattatcttgactaccgtgaggtttaagaagcaatttcgttgatagtaccacaaatttacaatgacgatgaataaccaacttcgctgaaactgctccaacttgtacacacatgccaacgcggcatgacttatgcgtaacgacctattaagcac

SEQ ID NO: 255156 - DNA, 288 bp, Glycine max
cggaacttaagtcactgagctgcagctatgctgaaaagtatttaaattgttagcccaaaaacacttttttattaacagcatagggacctgttaatttttggtttaaaggaacgggttttaacccacatggtggtcctacacatgaaataaaatgtagggaaatttacccttccccttttgttttgttggaaaggaaaccagggtgaccacctaaaacaaggtttcaatttgccaacaaaatttgtgaaccatattcatgagagccatactatgcaaatggaggtggat

SEQ ID NO: 255157 - DNA, 431 bp, Glycine max
cgaaggcaaactggatgcgttggtcaacttggtaacccagctggccttgaatcagaaatctgtacctgtcgcaagggtttgtggtttgtgctcccctgctgaccaccatacagacctttgcccttccatgcagcaacctggagcaattgagcagcctgaagcttatgctgcaaatatttacaatagacctcctcaacctcagcagcaaaatcaaccacagcagagcaattatgacctttccagcaacagatacaaccctggatggaggaatcaccctaaactcagatggtccagccctcagcaacaacaacagcagcctgctccttccttccaaaatgctgctggcccaagcagaccatacattccaccaccaatccaacaacagcaacaactccagaaatagccaacagttgaggccgctccacaacctt

SEQ ID NO: 255158 - DNA, 338 bp, Glycine max
tttttggaagaggaggaccaagcctctcttctggtactaattgtaaacgtcgtataaacctgttagatgtcttatcataatctgcatggatttgagtgtcgatctagaatgaacatcatgattaagttgtatgaatctgcatgaacttgtgtgaattgacaaagatctagctcattgatcataattgtgcggagggaacttggctaccaacggtagaattgactcatttaactattgcataatcaagtaattatttggaaaaatatctttgcaatttatactttgtctaagtaccaccttacaagtcgaaatccaactggaactatatgagaacctta

SEQ ID NO: 255159 - DNA, 447 bp, Glycine max
gtcacctgctgcatgcatgcttgaccaatcccgacccaacccgggcatattctttctgtgagaacctgtgacgtaactaaacatgcgagctcctggtagtcaaccaataaaagaacaaagtccacatagcaaggaggcttgtgtggcggctggccagctatgtatcttgagtggtatatagaaattagcctctggtaatcgattaccattcgtgggtaatcgattacagggcttaataatggagacaggaagttaaaatggcctctggtaatcgattaccaatgggtgtaatctattacacagagtgacagggcactggtaatcgattaccagttgggtgtaatcgattacactgtgctacctgccactggtaatcgattaccatttaggtgtaatcgattacacagtgtatattgtagatttccatgtgcagaagctatgtaattc

SEQ ID NO: 255160 - DNA, 358 bp, Glycine max
  unsure (1)..(358): unsure at all n locations
agcttctacttatgtggcaaggcgggctaccttcactttcatgcttccaacgcgagctctgacaactgttcttccttcccgcgatgcttcttttcatgtccgcctgagtgggcttatagcctaaaccatacttcccacgattcccttgtgcttttatcaaaccaattatgccgccattgtctattcctaaacccatcgcgggntcataaccgttccccaacataactcggaccatcattaccgccgcatcagacagacaacgttgcccaaagagggagtccacggaggaaatgctgaccacgtcaaaagactggatagcggcttctaacgattcttctgccgcttccacataaggcat

SEQ ID NO: 255161 - DNA, 205 bp, Glycine max
tggaaccctattagaacctaggaaaaacctaagattcttttgaactgctatagatgccactatcactaccggactacacacgaggaggatcaaatcgggaactatactgggatgttcactatatatgggactcttcctttatgaatataatcatgagaatgttggagttggcgggccaattgataccctggtgcgaaatggttga

SEQ ID NO: 255162 - DNA, 308 bp, Glycine max
ctgcagcatgcgaacttgtgctcagacctataacgctaacggtttttatatttcttggacgaccctcacacgggagggtcacaacttaagatacaccattgccacagcggcaatacctaacctaaggggtgaaatgacagaactaccgataaaacgacattgcgcatgttgttgctccgagcgatgactcggactctggagaccgcgacctcattgacgacagcatcggccacctcgatgggatgatactctcctacccatggaaccgtcgacgcattgcctgatgatgacaatgacactgcttctgc

SEQ ID NO: 255163 - DNA, 468 bp, Glycine max
  unsure (1)..(468): unsure at all n locations
tgctgcatgcatgctagcttattataagctgaaccattntattattttatacaaggtgggttttattcagaagattagagtttatctcttttatcttaccgagagtgattctcctaaattcttgagtgattcaagaacaccctggcttgatcaaaggtacttctacaacctttgtgtgttgccctccctggaaagagggactcttttcttcctttcatctccacccttggtctttcaaaccacaattccagaatatccatttctgcccagaattatctcgtgggcataactcccgttttacgcactcaaattaagtgattcttgagcctaaattgaatttcaaaacgagacatttcacctcgtgttggaatcacctcatttggagccctggagcttcagttattgccatatctatatttctgtccagccaccacttaacgctaaattttaccaatccattcattcatt

SEQ ID NO: 255164 - DNA, 392 bp, Glycine max
agcattggtaactcggaaccctacttgtcttgaatcagacaattgtacctatcgcaagagtttgtggtttatgctcctctgctgaccaccatataaacctctgcccttccatgcagcaacctggagcaattgagcagtctgaagcttatgctgcaaacatttaaaaaagaccttctcaacctcagcagcgaaatcaaccacagcagaacaattatgacctctccagcaacagatacaaccctagatggaggaatcaccctaatctcagatggtttagccctcaacaacaacaacaacagcctactccttcctttcaaaatgcttgctggcgccagcataccatacattccttcaccaatccaacaatatgcaccagcccagaaacagaaaca

SEQ ID NO: 255165 - DNA, 402 bp, Glycine max
  unsure (1)..(402): unsure at all n locations
agctntgcggatttggtcttcaccggggaatgggtcgaagcggatctaaaaagaggcaaatttaatcatcctgcttggacaaatgagaaaactggggcaaatgaagagggtgaggatgagggagaaacccatgctgtgactgccattcctatacggccaagtttcccaccaacccaacaatgttattacttagccaataacaatccttcttcttacctaccacccagttatccacaaaggccattcctaaatcaaccacaaaacccaccttccacacaaccaatgctaaacaccacctttagcatgaaccaaaacaccaaccaaggaaggaattttgcagctaaaagcctgtagaattcaccccaattctggtggcctatgctaacttgctccataatctac

SEQ ID NO: 255166 - DNA, 331 bp, Glycine max
  unsure (1)..(331): unsure at all n locations
actgtgtagttntctgaatgaagagagagaagatctgggctgtttattatctatgcaacataaagagagagatattcctttctttacacctttctttgctaacagcacttgacacatgtcctattatatgtggagcataagggcccaccttttttctttgattgaacttcatactcagccacacaggagaaaaaaattgacctttaggatgctgataatctgcctaatgttgtatgccgcctttctcggttacaggaactcacgatgttctgaagccctcacggcccgttntcatattaagcactatatatatcagcacgctatcaatgat

SEQ ID NO: 255167 - DNA, 269 bp, Glycine max
ttaagtcgactgaggcatgcaacttgaagaatcggagtgttactttctttagagggcccacataaaacaaaacggctgccaatcatggaggggggcggttatgccattaggtgagatatacacaggatcaaacttttgaggacgtactacctcacaaggttatctaccagccttaaaaaggcggcatgagtcccgtgacggcacaaaaggatcatgttaatgattgggtgactacatgacatggaaacatgtcggcggtaaaatattta

SEQ ID NO: 255168 - DNA, 414 bp, Glycine max
tccacatatggtgtaaaagacagacaacttacaatgattccttccttccctgatactatgattaactgcccttccaacataaacttcaacctttggtggagcattgaaaggattaccccgaatgattgaatccaatgttggcctacaaggctgctatatgtcgggttgatatccaccactaggaaagtgacctgacagatgtgtggtccaatctgaattgggagatcaatttcccttcctacgacccagcggctaccgtcaaaagcccgcatcaccatagagctctgcctcaagtgtgacccgctgacatataattcgtccaatgtactttcgggcatgacattcagcgataagccatctgtgatgaacacccttggctactacgtggtcccaacacttgacagatacatgtaa

SEQ ID NO: 255169 - DNA, 373 bp, Glycine max
agctcgctatcaatgctaatcccaaactcctttgcatagggattatactcataatcagcttcgtgaattgtctgctcatatatcgggaaagttatatatttattaaactaaaccaaaccagcaatacacattatttatttgtttggaaagagaataaatactgaaaaggacaagttaaaacaattgcaatctatcatacagccatggctattcagtttccaattgattctgacaaaaataagaatgtttagaagaaaataataggttggagagtgagttcaagaacccatgatgatgacctggagaatatttgtctcttgctcacgtggtctctggcatgagacctttagcagagaagttatctgcttttcgt

SEQ ID NO: 255170 - DNA, 460 bp, Glycine max
  unsure (1)..(460): unsure at all n locations
tctanccatatggacttacctcgagataattcctttgattgtccttctgagccttgtttccctttccttgtgttgaagctcactacaagccttaagtgagaaaccatgatattaccatatcctctaagaattttggagctttggaattgttttgggaataaacgtggggggtttctgtttcattggacaacttgttttgttggctatgcttcatgatgtattttgggccatacttgatagacattgtatattggttaaatgttggacatgctgaaagaaaaggtgcttctcaaaggctaataaaataaaaaaaaagcacataaagtgagtgaataagatcttaaatggcacaagaatgatgaaactcttgggtctactcttcatgttaaaatttaccttactttctcttatttttttgttttggtaaaatgacctattcccttggtcctattctttggat

SEQ ID NO: 255171 - DNA, 456 bp, Glycine max
  unsure (1)..(456): unsure at all n locations
agctctataanctgagaattgggatgtcctattctattgtgccgaatatatgcagaattaggcagtgttattacaagatacagaagatacagtcgttatacaagctggagaagacacaccaaagcagaatttaagatttggaaactaatccatcaggtccaacatcttcttgtagaaggatcctattggaatcctgagatttaacaaagcacagattagcatggaattcaaagaaaacatgattattttttgcagacttacttccactaatcaaattctttgtgatttgaggaacaagaagcatgtttttaagaacaagtttgacattaggactgaagggagaaacaaaattggagtgaccagaggctgagatattcagaccttgtccttaccaatgaagatctgatctggatcctagaaggagaagttgctggattttgcgagtattggaactga

SEQ ID NO: 255172 - DNA, 84 bp, Glycine max
taaagtcggccttgggcacttttttgactggtcagcctcaatgtaaaaaaattgagctaccccaaattacaaaaaatcgaaaat

SEQ ID NO: 255173 - DNA, 404 bp, Glycine max
  unsure (1)..(404): unsure at all n locations
agcttaagctcactattgcttccncataatgcttcactaaaattgtcacggccatgctcttctttgcgagccctcttggattcttgttcaagggctcccgcggtatctgcatttccttcccgtaacaccgcacactctttccagacattgttgcgaccaacttgaaattttctttggcaagacttgcttttcctactattggttttagagctcaggcttcttcatcctctttcagagcttacaagttctcttcgtcgataatcattaactaggagagccaatgtaaccctcgcgcacaaactttcagccattcatgattaccaccgaagatgccattatgaatgcccataacatcttgatatttccttaacaagctttcccatgccttatggactctttgtata

SEQ ID NO: 255174 - DNA, 361 bp, Glycine max
ctagataaccatgcattacgtaccatgtgtaattatttttttaagtgaaacagggtgtatgatcccaacatggttggatcgtgtgcctaacacatgaaactaagaatagtatgtgaaaattcacgcttcctccttttttagttttgttatggagaggaaaactcaaggttgagcaaacatgaaaacaaatggtatgcgattatgcagatcaaaaagcttgttgaacgcatatgcatgatgatgccatgactcatgcacaatgtgaggttggaatatgattacggacaaatgccggatttgtcattatgatgctatgaagagatgcttatgccatgcatgatatgaatgcattttactgaca

SEQ ID NO: 255175 - DNA, 358 bp, Glycine max
agcttgtaacgccactggcaatggcgggaactatgatgccgccattggcagcagcgtgatggggtatgactcaacttaaaccgccagttcgaatggcgggacaggctgagtacgagagaaagagaggaacatgtaacgccattggggctggcgggacaggggtagagagaagtaccgccattggtactggcgggacatgcaactgtgtctcaacacctacttaaccctacttaccatgttgttgcgacagtacgtacgtcaatctagctctttaatacaattataatggaatttcgtactcacggcacaggtatacgtcacaacgatcatctcgtattcagcaggatacgttaccact

SEQ ID NO: 255176 - DNA, 289 bp, Glycine max
tctaaccactgcccacgagcatataatcgtggatgagtatgctctagtatatgcggaaaaagaggctctaggaagggtgatctactctctactccaggaggcaaccatgtggatggatcggtttgctcttaccttgacgggagcaagtcttccccgattgtagccaggctaggcatggaaacacctactcccccctaaagattatgggtttcggctatgcacatagataactaatggcactaattgaatgtaggaactgttggctttagacctgctaatagattctttt

SEQ ID NO: 255177 - DNA, 403 bp, Glycine max
agcttgtttctatagaaaaaggactgtaaaatatctcagataatatattctgaataacattccttttgctaagcgcaagcctcgcgctaaacgcatttttgttcatgcgctaagccacgagtctcaatcgcttaacgcccaacccttgcatctgaggctgatttggttcgctaagctggccagggctgagctaagtcaacttcaatttgatctgaattcggctaaacgatagccaaactgctaaacgataccttatccttggctaagcgtgactcagtgtcgccaagcacaggtttttacggccagaactgaagttcatagagctgaatgccaatcatgtgagctaagctgaacttcctgaggccaaacttcaatttgattgagctaagcgccattccatgcc

SEQ ID NO: 255178 - DNA, 382 bp, Glycine max
tggaaatggaaagacccttctcattaagatttgtcctgccatctcacactaaccaattatatggtactagacaattatatttgttgcttgaataccttacccacttcagtgtattacacatattatggctttttctttaatgaaacacttttgccttttaccactctaattccccttgagatctttggcaattacagagaatatggacacaacaaaagaacaattcaccaatttgtgtaacgtaaggctatgaagacaaggaaagggttatcaagaacaaggctaacaatgtttttatgcacaaatgaagcgaataatattcagaatttaggaattcaagatacaatcctttctggcaccaatatattaacttaaagaattt

SEQ ID NO: 255179 - DNA, 327 bp, Glycine max
  unsure (1)..(327): unsure at all n locations
atctttatctcataagcattaagtgcttatttcacgaaatagatacatcccatcgcgcgcatgttgctgcaacccaaatacgcacactgctatataaacatgaatgctgcaccagttttctaccaaggacatgattgaagagttattttgtgagttctgggacttgagagtgatgcgagccacctttattgcaccctcacatcaatggttggacctgaatgtgtagagatgatctctatggttcacaaagcaatctctggtgtgtatttgattatattgtaaacaccggaaagtgatttatagggaacgagaggggcnttcatattt

SEQ ID NO: 255180 - DNA, 332 bp, Glycine max
  unsure (1)..(332): unsure at all n locations
gatttctggtgtctatagattttgtgtgaatgaatggtaaagcttataaatttgagactagctttacataacataataacaagctccacacttcaagcatgtacacaattcaacttatgagtagtttagttgacggtgtctagggtgcaaaagtgaaactactnttccaccctatgaaagtttgtgcaacaaaaataaagccattggaaccgtccgaatagttttaaccatatcgaatagtggagatgtgttcattgctaccgcgagtaaatggatccctcgagttctatgtcagctttcctcgaaccgcgattgaaagtatggagccctcg

SEQ ID NO: 255181 - DNA, 411 bp, Glycine max
agctctgtattttatctctacaagaaaagcagtagatctttatgacaacaggtgcggattttggggtggtgctgatccttcttctaccttgaaggtgctttctttgttttccctccccgctatctgcattctcttccattttgatttgttagggctaattgaaattctcgcttaatcttttattccggggtctttgctttgaaacatattggctttcattcctacaagcgcgatgacaactattgccaacttgatatgccaactttgtttgcttttgtagaagtggcgcattttatatcacctactcattatttgtgtgcattatagtgtttacttaaggttgtctatatatctgaatatcctaactgacattggctcatttctatgatagttttatccttaccctctacc

SEQ ID NO: 255182 - DNA, 408 bp, Glycine max
  unsure (1)..(408): unsure at all n locations
agcttaataagtccatctatggattgaaacaatcctcccgccaatggtattataagattcatgaggtcatttcttcatttagctttgaagaaaatgtcatggatcactgtatatactanaaggccagggggagtaagatttgtntccttgtattatacgtagatgatattctacttgcgactaatgataagggtatgttatatgaggtgaaataatttctctcaaagaactttgatatgaaggatatgggagaggcatcttatgtcatacgcataaagatccatacagaaagatctcgaggcattttatgcttgtctcaagacacctatatcaacaaagctttaaagagatctaatatgaaagattgttcaccaagtgtagcttccattgtgaagggtggaaacttgt

SEQ ID NO: 255183 - DNA, 298 bp, Glycine max
caagtgagaaagaaacgctcttttttccactctgcaaaatgctaaaagattggttatgaagaaggtacacacagagaaacaatttggacttttcattcggatgataaactgattgaaccagctttgatattgccggaggctacagcgtcctgggaaagagctttttcacgcttgaacgatcattcattctgaaatgcgcaataataatcaccatgtgtgggtcaatgacttagatggatgttacaccgagcgggagatattcgagtctcttgaagaactcgacatcattcaaacattt

SEQ ID NO: 255184 - DNA, 412 bp, Glycine max
  unsure (1)..(412): unsure at all n locations
gcttttaaggaagttntcttaagaaagcttctcaaggaagctacctagtctataaatagaagcatgtgtaacacttgttgtaactttgatgaatgagagtcttgtgagacatacttcaaagntccacttctctccctcttttattccttcaatttcgtgctcccccctctctctttctcttcctctttcttttcctccattgaagcatccttccaagcttcttatccaaggctcatcttggtggtgaagctctttcttccatggcttattccctagtggatggcgcctcctctcacctcttctcctttgtctttcgttgcatctccatgggggaaaattaccattaaaggacctcattgaagctcaaagatccagcctccatagaagccccacaagcaagtttccatcaagt

SEQ ID NO: 255185 - DNA, 446 bp, Glycine max
  unsure (1)..(446): unsure at all n locations
gagagagactattatatagttgggagcaaaaaattgaaggaggaaaagggggagagaagttgaactttgagttgtgtctcacaagactctcattcatcaaagttacaacaagtgtttcacatgcttctatttatagactaggtagcttccttgagaaacatttcttgagaaaacttccttgagaagcttctttgagaaaacttcgttgagaagctagagcctagctacacatacccctgtaataactaagctcacctccttgagaagcttccttgagaagattcctagagaagttagagcttatctacacacacctctctaatagctaagctcacctccttaagatgaaaagctagaacttagctacacaccccctataatagctaagctcaccccatgacanaatacatgaaaatacaanatagtccctactacacagactactc

SEQ ID NO: 255186 - DNA, 424 bp, Glycine max
  unsure (1)..(424): unsure at all n locations
gcttcttgaaaacttcttgaagctttttgttatacttccttganaagctagagcttaggtacgcacacccctctcataactaagctcacctccttgagaagcttccttaagaagattcctaaagaagctagagcttagctatacatacctctctaatagctaagctcacctccttgagatgagaagctagagcttagctacacaccccctataatagctaagcacccccatgacaaaaaaacatgaaaatacaaaaaaaaaagtccttactacaaagactactcaaaatgccccgaaatacaaggctaaaaccctatactactagaatgaccaaaatacaaggccccaacgaaggaaaaacctattctaatatttacaaagataagcgggctcatatttagcccatgggctcgaaatctaccct

SEQ ID NO: 255187 - DNA, 396 bp, Glycine max
  unsure (1)..(396): unsure at all n locations
ctcaagctntataagcgcgggtctgggagacaaaggtcaagtgttcgcttatttctttgatgatgttccgagcactgtggatttggtacgaccatgccctcctgatttccagctgggaaattggcgagtggaggaacgccccggcatttacgcaacgagcataatgtaaacctttacggctttaaaagctctataattgggcctatgctttacagcttttccttttgttaacgctatgtgtcttttgtttctgaatttataatacaaggatctttcttcatctgttcctggtctctacccattctcaatcatttgcatgtttacttctttttctgaaacggcagatccgatgacgagtcctccgaaggtactaatacctgtgacccgcctatcgac

SEQ ID NO: 255188 - DNA, 367 bp, Glycine max
acaattgcatcactctctcaaagagcgggtcgaagaagaatgtggccttcacctggggtgaaaaacaaaaacaagcctttgctttgctcaaagaaaagcttactaaggcacctggtctagctcctcctgacttttctaaaacttttgagctagaatgtgatgcctttggagtgggagttggagctgtattgttacaaggtgggcaccctattgcttattttagagaaaaacttcatagtgccaccctcaactaccccacctatgataaagaagcttatgccttaataagagccctccaaacttgggaacattaccttggttccaaggaatttgtcattcatagtgatcatcaatcacttaagtacat

SEQ ID NO: 255189 - DNA, 393 bp, Glycine max
cgctatgctttaaattgaagctataaggcaaagatcacatattatttgtgattgctttttggcaacgcgctatcagaagattatagagctacaaaaggttttaagtttaaacctctgtccttccttactaaactctccatgggctttaattttatctttattttaatacatacgtagaagctcttagattaatgtcttgttaagctctctggttgctttgtcaacgttaaagaaaagcattctgcttcttcaaattctttgttttgtttctgcttcttcagattcttttaaattttaagctgtaaggaaatgatctgttgacagtacgagttttttttttttgctagatcacgatctgagggtaatttcaagagcttccattcccatatgtta

SEQ ID NO: 255190 - DNA, 303 bp, Glycine max
ctaacagaataacttacaaaaaatatgtgataccacagaaatttcgaacaccacctaacaaaataacttacaaaaacatattgagatcacagaaatgttcaaacccactaaaacgaaagcaactgcaagggaaaacagttgaaaaaaatggtgaaggaggaggtgtatttaaacaccctaaaacgccaaagccggtggcgtttgccatattcttacaatagcgccaaccccatatgcgcttccatgctgttgctgagcactaaaaagctactcctgctctcctgcaaaactgctcttgctctc

SEQ ID NO: 255191 - DNA, 427 bp, Glycine max
  unsure (1)..(427): unsure at all n locations
agctgggacgagaacatataataanagagagagccgcctcttctttcctctctgttattaaacatataagtccgccaacaaagatcgatatatcgattatagcattgaacaaatcattctgacacatcactatatggaaccaatcatgagtatcatacccttatactctggtttccttattgatcctacaaaaagggccgcagcatccatctaagttcttaatattatatgactcatcaaactgtagcagagaattcatggaaaaaaaataccgatgttgatacaatgtaaaagagatcgatacaattaaaaagttgatatttatataataataatatctaagatggtttaattgggcattaatccctcgtactcacacagatattgctcatagaacctagggagacaagttagacaccatctctac

SEQ ID NO: 255192 - DNA, 187 bp, Glycine max
atcctcctttctgtattggaatgacatatcttatcttctgctgaaatttataacatgacaatcatgaaataccaagggaggaaagaactatgaaggcaactatcagtgcagttcaacatagggagcatagtcccccgatccgaacaagttacacttccacacctatagatagcagtcgcctaatgat

SEQ ID NO: 255193 - DNA, 345 bp, Glycine max
gtattaaggaaaacaaacaaacaaaaagaatctaagtgttgaaagagccaacgatatcttacaaataattcataagatatttgtgcgcccttccctatggattcgtggaatatacaaagatattttattacatctataacatatcactctttattaatttgtgagaagtctcagtctctagacatcttcaagtctttcaaagctgaagttgaacttcaattgggaaataaaattaaggttatcaaatttgattgcggtggtaatactatggtagatatgacaaataaggttagaaacatttagagctcatcatctttttccttcaatcagtgtgaaatttgtctg

SEQ ID NO: 255194 - DNA, 282 bp, Glycine max
ctattttggcctggaagcagacaaattcacacagatatgaagcatttcatgcgcaacctcccttgtggtatgtataggataacaagtgacaattcaattgagaggctgaaagatccaatatcaccagtccctaccaaaacatttgccgacaagcatcaaaatgtaagctctaaagaaatggtgccatcaatagaacaggaggaacagttttttctcagctagtacttttatgccataacaatattgtctcaatacaatatatacatatatatatacatatat

SEQ ID NO: 255195 - DNA, 301 bp, Glycine max
  unsure (1)..(301): unsure at all n locations
accaacggctactcacttatgacagaagcctaaacaataattaacaaccatggacattatccaacacatgaataatgcttaactcccacacatgaaagaagctaatattatcaatacaaagcttaacaaggctgataacaataaggcanaaaaggtcaaatatcaatgaaacaatcgaaagatttatcaccacatagttagtgacacctctctgaatagtcaagacttccatgaataactcttttgactcatattatacttaaacacattatcaaaacaacctagctgaaattttgacaat

SEQ ID NO: 255196 - DNA, 358 bp, Glycine max
  unsure (1)..(358): unsure at all n locations
tgcaagctngaatacaatggaacttttaacttattttagcttagacatccccagggtgctgaggctttcttgattcggaggactgacacacattacaacacttgtgcatttggtcttggaatattctcttatttttcaacaaccttaacgcaaaaatctccaagctttatatacactccagagctttgatccgttgagagacctagctagtcattgtccaatagcattggcgcttgacacaaggtcgctaatatgcacaaagagagagtgaggaccacaatcattttcgtgtagcatatcttcatagaagtataattcttcagtgtatcctagtgcttaaagctaactctcaccatac

SEQ ID NO: 255197 - DNA, 95 bp, Glycine max
acatcaagagagacgggaccttactcgtcttatacacaaacaacgcaacgacgcgcatatcggacgacaatgatccaacccccaaaatgaaaaaa

SEQ ID NO: 255198 - DNA, 444 bp, Glycine max
tagtaaagctaagcactaacagatggcaaccagtctgtttgtatctgcttctatgtacaagccgcacctgtcagagtcaccggtctcaggatcgcttcctgagggatcaacacaactcccctttgtgctcactcgaggatcggagggaccaggaccaaccagaggctcacgaggcattgcaagtccctgagattgcatctgcgactgaagctggctgaaggatgccatgacctgcctcgtcactttctctgtgatggactcctctagctggtccctgatctgctgagtcagctggtgtaattcgttaggaggcacggaggaagcgctgctggacgtccgtggagccgatccaaagtattgctcgatggtgacaccggctccagtaccacagacacgttcagagtgctctggacgtccaatagcatcggccagaacatcctgacg

SEQ ID NO: 255199 - DNA, 295 bp, Glycine max
  unsure (1)..(295): unsure at all n locations
atcttggagaagtccttgatgaatctccatagaaacctgatggccaaaaaacntctaaccctggattactggggggaactctaagcacaattgcttttcacttatgcccagggaaatttgaggccaacactatcccttcttaaaccatgaaatgacacttctcccaattcagccaccaatttatctcaacagatctctatagccccggctctagattcatcaagccacaatcataggaaggcccacacactgagaatcatccatgaagactttatgcacttctctaccatgtcac

SEQ ID NO: 255200 - DNA, 426 bp, Glycine max
tgaaatgaagaagagtggaacggtgagtcttccttcttttattgttgaccacagagtggtaccaggagatatgtcgcgtgggtcaggagaccttggggacgacaggtggggtgctattgcccacaaccaagcttgaccaatcccgacccaacccgggcatatgtcaatcagtgagaacctgtgatgtacctaaacaggccagctcctggcagtcaacagataaaaggaactaagaccacaaaacactgaggcttgtgtggtggctggccagatgtgaaacatgattgatatatgggatgtggcctctggtaatcgaataccaacggtgggtaatcgactacaaggcttaaaagtgaagacacgaagctaagatggtctctggtaatcgatataccaagggagtgaatcgattaccatgcttgaaaa

SEQ ID NO: 255201 - DNA, 154 bp, Glycine max
aaaacagaattaacaaaaccctaaccccaagggggtagacaagaggaaaccacaccccccgcaaaccaaaagcaaacacagccggaaccaaggaaacaacgaagggccccacaccacaagacggaacgcaggacgagaaccagggcgacaacac

SEQ ID NO: 255202 - DNA, 183 bp, Glycine max
ttttggagctgtgaaaggaatacctaatggtgatgtaacaatgggcacttaactttacacaccacttgtctctcttgaccgtgctataatggaattcgagtggcttaaaaaattttctcttaatttatccttactttgtcatttgcattcttcatttattgaaagaggaaaactttgttatga

SEQ ID NO: 255203 - DNA, 155 bp, Glycine max
caccaacccaacaatgtcattactcaagcaataacaaccccgctcatcacccaacacccagtcaatcacaaaggccatccctaaaatcaaccacaaagcctacctaccgcacttccatagcaaacaccacctttagcatagaccacaacaccaac

SEQ ID NO: 255204 - DNA, 449 bp, Glycine max
  unsure (1)..(449): unsure at all n locations
agctnggncattcacaccatntttattttattttttattattcatagtaactctgataaagtcaaaagaaaaatgtccagattatttatgaanatattcttcacttatgcatctcaaatcataatatatatattacaatgcattttctaaaagaattttagctagttaagtataaaaaaagggaaaggcatatattttgtttgacatataaactttggaaccataaagatattaaggcatgtatctgatatgcttagctctgatcaacattttgatcccaattgtgcatcccaacaattagaaatagtatcaaagctctaaccaatagttgttggatgctagtatttatcgctgccaaaataatgtagtaatcaacatgtatatgataataatatataatatctactttaagctagcacacttgtcgtaactaacacaagtgactttgg

SEQ ID NO: 255205 - DNA, 388 bp, Glycine max
  unsure (1)..(388): unsure at all n locations
ctcccttgagtgacgtttgtattggttnttatcttggttgttgcatcttagtgcatttgatatttgctttgcattatgcatcatcatagtatgtgtgaagaaaaatttcaaagttagaaaaatttcttcagaggcaataactctttgctgtaatcaattacaacctcattgtaatttattataacaagctgtctgaagcttgtagagttaagtctcatattagtttaatcaattatggtagtattttaattgattacaatgttatttgagacaatgactgatttattcaagagtctctgctgtaatcaattaccaggtggattaatcgataacttctctctcattcaagtgttcagaaagttgttaaaatagattacattgttcttga

SEQ ID NO: 255206 - DNA, 276 bp, Glycine max
gcagctgcaacttgacaaatcaacgagaaacttttacttgttgttgaacgaacccgcgaatatgagacgcccgaattgaaatgaaaaccctgagccagtcaaacgacctaacgcttactcagaggtccgagtgaatccgcaaaaatcaagacccccgaactgaaaaaagaagcccgagcaaacccaaagcaaaaactctaacacagacgccgacgaagcctgcatatatgggaccctcgaatggaaacggagctttcgaaaaccaaccacataaac

SEQ ID NO: 255207 - DNA, 326 bp, Glycine max
atgagaatggggtaaactcggatcaaactctcatctcatacaagtctatatcatcaatctaaactcgctccaactggttttatgacaaaaaccctaccgaatcaaaatttgactcctcaatacccaattctaccctagagatggctcctgtttcacttctggcactcatattcctcatttgcacagtctaagctttctcataagtcctaaatgacatttcaaactaagattaactccctttaacctccaaataccactaaatccagaattggccttccaactctcaaagcctctctctctctccactcataacaccacattcttac

SEQ ID NO: 255208 - DNA, 426 bp, Glycine max
  unsure (1)..(426): unsure at all n locations
ttcgaaccaagactattccataatttatgaataggccngcnnncgtatcggcaaatatttgcaagagctattccagtaaggcgatgtggtctactcgttgcatattgcactctgaatcacttgatgagtgtcacaaaagaatctatcgagtttttcataggagagtataccaatggagcgttgccactttcaacgtggtaggaaacactcggcacatcaaagcatcctcattggtgaacaaattcatctgtgttacgagtgcatatacatgctcacccgggtttgagagtctgtcataacagttngtgttcagcgtcttccacccggatagcaattatacttccatgattccatctatagccatctgcatccactaattgtggtcaaaggagaagtttccctcgccccacaatggacgccaaatgt

SEQ ID NO: 255209 - DNA, 438 bp, Glycine max
tatgaccatacgaataggttatgtttctcatctttcttaaatcctatatgcgagagagcactgtttaagagaattatgctgactgcctcatatgtatgaatagcatggccattgtacttgaatcttgtatcactttaaacaaaatagatactcttttgatgtaatattagatagtgataataggaaatataatgtgggtctgctctatagatgctgtatacatccttcatttattgcaaattcaaagttatctgagccacaaggaggcttctggtcttgcacgattgaaacgaatgtgaataggtatttccatctggattcatgaaatttggtgggttaatatctctgctccattatctggtgtctgaacctgcaactcactggacgaacaaactaatgtcttcactacacaataatgctctctgccttgtatatgta

SEQ ID NO: 255210 - DNA, 355 bp, Glycine max
aacaaatttttcttttttctcccaagcccgtaatgtgatgggataatttcttcatttggttttgcaaaaaaccctacggatcaatgcatataccataaggtcagtgggagtaaaatatgttctcttgttttttatgtagatgatattttacagccaatgatcggggtttgctacatgaggcgaaacaatatttctccaccaattttgacataaaggatatgtgtgatgaatattatgtcttctgcaataacattcatataaatagaccttgaggtattctagatcttttatacgaaacgtatattaaccacattctatatagattctggatgatagattgttcaccaagcgttgc

SEQ ID NO: 255211 - DNA, 376 bp, Glycine max
  unsure (1)..(376): unsure at all n locations
caagcttcgaaagtgcgcaccccaccatttttcttattatataactactaaagaggctacgagcattgtgatcggtgtgtcgtcattgaggagccacttgagctgccaggttcttcacctttgggcgtattctttgaaagatccgcgccccctcttttgcacaagtatgtgagttgcatcttatccgaagccattataccgaccctacctaacgaaggcaaccattaggtcctcccacgaatggactcgggaaggtccaaattagtgtaccaggttcaactaccccataagactntttggaagaaggataacaacccctattttgggaggccccatcgtcgaaaacattttagagggctggggcaaaatcccttga

SEQ ID NO: 255212 - DNA, 193 bp, Glycine max
  unsure (1)..(193): unsure at all n locations
accctcctgggatctgagattcacttaaaattagggagataaattgtttccgtgaagacaactccatcctatgcccttncggaacgcgttcgtaaccgttccgcgggtgattgcgcgaagatcttcaaccgtacttcattgtgtctcggcttcagccagttatacaccggcatcgaacttttcaattcattct

SEQ ID NO: 255213 - DNA, 196 bp, Glycine max
  unsure (1)..(196): unsure at all n locations
aaaccaaccaccaagccgaacaaaacccacgacatgaaaaccataaccctgacaagctcatagcgtttccacaccaaatacgcgaaatgatgatatccacggcgcgcagacggacacatcaaacaaccacttgatagagcatgagcgaatctccgcactgacatgcanagctccacacgaccgccctgaagaagac

SEQ ID NO: 255214 - DNA, 452 bp, Glycine max
gggacctcttgatcttggttactgcaccaggatctctgttattctcttgatctctgagacaattcctttcaatccattctccaaacagagcttcatggcctcctccaatgagttcctcctcacatcttcatagatttcacatccaccatttgtcaaaaagaacacctggttccaaacaaaacaccacattagatttccaatttaaagaaatagaataataaactaaggagcaacttcaccccttccaaagttctcacaactaaaaaaaggttcagagaactaacagggtatgtggttggcaatttccgaatgagcattgctgcttctggctggaatggtgagaagataataggtctgttcttggcataatcaaacacaacctgttccgcattctaaagttatcaagtttagacaaacactaagcatcacaatcgctaatatgctatatatta

SEQ ID NO: 255215 - DNA, 315 bp, Glycine max
aataaaatgatcaccctttcgccatatcaagaaggcgttttttatgaactgcaacatttgcttcggcgtagctatgtacctgccattaagagatcagcaactcaaactggaactctggtgtaattgaagctatgcaaaaagtcataccgcacaaacacaggacaaaggagcagcaatgctggaaccggggttgaagatcaccaacaattgtttcccaaggcatggttggatatttactaaagaacttatttgcgatatatatccatgcaaggttccagaatacaataggaactttctcagacatgctgaagctac

SEQ ID NO: 255216 - DNA, 415 bp, Glycine max
  unsure (1)..(415): unsure at all n locations
actatacaaactcaagcttgaggcctnggatcntctctatcaatggagtcctttgttancttttaatcaatggcagcgcgaatgatgcaaatctcccaaggagactccactaagattgggccancatatgcagcgacgactgcccctactggttccttatagagcctcagaggtagatatttgggcccatcggacttaagtatggaacccacttattcttcttacatattagatcatagggttcattatttctaggccttgatttatggcttcatagtggatggagggtaccctagtaatgtacgacttcttagccctttgattttatgacacctagactacgttttgtattaacggtagttttgtaattccacatgcattaagtccactatttgatgtgtgtgtgtgtgcgaga

SEQ ID NO: 255217 - DNA, 390 bp, Glycine max
accccaaaagagtggatagcggtttctaatgactcctctacggcctccacataaagcatagaggatgggtagctcaccaagatgtcttcttcgcctgataccatgaccagatgcccttccactacgaatttcaacttttggtggagtgtatagggaacaactcccactgaggggatccacgggcgccccaacaaacagctgtagggggggctaatatccattatttggaaggtgacttgacaggtgtgagggcctatttgtactgggagatcgatctctcccctaacctttcggcgagtgccgtcgaaggcacgaaccaccattgaactcacctttaagtgggaaccattgaatggtaatctctccaaagtgcttttacgcatcacgttt

SEQ ID NO: 255218 - DNA, 272 bp, Glycine max
cacaacagggaggccacagccacaaagcgcgcataaacccaccatcacccgacgcccacctccaactgagctcacggactcgcacagaacccataggctgtgtgcgatgaacaccggggccccatcaagcctcccaagcttgcccaacagcaaagcaaaacaacacgcaaacagcacaagctatcacagccaagcaaaacagagcagaggcagaaaactctgccaaaacaccaaccaaaacacagctggtctcacttaaagaccccagtaac

SEQ ID NO: 255219 - DNA, 421 bp, Glycine max
  unsure (1)..(421): unsure at all n locations
agcntcaaaagtaagctggtatatcttatatgtgtcatgataagataacatgcagaggcattctaaggttcccatttcgaggaacctttctgatgggcattttgaagaatcatcaaaacaatcattttgatctatgttgggagtgaatccatatccgatgaatccactcgatgaagtttggattgatatccaatgttgagtagcatagctttatcactcttaacacttcttcatagcttaaagcattctgaagtcgattacttcagaaagactcagtagaagttcagttgtggggtgctagtgttttttccaaggtgagattgagtgacatccttcagtgcttcattcttatagtagtagtctcaccatttgatgtgccatcagtgtatgtggccacatatggaaagtgaaggactctatc

SEQ ID NO: 255220 - DNA, 421 bp, Glycine max
  unsure (1)..(421): unsure at all n locations
actcaagcttgaggantatggggtatccgtctcatgtgtgtctangtggcggtcgggcgatggtacaagtcgactatccacatccacaaatcacacataaatccaccatccccagttgcccaccttcaactaagctcacgtactcccacgtagcccttatcctcgttcctctcaacaccgggttcccatcaatcctcaccaagcttgcacaacatccaagcaatttcaacatccaaacatcatgaactatcaaaaccaaacaaaaacagggcagaggcagaaaactctgcccaaaacacanaccaataccacaattttgtctactcaaataccccagtaacattcccttcgttccaattcgttcactcgctggatcgactcanaaatnttattggaggctcctagtacataagtctacatt

SEQ ID NO: 255221 - DNA, 371 bp, Glycine max
ccatacgcggagccgagagagcaacacgatggtttaaaatctttgaatagaaattaacaaagaccagggcttattcttgaagacaaattaatgtatatatctccattaattatccagataacaccaaaaatcaaggggcattggttcctctccacactagcaatcgaaatcaaattttttacaagccatgatctaaaatccaaattaaaagcattccaattaacacctgagggaaataaatgagaccatacattttttggatgctcacaaaagcggacaacatgataagtattgtcaagactaccttcacgtaatgagcaacttacattatcaaacacctctccttcttattctcatagaatgttaacaag

SEQ ID NO: 255222 - DNA, 362 bp, Glycine max
ttaagacaatgactgatttattcatgagtctctcgtttaatcgattaccatttgatataatcgattacttctctttctataagcgcgttagaagtgaacaagaatactttaatcgattactttgagtatctaatcaattacattattcttgagttgtttctagattttggatagaacactttaattgattaaaaagataattcaatcgattacttcattgaattaattgattaccttgtagatctaatcaattataggtagctataattggtttctctataaataactcggcttgcggtctcttctacataataatgaaataagttcgtgttgagcaaagatcacgtgctgttatcaaataa

SEQ ID NO: 255223 - DNA, 281 bp, Glycine max
taaactaataactcgtaatcactttatcaaaacaatggatggctatttgagttctgggtgtaaaatgacgacacccatgcatgatcttattcaaactattctagcttctcgtaccattaagttgattccactcggtggattgatatttgagtcggtcaggttcttctttgtctcaaacaaaaacaaaatttatcttaaaccagtgaacactatttctatctgtattcaaatcattgaacttgtcacatttatattcccaccaccttttatcgagcacaaag

SEQ ID NO: 255224 - DNA, 302 bp, Glycine max
aacatcctacggtttacgaaagctggacagtgtttctacccagccagcttcatgtggggctccttataagctttattaagaagcttataggtcactccatacatgttctcaaagatcccaatggacagatcatgggcatgttttttgcgaaggttcagaccaacttttgagaagactcgacggttaacgaaggctgggcggcgggtttacccatggcactttatgtagctgtctctagaagcttatttagaggcttcctccacaagctccatgaagaggctgctagcacactccagacatct

SEQ ID NO: 255225 - DNA, 385 bp, Glycine max
atttgtcacaagatagtgacatggatgttatggtaaatatttgtcacaacaaagtagtttcatctcaacctatattgttgcaccactccatttttatatattacaattattcatgttcggcatttacatgtacggcccttgcactattgtttcaccaatagcaaggaataagctagccctaacaagagccaaacaaaggaaggttgctgataaacatgatgctgataactgaataaacatcttttgttgcatttgaaggctgctgaatgttgctgaaaacccatatttgttggcattttaaagttgctgacttgaatgtgctgatgaaaaactgaagaagcattttggtgcttctgatatatgatgtgtatcagatatttgaagc

SEQ ID NO: 255226 - DNA, 409 bp, Glycine max
  unsure (1)..(409): unsure at all n locations
gaagaacgaggcgtttacctggggtgaaaaacatgaggcgagcctttgctttgctcaaagaanagcttactaaagcacctgttctagctcttcctgacttttctaaacatttgagcttaaatgtgacgctctggagtgcgagttggagctgttttgttgcaaggtgggcaccctattgcttattttagtgaaaaaattcatggtgcgacccttaactatcccacctatgataaagagctttatgccttaataagagcactccgaacttgggaacattaccttgtttccacggaatttgtcattcatagtgatcatcaatcacttacgttattanagggcaaagcaagtctaacataacgcatgcaaattgggtagagtacctagagcaattttcatatgttatcaaata

SEQ ID NO: 255227 - DNA, 370 bp, Glycine max
gcaagcttgaagtgaggaagagtgtaaaggttttactttctacttttattcggggaccacagagcggtacctggagatatgtcccgggggtcaagagaccttggggacgtcaggtggtgcgctattgtccaaaaccaagcttgaccaattctggcccaacccaggcatagtcagttagtgagaacctgtgatgtacctaaacaggcgagctcctggcagtcaaccgataaaagaacaaagatcacaaagcaaggaggcctgtgtggtggctggccacctatggatcttgagtgagatttggaatatggcctctggtaatcgtataccaagggtgggtaatcgattacaacgcttaaaagtgaagacagaa

SEQ ID NO: 255228 - DNA, 288 bp, Glycine max
ctcagcttggtcgaggacttacccgttgaagatcgaaattcgattataaccaatgtttaacgccgaagaacggctgaaatctgtgcgaaattcctcacggaaaacgttacggaaacgtttctgaagcgcctcggcttagattttcttcacggaaacaatttttccaagcaaattcgaaagagagagaagtgcctcatggggctggaccccctacttcttcatttcctcccctatatatagcaaaataggggaggtggttgccgcccagctcgtccaggcgagctcaac

SEQ ID NO: 255229 - DNA, 226 bp, Glycine max
agtccctcccaaaagaaacgaaatctgatattgataaagcccaatgacacggtcaatatggttgtacattattgccgatgcatggactgattggaaacaaatatgcattattaattattttattaactcttaagctggtaccatgtttttaaagtcagctgatggctttgattttgaaaagacaggggaaaagctttttgagttgcttgatgtcattgtggacgaa

SEQ ID NO: 255230 - DNA, 372 bp, Glycine max
  unsure (1)..(372): unsure at all n locations
actcacgcttgacgcacatcgttcgcgtgttgatatctactccacttggtttgaagnagaggagagcttcaaccctataacgcaacgtggcggacaaaagtgggcagtaaacttgaatgatcgtcattgtcaatgcggaaggtattttgcgcttcactatccatgttcacacattattgcagcttgtggttacatgagcatgaactactaccaatatatagatgttgtttatacaaacgaacacatcttataagcttactccgcacaatggtggcctcttgggaatgaagcggctattcctccttctgatgatgcatggacacttatccntgacctaactacaattcgtgcgaaaggtcctgcacaatcaac

SEQ ID NO: 255231 - DNA, 332 bp, Glycine max
ataagtccatgaccatgacaattaaagcgcctatgcattccggtgcgaatgcttagattttttaaccactctattcccccatgaatgggccgttcgacaagggtaatgcccccccccatgaacaatacacaacatgcacatgccaatgcattaccaacatcaatcaacattgcattttcatactattctcaaacataaatatcatcgttgtctaatgacagtattaacaccaacaacaacgcttttttatattcacataatccttaacaagaacattcacttcttcttgaatgggtcttatttaacaacggtcatttaaattatattattat

SEQ ID NO: 255232 - DNA, 341 bp, Glycine max
  unsure (1)..(341): unsure at all n locations
acagcctnccggaggaagaagctggaaggcccaagtgggcctgattgctatctgctgtacccctctttttactaaatgcactccctttaccttttgtggtaattctttttccgtaacgttacgaaactttatgaatttcgtaacgatacttattgtccttccgcaaggatacgaatccttacggattatgtatttactctttgttagctttcgaagaagttactaaaactcacagattgcgaaaaacacctcctttcgatttccgtcacattacggaattttcacggattgtgtaagcctgcttccttcttatattacgcacgtcttcgggacttcacata

SEQ ID NO: 255233 - DNA, 438 bp, Glycine max
  unsure (1)..(438): unsure at all n locations
gctngccttgaattccaacctgaatatcctcgcaatattatgtccgcctggatggccacatcagcaagatataagaaaaacaggttcattcacttatatcgatcaaatcaaatacttggctagtgtttagtttgttttttttttttcttttccaactttactcgatatgtttttattaaaacttcaaaattttcactttatttttcactagtctttcaataatatatatatatatatatcagccaatgaatggtgagagaataattcctaccaaggataggaaagtgaatcttacttctcttaatagaatcttcttcatatgcatcatcataaatcgaaccagtaataacatacataaagaatccaattatttagtattggaccttgttggttaaattaattataataagaattaataaaaacatttcacattttaca

SEQ ID NO: 255234 - DNA, 276 bp, Glycine max
  unsure (1)..(276): unsure at all n locations
tctagtgtgtcaatccttttcccttcccagtaaaccctattgccaaatgtggcatgaagtgtagactntattgcaactgtactaggggtaatcacatgtagtttggatcagcaataatcactttagcgttaatgtggtattttcctgcggctgttgtatggttctgtacaaacaacaggtagtgtttttggttctgttttgctggttattggtgaaatatatcaagttattggtagtgggcttgtactaagaggactggtacttaatctaattagt

SEQ ID NO: 255235 - DNA, 269 bp, Glycine max
cttatggtacagttgagatcaaaagcgactccacaaacaagagctttaaggtcaatggacaccgacttaagccattcctcacacacccttctttagtgaacgtagtggaggaagagacttccttactccaccctactcttcctcttccatgactggaggagggtctctatccctatctcctcctttacttttattacatttttccgactctatttgaagggtgaattgcctttaatcttttactcgggctacattgaggacaatgtgtt

SEQ ID NO: 255236 - DNA, 265 bp, Glycine max
tgagcgccgctaagcgcacactcctgggtaagcgcgggaacatccacaagaagaaagttgtcaagtcactaagcgcaccgttatctcactaagcgcaccgttcagtcattcgctagcgagaaggcgactaagccaaaatcactaacggcctagcggccatagtggtaagcgatgagccaaacacgcactattaagctgaatcaatttggaagagagtgactggatcaagcttgatgtctagttctaagaagaagccagtctaaag

SEQ ID NO: 255237 - DNA, 320 bp, Glycine max
atgctcctaatgccgctatcgttttctccaacaacgccagtaattcaaaggagtttgaccccttaactctatttccccaagggatattaaaaaacaaagtccaagaaattatgactcacgctatcatgaacgcagggagaagaaacaaacgaaggagtttaataacttatgttgaccaacaacacattgagaataaccaatacaagctatctatgcaacaagctatcctttcttaattacaccaatctatctcagatgcttctcccaaatctttaaatggctcaaaaccatagaaactcttttgttttgaaagtcaacag

SEQ ID NO: 255238 - DNA, 401 bp, Glycine max
  unsure (1)..(401): unsure at all n locations
gagacatcaatctaattaatattgatagatcatttattgaaaacaaataagatatattactcaacctcttcaagggatacatccaccgatattgcccgagaccaccaacctctacttcataaggcaaaagaatcggaatatgctccataaagttgatgaaacttgtgaaatatttgttcaagtttgcacaccaatattggaatattttttcaattaagcataaagcatcctgttgtagtagaggctaagttatttctcataagaactgactgaactctgcctatgtgttccaaattgcctttggtaaatctttgaatgcatttggaagcaacatcgcacgaacacatggcagtcatgacttttcatctcaacaacttcncatctttcatgttatcacacct

SEQ ID NO: 255239 - DNA, 333 bp, Glycine max
acttatattttgatggctgtctaaaaggcattacatttgctcctatggatgtctttacttctggactaagttatacccttgaatcataaagcttttcaccccccctccctcgattcaaaatgctgtttaaagtatattctactcttgagtttagtataattatatatacttgaataccacaaacatttctagttgtcctttggcgcctgcatgaatatatattaacaagttacaaatgatgtttaacagaatcccatatggcaaccttttgtcttcttggtgtggatggcatacttgaccaccgtcactgacagagtgttattatatatatat

SEQ ID NO: 255240 - DNA, 455 bp, Glycine max
  unsure (1)..(455): unsure at all n locations
tttggcttctactaggtttanaggcaganagtttatatggttttttttttatgaaatgttagacattgtgtagctatgatagtcttaagtcactaaaatatataactatgtcttttttttgtaatcacaaatacgttttttattgtttatattgaaacacaacaactaaatgtctcccaaaaattacatggnttttattgtttatattgaaacccaacaactaatttttttcccaccacgtgaggacggttacaggaattaaatgatgccatgatgttctatttggaatcatgtttatagatatatggttgacctctaaatacttcttaatggtttcacttatagctttcttttgtctccncctaccactttccatatggctacccattattggatttacttaacttactgggacctctactagtctctgtcatgcatacccgaatcaactaacg

SEQ ID NO: 255241 - DNA, 326 bp, Glycine max
ctaaatcatttctaaatatgcatgtgaattaggaagcataaacaagaatcaagccaaggctattgtgcaagcaatcaatggggcaaaacacaccaaaagattatgatgatggatggctcaaattcttacaaaggtaaacttatcactttcaaatggagctttcaaaactatcatgacatgtagaggaaaaacaaggatttcaaatcacaaaatgtcaagagacttttattttcaaaacaattacccatttcttgaacatatcctataattcaatgaaaaatgtgaaaagttgcaaacataattgacctaaaatattaaactagaaa

SEQ ID NO: 255242 - DNA, 412 bp, Glycine max
taggacaaccattatggaactatgagtaagtgaccataacatttttaaagaaaccaaattcctagatatacctcagaatccaaactagtacaagtatgtcacaataaccttcaactaaacacatgttcttattttcacaaccaagtgcaaaggttttattttattttttaatttgtcgtcctcatagggtgttacgttaattgttcgtccacatggttattaacaaaatatggagtaataagattagatattaaaatttaattatatttttggtgtattgattatgcattaattatattatgtattaaacatactaaatacttaagtttaagatatgtattacactttacatttattactacacatcatgaatatgagatatgtacgcattaaatgtacgagagatacatat

SEQ ID NO: 255243 - DNA, 364 bp, Glycine max
ttttcaaccaacagaggctgcgtgccctgaaacggtatcatgtgcaacacatattggcatttcgcacccacgagacaaatgtttccaaagggggtggcataagctacgacgttccatcgggacgaagagatgggcgtgtctcgatcggcgatgaaaagctagacaatcttcctagaccatccttgagcgctgatgatcttattagtaactctgaccgaaagggtttgtcatcacatgaaatggtgacactctcaagagcgcattcaatcgcgggtgcccattgtggtgccttctcgaaatcgttatactctttcagggacacagtcacacacaaaccctctatggactcctcatatgctgaaac

SEQ ID NO: 255244 - DNA, 451 bp, Glycine max
  unsure (1)..(451): unsure at all n locations
actaagcttgtcaataaacagctctcattagaagctgatctttattantcctaaacttgaattgggtcgaacaaatcaacagtcatagaaacacacatgatgagttggcattcggcaaccacatcataacatgagatgagtaatgagttgtttctattggaatgttcacaagaagaaaagcataataattgaggtgatttgaagcaaaagaaagaaagaagaaagattaaattaaaaataaccttatcatatgcaaggcgtgcatttgggtcagagagaatggaataagcttctgtgagtatgatggccatgtcatggccagcagggccagcaatgtcagggtggcagcgcttctgaagagagcgatacgccactctgacctgtgactgatcacaagagctgtcaatgcccagaaaggtcatacagtcaaagtccatcatgggtgatgatg

SEQ ID NO: 255245 - DNA, 410 bp, Glycine max
  unsure (1)..(410): unsure at all n locations
gcaagctnttcgcttacagacagttaaaatttgtttatttgtntaccactcgggtatttgcgctcgtcaacgtgactcaaatgtcagtatgacagattttgtgagcgcggaagatgatgtaaatcaccgtgggtcaacgggcttgtcggccgcgattgacgaaggatgcagaaaacgacattagtctctgcgtgctatcaggcttttcatcttacagacagcaaataagaatgtttatacggataaccactcgggtatttccgcccgtcaacgtgactcaaatgtcagtatgacagatcttgtgagcgtggaagatgacgtaaatctccgcgtgtcaacgggcttgtcggccgcgattgacgaaaggcgtaaaagaccacgttagtctctgcatgctatcaagcttttca

SEQ ID NO: 255246 - DNA, 356 bp, Glycine max
  unsure (1)..(356): unsure at all n locations
gagtatactgatctccttttggttctctacattgtggtagngcgctcacatatatggtgccaatttgatcttgtctcttgctagattacgttgaattaagggttggtatgagatggccctacgtctataatgctttgagaagtaatgggacatgccacattgtccccgttctcttgctattaatgctctaacgcgcgcccaccaagtgttcggagaaaagcctcaatggcattagcgcgtgatttttgtaaggaaacaacccatggggcaatctggcttgcacatatttttgggacatgcattcatattcgaaagagctagagtaattgccccgcatattgcctacgcctaagaac

SEQ ID NO: 255247 - DNA, 367 bp, Glycine max
agacaagaaatgcaatgtacaggagcacgtgagaattaaatagcatactattaaacctgtagaatgcatcataaaagataatgctgagaaatgcacaagagaaaacagaaatgttcctaaagatctgctattttttttggggctcacaagaccaggtgatattacaagtaacttaatgtccaagagcattatgctccatggtaatgcattttaactcccctccaaaaacaagtatcagaaaacctaagagtctaatttaaattggatcaggtcgagaaatgtaaattaggttttcaaataaagcatattataatcaagcatatagaccgtacaccaaattgggacagatagaatacaaaaaataaca

SEQ ID NO: 255248 - DNA, 420 bp, Glycine max
gtgtagctcatacctcataacgaatcaacatcgttatagttttatatgtgatctaaagaaacactgtggtgcgaagaggtggaaggaaatgccgacgccaacacaaccgagggaggaactggaaaagctaaaatagaaggagtcgacacttctggagcactcatggccatcacacctgcgcttaaaagggtgtaacaatggtaaacgaaggggccatgacagcatcagccgaagcaatcggtgcactaacttcagcaataggagcaacccttgaacagacacaagaggaggaggtggaggagtaggagtagggattgcaacaataatagcatgagcctcaatggccaatggagctgaaggcgagcctagcaaactcaaggtgcaaccctaatcgagtgtcaacctccctgctacctcaat

SEQ ID NO: 255249 - DNA, 432 bp, Glycine max
  unsure (1)..(432): unsure at all n locations
ctcaagctngatggcattcagaagacactatgtcgactanatgatttcttttatgcttntnctangctactggaatcattatgcgatataatttgctgttaccaattactaaccaattaatattattaagtactcgtttggttaagcaaaaaaattgttggtccaacataaatcatttacgcgtgtagcatacatcattgtctaattgacaacacataatgacatgcatgcgtattaaagtttgagttgaggaccaacaaagaactgctgaaggtgttagtacaatctaactactggaaaaaatatggaccaatagaaattgtagctgtctttactaaatatgttgtgaaaatcgatcacgaggtcattgggacatcgcttaacaactgaatgcaatgataattttttgctttttcgcgatgaatcttatct

SEQ ID NO: 255250 - DNA, 386 bp, Glycine max
  unsure (1)..(386): unsure at all n locations
ctccgaagncacctatagccgttaaataaagggatgacgttctaacttttgtttgggcgatctactgcaaatacattctctctggaccgggagtatnttccccctctaccatgctggcctcccctcaaataaatgaaagagaatgcgttacttacatttatcaataatcaatattctagtttcagttctagcccctacccaacagccccaaaataaataaataaatatgagatagaatcttcaattcattttttggtgaattctactcccaatctttttttcactttttgggaatcttatccctatttttttactggttggcaaaatcagtcccaacccccacttttatgcttatgtcagcaacgcatatatcagctcaccaactg

SEQ ID NO: 255251 - DNA, 440 bp, Glycine max
  unsure (1)..(440): unsure at all n locations
agcaactcanaatctagggatctaattcctttcattttattggattntcaaggtttgagaagtgaaaatgagatggggtaattttggagcaaactctcatctcacacaagtctataacattaatctaaactcgctcaaactggttttacgacgaaaactctaccgaattaaaatttgactcctcaacacccaatttaccctagaaatggctcttgccctcactttggtcattcattttcctcctttgcacagcccaagcttttcccacaatcctaaatgacatttcaaactaggattaactcacttcaacctccaattaccactacatccagattttgcttttcaaacccttaaagcgtcacacttttccactcatatcactacattctcactttttagccctaggttaactctacccttcatctctattcagtttccat

SEQ ID NO: 255252 - DNA, 435 bp, Glycine max
  unsure (1)..(435): unsure at all n locations
agctaatacagaggacaacttattatanatcatttnctgcgagagtnggctcacaataggccaatcatacctgtggtgcattttcttgagtaggtagcctggcctgaagctcaacttccattggtaagacccaatgaggctactcttcctgagcccgcaccggcatgggttgaaccaatgccagctgagccacgatctccagtggtgaatccacctccttctcctgagcttgaagtagttcccccatctccacctctgattatcatatctgatgcgtcatcggatgaaactgctgcccctcccgattcaccaattggagaaacagttgatcctcctgtttccccagttggaggaattgccgatctttctgattcatcatctggagaagctgttgctctcactgattccccactttagacgttgttgacactattg

SEQ ID NO: 255253 - DNA, 384 bp, Glycine max
  unsure (1)..(384): unsure at all n locations
tgtggctctccattgcactgaagaccatgtacaggtacgtttatttcgnctacctatgttgttctattgaatagctaggtctgtttctggaacctttggttaacctaaggaccttttttggtttctggtgcaaggattatggaactcgtcgtgacctgagacccattgtcactgccattgaatggccgagtctcgatgccattgtcagtgttgggttcgaggcaagcttcatgtcttcattgtaactttatgcttccgcgtacgtgctctttgtgctcacttctctctgaagcatgtttatgttcccattgtcatttgttcttatgaaaactagttggttattggtagttagtttgtaattagttactactactagggtttgga

SEQ ID NO: 255254 - DNA, 443 bp, Glycine max
  unsure (1)..(443): unsure at all n locations
gcggcatgcaagcttgnaggattatggtgtacccatcatatgtggtactaggggagcggtctgggcgatggtgcacacacaagtttttcacatccacaatgcgcgcataaacccaccatcccctgttgcccacctccaactgagctcacgtactcccacgtagcccatatcctcgtttctctcaacaccgggtccccatcaatcctcccaagcttccccaacatcaaagtaatacaacattcaaacagcacaaactatcacagccaagaaaacagaacaaaggcagaaaactctgccaaaacaccaaccaaaaatcacagctttttccactcaaagaccccagtaacaattccttcgatccaattcgtaaaccggtggatcgactccaaaattttactggaagtctatagtgcataagcctacattttgaccgttgggatcta

SEQ ID NO: 255255 - DNA, 452 bp, Glycine max
  unsure (1)..(452): unsure at all n locations
tcaggctgctcaattgctccatgttgctgcatggaaggttttatgtctgtatggnnggcagcagaggagcacacaccacaaacccttgcgacaggtacagatttttgattcaaggccagctgggttaccaagttgaccaacgcatccagtttgccttcaagcttcttagtttcagatgatgcagatgggtttgtagctacctcatgcactcctctaatgactatggcatcatttctggcactaaactgctgggagttggaggccatcttctcaattaaatatctggcttcagcaggagtcatgtctccaagggctccaccactggcagcatctatcatacttctcttcatattactgagtccttcataanaatattggagaagagctgttctgaaatctgatggtgagggcaactggcacatagtttcttanatctcttctagtactcatac

SEQ ID NO: 255256 - DNA, 340 bp, Glycine max
  unsure (1)..(340): unsure at all n locations
atttgtcagattgattatgaaggaatgcattaactgtatcccagtgagagtgtgatccttaaattctgagagaaatgactatcatttagtaccgatttttgcatgaatctctgaagtatggactgattgcatgaaattgaggatgatgaaggccatgtctgattgtgatagccacttanccaaaaagctgaccacgtgcttgaattatttattctttacacccagtttgagctgaatgaattattgattgattgaacgatgaacctacagtgttatcttctgctaccttgacttaggttggaggagagcatcattcacatgaagtgcggttcaaagcaat

SEQ ID NO: 255257 - DNA, 428 bp, Glycine max
actcagcttccaatccgactggaggcttggaactgctttatttgtcttaccagttctatacggacatggctcctgatcggaaccagcttcagggtatgactaaatgagagcatgagtccattaaggaatatgcccaaagatggagagatctcgcagcccaagtcgtaccgcacatgacggagagggagatgatcacaattatggtagatacgttacccacgttctactatgaaaagctgataggctacatgccagctaactttgcggatctcgtctcgccggagaaaggattgaatccggactatgaaaaggcaagttcgaatatgctgccaatatggcccccaacaacaacagaagaagcccaatagtgggcgcgaggaataaagaatgagatgcccacgcggtcaccacccgcccaacatggatga

SEQ ID NO: 255258 - DNA, 346 bp, Glycine max
  unsure (1)..(346): unsure at all n locations
gcttngaccactggtcttccttcccgcgatgcttcttttcatgtccgcctgagtgagcttatagcctaaaccatacttcccacgatttccttgggtatttatcaggctagttatgccgccgttggttttgccttaacccatcccgggttcataaccgttccccaacataacccgggccatcattaccgctgcatcggacagacaaggctgcccaaagagggagtccacggaggagatgctgaccacctcataagactggaaagcagtttctaacgattcttctgcgggttccacataaggcatggaggatgggcagcttaccaagatatctttctcgcctgacacg

SEQ ID NO: 255259 - DNA, 329 bp, Glycine max
tactcgacgacccaatgcactgttcggaaaccacttccgcatataaaagagtaattacaaattttggaaaaaggaactatggaagaggatcaacagtacccaatcccaaccacctgggtcaagtaccactctcttctagttcttgatggcttgcttggcataactttcattcttctttgcaagttgagccttcacttgctcatgcaatcttttcacccactcaactttagcctgtgcattcttatacttgaaattagaaatgttaggcaatggcaacaaattagaaatgctactaatgttgttgtttaaatatgagagattcattcatg

SEQ ID NO: 255260 - DNA, 187 bp, Glycine max
aaagaacgacaacccctgctggaaatggcaaccctacaagggcaaacttcccccaacccaacacagacatacggcagccaaaacaccccaacgtcttccccaccaacagatatcacaaaggccagcccgaaaggaaaccacaaaacccacatacgacacaaccaatgcctaacaccccctttagcac

SEQ ID NO: 255261 - DNA, 385 bp, Glycine max
cccttttggaggatgacaaccacccgtccggtacgagcaacacgcaagaaaatatctatttgcatatatgatactcccccttgatttacaaagactgcttatatgaaaacaatggagatttcataatctatatatataaaaaaggtgtctcataaaacaatagataatttttcttactatcttatcttttatctatctctccccctttgtcaatatcaaaaacaaatcatgaatagagaggagaaagatgttaccacttgttgcaatgtatgagaatcatgtgataccaaaaggcgttaacacaatcattcaatattaatcaagcacagacaagtacaataacacatcaatcatacacaatcaaacgcaatcaatcattaaatat

SEQ ID NO: 255262 - DNA, 322 bp, Glycine max
  unsure (1)..(322): unsure at all n locations
cttgtttaatgtctacaatttgtttcttattatgcctcagaagattgaggttctttctctggaattgctgctgcctctaactcttgcaaaaaattgctaattctcccttgattatgccttctacaagtggcgttaatatccaaatcaatgggaatcaaatcacctgcggaagatctgctttgcatacaagaacagtacaacagttatccagttcaaaagaacaataaatatactaaactactatgtgatgtaagctccattggagctngtaagcctaagatcttcttcatcaatggattcctttgcttcttggaagatgaat

SEQ ID NO: 255263 - DNA, 406 bp, Glycine max
gctcacctgcttgagatgagaagctagagcttatctacacatcccctataatagctaagctcacccccataacaaagtacatgaaaatacaaaaaattccttactacaaagactactcaaaatagctcacaatacaaggcaaaaaccctataatactagaatgaccaaaatacaaggcccaaacgaaggataaacctattctaatatttacaaagataagcgggctcatacttagcccatgggctcaaaatctaccctaaggatcatgagaaccctagggccttcccttggatctctggcccaatctgcttggagtcttctatccaattcccttgccgggtaggagtgcatcacacactccctataatagctaatactcgccccatgacacaatacatgaaaatac

SEQ ID NO: 255264 - DNA, 353 bp, Glycine max
tgatcaagaggccataactaagctctatattctgataaagcctgttcaatgaattccacagattcaaagagaattgattatcatgctggacaactcttgattcatataaaagtatttaggatagcgcactcacccaatatgaagatttaaatacgaacttgctcattagtctactcattttttacctttgcaaaactgcctttcgagttgtagaacactcgggaataatgttatatttttgttactttcgcggcataatatcagaagttcattattaagcggcgtgagtgaacattatttcctggcataaaaatgctattaatcttgttggttacacacttccaccaattctc

SEQ ID NO: 255265 - DNA, 463 bp, Glycine max
ctaagctggagagtttgaatcgcatcatgaaacactttattatcttgcttataagacataattagcatgaaccatactaaacttcatgcttaagtaactaaattcagaggacaaaagattaggtatgagtcaagtatccaagtaagttattaatataactgaattaaatccatctaaaatcagtacaaccaaatatctaattcgtgatggtaatggattttagcattgatgaaatggaagaagtttgactatgcaagatgtggacatagattgaacaattacacagccaaagatataaattatatatatgtatgtgctctaagatcacaccatcagttgatcttgttgggatatggtttatatttctatcaaagaaatgtcataacagaacatgcatattagatggtttctcaaacataaccactccaatatgcacgagataaggacaacatgatagcactac

SEQ ID NO: 255266 - DNA, 273 bp, Glycine max
ccataaccgacgccacctgggtcggggcaccgcaacacccccttaaaacacccgcctaaaacgacttttccaccaaaagcacatttgcaacacaagcctcaagggctactcatgctccaccctatttctcgaatacactaagatatcatcaatgaacaccacgcgaactgatctaagcgatcatggaatagaccatccatataatccatgaaacaaggcggagcattagtcactccaaaaggcatgataaatactcggagtgcccaaaccgag

SEQ ID NO: 255267 - DNA, 307 bp, Glycine max
  unsure (1)..(307): unsure at all n locations
agaccatacaagtttcctaacgatttctaattatgtgggccattaagtctatcatatgctgacaatagccgagaagcccatgaatctcttcgggggcggagtaggtgtctgccatcgccttggcctcggctaacaatcggagaagttcttgactcccgctcaaggtaagagcaaaccgatccatccacatggttgcctcttggtgtaaagagtcgatcacccttcctctagcctctntttccgcgtatattcgtccgcaatcctatgctcgtgggccgcggctagacctaactcttcttggtacttg

SEQ ID NO: 255268 - DNA, 332 bp, Glycine max
ttttgttccagagacacctatcggttgagaactgtataagggtcaagggcgcccttctcccattgcctttaccccttttatagtattttctgttggaagcaaccgtggttagataatacatcttaaatgtggggaggtaacagttaacacttgtcgtcgaaaaccactgcattcctttttattataatattgggattgttttgcatctgtatatcaatctcatgttatggtcttgacagtattcttcctcttgaaacgccttttcttattaaaataataaataatttcagtctggtttttcctacaatgctggatggactgaggatattcgc

SEQ ID NO: 255269 - DNA, 276 bp, Glycine max
aatattaaaaaaatacataaacattgattacggctttcataaaacaccgatcatgaaatttctgtgatgaataatttaacatacgaatatcacaagtattgaagggtatacaaacacaagttggaattgatttgcaagtgacccagacctcttatactataaacatacacgacgtcttttggaaatcaatgtgataacgctatctgactatactgcgtgcatcttgttgattaccgactgctcaagtacagcaatgtaattataagactaagtttg

SEQ ID NO: 255270 - DNA, 336 bp, Glycine max
ctgcaactggccattgagaaaaaaaattctaaaaaaggggaccaaccgaaactgaatcgctgtctttcaaagagaatcttatgcacaaacccaagctgaaaacctaatagtgacaaaactttcaaagatattacacatgaatttacaattgacaggaaatgaacaatgtctgggcatctatggataatgagagaaagggagcattaacaaatatacaattcaaagaaattcagtatacaaaaaatgaagcggctaaagggggaaaaggagaagtaactgataatcaatagaaatttcctactgaaactgtaaaatataactgaaaaaaacataata

SEQ ID NO: 255271 - DNA, 370 bp, Glycine max
  unsure (1)..(370): unsure at all n locations
tctagacattgttcttcgganactggtccagctctactttgattgctttgacccaaggttcatcaaacatagcatcatctatgtgttntggctcaatctttgatagtagcactgtatgcttgagagagttccttgttttcactttgtccttatgatcaccaatgatttgaggctttggatgatgttttgctagcaagggtcctattggttctctgacttttttaggttgatcatccactggtctgttggacgcaagctcatcttggctagacgcagaagaacacttgacgatattttctattntcatctctggagaagaattatccagctctaacattgtagtgcaaacttgttgtcttaaatcttacat

SEQ ID NO: 255272 - DNA, 220 bp, Glycine max
  unsure (1)..(220): unsure at all n locations
gttatgttcgaaaaatgtttttggtcatgcacaatacctataatttacacagtttgtctaatctttatgacatgggatcaattacttataatgtgaatgctaggtcgctgcccaaaaacaacgcgctggatggctcgaagtcagtgtcaaaaagggcaagggccgctgcattgccgcccgaatgtantgaaaaagaagctaaggttcccacattttttga

SEQ ID NO: 255273 - DNA, 336 bp, Glycine max
  unsure (1)..(336): unsure at all n locations
gctgaggcgcatatnnccttacanacgntctctagcacaagacattctattatccgaataaacgcacccagagacaagacaagcagcggccgtacctagattacttacacgtacttccaaggtgtataagcgacttacatcacacacatcatacttggctgaaagcacatacatgcatactcaaagcacattgggggcaccaagaagatgcacaagcgcacatcttgggatttctaatacctatacatacacaaacttcatgatgaatctcgactatctacacaataaggtgctacatttcatgctctattcaagtatatgctacctaaagccgca

SEQ ID NO: 255274 - DNA, 280 bp, Glycine max
aagagtaattacaaattttggaacaaggaactatgggagacgatcaacagtacccagtccaaccacctggttcaaggaccactttcttctagatgttgatggcttgcttggcatacacttcattcttctttgcaagttgagccttcacttgctcatgcgatcttttcacgcactcaactttagcctgtgcatccttatacttgaaattagaaatgccaagcgatggccacaaattagaaatgctactaatgtttttgttaaatatgagagatcattcatg

SEQ ID NO: 255275 - DNA, 468 bp, Glycine max
cgtgatgtacattctccccttttctcaagcagatactttagatgtcttgacatcaccaaaacctacaggagtgacattctcccccttcttgatgatgacaaccacctgtaggttaggagcaacaacaaagaaaaaatatctatttgcatatagtatattccccttggttttgcaatgattgcttatttagacagttgaagacttcatatttttcatatgtaaacaaattgtctcatagacaatagataattcttcttactattttatcttttatctttctctccccctttatcaacataaaaaacaaatcatgaatagagaggagaaagatgttaccacttttcgcaatgtatgagaataagtgataccaaaaggcattaaaacaatcattcaatattaatcaagcaaaaacaagtacactaacacatcaatcaaacacaatcaaatacaatcaatcatcatatattt

SEQ ID NO: 255276 - DNA, 302 bp, Glycine max
  unsure (1)..(302): unsure at all n locations
aactgtatcanagtgcggacatgatggtatggtattgtaagtgacatccatggcctgtgtttaattgggatggcactaagcacatgatcacatctgagaaagaaaatgcttggaatgaatatcgaacagcatgtattgtttaatatatcgctatttgctattcaaagtagattggatttgacgttttcttttcttttttccattcgcataaatcggttaaaccatttcaagttaaggcgctctaaaactaggatgatatataggatttgcgtgctaaatatagagccattggtcctggaact

SEQ ID NO: 255277 - DNA, 315 bp, Glycine max
ccgctaagcgcaacactcatgggctaagagtggcgaagacactggaagaagatgagctatacaggttcgctaagtgcactgctgcgtctcactaagcgcaccgcttcagtccatccgctaagtgatacatgcacgtgctaagccaaaattcactaacgttcgttaagtgggccataattgtgctaagcggtccataattgcgctaagtgcacgagcacaaacaagaccacctatttaagcgtgaaatcaaatattagagagagagcttggactgggattcatagctttgcatgtctagagattctagagagagaa

SEQ ID NO: 255278 - DNA, 238 bp, Glycine max
  unsure (1)..(238): unsure at all n locations
gataacccatttaaggatcatcaagatcaagatatttagttgatgatatagatatcccatggcctagaggcttaaaatccacgcacgaggaggaggagaagaaacatcacgacatgtaagacaagcangacacaatggcaagaaaatacagtctttctgaagtatggaaactgcaaaaacctgagttcgcgatgctatgttcaggacttactctgggaacgcccgctgcggctattct

SEQ ID NO: 255279 - DNA, 285 bp, Glycine max
ggacatattgacttcgccttatatcctcataccttttttggactttgatggccattgacttgaacttctctttgtgggccccggctccttcatgctccacctttaagggtcgtaccttcctaattgtttccggagcttcaccctcttagtctctcacagcctttagctgttggagccaatccaatctttgtattccgactcttagtcgtatacgatacgccgcaaggagtccattactactttccctaagctctttgtccttcctttgcccgtatcccatgcctt

SEQ ID NO: 255280 - DNA, 310 bp, Glycine max
  unsure (1)..(310): unsure at all n locations
gccgcaacccacgaacgaactatggttctaccaagccggcgaaacacngacgcggaagntattgcgacaaggacactaaccggcaccactctcgaaggatcaaaccaactaagcaaaatcacgcgaagagcgccaaaagcgtactcccatacaacatgcccagcgcgtgagcaaaaccaacaacacaaccctgagacagaaggcatagcaacaaacggacaaaacaccttgctcggagacaaataaggcaatcgagcccctcccaccctaaagccaagacgactagggacaccacgaccacgggtcacgc

SEQ ID NO: 255281 - DNA, 291 bp, Glycine max
  unsure (1)..(291): unsure at all n locations
cccattttttttccccccccccccaggngttttattaattgcccccccccccccccnncaaanaggccagcaccacagaaagaaaaaaagggaaacttgtttgttttttattataaggaattttattcttaatttaaaaagtttacttttattgagttcttaggatgaaacttcaagaaatgcttgttattaattcttttttttataattttctcttattttttctgaataattttaatttttttattttaatttttaaaatcccaggggcacccatagaaattaggttta

SEQ ID NO: 255282 - DNA, 98 bp, Glycine max
aaacaagcggagaagccaagaaggggccacaaacggccgcagaaaagcacgcagaaaaacacaaccaagggcgggcaaagggcaaagaaaagacggag

SEQ ID NO: 255283 - DNA, 312 bp, Glycine max
  unsure (1)..(312): unsure at all n locations
agatatgataagataaaatctagatgaaataacatctagaggagataaaatctggataagataagattcgataaaataaaattggttgctcttttcaagtccaagtccaattccgaattcaagcccaattgcttataattctcctgaaataaaattaaaaacacaaaattagtccagtaggcccaaataataaaactgcataattaatttgacaattatggctaatcagcaattaaaacggcgactaaaagtgttaagaaataggagaaaatgatgacacatccnatcccctcacacttagccttttgcact

SEQ ID NO: 255284 - DNA, 297 bp, Glycine max
acctctatgtgatagcactcacattattcggattctgcacaatttgtgaaggcaatttgtcaaaaattttgggactgagcttggttcaactgagtagccatctgccccatctgatttgtcagactctgaatggaggctcttgtctcttgctgaaattgcatattctggatggtcatttgcctcactaactcttctaaggatggttgaggagaagcctcagttgcttgttgtctttgttgtgactgctactgtattggaagaggaacatattgcttgcttggaccagcaacattctgg

SEQ ID NO: 255285 - DNA, 352 bp, Glycine max
tatgtccaggaagttcaaatagatgatagagaagaagggaaagttctaacactcctccgggtgcaaagattatagatttaaaaagaaaaaacaaggaggaaaaccattgagataatctattttgagtgtagaaagtctagacatataaaggcttaatatccccaaccaaagaagaagagatattctaggaacaggaagaagaaaattctaatggtcacttaggatgacttagacaatgagaatagagcaatttagaagatgaacaagtcaacattgtctcatggcagatacaatgataagatcgagataaaacttgttctaaatttgaacctctcatgtctttataaacgat

SEQ ID NO: 255286 - DNA, 320 bp, Glycine max
  unsure (1)..(320): unsure at all n locations
gtacggaggcgacatctctctatgggttaagggaagatccatagtgtcatattcataccggtgtgtattgtagccgaagtaatgctcttctttgaccaaagctttgtatttcattggttatgaaaggaagggcatattttcacattntttttcctctctctctgcacaatagcatttgagaattaattgcgactntatgaaaattaattaagatcgatcattctgaggttaggaggtacaagaaacttttgtgacctcaatagttgtatgtactcaccatgttggaatggtaatctataaacattctactctacattctc

SEQ ID NO: 255287 - DNA, 299 bp, Glycine max
ttttttttttaagcctgaggggggctcagtgccattttgggatagacaaaaaccttgtcttactaacaaaaagttttattggtcccatatgaagaaagatgaccattacctttgcactaggtgtgtggctttgttacaagccacagtctaggtgatgcctcatgggctatacacacccttactgttggatcgagtggccttaaaataattaagaagggggggttgaattaattattcctaaacctttactaataaaaaattactcttttaacgctttcactaaattgttcacagaatga

SEQ ID NO: 255288 - DNA, 379 bp, Glycine max
  unsure (1)..(379): unsure at all n locations
ggatgagggcaagggtgattncgaaaatctgcacttatatgcacgaatttgctattaaagtgtgcagcaaaatattgtgtttgtgcagaaaatgcttatgcatggctggttgtggaaagggttgaacatattgtgttctggacgtttcctagcagatctcaacggtcaaaatgtagacttgtgtactagggacctccagtaaaatattcgagtcgatccaacggtgaacgaattggaacgaagagaatgttactggggtatttgagtaacacaagctgtggtattggtctgtgttttgggcagagttttctgcctctggcctgtcttgcttgtgtttgatagntcatgatgtttggattttgaaattgcttggatgtat

SEQ ID NO: 255289 - DNA, 284 bp, Glycine max
ccgatcgcacccagctccatatattttcccctaaagagggcgatccctttaaagaatacgcacagtggtggttataccagccgacacaggtggctccttccccggttgataaataaatgcaccccatgatggaccacactctgacagtgttctactatgagaatctcagaagatacttgtctgtcaacttcgcggacctagtgtttttctgggacagaaaccacgtgggcgttgaaagatgaaagtactattacattttctccacaagtgcgaatgccaaatga

SEQ ID NO: 255290 - DNA, 294 bp, Glycine max
  unsure (1)..(294): unsure at all n locations
actctcagccagttatgatagccggcgatgatcccattactgcttcccctaagctctctgtcctttcttcacgccgcatcccatgccttgcgaactccttggagtaccctcgcgttcgggtccttgaaccccgtgcgatgaaaggcgtgatgctntcgtctgatggcactcctctcatgaggtagccaagctgtcttatggcgaggacgggattataattaatacaacaccttgttccatcaagggaacctttggacatcttcgatgaagatagatcctgattcttcttccttc

SEQ ID NO: 255291 - DNA, 357 bp, Glycine max
ttggaaaggtaggggagcagtgggatactattgttaaaacaaaaaagacatacaacctcctcccataaatacaaacattaatgtgaatttagagcaagcgtatgcgcatatttccctacgaacgttcactttgacaagacatcctattaactaagaaaaatgcgcccatatacaatcaaggtagcttcattacctacattatttacatgtactcccaaggtgtaattgttatttacatcacacacgccgtctgggctaaatatacatacatgcgtactcaaagcatttcggggtaccacaaattgcacatgcgctcatcttgggatttttaacacctatacatatacaaactttctg

SEQ ID NO: 255292 - DNA, 482 bp, Glycine max
  unsure (1)..(482): unsure at all n locations
acacaaaatactaagctttatgtanaggatgtactcttacattngaatttgatttttctacgtcaaaggcactggtaatcgattaccaaaacattgtaatcgactacagctntttgaaatcaattggaacgttataaattcatttgaaaactttttcaaatccatttcgttatttttgggccttgtatttagggctccataatatatgtaaaggtaccctacaaatgtaagatttttcagcccttgtgttttacggcacctagactatgttttgtattaagatttgtaatttcacatgcattaagtgaatatttgatgtgtgtgttgggaaataaatttaattgaattgtgagaagcccaatccaattaaattctagagcgggaggtgagcattngcttgctacaccccattgccacatcatataatcacactgtgtgcatgtccttcatgctttacatgccttatgacacctaaccacact

SEQ ID NO: 255293 - DNA, 412 bp, Glycine max
  unsure (1)..(412): unsure at all n locations
cgcaagcttaagctgttcaaggcttcaatttttgttttatcggcanacggctgtatggtggttgtcagaagaacataaaccacaaagtcttactactagtacagatttttgattcaaggccactctgggtttacccaggttacatcataggtcatctaagctcacaccttacagcgttcgttattctttagatagatgcaagatgaagtttgcgggctactttcatgcacttcctctaatgaatatagcatcatctttggcgctaaactgttgtgagttggaagccatcttctccattaaagttctggcttcaacaggggtcatgtttccatgggctccaccactggaagcatctatcatacttctttccaagtcactgagtccttcataaaaatattgaagaaaaagctgc

SEQ ID NO: 255294 - DNA, 440 bp, Glycine max
  unsure (1)..(440): unsure at all n locations
gttaactntatacaagaatcccgctctgataccacttgttgtaccttgtggcctcaataatcttaagagggataggcttagaatacagaagaagcaacaacaatcaatttaacaatgttctttaaacatgcaagacacaattgattgcaacaaaataaataagataagggaagagagaatgcaaacacagttttatactggttcggccacaacccgtgcctacgtccagtactcaagcaacccacttgagatttccactatctttgtaaaatcctttacaaagtctgaaccacacaaggacaacccatcccttgtgttcagatgctttacaacaagagactcatagtctcttaaccaatctcattgaataagacgaatggaagaagaattatctcttcaagagaagaatattacaatgaagatcatcgtaaaatccttat

SEQ ID NO: 255295 - DNA, 306 bp, Glycine max
  unsure (1)..(306): unsure at all n locations
acgctgtgggatattggtatggccttancagagaacgaatcaggaccaaaaaggattttaagaggttaaaaacggaattgtcaacaagaatacatagtacagatttacttgatctaacataattcttttatatttatatttgataatcgaacacattataagtattagttactattatattgtactaatataaaacttaacgaaataccttaaccgaaaaatataaaaagttttcataaaatatatttatgtaatttatgcaaacgatttttttatgataaaattatatttgatgagttttataaa

SEQ ID NO: 255296 - DNA, 480 bp, Glycine max
  unsure (1)..(480): unsure at all n locations
accatagaaactcagctgcgtcacaangtatcgagagaggcacctcatattagattacaactcccnacntctacatgatgatgaatgatgcacatatgaaaatatatgacactaaaatgcaacaatcaatacaaatatcactcaaagagttgggcatgtaaaagacaaaacttcttaagcttttcaagtgcaaggcataggcctcatgttgctccccctatctctaacaatctctccctttttggctttgatgatgccaaacttgaatatccatttgagtgcatttggagagtcttgagagaagagacttttcttggaaaacctataacgttcttaacactaagagaaatgtggcaattcatatcatcatcatcatcatcattagttggagtcatatatgaatgtatgtatgcagtgcactaatcatatgcatctcaaattcatgtttcatctgttgactagacgccacagagaggtcac

SEQ ID NO: 255297 - DNA, 316 bp, Glycine max
ttgttatcgtgaaagccttcctcccactcaaaagcttaaaaagcacaaccccaaaactgaacacattgcttttctcttgcaattgcccattcaaagcatattcaggagcgacataccccattgttccatcaaccctagtgctcatatgtgtcatcccctcagggttgaacttggctagtccaaaatctgcaactttagcttcaaacttatcatcaagaagtatattacttgctttaatatctctatgaatgatagaggttgagctccaaatgcaaataagccaaccctctagcagtgcctagagcaatcttttgac

SEQ ID NO: 255298 - DNA, 457 bp, Glycine max
  unsure (1)..(457): unsure at all n locations
cttagctaatttcaacgagtccacagttttataatttcacacancaccnannnagaacaagggcctatagagctcttaaagcctattcttataaggcccaatataacacaaagactctataatatgacacctaaaataaaagtgcactaatgattccacacacatgattaagaaaaagggtcaacaaacggaccatatgcaaaaagtggtcaaattaccaaaatacccaacaaaagcctattctaattatggtttacattaagccactttaattcctagtcatatactccatgctctccaagtgcattggtcttacttttcaagcctcttggatattgacttagttaatggtcccaatcccttcccttcaagtcctacattttggtcttcaagtccatccatacgtggatctaaacattcctttatgtttttcatataattatcctcaatttgatac

SEQ ID NO: 255299 - DNA, 404 bp, Glycine max
  unsure (1)..(404): unsure at all n locations
gcagcatgcaagcttancatcctcgttcaattctatcattttatcgccnccncggtctttgtttttcagagagaaagntgggtcatcctacaacctcacgccaaaggggaatgtgaagataataattatcgagaaatgcttcaaaggcatccctttttctgccctttcagataaggaagacatgtagtttgcaattgataagattctcacagaaaatacagcccttaatctaaccaaggggcctatatttgagagcgcaaagggtaaaccctaaaaataatgttcacagcggattgtctccaaaagatcaatagcgtattcggatggggggtacacaaaggccactgcgccgtgaaataaaataacaaaaatctgacagattgacattgaaagtaatcttgaac

SEQ ID NO: 255300 - DNA, 332 bp, Glycine max
  unsure (1)..(332): unsure at all n locations
tcagatgagtcgagagtattctatatttcatatctgtttgngatctccgngctcggagctttatgcacaacgtgtcgttattgtcttttttggtcatcatcttgtacatgcctgctctacttctgttgcacaaagactcactagcaactaggacaatcgaacactgaattatatgtatgagttcagatatcttctatttggttgaacctcatctatgtctggttgcaatggcagtttgaaatcaatacaacatcagcaaccaaactgtttagattaatatcattatcataatctttcagtagtcatatctaattaatttcttacatatcaag

SEQ ID NO: 255301 - DNA, 403 bp, Glycine max
  unsure (1)..(403): unsure at all n locations
ctcttanattctgtcctgtaatctgacaccatangctaggcagtagccttcatcatgaactattttttgtactatctgtcaattcatatacatatatatatatatatatatatatatatatacatctcagcaaactaaggttgaggatccttcttgtgtgcataatttcatactcaaacatttcaagtaattctaaagagtctaaacgtctaaccattttaattcatggaatctaaataagccttatagatgcaaacatccaagatattaccattcatgataatttaatcatttgaaatagcactaactgcagataacacaaaccttattacaattgctntatctgtatatcccttccgtcggtcactaaatgaattccgcaccatactcattggctacaaca

SEQ ID NO: 255302 - DNA, 398 bp, Glycine max
  unsure (1)..(398): unsure at all n locations
tatctattcaagggcttagagaccatacaagtttcctaacgatctctaattatgtgggccattaagtctatcatatgctgacaatagccgagaagcccatgaatctcttctggggcggagtaggtgtcttgcattcgctttggccttgctaacaatcgcggaagttcttgactcccgttcaaggtaagagcaaaccgatccatccacatggttgcctcttggtgaaagagtcatcacccttcctctacctcttntccgcgatacttgacatattcgtcncaatcctatgctccgggccgggtagactaactttctggacttgggatgatagttcatgttggtctcgtctccataacgctgaacaacttctttgaccttgaaggcactactcttttaaa

SEQ ID NO: 255303 - DNA, 430 bp, Glycine max
ttcagctctatattcagcaattggcaagaaggcaggttcatccatatcaaagtgttgcaaaggagggttgcaccaacccccattgttgttaggcaaagaagggtttggggggcagaagttattggcagttacagtaatggagccaggtttgcaccatcttgggtcatcatcacatctcatttcatagcaagatccacagcttaagccattgttgaacaaagcagtgcttagagccacagtgtcagtttcatagccctggctatacaaatttccatacccacatgctccacctgcgtgtataaaatacaaagcataaacatacaactcatcaactcaacttttaataaacacactctaactagaaaacatataaacaagagagtttcttgcaaagataaaaaagagtagtattaaaacctatatgtagtat

SEQ ID NO: 255304 - DNA, 352 bp, Glycine max
  unsure (1)..(352): unsure at all n locations
tagatgaaataattgccaatgctcaaatcgaatttcaaatacctgcacaaatgctaaatgataggagctcaaatgcacaaagaccagatgccactatgcctaactaatctatgaaaggtggtatctatttcaagatcaaagggttgttaatcacctggattgcccctagtcatgcactatatgcaacaaataatgtgtttctcaaacaagcaccaggggaggggtaaaactacaactataatcaaacaatatccaaatgagctgaaattgtgtgagcaacaccctataatcatgaaaagatagcacaaacaatttcanacaaatattcagagtctaactatgatagatacct

SEQ ID NO: 255305 - DNA, 435 bp, Glycine max
  unsure (1)..(435): unsure at all n locations
ctaagcttgctgctaccatttcggctgcacagagaaacaaacattatgttttttatngtttacggagtgcacattagaggggtctaccagaatcatgttgaaatactatttaacataattttaggtaaatgctgaagtaaacaacatgtttggttctacattttgaatgagattagttcaactggttctagttgtccgcctaagcaaaattaacatggttttttctctttacatcagggttccaaacacccacgtttatttctgctttgatgagtccataataataaattttgaactaaacaattctagataacttttgtgttggatcaaaagctttacactgaatttgacttgactaccaatttactgttggaataaagacattgatacacaaattacagtacttacttcaaaatgaaagtttactaaaatcca

SEQ ID NO: 255306 - DNA, 438 bp, Glycine max
  unsure (1)..(438): unsure at all n locations
tcatcttcaattcaagaagggagtgatatataatacttgtatgaaatagaagaagaagatgatntcagtttcttcataaagagattcaataaattcctaagaaacaaaggagatcaaagaagatcaaactctataccaaagaaaagaggagaagattcatcttctattcctaagtgttatgaatgtaatcaaccacgacatctgagagttgattgcccgagtttcaagaaaagaatggaaagattgaaaggaaaaccttcaatgataagaaaacaaagaaagcttacatcacttgggaagataacaatatggattcatctgaagactcagaaaatgaagtcgtgaatctaagtcttatggcaaaaaattatgaaagtgatgaacaggattctttgaagaagagttggtacattgatagcggatgctctaaacacatga

SEQ ID NO: 255307 - DNA, 307 bp, Glycine max
  unsure (1)..(307): unsure at all n locations
agatataatngatgcatgcctgcgatgcttccgtgtcaactgtatagcttggtcatgcattagataaatggaatcaaattttatgcgtacatatgcacgcacgcacagcaatttctgtaaaattgaagctacgaatcactgtaggaaaaatagtattttttattaatgaaaaccgtaataatacgcaaataagtcatgaacgatttcaaaatcgtaaggggagggaagcaagtggcacgggctcaatattcttgttaagcacacattactccaagacttcttaaaatattgtatttatatattctga

SEQ ID NO: 255308 - DNA, 381 bp, Glycine max
  unsure (1)..(381): unsure at all n locations
aaaagnctgagctggacctttataggaaacaagncaaaccgagccgagccttaaataggcctaaccataggtccttgacaagcgactccgctcattttcatccctaggcacacaccatatattaatagaatgcagcagtatacaaatttatcaaggttgaacacaaaatttgttgaattaggtgaagattgaacatttagttacttgttgcgattggcatgtaatatgataatatatgtgtgtttccttcgacgctgatataattatgtattgcactaaaatcttatatttagttacttaagggggttatgtcacattgaattcactaatcagagtttagtgttactgtaataattaagctggtatcactcattatgggta

SEQ ID NO: 255309 - DNA, 440 bp, Glycine max
  unsure (1)..(440): unsure at all n locations
taaaactcagctggaggtttcctaatatatgttatacattgactatattcccatatgcgttgntcaatacagtaccattctatggtatataccttgcaagtttccaccggttgccattgcaacctgatttccccatctgcgccaactatagatctacaaacacatgccacatagagaaaataaatccccgcttgcttagcaaaaagaggcatgcaagcaaattgctgtattgtgtcaagtaaaatatttcataaattaatctcaggagctctatcacaggatatgaaccagataaccaaacatagaaaacagcagcaactaagacaactctcagtgattggaacatagatcccttataaggaaaatcactttcgttgtcctactctgtagtacactagcanaggctcaaacaaagacactgtttatccatgggcattact

SEQ ID NO: 255310 - DNA, 423 bp, Glycine max
  unsure (1)..(423): unsure at all n locations
tgcctttcccctagatatattgattttctttggncactacgacagacaaattgcttgggataaaggtagtggtgccatgtcttcaaagcccgtactaaagcatacaactccttatcataagttgaatagttaagggtaggaccacttaacttttcactaaaataagcaattggatggcccttttgcatcaacacatccccaatcccaacatttgaagcatcacactcaatttcaaaatatttttgaaagtttggcaacccaagtataggggcatcagttagcttttgcttaagaagatagaaagcttcttcttgtttctctccccatttgaaaccaacaattttcttgagcaccttattgagaggtgctaccaatgtgctaacatccttcacaaccgtctataaaactcgcttaccatgaaac

SEQ ID NO: 255311 - DNA, 385 bp, Glycine max
aacatatctatacttgaaagcgatcgtatgtaatattgacatcatagccaaacaaactttagtagggctttagacttcacaaattgtgagtctgattctattttccctcttcaactggtgcgatactgagcatctctagcatactaccataaatcataaatcttttattgctataattcacttgcctcttctctgcccaatgtggaattaggatgggtgattcgtgaagggctgtgaataagagcacaacactaaacttgggattcctttcgttggtttaaagcatatatgaaatctcgcatttctcttatatacgcttttctaaagatgaagaattatgttcagttctacacctcatttacataaatctttcttgaaacatctc

SEQ ID NO: 255312 - DNA, 396 bp, Glycine max
ctgcagcttgaccaaacctactcaccattatttttttcccggcgagaatgtcaatccttaccctcggaagccaaaaatatgagaaggaaaatttcctatcacagaaaataaaaagagaaggaaaatttccaattcaagagaaagcaaaaaaaaaaaagagagaaggaaaatttccaatccaaggaaaaaagagaggaaatgaatatctcaatcaaagagtgggagaaagcgaaaagaaaagaaagacaattcccaaccaaagagtgggagaaagtaaaaggaaggaaagaaagctcctgatcaaggattgaaagaaatcacaagaaatgtgccaaatagtctctggaccggacaatatttgtacaatacagaattgtctccaaatgaacataaaaa

SEQ ID NO: 255313 - DNA, 471 bp, Glycine max
  unsure (1)..(471): unsure at all n locations
gtgctggcctcgccgaatcatgactctggacccatctgttattgtttggttccaagcanctagtgatgttggagagattattgtgagttgtggtgaatatcccaacgtacctcttttgggtatgcgtggcggaattagctacaacccactcctcgctcgacgacaattcgggtacccgataaagacaataccaaacaaccctgccttgactaatgaattctatcttaaccatggagatcactcgaacaaaagggaaagattcgcacaagcttggagcgctatccgcagacttaacagaagtcagttgggaaagaaatcagactatgtgcatgaatcttacacccagtgggttattgataggaccaagagctntggcctaccctaccgcttacctagatacctatcgtccaccatcccaccatcatccttgcctatccgctctgatacttaggaagagtttcatgaacaatt

SEQ ID NO: 255314 - DNA, 198 bp, Glycine max
tcccaaaaggggaaggatgttgttcatgattgagagcaaaaaaattaacggtgttcaatgataactttcttaaaatattagatgcttcacaacaaccttgtcagatcactaagaccaaccttgctaaacatggcttcagactcaggcttggtatcataccagaggtatcatatcaagacaggtgaatactgtgaaaag

SEQ ID NO: 255315 - DNA, 450 bp, Glycine max
  unsure (1)..(450): unsure at all n locations
actcagcttgaactgaattagcaacgcccatattattttaaatgtgtgtatcaaccacaatatattggtaattgattaccagtgtatctgaacgttgaaattcaaattcaattgtgaagagtcatatcttttcattaaaagcattgtgtaattgattacatggttatggtaatcgattaccaatgacaagtttttgaataanagatcaagagatgtaactcttccaatggttttctcaagattttctcaaggttataactcttccaatggttctcttgaccagacatgaagagtctataaaagcaagaccttgacttgcattcaaatgactnttgaacttctttaaacaacttttgagaaatcttgaacctttctactcatcttcttctcttcttcctttccaaaagcttctaagtttctggttccaaccttgtcttctgaagtgaaatt

SEQ ID NO: 255316 - DNA, 346 bp, Glycine max
  unsure (1)..(346): unsure at all n locations
agctaataagntaattttacctaacatattatttgcacaagcgcatcttaggcataagggactccaaataactcaaaaaaataaacttagctactaggatctatttgcttaaaattatccttactatattatttgattctttctttttcactattccaaaaaaattaaaaacctcttacttattttaacattcttccaaacactagatgaaatttattttcttggttaaagaaataatacttttttatttaaaaaaattgtgtcggaaaatatatatgatgacaccaagagaagagccataccattggacacattttgtgcctagtncaaaaattccacacataat

SEQ ID NO: 255317 - DNA, 371 bp, Glycine max
  unsure (1)..(371): unsure at all n locations
tctcaaggaagctaccaagtctattaatataagcatgtgttattcttgttgcaactttgatgaatgagagtcttatgagacacacttcanagttccacttctctccctcttttattccttcaatatcgtgctccccccttccctctttcttttcctctattgaagcatcctctccaagcttcttatccaaggctcatcttggtggngaagctccttcttccatggcttattccctagtggatggcacctcttctcacctattctcctttgtttaccgctgcatctccatggtggaaaatcaccattgaaggacctcatgaaagctcacagatccagcctncatagaagctccacaagcaagctctcatcac

SEQ ID NO: 255318 - DNA, 364 bp, Glycine max
  unsure (1)..(364): unsure at all n locations
acacacacacacacacacacacacacacacacacacacactttttcctaggcgatcactcacataaatttccattctccccccttgtttgtgaatctacgcttatcttaaaatgaagtgaactactcatgagagggcgttgaataacccctagttctctcaccctggggcatcaacaaaaagccaaagtgcatatcaaatttgaagtattcacatataactaaatatccatacaacattcgtggaaaaaaaatatcaaccaaatcatgaagcaagaaccatgaagcaacaatgatgaatagagtataaaatccacatagccaaacaacatacttaatatgtgtcanagaccataataatatagc

SEQ ID NO: 255319 - DNA, 397 bp, Glycine max
tagacgaggccatctatccaatcccaaacaaggtcatattccatcaacttttttggtcatttaaggcatccattgatgcatttgcattttgcaaacccattgtccacatcaatggaacatggatatatggaagatacacagggactgttgtaagtgcagctgcacaagatggcgctaacaacatatttccattggcatttgccatggtcgaaggtgatataacagatgggtggcacttttttttgcaaaacttgataacgctctgtgacaccacaacattggatatgcttaatctttacagacatgagtcaatcagaagtgcatacaattgacctgataatgggcgggcaactgaaaactcatacatgtgttctgatttacacataggccaaactac

SEQ ID NO: 255320 - DNA, 441 bp, Glycine max
  unsure (1)..(441): unsure at all n locations
cgattcattctatgtacccacggtggtctatattgtgttttgngtatttctattcccgttctgtttactatttataccctctgttgacgtgcttaagccatgttacttaagtcatttctcgcttaacttgaaaataaaataaatttccaccgaacgtttgaattgtattatccgttaacttcggttaaaataaattccgaccgttcggtcgtgccgtaaccacgttggaaatcaaaaaagaggtaaaaaataatataataatcaaaaagacatcttttagtaaaataaagcggaaaatcaatcggacgttttctctttgggatttctcattcttaatcgaattgattaataactaaagtgaaactaaaggctaaaatcaattcgcctagtcaagctcgtccatgaaaataggcttttgaaggttgtcatctacattctcac

SEQ ID NO: 255321 - DNA, 395 bp, Glycine max
  unsure (1)..(395): unsure at all n locations
ctcaagcaccgcggctgcagcttngaagaagtgatgaggtcaagctcttttgcatagcttgaaagagcccgagtagtcgaagagaagttcaagtccatagccatcaaagtctgaaaagagtatgatgaactaagggacgtcaatatggccaccgctgaagccttggaatgagaaaccaagaaggcccgaaaggaagaacacgtgccagcaaaattttgaggggctttatagggcagcaatagcaaactcaagcttcgaagaggtgaaaggaatcatcacaggtcaaaggcatgatcttgaaggacgagctaaaggcttaccttaggtcgaanagaaattngtcccaacagttaagcgagactgaagggaatatgtgggccgtcatcgatgagtgc

SEQ ID NO: 255322 - DNA, 216 bp, Glycine max
aagacgaagccatgttggctcaggaacccctctaattaaaagactgaatatttcatggaggataacacctactttggtactcaccgtcagatgaaagaggctgacaaaaccacaactgggataataccattgttacaaatagtctacaaaaaatgacttacactctaggagtgcgaagttcgaaataattaaacatacattccaactacaaattta

SEQ ID NO: 255323 - DNA, 338 bp, Glycine max
tcccaaaaagggggagaaagtgactgtttgtttacatgaatttgatgatgtccaacaagaatcaaacaaggctgcttctaatgataagcatttgcttcaacaaacaaagccttgtttcaagattcactaaagaccatgctttgccttaaaacagagggctttcaagatatgcaaggctctggtaatcgattaccacaagacagggttgacaaatagctgttgaaaaagattaatgaattgaattttcaacatgtaatctattaccagcaacgaaactcctgaaattcaaattcaaaagtcatgactcttcaaattataactgtgtaattgattactca

SEQ ID NO: 255324 - DNA, 405 bp, Glycine max
gcaagactcggatcctgtgtcaaacgagggaacgtaaattttttttacacaattgtttaaatattgaactctaataaatacttattgaataaataaaaacaatatttattgttaattttaagtgtaaaactaaggataagttccattagtagaagaaaattaagtaaatattaactcaaaaatgtatgagatgagtcattaattgtaaaacaaaaaaagagagtaaactggcagtaaagatggaaaatgtgagaaaaatattacttataaagaacaatatacacatagtgttccaaatatgtccttatctctattaactgtatctttcgtgggggaaaataacttttttctttctgcttgcaatctgaggaatatatgttgacttcctttgcaattgaaatatca

SEQ ID NO: 255325 - DNA, 381 bp, Glycine max
agacaagagttgaacaagagcacttttattcaatatggaactccttcctaaggatcctacagtcgtgaaatctcttcactttctcctcgtgaatcttggatttctcataagcttctaagcggatctcctcaagttcttggaattaaagcttccttttcatacctacttcatcaaatgccatgttacaacccttcacttctcaataagcacggtgctcaatctccaccgaaaggtggcatgccttaccaaaacccactctatagggagacatcctaaaggtaattagaagcgatcctgcgggcccatataccatcctcaagtttttgctccaatccttcctaatgggtggcactaccttctgcaacactggcttgatctctt

SEQ ID NO: 255326 - DNA, 437 bp, Glycine max
  unsure (1)..(437): unsure at all n locations
gcttctttatttgtgtcgcaccatttcttctgggacaagttgttaatcttatggatattatttgggagcaagatttttgccttttgaccttctgtcagtcaacaagtcttgcttcttgtttccattttattgtgcttttaagctccttttcatctgttaggttcttgaggttttccctcagcaatcattttaatccttgttttaaactctctgacaggcaacagccacactaatgagtacatatgtctcctattgaattactacaaaaaatatttaattttcaaaataatgttagtgatggattaaatatccataataaaatgttaatggatggattggatttttttaatgaatctttaatggatcgtaaattgactaatggattgttnttagtccatctattaatctgaataaaagatatccatctatccatttga

SEQ ID NO: 255327 - DNA, 397 bp, Glycine max
ggaacccagctggccttgaataagaaatctgtacctgtcgcaagggtttgtggtttgtgctcctctgttgaccaccatacagacctttgcccttccatgcagcaacctggagcaattgagcagcctgaagcttatgctgcaaatatttacaatagacctcctcaacctcagcagcaaaatcaaccacagcagaataattatgacttctccagcaacagatacaaccctagatggaggaatcaccctaatctcagatggtccagcccttagcaacaacaacagaagcctgcttccttcttccaaatgttgctggcccaagcagaccatacattcctccaccaattcaacaacagcaacaaccccagatacaaccaatagttgaggcccctccacacct

SEQ ID NO: 255328 - DNA, 265 bp, Glycine max
accgaaaaacaccgggtgcagagtggatatcattctgcaaatacaataatatccagctggggtggtaattcaagcacaccttgccaatattatttgttcccgcgccttgaaataaaacgatgtataagatgcggcatgtgaatttgccgcaattgctacctttctagcaaatcccaggcacctaatggaacaatatgatcaaactggcgcaagactggaccgcttgcctttggcccggtttcattatcgcatatctggtattata

SEQ ID NO: 255329 - DNA, 458 bp, Glycine max
tgcaagcttatgctgcaaacatctacaacagaccttcttaacctcaacagcaaaatcagccacaacagaataattatgacctctccagcaacaggtacaatctcggatggaggaatcatcccaaccttagatggtcgaatccttcataacagcagtagcaacaacaacagacttattttcaaaatgctgctggcccaagcagaccatatgttcctccaccaatccagcagcaacaacaacaacagcaacaacaacaaccccagaaacagcaaacagttgaggcccctccgcaaccttcccttgaagaacttgtgaggcaaatgactatgcaagacatgcagtttcagcaagagaccagagcctccattcagagcttaactaatcagatggaacagttggctacacaattaaatcaacaacagtcccagaattctaatagattacttctcaatctgtct

SEQ ID NO: 255330 - DNA, 299 bp, Glycine max
  unsure (1)..(299): unsure at all n locations
atggaggctggaacgggagcttcattttgtccttcgaaggcgantttccaccatggagatggagcggaagatacaaaacaacagaagagaggaggcgccatccactagggaataacccacggaagaaggagcttcaccaccaatagagtgccttggataagaagcttatagaggaagcttcaatggaggaaaagaaagatagagggggaggggggagcacgaaattgaaggaggaaaagagggagaaaagctgaactatgaagggcgtctcacaagactctaattcatcaaagttacaa

SEQ ID NO: 255331 - DNA, 255 bp, Glycine max
cacacaagcctgaagggagaaaccatgacatccccatatcgctgaagaattctggagctttggaattgttttgggaataagagtggcggagtaccgtttcataggacaactggctttgtgggctatgcctcatgatgtatgttgggccatacttgatgtacattgtatatcggctaaatgttggacgatgccgaatgatactgttgtttcctaaacgctaaaaaaaaaaaaaaaaaaaaaagaaatccgaaaaaa

SEQ ID NO: 255332 - DNA, 321 bp, Glycine max
tacatgtgctcttacactgaactctaaaggtcgacgtctctaatatgaataagatttttgtctactctgagcagtcagcatgtgatctcagattatcttgaccttttcaacaacttcttgaattagatctgggcataccaacctaggctctccaacttcaaaccattcgatcggtgatctacaacacctcccatacaaggcctcaaaaggtgccatttgaatactagattgataactattattataagcaaactctgccaaaggcaagtattgatcccaactatcttcaaaatcaagcatgccagcacacaacatatcttt

SEQ ID NO: 255333 - DNA, 418 bp, Glycine max
tcacatgataccattccgtacagttaaaaaccataatgtttaaaaatattatttagccaaataaaagaactaaccacgtagtgaaatccatccaagttcagaaacccaaatataacacgaatcataaatgttagacaccccccaagaaagagaaaaaaaaccatgaatttaagatccacatagctaaacaagaaaagcacaaaattcagatgcaatttcccaagtattctcaagtgatattctcctctaagaatagaagtttcacctccccaatctacattgattttaatgcaaatttatattacacagattcctagaagaaaaaactctaatcttaacaggagaatcccactaataacacacataaaagaaatgcatttaaattgtgtgcaacaacaaaactcataaatatcagatc

SEQ ID NO: 255334 - DNA, 210 bp, Glycine max
tgaaaaattaacaagtcaaaaagcaatatttcagaatgtcgtagtgaatatgttatctattgtataaaataactttcattctcatgtatacatgtgaatgtgagatacccacctctcctgatgggaacaaaatttgcttgaaacatgacgaggtaactctcctaggaatacagcatacccaagaatatatattcataaccttgtagcaaa

SEQ ID NO: 255335 - DNA, 429 bp, Glycine max
  unsure (1)..(429): unsure at all n locations
gctactactccggaccacaattgtgttttttatttnnttaaaccttcttgcatacattgtgtcccttnttttttgtatctgggtgatgctgatcttaccttattcagtgtttccaaacgttcatttcttgtgctgcatttgtatgatatgtaagatgtaagaatttcactgcattgtaagctcatgagaggagttggtgttgcaggagcgtcagtagagtgcatgatacatggtttgctgatgaagaacgagttcgaaaagcagttggcttgttggagaagccaattgtccagcatcctaatgctatagaggtgagatatggattgtggggttttaatactatgaagcacatacacttcttctgtttgaagagtcacacgattcgacataaggccaatactgacaagttacaactgtctgacacttatt

SEQ ID NO: 255336 - DNA, 329 bp, Glycine max
  unsure (1)..(329): unsure at all n locations
catcaanggtaagaaaatgacctccgcagaaatgcgcgttaaaagaaaaaggggccctttgctttacctgggatgaccagttttcccctatccattgttgtgctaattagccatattttgttctacagtgggaagaaaaggatgaacctgcatttcaacctgatccaccaaacgaggttgaaacagctggtgaccctagtttgcagatcattatttgtcttattatgctttaaaaggctcattaggtcttggaacaatgaagtttctaggatcaataaatggattgggagtgcatattttactatatatggggagtttagatatacttc

SEQ ID NO: 255337 - DNA, 405 bp, Glycine max
  unsure (1)..(405): unsure at all n locations
agctngctctaaattacattgatgtttgtatttatgggaggagggtatatgccatttttgctttaagagtagtgtcccactggtaaaattaactctccaaatgtttgccttcgcaggaatggccccgaggaagcttgcctcaaagaggtccaggaaggacaaggcggccgaaggaactagttccgctccggagtacgatagtcaccgctttaggagcgctgtacaccagcagcgcttcgaagccatcaagggatggtcgtttctccgggagcgatgcgtccagctcagggacgacgagtatactgattttcaggaggaaatagggtgccggcgatgggcaccactggttactcctatggccaagtttgatccagaaatagtccttgagttttatgccaatgcttg

SEQ ID NO: 255338 - DNA, 462 bp, Glycine max
  unsure (1)..(462): unsure at all n locations
gctncatgangangaatcaagtgtgagtcattgtttttgttgatgactaanagcccataagaacccaaaagaatgatttcaagattgagtcaacaagtgtaagatcaagattgatttcaagattcaagataagacacctccaagaatctagattcaccagaagatgaattctcgattcacgagaggaaatcccgaagcaacaagtcaagacttcacaagggaggtattgaaaagggattttcaaaaaccaaacatatcatatgtttgttttacaaaagagtttttctcaaatttttctaagttaccagagtatttactctctggtaatcgattaccacattcttgtaatcgattaccagtgttaaaatttgatttcaaaaagcttataactgaatttgcaactgttccaatggttatggtaatcgattaccagtgaaaagttcgaataaaaagtcaagagat

SEQ ID NO: 255339 - DNA, 449 bp, Glycine max
  unsure (1)..(449): unsure at all n locations
gcagcttgngaaggggcacacaaagatccaaatatttgccatggantcccctgaaacaaagctaatatttattacttgtgaagctttttaattaatacgttttttttacaatactgcctctactcatatataacttttcttttaaaactaatttaaaaacattaaaaaaattgcttaatttaattttcggatggattcaagatatttttcaaccaaaagtcaaaagattaatccttcaaaggattaagaagattcattttaagtggttattattttttctcaatagatatttttccacacataaacctgattatttaactggtcttgagcacatacatataaaaaataaaattatttatcaatcatatcatgctataaaactcgtcattttgagtattttatcttnttttactaaactaatcaatgtatgcaaaggaatgataattata

SEQ ID NO: 255340 - DNA, 432 bp, Glycine max
agcttgtttaccccatgttgaatgtgcttattatatagctgttcatagcaccactaattgttctccttctgaagtcgtttatggatttaacccactaactcctcttgatcttttgcctaatgtttctgtttttaagcataaagaaggtcaagcacaggcggactatgtgaagaagcttcatgagagagtcaaagatcatattgagaggaaaagtaatagctatgctaaacatgccaacatagggagaaagaaggttgtcttcgaacccggagattgtgtttgggtgcccatgagaaaagaaaggttcctgaacaaagagatctagcttcaccaatgggaatggaccattaagtgcttgaagaatcaatgacaatgctacaaagtgagctgtccgggagttatgtagtccaccttaatgttgattattctttt

SEQ ID NO: 255341 - DNA, 419 bp, Glycine max
  unsure (1)..(419): unsure at all n locations
ttctaatgccagttcacattcttgttctttctttgttcgacatgcacacttgctcaacttgatgaaaggaaacacaaatctcatcttaagcatgcatttaatttaaaacaaagtcatacacccatttttcacaaaaatataaaagtgtgtcactgccatgtcatctaaaataagttaaactgttcaaaatgcttcaggataagcatactaactattcatatttaaaactagcagtatatatagacataaaggaaatattatacgaaaaccaaaattataataataataaatcaaaaagaaaaaagtgacattaagaatcacaatttcagaagtgtttaaactggcgaataggtgagagcaacagctnctccagatgatgaattagaaagatttgcattcctccaattggggaaacaacg

SEQ ID NO: 255342 - DNA, 411 bp, Glycine max
  unsure (1)..(411): unsure at all n locations
tgcaagctncattgaatgtggtgttgatgttcattattcttagcaactgccttgnctggaactgtatgatgtgttagttatcttgaaattttaaaggtaaaaatgagttccttgggtgtcaaaacctagggttagccttaaattttaccaaaatcggagttttcaagtaaaaattatgaacaaaacacggttaaagacttttttaggactaaattgtcacgaaaataaacatgttctggttctatggacggtctttcttaaaaatgtgaattcaaaaatgagtttttagttgttaaaatatacgagtacgtgtaaaatttatgaaaatcaattctcgatacacttagaaaattgaaaataagtttaggagtgaaactttgcctaataagatagctatttaatttttatagc

SEQ ID NO: 255343 - DNA, 440 bp, Glycine max
tattttggtttatggtgtgaaagctatatatggggtgaaagctagccctgctgaaggattgcttgtaactagaatgccaagaagcattatgggtagaaggtatggcaattactctattgtaccatgtctgactgcagtagacaccaataattaacagtttaatagaatatcactggtcttaatcctaacttaatctttatatttttctgtcaatgcatagcatgccaatgagacgcatataactaatcaacacacttataacacataacacataagagcataggcaatgaggcaagatgaagaggtggcggaaagcccgatacattataagttgcgcttataacacataaatgaatatgtttttgttgtgataaataaatataaataaaactatatttaattgaaatgggcctatgtgaatagataaactacattttttc

SEQ ID NO: 255344 - DNA, 418 bp, Glycine max
  unsure (1)..(418): unsure at all n locations
ggaaaagggtggtttcaccttctcgctatgtcaatatgctggctnaacgagcatccgctaagcgcaacactcctgcgctaagcgcgaggaagaattcagaagaagatgagctgtacaggttcgctaagcgcaccgcttcagttcatccgctaagcgagaaaggcgtgctaagccaaaaatcactaacgtgcgctaagcggtccatacgtgcgataagcgcacaagcacgaacaatgccacctatttaagcttgaaatcagattttgtgaagagagtttggactgggattcagagctttgcatgtctaaggtttctagagagagaaaggtccaagttccaaagagttttgagagattttgtgtgtgaagatctgcagagaccaaatcttgaagcaggagccggtttgagagcttgagat

SEQ ID NO: 255345 - DNA, 361 bp, Glycine max
cagcttaacattcaacttagagcgtcgcgttatattattcgactcaattagacatccgagtaaaaagttattgtcgtttgaatgtgctcagagcttcaacattcaatttccagcgtctcgatatatgacgggactcaatcagatatccgagtaaaaaggtattgtcggtagagttggctcacaacttcaacattcaatttcagcgactcgatatatgacgggactcaatgacacatccgagtaaaaagttattgtcgtttgaattggctgagagcttcaacattcaatttcgagcgtctcgatatgttacgggactcaatcagacatcccagcaaaaagttatcgtcgcttgagttggctc

SEQ ID NO: 255346 - DNA, 425 bp, Glycine max
  unsure (1)..(425): unsure at all n locations
ccttgatatatttgagggactcatggtcactatgaatgacaaattccttgggataaaggtagtgttgccatgttttcaaagcccgtactaaggcatacaactccttatcataagttgaatagttaagggtaggaccacttaacttttcactaaaataagcaattggatggccttcttgcatcaacacagccccaatcccaacatttgaagcatcacactcaatttcaaaagatatttgaaagttcggcaacgcaagtatgggggcattagttagcttttgcttaagaacattgaaagcttcttcttgtttctctccccatttgaaaccaacattnttcttgagcacttcattgagaggtgctgccaatgtgctaaaatccgtctataaaaacttgctaagccatgaaaactnctcacctcgtcac

SEQ ID NO: 255347 - DNA, 422 bp, Glycine max
agcttgccacccagctcgccaaggcgagctctgtttcttcctccagaaggcactgccttctggagaacttcctggaaggcccaagtgggcctggttgctatttgcatcccccttttttactaaatacaccccttgcccttttttttgctgattctttttccgtaacgttacggaaacttatgaattacgtaacgatacttgttttccttccgtaatgttatggaaccttacggattacgtaatcatcccttttttgccttccggaatgttacagaactttaccgattgtgcactaacacttccttttaatttccggcatgtcacagaacttcatggattgtgctacaatgcttatctttgactttcggcatgtctcggaacttcacgaattgcctaacgatgagtaccaagtacctcgaagt

SEQ ID NO: 255348 - DNA, 391 bp, Glycine max
gccaaagactcgacaatatgagaagcaagctttaaacaatctggatccttttctgcatctatggcttcacaaattccataaataaggtcctccccctgcaagagagtcaaaaaaatgagttattatagagataaaagtcagatcttggccatcatattttagtttattatattaggtggatatcttattctctgctcttgtacttcatcattttataccgccaataatatttattggtataaaaaaaaattgagtaaattgcaatatgtacacctcaatttatgcaaaaaaagaaagatacactgctattttcaaatactgcagccacatttgagagctaaatgcttctgtaatatttttgcagctctctcaagatataaaataaacaatg

SEQ ID NO: 255349 - DNA, 428 bp, Glycine max
  unsure (1)..(428): unsure at all n locations
gcatgcaagctncaagcttaatgtccaacctagcgattatttttcttatttcctctacacctaggtgtgtgaagcttggatgccaatttggatatttgatcttgagggtctctttttggactttggaaatatcattgtcaaccatgttcttcctaatctcaaaaaaattattgagatcgaagttcttgggaaggttctcattctttatgctctcataccttttgatgatggagtgcacctcaatggggtcatcttgtggccaagtcagcggtggagcatcaccatatttgccatcatacataatcatgcaagctatgactccacacacgttataaagatcagtcattttcttcattagtgctttcttactcttcgtgagagccagaacacgatctctcccatttgggatgggctgtaagattatattt

SEQ ID NO: 255350 - DNA, 456 bp, Glycine max
  unsure (1)..(456): unsure at all n locations
agcttataaaatatccatatgagggagcaattnttgttatctaaatncaccnattatgtgctatgtaaatattgactccatcttataaaatagatcggatacggaaccctattctatatctctatcacgtgaccggtttatgatggtcatgtgttttataacacatgattaattatcgtaaactcatttgaatttttgcatgtctatttcatgggtgcaaatctttctttttggacattatgtttaagcataattatctttttagttcttaaaatctaggatgaatttaatattaatatctcaatttaaaaagaatcatttcgttaataatgtttctctattccttcggaagctataatgtgatttgtaactggaatcgaaggcatccaaatattnttattgactcttctacactttttgtaataaatatgaagatgagtcatatacttaaataac

SEQ ID NO: 255351 - DNA, 402 bp, Glycine max
aactttggatataacctcttcttctacgtggttctggaagctgaaggagcaaattgcatgcattaaaatattgcatattccccaagattcaaataatggcagattcatttggttggcaagtatgcaatctgatccctgtttctgaagagataacggttgctgggggcttataatcatcgcaatggacacaagaagagcaagcagctgaagggttatttgagcatagcaaataaatatattataaaggcttttaatgctacatattctaggtgacaattgggtctgaacaatgggccagcaacatgatcaaacaatgcacactgaggtttgacactcggtatctaatataatagacttgggctgatattgagaatatgtgtaaaccaagcgcagagtggagga

SEQ ID NO: 255352 - DNA, 452 bp, Glycine max
gcaagcttcatacaattaatatagaacctatatctcttttctcatcctatcagagcattttgtttctgtgtcctctagcatgaggttcttcacagtcatccacctattcatctgctctctcaaacaccaagttcaagatcatcataggatccaaacacaaacaacacacagggagtgagttatcacatttctgactaatggatagaaacaagataacatgtaggtataaatatcatataaacaaaatacaacttacttaagcatcactcacgttatttcaccactttgtcacacattacatcacaacaccacacatttcattcattttcacaacattcacgtactcaatgatcaaaacacaatatcatcaagtcaatcaatatcgatcaatacacaagcgttatacaacatatacacttaaactcaattctacatgcgatgtgtaccatgtc

SEQ ID NO: 255353 - DNA, 219 bp, Glycine max
aattcgaattcctgaagtatgtcatgaacaccatatgtatgtaacttgattctagcgacaacactcctaaaaagatcttgaaaagccagacccttaaaaataactgttaagcgattccaaaaacctgtaatcgattaccagtgaagaatttcagaagatgctttttgaatagacacttctcttcaaaccatattgtaacagcacaaagagcttatatat

SEQ ID NO: 255354 - DNA, 464 bp, Glycine max
  unsure (1)..(464): unsure at all n locations
acctgcggctgcagctngagaggatgcttgatggatgatttatttttatagacaaagagagaggggggagcacgaaattgaaggaagagaaagagagagaagttgaactttgagttgtgtctcacaagactctcattcatcaaagttacaacaagtgttacacatgtttctatttatagactaggtagcttccttgagaagttttctagagaaaacttccttgagaagcttctttgagaaaacttccttgagaagctagagcttagctacgcacacccctataataactaagctcacttccttgagaagcttccttgaaaagattcctaaagaagctagagcttagctacacacacctctctaatagctaagctcacccccatgacaaaatacatganaatacaaaagaagtccctactacaaagactactcaaaatgcctcgaatacaatgctaataccctat

SEQ ID NO: 255355 - DNA, 437 bp, Glycine max
  unsure (1)..(437): unsure at all n locations
tgcggcatgcaagcttccatcaatatgtctatggagttaatgttctttcttanagaaacacatataagaagccattgggctggaatatgtaagcaacatttaccatgacaatttgtcagtggagtttgacaaagcacaattgaacaaaaagaccctcatgggaagtaactacaaaggaaaaggtcaacaaaccttttttatagagatttaactaacaaggccatgatctagcaacaagtgccttcttcataaatttggatcaaatgatgccatttctggacaccatcgctttgcattgtaccatttaatggaagatgttgctttcaatctgtcacaccttatatatgttcatttgactaatcacatgaagggagatggcaatattcaaaacattatcttgtttgatttgctaaataagttgtatggaagcaggggag

SEQ ID NO: 255356 - DNA, 358 bp, Glycine max
  unsure (1)..(358): unsure at all n locations
ggatggccttgattttctcagggtccacttggaccccatttctaccaactacaaaacctaagaaaactatattatctacacaaaaggtacacttctctatatttgcataaagggtgtntttcctaaggattgaaagaacttgcctgagatgtcctaagtgatcatctaggctcctactgtacactaaaatatcatcaaaataaacaactacaaatctacctatgaaatcccttaagacatgatgcataagcctcataaaggtgctnggtgcattagtgagcccaaaaggcatcactaaccattcataccaaaccaaacttggcttgaaagccggtttccactcatcaccctttttcat

SEQ ID NO: 255357 - DNA, 397 bp, Glycine max
  unsure (1)..(397): unsure at all n locations
atgttggttatatcaattgagntaactactatgtcatcaatgtacacttctatacccttgccaataaaatcatggaagatggggttcattgccctttggaaggtgttcgacggctggcaagtgcaccggatcgtgcaagtggtataaaacggtaagtgaataccgagtatcgaactctcggggaactcgttttacttggtaaagctgtggttcagtaattaagcacctttggatgaaagtttggtgcgtggtatgaacaagtatgcaactaaactattcaacaataaattacgtgaatagtggtgtgtgaagacagataaagaatgtgttggtcttcctactggatgactgatgttattaaagatgttctctacctaacaatgtttctgtttctatg

SEQ ID NO: 255358 - DNA, 399 bp, Glycine max
  unsure (1)..(399): unsure at all n locations
acacacaaaatgaaaatactaagcatttattacctatacttaatagaaaatacttataacattacaaaataaccataaattgggagagtttgatacaatttatacaagttttatacacaagagttagtcgttttcatcgactaacagggtcttcattaggtaatccttggaataaattcccctgtattaaatgaatcaaagaatgtggtagttgatgttgtgagcttgcacttcaggacgtgcaatgctagtaaagaattgcagcattgagttgcttgaataatcctcaagggtgatcctctagtgttgctcatctgccatgatagtggcttcaggcaattgagtagcggattcccttgatgttggtgaattaggtgataatgaatcanaaaatgagtt

SEQ ID NO: 255359 - DNA, 377 bp, Glycine max
agcttcttttttgtctttcaatgctgattttccagggtggagatgcagcggaagacaaacgataagatgtgataaagtagtgggtagcactaccaccgaagaaccccgtagaaggactcctctgattgttggggtgattaccatattgcttaggaggggtcgggtatgtgtttccccgatttaaggatccattcttcttattctttattggactcatattttgataatacgttaccttattttaggagttgtgatctcagatcctacacatgttcaccagcattggaaaccggtgaacaccttgatgattcatagcttacttcatcttaggttacaagctatttataaacttcacacacctttagcttctcctatat

SEQ ID NO: 255360 - DNA, 364 bp, Glycine max
tctcccgcaaaaactctggagaaagtctgaacccgtgttttgcaagtggatagatatttaacttccccgaactcatggattccgaatcacagactgaaaataaaaaatgaaactcgccattataccttcgtgtaattctcaacgcgtgcaaagttcctacacaaatgtatccctttggtttgatctgctcacgttttcctcattccttgactcctctaaacttaagctttattgtgtgcatcttaatactgtattctgtaaagcgaatacccaaattctttcttataagttgggggacctgtcgatttacattctactaatctcaccgctttttcatatattcaatatcttcctcccaaactaa

SEQ ID NO: 255361 - DNA, 70 bp, Glycine max
cccccaaagggggggttttttttcccacgcagggggctttgtaaacctcccacccacagcatttcaatat

SEQ ID NO: 255362 - DNA, 329 bp, Glycine max
tcttactacattatattttcggttgagcttctctgggtatcttattggttatcccctcctctaattatccgagcatacatgtggatgcctaataccaggaatgtcgctaagtccacctatacctgctttgcttatgaaactgaaacaacttctcctcttgctcataacagggagcaaatataatactggaaaactttgtatctccagaagcatatttaaatttgatggcaagcttaatttgggggggcggctggatagggtaaaagaatggtctatctgcactaaaaaaagcaaggattgacttctaaaatggtagttttcgactctaa

SEQ ID NO: 255363 - DNA, 166 bp, Glycine max
caccgaccatgacaacacgacagcggagcccgacaaagcacaactgaacaaaaagacacccaggggaaggaactacaaaggaaaaggtcaaaaaccctccctaaaaagaccaaccaacaaggccatgatcgaacaacaagggccgacgccaagaatacggagcaaa

SEQ ID NO: 255364 - DNA, 391 bp, Glycine max
ctctaacatgagggagggtgctcaaatatatggggcaatcttgactccttctcttgcttgattaagtcgaattaggggattgtatgagatggccctaggcctataatgcattttgaagtaatggggcatgccacattgccctcgttttcttgctattgacgcctaaacgcgcgcccaccaagtgttcggtgaaatgcctcaatggcattagcgcgggatttttgtatggaaacaacccatggggcaatttgggttgcacatattatttgggacatgcattcacgttcgaatggggtagagtaattgtcctccatatgtcctaggcctaggagccagagttttatgcccaagaacacaagaggaggtgcgtattgggtaaagttaccttatt

SEQ ID NO: 255365 - DNA, 413 bp, Glycine max
  unsure (1)..(413): unsure at all n locations
aatggacaaattatgtttaattagtatggcactaactgaaattaaattgaatttgaatttgggaatgtaagcaacattatgcaagactaagatgttggtaaagcaaactgaaccaatggcaataatgggtataatgtcactattaggcagagttacatttttatcaaaaacaagctggtaggatctaaaatgatgaagagagcaagtaatatgaatgcttgcaccaaaatctaaaagccaacaatcatgaagaaaattggaagtagaaataagcatactacttgaggaatgacaacattggtagcatgactttctaaaagattcatcaattggctatattgttgagaagtaagttgaaactgggaacctaagtcaacanaagaaggttgtgattaggcatatcaacagacact

SEQ ID NO: 255366 - DNA, 451 bp, Glycine max
  unsure (1)..(451): unsure at all n locations
agctngnnaagccatttacataattgtcatttttataaaacttngaagccaaagaaaaagtattggtactcacaaaagcattattatatcctcagaagtctgaattgctttgtatgatgcaagccaccaaatgcattataaaaacaatggtttctaagatgatgttcccaagccaaacatgtgcattgtataagtcccacaaccatctaaatcacattctctctactcaagtcttcaccatctcaacaaatgtctagtcaaaggtgatctcaagtagatacattaggtatttacatctcccttggttgaacatagcctcccaactaaggtaaatgtaacagatgacacatcttatagagtgatggttattatatccccaacaagaaagtggaaggaattagcgtacttcaacccccaatcacctaaagtacagacaccattatccacctac

SEQ ID NO: 255367 - DNA, 380 bp, Glycine max
  unsure (1)..(380): unsure at all n locations
tacttttattcgnggaccacagagtggtacctggagatatgtcgcaggggtcaggagaccttggggacgtcaggtggggtgctattgcccaaaaccaagcttgaccaatcccgacccaacccgggcatagtcagtcagtgagaacctgtgatgtacctaaacaggcgagctcctggtagtcaaccgattaaagaacaaagaccacaaanccaggaggcttgcgtggtggctggccaactatggatcttgagtgataattgaaatatggcctctggtaatcgattacaaagggtgtgtaatcgattacaaggcttaaaaatggggttaggaagttgatatggcctctagtaatcgattaccaatactgtgtaatcgattac

SEQ ID NO: 255368 - DNA, 336 bp, Glycine max
cacaattaacaaaagttggtctcacagtccttagttgtaacttaaggccagaatgatcacctaatgccacgatgatacgaagagaatctttcttatatactggagagaaagtggcattgtaatctattcctttcttgcgatacattcctgaccaacaagccctgccttgtatcattagtggggactaaggaatcctttctggttttaaagagccatgtacatccaatagggctggtctgacttggcacttctacgaggttcctaacattggaactctgcacgggatcatcttatgcttaatggcgcacaccataagaggaagtttctaccactcat

SEQ ID NO: 255369 - DNA, 451 bp, Glycine max
  unsure (1)..(451): unsure at all n locations
agcttcattccaatcatgtattcaatccacaatcatcattcaaaactataccaaaactgcaatttcaaggagtcaagttaaactgttctatatgcatcaggacttgcatactattatccacaatcgaaagtataaacccatatcaaaacaaaaagtgtactaaaggcataattataataatcataattgtcatcaaaacaaaagtaggaatttaaaattcctatgacaggtcttgtgactgagtatcctcatcctgagtgtcctcctcatctgtaagatgtagcataagagtggtcgggggagtggtagtcaatcccaagactggtgtagaagggtcctctggaagatcaagtaatggtgtagacaagtctgttggcatctcatgcactggtgtagaagggtctgctggctgttgaagagaagatngatccaccacagagagggtggatct

SEQ ID NO: 255370 - DNA, 430 bp, Glycine max
  unsure (1)..(430): unsure at all n locations
tgcaagcttcattcacaacatgagttgtggcgattttattaatgttgnnganaaacatacaacatcggtttttactaaaaatcgatgttgtatatatatattaacatcagttttttcaaaaatcaatactgtatgtataagttaacattagttttggtaaaaaccgatgttggtgtgaagatatatgaatattttttataattcttactatataacatcggctttttcaaaaaccaatgttatcatttttatgttaacattgattttgaaaattcgatgttaacgatattacattggtacttccaacatcagttgataaccgatgttgaaagtttttaataaccgatgttaaaaatctattgtctagtagcgattgtttataggtttgttatatatgtacgtgctggattaatgcatggttgaattttta

SEQ ID NO: 255371 - DNA, 368 bp, Glycine max
ctttgtttgtattgtcattttaaaaaataattcaattgtttatacgtgtaaaatgatatagggtttttgtattttactaatcatgagttattgtgattgacagtaaaagattagttgtattatatgcatattgcggttactaatcatgagttattatgtagagctttgtattatatggatgcaagaagtgcatgtcgttcttccattagaagaagtgatactgaaatgcaacatctaataaagcttcttgaacgggatcaatatatttattggcataaattaaaggataaagacgtggtacctgatatcttttggttgtccccttatacagtgaagcttatccacgcatgtaacttggtgttctttat

SEQ ID NO: 255372 - DNA, 335 bp, Glycine max
  unsure (1)..(335): unsure at all n locations
cgaccgaggagcataaaccacaaagtctggcgacaggtgcaaatttttgattcacggccagttgggttaccaggttaaccaaggcatctagtttaccttcaagcttcttagtctcggctaatggagatgaattcgtggctacttcatgcactcctctaatgacaataacatcacttctagtactaaattgttgggagttggaagccatcttctgatggaagcttgcttgtggggcttctatggaggctggatctttgagcttcaatggggtcctttaatggtgattntccaccatggagatgcactggaagacaaaggagaagaggtgagaggag

SEQ ID NO: 255373 - DNA, 361 bp, Glycine max
  unsure (1)..(361): unsure at all n locations
catgcaagcccgnaagcagtaaggagggacgaatctctactgcctaaatgtcccacaaagaggaggacatgcagatcgagttgcgcgccgatctaccatgaggccaaagacagtaaaaaaaatatatcccagactcaacgatcttattatggcgagccacacaatctgctctgttagcaacatacaagtgaggatgaccgcaatcctaaaaaaaactatggaacctaacaaaccaagagaggggcgaatcggttttcaaataaaaacactctgtgaaaaccagagttacaaatttgtttgtatgaatcgtcacacaaaactgatcatgaaccgaactcaatcaagacataatcaatccacc

SEQ ID NO: 255374 - DNA, 452 bp, Glycine max
  unsure (1)..(452): unsure at all n locations
agcttgaatgtatctgccatagnccaatcttcatatntaaattagaaatatctcgttttagttgatatagtttctgtttgattaagacaaaacttgcagataaaagaagtgttaatttcgtttaaaagagaaacactagcaacacaattttttcaacagataagttgaaagtgtattataaaatgtattactagcacttctcttattaaaaattcgagtcatctatgcttgtttcttaaagtactggtgagtttaagttctttctccacaattntatccacacaactggtgtgtggcatttttaggtaacatgttataagaatgaccctggtagtacatcaatagtgtaggaatcagagacatttggaaggcttgtgttatcagaattccatcattatcctgaaaatagtaattagtagtgacgtatcaattaagagtagtactttgtacca

SEQ ID NO: 255375 - DNA, 444 bp, Glycine max
  unsure (1)..(444): unsure at all n locations
ttgacggagtgtgccgcatctgtgaattatttcactttaaaagagggtcccaattggattcctaattttcaacttacctatttggatgtgacatcatggcagttaggtggtcccagctttccattgtggattcagtcacaaaacaaacttcaatatgttggactatctaacacggggattttcgattctattcccacacagatgtgggaagcactttctcaggttttgtatttaaacctctctcgtaatcatatccatggtgagattgggactacattaaagaatccaatatctatcccaactattgatctaagctcaaatcacttgtgtggtaaattaccctatctttcaagtgatgtgcttcagttagatctttcaagcaattcattctctgaatccatgaatgactttntatgtaacgatcagacaagccaatgcaattac

SEQ ID NO: 255376 - DNA, 428 bp, Glycine max
caagcttgtgaaagttaagaaatatggcctctctatgttgctaacggaagatgaaggtgtcaaatcttttctagcagatctaacctcttagctctctagtaactaacaccctaatttgtttcttctgtcgtggttcttttttcatctcttggaagctatagagaaatgaaaataagtcatttgttagttggaaagtattgtttggattaatttattcatagaataaaagttcattttaagaaatggtttcgaatttgttatcatttttcccaaactattttgatttcaaacgtgtcacactctaaatttgcatggcatattgtcttttgtcacaaccgtgttttttttttatagtttttctataaaataaaataaataaattaataaattaattagtaaaagtaattaggtcataaatttccactatt

SEQ ID NO: 255377 - DNA, 406 bp, Glycine max
  unsure (1)..(406): unsure at all n locations
atcgctcttcacagagtgatctcattctgcactttcttcccctaaacatccgcaaaacatcaatttatgcttttattatagttaaccaaaacatatgcattccttaataattgttgtaaatgatttcttatgtaggaagtccacgttcatgttccaaagcctttattattttattntattattttagaaaattttgttattttcgaatctggtatattttttattcacattcaacatacatgtctttgcaacatatttgtaaccacttctactaacaaatcacgaactcatctcactgataacttttatctcacgttatgataataacgacaaagagaatgaggtgctctccttttgtatcactaaactcactcatctatctaaaanaatgactatctatctggag

SEQ ID NO: 255378 - DNA, 316 bp, Glycine max
gctggagctgacccatcaattgttcatctctctgagactggtgatccctaggctggttgatttgactggatagaacctctttttaagtgaaggcttttgaattgatcccatgttttaccaaagtgaaacaaaacccagtgcgaattaaaactccgacctctattatgggaggaatggttgaatgcatgaacaaatgcctattatacagatgtcatttatgaataaaggcgcccgggaagatgtctcattttagatacagggttttggggtagtctgatgcccgacttttgtatttaaaaagggaacccacccttcc

SEQ ID NO: 255379 - DNA, 425 bp, Glycine max
  unsure (1)..(425): unsure at all n locations
ctgcagctttccaaataaatacaatcacatgccttttgttatacaggggaatattcgtaggggattttcctctccttatgtaatcttttgcaaatctatataggagaatttagaccgttgatttatctggtctgtttgtgaatcctccaataaatntagaccgttgtagtatgttntagaaactaaggcagttgtaaaaataaccgtcttagtttctaagacatactacgacgattcttttaaaaccgtcttagaattcgcatgttgactacactatattacgccggtttagcgcgtagaaccgcctttgtattaattaaaatctaagacggttgttggataaccgtcttagaaaatgttactttctacgactgttcaaaaaccgtcattgtaaatagattgtgatattacgacacttgcatcta

SEQ ID NO: 255380 - DNA, 424 bp, Glycine max
  unsure (1)..(424): unsure at all n locations
agcttgtaagagctcggacacttttcttttttccacatctagaatggcggcgttgaatctccactgtggctgcctcactggcttanctccatcctctaaaagtatcctatgcatgcaggtagatgggctaataccaggaatgtctgctaaagtccatccaatggctttcttgtgcttcttgagaattagcaacaacttcttctcttgctcagcagcaagggaggcagagatgatcattggaaatttttccttgtcttccaagtaaacatatttgagggttgctagtaagggctctaactctggtgtgggtggtggctgaaccgtgggaggaaccatggtacgaaaagaaaaacgtttcttagcctatacctcataaaacaagtcataagtatatgttctctctgccaccatgggtagtgcattt

SEQ ID NO: 255381 - DNA, 442 bp, Glycine max
tgtattcctgcactctactaattatgtaattgcccattggcttgcctgagaagaacaattggttgaccacaacagcgctgggggcggcaacggacaatggtctttcaaataaacctgttgtacatgaacaaacattatatcatgcgctgaccgtgccaaacgaacaagcgaagtcattgcataattgttacactaactatattcaatgtacctgaacaaaatgatttccaaacacgtgaccgacacatatgatgcggtggccataagagtcaggtggtggttgacttctaagagggaaaaatgtcatgctttgttgttgggacaacgatacaaggattacgttataccgtgaagcaatcacatatcccatgtatgttatatccatccacttgtccacactaacctgattgaacatacatacacatgaagtgatttatacatt

SEQ ID NO: 255382 - DNA, 55 bp, Glycine max
  unsure (1)..(55): unsure at all n locations
tcctcntcccccccctcccccncaagaggggatgtgtgtgaccctcgaaaccccc

SEQ ID NO: 255383 - DNA, 304 bp, Glycine max
ggcgacccctggcgcggggcttcactaaggataagcgaaatatgctttcccagggtgctgaacaccttccttcagccccccactccctcttatagccaaaacaggggaggagcttgccgcccatcttgcccaagcgagctggttgcttcatataaaagcttcctgatgggcctagatgggcccacggctgaagaacaccccctaaaatgatcagatcacccccattgtgagttttcggctgattaccttctgaaacataacagaaacttacagattgcgcgacaattggctctaagcaacttaa

SEQ ID NO: 255384 - DNA, 302 bp, Glycine max
gccacacacacaagcctgggaggagaactttagttgtttattcaaatccaaagcattggttattgtcatctcagtgcctttaatcttgacaaccaatgataatactatcaaaatctctcaaagaacaactcccataacatctgaggtggtgtttaatttacctaaagatggtacttgtcaccccacataggaaccaacataaccaatttctcaatttcatgagataatgctaacttagaatcttagagaatttccacatgaagataaatgctacatcatttattatgagcttaatgccactt

SEQ ID NO: 255385 - DNA, 402 bp, Glycine max
  unsure (1)..(402): unsure at all n locations
agctcgnngccgtatgctaagtgagtgatctattttgtagaagggttctcggacttcttcggtggttncaagttccaccctcatattttcttcattttgtggacgtaggaacaatagtctccttgtcgacggttccccaacttcaacaagaatcatggcgtatgtgtcatatgtaagtcggtaaggaatttagttggtggttatctagggtgtacaatggtatgctcagaatatgctataaagttcttctttccataggcccttatacttgtcaagtctagttcacagggctttgagaatgactttgttagttgtctctgcctgtccgttagtctgaggatgtttgatagaggtgaccaggtgcttaatgcctagccttgttagaaagtcttcgtaagtctg

SEQ ID NO: 255386 - DNA, 388 bp, Glycine max
  unsure (1)..(388): unsure at all n locations
agctcgtgtcaatcccacatgttttgttcattcttgcaaaacagggcgatcctgactagtctccctatgaatntacttagtacgagtgatgaggacatgacaaggactaagggccaggaacctttagaacgacttggacgacctatgtcaagggctacaacaaagaagaccaaggaagctcttcaacaagagttaaccatgctatctgaatttaggcccaagttacaagtggataagattcagattgtcaattgtcccatgttccaagaagagaagagggtgccacctttgatgaggggttctattattattttgttagtcgaaataaaggctcaaacttgcgttaaagtgactgtcaattatatttggatctgcaccacctatggac

SEQ ID NO: 255387 - DNA, 258 bp, Glycine max
aaagcgccgatgagccgaagccacacctgctcactattcgacagccacaacaacaacatcggcaaaagccccaccaagaaccccatcttgggctgacacactcaaccccttccgcagaaccaatcctacgttgcggacccaccaccaacgcctatactccgatcatcgctatcaagatcatcaattacagcccagccaatggctacctccccaggcaaagaaggctggctggaaacaactgagatatcactggctttg

SEQ ID NO: 255388 - DNA, 296 bp, Glycine max
gcgctctttgcgaggcgcaacaacctgcaaagcaaccgcatcctcaatggcgtttcctgcttcctgtagctggaaaaccttgctgcatcatgtgccctgacaactgtcaactgtgctactgcaagctaaacaccaccaaactggcattttggaaccatgcacaatgcgccatggaggatggcgtcccatccactaagcacaagcgaacccgtgtgtatagcgcgtcctacacgtggagtccttacggaacgccagggggggaccatcatgacgtacgaccaagagccctgtgtaat

SEQ ID NO: 255389 - DNA, 330 bp, Glycine max
cagaaacaaccctggatggaggaatcaccctaacctcagatgggtcaaccctcagcaacaacaacagcaagcctgctcacttacttccaaaatgctgctgggcccaacaaaccatacatttcctcaccaatccaacaacagcaacaaccccagaaacaaccaacagttgaggcccctccacaaccttccctcgaagaacttgtgaggcaaatgactatgcagaacatgcagtttcagcaagagaccacagcctccattcagagcttaaccaatcagatgggacaattagctacccaattgaatcaacaacagtcccagaaatatgacaag

SEQ ID NO: 255390 - DNA, 142 bp, Glycine max
tacacagatcgatcctgcttacataagaggacctgtcatataatcgaagaagtaagatgcaaggctggacagactggagattcttctgataatcactaagatgcgctacctggacaaggtagtatacagaaaaaagatggtt

SEQ ID NO: 255391 - DNA, 445 bp, Glycine max
  unsure (1)..(445): unsure at all n locations
acctgaggcatgcaagcttggtaaagttaaagaaatttatgatagctcttttcttttgctgngngnataacccaaaccagccttttcggatacacatattttgttgtgcaagtaatgctttcaagttgtctctccccatagagaacttggataaagttttagcaagtattcaacctttacttctaaaactttacatccttcacaaggatagatgacattagttgtattagtgcaattacaagaagagttgttcttttcttttactaaaatatcatcttttgctttttcttctgacaactttattggacttttccactggtttatccacatgccacctcagtttaccttttagaagattatttgcaacgactaacttttgtgcttcttgatgcatttcattgaaaacatctagtagctaatcatagttatcaccatcttccgaata

SEQ ID NO: 255392 - DNA, 457 bp, Glycine max
  unsure (1)..(457): unsure at all n locations
tctatctactgactaataattataaattatagttcacattcttggtccttctttggctaacatacacacttgctcaaactcatgataagaaacacaaacaccatcacaatcatgcgttcaattcaaaataaaagcctacaaccatttttcacaaaagatataagtggttcacttgcatgtcatcaaaaacaaagtttaactgttcaaaatacttaagaaatagcaaaccaaatatttataaataaaactagcagtgtatgtagacctaaaggaaatactgtccgaaaaccaaaaaatataataataataataaatcaaaaagcaaaaagtatcatcaggaatcanaattcctgtgactggtcctggatatctggtgcctaaacatcctccttatctgtcagatgcaatactggagtagctagaggagaagtgtccagagccaagactggtgtggtct

SEQ ID NO: 255393 - DNA, 240 bp, Glycine max
agcttagacacagagcggaaccctaccgcaaacaagggcgatcatgaatgcctactgtggagaaggggcaacaagagacgtcttcacttcacctacctgtcacagagatgaccatcactccagaggatgagtcatctcttcagcaactgcctatgacaagcaagcccatagatcacatcccatccgcctttgaaagagactctatgaagattccgctaatgagcctcctcggcatatcga

SEQ ID NO: 255394 - DNA, 434 bp, Glycine max
gcagcttctagatcaaaaactaacttgttattttctttcgaacgatgcaaaatgaacgaagaacggcgaagaacggtaaagaaacttcctcggaatcgatcacagaaacgtcttggaagcgttacgaaagcgtctcggcttggattttttccttccttcttcttctcctcactaattgtaagtgattttttagttatcaagttgctgaacccctaaaactcagcccccctcacgccattatataagaaaataggggaggtggttgctgcccaactcacccagggctgaaggaatcccttcttttggaatattccagatgggcccaagtgctaggtacacccccagttagattagcgcacccctattatcgtgttattagctaatttctttctgaatcattgtgaaactttacggattatgcgggggcgagtgtc

SEQ ID NO: 255395 - DNA, 396 bp, Glycine max
cttggtgacccattttttttttttcgaacttgcagacttcacccatgttcagaccgactacttccttccacacagtagtgtccatgactatttatgctccattaacggtagagaagaggttacctacaggtcaacatatgcacatgtgtaaaacaccttaactagatcctaataaaaggttcctttcatctgcaccagctatgacaatccttgtgcttccagcagattatgaaagttgaacccttgctgagaaccattccaagcccaagtacttggggatcctcacgttattgaaaacatagatcatcttgtaatcattcttcttgctttcattagtgaaccatgtgtccaacctgttgagagcaactttagagcattcaccttgtttcttcttgg

SEQ ID NO: 255396 - DNA, 434 bp, Glycine max
  unsure (1)..(434): unsure at all n locations
agctntgcttccatactgcatatattctatttttatcgttcgcatgttatggtcattcatgcatgatccttgcattttcctctgcaaaaacaaaacaaaaaaaaacaaataagagactaacataaacaaaagaaagttacaatgaagaataaagtttacaccacattcttagttacatgtgttgggtaccatgatgatagctataaacaaaccatgttgggattatacacttatttctcttaaaaaatgattgaaaatcatgtgaacatggtgcctaatgcattgttaactaggaaatgatggttctttgggcgtctcatgtcgatctcataattacatttgtcatgcatagcataagtattccctaatcattcatctctatgatatgttgtcgaagtatcgacaattaaaaattattttccttggattatggg

SEQ ID NO: 255397 - DNA, 384 bp, Glycine max
  unsure (1)..(384): unsure at all n locations
tatttcatgtgcgttagaccaatgcattctagtcagtaagaagctaataagtagaagaccagttcaattatgcttctgagacattctaagcaaccagcatgaaaggtagtgttattgaacattaataataatactgaacttcaccactttgaattacttcctttaaacttattatgtacacagggaatcatacatgaaactaaccttntatgtctaaaaatctataagaaagcaaacaagttaagcattgaggaaaggaacttttggctccaatttcctagcttgcatactttccaagagttctctgggagagtaacaattacataatgtactttagctaagagcatgttcccaatcttttgaatcaattaaaaataaatagat

SEQ ID NO: 255398 - DNA, 425 bp, Glycine max
  unsure (1)..(425): unsure at all n locations
agacttggcagatcaaagagagtggactttattcattgatgcttcacattgctggtggttgggatcgtactctttccaaaagtagatgggctagcggatttagtggcgatcgatgcttttcttgcttgtcaccataacaatgaaagcccggtcattgtttgtttggccgatgtgtatgacgcattccacctgagatgcgagaagagctgtgcgagaattgtctggtgtacacccactctatntgtatggctagtctcccacatttatcgtcatgatagtagacctatctgtcccctacaaggtcatcgcatgtgtgccaagaaaggaaaagaaaattgggaggaactcttggcaggtatggtaagagtgtccattatttggttcccccgatggaaggaaggaggagccggagtttatgctcatgt

SEQ ID NO: 255399 - DNA, 203 bp, Glycine max
taaacttagtgtgaaattcacgatataattcaagaaaacgaacaagtttgaaacatgaaattaaaaagaaaaattagagatactaggctacctcctaggagcgcttctttaacgtctttagccggatgcgggatgatgatcgatcgatcatgggcctagcactggttcgtacctgcccctaaacttggacaaagaaagtggca

SEQ ID NO: 255400 - DNA, 437 bp, Glycine max
agctttcttaagaaaacttcattgagaagttttcttatgaaaacttccttgagaagtgtctttgagaaaacttccttgagaagctagagtttagctacacacacccatctaaaaactaagctcacctccttgagaagcttccttgagaagctagagcttagctacacacacccatctaaaaactaagctcacctccttgagaagctttcttgagaagctagagcttagctacacacccctataatagctaagctcacccccatgacaaaaaaacatgaaaatacaaaaaaaatcctactacaaagactactcaaaatgccctgaatacaaggctaaaaccctatactactagaatgggcaaaatacaaggcccaaaataagaaaacaacctattctactatttacaaagaagagtggacccaaccttggcccatggg

SEQ ID NO: 255401 - DNA, 250 bp, Glycine max
ttccccagctgcgatatccgtataaatttgtcgctctggtcgatagttgcaatttggattgccgccaacaaaaaaaaacaagaagttgagatgagagtccacattgccaaaagggcaagacagacgaaatcatcgtcttatctttgctttcctcttatctccgaagagaggtaaataaaaaggggcaactgtcataccctaatatcctacggggattattacttgatgacatgcaataaatgaagtcccc

SEQ ID NO: 255402 - DNA, 429 bp, Glycine max
  unsure (1)..(429): unsure at all n locations
agctttccattctctnggaagttcattatttgatttgacttcttctggaggatcttcattggttcctttatcatttcctttggaatcttgttcatgaatattcatatgttctaaagaatctgcaatatcatctagcatattctttcttgacaagatagcattagattcatcaaaggtaacatgaatggattcctcgatattcatagttcttttattatatatcctatatgctttgctttgtaatgaatatccaagaaaaataccttcatcagattttgcatcgaattttcctagattatctttaccattattaagcacaaagcacttgcaacaaaaaacatgtagatgagaaatattagggtttctaccattatataactcatatggggttttctttaagatgggtcttatcaaggccctattcatgat

SEQ ID NO: 255403 - DNA, 473 bp, Glycine max
  unsure (1)..(473): unsure at all n locations
ttgagcaaaatcaaacgacaataacttgtacactgttgtttaatgaatcccgtaatatatcgagacgctcgtatatgaaaacggaagctctgagcaaatacaaacgacgataactttttactcggatgtctgattgtgtcacgtagtttatcgagacgctcgaaattcataacagaagctctgagcagtatcaaacgacaataactntttactcgggtgtccgattgtatctcgtagtgtatcgagacgctcgaaattcagaacagaagctctgagctgaatcaaatgacaataactttntactcggatgtccgaatgaatcccgtaatatatggagacgctagaaattcagaattgaagctctgagcataattaaatgacaataactttntactcggatgttcgattgtgtcgcgtagtgtatcgagacgctcgaaattcataacagaaactctgagataaatgaaatgaca

SEQ ID NO: 255404 - DNA, 350 bp, Glycine max
  unsure (1)..(350): unsure at all n locations
agctnttggacaatctaaggagtgttgtcttcatgctgcaaattgatggtttctgagtggaaaatcctaatttggctaagcctaaaattctgcagcatttgcaaagccgattcaaattaattgaagttatgtacgagcactgtagcttttacaaaaataagcactgcagcttatttaaggcacaaattctgcagcatctgcagtatgtgggtgtgtttcactgtgtgtgtgtgtgcttctgtgtgagtgtgtgtgtctgtgtatgtttctgtgtgtgcgtgtgtgtattacagtgtgtgtgagtgcgtgcagtgtgcgtgtgtgggctgccccctgagtaacgtgcgcaa

SEQ ID NO: 255405 - DNA, 399 bp, Glycine max
  unsure (1)..(399): unsure at all n locations
gtcaagctattgcgggatttgaacattttgggttatgaaatatgtcacttagttgaagccaatggccatgcgagaggtatttgggtttttgtggagaaaaaatagggacttttctatcactaatgttcattctttttcccaagccctcacagttcatattctctaggaattctcaatcttggatctgcacgacaatgtatgaaaatactcacaggcttctatgttgccttatgggatcatattgttgatatcaaacaatctatagatcttccctagtggtttgttaatgaatggactgagatttttcatcttgaggtgcagggaggatcgtttctgtggttgatgcttctacgttcatggatatgattgacacttggcatttgttagactanggtgcta

SEQ ID NO: 255406 - DNA, 396 bp, Glycine max
tgccatcactccccttttatcttggtgcttcctccagaagcaacagccttctggaggaatcttctggagggcccaagtgggcctgcgtgctatatgcaccctcatttttgctaaggacacccccctgccctttattggagattctttcttggaaagtctatggaaaactctatctctctctcaagtggcagaccggatatatcctcacgaaacacttcatgaaactctctgacaacagggaggtcacacgtagaaacctttgcctctacttctaggctagacaagatcatgtatactcgagcatcttccttaaagatgtacaacttggttgaagagaaaacatcatatctaatcactcagaatcatcaacccacctttataaacattcaccagaat

SEQ ID NO: 255407 - DNA, 434 bp, Glycine max
  unsure (1)..(434): unsure at all n locations
agctggtctttgacttatatggggcctttattggtgatattacaccatggagatgcagcgaaagacaaacgaatagaggtgagaggaggcaccattcattaaggaataagcaatggaagaaggagcttcaccaccaagatgagccttggataagaagctnggagatgatgcttcaatgtacgaaaagaaagagggagagaaagagaagggggagcacgaaattgaaggaataaaagagggagagaagtggaactntgaagtatgtctcacaagactctcattcatcaaagttacaacaagtgttacacatgccttctattatagactacgtagattccttgagaagaattcttgagacnacttcttcgagaagcttctttgagaaaacttccttgagaagctagagcttagctacacacacctctcttataact

SEQ ID NO: 255408 - DNA, 411 bp, Glycine max
  unsure (1)..(411): unsure at all n locations
agcttgccaacccatggaagctcctaatatctctcacactttttggggtgggccattcttggatggccttgattttctcagggtccacttggaccccatttctaccaactacaaaccctaagaaaactatattatctacacaaaaagtacacttctctatatttgcatagagggtgtttttcctaaggactggaaaaacttgcctgagatgtcctaagtgatcatctaggctcctactgtacactaaaatatcatcaaaataaacaactacaaatctacctatgaaatcccttaagacatgatgcataagcctcataaaggtgcttggtgcattagtgagcccaaaaggcatcactagccattcatacaaaccaaacttggtcttgaaagcggttntccactcatcaccct

SEQ ID NO: 255409 - DNA, 424 bp, Glycine max
  unsure (1)..(424): unsure at all n locations
ttcaccatgtgnggagggcatgcttgattggaaattccttttcggtcactaatcagatgtaattggtttgtttggttttggggctcttagccccgttcaatcataaaaaaaaataaaaaaaaattattattaacattttcaactaccaacatgcttgtccaaaatgtcatacattctttccgagggaccattttattaaggtctttccaagggaccatgattataaactatcttctgaataaataatcaatcacgaccttatgatattatatcagttattaagtatattatgaactacgttcctgtaggattatcttaaggcatgcttattattacgtgtttgcatgattatcttttattattgcgcgtgcatatatataagattttgaattggtttctacaatgagagtcatgtaatcaatat

SEQ ID NO: 255410 - DNA, 352 bp, Glycine max
aaagggatgccccacattatttccatgacacaaaatgcacaaatgatgatttggaaactttatgcacaactggacatgcatgcacctatgtggaaactcaatgttataattttatggtcatgtgatgcttacgctcaggattcatttcctctattttaaatcaacccaatgattccaaaatatgttcttttatccatttgtgcattcatccgagtccattttgggcgtccgggaaaattttcacagcattcacccttcagggtgatacaccatttttcaaaaattggatatgaacaatgaactttttcaaagaaaattggaagttatcttttttcacaagcatgccggattt

SEQ ID NO: 255411 - DNA, 440 bp, Glycine max
agcttaagcccactattctaactaaaagtaatatattattaatgattcattttcatgcgttaaaaaatgcttgttggtgatgttgcggggaggatatgggctggaaagagagaaaagattgaagtggcaaaggagttagtaaaaggcttaaaggaattggagaaggttcttggaggcaagccttatttgggatgacacatttgggtttgttgacattgctctgtttgacaaaattaaatttgtttggatgatattaatcaaaaatacttttgcatgtgtaattactaaaaaggatatgaagtttataatataatgctaattatttttctatttcatttcaatattttttttaagatgaacttattttacacatatcaagaaaaaataataaataaataaataatcgagtaacaattttataacaataaccttatgtcatg

SEQ ID NO: 255412 - DNA, 481 bp, Glycine max
  unsure (1)..(481): unsure at all n locations
actcagctgtggatatggggtcccatcaatgtggactaggtggttgtttgcgatggtgcacaacaaagttttcacatccacaaagcgcgcataaacccaccatcccctgttgcccacctccatctgagctcacgtactcccacgtagcccatatcctcgtttctctcaacaccgggtccccatcaatcctctcaagcttccacaacatccaagcaaaacaacattcaaacagcacaatctatcacagccaagaaaacagagcaaaggcagaaaactctgccaaaacaccaaccaaaatcacagcttttctcacgtaaagaccacagtaacaattccttcgatccaattcgttaaccgttggatcgactccaaaattttactggaagtatatagtgtataagcctgcattttgaccgttgggatatactagcanacatncagaactcattctgcactagactntccacagtcaaccacacac

SEQ ID NO: 255413 - DNA, 300 bp, Glycine max
agtcctcatagagcttattcaaaccagattcttcgtgattttgatactaataaggaggatttccttgtccttcttataatgcacttcttttggtaaaatgtgtatgctattttacttttcacttgggtgatatacacctatcacaaatgctgagaaagggaaatgggtgtatgtcggggttccgaataggagataatgggttctcttcccaacatacaaattgtctctcattgacggattgcctaaaatcacaaatttgaactcttcctcttggcaccatctatggtatctccatcttcc

SEQ ID NO: 255414 - DNA, 384 bp, Glycine max
  unsure (1)..(384): unsure at all n locations
agccagctaagggttgagaactcacaccctcctactcgtaaggctactacccctgacaacaaacaatcctcttngacattggacaaccatcttcgctcacaagccgacttatagcttgggagaattatgtactatccagggtccacaaaatacgtgtggcatgctacgcgatacttcgagaaaataacaaccctccatgtcagccctgacacaagagcgcgaacgtctaacccttaacaatcgggctccccaatcaacacgatatctcataccacttaatatctgaatataatcacatcctttatctcttggcagaaatcaacaatctacaaagtcacacatcacctatgagggatgattatctactaccaagtatcactaagc

SEQ ID NO: 255415 - DNA, 363 bp, Glycine max
  unsure (1)..(363): unsure at all n locations
ctgctngcatgcaagcctctctgagaacacaccctcgagaagttatatcttagctgctcactttctancagaactaagctcaccggcttgataagcttgcttaacacaactcctacagaagcttgaccttagcatcgcgcacctttctaatagctaagttcacctccttgagatgagaagctagagcttacctacacaccccctataataactaagctcacccctattccagaaaaaaaaacctgaaatttcaaaaaaaggccttactacaaagactactcaaaatgccccgaaatacaaggctaaaaccttattctactagaatggccaatatacccggcctaaacgaacgaaaaacctatt

SEQ ID NO: 255416 - DNA, 328 bp, Glycine max
aattggtatttaagtttttctaagagtataactcttctaatgaattgtcttgaccagacatgaagagtctatataagcacggctttgttttgcatttcaagcatctagaatactttttcaatcaatctcttacaatcctttacaagccttgaatctctttgaacttcttcttcttctgtgtaccaaaagctttctgaagttatctggttttctaaaccttgaaaacttgtgctattcatcttatcattctcttctccctttgccacaaagaattcgccacggactaaccgtctgaaatcttcttgcgtctctcttctccctttaccaa

SEQ ID NO: 255417 - DNA, 452 bp, Glycine max
  unsure (1)..(452): unsure at all n locations
accttagagngacctgaggcatgcaagcttagatacggtgctcgaaacaccccatanatttctccaaaatggaaaagnntggtgcttctaccagaagtctttattttgccatggaatacatggcggaactcgaggcttctgataagaagagacaaagattgaagacggtgggagccactaattacaacagctaccccaaacaaaacatggaatacttgaacgagcagatagcgtatcatagaaaacaagtgcagcagtacaaggaagtttcgctatggagccaaacattggacaaaaccgttgggatcatggctaagcttgtttgcattgtatacgctagaatatgttctgtttttggaggctacatttctaattgcaactgctatgaaatcaatgatgttgacaacaacaacaaacattgttgttgcctcttggaacaccgcgagttgtac

SEQ ID NO: 255418 - DNA, 453 bp, Glycine max
taaaactcagctatccccttacgcgatgaagagctgttaatatatttttagcatgacagtgtaacgataccggtaactagccagtacgatcttgggccgcgtgaggacatcaatagtatatttggaaagacccaaacgaacgaacaatagctaaacttggatatggaagaagaggtcgataatggatgaacttccataatggtttgatccaagtgcctgacattgcattgatgttatgcatgtggaaaaaaatgtgtgtaatagtgtcatcgacatgttatttaacattcaaggaaagacaaatgatagattgaatactcgtcaagatctagttgagatgggtgcatcctctagcttgtcatacttgtgccagaaaagagaagataagttttgttacgtctgtaacattgaaaagtgcacaaggatactcttcaaatattaagagccttctac

SEQ ID NO: 255419 - DNA, 430 bp, Glycine max
agcttcttatccaaggctcatgttggtagtgattctccttcttccatggcttattccctagaggatggcgcctcctctcacctcttctcctttgtcttccgctgcatctccatggaggaaaatcaccattaaggaacctcattgaagctcaaagatccagcctccatagaagccccacaagcaagcttccatcaagtggtaatcagagcacaagagcttcaagtaggtgctccttaaacctccattaattttttgctttaccttctcttccattggtgtttcttcatttttctccatgtatctcctcacatgtattgtgataaatgttgttaacatgattctttaaagtttccaccgattaaacttgctatagaagctagattttattttctatggttcaaatttcttgttcttgttcttgaaccatgaa

SEQ ID NO: 255420 - DNA, 471 bp, Glycine max
tttcttattgagaaataactggtggtcagtgcctttcttttctttttccaattctccattgatggttaaaagctaatattaacctgtcacttcttataatttcctattggcttattacatctataggtcaaactttgtttaaaaatgtatcttttcgggttggatataactttgtttagaattggatagcttcaaggatcacctgattttattttagtagttatacaattgatttattaatgattctttaccaacagtgtagctggttaaagaattataaagagaaaaaaattattgtaagaatataagaaaacgaataataaaacagcaaaattgaaaaaaaccattgatatttatttcatttgcaacattggactctccacgcctttcctaaacggatcatagtaggtggtaaggaggaaattgatagttgagctctgtctcacgaacacgaactaaaaccactggata

SEQ ID NO: 255421 - DNA, 264 bp, Glycine max
ggaccgaggggcgtcctatgcaccaacaacccctcttctgtatggagaatggatcatgaactttccacttctactcgatgcggaactctacctcacactcgtactccaccataactcaatagccaaatataattagccaccaatatgaacaccattaggcatgcacttagccactttaaaggctatttgtcagacccccataatgatatatcataagtcgacatgaaatgatacaacaattccatgaaaatatgtgaaacaagc

SEQ ID NO: 255422 - DNA, 350 bp, Glycine max
tgctcactcatgaagtatcgaagagtgtaagttttatagcagacaaactgttatatgctaagcttacgagagacaatctgtatgcggaggaaatagaatgatcttattctaaatctaatcgttctgagcagctattcaatgaataataaatcaatagcaaaacagaaacttatcacataacaagatttcagccaacagcaaataaactgacttgctctaatgtatataaccactattgactagctaatcataactgaacacagaaaaccaataaatatccgctacacagtgtttaaaagattaaacaatcctgctgttgaagtgaagctcaattcttgccttaagagtca

SEQ ID NO: 255423 - DNA, 373 bp, Glycine max
agctttgataccaactgaaatttctttatttacactaaaactaagggggttgaatagtgtgtatatcaaacatataaacttttgcaatattaaagcagatatagatagtgaaatatatatgtgtcaagtcatccattgaagatatatatgtgtcaagtcattcaaataaatacttgttgttaaaaatgtgatagagagtgctataagaatgattaataaactgatatcactttgatttatactatttcactcaaccttagctacatccagttctcctttagtcactagtaaaggattccactaatcaaaacttgattacaaaacaaggattctaacctaccactcctggttttacaagtactcataataccac

SEQ ID NO: 255424 - DNA, 466 bp, Glycine max
  unsure (1)..(466): unsure at all n locations
tgtaggttaaagtctcacgaatggcatgttcttattctttaattggtagccgttgctatacgagacatcttgccaaacaaagacaggttagccataactacgatgtgctttttctttcatgctatatgtagcaaagtcattgatcctgtcatgtttgatgagctggaaaatgaggccgcaattatactgtgtcagctggagatgtattatccccctgctntctttgacatcatgattcacttgattgtgcatctggtcagagaaatcaaatgttgtggtcctgtttatctacggtggatgtacccggttgagcgatacatgaagatcttacaagggtatacatagaatctatatctgtcagaagaatctattgttgagaggtacattgcagaagaagccattgaattttgtcataatacattgagaaggctaaacttgttggccttcctgagtctcgacatgatga

SEQ ID NO: 255425 - DNA, 233 bp, Glycine max
taggtggatagctatggagaaccttatgctagaggcactgggacactatgctctgatagaatgtgacattggggattagggctttatgttgcccttatcatatgagactgtgagatatgcattcgaacatgatttactccatgctcctcatagaaattacagttgtaatctcggcacgggctttgtttggaaccacaactcattattatattcttactgacaagctttaactt

SEQ ID NO: 255426 - DNA, 483 bp, Glycine max
  unsure (1)..(483): unsure at all n locations
tactaagctgtgtcacaattattgtgacagtcaaagtgccattcacttattcttttatctaatgtaccatgagaggacaaagcacatagatgtgaaactacacttcatcagagatgtgtatgaatctgagaaggtgaaggtggagaacgtttcaacacaagaaaacccgactgatatgnttcacaagtccttctttagtgtcaagttcaagcactgcctggacttgataaattttgaagatgcctaaagcagattggtagaagtgcagccctgaatcgcaagataaacactcgctgatttggagtcaaggtggagatatgtggtttgtgactcaaaatcacaattggcacaagtgagaaggccttatagtggtgctgtcataactcgtttcagttattgtaactgaattagtttggcaccaatgtatagcctttgctcttaggactagctcttagagtgtatatatactcttgatcttgaatc

SEQ ID NO: 255427 - DNA, 290 bp, Glycine max
cgacgaaacacagagaaggaacaaaccggaatagtacaaacacacacacacgcgaagaaaggcagcacggacaaaacaacgcggcaaaccaggcccccgaaaaagagataccacccacgcggcataaccgaactcgagggcacaagaacaaatccaaacacgcgccaaagcagacattcacagcacccgcagacgcaggaaaggcccccagaaacgcaaacccgaccaaggaaaaccgagtaacgcaacggtaaacaaggggagcagcacaaatgtcggcacagaaaaca

SEQ ID NO: 255428 - DNA, 301 bp, Glycine max
  unsure (1)..(301): unsure at all n locations
accagaatacattaacttctttctttcttatattcaagtgcgatacctatacttcgacgaggagtaatatgcttttcctgaataaatgaatgatccgtccatggatgaagagatatgggttgattttttccaaatcccncactatttgatgagttgggcatctcaacatccatatcagacatactgctagaaggcaagcctcccaacatagtagagtcaaagtcatgatgactattagacacattcgactttgctgtacattttcagaaccagatgtctgccaataactttggactgtgat

SEQ ID NO: 255429 - DNA, 287 bp, Glycine max
agttcatttgctcacatctcattttttccattgaatgtatttcggattctaaaaaatttgtccattggccttttttagtctaaactttgtcttgcacttgcagacattacaagagtcccaaactcatattcacttcatacatcaatggttcccaaatcaaactctatattcctataccctgcatagtctgaatggcccatttttggagtatattccttcacctaactaaatggggaattctgcagtgcaagtcccactcccatcaggtgttgctctgtttctccttg

SEQ ID NO: 255430 - DNA, 407 bp, Glycine max
acgatacagaacgtccatggaattgatcacgcaaatgttactgaagcgttacggaatatccaaagtgctgaacctctttccctcagcctccaatgccatattatagcaaaaatgagggaggtggttgctgctcagcttgcccaggcgagctatgtagcttccacatgaagcaacctccttccataatgttctaaattggctcaggactatgtacacaaccctaaatttatcacttctccccccatcttgtgtttttggctgatatccttctgaaacatcacgaaactttacggataacgtgacgaggagtgttaacatcttaaattggtcagcaaaagttacatgtcgacaacaattgcccagacataatagggtatacaaagggttctcggttccatcagataaaa

SEQ ID NO: 255431 - DNA, 230 bp, Glycine max
aaaggagaacaggtgagaggaggcaccatccgcaagacgaaaagcaacggaaggaaaagccccaccaccaagagagcgccctggataagaagctcagagaggaaccctcactggaggaagacaatgacagagaggggggggggggggcggaacacactcaccgcaccacgaacccacgaaagcacaccccaaacgccaccaccaaccagccacccgccaaggcccgcaca

SEQ ID NO: 255432 - DNA, 375 bp, Glycine max
atggttccagcttaaacgtgatgctctaacagcactttttgagaaattaccattcaatgcttcccacttaaagccgagtcaatggtggttcgtgccttcgacggcacccgccgagaggttatgtgagagatcgatctcccattacaaataggcccttacacctgtcaagtcaccttccaaataatggatattaaccccccctacagctgtctgttggggcgcccgtggatccactcaataggagttgttccctctacactccaccaaaagttgaaattcgtattggaagggcatctggtcatcgtatcatgcgatgaagacattttggtgagcttgccatcctctatgccttatgtggaagccgtagaggaatcg

SEQ ID NO: 255433 - DNA, 242 bp, Glycine max
ggggaccccccacagagaaacaaacggcacaaaacacaagcgcggcggaacaacgaaggaaaggacgaagcgcaaaaccacgcacccgggaaaaggcagagacagcgaacaaacgaccacgaacgaagaaaaacacagaaaaaaagagagagaaagaaaacaaccgaaacaccaagagcaacacccacaacgcaagcaagaacgaaaacaacacaaagaagcgaaccccacccggaccaaca

SEQ ID NO: 255434 - DNA, 362 bp, Glycine max
  unsure (1)..(362): unsure at all n locations
acaaattccttgggataaaggtagtgttgccatgttttcaaagcccgtactaaggcatacaactcctaatcataagttgaatagttaagggtaggaccacttagcttttcactaaaataagcaattggatggccttcttgcatcaacacagccccaatcccaacatttgaagcatcacactcaatttcaaaagatttttgaaagtttggcaacgcgagtatgggggcattanctagcttttgcttaagaacattgaaagcttcttcttgtttctctccccatttgaaaccaacatttttcttgagcacttcattgagaggtgctgccaatgggctaaaatcctttacaaatcgtctataaaa

SEQ ID NO: 255435 - DNA, 423 bp, Glycine max
  unsure (1)..(423): unsure at all n locations
tttgacatcatcaaaatcttcatgatttacattctccacctttttgatgatgacaaccacctgtaggttatgagcaacaacaaagaagaaatatctatttgcatatagactactcccccttggtattgcaatgattgcttatatgagacagctgaagatttcatatttttcatatataaacctattgtctcataaaaaatagataatgtttcttactattntatctnttatctttctctccccctttgtcaacatcaaaaacaaatcatgaatagagaggagaaagatgttaccacttgttgcaatgtatgagaatcaagtgataccaaaaggcattaaaacaatcattcaatattaatcaagcgacaacangtacaataacacatcaatcagacgcaatcatacacaatanatcatcaaata

SEQ ID NO: 255436 - DNA, 306 bp, Glycine max
atgacctatttctatcccattcttatgatatcctgaaggacaggatgaagcgccataaagggcttacagatgtcacttgcttgtgaaaaattctccaaaagaagaagacttaagcttataggataatgaaaccagattaatacttccaaagaacaaaatattttgtaaagacactttcggacaatatcaatatatttattcggctatattacaataaatcatctctactcacatatgtattaaattatgtcttttttttcatcggctctgatatacttcgtgttcaatacctcgccttcaaatgat

SEQ ID NO: 255437 - DNA, 407 bp, Glycine max
  unsure (1)..(407): unsure at all n locations
aacaattttatctgaaatacaatcaaaatcaaattattcttaaagtatagaaatcaaaatcaactttaatcgaaaagtggaatgaaaaacatattttatctctgtaatctttattgatggtgctaaatcaaattatgaaaatttaccttctttttcacggngcaacttggggcagaggagcacctgaagtaagccctatgagaagggttatccctagtgaccttctgaccatatttcctccattgatatccgtccatcacatactntaattataccaaaaaaaaaaacaaagtcaggattcccagttagtacttggagttaattaagcttcccaatatagacacaactattatagaagttactaggaaacaacaacatatcttaggaacttactaagctatttattg

SEQ ID NO: 255438 - DNA, 85 bp, Glycine max
caacagaattttaagccaaagcggacgaaagagaaacgcccgaaaccaaacccaggccgaacagcaacagacagcaccccaaaca

SEQ ID NO: 255439 - DNA, 344 bp, Glycine max
cacatattcatggaaatgactctaaagaaaaagacgaacgacgcaacgaggaatttcaagacaatggagttagaggaaataatgaacttcaagagaatggaaagccttaagagatcaccccctcgacaacattattggtgatatatcaaaaggggtagcaactagacattctcttaaagaattatgcaataatatggcttttgtatctatgattgaacctaaaaatataaaagaagccataatagatgataactggatcattgccatgcaacaagaactgaattaaattgaaagaaacaatgtgtggaaactagtagaaaaacctgaaaatatcctatcatacg

SEQ ID NO: 255440 - DNA, 322 bp, Glycine max
gcagctgacggactttcgaccaattatcatcatcacttcggacaggagggggtggaggggaggaaatactattaatactgcaatatctagacacagaaattgaaccatgacaaattctgtttacattttaaaacgctggctgtagtcatcctgccaggaaatataaaaaaataattatctattgtgtcacacaatgatggacaatataacatgtggtagttacaattcaattgaggttcatataatgtgtgccttatgagggaagcatacccggctacgacattaatcactacaatctattctaacttagcaacactagaac

SEQ ID NO: 255441 - DNA, 398 bp, Glycine max
  unsure (1)..(398): unsure at all n locations
ccacacgccacaaaaaaaattgaccttagattttggctagctatttcttttccttttactataacattaattagactaaccttgttctttctccttccctcttctttgccaaaatgtcttgttcaaaaattgaacactcacccatgttacttcattgttatttantagaaagtacgttgcttcattggtgttcttacctcacaactaatatgatntttttaatgaattattgaataagacttaatcgatatttaaaaattaatgacttaaatatacttttaatccttaatatatatctgaantttactnttgatccttaaaaaaaaattcatcccatctactccctggtatttgaaagtctgntgcatgatttaaaataaaacttttaaatattaggg

SEQ ID NO: 255442 - DNA, 445 bp, Glycine max
  unsure (1)..(445): unsure at all n locations
tgaggcatgcaagctntcctacaagtcctaattgacattctttactttattaactcactttagactcagatgtccactaaccccaaatttggctttctaaccctcaaaatctcacacttttccacctacaacactaccattctcacatttaactctaagttaactctccccatcctctctaccagttttctatctacattttaagcatacatatatctcaaagcatcattattaaaccctaaatcaacatgggtagttttgcttacatcaaacatgtcaagtttagcataatttcaacaatttccttcacaaacaactaccctaaagcaataacctagtagaactacccattatagctcccaaaaacccaacacccacagatttcaagtgagaagaagtccacccttacctgaaattaagggcccacgaagtagaggaggctcct

SEQ ID NO: 255443 - DNA, 406 bp, Glycine max
attacttttagacggcttaaatgaactttttaaagtctaaactcaatcctacgcgcacctttttttctctaaaagaactacgtaggtctgagttcctcatcacaattaaaggagacataggagcaagagccccacttttgttgaccccaacagatataaaatgttaaaaagggaaaataaaataaatataaagtcgtgattttgcacatttgattaaaggtcgtcgtcccttatgacggacacgtggggtgctaataccttccccatgtgtaaacaactcccgaacctttatttcttaaaattcgtacacctattatttatttttctaaagttcttctcgaagtaaacgtggtggagactctgcacgttttttcttccttataagacacactcgtgagcctcacgt

SEQ ID NO: 255444 - DNA, 184 bp, Glycine max
ggccggaacggagcaaacaacaagcctaaaaaacgcaacttaccgggccatggccgagaaagaactggataaagaggctgcaaaaacaaaacttacagagcaaggcccgaaacgacccgaataaacagctgaaaaaaaaaacactccgagcacggcccaaaaagacccaacaacaaactaaaaa

SEQ ID NO: 255445 - DNA, 371 bp, Glycine max
gcttctgttctgaatttacagcgttatgaatcactacgggatacaatccggacatccgagtaaaacgttattgtcgtttgttttgcacagagcgtctgttctgaatttcgagcgtctcgatatactacgggacacaatcagacattcgagtaaaaaagtagtttgtcgattcacttttgcttagagcttctgttatgaatgtcgagcatctcgatatactacgggactcaatcagacatcctagtataaaagtttttgtcttttgaatatgctcacagctctcgttttcaagaacgagcagtcttgatatattacgggcatcattcggacatccgtgtaaaaagttattgtcgtttgattttgctcagagc

SEQ ID NO: 255446 - DNA, 405 bp, Glycine max
  unsure (1)..(405): unsure at all n locations
gagcttcacgttgctcatagactccagaatgttgcaatttatgacagacacctcgttggcgatctgcagaagaacatagaccatacactctngcaacaggtgtagatttctgattcatggcaagctgaactaccaggctgaccaagacatcaagttttccttcaagctttttatttccagtagatgaagatgattccatggccaccttatgaactcctctaagaataatagcatcattccttgcattgaattgttagaagatggaagccatcttctcaatcaaattcctagcctcaataggggtcatatcaccaagagctccaccactggcagcatcaatcatactctcttccatgttgctaagcccctcatagaaatattgaagaatgagttgctcagaaatct

SEQ ID NO: 255447 - DNA, 398 bp, Glycine max
  unsure (1)..(398): unsure at all n locations
gtgtgactctaatgtgtatgttcttatctttgaaaagctgcattgtttgtgaaaatcaatctgatgaagcagtccataatattcagttcatatggttgaatttctctgtgaagcaaacaacatttttgagtgaccactgtagcttgtcacttgaggacaagtgaactattttttctttgcttgaggataagcaaaactgtaaatatggggaagtttgttagtcgtcctatacgactaacttttgtatagaanattttttccaaaacttgtatagttccccaatatatggttattttgtaaataaatcttgtttatggttaaagttgtctctagaatatttccatcggatttaatgatcaaatctgtacattttcaggtgacaaaaaggctgagtcatg

SEQ ID NO: 255448 - DNA, 403 bp, Glycine max
ataagcagctgcgcattggtcatgatatcaaaagataaacgtaatgtcatactctatgatgggacaattttagccctccgatgtataagatgataatgtgatcagcttttattttcctagatagcataaagcctcaatgatttatgtgatggttagtatttgttgtaaatatgcatcttttattgcttggtaagttcagctatgttatagcttctacccttctgaatgttggaaatatccaccttaattgttgtctctttgggggttgtcttaattataatgataaatgtcataattgaataaaataatgtgacgaatcaatctattcttcttaacttattatatgatgtgagccaaatccaatgtcttaaatacatcatttggaataataatgtattcttat

SEQ ID NO: 255449 - DNA, 355 bp, Glycine max
actaggtggcgggcgggcgaaggtgcacaacatagttttccacatatcacatactcacgcattaacccaccattctctgttgcccacctccaactgacctcaccgactcccacgtagcccatatcctcggatctctcaacaccgggtccccatcaatcctcccaagctctcccaacatcccagtaactgaacattccaacaacacaaactatcacagccaagaaaacagggcaaaggcagaaaactctgcccaaagcaccaacacagtttttctcacttagagaccccagcaacaattccttcgttccagctcgttaaccgtgggatccactcggaaatttaactggaaggctct

SEQ ID NO: 255450 - DNA, 429 bp, Glycine max
agcttatactattcaacaacgcattcactgttctcttttcatcaagcctatcaatgtgtccttcactagttcgtgttcgaattcagaacaattttctttctgggacggttcctgtgggtcttgggaagcttgggaagcttcaaaggttagagttggctaacaatattctttctggtggaattccacatgacatttcctcttccacatccctttcctttattgatctctcaagaaacaaactttattcttcgcttccttccactgtcctttccattccagacttgcaagctttcatggtctccaacaacaacttggaaggtgaaatcccagaccaatttcaggactgtccatcacttgcagttcttgatctctcattaaatcatctatcttggagcattccactagcattgcttcatgtcagaagttggt

SEQ ID NO: 255451 - DNA, 311 bp, Glycine max
cttttttgtgcgcagagatgtgagagcttattgtgttcttatattatataaaaaattcttagagtaatagcggtcatacatcacaagtagaattagtctctgatccaatagattaaaagacatttgtctcttacccaataaaaaaaatgcatcaagtaatcatactttagtttattgcctttttaaagattaataatggcccagattggagtggattgaaaagatgccctttagtggtgtaaatggggtgctcaagcactctttgaagagtcttctatacgagttgctacctactagctagtgtgcatcat

SEQ ID NO: 255452 - DNA, 409 bp, Glycine max
  unsure (1)..(409): unsure at all n locations
agcttgngggcctcttcattgattctggttcatcttttggactttatcctttgactctacttccaccatcatatatttcttcattctattgttcctagaaaaatagccatcttgtcgatggttccctaactttgataggaatcattgcaaccatgttgtatgtaaggtgtttgactactggcaagtgtaccaattgtcgccgtaagttacatatttataaaaggagatcatctccacatacacttgagttacttaattcattcggataaaagctatcagtttaatagttatgtacaaatttaattgaaatatcatgggcttgtctaactaaagaaagataactctaagtaacacaatagcgcaaataacataaattacaacaaatatggaatttattgcatcgataata

SEQ ID NO: 255453 - DNA, 465 bp, Glycine max
  unsure (1)..(465): unsure at all n locations
actcagcttgttctactatgggactgtgaaaactctaatgtcctatgttctaatggnataaaanttatgttcatcatggatttatgggatgtactgaaaaaatattttttggcattctttgatgaattacacataaatgggagactagaaaaagtggtcagtagttcttatattgttctgttacctgaaaaaagaaaacctagtgtctatgggggataatatatccctgatagggtgtttgtataaagtgttggcaaagatgttggctaatagtttaaaatgggttatggatgatgttatttccacaacccaatcaacttttatatcanggaggaaaatgttggatggggtactcattgctattgaattggttcatgaagctaatgggaagaagaataagttgttgtgtttacactggactttaaaaagcattgactcagtgactgggagttctagacttatgat

SEQ ID NO: 255454 - DNA, 398 bp, Glycine max
  unsure (1)..(398): unsure at all n locations
gagcttgtngacatgtagagattacgccatcttctttgcttcaagatctgncatactgacttttgagtctcgccgacggccgaaaatacccgagtggttatccgtataaactgtttgttgtctataagacgaaaagcctgatagcacgcagagactaacgtcgtcttctgcgcccttcgtcaatcgcggccgacaagcccgttgacacgtggagtattacgttatcttccgcgctcacaagatctgtcatactgacttttgagtcacgctgacgggcgaaaatacccgagtggttatccgtataaactttttgctgtctggaagacaaaaagcctgatataacgccgagactaacggtgtcttttgcggccttcgttaatgcggccgacatgcccgtt

SEQ ID NO: 255455 - DNA, 335 bp, Glycine max
aactactcattctcttatctgaagagccaatcgttctttcatcatcttttaacgcagattactcaagtatatggattttatgacgacagccttaaaaagtgagcttccaacactcattcattggttctatggggcaaaagtgaagaaactataattcctatggagcaaaagtgaaaaacatgagatgatcctatctagagaaagatctgtttgtgtaggatgattttgttgattcaacagaagctcgtttcgttaaacacggatgttcaattcttttattagcatcgccatgtgggagtcactaaaatgtccttttagaaagaagctgacagaaa

SEQ ID NO: 255456 - DNA, 365 bp, Glycine max
attacggacctatgaaactcagctttgcaattcccattctaaagagaagaccttaattcttgacagcttgaggctaaaaagacttgtgtgtggacaaaagttttattgataactctggctcggctcatgagtggtagttgagataaagtggattggtccttttgtgggactaatgtttttccttatggtacagttaagatcaaaagtgaatccatatataagagcttcaaggtcaatggacaccggctgaaaccattcctcacaaatccctccttagtggatgtcgtggtggaggagaccatcttacttcaccctacttttcttccgccatgacttagggagtatttattttctgtctccttctt

SEQ ID NO: 255457 - DNA, 377 bp, Glycine max
agcttcaggctgctcaattgctccaggtttctgcatggaagggcaaaggtctgtatggtggtcagcagaggagcacaaaccacaaacccttgcgataggtacagattttttattcaaggtcagctgggttaccaagttaaccaatgcatccagttttccttcaagcttcttagtttcagatgatgcagatgggtttgtagctacctcatgcactcctctaatgactatggcatctgatggtgggggaaactggcacatattttcttaaatctctcccagtactcatacagggctctctccactgagtgtctaatacctgagatatccttcctgatggctgtggtcctggaagcagggaaaattttttctaagaatac

SEQ ID NO: 255458 - DNA, 417 bp, Glycine max
  unsure (1)..(417): unsure at all n locations
tttcaaaaaatattctcaacagtcacatctttgtgtgtggatcttgaatggctatcaaaggcctatatatatgtgtcttgagacaccgaattgctaagagtttttcagaacaaaaaagtcttatcctcttatgaagcaaaatctttttatcctcttacaaattccttggccaaattacttgtgattcaataaggaattatttgagtgctcaaattgttcaatctatctctttcaagagagatttcttcttctcttcttcttcattctgaanagggattaagagaccgagggtctcttgttgtgaaagaattctaaacacaaaggaagggttgtccttgtgtgnttagaacttgtaaaaggaatntacaagatagtggaactctcaagcgggttgcttggngactggacgtatgcaca

SEQ ID NO: 255459 - DNA, 370 bp, Glycine max
  unsure (1)..(370): unsure at all n locations
agctngncatctttctgagagactcatacttctcttttgagattacttcaattattgtgcttcataaaacttgtctttctcaatacatttacacaaactcaccaataggcttaaactcggaaggtttatgatttatgtttagaaggtttttcataattaaaacacaaagaattttggactcaacaatggagtctttgctaagaaccagacatgagagctagttgagcttcctatgggaaagaggaaacctctattatcaaaaaaataaagggaaaagttcaaggctcgcctattagcaaaaaggcattcaaagaagaagaggattgactatgatgagattttctccccaatcgtaagacatacttttatc

SEQ ID NO: 255460 - DNA, 461 bp, Glycine max
  unsure (1)..(461): unsure at all n locations
tgtctcgaggtttccgtagagaacgaagctcaatctgattttcantgatttcttcgaggtaaccatgattataagcttgttccttggtagtttaagcttatctttgcatcttttctgactatggaaccatcattgtacgttttacgcttccttcgaaaaaacttagagaaaaagactttgtaaaagttatctttttatgaaatggatgttattttcgtgaccttcactgaactctggtcacattggcatgatcgaaatttcaaaatgatattccttttcgtaaaatccgaaacaaccctcatccctttcatgtagtgacatgagtatttgactcagagtattgttgttaactctatttctganatccatagtaatttccttcgttntggcgtaatagagactngcgttggaccgacaagcgtgaacaagagagagacctctaagtgacgctaagaggaacc

SEQ ID NO: 255461 - DNA, 425 bp, Glycine max
  unsure (1)..(425): unsure at all n locations
agctttgatctaacaggtatagatagactctattattttttttattcatcctcaactatacagtctcatacctgcacagcctttggacccctctgatttttttgtgattcatatggggtgttacatgtccatcaacttttgcttggttcatcctcaaaccacaccatactagaagaaaggtctaattngatatcatttgtaacatccctgattgtcgacttatcgacaactctcacactatgacaagtcacttaactccttgatggtcataatctccaccggtcaaaaccctctgtaggtagccctttacgtgagatcaacaatttgcttcacctactttcaagagcaataactatccccacaaactaacatgtggcttttcagtgtgctttgtccccactcacacgctntctggaaaacttcct

SEQ ID NO: 255462 - DNA, 416 bp, Glycine max
aaaattttggatgctccccttcctctcgaatggaagcctttaagcattgactaatatgatggagccatagatcctaatgaacacttggaagcgtacattatgcaattaaattatacactaacaacaatgacatattatgtagggtctttccaagttccttgaagggacccacactaacatggtggcatcaacttcctcctcagaggttgacttttttgacacacttgttgaatattttggtgcacaatatgccacatgccaacctcaccacacaacatcagtagcaccgatcaacttgcgataagccgataacaagtcattacatgaatttatgggccgattttcacaaattgcagtcagaattcaagatcttgaactcagagtagcccttcattccatgataacaacacccaagt

SEQ ID NO: 255463 - DNA, 354 bp, Glycine max
accaagaaacacagacacatgggttgtcctagtcgatcactcactcaattccccatattctccccctttgattatgagtctaagccttactcgaaactaaggtatctagttatacgaaggctggattaaatccttattgtctctccccctttggcatcaacaaagagccaaagggcataagaaataaaaaacatacatgaatgatgaatcatacaagataatagaaaataattaaataagacaatttaaccattcatcaaacgtagaaaggtaagatatatacaaaccatacataaatgacatacacaagaatagaaaacaagccaacaagataacttaaccattcatcaatct

SEQ ID NO: 255464 - DNA, 454 bp, Glycine max
  unsure (1)..(454): unsure at all n locations
atataagaaaaacgcattcaggccatcttttatattattctcccaaacgtcaaattctgccgctatatatacaacctttccatcactggcacgtggagtgaatctatctccatggggcaatactaaagatatattgtcattcattctacacaatcacgaaaccgcaaacaaggtcagatattaggaaataaaaaaacctacctcaaaaagcgcgaagacattgacattgtcaaaaaccgcgaagacacaatcaaaaaccaaaaacattgtcatctacaaaaacagagcatcataaacgagaataataaacgatcataaacctccctacgaagcgcgaagacaatgccgcagatgaaacccctcgaacatgtaaaaccccatatcaaaccaccaaaacaatgcagacgaatngaatgaaaccaccaaccttgacaaaagcgcgaaccctcaatca

SEQ ID NO: 255465 - DNA, 446 bp, Glycine max
  unsure (1)..(446): unsure at all n locations
catgcaagctcgaacnttaataaccnnaaaccnggattgttatttatacatttnaacgctaacaaatccatccctatgctnctagttaagcaaaaaatcctctgcccaattaattaaaatgtcacttttaggcgttaattcataataacatgactatatgctaataatatttctcaggatgaagcatacatttttattaataacatgattatataaaatttctttaaatcatttaactatgaaatctaattaaattaaaacaaaaatgaaatactaaatgattcactggcaatacaataataacacaataaattatattaatcaccccaaaagtcttataaaatattaccaaaccctcttttttttatccaatcgcacactaaatctccttaatttttttaaaaaaattaacaccaacacttgcttgtacattacacaaacctctg

SEQ ID NO: 255466 - DNA, 384 bp, Glycine max
cttagccggatgaaattcgtctttagtgatgagaatgaagacaataatgtggggatgttttgtgtcctagaattagaatttctaacttgtcgctatatgctcttctatagatgctctttaatgttgggtggacttacatttcttgcatatacgggcacggattcttatcttcgctttatataatgacatcattcttgcactgaatcatatgtgtgatcactcttggtgacaatcttttactatcggatatacatatacatcttttgccttgcaaaaaaaaaaaaaacaattgacttattttggaagtttacccgcataaatcgtctaataatcaaatataaatatttttggtggcaaagttgtaaagttgtaatatttatctca

SEQ ID NO: 255467 - DNA, 390 bp, Glycine max
  unsure (1)..(390): unsure at all n locations
actcccaccttatgaaaactatcccgggcaagacgatggtgaaggagatacccatcatggccccctgctccaccacaaagaaccatccccgcatgaactaccccagacaaacatagtcccgcatatacgggccacacccacacccgaaaaagaatctgtaccctatgcggaaaaataacgggaagattgaggcgcttgaagagagggtgagagcagtcgagggcctcgacaattacccattcacggattagcggatatatgacttgtgcccaacatcgccaaccctcccaagntcaaagaaccagactntgataagacaaagggacgaccatgccaaaggaacaacatacggatgaattgccggaagacgggggcgcataccgccgacga

SEQ ID NO: 255468 - DNA, 419 bp, Glycine max
  unsure (1)..(419): unsure at all n locations
agctntaaaacagctntaacgcagtngctttttatttttattcttcaattnctttaagaggttacatctatatgtaatcaccatccgttatagaaacaatgatgcataacatagaaattaataagtgaacctcaccatatttttttatcgtttcttacaaggtctagaggttagaaattcgcccgtgagtatggcttaattagcaacatatgttgttgaaaaaaatatggtaatagcaaacaattgggtaatagcaaaaaatgaggtgccaatgacattagccttctgggttgataagcgtctcttctcttaaagatccaactactgacactattttaactttgtaatttgctttgcgcattcccattattacatcttatgcacttccacctattacacctctaactgcattatagaaa

SEQ ID NO: 255469 - DNA, 388 bp, Glycine max
tacgcatgtgtactactaaggttctttatgtgcattctgacaatatatagaatcgtgaacgtaaactagggttatttgtaagagtttaacaacggctattcatcttatattaacagttaatcacacaatactcactctttgtaggtaagacttttaaagataattattataaatattaatatgtaatatatttatacggtaatttataattaaaaaattcataatcttaattctcattttgtaatttagatattatattttgcacttttaacaaaattcacaattttaaatatcgtcaacatacttctttaacgaacgtatgtgtttatttattattcacatgataataattttgtaatattatttagatactaacaaacttaattat

SEQ ID NO: 255470 - DNA, 458 bp, Glycine max
  unsure (1)..(458): unsure at all n locations
tccatcacttatcctttcatttctctcccaccagctatttatttttctttgccttccaccattcagccacattccttggagctgaaactactacctgagtaccttanatatgcctatttaaatgttgctcagaagctcctagtcatcatatccaacatcctttcacttgagcatgaggataagtcgttgcacgttttgagaggccacaaaatgggcattggatggacacttgttgaccttcttggaataaatccttccatatgcgtgcatcggatactctttgaggatgattctagacctataaggtagacacaaaggagattgtatcccaccattcttgatgtggtgaagaacgacgtgaggaagttactagttgtangggtcatttatccacattcagagaacattanggtttcacctgtccaagtggtccctaagaagtcgggaatcactgttat

SEQ ID NO: 255471 - DNA, 400 bp, Glycine max
  unsure (1)..(400): unsure at all n locations
agcttgtccacttattctctgactgctttttnttgcncttcncccatcattctcttcttctgtgataccgcgttggcttggggatagatagcgagcttgtgacagataatgtggggttgattcctgacatgtcagatagttgccaagcgaataggtccacgttcctgtttaggacatcaaatatgcgtttgtgctcatggctgtgttggatcaagaggcctcaaaataattaagaaggggggttgaattaattattcataaacctttactaattaaaaatttactctcctaaggctcttactatgttgttaagtgaataaagagtacaagagaaccttaaccaacagttcaaacggaaattaaaatgcacagtggaaattaaaagaggagggaagaagga

SEQ ID NO: 255472 - DNA, 388 bp, Glycine max
tcctctaaaccccatgccagaatgcagctttaacatctaactgctccaagtgaagaatctctgcaactacaatactcataataactctgatggtagttatctttacaactggagagaagatttcagtgaaatcaattccttggtgctgctgaaaccctatcaccacaagtcttgccttgtatattcttctactgttagattcttcctttagcttatagacacacctactctgtaacgtcttttttccttctacaatgtatgtagagaccacgtcttattcttctgaagggatgtcatctcatcttctattgctagctcctactcaatagagtcattcccctgcgtagcctcactgaaacattctggctcactagcatcagttaacaac

SEQ ID NO: 255473 - DNA, 360 bp, Glycine max
tttgggtatgaccaaggaactcctttgcaggtaagttccaaatgaaggccatgatagaatagatgacttgaatttcaactcttctcaataccatggagtatcaccatcagaactgaatcaaaaactatgtcaattgctgatagaacagcagaaaaaccagattgtggaattggaatcctaactaaacctggcttaatctaaactccaagaaaaggaagctgaactccaggcactaaagaactgtgttgcactcctttccgaactccctctatccacagtttcaggcatgattaaatgtttctattcatgatcccttctctttaagccaatgctgctttgttccttgaagctgcatcttca

SEQ ID NO: 255474 - DNA, 411 bp, Glycine max
ccaggtcgcttcacattggacaacataatcgaagtgttgtagtgaacacaataaacattgaaatccttctgatcaatggggtacgatggtaggaaccaacaatcactaacattggcatcaagaagctcccctaccccaatgtcaatatacaccaacctcttcctagtggaaacatccacaaacttaggcaaatagggaatattcctcttgtgaaactcaatcggtggttgttgttgtttctcactcacgagaggctccattaactcctatatgggttcggtgaaggtgacactgggacaattaacgggtaaaccatgttggtaaacaaagtagctgtttcaactcgattcttgaaaacaacaatgttatggtcgttgacagaaccaacatgcacaacattggagaccttaa

SEQ ID NO: 255475 - DNA, 417 bp, Glycine max
  unsure (1)..(417): unsure at all n locations
ccaaccnccgcggctgcaagcccncagaagcattctagagaattattttttcatgagctcctccctaaggcaaaatgagctcgccattacgaaactacgacaaactctctcatataagttctctaaaagatgagaggacacttacagattagctaatggttagctaatgaagaactcatctaagctcatggagaagctcatttcattgtgatcttactttttctcctagaagtgtttctagataagcttacccaaacaatggtggcttcaccatactgaaagtgctgcggttgtggtgttgtgatcttatgtcgagcatgtatctgaatggatgtgaattttgtaggtgaggatcatagtagaggagcctgaacacggagtcactgtcgttaaactcacacatagcgatgtccctga

SEQ ID NO: 255476 - DNA, 337 bp, Glycine max
gaataatgaatgaatgatcaaaaagaccatactcaagttcaaagatagatgatcaatatgctctatgaaccctttatttttattatcgcagtacaaagtatggtgatgaaaaaattcaagtaacaattaagaaagaaaccattgattagttaaaatcaattataagcatatcaccataaatttaacaatactcacctgaagtgataaactgacaatgattggatcatataattatactggctctaatatttctcccacaatttcatgtggcaacaatgataaaaataaataatactgaaatataggatagataataagttacgcaaacataaatatg

SEQ ID NO: 255477 - DNA, 314 bp, Glycine max
aaagatgagcataacaccatcaacaacggtaagcagggtaagaccgccaaaaacagcgtatccacggagcttctggatccaataaacggctcctctacgcactgaacggtcgctgaaacaggaacaatcatgactgccttattgcagatgaggagacctataatgaagcggccttgcatatgacaatttgttgccatattccacaatgagaagatgatattccgctactcttttaatcaaataggctttttcacacattccttgtacctgatacataacacttgcaggtaccacattttctggctaggactata

SEQ ID NO: 255478 - DNA, 352 bp, Glycine max
aaaatcaatgaatgacacgaaaaaataagcaatatacaatgaccaatcattaagaggtgtaaaaatttaaagagagaaataagcgcatgtctgcgtaagactcatacttaactctagttatccgatgcgatattccacgtggatacgtgaatccaaacatagtccaagagaataatattacttaattggaagagggaaaaatcatttgtataaagcaagaacatttaagacatctaaaagtggaaagaaattaatagatgaagtagcctaacacatcccaaatatgtgctaatctgcatatctataagacagcgtgaagagaccttttaaacacacaaagacttataacacc

SEQ ID NO: 255479 - DNA, 422 bp, Glycine max
  unsure (1)..(422): unsure at all n locations
gcttgcatgcctggtngaatgggtgtttcaatcttaccttgcctcagtaaatcttggcattcttgtctggctgcttgtacatatgaaggagtcatccctggatgggttgcttttgttggaatgatatcttcatttaatctgaatggtagatcaacaaagtattctttgtttttccataaaggatatggatggttgaaatcttcatgactgtttgcgcatagggaggaaatcttttgtttaaactctccaacttctggcggggcttctgctaaagagaaaagccttgtcatttctgaagaaggcttgaattctcttttgaatttgatcctaatagaatgtatttggagtttatcagcagcagtatagacattcatccctataaggaggtctctatcaagaaatttgcttccaatgactttggt

SEQ ID NO: 255480 - DNA, 237 bp, Glycine max
  unsure (1)..(237): unsure at all n locations
acaccttatcatacatcttacaaccttgaatctctttgaacttcttcttcttctttgcagcacaagctttgcaaaggtttctggttctctaaaccttgtagacttgtgctactcattctattcatctcttctccctgtgccaaanagaattcgccaggactaacacgctaacatctttttgtgctctcttctccttttccaaagaacaaggactaccgctgattctttgtcctcctt

SEQ ID NO: 255481 - DNA, 335 bp, Glycine max
caaatggaccgctctccattttaagcttctgcagaataggacatacttcatgaacatactggagtcccagatcagtgtcttcaccaaaggcaactgacagcgtcctaatctactttccatacgttccaatgtatattaatttcctatcagtccactaaccatactcatcatgcctaatgcgctttgtgatgtgataccgatggctccacgaacctcatccatgcggttctacgtctctgcgtctggcctatacccgcccattatacacaacccatactccacatagacccggcacgtgttcaacatggctaccactgcagcattcgtaattctct

SEQ ID NO: 255482 - DNA, 423 bp, Glycine max
  unsure (1)..(423): unsure at all n locations
agctnttgaatcctanaataaccatgatttgttgtcttcttaaccccattacatgcctagaaagtccttcagattcattatgtgtgttcatcgctgtatgatatgagatgaaatgcaaaggttgggacttgcgttagttggttatgatggaatgagcctaaacacttgagcttgagtgaaataatgactatgaggttttggttgaagatccttccttgatttttgccctccttactaacttatttcagctgggactctaatgcgtatgtccctatctttggaaagctacatgtttgagagaagcacatgattgaagcattctatgataattagttcatatggttcaatacctctgtgaagcaaacaccattttttgagtgaccactgtattttatcacttaaggacaagtgaactcttctttc

SEQ ID NO: 255483 - DNA, 456 bp, Glycine max
  unsure (1)..(456): unsure at all n locations
ggaaccttatttattcttcatgggatttgacagattctattatatactgtttgaagacagttattgcgaagcaaatttcagacatagagtattaaatgctgtctttaatgttgtatcaaattatggattaaacctgcttntgtctgaaacttcagacgcataaccataaggcataatctaatctcacataatacgtagtttttaagctttgtatttatttgaatttaatcaaaataattaaggatcctgattcaccctaagacactaaaatatcaatggtaaaggatcaatggaagctatctgaaattttcaatgtgctacaaccaagccagtcaaagaaaaaagaatgatagctccaagtctgacatcatgcgagatgcacttgcaatttatatgctaagtttgtattagaatatgtatccacatgcgaattattagtgtattctgtctattgga

SEQ ID NO: 255484 - DNA, 328 bp, Glycine max
gttatacttgctcgaattcaattaactcataggtcaaggatgtgcacgtttctttagttgtacacatcatttagcttatttggtataataggaaccaagctaggtgtgaaagtggcccttttcactatgagcacattgcccacaaatttatctcaaaagggatggattaagtgcaacattgatggtgcaacaaatagttgtcctggggccttgagctaacatgggaatttttcgcaattctaggggtgcttttttgggctgcacctcgcactctttggatattataattgcttatcatgctgagtggcaagttaatttgtaactattg

SEQ ID NO: 255485 - DNA, 288 bp, Glycine max
  unsure (1)..(288): unsure at all n locations
catctcctcggctaggaacctgtgtcatacttgctgcaataccattagctcataggacaaggatgtgcacgtttctttatttgtacacatcatttagcctatttggtataataggaaccaagctacgtgtgaaagtggcccttttcactatgagcacattgtccccaaagttatctcaaaagggatggattaattgcaacattgatggcgcaccaaatacttgtctgcggccttgagctatcaggggaatttntcggaattccaggggtgcttccttgaggtgtatct

SEQ ID NO: 255486 - DNA, 393 bp, Glycine max
tgccacccagctcgcacaggcgagcagggttgctttctttatttcttcaccttccggaggaaacctctggagggcccaagtgggcctgattacatattgcacccccatttttactaagtacacccccctgcctttgttttggtgaatcttttttcgtaaaagttcgaaacttacgaatttcgtaacgatacttgttttctatccgtaatgttacggaaccttgcggattacataatcatcccctttttgacttacggaatgttacggaacctcactaattgtgcaacgatgcttccttttgattatcggagcgtcacggaaacttacggattggcatcaataccttcttttgatttccggcgtgtcccggatacttacaaattgtctaatgat

SEQ ID NO: 255487 - DNA, 361 bp, Glycine max
  unsure (1)..(361): unsure at all n locations
ttaatctttttttttttgacccgaccactactcagcagggtggttaaatctaccgaaattgtaccattaatttgccttaactacgtataagatttgaatggtatggaacacccaagcgtttattgaagtcaattaaaattgggtggatcacttgatgggggaataaagaaaccaaactagctaggtagtgcctacaatttaatgaggatngccttattaatgtacatagatatttctagtttcgtatgaccatgtgcattgttcaaactagtttatgaaaaatcaaacatcactttccagattaactatttttcactaatggaagaaaaaaactattttaactttcgctactttaatttct

SEQ ID NO: 255488 - DNA, 378 bp, Glycine max
  unsure (1)..(378): unsure at all n locations
tctgagttcagagntgttatgaacctcagtcaactccatatcgtttatatcatagccgagaaaattggccatagcggcaatcatgcttgatttaccagtacctggagggccatagagaaggtagcctctcttccaagccctaccggttttatggtaaaaagattgcccattggcgaagtcctgaagatcctccatgatctgcttcttcttgtgagggtccatggccaatgtgtcaaacgtgcttgggtgcttgaaaggcacagattcccaagggtggccccgcgagtccagggagccacccctggaattggtgtagaggagccgatccttgatcttcctccgaatgtcgctggctttcttcataatgtaatccaagta

SEQ ID NO: 255489 - DNA, 294 bp, Glycine max
gagtcggtgctctcatctttgcggacaatcacttaatccttgacttcattttcttcgtctgatctccccatttcttggggtaatgctgtcaaagtcattcaaacaaataactgataaatcttagggcaccacttgtcttgcatttctatggtccaaattataaatcaccccaaatctcgcttcggccgatttaggctcatatttttcagccataatcctctcggctgaacctttagatccattttctcgccaaattgatagaaacaaaaccaaaacataagggaaatcactcat

SEQ ID NO: 255490 - DNA, 446 bp, Glycine max
  unsure (1)..(446): unsure at all n locations
atgagcttaattatttattttatagtatttaataaaaacaattggatagtctactaataaatggttaatgacataaaataatatatctaattgtgtgaaaaatttaattaacaaaaataaatattttcacttttataacttgaatcgataaaataaaaatcatgtgagaaaaccaattagatcatgtaattttagaagaaaaaaacacaataatttaacaaataattataaagttaatataattaaaaaaattaacattaataaacagtataataatgacaattgataagttaactattgtgtcatgtacgtgtaagaacataaaattaaatacaaagatnttatcatataacaaataanaaacataaaatttttctaattaaataataaaagtataaaaggagaattcacataacataatatagattaaataatataaaaaacta

SEQ ID NO: 255491 - DNA, 420 bp, Glycine max
  unsure (1)..(420): unsure at all n locations
agctngcatgaattacattatttccctttttaagcaaattcttcttgatatcatcagaatcttcatgatttacattctccccctttctcaagcaaattcttgttgacatcatcaagatcttcatgatttacacactttaatcgattacttagataacctaatcgattacttcattgaaataatcgataatcttatagatgtaattgattataggcagttataactattttctctataaataattagttggcgttcacatctaaacaatctagaaatcaagagagcattagagaatactcattacatctcgaaaattacttcttagcctcagaatgagcaagaatttgtgctttcattattgaacaagagaatagaagaacatagctttatacgaactcacaatttcttaatcttttgatt

SEQ ID NO: 255492 - DNA, 407 bp, Glycine max
  unsure (1)..(407): unsure at all n locations
aacactgtctctagaacaattccattggatttaatgatgaaatctgtgcattttcaggtgaaaaagaggctaagttttgaattgcaaaaagtagcagttgggctaagcgcatatccatcgctaagtgcagcttcagcacacttagcgcaaaggagaatctggcagagcatcaacatcaaagttgtgcgctaagcacaacaagtgccttcagccacgctaagcacgagactggcgctaagcccaatttcacttatctgtgctaagcgcaaaggtggcgctaagcacatcatcgcgaattcagggcctatttaaagcttgtcttgtgcataattanggtacaacttttacaacattctacggacttganagagaacattggcacatcactcacaatgcctattatggga

SEQ ID NO: 255493 - DNA, 436 bp, Glycine max
  unsure (1)..(436): unsure at all n locations
gcttttttacatgctttataagctaagatcgaattatataattttaggcacagttaatttgaactaacaattngaaatataaactctatatttcatcaattaggctcaaattagaccagtcacatacttaaatgggtgaggcaaaaaggcttaaccatttagagactttgagtaaatattcaatttcattcttataaaaaattatttaactcgatgcgttttatttgttaaaaaaagaagttactaaatagtttctcatgattataaatgtagaacattttaatcatctctatttattttagttaacatttttagagatcaatttgaattactaataattcgtttacagactaaatacacattcattttttgcgcctaaagatgcactaaanaatataacgaaaataataaaaggactataatattttatgtatgt

SEQ ID NO: 255494 - DNA, 419 bp, Glycine max
  unsure (1)..(419): unsure at all n locations
gggaattggatctttatatgtccttctgtgcagatggttgtctattcgtttgcaactgtacattactggagcctgtaaaatattgccacaaaaattaccctctattgtaacagacagtaaaaattttgtatacaatgatgtgcacagtgaactcaaatatgacatgtcctctgactaaaagaagagaaaatattcttgatgtccgaaaaagcaccaacataggtttcaaacgaaaaatacattaaagtggtcttatccaacacatanaactagagatcaaataaacaaacataatacatatatcatcagaatcagataagcacatttctagatcttgtcttgcaacagttaaaagaattaaattccaattgcatanaccataccaataagcccaggacaagtcagatactgatggagag

SEQ ID NO: 255495 - DNA, 440 bp, Glycine max
  unsure (1)..(440): unsure at all n locations
agcttgtaggattatggggtacccatcacatgtggttctatgtggcggncgggcgatggtgcacaacaagttttccacatccacaatgcgcgcataaacccaccatcccctgttgcctacctccaactgagctcacgtactcccacgtagcccatatcctcgtttctctcaacaccgggtccccatcaatcctcccaagcttccccaacatcaaagtaatacaacattcaaacagcacaaactatcacagccaagaaaacagagcaaaggcagaaaactctgccaaaacaccaaccaaaatcacagcttttctcacttaaagaccccagtaacaattccttcgttccaattcgttaaccgttggatcgactccaaatttttactggaagtctctagtacataagcctacattttgaccgttgggatctactagcaaacat

SEQ ID NO: 255496 - DNA, 409 bp, Glycine max
  unsure (1)..(409): unsure at all n locations
acatgaaccgatacgcaattcatggggcttcgaaatgattgagaatggagaatggcacttagcaatcactacgcatagctctcaaaatgtgaaggtgggaggacaccatgaaacgaaatacgcaattcatggggcttccgaatananggtttgagaatggagaaattgcactaagcaattactacgcatagctccatactcgaaggtggaggacacatgaatgaaaatgcaattcattgggctctcgaaagattcagaatggagaatgcaatcactacgcatggctcgaaactcgaggtggagatacatgaatgaaaatgcaattatggtgctccgaaaagatgagaatggagaattcactaagcaatcactacgcatatctccanactttgaggtggaggacacatga

SEQ ID NO: 255497 - DNA, 413 bp, Glycine max
gcttctgcatgtctagagagttctagatagataattgtcctgctcaagaaagctcgagagaatttgttgtgtgaagatttgcagagaccacagcttgagatgagtttgtgagtgattgtaaggtcttagaggcggaggagacatccccactacttctatttctgcaatctttcatctttctcttctctttttttggaaaggaagcttcccagttatggaaagctaaatcctctgttggatcttccttgtaggtacttgatgcaaatatctttttatctatctaatgatgctttgtgtgttctctgagctatcagtatttcactctaggatgcttttaccttgatcacatagatgcatgctttgttagggacattcagcagtggaaactggcttgatcttagactcgataggac

SEQ ID NO: 255498 - DNA, 396 bp, Glycine max
  unsure (1)..(396): unsure at all n locations
gtttctaaaaagatctcaagaagttttctcaagaaagcttctcaaggaagctacctagtctataaatagaagcatgtgcaacacttgttgtaactttgatgaatgagagtcttgtgagacacaactcanagttcaacttctctcccttttttcttccttcaatttcgtgctcccccctctctctttcttttcctctattgaagcatcctctccaagcttcttatccaaggctcatcttggtggtgaagctccttcttccatggcttattccctagtggttggcacctcctctcacctcttctcctttgtcttctactgcatctccatggtggaaaatcaccattaaaggacctcatttgagctcanagatccagccttcatagaatccccacaatc

SEQ ID NO: 255499 - DNA, 441 bp, Glycine max
  unsure (1)..(441): unsure at all n locations
atgcaagctntgagccaattctaacgataataactttttacttttatttccgactgagacctggaatatatcgacacgctcgaaattgaatgttgaagctctaagccagatcaaacaacaataaccttttactcggatgattgattgagtcccgttatataacgagacgctcgaaattgaatgttgaagctctgagccaattcaaacgacaatgacttttcactcagatgattgagtgagtcccgtaatatatcgagacgctcgaaattgaatgttgaacctacgagccaattcaaacgacaataactttntacttgggtgtctgattgagtcacgtaatatatcgagacgctcgaaattgaatgttgaagctctgagcctattcaaacaacaataacgttttactctgatgtccgattcagtgacgtaatatatcgggac

SEQ ID NO: 255500 - DNA, 188 bp, Glycine max
ataatgctcaagtcacattacttcacgtctgattatacgactatcaactcagaaaatttgcgttaaggtaagtaacataattcagcctcattatctgataataacatcaacagtatgcgtggtggtaagtacatattcacctcgattagcactacactcataaattgcttaatgtaagtcactattac

SEQ ID NO: 255501 - DNA, 338 bp, Glycine max
gggtgttgacataggtcctgtaaaaaaataaataaaaatttaaatcagttaacacaaactatgtagaacaacatataaacatgaaactgttaatatccacaaatgtaaaatgtaatatacttgatttcatatattaaacattacttgggtatacgacagttacataggtgtattctcccaaaaaccttcatgatgatcattacgagttgcatgtacatcatcctcctcattttcagcatttatggaaggcatctgtggggagaagatgggcatctcgttaacatcaagtgttgaagcatcaatatcgtaagtgataccacctgctttttcctgtagaa

SEQ ID NO: 255502 - DNA, 406 bp, Glycine max
  unsure (1)..(406): unsure at all n locations
ttgttggcggtcagtagaggagcacaaaccacaaaccaatgcgatatgtacagatttctgattcaaggccagctgggttaccaagataaccaatgcatccangttgccttcaagcttcttagattcagatgatgcagatgggtttgtagctacctcatgcactcctttaatgactatggcatcatttctagcgctaaactgctgggagttggaggccatcttctcaattaaatttctggcttcagcaggagtcatgtctccaagggctccaccactggcagcatctatcatacttctctccatattactgagtccttcataaaaatattggagaagaagctgttctgaaatctgatggtgagggcaactggcactatagttcttaaatcgctcccagtactcatac

SEQ ID NO: 255503 - DNA, 404 bp, Glycine max
  unsure (1)..(404): unsure at all n locations
aagaagatatcgcgagctctctgggtttggttccaccctgctctactgattatgcgccgggaaattgagctacggtggaacgccccgacctttacgcatcatgcagagcgttcacctttacggttctaacagctctatatatgggcctccgcaatagagccttcatgttgataaggctgagcgtcttaagtttttgaaancataactacagggatctttctgcgtctgttcctggtatgcacccaaactcatacatctgcatgaatacttctatctctagaactgccgagtcgatgacgagtgccccgtacgactgatacctgtgacccgccctgaactgacgcccgagatgatgtacggcgatgaagaatgacgacgtggacttcttgaacagaataatgtcg

SEQ ID NO: 255504 - DNA, 430 bp, Glycine max
  unsure (1)..(430): unsure at all n locations
agcttgaactacccgagcactcacgcatttatctattttttcattgttcccctctaaagccctgtattggaccactggacacggcgcatattgagaaactgtcaccaggggcggttgataatcagccagttcccatacccttggctattctgggccacaagactctctcgactaaccacgggccaaagcagctggtcttagtgcagtggcagggacttcaccctgactaaacgtcgngggaagactggtcacgccttcaggagcttcatcaccttgaggacaaggtgttgtttgtagcacgcgggaatgttacaagtagcagctatgaaccgcatgcaaccagggccaatagtgataacaacaaggagttagtatcaggaaggcccaaaagaagaagcaccactcctagttatctgaaagattacctgct

SEQ ID NO: 255505 - DNA, 451 bp, Glycine max
  unsure (1)..(451): unsure at all n locations
cttttgcctttgagtcatcatgttttttttttttagctccattcttcatcctagacttgattcttcttcattctcttgttctaacttccctaacaacttataactatcattttgctttactcatgaaggaaaacattgaaaaactcaacattcttcgttctccttcaatatttcttgagctcatcaagaggtaaggggggtcttgaacatgctattgctttgaaatttttgagcatattgtcatgtcttgaatctatgcgttgagctattntccttgatgttgatgccaaaaatgagttctttgcatattaaaatataaagttagccttaaatctcacttaaatcacagtttcctagcaaaagtgcatacaaaactagtttaaggacttttagcaaaatgaaaaatctatcacgaatttggattgagttacagcagtatgaactatcttta

SEQ ID NO: 255506 - DNA, 413 bp, Glycine max
  unsure (1)..(413): unsure at all n locations
aaagnctcacgatggctctttctcatgaaacaattgttagccgtggctatacgagacatcttgccaaacaaagtcaggttaacgataactcgcatgtgctttttcttccatgctatatgtagcaaagtcattgatccagtcatgtttgatgagttggaaaatgaggccgcaattatactgtgtcaattggagatgtattttccccctgctttctatgacatcatgattcacttgattgtgcatctggtcaaagaaatcaaatgttgtggtctgtttatctacggtggatgtacccggttgagcgatacataaagatcttaaaagggtatacaaagaatctatatcgtccagaagcatctattggtgagaggtacattgcagaagaagccattgaattttgttcagaatactta

SEQ ID NO: 255507 - DNA, 421 bp, Glycine max
  unsure (1)..(421): unsure at all n locations
actcagctgtcctgtntatgtaatgatctttaacatgatcatcctttccaataattntcttcctgggtggatttcaaatttcagttatttgttatcacccatagtttgaagaaaccaaggaacacccagatgacgcaaaacattgattattataaaaattgcaagagggaaactataaaaccctaaacccgaggaaaaacagggtaaaaattgaaactttgcagaatttggggggcaaaaagtatcgagtttggggaaggcggtggagggataccttttattggtaattggagggcatttcagaaggtcatcttctacctcgaaatccaaagggtcgttcgtatccatcacagagagttcagagttagtattcgagactattagtttgcacataatgtacttatcgcacgaccgtcggagt

SEQ ID NO: 255508 - DNA, 425 bp, Glycine max
  unsure (1)..(425): unsure at all n locations
agcttgaagaggaactcgagaaaactcaatcattnttggagcatggagtaaagagattggatttgaagtggctaaatttgaatcaaatattagaataggttattatgtgtaattttgtatttggacctttgtaaaccttattacttgttcggcctcttttggtgtgtttgagtctttcatgagaggattagtataaataagtctatctttgactttgagaggagtaagactcattttattgaaagaattatgaactttgtgtgtgagaacctctcttggttcttgtgagcacttctttgattcttatcttgagatgctaattcaagtgactaatcctcctttaaacgcatcaattcatcatgaattgtggtgttggtcttcatccctaatgtttccgtccttttgaattttatcttcacctttga

SEQ ID NO: 255509 - DNA, 225 bp, Glycine max
  unsure (1)..(225): unsure at all n locations
tttttattcttatggatcaaaaaatatttttttccctttctattggtataagcttttggtntggtttaatctctaagtaaaatttttttttctacccgtccttataaattattaaatttaatataaagttttacactaaaagaatntcattttagtccatattatttaagaaatatatattggagtttgttttaatgtaagttagtcatgtgatcaaaatgaaaa

SEQ ID NO: 255510 - DNA, 427 bp, Glycine max
  unsure (1)..(427): unsure at all n locations
agctntgacgcaacatttggagatgttaattgttcaacgagatgatgcgctccatgagaggttggatcaaatggagaatatagatcattatgaagaagaaaggaggagaagagggaataatggtgttcctagacaaaaccgaattgatggtattaaactcaacattcctccctttaaaggaaagaatgatccagaggcctacttggagtgagagatgaaaatagagcatgttttctcatgcaacaactatgaggaggaccaaaaggtgaagcttgccgccatgaagttttccaactatgctctattggatcaagtggcctcgaaataattaaaaaggcgggggggtggaattaattattaatgtaccttgactaattaagacttatcctttctaatgtcactagatttaaataggctctactactaa

SEQ ID NO: 255511 - DNA, 467 bp, Glycine max
  unsure (1)..(467): unsure at all n locations
tcttgagaagatcatggccccatgaccattatcattgttctttatcgngaacatattntatgctttgttatttttaaatataatttgtaattgagcattatagactctaattgagggttcttaattattgatgcattgacggcatagagcaagagcataggattcctcctccttctctctttattccagcttgatgttctttcttttttgttttagtttccatggctatgtgccataagtcatctttgttatggaattaaggcattgcactttacatttgtttaattaatctaaatagtcgagggtttcttcaattattttcttttaattcttctcttattgctttttatatatgcttgagacttgatcacttgttgcatgatgttagacacttacgaatgaattgagaagtaaacttagtatgttggaaccataagaagagaacttatgtttaattcatgatagta

SEQ ID NO: 255512 - DNA, 443 bp, Glycine max
  unsure (1)..(443): unsure at all n locations
agcttgcatgcangatggtagctgaaaatttcaagaatatataattcttatagcaaaccatgggtgctaaaaagatttaaaagattaaaatttctcagcatgcaacgtaccaagaagaccaattgcatgagcccataaaactgtcaggagaccagcagaaactaaccatagaaagaaacttgctgcagaaaaatggggaaagaatcactggaatcaaaaaatattggactggtagcaaggattgacagaacatcccacattattaatgattaaaagaatccctgtttcaaagactttatttaccagaagaaaatatcaagacaaatacccaacgcggccggccacatatataaattgctctcttggatgatggacgtccacgaataacaggcctggaattaaataattgacaagcatgcataaacttccaaaagtcaaaagag

SEQ ID NO: 255513 - DNA, 475 bp, Glycine max
  unsure (1)..(475): unsure at all n locations
tcttccacgaactctgagaataatacttttaatgagattattatttagtgtagtaaacacgttctaaaagagttcacgaatagtggtgttcccaggcaacgtggtaaccaaaaaaattcaactatggtatccgcaaaattaaattaaaagtaatatataatacttataaataaccaaaaattattcacagaatgaaataacattctagtacataaacaccaacacttcattgcattcaattcttaaacgaacaacaaatatcacaacacaaccactgattcccaaaatcactagactcaactctttagttcccagaactggtgtggatatcaggttcttcaaaaggtctatgagcactcatatccatgcaatgacgtctcactgtcttccccatcgtaaatggagggatccaaaatctgttccctatcctagatggaggtatctcaagaacccaatatgaatncacaagattata

SEQ ID NO: 255514 - DNA, 441 bp, Glycine max
  unsure (1)..(441): unsure at all n locations
agcttttatantcaataaaaggaagcatgatttactcttatgaatctaagnctcggttggaatgtaaaaaggcatgaatattaagacatgtttgagaggtttttattaaaatttaaatttggctgccccaagaggaataccttgcacctaggtagcatggaaaaatacctttcaacggtatgtatatatgtgaatatatgtagcacggaaatgccttgcaaagtgtgtgaatatatggcataaaaataccttgcaaagtgtgaatgaatagcaaataatgcatttcaaaaatctgtatgtgtaggataggtagcgtaaaaatgcctttcaaaacatgtatatttgtggataggtagcataaggagcctttcaaaataaaatgtacccatgtcaaaaatggtacgagaatgcttcccaaatgaatatatgatgtggaattac

SEQ ID NO: 255515 - DNA, 467 bp, Glycine max
  unsure (1)..(467): unsure at all n locations
tctagctgccgctctctaggttctatctgggcctgctttatttatttgcacccaactatgtatccctaggaggggatatgagatgaatgcagactggctgcctctgaagattttgaggaagaatctaactactttggcccagacctggagtggtctatctttntctaacttagccccgacatctcacaacttatatattactttggatagggctaagttaatctacgggcttgtaatgcaaatggatatgaacttggggtccctcaactcaggtcaaatctctcttatcgcacaacatgactcctcgaggctaggttttccagccttgattattgccttgtgcaaggcccgaggagtcacatctgattctctgatctttgaatctcagagcccagctattaatttggcttatattaaaaagaattgctggaacctagatgaccctttagtcacttttcggggaaccc

SEQ ID NO: 255516 - DNA, 306 bp, Glycine max
agatgccatcatcactttgatttttttaataaggcatcagaatgacattctggatatgggtgaaccaactctgtttacaaaaggttataagtcaatgtaattgaagtaacgtctgcaaatggggaaaagatgatgactacatactgttctctactgcaacatataggatgtgatgtcttgtacttcagtttacctgaaaaagtatggatatgtaaactaattgatcacccctatctggtaaaatccatcttaactatacatattgatacatctgctttatggtgatgtattgattttcttaaaata

SEQ ID NO: 255517 - DNA, 388 bp, Glycine max
  unsure (1)..(388): unsure at all n locations
ataccccctgttgacgtgcttaagccatatttcttaagtcgttctcgcttaactaaaaaaaaataaatttccacccgaacgtntggaaattggtattatcccattaacttctgattaaaataaattccgaccgttcggtcgtgccgtaaccacgttggaaatcaaaaagaggtaaaaaataatataaataatcaaaaaacatcttttagtaaaataaagcggaaaatcaatcggacgttttctctttgggatttctcattcttaatcgaattgattaataactaaggtgaaactaacgctaatatcaactcgcctagtcaagctcgtccacaaaaataggctttntgaagttcgtcaattcaatttctcactaagtaaaatggatcat

SEQ ID NO: 255518 - DNA, 409 bp, Glycine max
tagagaccaacaactgctatttgatgtggaaaccattaggccctaggtggaggaaaagactaaacgaaacgctcctgggtcatgcgtggaatagaactttgagaaagaaaaatgtccgagcttagacctaacacactaaagccattaattgcaagtattattcaattgacaccactcgaaggaacaacatactgttaggatgcaaaaaaggcaatgctggtggctggctctaactgggtccacttggaagctcaggaacaacatagcgttctctaatgcaacccttaatgctaacaaactatctgaagatgcaatattcactctatggacgcgggtcaggcactttgagaaggatttcactatccatcttaatcaatgggcaagcaacaatacacacggcttttgcatc

SEQ ID NO: 255519 - DNA, 373 bp, Glycine max
atagataagacaaaaacatccaatttttcaatcataggaacctcttaactagaatggaataaacaagtgaataaggacgtaaccaagtttttgagtgcggatccaataacatgattctgcatgagattatggttgtgtttcccccctagtattgcccttgggatggacaagtatttttgggcccttatgagtgatgggagattctatacaaagtctacttatgatcttttagcttgtcctaatgtccagagtgacccctctttgaggaattgtctgtggaaaatccctggtagacctacaactaagggatttgctaagaataagtattgccatattcgaggaatggctgagcataatgattggcccttgtgtg

SEQ ID NO: 255520 - DNA, 423 bp, Glycine max
  unsure (1)..(423): unsure at all n locations
tcaaaaaatagtggtgaacctgctgtgtatgatgtttctccctccattgcgaatctctcaactcatagatccctctaagataagagctctagataccacattgttggtttttttaataagagtaggccgaaatattaaacaataaaagggagcataaagaaagaaattgagactgcaaaggcttactttattctgatatgaagacacgtaattaaaagcatggaaaagataataactgctaacagaaagataacattcctgacagaaagataacaccactaacatatcatgcctagagaataggatcanaactggcttatcctatcagtcaacatgacttctagtttttcccttaaaatagcatagaaatctcatctactataatttggtatgcagttccaacagtcaaatcttaacagaaat

SEQ ID NO: 255521 - DNA, 402 bp, Glycine max
agcagctcctcacgcaatccccttacctttatcttcacaccttcgacactcactcaagtcttcaccaaatcacgtcccgtaaagcccaaccttcctcttttacactcctctttcacttccaccgatcaaaatccagaaaaactccatcaaatggcagagccatcaaagaagagaaagggatcatcctccaccgctaccgctgctgcccatcgccgccacgggccatccggagcacccacaacacctattcctccttctttgtcatctacaagatcatcaacactggtttcatccgatgatcagtgtctacggaacctttctcagtttttttctagaataatcttagaccctaagtacctagacgtagagttctttaatgaagaaacgtgtgagtgctatcaa

SEQ ID NO: 255522 - DNA, 350 bp, Glycine max
caaattaatatgctggtttgacaaagagaacactgggcaaatataagggtgagattaaggataaacccatgttggactgccattcctatactgccaagttttccacacaacccaacaatgtcattactcatgtaataacaaacctacttcttacctcaccacccagttatccacaaaggccattcctaaatcaaccactaagcatgtctaccgcactctcaatgactaagaccacctttagcacaatccaaaagatactccaaccatgaaatgaattttgcttcgataagcctgtatgaatcaccccatattcctgtgtcatatgctaacttgctcccatatctacttga

SEQ ID NO: 255523 - DNA, 193 bp, Glycine max
gcccacacactcaaaccaagaaacaggcacccgccgaaaaaacaggacaacggaaagcccagaaaacccagaaacgcaagaaaacccccggaagcaagcaaccacacacctcaaaacaagcaccccaaggaagcgcccgaaaaaccacgagcagagcgagcaccccccggaagcgacgacccaggagaaacaa

SEQ ID NO: 255524 - DNA, 406 bp, Glycine max
tcttatccaaggctcatcttggtggtgaagctccttcttttatttttattccctagaggatggggccttctctcacctcttctcctttgtcttccgctgcttctccatggtggaaaatcaccgttaaaggacctcattgaagctcaaagaatcagcctccatagaatccccacaagcaagcttccatcagaacttctactggggcaacgccgtattccttggtttatagattggaagcggtactcccatttgaagtagagatcccttcctagaggatactggcagaatcgggcttagaagaatcagagtgggctcaagcacgctatgaccaactcaaccttattgaaggtaagcgcttgacggccatgagtcatgggcgcttgtatcaacaaagaatgaagaatgc

SEQ ID NO: 255525 - DNA, 325 bp, Glycine max
aactgataagcactaacgtgtttatactaaaaaggcaagtctgccttggaaggattacgcataaagcttccctatccagcttattatcattaggcctttgtttccaatgctccattcctctttttgtgcaacaaaaattgatgtcgcctactaccataggcatgtataattgtagatatctttcgtatctgttgaaaatttgaaatctctctcatcaaacaactacatctccgtgtaagacaggagatgtcacataatgtgcccggaccagctttattacagtcctgtgtggactactactatactcttttcagattataatata

SEQ ID NO: 255526 - DNA, 414 bp, Glycine max
aaaacgacatagcgaagagaatgactatggtgggtatgtggtgcattcaaacaattccttctcatagacctaccataagttgagtcattgacatgttggaaggtagtgtggattccttggaaatgccaccaaaaccatttctgtcttctcctccaagatcatcaacagaattttccactgcaatatccaaatcacttgacggtgtctaatgctgctgctgctgctgttctatcaaacatagtataccgcacaactttcggtattggtgatcaaagttagaggttatatgggtctgtccttcatcattccatatatattaatatgtaagcgcttatttatttggagaagggtgatggtgctcatgcatgggatacgcaaaataatgcagccatgccatagtttgactattcatat

SEQ ID NO: 255527 - DNA, 346 bp, Glycine max
gcttgcttgaggagctcctatataggctttatactttgagcttcaatggaggccttcaaggggaattttccaccatagagatgccgcgccagaaaaaggagaagaggagaggggaggcaccctccactaaggaataagccatggaagaaggagcttcaccatcaagaatgtgccttgcataaaaagcttaaagagggtgcttctatggaggaaaagaaagagagaaggggggagcacgaaattgtaggaataaaagagggagagaagtggaactttgaagtgtgtctcataagactttcattcatcaaagttcaacaagggttacacatgcttctatatatagact

SEQ ID NO: 255528 - DNA, 473 bp, Glycine max
  unsure (1)..(473): unsure at all n locations
tgcggactataccttcgatcgaacacagccgtgtttcttgtttgtccggattcaggcaagctgcagcaccggctccgcttccctaactgtactggaggcggttgcggtggctttatcctctatggttttctggagttttaacatgacctccgagatggaagccatttgatcttttaaggccgatagatcgaccttcatctattcctgcatgccctcttcattatccattttttggatcgagtgttataggggtgccttggtgttttcttagttatgatgaaattcctaaagaaataaacaacggtgagtatgccaccaaaacatgagtatgcaaatggatgatcggagcacttggatccaccccaagattattagataacgtaatgagtccagaacttctcattntataaaaagaacaaagctttcatctagccaagaatatacaaagggtgtacaaaagaacctaacgattc

SEQ ID NO: 255529 - DNA, 340 bp, Glycine max
agatgatccaataacctaaatgaatgatggaagaacaaccaaaactcatcgaagaactcacatcttggcaaaacaaacctttttttaggtaagtctctctagagaaggcacaaggatctcgtatagagcaacaatgactcgtcctttgatctgaacttccatctttctatggatttgtcgataatggagaaaacaggtgaagtgttcggggaataagagatgaatttgttcaacttgtctttcacaccttccagcaatggagtttgagtgccacaacgactattgcaaccttcccgaatggagttgtatgacagttcaacaaatgttggggatcatttat

SEQ ID NO: 255530 - DNA, 464 bp, Glycine max
  unsure (1)..(464): unsure at all n locations
cagcgtggcaaccaacaacatcagtccctcacttcacttttcctttgttataccacgcccggtaagagagaggtggttgtgtgaacttgaccccatggctacatttgggaggaggtattcaataatgttgtattgtggctccattttacctttatattgtttaaatttttgttgaagagaaaaagggtttgtgagaaaaatcatatttgctgganaaggcttgtgaaactagatgaatgtgcttctttcttcttgcttttgctttgaattttctttggtatagatcctactacaaaggagaatctgctgaaattttatcaaaattcttatacaagtcttgagtgtaagatcttgccacagtgatggtgagtaggatagaattttgggttctcaagacaagtctcaatgtgttgaacttttcttcaaatctttttgtagaattattatattaaactggtctcaaa

SEQ ID NO: 255531 - DNA, 351 bp, Glycine max
tctagactctcttttgttaattatgaacgccattaattcttagtaatttcttattatctttgagaatttatatgtatatagtatacattatataaactataaaaattccaaaatagcagctgacccgctatatgcaatctcgctattgtgttttttgagccagcggctacgctttgctatcagagatttaaaacattggttctatgtagtatcatgatttcctaatgccatcactttattttattttgttttcctctgcttcagggagcttctgcagttccaagagaactgtcagggcaaaagactcatcttcacctgttgtgctggtggactggatatcttgccttggga

SEQ ID NO: 255532 - DNA, 346 bp, Glycine max
tatgtattagtgaaactccctcaacctgaggaagaatcttcaatatgatatttctcagaatttatagagaagaaatatcagaatgataatggagtggagcaatgctccttacaaggtaaagcataatattaacttaaaatgacagagcactgcttactaagagaatcagcttctctgatcagccaaggccatcatgatgaaccttttgaagaaaattccctccccccatttgggttacgtgtacccccttcataatatcattctccctctcattccatgattcccatatcctcttcccactcccgcctcgccacgtgtcaagtctgatattatcctctttctctct

SEQ ID NO: 255533 - DNA, 430 bp, Glycine max
  unsure (1)..(430): unsure at all n locations
agcttcagccacagatccctcattaagactttgctttgatcaaacaacattattgtaacaacataactgaaaccaaaacttaatccgcagatccctcttgtaagactaagtttcgatcctgcatcaatcaagttctaaggcaacagtacatttcccaatgctacagtcacctaactatgcccacaaatggatgatcaaaccaaaaacatacaaacattaagcattaaaggaagcattgaacacagaaaacacaatcaattagatattaaatatttacatcggttgttcattagaaatccccaactagggtgtttagccagccattacaaagaaaccctaacaataaatgagattaanagtagagaatgatagttccttacacaagaagggggattcctcctcctcttctcagcatctcacactcactctt

SEQ ID NO: 255534 - DNA, 467 bp, Glycine max
  unsure (1)..(467): unsure at all n locations
tctttttcttcatattaaatatcacttaatttttgtttattctcgatatcgaaaatggatctgtataactacatagcatatgcaaggatagaatctacgttcaatcactactacaacaatccgaggaaggaaacaaatggtgattgagctatcaattggcttaggagattttgcaacaaaagtgcactctcgcaagagatgaccaatgatggggacacatgacaaccaatcttgttgagccaatcaattcagtactcaagaaaacaaggaagttgccaatatgtgtgctgcttaaattaacttgatgcaatcctaccccgcaatggcattggatagaagactccangtagattgggccagagatcccagggaaggccctagggttctcatgagccttatggtatattttgagcccatgggttaagtatgagcccgcttatctttgtaaatattagaataggggtttt

SEQ ID NO: 255535 - DNA, 327 bp, Glycine max
tctgttttacggtttttgtgatgatgtttgtgatgtttatatgctgaaattgctaatggaaatctgttaaagacgaagggtagaactaacccaacgttataaagtgagaatgtgatgttatgagtggaaaaagagtgagacttttagagttggaaggctaagtcggaattctgtggtaaatggaggttagagtgagtcaatactaccttgaaatgtcatttataacatgtgagaaaggttatgctgagctatagagaaaaataaatgaccaaagtgaaccaagagccatttctagggcaaaattgggtgttgaagagtcaaattttg

SEQ ID NO: 255536 - DNA, 365 bp, Glycine max
gcatttctttcgcccatgctactgttatggttggctatgaagctgcagaagatgaagacattgaagcaattagtgctctaatgaagtggaaagccaaccttgataaccaaagccaggctttcttgtcttcttggtccacctttacttgcccttgcaagtggaaaggaattgtttgtgatgaatccaactctgtcaccactgtaaatgttacaaattttggactaaaaggtacacttctcagtctaaactttccgccatttcataagctcctcaatctggatgtaagtcacaacttcttctatggatctattcccccccaaattgctgacatgtccagaatatcttagttgacaacggatcataat

SEQ ID NO: 255537 - DNA, 378 bp, Glycine max
  unsure (1)..(378): unsure at all n locations
ggggagcaccacattggaggaataaaagagggaaagaagtggaactttgaagtatatctcataagactttcattcatcaaagttacaacaagtgttacacatgcttctatttatagactaggtagcttccttgagaagctctcttaagaaaaattccttgacaagctttcttaagaaaacttccttgagaagcttctttgagaaaacttccttgagaagctagagtttagctacacacacccatctaaaaactaagctcacctccttgagaagcttccttgacaagctagagcttagctacacacncctataatagctaagctcacccccatgacaaaaaaacatgaaaatacaaaagaaattctacttacaagacta

SEQ ID NO: 255538 - DNA, 308 bp, Glycine max
caaaatgggctgacatatcaccatgtggtgataaggacgctattgtccaatcaagtgacaatgttatccattctgtcaaactccatcctacctatgggtttatatgggagagggaggaaataagaacatgttccctctgaagatggagtcattccaccaactgggtggaatatatatgaagattaatatggctgaggccactgcatgggccagaattacggctcatatggccgaaaatagactaaatacggcccttgaggctgaatctcaacaaaatatggcagttgaagccaacaatcgatatcata

SEQ ID NO: 255539 - DNA, 377 bp, Glycine max
  unsure (1)..(377): unsure at all n locations
agcacctgcggcgtgcangcttatattacatgagtngtcgagagttttattatgtgcacatgtatgacggcatgggacgtacagtatgtaaaagttctatctactaaaaaaaattaattcagctaattaatcagtatgcgtaaattattgtaaattcttcgataatacttatttttattcatgtagataaaaaaatatatttatctactgcatatatataattttcttcttttatcataggcatacttgtagaaccaccggaccctgaaggacaaatgaaggcgaacttcggaaagatgcaggatcctaagtctgataaaatgatcccaatgtagatgcaattgcctttggtgtttgatgatgatcatgatgatatg

SEQ ID NO: 255540 - DNA, 469 bp, Glycine max
  unsure (1)..(469): unsure at all n locations
ttaagcaccgcggctgcagctttganatcgcaagattgaagcattgttattattgacccaacctaatgggctaactgtttctctttatattataattataatattatttataattcaatattattaattctcacaaatgtgttttattttattttatttttaaaaaattagcatgttattctataaataaatttaacttgatacaaattatatcaattgaacataaaatcgaagacactatttcaggaaatgaaaatagaaaatattaattgaagaggaaaataaataccttaaaactattacaaatatttaatgtttactttttaaaatagttttaagtatttaagattatgttaaatgctctcttctatcagcatagcaatcttcattactttatttttcttcattctgatcgtcatcttaacggcaaatccagtggattactggaccacgttctcattcctagtat

SEQ ID NO: 255541 - DNA, 462 bp, Glycine max
agcttctaacttgtaacttacatttatttttttttattgcttataaggcaattttaccaaacatgtctttgattttgtcttaattatttactccaaacaacaacttttttcacctttaaaataatgcaggaagggtaaaagttcggcctggaagctaagattgacattaggtaatgtacatgatctctgatattcaattatgtatcatgtgtgcctccaaatttcttgacacaaaagtgcattttgcataaagtatcagtgcatttcttttacttaaccctctcctttctccaatttatataatatatttctttaattcacaatatgttttaaacctgtgcggcatcaatttttttttgtcaaaatatatacattgcacgtcatcactattgtttgtttaatacttataacagaatatttacccaacaactttcattttcaaattagctttgttcagttatc

SEQ ID NO: 255542 - DNA, 256 bp, Glycine max
ttatatgctcaaaatggggggtcaaacctaatcctcttccaagacggccttctaagtaaaggggctgcttcaacgaggctcaatgaatcacttgtgcccttcttccttgggttaacactcccaattttctgcaaaagtgttagaaccactatacaaaatatcaatgttagtgtgtgcttaagaattcatagattgcctagctagaaccaatcttattccctcagtttcttttacaaacaaactttcattacatctc

SEQ ID NO: 255543 - DNA, 445 bp, Glycine max
  unsure (1)..(445): unsure at all n locations
agctngtcaaaataacctgaaattgttataaattgattattaaacacacaaaatggaagtactaagtatttattacctatacttaatagaaaatacttataacactacaaacgggtgttcactttcgacaagtgcaccggatcgcacaagtagtataaaatggtaagaaccgagtatcaaactctcgaggaacttgtgttatttggtaagctatttcaccaaataggtgtctggtgtgtaaagataagtgtgaatatgaacaggtgtataaactatctatgcaaaaagaaagaaaatcatgcgagagaaatgatgtgtaaaaacaagtataaaacacgttggccttcctaataagtgcctgatgctaaaacgatattctctatctaacaatgctcatgtgttcctatggtgtctcttgagatgctaaatctcgattccttatgat

SEQ ID NO: 255544 - DNA, 444 bp, Glycine max
  unsure (1)..(444): unsure at all n locations
agcttctcaacctgtccaataagcgaatcttgatatcttgagatgtaaaattctttgagaatatattccctttcaaaaaaccagcaatccaacaacagtgacagagagttatttcacccctatgccacccctaatctcatcacctccaataactcagatgacacatatatcacatccatcacagacacaccacaacatactccttaacctgctcagttagatcctactacaaccatagaacctgatattcctattgaagaacccttacaaaggtctacaagagtttcaaacactccaagatatctcactgattatcactgctacaatgtgaccaacacaaattaagtcacctaccctatacaacatcatttagactactcagaactttttgattcccataaacactacattntccaaatatgagaaaaccatgagccataaact

SEQ ID NO: 255545 - DNA, 395 bp, Glycine max
  unsure (1)..(395): unsure at all n locations
tctaactaaattcagggcttgcattcccttaatcctttcatctccttcggattcattcttaaggaaactccacatttcatatgctgagttgatggccattattctagcgaaaatttcttgtgagatagcagcaaataaagaagctcttgcctttgactttcttgttatcctctcctttttaatttttatctgagtcattgttggatcggttggtaaaggaagaacttcgtattcttactcaaccgcttcccagagatcattagcctccaaatgtgcctccattnttgctgcccagatttcatgattatcaccatcaaacataggttgtgctagtgctgtgtacggcgtttagaaaccatctatttgatgaatagaagcaacgtgtgtcggctatt

SEQ ID NO: 255546 - DNA, 291 bp, Glycine max
  unsure (1)..(291): unsure at all n locations
agctangagccaagtgtgacgagaatatctttttactcggatgaccgagcgagtctctgaatatatcgacacgctcgaaattgaatgtggaagctctatgcctagttcaacaacaataacgttttactcgggtgtccgattcagtgacgtaatatatcgggacgctctgaaatgattgttgaacctctgagccaacttaaacgacaattgctttttactcggatctctgattgagacccgcattatattgagacgctcgaaattgaatgttgaacctctgatccaattcaa

SEQ ID NO: 255547 - DNA, 373 bp, Glycine max
  unsure (1)..(373): unsure at all n locations
agctntaacttacatggatagtccaggcttattgcatctaacgcgctaagcgcaattctatgaatttcaaaaatagtgaaggattggcgcttagcgcatcctatcactaagcccaattcatgaaaattcaaatccatagaggaaattgagcttagcatagggaagcgcacttagcgctgctacaataatttttcaacatagaaggaattatgcttagcacatcatatccgctaagcccaagtcatgaagttcaattctagagaagaaattgggcttagtgcgatgatgtgcacttagttgaaccacctagccaatcggtgaagggtaaagtgcttagcacaagcaacaacaacttatcacgtgaagacatggc

SEQ ID NO: 255548 - DNA, 444 bp, Glycine max
  unsure (1)..(444): unsure at all n locations
tgcagcttgtgcaattcgaacgagaaaactttatctcggtgtccgattgagtcccgtaatatatcgagatgctcgaaatttaaaaccaaagctcgtagcaaatgctaacgacaataacatttcactcggaagtccgattcagtcccgtaatttatcgagacgctcaaaatttaaaatcgaagctcgcagcaaatgctaacgacaataacatttcactcggaagtccgattaggtcccgtaatatatcgagacgctcgaaatttaaaaccaaagctcgtagcaaattcgaacaacaataacatttcactcggaagtccgattgagtcccgtaatatatcgagacgctngaaaattaacaccgaagctcgtgcaaattctaacgacaataacatttcactcggaagtccgatggagtcccgtaatttatcgagacgctcaaaattt

SEQ ID NO: 255549 - DNA, 411 bp, Glycine max
  unsure (1)..(411): unsure at all n locations
agcttcagaccctagcacgtaaaatctatgtatttataacccctcaantnaatggattttcaagggttgagaagcgaaaatgagaatggggtaaatttggagcaaactctcacctcacacaagtctataacatcaatctacacttgctcaaactggttttacgcctaaaattctgtcgaatcaaaatttgactcctcaacacccaattttaccctagaaatggctcttgccttcactttggtcatttgttattctctcttgcacagcccaaactttctcataagtcataaatgacatttcaaactaggattaactccctttaacctccaaataccactaaattcagatgtggccttccaactctcaaagcttcactctttttccactcataacaccatattctcactttct

SEQ ID NO: 255550 - DNA, 340 bp, Glycine max
tctgctagcttagcgagcgtccgctaagcgcaacactcctgggctatgcgcgaggaagactctggaagaagatgagcatacaagttcactaagtgcaccacttcatctcactaaccgcactgcttcagttcatccgctaagtgagaaaggcgcgctaagcaaaaaatcactaacgtgcgctaagcggtccatacatgcgctaagcgcacgagcacgaacaaggccacctatttaagcctgaaatcagattttgtgaagagagtttggactgggattcatagctatgcatgtcttgggtttctagatagagaaagggccaagttccacagagttttgagag

SEQ ID NO: 255551 - DNA, 265 bp, Glycine max
gttagtcttagtgggacattactctaaaagcgaaagaggcatgtaacctccttccataaatacaaacatcaatgtgaatttatagtaagcttatgcgcattttttcttacaaacgttctcttgctcaagacatttaaccgaaaaaatgcacccatatacaatcaaggctgctccgttatctacattatttacccgtacctccaaggtgtatttgttacatacatcgcacacatgtctttgggtgaattcacatacatgcatcctc

SEQ ID NO: 255552 - DNA, 428 bp, Glycine max
agctttttagctcagacataccatttctttttttatacattatttcttactatgaaaaattacaagagaaaagtatataattatgagaaagataaaaatatatactccttcttcattgatataaaatcagtatttgatgaatacttgcctctccgtgtttaattataagatattaaaaaaaaataattatttatcaagtataatttttttcttctaatgtttagatatattaattaattttcttcttatatattattatttaattattctttctctatacattaagcgaaaacaattaaataaataaagaaatataattaattttggaattataaaataattaattgacatatgtaatatgagtaattaaattaactatttttattaagaaatatgaattgcacgacagagctcaaaataaagtaatt

SEQ ID NO: 255553 - DNA, 468 bp, Glycine max
  unsure (1)..(468): unsure at all n locations
agctttaactntagccactcttgacaaatctctacatgaccaacacaatggtccttataagaactaataagggacaaatcaacagaacctcctataaatgggggtccaatgatcctattagcagctgaccctagctctggctctacccctagctctggcattagcagttgttgttgctatcgtcgctcattatcactacgcatgctgactcagtcactctacaacatctctcgtccgcaccttcccttttcatgtgagtggccttcatagaggggggagttgcatccaacaatgtacgatgtcttcgtgcaagctgtcacaagtctaaaataaaatgaanaaacaagttagtaatgcatcataataaacatttatttaactaagaaaaaaatttaagaaaaaaaatgacattagcctacaaaaataagaaacatgaataaacatcttntaattacataacanaatcat

SEQ ID NO: 255554 - DNA, 463 bp, Glycine max
  unsure (1)..(463): unsure at all n locations
gcttgccactggagctaacccatcaactgtccaattcttnttgactggtgatccctaggttcttgaccttgacttgatagaacctctntttaagcgaaggtgtttgacttaatcccatgttttactaaagtaaaacaaaatcggtgtgaatcacaactccgacatctatcatgggtggaatggatgaatgcatgaacaaatgcatatgatacagatgcaatttatgaacacgggagccccgggaaatgcctccttcttagatacaacgtcttggggtagcaaagcgccctacgtatgtatttaagaaggtgacatggatcctccattggtttgcaaaagagacgggatcaagacagaacccgtgcgtgatgcctatgccanaaccgcaacacaggaatgtacatagtatgacaatattcacaaaatataagccaaangggtcatgacacttatgcatggcagt

SEQ ID NO: 255555 - DNA, 444 bp, Glycine max
actatagctgcactaaatagtttttgtgtttatcaaatgcagatgcaatgcagaagaagggggtaaagacaatatattactacaattatatgaaattgagaaggtgatactaagaatagaatattagtagcatgaccgaaaataaaataaccgctgtgtcaaataacataacaattgtctcaaatacagggaaaaaaatactccaacgccatcattagccgttttgacttattgctgtctttaaaaaaaatgttgcccatttctttcgaattgtggtgatgatgccgatgtccaacggtgtgtcattagcaaaccactgcaagtattcataattgtaagttagtactgcaaatataaaaattcagttccaattgtactgaagtttatgcataccatggaccaatcactctttatgtcgctggctatgatgttccagaaccaatg

SEQ ID NO: 255556 - DNA, 417 bp, Glycine max
  unsure (1)..(417): unsure at all n locations
caatattgagaagaaaaggaagaagaagaagaattggttaacctgtgatactaacaaaggaagaagaagagatgaccaaggatgaccggaagagatgaccaaggatgattggaagagatgacgaaaaagatcggaagcatgagagaaaaatttcaacgaaggcacagcacaacacgtttgaggaacaagtgagagaaatatttcgggtttagaaaatgaagagggcgtgctttgtcattttgaaattntttgaggacattattgtacaagtattatttagggaacagattcccgaaaagaagatttgagaagttggaaatctaagctttaaaacaagatctactaagagcttttacttttgtaaaagctaaaaaatgtttaataaccaaacactcttaataataaaaaagatctttt

SEQ ID NO: 255557 - DNA, 442 bp, Glycine max
  unsure (1)..(442): unsure at all n locations
cgattcattctatgtacccgaagtggttcacattgtgtttcgngcatttttattctcattttgtttactttttataacccctgttgacgtgcttaagccattttacttaagtcatttctcgcttaacttaaaaataaaataaatttccaccgaacgtttgaattgtattatccgttatcctcggttaaaataaattccgaccgttcggtcgtgccgtaaccacgttggaaatcaaaaagaggttaaaaataatataataatcaaaaagacatcttttagtaaaataaagcggaaaatcaatcggacgttntctctttgggatttctcattcttaatcgaattgattaataactaaagtgaaactaaggctaaaatcaactcacctagtcaagctcgtccacaaaaatagggctgttgaagttagtcatctcaatttctcact

SEQ ID NO: 255558 - DNA, 400 bp, Glycine max
  unsure (1)..(400): unsure at all n locations
agcttctacttatgtggcagggcgggctttcttcactttctngactcaactgcgagctttggccactgcttttacttcccgcgatgcttctcttcatatccgcctgagtgggtttatagcctaaaccatacttcccacgatttcctttggcatttatcaagctagttatgccgctgttgtctttgcccaaacccattccgggttcgtaaccgtttcccaacataactcgagccatcattactgctgcatcggacaagcaagcttgcccagagaatgagtccacggaggaaatgcttaccacctcaaaagactggaaagcggtttctaatgactcctctgctgcttccacataaggcatagaggacgggcagctcaccaagaggtcttcctctgctgacac

SEQ ID NO: 255559 - DNA, 426 bp, Glycine max
  unsure (1)..(426): unsure at all n locations
attagtctaaactttcgtatgctatttatgttgagcctaatcttaaatgagggatctgtgaatgaagcttaatttaagttaatctaaacctacgagggctgtctaaattaagcctagtccaacaagagggatttgaggacgaagcttggattgattcagcctaactagggattgaggtttagtagtttaggctacagcataaaacacaaaagcttgatagattagagaaacatctttatacacatcagcttgtttgttagaaagacccaacacatttacctactgcttgcaatcttacttacttgcattntttttattactgtttttagcctagacttagtttaattctgttctaaaccatcaattatcaatgtttctttcaacaatgccttatttctgaattaaccctatcaatactagttcctt

SEQ ID NO: 255560 - DNA, 410 bp, Glycine max
  unsure (1)..(410): unsure at all n locations
cttttattcgttgaccatagaggggtaccttgaagatatgtcacgggggtcaagagaccttggggacgtcaagtggggtgctattgcccaaaaccaagcttgaccaatcccgacccaacccgggcatcgattacacagtgtaaattgcaggtttccatgttctgaagctgtgtaactcgagnttggcctctggtaatcgattaccaatgttgtgtaatcgattaccagagaagaaaacccttgaggcataccttttaactacatgtagcggttatgggactcattgtgttgtacacgtagttagatttctcatgaaagagtctacccctttttctcttatttcttgtagatcgcgatggcagcgcaattaatccatgattgagtggagatggagtgcctaaagggagttt

SEQ ID NO: 255561 - DNA, 378 bp, Glycine max
  unsure (1)..(378): unsure at all n locations
catatagagctatagacgttttggaattgatacatacagacanttgtgggctatttcctacaccttcatggaatggtcaacaatattttatatcattcatagacgattactccaaatacgcatacttgtttcttatacatgaaaagtcacaatctcgggatatgttcaaaacatttaaagttgaagttgaaaatcaactcaacaaaagaataaagtgtgtcagatctgactgtggtggtgaatactatggcagatatgacggtttangtgaatacttgtttcttatacattcatacttcttatcatagtttatttcccatacagaacaaagacaaaaaaaaaaaacatacccaatgctgtatataatggaaagaaatc

SEQ ID NO: 255562 - DNA, 381 bp, Glycine max
  unsure (1)..(381): unsure at all n locations
aacattagcattgacagatgtattgtttccttggaacttgatagagcacgacaagataactgtagtgctatacataatgtgcagggttctaatttttattatgaggctgtttaaattaggctaagtttaacaagagacatttgcgaacaaagcttattgtaaattagttcaaactcacgagacatcggtggtagtatntttgtcctcagcatacaacacaagaataatttccaatagagaaaaatcctaatggcatcaagtatctctgtgggaggacccaacgctattacttatttgttttcacactcaatngatccggctactgtttctttgattacaatagaacatacacttgtttcgatttataatacttaaatcttt

SEQ ID NO: 255563 - DNA, 435 bp, Glycine max
agctttccgagatagcttacataagcaactgttagtatatgtgagaacagtttaatcatattcacgtccaatttggataaatttctccataaacactacaaatccgcataaaacttaattttaaacttacatagaatatatttccatttaatttctccaaaagctaagggcataagcctgtatttggttgaatctttgcgggtcacatctttgcacaaattcaagtcaaatttagaaatgacatagcagcaactaatgttagcttcaagaatgacgcgcatctaaggccatcgaacgccaatccaaacatgcaataagttgatttaacatatggagaagctaacgcatttatcttctttttctttcctataaagccatgaaaaattatccaaccaactctgtcttaagtcaaaaaactacacataaactattcta

SEQ ID NO: 255564 - DNA, 446 bp, Glycine max
agcttcttctccaaattttataaggacttattaacaggagagaagaatgacaaatgctgccagtggtggagccttaggagacatgactcctgctgaagccagaaatttaattgagaagatggcttccaactcccagcaatttagtgccaaaagtgatgttattgtcattataggagtgcatgaagtaaccacaaattcatcttcatcagccgagactaagaaacttgaaggtaaactaaatgccttggttaacctggtaacccaactggccgtgaatcaaaaatctgcacctgtcgacagactctatggtttatgctcctctgcctaccaccacacagacctttgtccttttgtgcaacaatctgaagcaattcaacagcctaaagcttatgctgcaaacatctacaatagacctcctcaacctcagcagcaaaatcagccacaac

SEQ ID NO: 255565 - DNA, 477 bp, Glycine max
acctgcggcatgcaagcttaagtgtctgagcaagtattggaggaataataaaatgtcctcatggcaaatgttgatgttgaacgtcacaaaaggcaatgatctctttgttgattcttcatctccatcactttatgctataggattcataatattctcaaacactcgaccttacattatgtttgaataggagaaaaagactttttttttctttctttcccatacaacaatatcattatcagaagctgataatcctatttaagtattgtagaactattatgagtgaattcttttcctccaaatatttaatataactacaaattcaacattcaaatttgaaaacattggttaaactaaaataatatgatgctagttgatttatgcttagtgatacgggactaggagaaaatatatatagtatatttggaataactttctttttcagcgtataaattattttatttcatatttacatacata

SEQ ID NO: 255566 - DNA, 419 bp, Glycine max
  unsure (1)..(419): unsure at all n locations
agcttagctaaaaggctaaacacatcctatttatactgagaaccgnagttgtgtaaaaaaggcccaatactcggcccatataacttctcactctagactctaatgaactgttttgttcaaaagcgggaaggagaaaagagagattttaatggagggaaggagaaaaggggaagaattttaattacacattatgtttgattgataagagagttgagagattataattgaggagaggaaaggaaatcgttttctcgttttgtttacaagaaaagaaaacggggttttaaatataattttttgaaaacaaataaaaatattttaataatttcaactgaaatattttaaatttcttttccttcctctcaaatccttccaatatttgaggggaacaaacattaaataagagattntgctcctat

SEQ ID NO: 255567 - DNA, 443 bp, Glycine max
ctgcagcttataaagttattggcttgaacattctcttttcttggtacaagaagtttaatgagtgtctgagcaactcaggattcaacagatgtgacatggaccattgttgctatgttaagaaatatactaatagttatgttatccttgtcgtgtatgttgatgttaattgcacgatctattatggtagaaattaataggttgaagcaatggttggcacaaaactttgaaatgaaggatcttggtccggctaaacaaatccttggtatgagaattcttagaaacagataagaaggaattttgaagctatcttatgagaaatatatacacaagttgttcgacaggtgttaccttgaagattctaagaccaggaatacccctctgggatctcatttgaagttttcaagaagcaatctttgcacgctgatgaagaaaaatgttacatg

SEQ ID NO: 255568 - DNA, 66 bp, Glycine max
ccccccactcagatcccagccctcgcactacaacaggcaggtgactgacatgactgaaccccacaa

SEQ ID NO: 255569 - DNA, 295 bp, Glycine max
  unsure (1)..(295): unsure at all n locations
taacaaaatcaagcaaaatagggcaaaggcagaaaactctgcccaaaacacaactcaaaatcacagcttttcacatacaaataccccagtaacatttccttcgttccaatttgttaaccgctggatcgactcgaaaattttactggaagtctctagtacataagtctacattntgaccgctgggatctgctagcaaatgtctagaaccccataggtactacccttttcacaaccagccatacacaagcattnttctgcacttatacaaaattctgctgcacatttcaacagcaaa

SEQ ID NO: 255570 - DNA, 218 bp, Glycine max
caagcttgaatagtagaacccttcacctgttttgtattgagagttacacatagctttgtttcagtaaaccagtaggatcgaggtcttgctacaatcaaataaacattaaaatgcagtaactaggaagtgatcctatgtcatttcccaacgagcaatgataaaccaaatgttcataatatacttgcagtaacagtaacagtaacaatgggggggggggg

SEQ ID NO: 255571 - DNA, 410 bp, Glycine max
agcttaaacaatttgttgtaatcaattacatcaactctataatcgattaaaatagagaggtttttcctctgaagaaatatttctaacttagaaaattttcttcacacacactatgatgatgcctaatgcaagacaaatatcaaatgtacttgtagacaaaggatcaagctgaatgttttgatgatgccaaaggatcacatgtttctcaaagctttattcaagacaaagaaatcaaagatattcaagatggatgatcaagacagtctctatagtcttaggaagagtatattaaataggaagggaattccaattgaagtagcaaaaggtttggccaagaaatttaagttaaaaagtgtttttcaagagatttactctctgggtaatcgataccagaggatgtaatcgattac

SEQ ID NO: 255572 - DNA, 419 bp, Glycine max
atattttcactctctgtgttaaatatgatataaccatggatggattgagatagaatcatgtttagcatgatgatgtattcttgtatacatgggtatctctgatatatatatatatatatatatatagtactcccattgcttcaacttcttaatcgaacatcaaggcaaagagtcctccactcagttctggacgtaacaacattcccatgcatatctctaatgcccattcaatccaaaacttatcaagttcaaatcattgaaaaatgaagcatcgttattaattattgcatcacagtgtacccacaaccacaataaatatataaataaaggcgaaaatgatttttataacgagggcaccgaatgtgacccaacaacaaggaaaattacaagctaaagagccacaatagtataaataatgt

SEQ ID NO: 255573 - DNA, 456 bp, Glycine max
agcttgccgcccagctcgcccaggcgagttttgttgtttctccagaagcaacagccttctggaggaatcttatggaaggcccaagtgggcctggttgctatttacacccccctttttactaaatgcaccctccttttctatttttttgtaattcttttttccgtaacgttacgaaactttacgaatttcgtaacgatacttattttccttccgcaaggttacgaatatttatggattatgtatttactcttttttagctttcgaagaagttacggaaacttacggattgcgcaaaaacgcctcttttcgacttccgccacattatgaaatttcacagatcgcgcaagcctgcttcctttatatttctgagacgtctcgggacttcatttattgcgcaacaaaggacgccaagtatctcgaagcggctaaccaaagatggcatgtcatcaagtaata

SEQ ID NO: 255574 - DNA, 392 bp, Glycine max
aataaaatctggacaagataagataagatttgataaaataaaatctagataaaatctagataagattagatgaaataatatgtcgatgagataaaatctggataagataagatttgataaaataaaattgtctgctctctttaagtccaagcccaattccagattcaagcccaattgcttataattctcctggaattaaattaaaaacacaaaattagtccagtaggcccaaatgataaaactgcataattaatttgacaattaaggctaatcaataattaaaatggtgacaaacagggttaagacataggagaaaatgatgacaatcacctacgtagttcttgagaaagcgtgtgagactaaaatagtctctaccggaagatgctgacatc

SEQ ID NO: 255575 - DNA, 455 bp, Glycine max
  unsure (1)..(455): unsure at all n locations
agctttgagggtgcgcagcccaccatcttttatattagagtaccgataatgtgtctaccatcacgattatcgtctccctttccattattgggggtaccacctgggccgccagatccctccaccttttgggcgtgttctttgaatgatccgtccccctttttgcacatgttctgtagttgcatcctatccggaaccatatcaaaattgtactgatactgcctaacaaaggcaaccattatgtccttccaagaatggactcgggaaggttccaagttagtgtaccaggtaacagctaccccagtaagactttcttggaaggaatgtatcagcaattcctcatctnttgcgtattcccccatcttctgacaatacatctttagatggttcttgagacaagtagtccccttgtacttgtcaaagtccagcaccttgaacttgggaatgaccatgtttgg

SEQ ID NO: 255576 - DNA, 360 bp, Glycine max
  unsure (1)..(360): unsure at all n locations
tgcttctcttccttttatcatcccatgattgatcttcatgtcttgaaaagtacaccaactttatcagagatcctgcgcatataatcaaataagagtaagtttccgagttcagacatatttcacatgctaccaaccatttattttccttaaaactaatacagaatttggtcaatttaccaattatacttcattaagtataaaacaaaactgtgaagaacccaaatagaaaaaaaacaaactgttctagacactgtccccgagacagagcttaaagaagagcataaaaataccagtaataagggagtacaacagggtctaaaccccaaagaatgatnttaaacgagaagaaagataacaaag

SEQ ID NO: 255577 - DNA, 396 bp, Glycine max
tataggagcaaaaatacctttttaatttgtatgttaatgttggtagcaaaaataccttgttaatttgtatgttaatgtagctagaaaataccttgaatatgcttgtacgtaaatgtaggtagcaaaaataccttgcatacgcatgtatgttgatataggtggcaaaataccttgcacatgtgtgtattcgtaaatgtatttccttaacaaaaatgtgtgttagtatatgtgcatcctacaaaagcacaagtgtcgacatgtaagttttctctaaattcatattgatatttgcgtgggtcacaaggaattgtatgccattattgcttgattgtgctttaaaaaggtatttccttgtaaactgactttacaaatgtgtcttctcacgagatggcgctg

SEQ ID NO: 255578 - DNA, 433 bp, Glycine max
  unsure (1)..(433): unsure at all n locations
ggtttagatatgatgtatacatgtattatgacttgtaggatccaatttgggcaaaattggatgagggcaagagtgatttcgaaaatctgcactattatgcagaattttgctgttgaaatatgcagcagaattttgtgcttgtgcagaaaatgcttatgcatggctggttgtggaaagggttgtatatattcggttacggatattttctagcagatcccaacggtcaaaatgtacacttatgtactagggacctccagtaaaattttcgagtcgatccaacggtaaacgaattggaacgaagagaatgttactggggtatttgagtaaggaaagatatggtattggttngtgttttgggcagagatttctgcctctgccctgttttcttggttttttgatagtcatgatgtctggatgttgaatatcttggatg

SEQ ID NO: 255579 - DNA, 401 bp, Glycine max
  unsure (1)..(401): unsure at all n locations
tcacctgcggcatcaagcttggaggatgatggaacccctgtttatataactaggatatgggctacgtgggagtacgtgagctcagttggaggtgggcaacacgggatggtgggtttatgtgcgatatgtggatgtggaaaacttgttgtgcaccatctcccgaccgccacctagtaccacatgtgatgggtaccacataatcctacaagcttgagatgaggaagtgtagaagggtgaaacttcctgcttttattctttgaccacagagtggtacctggagatatgtcgcgggggtcaggagaccttggggacgtcaggtggtgtgttattgcccaaaaccaagcttgaccaatcccgacccaacccangcatagtcagtcagtgagaacctgtgatgtacc

SEQ ID NO: 255580 - DNA, 432 bp, Glycine max
  unsure (1)..(432): unsure at all n locations
agctttataagtgcgggtctgggagactattgtcatgtgttcgcgatatgtgaagatgatgttccaagtacttcggatttggtccgaccatgccctcctgatttccagctgggaaattggcgagtggaggaacgccccggcatttacacaacaagcataatgtaaacctttacggttttaaaagctctatagttgggcctaggctttagagttttcgttttgttaaggctttgtgtcttttgtttttgaatatataatacaaggatctttcttcatctggtcctggtctctacccattctcattcatttgcatgtttaccttcttttctgaaatggcagattcgatgacgagttctccgaaggactaatacctgngacccgctaataacttcgagcagaaatgaaccaacggaatataatgagataggatgt

SEQ ID NO: 255581 - DNA, 422 bp, Glycine max
  unsure (1)..(422): unsure at all n locations
agcttaataccagcagaagtaaaggcaaactttatgttatatgtccttatgtttcggtgggaatttttaccatcagctgtattttggtcaaacagaagttgatgcacaagtttaagtggattctgtaacaatgaacgttcaactttaccatctccacaacataagctgaaccttgggcttgaactatttttacatttttctattctttcattataccacattttgcattacagtgactacattgcatgagctggtcaccaagatcaaaatactctgaaatggttaaattagatatgagtaaatgatggtaaccattgattatattttgacaggaatatgtaaattatatcatgatagataaaagtatattttggattgactcatttannattgaatttaaactgaagtacttggatcagaca

SEQ ID NO: 255582 - DNA, 390 bp, Glycine max
  unsure (1)..(390): unsure at all n locations
tgcatatcttgcattgtatacttgtttcattgttgtacaattgttagcattgtgctccttcaatgttagaagaatattttttgctttgaccatagactgtcatatcaaaaataataatcttttcatccttagtcagtcgaccaacatattgatgtccaactaatgacttaaccaatgcatgattatgattactcccacatattaacttcattatccatccttcacctttcaccattggtttcactcgcagcttaaagagacactcacattttctactgccacgaactattcgtactaaatcctccctaaccttatanttttcagcagagcgagcccaatgcataacatcatcatgggtaacaaacacctacaaaagggatgatacatgtt

SEQ ID NO: 255583 - DNA, 396 bp, Glycine max
tttttacacatacctctctaatagctaagctcacctccttgagatgagaagctagagcttatctacacaccccctataatagctaagctcacccctatgaaaaaaaacatgaaaatacaaaaaaaaagttcttactacaaagactactcaaaatgccccgaaatacaaggctaaaaccctatactactagaatggccaaaatacaaggcccagacgaaggaaatacctattctaatatttacaaagataagcgggctcatacttagcccatgagctcgaaatctaccctaaggctcatgagaaccctagggccttcccttggatctctagcccaatctacttggagttttctacccaatgcccttgcggggtaggattgcatcattcccttcacct

SEQ ID NO: 255584 - DNA, 460 bp, Glycine max
  unsure (1)..(460): unsure at all n locations
agcttcccttaattgatgtttctgatgaagataatctaacccggagagtaagcctaaatggaaaatacatagtaaggtccgcacaccaccatctcatggaagcaatgatccaaaatgatgccctcaaagttaatggaaacttgatgttactatggaatctggaaattcaaccaaaggtgaagcacttcctttggcgcctcctccgtcaatgtctttcaacacgtcaaaggcttcaaaataaaggggttagntgttctcccttttgtgcttactgctattccaactacgtatgagaacgattgtcatgtttttttcggttgtgatcaagtaatgatgagtatttggaaatctactggtctatggaagttaatttctgcccaagttcaattaataaatagatgagttaatttcaaagaacgactggcattcaacttgttaaagttcctatcatttgatcaca

SEQ ID NO: 255585 - DNA, 312 bp, Glycine max
  unsure (1)..(312): unsure at all n locations
cacttgttagacaagtggccttagatatctttaagaagagggggttgaattaagatatcaaagactattccccaatcaaaacttttaactctcttcttgaattaataatttacccttaatataaattacttaaaagataattcaaagtaaacttctttaaagccaaagatgaatgacaataaataatagaagtttaatggaagagagaatgcacactcaatttttatactggttcggccacgccctgtgcctatgtccagtccccaaccaacccgctggagatntccactatcttgtaaaatgtcttttaca

SEQ ID NO: 255586 - DNA, 458 bp, Glycine max
  unsure (1)..(458): unsure at all n locations
agcttatgcgcatatttccttacgaactttctcttgcacaagacatcctattaactaagaaaaatgcacccacatacaatcaaggtagcttcattacctagattatttacatgtacttccaaggtgtatttgttacttacatcacacacatctccttggctgaatttacatacatgcatactcaaagcgttttggggtaccaaaaattgcacatgcgctcatcttggtatttctaatacctatacatatacaaagttcatgatgaatcttgactacctacacaataaggtgctacatttcatgctttttctttcaagtttttgctacctaaagccgcatgcaaattcaagcatattttccttcactgactaaaattgtattcaaattaaaaggtatatatctnnttgtaatatgttttctttacataacatgcaacatatttatatatantttttgtg

SEQ ID NO: 255587 - DNA, 408 bp, Glycine max
  unsure (1)..(408): unsure at all n locations
agctngcataagaaattgattgtgtatcgtgttattaatatttacaccgctcaataatctttatcagataatacatattttaaatctatccattctttatacataaatcatatatataaaatttcatattaatctaaaattatttgttatctcattcttacaaattaaaatcaacataacataaaanttttaaaaatactaaaatatgaatcatttgattacttttttttattgtttgattttgacaaaatttgataaatacaattttaacaatatgtagatataattcaacgatcgataaaaattacattttatgttaagttataaaataatataataatcgatgaagctatatatatatatatatactatttgacattctgtttccttggcatctgttggatatgc

SEQ ID NO: 255588 - DNA, 299 bp, Glycine max
  unsure (1)..(299): unsure at all n locations
ttaagtcacctgcggcatgcaagctngtacgaatgtaagaaacatcttcttttctcttgtgattcttgactccatctcattgaatcgcatgtccacttgtaacttcaaagtatcaaacctttcaccaacaaaggtttgaagaccatcgaacctatccaaaatcttttgaagaagagaggaatcttctccaccatgtaaatgtccttcttcatcaacgggtcgagcaccctttttcacccaagagccatcatgctcttnttgttaaccaaaggatgcaattaccacagcgcctattaaaa

SEQ ID NO: 255589 - DNA, 441 bp, Glycine max
agcttcatggtgaatcaaaggtgtgttgatgatatcttatgatgatgacaaaggtgatgaccaaaagctcaaagatcaatcaaagaacaactcatgtgaatcaagaacatttcaagagttcaagataagaatcaagaagaaagtttagagtcaagaatcaagattcatggttcaagatctcaagaatcaagatcaagattcatggctcaagattcaagaatcaagagaaggcttattcaagataagtatgaaaagtttttctcaaaaattgagtagcacatgatttttctcaaaacatgtttaccaaagagtttttactctctggtaatcgattaccacattggtgtaatcgattaccagtagcaaaattgttttgaaaaagttttcaaattgaatttacaaccgtccaattaatttcaaaaagctgtaatcgattacaat

SEQ ID NO: 255590 - DNA, 456 bp, Glycine max
  unsure (1)..(456): unsure at all n locations
tgggctctngcctcactcaccgcctttttgtgtttcatttctagctatcttatacttatcccaagtttcagaatttctacacctagaccactccttgaaacactccttttttactctaactttgctctgaacactttcattccaccaccacgattctttacccctaggtccaaaacctctagattcacccaacgtctctttagccactttaataatctcttgggacatcttgttccacatatcatttgcacttccttgtgattgtccacaccatccctcccatatcttntgttggaagattccttgtttctcacccttcaagtgccaccatttgatccttggtgctaccataggacttcttctctttgccctatctctaattcttacatccataaccaaaactctatgttgggtagtccagctctctcccgggataacttacagttcaagcatact

SEQ ID NO: 255591 - DNA, 370 bp, Glycine max
  unsure (1)..(370): unsure at all n locations
ctgcagcttacctaaagaaggtgaaagaagcttttccttctaagtaactcactaacctcatttcttataagtgatcgaccaatatatttcttcacgaattgcgacttcgagtcgggaaggttcgcaccggctgggaagtcaacctcgggttgtagaagaacaacctcgggttcagaacagtgaacagcccaggggcttgcttcaaatgcaaaatgagcgacaaggttagggttcagaacagtgaactcaaatgcgaaagcagcttagagtgttctgaactaaaattttattntttattnttgtttcttttttattttggtttacgacgggtttttatacaaactggcgtaaattttattacacaaaacat

SEQ ID NO: 255592 - DNA, 455 bp, Glycine max
  unsure (1)..(455): unsure at all n locations
agcttacctttatgctgagactatacctcttttttagacaatctccaaacccaatagagatgcagttgaagaagtccctagagaagctattgctgccacacccaatagatctagatctcgaaaccttgcactcaaaagaagaagcatacgcagaagtcatttctcttcctgggactaaaacccctaatgaccaactcctcgtcatctgtgaccaaggagtggtttcttcatgacgtggtgatggattttttgcgcttgagaatgatattatgggaggaagaggaagaggtgggtgctgaggtggtgatggaagagggtgcgatgtcagatctaaaagaaggggagtaagtataggaagaaggagcatggataatgaaagggaacgtaacacaatcaatgaagaatgggagtcatagagtgagaggaagagtgagataagagtntaatgagagaca

SEQ ID NO: 255593 - DNA, 428 bp, Glycine max
  unsure (1)..(428): unsure at all n locations
agcttgngcaaatcaaatcactcctacatcttatctctagcatgcattntctttctttacccactcctcacgtttggttttttagggaaaacaccataactaaacgcgccgcaagggatccctatcgcaccagatccaaatctataacgatgggtgatcaagaggagacacaggaacagatgaaagccgacatgtctgctctgaaagaacaaatggcctccatgatggaggccatgttaggtatgaagcagctcatggagaagaacgcggccactgccgctgctgtcagttcggctgccgaagcagacccgactctcttggcaactacgcaccatcctcccccaaacataatatgacggngaagggacgcactgnggcacgatggcagccctcacctgngatacaaccgagcggcttacccttatgga

SEQ ID NO: 255594 - DNA, 431 bp, Glycine max
  unsure (1)..(431): unsure at all n locations
agcttcatgatgatgaatcaagtatgattcttttttttntgttgatgaaaaaaatcccaaaagaatgatgtctagactgagtctacacgttcccgatcaagattaaagaaaagacatctagaagaatcaagattcaatagaagatgaattccagattcaagagatgaaaccaaaaagcaacaagtcaagacttcacaagggaagtattgaaaaagatttttcaaaaaccaaacatagcacagttttgttttacaagaaaatattttccaaatttttctaagttaccagcgtatttactctctggtaatcgattaccaattacctgtaatcgattaccagtggtatagtttgatttcaaaagcttttaactaaatttgcaacgttccaaatgtttttaaatggtgtattgatacaatatattggtatcgata

SEQ ID NO: 255595 - DNA, 387 bp, Glycine max
  unsure (1)..(387): unsure at all n locations
agtttagtgtctaattataatgttgtgtaaatgaaagtggaaaaataagaaaattaagaagaatgatatgattcaacgttttcctttgtataaaattatcaattatcaattaattctttcatatttgaaggttcggatagtttgaataaggttttagatttattataaaaaaataaggttttagatttaaatcttaatatcattattgtacaaaagaaacatatttaattttactgagtcttaattagcaaattaatatggattttcattaattcgggtaacaataagttaaaacatatttntacacatgcacgaactgaataaaaattatgtttaattaagttaaattctcacaagttacacattaataatcattttatagaaaac

SEQ ID NO: 255596 - DNA, 453 bp, Glycine max
  unsure (1)..(453): unsure at all n locations
acaaaaggcatgcaaagtgggtggaattcctatagcaattcccttatgttatcaaacataaaaagggaaaaggtaatattgtagtcaatgatctttctcggcgtcatgcattactttctatgcttgaaacaaaattgattggtcttgaatgtttgaaaagaatgtatgaaaatgatgaatcttttggagaaatttttaaaaattgtgaaaatttttcagaaaatggtttctttagacatgaaggctttcttttcaaagaaaacaaattgtgtgtgcctaaatgttctactagaaatttgcttgtttgtgaagcacatgaaggaggtttaatggggcattttggggtccaaaagactctataaacattacaagaacatttttattggcctcatatgagaaaggatgtgcagaaattntgtgaacatcgcattgtatgtaaaaaggcaaagtcta

SEQ ID NO: 255597 - DNA, 454 bp, Glycine max
  unsure (1)..(454): unsure at all n locations
agcttgtgcaaatcaaatcactcccgcattttatctctatcatgcgttgtatgtgggtctcgtcctttgtcacgggaagccggaaggtccatatcaccttcttaattgtacacatggggcactgtgcccccaaatgcgcaagtaagaagagataattttccgggctctcgtgtccgtaaaatgcattcatatcatgcatcgcataagcatctcttcataacatcataatggacatatcctgcatttgtccgttatcatattccggcctcacattttgcatgagtcatggcatcatcatgcatatgcgttcaacaaactttttgatctgcaaaattgcataccatttgttttcatgtttgctcatccttgcgttttcctctacaaaacaaaaacaaaaaagggggaagcgtgaaacttcacactacattcttagtngcatgtgttaggcaccatg

SEQ ID NO: 255598 - DNA, 391 bp, Glycine max
  unsure (1)..(391): unsure at all n locations
ctgcgctgtaaattattggaaattccctgtttctttgctcttgcatgacttagagggtacttcctcgttgacatcttttgtcttgaatggaattgccatgacaggtttattgttactgtctttgatatttggtagctgatattgtgttgcgggaggtaattccgattggattaactcaccatccttaacttgccaatttgttatggcatttgttgttggatcacctatgatgtcttgtttccaagggtaatctatatcctttctgatggcataagcatgaaaccaatcaaagaaaaggacattaattntgactcgtttgacaacatcgtagaacttgtcttggatatgttatctgtttgtacccttgtaatgttggaaaaaccatctcctt

SEQ ID NO: 255599 - DNA, 430 bp, Glycine max
  unsure (1)..(430): unsure at all n locations
ttaagtcacctgcggcatgcaagcttntaagtgaaaaccatgatatcaccatatccttcattaaatttggagctttggaattgttttgggaataaatgtggggggttttttgtttcattggataacatgttttgttggcatgatgtattttgggccatacttgaagtatattgtatattggttaaatgttggacatgctgaataaaatgctggttctcaaaggctacagagcaaaaaaaaaaaaattgaaaaagaaaaagaaaaacaataaagttgagtgaataagatcttaaatggcaaaagaatgatgagactcttagttctactctttatgnttaaattntatctttaggtctttttttttcttaatatgcacttattccccattgctcctctattcctttgggatgtagcctcttattccatatat

SEQ ID NO: 255600 - DNA, 382 bp, Glycine max
  unsure (1)..(382): unsure at all n locations
tagacctgacatctcaaacaaacgaatcagacgtaacaagacaattatagttgctgtgtgaatacctcacccactcaagggtatcacacaattatggcttttctctaatgaaacactcttgccttttaccactctaattccccttgagttcttaggcaattcaagagattatggccacaacaaagaacaattcaccaatatgtgttaggtaaggctagacaaggaaaaggttaaccaagaaaaaggctaacaatgtttttaggcacaaatgaaggaaataaaattcacaatttatgaattcaagtaacaatccttcatgcaaccaatatattaccttaaagagttgtttttttgtaagttcttangcatgaaccattcagcc

SEQ ID NO: 255601 - DNA, 363 bp, Glycine max
gctccaaatattttccagctgaaaaaatatagcataccttgaaaagtcgaaggtacctgggattgggagatgttagactggcatctgtagtcagttgctagtttgactcggatcccttcaaaaataaatttcaccatgccattccttttagagaacataacttctatttgtctcattttcatttataggtcttgacacttcaattcaatgtatagtgcttgaattatatatagagtgagcttaaagcaaacaatctatctacatatggaccttataaagatggcattcaaaagcataacataagatatcattaaagtaaccattttacaattccatggtgtgttacccacatggatagatgca

SEQ ID NO: 255602 - DNA, 344 bp, Glycine max
aagtgttgaagggtgaatctttctgcttttattcgttgaccacagagtggtacctggagatatgtcgcgggggtcaggagaccttggggacgtcaagtggggtgctattgcccaaaaccaagcttgaccaatcccgacccaacccgagcatattcagtcagtgagaacctgtgatgtacctaaacaagcgagctcctggcagtcaacagataaaaggaacaaagaccacaaagcaaggaggcttgtgtggtggctggccagttgtgaatcttgtgtgatatatgggttatggcctttggtaatcgattaccaagggtgggtaatcgattacaaggcttaaaaat

SEQ ID NO: 255603 - DNA, 366 bp, Glycine max
gcagcttttgactcctgatctttggaattgcttaactcttgagtctttatcatcatcaaaatagtcttggaagtcattgcttccacaaatcattccaggactcaccaccatcacctgagacatgtgtgctttaaaacaaaatatgatgcataaatggaaataggacataaggaataatcgtaagtggcacaggaaaaacaaacatgacaaattgaaagcatctccaggctacaaaataaaaaatataatttttttttaattagatatgaaccccaaatcagagtgagaatctgtttgcaccaactctatcatgcatcttaaatatgactaactatctatgatggatgaggcctttatggtttatac

SEQ ID NO: 255604 - DNA, 452 bp, Glycine max
  unsure (1)..(452): unsure at all n locations
agctngaagagagacaacaatggtggtgaagaaaatgaaaaataaacgtggaggaagaaagagagagctgtgctggaagtttctggagaaagagagagaagattttgcttttaaaatggtttttcttttctttttcattttctttttaaaagcaattccacatgtcattttttaattggagcaaaaagggcccacctttacctttgacttgaccacatactcagccataaaagaagaaaaaaactggacctttttggatgctgaaatcatgcctcggtttgcgtaccgcctctccggttccagttcttcgcatttctctgcacccgtcggggcccattttcaaaggtaggcaatatatatatcaaaacgctcagaatgagaccctgagcgtggttcagaggttgattttgtttaattataagttgcacacaaaagtataacttttagactaa

SEQ ID NO: 255605 - DNA, 347 bp, Glycine max
ctgctatagtttttttcttttcacaatagttggtgaagatagaagcctcgctgaaattaaactagacacaatcatgtgacatggtaggcgggtatagttgcaaatttcaactcaactaactagtttttctttccacaagagttttgtttgttccggagatcacgtagctaagaagagtaaacattaaacaagaagattggtaattttttattttagtgcgcgaaaaccgaaaagggtctttgttttctttcatactataaatgtattatcaagttgcatagaaaagcttcaatagccccaagtccagagcgacttatcggttgttcgggacaaccttttagtttttg

SEQ ID NO: 255606 - DNA, 466 bp, Glycine max
  unsure (1)..(466): unsure at all n locations
tgcaagcttgtgtattcctgcatactactaatatattgaatngcccattgctttgcctgagaataacaattggttgaccacaacagcgctgggggcggcaacggacaatggtctttcaaataaacctgttgtacatgaacaaacattatatcatgcgctgaccgtgccaaacgaacaagcgaagtcattgcataattgttacactaactatattcaatgtacctgaacaaaatgatttccaaacacgtgaccgacacatatgatgcggtggccaaaagagtcaggtggtggttgacttctaagagggaaaaatgtcatgctttgttgttgggacaacgatacaaagattacgttataccgtgaagcaatcacatatcccatgtctgttatatccatccacttgtccacactaacctgaatgaaccaaacatacacatgtaagtaattaaacattgttattaaaaaa

SEQ ID NO: 255607 - DNA, 490 bp, Glycine max
ggatcttaagtcaccgcggctgcagctttggcgggttaattgtgagtccaaagaatcttctggtttagccttggaaaaactggaatcagcaataggctttgcattgttaggctgagttaatccagccactgccttcattcatgtgattatcaatgtttactcttgctgcactcacttcctgaccttttggtttttgattcttgacatcaagaaaaattaaatgcttgactacaatcagcatccctattatttaagtgtgaaataagtactatcttccattcatttccataaattatcatgaaattcatctctttctattccttttaatacatgttaaaatcaaaagataaagattaaaccagcctataagatttaaaagataaattcactagaaattacccttacctttcattaagttatcatgtattagtcatgagagtgaacactaaataagaacgactgaaatataaatatatacatgaagagctgg

SEQ ID NO: 255608 - DNA, 241 bp, Glycine max
tgccctccataagcctttccattcctcaatttaatcttggtagatgtcataccctagtttccttcggggatgatcatttgctaaagatttgattcttgccagcccaattgagctgcttaacaacagttgtcacacaaaccgccaggctattctatgctttggcagagaatgcataatatacccaaagggaaggcaaaatggtcatttggtgagtattttatgcccctggctcgcccgggct

SEQ ID NO: 255609 - DNA, 462 bp, Glycine max
tgcaagcttgccatgaatcagaaatctgcacttactgtatgagactgtggtctatgttcttctgcagagcaccatacagatctctgtccttttttgcagcaatctggagtcaatgagcaacctgaagcttatgctgcaaacatttataatagaccccctcagtagcaaaaccaacaacagcggaataattataatctttcaagcaacagatacaattcaggttggaggaatcttccaaatctgagatggacaagtcctccacaacaacaacagcttgtccctccttttcagaatgttgctggtccaagcaagccatatgttcctcctctaatacagtagcagcaacagcggtgactcaacctcatcattctagatgtggtgaaaaaggacgtgaccaagctcttacaagctggaatcatctaccccatttctgacagccagtgggtgagtccagtccaagtg

SEQ ID NO: 255610 - DNA, 425 bp, Glycine max
  unsure (1)..(425): unsure at all n locations
agcttcgaagggaagagagagaccaatctttgtacttatcatggtcttaaaggaggagttagctgcttgctcaaaatccaagaagagtttggcccaacacttagaagccacggagaaaaacatgctagctataatagggcggtacaaagaagagttaaaccagtcgttgacctatgagcaaaagctagtagaggacttcgcacaagcatacgctgagaaggaagcaagagggagggtgattgatgcattgcatcaagaagcgaccatgtggatggataggttcgccttgaccataaatggaagtcaaaacctcccgtgactactatccaaagcaagggccatggccgaagtgtgttcaaccccacagggaaatcacgggctaatcaattactgtcaacacatgatagatntaatggcccatataa

SEQ ID NO: 255611 - DNA, 459 bp, Glycine max
  unsure (1)..(459): unsure at all n locations
agctttcataagtgaaatcaggtgcaaccatctctctatagtcttctcacgaggcggaggttgagccatgttctcagtatgaaaattagtagtcgaatgctcaaaatcagaatgttcagaatcaccagcaacagaatactcaaaatgctcaaaatgcacagtcactatagccatgaacaagaaactcgaaaaggattgggctagagctgctaaagaaggccttatagttctcatgaaccttatggtagattttttagcccatgggccaaggttgggtccacttatctttgtacatattagattaagattttattatttttgggccttgtatttaggactccataatgtaggtagggtaccctacaaatgtacgatcctcaacccttgtatctagagaacctacactacgttttgtatcangggtaggttggcaattacacatgcattaaatgcactata

SEQ ID NO: 255612 - DNA, 459 bp, Glycine max
  unsure (1)..(459): unsure at all n locations
gctttatattntactagtgttaatgatggctccaaaaactggttgaacttggtggatcccaagtcatcaaatggttatgctaagggaccaacaatgttcatggctactgatgacttggtcgtggcaccaattccaatttcggctttatcattgctcaagcaatctaagatatctctggatgactcgaaggaaaaaagttaattgtcaccattggcattaaggaagtaagagagttttatctcaaccaactatagctaatttatgggtttttcttgtttttgtattcacactggattgagtttttggtagaatattagtagcatgtttgtattaacgttgcaattgtgacttgaattcaaatgtgccttaactgcatggtctcgttggattttcggtgactgggttcaaaagtatgtttgagagtgaacatagtttgggagtcatgtttggtacccttca

SEQ ID NO: 255613 - DNA, 403 bp, Glycine max
tagagaatcatctgagtcaaaacaaacaaagtgctataatgttatcacttaacaagcttccattgtattcaagcttactatgtaaacattatttgagttattagaatacatattctatcaaacatctattgtttgtgaaagctaggagtgacttcgtgacaaaaaatacttggctcttattctcaaaaggagattaagggtagtgccagaagtggcctacagagtacttgttgtagccacaagtggcataaagaatacttgttgtaatccaagttttgattagtgaaacccttcacagtttgaaagagaattggacgtaacccaagagttagggtgaactagtataaaacctctgtgttgtctttattggctttatataactaggtttcttttatagtatact

SEQ ID NO: 255614 - DNA, 269 bp, Glycine max
taactccctgaattgacctggtctcccaagttttttatattttaaccacacaggtgggctactatgcccaaccgataaactgtttcttaacaccaaaatttgagacatatggccccagtaaactcagagaaacatcaaggctccacttcccaatcttcaactctcgcgatgccaattcaaaggcagattggcgctggcatttattttaaaaaagggatattggtctaattaaaaccactatttgggaattatttatttgggtgttttaa

SEQ ID NO: 255615 - DNA, 369 bp, Glycine max
actttccctttttgactgtgacccatactcagccacaaaagtgaggaaaatctgacctttgaaacgctaaaatcttgcctcggtatgcatgccgtttctatggttccaatttctcgcgtttttttgcgtccgtcggggccagttttctaaagtaaccaatatatatatcaaaacgctcagaataaaaccccgagcgtggttcaaaggttggtttcgttaaattctaagtcgcacacaaaacgatgattcttaactaattaattaggaattaacccataacctcccagttatggatttctcttccttaattaacctaacccgcgtatcttgcccacactactcctattttaccaaaaacatatatgcata

SEQ ID NO: 255616 - DNA, 426 bp, Glycine max
tagagagaggaaaggaccagtcacggtgcctggctgatcttaaagaagagtagctgcctgctcgagaaccaaaaggagtttggctcaacacttggaagccatggagcaaagcatgctagctatcatagggcagtaccaggaagagttaaaccaatctgtgacccatgaacaaaagcaagtagaggatttcgcacaattgtacaccgaaaaagaagcaagagggagggtgattgatgcattgcatcaagaagcgactatgtggatggataggtttgccttgaccttgaatggaagtcaagacctcccacgactactagccaaagcaaaggccatcgctgaagtgtgtacagcccccgaggaaattcacgggctaatcaattactgtcaacacatgatagatatgatggcccatattattagaaaccg

SEQ ID NO: 255617 - DNA, 358 bp, Glycine max
atcaacaagaatcaagccaaggctattgtgccagccaatcatgggggcaaacacaccaaaagatatgatatggatgactaaatatccaaaggttaacttatcactttcaaattgagctttcaaaactatcttgacatgttgaagaaaaacaatgatttcaaatcacaaaatgtcaagagacttttatttttagaacaattacccatttcttgaacatatcctataattcaaagaaaaatatgccaagttgtacatgcaaacttaattgaccttaaatattaaacttgatacccacacaaactaacagaatttacaaatttaacaatactagcaaaaccacaaaacacctccccccata

SEQ ID NO: 255618 - DNA, 417 bp, Glycine max
tctcagctccctcagggatcaagccaagagcttcagtggtgctctttaaccccactaatttttttctgtgccttctcttacataggtgattcttaaattttctccatggatctcctcacatgtcttgttctaaatgtggttaacatgattctttagagatttcaccgattaaacttgctatagaaagtagatttgattctctatggttcaaatttcttgttcttgttcttgaaccatgaattgggttgagtttaggatcctttgagttttgtcttgttatttcttgtggctgaaacctaaaccctaaaattcttacaaaaatattaaagtacaataaaacctcataaatctagagtgacttgttcacctattggagatttgtcaaaaaagacatgtctagtcatgaaacttgtcaca

SEQ ID NO: 255619 - DNA, 310 bp, Glycine max
  unsure (1)..(310): unsure at all n locations
aaaaccgattcttctttttccctttaactggaagggagtaacattttgaaatatttggccagagtcggcgggaaaaatccaattgagaggcctgattaacaataactgaatgtgggtgagaaagggacttgggatttaactgaagagcccaaatagagaaaaaaaattggacagtcatataactcacgagaattttcatcttaaaagatgtggttgttgttgttgcttggggngggagtggtttcagcttgtggactgattacaacggcatgttgattgtggaaaagaggtatgtttccatagaaagtgt

SEQ ID NO: 255620 - DNA, 449 bp, Glycine max
  unsure (1)..(449): unsure at all n locations
gcttctttcatgcgtacacctgaggccaagctccatagttttcttgcttnttactgcagtcgctgggacataaggggggagattgatctcctaattcagattggaccccatgtctgccagatcactttccaagtgatggatattaacccggcctatagttgccttttaggctggccttggattcactcaatcggggtattcccttcaacactccaccaaaggttaaaatttttggtggaagggctgttaatcatagtctcaggggaggaagacattctggtaagttgtccttcttctacaccatatgtgtgaagccatagaggagttcttggagacatcccttcaagctctggaagtggtaagcaacgcttatgttgaatctcttccggtgcaaccccgctcattcacgtgtgcattgatggtagccccgtgtattttatgacatgggt

SEQ ID NO: 255621 - DNA, 236 bp, Glycine max
gacaccttggcaccggcactcatggttttgtgggtgctgatctaactgcactttgcaatgaagcaaccctgatttgcctaagccttatgccaattctaaaaaaacttatggttcttgttctgattatataacacaacaacctgctctgatgaatagtgcaacaaactcatgagatcattcggtgatgcaatttcatctgtctaaatatgtaagtggcctccatcgtgtgtaacttc

SEQ ID NO: 255622 - DNA, 280 bp, Glycine max
acctttacattcccttcttcctttgccaaaatagaatcccccaggactaaccacctgaaatcttttgcgactttctttccttttcaaaagacgaaagactaaccgcccaaatcttctggtctcctttttcccttgtaaagaattaaaatgaacagtctgagaaacttttattcttccttcccataacaaagattcaaagactacccctgagagtctttgttcccctttcaaaattaaatgctactgctgaaacttttctaaacattgagtcatctttggg

SEQ ID NO: 255623 - DNA, 182 bp, Glycine max
cttatgatagcccaccgatgatcccattactggcttccctaaactctttttctttcttatgccgatcccatgcctagcgaactccttggaggacctttgcattggggtcactgaaaccccgtgtcgcaacctacccttctgcgggagggcgaagcgtgactcgccggatgcgtgttccacca

SEQ ID NO: 255624 - DNA, 431 bp, Glycine max
  unsure (1)..(431): unsure at all n locations
agctaatattanaaagaacataaagaatgttgtttcattggtanannngacagaagtcttgcttatactatactcttacaatcctccacaagcacattttagcctaaacgctatactcggggtcatcaaatctcgattaccagccttttggtggtcgtggaagttataatataggccgtattggccacatagcagggcattctgtatcccgcggtgggagaatgtatgttcagtgtgaggtgtaccataaatatggccacaatgtgtcgatttgcttccattgtttcgagtgtgacctcattccacatgttcttgtgaattcgcaaccttaatacagggactaactgttagtctggtaacagttgctagttattttgccataaactcctggcaaccttcctattttatcagaaacctattaaaagctcctg

SEQ ID NO: 255625 - DNA, 435 bp, Glycine max
  unsure (1)..(435): unsure at all n locations
ccatttgaaaacaacattttttttaattatcttattcaaaggtgctgccaaggtactaaaattcttcacaaatcacctataaaaacttgctatgccatgaaaacttctcacctcggtcacacttttaggtgtaggccactcttggatagccttgaccttttcttcatcaacttgaacccctttggaactcactacaaaaccaagaaacacaacatggtctttgcaaaaaaatcatttttcaaggttaacatacaattgttccttcctaagcacacacaacaccgattntaagtgtgcaacatgcaaatcaagggttgtgctatgaacaaggatatcatcaaagtacaccaccacaaatttaccaatgaattctcttcaaacatgggtcattaatcttcataaagtgcttggtacattagtcaaacccgaaggcat

SEQ ID NO: 255626 - DNA, 356 bp, Glycine max
tggtcaacaaacattggttatgctgaacaaacaatttctaacttcttaaggcaatcatctaaatgatccttagaaggacaatcaaccaaactccctcagacatccatcacataatcccatgcatttttttgaccaactagagatttacattttaccttgacattcttgtcaatgtgaaacctacacaacaagttggtacacccagagaatacagttttcactacattcatcaacgttaggtctctatcggtaacaataactccaaggaggacatcacatcttataaaaagacattgataccgttctatagatcaaaccatattatttagacgttctccctccaataggccaaacca

SEQ ID NO: 255627 - DNA, 340 bp, Glycine max
  unsure (1)..(340): unsure at all n locations
cattggttctaagctaactgctgatatggctcaaatttgttttcctaaaggcttttagccttcgttaatatattatgcgtttacaaaaacagtcaaaccaatttttttgtcgagaccaaacaactctagaataccaaaacaaaaaacactaattntcttttattaatattatgttggtccaattgaaactaagtattggagtataaatgtgtgatgaaggcccacattgagtagaaatgaaaaggttgaacattatataaatgaggaaaatatcataaacttatgtaagggtttttgagttaaagtgtggtatcaaactttcttgtgtgattgttatgac

SEQ ID NO: 255628 - DNA, 229 bp, Glycine max
taacctccaatttataaatacgcaaccaaataaatagtaacgtctggttatctaaactcagaagaatactgcacctctttgtagtatctttttttactgattaaattaacaggccttcttgtaattgcagggcttatgcttttactccccaagtttcaattttgagagaataataatgcttttgagaatttaaccaaaagtctctcattcactgcatgacttggggcta

SEQ ID NO: 255629 - DNA, 126 bp, Glycine max
tttacacccatgtttattgcttactaaactgttagattgccaaataatttgtcattcatattaatataagatccctaaaactgttggaggaaacaacatcacttcattgttgtactatgtaaccac

SEQ ID NO: 255630 - DNA, 436 bp, Glycine max
  unsure (1)..(436): unsure at all n locations
ctgcagctgagggacccccattcccagtttaatatctcttcaacataatctttcttcctacacttatactgaccacttctttcacaactaattaacacaaatgaagtccttcctctactaccagtggttgtggtagacctcataatgaccgccacaaatccattttcatgagcaacggatcgagtctattgcaaaacatcaatctgggtaccaaacacctataacacaacccacanccatttagtcttctaagggacattgattttatgaaaataataacaaaaatcaacattattacctgagaagtattgaacgcatccaaataatcaacatgttgttcattcacaccacattcttgtgcattttgatcatacatatcaacttctttagatattatactggcatacatccattgatctttgtccatcttaacaac

SEQ ID NO: 255631 - DNA, 387 bp, Glycine max
ggtctcttttctgaaggaaaacccaaaaaaaataccatattggctatttctttacgtgagcgtgacaagaattagttgagaagcaaataattatgatactggttaatattactccacaaattgaattgtattgagccaagagtttgaatatcggtgatattatttaatactactcaacaaacttaaaattatgaggttcaattgaagataattattgaaatattatatctatattaaaaattgatattgtgattctaattatcttttaaaatcttttatcttctttggctaatatgctatctattagaaaatgaaattaaaaattattaagtgcgtatattaatttacatataattattcagttagatcaataatcttagaatcgag

SEQ ID NO: 255632 - DNA, 352 bp, Glycine max
  unsure (1)..(352): unsure at all n locations
tctgctggatttctgatttctgcgaatngcattgcttcttaaatagggaaaatccttgttggaccggttctgggaatatctctgggattggtccaaagaagtcccaccattgcaaaaaccaattgggaaaattgtaaattgggttggtcttgaaatatatcacccatgaatgcttgaagcgggtattttggtgccaaaacaccttggtccaagcattaacgtaatcccaataggtataacctaccggatcaaatggaactgaaaatctcttttcttttgttaagtccgaaccaaagtgttttggtggaagaacttttaatatttggatggttgaatgggtgtttaaggtttg

SEQ ID NO: 255633 - DNA, 297 bp, Glycine max
aaactctgcccaaaacacaactcaaaatcacagcttttcacatacaaataccccagaacatttccttcgttccaattcgttaacccgtggatcgactcgaaacttttactggaagtctctagtacataagtctacattttgaccgttgggatctgctagaaaacatccagaactcattctgtactactctttccacaaccaacaaatacatagcatatttctgcacttatgcaaaattctgctgcacattccaacagcaaaattctgcataaagtgcagatttcgaaaaccactctt

SEQ ID NO: 255634 - DNA, 311 bp, Glycine max
tcagctcacacactctataatagctaagctcaccctcatgacaaaatacatgaaaattcaaaaaaagtccctactacaaagactactcaaaatgccctgaaatacaaggctaaaaccatatactactagaatggccaaaatacaggcccaaaagaagaaaacatctatcctatttttacaaagaaaattgattcaaccttgcccatgggctcaaaatttaccatgaaggtatgaaaatctaggtctttttacaactctacccaattttgggagctttataaaaccctgggggtagatgatcatcctcccct

SEQ ID NO: 255635 - DNA, 421 bp, Glycine max
catgaattacaattctattagaatccagtattttggcacaaaaactctgatccaatgcgttatcaaaatatcggttcaattggcgggattcccttgatattagcaaaagctcccttcgtacatattgacataactttgttccttatgtttggtttgatcctcccaaatgtgttggttagtatgctctattaataaattaaattatgggtactttctccaacagccggggtgtgataccaacgcacttgagatctcccggttgttttcgtgcattgtgccatattcattaaaaaaaaagttcttaataactgttcaacctttaccctcaaaggaaatatattcgacattaagattgctttgcaaattataaagaaattattttgatcttaagtgatgagtcgaccatcataattatatcctt

SEQ ID NO: 255636 - DNA, 345 bp, Glycine max
acacaaaacctcgagcataatatcgtagcagaatacatggagaacagaacacaagattcttaaaatagccactaaaatgccaaatagcataggaattgaacaaatcatatttgaagaaatttaaaatcaccagccaaagccccttcaagatcccaaacttgataaatcctgtttccaccaccaaagagcaaaatatcatatcagtaaccttagtgcataaagaataatcaacaagaaatatccacatacaggaacaattcccttagagcaaataaaaactgtcaaggtttctgtacaactctccctcacagtgagtttctattttgtgggggatgggggggagat

SEQ ID NO: 255637 - DNA, 367 bp, Glycine max
accctcattaagaactagcttttttttcctctattgcctttaagtgaatacacctttgtttggttctctatttggttcttaaccctctcatgcatcttctttacaaattctgacctaaattccccttctttatgtattaaaaaagtgttcagtgggaggggaatgaggtctaacggtgttaggggattgaacccatagacaacctcaaaaggggactgcttggtggttctatgaacccccctgttgtaggcaaattctacatgaggaagatactcattccaagacttatggttgcctttcagaagagcccttaatagggtggataaagacctattcactacctctgtttgcccatcaatttgtgatg

SEQ ID NO: 255638 - DNA, 446 bp, Glycine max
  unsure (1)..(446): unsure at all n locations
agcttntatataangtgaaccatcttatctataaacacatgttgagttttattcagaaaattagagtttatctcttttatcttagtgagagtgattctcctaaattcttgagtgattcaagaataccctggctgtatcaaaggactttcacaacctttgtgtgttgccctcactggaaagagtgattatttccttcctttcatcttcacccttgttctttcaaaccacaattccagaaaatccacctcttcccagaattatatcgtgtccataactcccattttacgcactcaaattaagtgattcttgagcctaaattgaatatcaaaacgagacctttcacctcgttttggaatcacctctattggagccctgtagcttcacttattgtcatttctatatttatgtccagccaccacttaacctatgtgttaccatcccattca

SEQ ID NO: 255639 - DNA, 394 bp, Glycine max
  unsure (1)..(394): unsure at all n locations
atgccctcgagaaattccaatgctcataacttttcatatggatgnccgattaaagagcataatatatcgagacgctcgaaatntaacaacggaagctctcgagaaatgcaaatggtcataactttttacacggaagtccgattccggcgcataatatatcacgacgctcgaaattgaacaatggaacctttcgagaaattcaaatgagataacttttcagtcgaatgtacgattctaggacataatataacgagacgcttgcaattgaacaacggatgctcccgagaaattccaatggttataagttttcacatggacgtctgattaaggagcataatttatcgggacgctctgaaattaacaacggaagctctcgagaaattcaaatggtcat

SEQ ID NO: 255640 - DNA, 279 bp, Glycine max
cgtattgcattttcttgatgctacaagcaatggagcatcttctttgattatggaacatctccttggacttacatccgtttgtcacgaaaactaccctcatgtgttcttcattttgttgatacgggaacaatattttccttgtcaacggttccccaactttgatgaggatcatggcgtcttgtccatatgtaaggtggaaaggaatttcattggtggttgtctatggtgagcaatgatagggccaaaagatactgcggagtttttccttcatataccctt

SEQ ID NO: 255641 - DNA, 396 bp, Glycine max
  unsure (1)..(396): unsure at all n locations
tctgtccctatcttcaatggggaaaattatgacttttggcgtgttaaaatggaaacatattttcatctaagattatgggacatagtagaagaaagcttcaccgttcccgcggatactttagctcttaatgcatctcatgaaaaagagttgaagaaaaataaacagaaaaanttcaaggtgttgttcaccttgcaacaagcggtgactgatccaattttcccaaaaattatgggagctaagactttcaaagaagcgtggaacacattgcaggaggagtttcaaggaagtgttaaggtacgtgtcgttaaacttcaatctctaaaaagagaatttgaactattgaagatgaaggagtctgagacagttaaagattactattctaaagttaaagaaata

SEQ ID NO: 255642 - DNA, 194 bp, Glycine max
ctctaatgactggtcccttcctatggaggattgcatcaaaagagtacccactggagacttttgacaacgagaaaaggatgttgaggagaatggcggccgacttcttcgtgagcggaagcatattatacaagagaaaccatgacatggttctgctacgctgcgtgaacgctaaggaagctaagaacatgctgggg

SEQ ID NO: 255643 - DNA, 427 bp, Glycine max
gcttgcccttgatatcttcgatggactcattgtttttttaatgaccaatccatgggataaaggtagtgttgccatattttcaaagcccgtacaaggcatcaacttctatctaaggtgatagtatagggtggaccacttaacttttcactaaaataagcaaattggatggccttcttgcaacaacacagccccaatcccaacatttgaagcattacactcaatttcaaaagaattttgacagtttggcaacgcaagtatacggccattagttagcgtcttgcttaagactattgaaagcgtcttcttgtctctctccccatctgaaaccaacattttttttgagcactccattgagaggtgctgccaatgcgctaaaatacttcacaaatcattttacaaaacttgctaagccatgaaaactcctcac

SEQ ID NO: 255644 - DNA, 305 bp, Glycine max
aattctaatgtcataacaatgaatcgggatagattaaactttcttttttgttacatttaagccttggccaaacactattccaatgtatttatttaccattgcagcccttgagccaaacacttgatttttgtggaacactacctagataaaagtccctcctaatttaagtcaagaaacaaggtatttgatgggattctatattggtggtaatggagtaatactctttttaatatgggtataagggaaacgaaagaaaagaaagaaaagaaaacccgtcttaggataaaaaagccaatatgtcttta

SEQ ID NO: 255645 - DNA, 207 bp, Glycine max
cttacatgaacaaatgttcctaacaaatggagatgattcacaagccgatgccggtgatcctaacacttagcaaagtaaaaacaaaagaagacagcaaaaaacattggtccttagcatttgggtgggttacccttgatatattcccattcaccacttacttgaagggccgatagctccaaaggcaacatcgttggccacaactttcac

SEQ ID NO: 255646 - DNA, 426 bp, Glycine max
  unsure (1)..(426): unsure at all n locations
taaaactaagctctgagagccttcggtatcttatagaggcttttttatatctactatctcanggaaacatcgatattaaagtagtcaatgaatctagaggctaagacaacatatggaaactcataatccactaatcgatggctctttaacataatatcttcaatcagaagtatccaattcatctgaatacctaatttgagaccatatatgatctataagttgtcgttagttacctgtgcatgattgttggaccttggtgcgagaatgtagataatgagatacactaacatcctatcttccatagttaaaccaccaactcctatgtaggttctcatagtccttgctaggtcaaggagcatagctcttgacatctgcatcttgctgtagccatccacagatactttgacttggagacttccacatatc

SEQ ID NO: 255647 - DNA, 338 bp, Glycine max
agtattaccaaactaaattggtccacttctattggttgtgattgcgaaacaaacacttgtatgctcttgtgagtgagtgaaacaccttgatcacgggacgacgtgtgtgtctttcttgcattaagtgattaaattgcccttctctggcggtctccttgaaatttgagcctgtatatccttgctatggctcctaaggaggacattactggaataattaatccttgtcccatccttattatgatcttgggtttaaaaatgcctgtgttggatatgttaggattgaattgatcttcactcacggcaatgtttatgcctaccacttagagctttgattattg

SEQ ID NO: 255648 - DNA, 336 bp, Glycine max
tcttgagttgatgggcctggaggaacttgtgtttgagtaataaaaattgaaggagcttgtggagtttaaaaagaaggaacattagctggtcaagcccataccttccttgcccctctgaagttaactgtcagatcatccacattctgtggaagcaagactacaagagattttgatgatgccaacagtcaagtgttcttcatggataattcaagtgaacttcaagaaatccaagagatacaagttacatctacaagttagattctcaagttggaagtagaagttactggaagttggaaagtagaagtgaaagttattggaagttgaaagttgaaatgg

SEQ ID NO: 255649 - DNA, 436 bp, Glycine max
  unsure (1)..(436): unsure at all n locations
ncagctttgctgatttaattttcacttactattggtatcgaaagggnctgaaaagaagaaaatttaatcatcttgcttggacgaatgagaaaactggggcgaatgaaaaggatgagagtgaaggagaaacccatgctgcgactgtcattcctatacggccaagtttcccaccaacccaacaatgtcattactcagccaataacaaaccctctctttacccaccacccagttatccacgaaggccatccctaaatcaaccacaaagcctgtctaccgcacttccaatgacgaacaccacctttagcacaaaccaaaacaccaaccaagaaatgaatattgcagcgaaaaagcttgtaggattcacctccagttccggtgtcatatgctaacttgctcccatatctactcgacaattcaatggttgccataacccctg

SEQ ID NO: 255650 - DNA, 430 bp, Glycine max
  unsure (1)..(430): unsure at all n locations
actaacctcgtgtgtgcattgtgaactgcgtattatgcatatatattgtggctattncacattctgtacactggattctaagcacccacgggtttgagtaaaaaagggccctacacccgggttcatgggaatttaaggagtggaggtgaatctatcatcatgtgaaacctcggctagagctttctctctttataatgtgttgacgctggtattccataccgccacaatattattatcttgagtgatgatacctctagaaaacagccgtgtgagttatgaatggttggggaaatagttattaaagacccctagatattgtcttaggtttccaaataggggcaaagagcaaacacactccgtgccatttgttctaatgcanttttggtgaatagcactagtttatacgtatgctagtgatgtttggataata

SEQ ID NO: 255651 - DNA, 308 bp, Glycine max
acttttttaagcgttacaaagggtgtataaaaccgcctttgatatgaatggtatgaagggggctttataaaatctgcccttgttgctaagcctactactacggttttgtaaaaacagcctctatctaaagtctcatatctataattacttcaattttttgcttctcaggctctggaacacatatgttcctttacatctcactctcgccctttaccttggcgagacctccgtaatcttgcacaacctccgcccggaccttctaagtttggcgcaagctcattgtggatgcaaaggtagtttgtcttaat

SEQ ID NO: 255652 - DNA, 180 bp, Glycine max
tgatgaactacaggcaaaattttgttattgccccatatctacggcggacacccaacgcttaaagccggatgagatacgcgaggagacactcaacaatgttttattaaatgaaaagcgagtaacatttcgggtgaagcagagataatttgaaaaacgttttaaccatgactcttttttttt

SEQ ID NO: 255653 - DNA, 320 bp, Glycine max
gatccagacagcctctagagtcttaggaagggtattttaaataagaaagggaatttcctattgaaagtacaaaaggtttggcccggaaatttaagttcaaaagtctttttcaagagatatactctctggtaatcgattaccagaggatgtaatcgattaccactggccaaaaatgatttagaacagctattaaaatttgaattcaaaatttgcactgtgtaatcgattacacatatatggtaatccattaccagcagttattgaacgtttaattcacatttaaagcttgaatcgattcacacatactgttatcattacta

SEQ ID NO: 255654 - DNA, 431 bp, Glycine max
tctaacttaaattgattaaacttagaactgtggtattattttctatatgtgtcatcgattacacacggcacattttgaattcaaattttaatagctgttgtaaatcagttttggccactggtaatcgaataccaccgattaccacagagtaaatttcttgttaaagactttttaacttaattttcttggccaaaccttttgctacttcaattgaaattcccttcctatttaatataccctttctaagactctatagactgtcttgatcatccatcttgaatatctgtaattgctttgtcttgaataaagctttgagacgcatgtgatcttttggcatcatcaaaacatcggcttgattctttgtctaaaatatttgttgggtcatcaatacacgatcctaactgatcactcgagtttgaaggaattgatgt

SEQ ID NO: 255655 - DNA, 331 bp, Glycine max
cacctgggctgcagctgcaacataatctatacgaatatgtgtttatttttgaccttagttaggattcatcccataaactatcatggtaactataatggtaaaattctataaaacacctattgttaggaaaaacacttatatataaaagatggatgatactccatgactgcatttaaaaaaatgttagctgaaagctcagtgattctaatgcctaatgcaaactaaaagcaccaaaattacctgttttaaatagcagatgactccaacatttaccagtttccaacatcattttctgtgctctgtgacagattctctccgtcaatccattctg

SEQ ID NO: 255656 - DNA, 361 bp, Glycine max
ctatacaaaatgactttgcttagaggtctttaacataatcgatgccatcatccatcaaatatatagtgctaatttggattgaaaatttacatcttcttccaagttcttgatcgtggagacaagatcgagctgctcgtggataagactgacaaccttcggtcacaggtttcattttcttcctctattcttttagatatatttgtaatctaatttacacgactttttgttcatttttcttttattttattgttaaatatttcttacattatttaaattttcggcgttacgatatgctgacatcattagtatactgtctttaatttctatttccactagttatgcgacgacttggtattttata

SEQ ID NO: 255657 - DNA, 379 bp, Glycine max
  unsure (1)..(379): unsure at all n locations
cgtgagctaactccacatccttttgctattgcaaatgcaacatacaagtaatttcattttttggtggcaacaattcaattaattaaattgcaagtcaaccatataaattattgcagattcagacttatgattaatgagggaatcaaccaatcaatattggttagtggtgaaaatggggctgggaaaatggaaagcaccaagtgaaggcttaagattcctaagaaaaagggttgactctgaatattggctctatatcgctattaataaatagttccttaagaaaacacatttgcttctactgttctcccaacacttgaagggagctttcttaaagaatcgtacacctatnttgtatatttatttctaaatctattatata

SEQ ID NO: 255658 - DNA, 275 bp, Glycine max
  unsure (1)..(275): unsure at all n locations
tcgattaccagagagtaaatttgtttgagaaagactttttaacttaaatttcttggcccaaccttttgctacttcaattggaattcccttcctatttaatataccctttctaagactctagagactgtcttgatcatccatcttgaatatctntaatttctttgtcttgaataaagctttgagatgcatgtgaacctttggcatcatcaaaacattcagcttgatcctttgtctacaatctccccctttttgatgatgacaatccctganatcaa

SEQ ID NO: 255659 - DNA, 392 bp, Glycine max
  unsure (1)..(392): unsure at all n locations
naagcttcttaatcacctcatttataattattatgccacgaaggatgtgtctgtctttgatgaaggctgtctgtctctcatcaataaggacagatataacatgcctcaatctgtttgctaataacttaactatcacctggtacatacactcaatcaaggagataggtctgtaatcatcaaaggactaagggtgtttaactttgggaattagagccaaaaaggaagcattattgcctctagggaagcttccatgcacatgaaattcatctaccaatcttctgaaatcagttttcaacactccccaaaattctttaatgaaatggaagttaaatccatcaggtccaggacatttgttcccaccacagcttcacactgcttctttgactcatgat

SEQ ID NO: 255660 - DNA, 415 bp, Glycine max
  unsure (1)..(415): unsure at all n locations
tgagtttggggaagatatggggcgaaaatggcttcacccctcccgtatataaattttcacgtcagacacgctcgcccaagtgagctgatgattttttctttatttgccaagaaggggtgttcattgttatatccttttttctaaaaatcctataattgcatataaacttacgcgaattcaggatataattctaggaaatgaacaactatgaaacaggaaattaaaaagcaaagttagagatattaggctgcctcctaggaatgcttttntaacgtctttagctggacgcaggaagatgattgatcgatcctggggctagcacctgttcggacctgcccctaagctaggacaaaaaagtgtcatcctgaaaaatatgaagcatactacaagaccttggatacctttatttgcccta

SEQ ID NO: 255661 - DNA, 308 bp, Glycine max
gagcttaactacaccccccctataatagctaaactcacccccatgacaaaaaacatggaaataccaaaaaaaagtccttactacaaagactacttaaaatgccccaaaatacaaggctaaaaccctatactactagaatgaccaaaatacaaggcccaaacgaaggaaaaacctattctaatatttacaaaagagtggatccaaccttgacccatggactcaaaaatctatcctaaggttcatgagaaccctagggccttctttagtagctctagcccaagcctctttgagtcttctatccaataccc

SEQ ID NO: 255662 - DNA, 339 bp, Glycine max
  unsure (1)..(339): unsure at all n locations
agctngtgtctcatggctgacattgatgtttataanaccaaaagcaatgttagtgactcttcttttgaatctaacacaaactatgataatctacttgatgcatttaaagagttactatggaagcaaagctttccaagtttattttgatgatgccaaagactcatgtcaagaatcaagaagtaaaacaagtttcaagaatcaaagagtcgttcaatcaagaatcaagattcaagtgaagattcaagagaagactcaagatatgctagaacttcaagaaaagcatcaggattagtataaaaagatttttttcaaaagaaaagattgaataacacaatttgt

SEQ ID NO: 255663 - DNA, 424 bp, Glycine max
  unsure (1)..(424): unsure at all n locations
ctttagccatgctgcttggaagttaatcaatgaatttatttgtcactgaaanttggaacataaatgaactgctcccttactatcattctctttctctattttttctctctctctagctgccttgntatgttatatatctatatgcatatacaaatgatactctctttttacttcatggtgaataattaacctacctacgtctacaatgagggactgaaagttccaagagaagagtttgaatccagagaatatcagctgtggcagcaactaaacttctatattttgggaatcaatgtcctgcgttaatcttatcactgtaatgccacaaaatcatatggaccattttctgcaacatggaatggaggtagcaaatggagtcaggctcaaaacctgaaatgttgtgggatgcgttacttggacatat

SEQ ID NO: 255664 - DNA, 395 bp, Glycine max
cgcttcaagaatttcccaaactcccctcttcttttttggtttcaggcttaaataggtggccttgttggtgcttgcgcgcttaacacaactctggctcgcttagcgcgcattaatgaatttcagcttagcgcatgtcttctcgctcagcggatggactcaagtgatgtgcttagcatgatgatacctcgctcaacgaacatgcacaactcatccttcttccaaattctttctcgcgctcagtcaaaggagtgttgtgcttaacggatggctcgctgagccggcaaaatggcttatcgagcatatcaaaattagcaggtcacaaacttgcctaattagcctgaaattgagaggaaatgattattaaatacccaaatgggagtctaaatatttattac

SEQ ID NO: 255665 - DNA, 351 bp, Glycine max
  unsure (1)..(351): unsure at all n locations
tttcttacacttggatgatcgggccactcaagaatgacctttattctcttatggttcatgggaaccccttgatcacaatttaaaaaattaagaaaagtaaagcaatagaacatacctttttctgtattttcatgttgattattcctaccaaaaagtatgacaaacctaaggtgtcccatatgagtgcctaagtttgtattgaaactaaaaataagaacaaacctacctaatgagtccctatgtacacaaatcatgaagatgttgggtgcacgagtgattttacanaagagtgttgcaccacccaaaacattcatcacaccacctattttanggatttggtgcctaataata

SEQ ID NO: 255666 - DNA, 427 bp, Glycine max
  unsure (1)..(427): unsure at all n locations
tcaagcttatgtatgcatgcttgtggttngatcacccattggtgtgtgctggtaggaactttatcattgacaaatgtactggttccttggaacttggtagaacacgactagaataaccgtagtgctagacatagtgtgcagggttctagtttttattatgttgtgcttataatgctggttaaattaggctaagttcaataagagacatctgcgaatgaagaatagtttaaattaatccaaactcacgagacatcggtgttggtatttttgtccttaacatagaacacaagaataatttcaaatagagaaaaaccctaattgcatcaagtatctcggtggaaggacccaatgcttatacttatttgtnttcacactcaataggtcaccgttactatttctttgattacaatagaatatactttgtttc

SEQ ID NO: 255667 - DNA, 434 bp, Glycine max
  unsure (1)..(434): unsure at all n locations
tgcctcttttgtgacttattgctacaatggcatgtcngcttggcatccctacatcaaagctgtaaaatcagcacacatgtaggttacaaatgaaaaaaagaaaaaatatacagaacacaacctgttagttgccaaactctacaagtgcatgtccattcagctaaattgacctcaactttttccccccacatgtggacctcatatctcacgcccatgttatcactacaccaaattggagtccattgattagcaaaatgaatctccttttctagtcttttgtattgaactggacataatggtccaggttttccagaaagtataaccttgtgggcagccatggttctcgtgatgtaacatctaatttgttcaagcatggtgagaataggcttgctcctatactgcanaatcttggcattgaagacctcacatgtgtt

SEQ ID NO: 255668 - DNA, 249 bp, Glycine max
atgcatcaataacttctcgtccctggaatatgcacccatcttacgacaatacatttttaggtgattcttaggacaagtcgtccctttgtacctatcaaagtcaggtaccttgaacttcgaggggatgacgacgtccgataccaggcataggtcggtcatgtctacgaacggataatcgtcgaatccttcaacagcccttaacctctctttgatgagatcgagtttcccctttccttctgctggcatggg

SEQ ID NO: 255669 - DNA, 437 bp, Glycine max
ataagtgcgggtctgggagacgaaagtcaagtgttcgctatatgtgaagattatgttccaagtactttggatttggtccgaccatgccctcctgatttccagctgggaaattggcgagtggaggaacgccccggcatttacgcaacaagcataatgtaaacctttacggttttaaaagctctatagttgggcctaggctttagagttttcattttgttaaggctttgtgtcttttgtttttgaatttataatacaaggatctttcttcatctgttcctagtctctacccattctcattcatttgcatgtttacttctttttctaaaacggcatattcgatgacgagtcccccgaaggtactaatacctgggacccgtctatcaacttcgagcaagaaatgaatcaaacggaagatgaaggagatgaggatgtgggac

SEQ ID NO: 255670 - DNA, 211 bp, Glycine max
  unsure (1)..(211): unsure at all n locations
aaaaaaaatgttccaactttcatctcctacccccaaattgggcacggaggggggaatgaangtgaatattggaattggaatgaatgaaatttattgggttccatgtcatgccatcttttttttacaatcccaaccacacaatggaatatgatatcatgtccttttctcaatccaacatatacctactatacttacctctgtgaaactggaa

SEQ ID NO: 255671 - DNA, 353 bp, Glycine max
acgcctggaaaatggtactcgctttgtgttggttcatggcatggtatcaaagcctctacaatcacatggtcaagaattcaatcctctgtgcctttatttttctaaaataaagatacatttcagtacaaggttgggcagacatgtgcaatgtgaacatgcttcaagcttaaaggacttttgcatgaggtggaatgttagatactgaaactgaccacaacacaagaaagggaaatatagatgtgtggtgcactaggcaaaatcactgatatcagaagagaatataccagtgaaataactcaataagagaaatacacgaaagaattagttctcgaaatgaataaagaaaatgatga

SEQ ID NO: 255672 - DNA, 396 bp, Glycine max
catggactcctctaaggacaatagcatcatttcttgcactaaattgttggaaagaggaaaccatcttctcaatcaaattctagcctcaacaggagtcatatcacccaaagcttcaccactgacattatcaatcatactcctctccatgttgtcaagtccctcatagaaatattgataaaggagttgcctaaaaatctagtggtgaggacagcttgcacacaataacttggatctttcccagaactcatacaagctctttccactaagtagcttgattcctgaaatgtctttttgatggaaatggtgctaaatgctgggaagaaattctccattaacaccctctttaggtcattcctacttaaaatggacctgggagataagaatacaaccaatctt

SEQ ID NO: 255673 - DNA, 397 bp, Glycine max
  unsure (1)..(397): unsure at all n locations
tttggtccaaagagcctgtgtctataccattcatggccttaatcatgttctgaggtatacaaaacattctagaattcaaagatttattccaagatcattattcacagttagtcgttcactcacagagtaaggtcacactctcaccgatttttggttcaagcttttctttcataatcagtctatctagtgactaaccattctattataagttcacactcttgttctttctttgttcaacatgcacatttgctcaaattcatgagaggaaacacacatttcatcataagcatgcattcaatttaaaacaaggcatacaaccattntcacanaatatataaactacttcactgccataccatcaaaagttaagttaaactgttcacgatgcttcaagatg

SEQ ID NO: 255674 - DNA, 419 bp, Glycine max
gcagcttaacctattggctctacaggctttatattttgtggagccatccaatccttgtgttcggactctcaaccacttatgatagccgccgatgatcccattactggttcccctaagctttcttgtctttctttacgtcggatcccatgccttgcgaactccttggagtaccctcgcgttgggggcactgaaaccccgtgcgatgaaaggcgtgatgcttttgtctgatggcactcctctcatggggtagccaaatggtcttatggcgaggacgggattataattaatacaaccctttggttccatcaaaggaacattgggacatccttcgcatgaagatagaattccaattccagatgctccctctttgcttgctaagagttgaatccaattcaccctttctttctctgtgcatgaac

SEQ ID NO: 255675 - DNA, 366 bp, Glycine max
aaaacatgaaaaataggatttgcttgtgagaggttttgctcgaatttgggctgccccatgtttgatactttacatagaggcagcgtggaaaacaccttgcaatagtgtgtatacataggtaaatataaggagtatgaaattcctagcaaagtgtgaatgattgtatgatagtgtggaatgctttttttgaatgcaaatatatgcaggatgtaattagctctccaatctgcatataaataaatatgagtgagacattaaaaatttgtatggcgtacttcaaatgtatgtaagtagtttgtgatagcagatgtttacgatataaatttatgtgtaaaagttgacgcaacatattgagcatgaaagtgt

SEQ ID NO: 255676 - DNA, 445 bp, Glycine max
  unsure (1)..(445): unsure at all n locations
agctttgagccaattcaaacgacaataactttttactcggatgtctgattgagtcccgncatatatcgagacgctcgaaattgaatgttgaagctctgaaccaattcaaacgacaataactttttactcggatgtctgattgaggcccgctatatatccagacgctcgaaattgaatgttgaagctctgagccaattcaaacgacaataactttttactccgatgtctgattgaggcccgttatatatcgagacgcttgaaattgaatgtggaagctctgagccaattcaaacgacaataactttntactcggatgtctgactgaggcccgtcatatatctgagacgctcgatatagaatgttgaagctctgagccaattcaacgacaatacattttatcggatggcgattgaggcccggatatatcgaacgctccaaatgaatg

SEQ ID NO: 255677 - DNA, 334 bp, Glycine max
  unsure (1)..(334): unsure at all n locations
atgttttanaaatactcctaattaatatttgaatntttattcccgtatcaacatatatgcgaggggtagagggcgtaacactcgtcgttccgtataatagaaagccgagtggaagagccttggctatctctataaaaggatacctgtcccaggatttcggatccatttgcacctacaaggataaaacataccttgttgagacaagctgggagagaaacagaagaaggttgttgctgttgntggtgtgtgttcttttgatggaaataatggatgacctcatatgtgcggaggcatatgagtatgtagcattggtgtctaagtctctagatcttct

SEQ ID NO: 255678 - DNA, 115 bp, Glycine max
aacaaaacacacccaagccccaaacaaggcacagacaacgcaagcaagaaaccaacaaaacaaaaaaccacacaaaccaaacacacaaaggccgcaaaccagcaaaccaaacacg

SEQ ID NO: 255679 - DNA, 332 bp, Glycine max
  unsure (1)..(332): unsure at all n locations
ctttctttcttcaaccactcctcacgttggcttttatggaaaaacaccataactaaacgcgccacaaggcattcctatcgcaccagatccaaatctagaacgatgggtgatcaaaaggagacacaagaacagatgaaagccgacatgtcggctctgaaagaacagatggcctccatgatggaggccatgttacgaatgacgcagctcatggagaagactgctgccaccgctgccgctgtcagttcagctgccgaagcaaacccaactctcttggcaactgcgcaccattctctctcaaacatattatgaccgtgaanggacacactggggca

SEQ ID NO: 255680 - DNA, 336 bp, Glycine max
ccattatctatttgccgaccaaatttttttctaaatcccttgacggactaagacgaatatgttcattgtgatgatatcatttaatatttcaactatcatgactattctagattctaaaccaatatttgtggggatcatgaactataattttcaattggttgttgtaaattaagtccatcacgcattatctaggaaaaggagcctaattaacaagaatttatgattaggaactgagctctttcctcgtgcagaaccagtttcacatatttggcttgaaaccctcgaagtcttgctttgagtttgaggcatcttgtgactaggcatgttaatctctgc

SEQ ID NO: 255681 - DNA, 317 bp, Glycine max
  unsure (1)..(317): unsure at all n locations
gaacataaaactcagcttaacctcatcggncctcacagnctttagattgggagcctatccaattcttgtggtccgactctcaaccacttatgatagccgccgatgatcccattactggttcccctaagctctctgtcctttcttcacgccgcattccatgccttgcgaacttcttggagtaccctcgcgttgtggtcactaaaaccctgtgcgatgaaaggcgtgatgctttcgtctaatggcgctcctttcatggggtagccaagctgtcttatggcgagaacgggattataattaatacaaccccttgtttccat

SEQ ID NO: 255682 - DNA, 421 bp, Glycine max
  unsure (1)..(421): unsure at all n locations
aactntgcttctacacttgagtatccgtttatgntcctcaggaacactatccctcatttcaccttgaggacaaggtgactcttttggaggggagtattgttagacctcttataaagaatgtttataagaaaaggggggaaaataatttttatgtggtgtcaatagcacttagttttaataggacaacaattactatttttagaagcactttattatgaatagttagcagttagttttaatagtacaacaattactattattaggagcagttattttaattaagcagttatgggtatgtgtataataagaaggaacagccgaatcatattctggttatcctgaaaaatgtggttagaccttgngagggagaaacaagctcttgaatcttgcttggtgagtgatattcgatctaatggcggaa

SEQ ID NO: 255683 - DNA, 426 bp, Glycine max
  unsure (1)..(426): unsure at all n locations
atctgtttggggatgtatggattcttttgtttttcttgcngagttgaaagtggagttatgtagatgagaggaaaaaaggaatgtctggttatgcaggtaaccacacaataaaacgtgtacttcctttagaggtccattgtgacagactttgtctttgctatttcgcaatctgaaagtcatgcatccaatggctcatctaataattctttatggcatctgcgtttaggtcacataagtaaaaagttttggatattttgagcaagagaggcttacttggaaatcataagatggaacattttcagttttgtaagcactgcgtctatgggaaataatatcggatgaagtttccaaaggttgtgcacataacaaacgtcatgttggattatgtacattctgactggtgggggcctttgagagtttatctct

SEQ ID NO: 255684 - DNA, 76 bp, Glycine max
gaaacccccaccgaagaagggaaaacccagaaaaaaatcaacaagaaaataacaaccacgaggaaaacaacgtgaa

SEQ ID NO: 255685 - DNA, 417 bp, Glycine max
agcttcttttggaccttgaacaggcaactttctcctctttcaaaaccatgccatgtgctcgcgactggtccctttcttcccttcgcaacttgagttcactattgctaccccatagagctccgcgaaatttgttccggccatactcttccttgcgagccctcttggtctcttgttcaagggctcttgcggtaattgcattctcttcccgtaacccggcgcactccttccgaacgtgtgtagcagccaacttgaacttctcctcggcgagttttgcctttcctaactcgcttttgagagcttggacttcttcgtcctcttccggtgcttcaaaattctctttgctgacgacttttaacttggcgagccaatctaaacctcgtatgcgaaccttcagccattcggggacccaccaatgat

SEQ ID NO: 255686 - DNA, 332 bp, Glycine max
tctacagaagggtggttcctaatatctctacacttgccttatttattttactaagaggaaatgcaagcttagtcccagaggtgatggacctttctatgtcttggagatgatcaataacaatacatatatggtggacctctcagaagagcttggagtcaacaccacttttaacatttctgatataattccttttgtaggtggagctgatactaaggaggaggaaccaacagatttgaggtcaaatcctcttaagggggaggcgatgatgcaattctacctacgaaaggaccagtcactagagccaatgagcaaaggatctaagaggattgggc

SEQ ID NO: 255687 - DNA, 286 bp, Glycine max
  unsure (1)..(286): unsure at all n locations
gcggcatgcagcttaagttttttaaatgcattncaattatatttcttaanacccggactgctttggtcaatactgtttttactaatacttatacagaaaangaagtttggtttttttttctttttaattccttttttttcaattctgggtattcttgttattctggtttttttttttttttttttttttataaaaatccggcccctccttttaggtcgggtataaaaaaattatttctgctggtattttgggtattatacccccatacacacattatttttttttt

SEQ ID NO: 255688 - DNA, 295 bp, Glycine max
  unsure (1)..(295): unsure at all n locations
ttccttcgcactacttcttcattctgngccatgtcttcctctctcgttcttccttccactcccttctttcgccatggaacaagaaccctccctttcactcgaactaagctttccatgaccgtctccgccggatctcaaccttctctccgcgacgctctgttcgccgattacaaagcctccacttcattcctcttccccggccaggtaaactcccccttcctcaaaacgacatcgtttggaatttcgaattaatgaaagaaaaaaaacacacaccaacacaagtttttgtgaatgt

SEQ ID NO: 255689 - DNA, 414 bp, Glycine max
  unsure (1)..(414): unsure at all n locations
cttaatgtgaaaggatgtgactcatcttatttgaatncgaattacaactctcaaaggcactagtaatcgattacccaaacatcgtaatcgattacagctctttgaaatctagtggaacgttgtaaattcattcgaaaactttttcaaaaccattttgctactggtaatcgatcaccagagagtaaaaactctttggtaaacatgttttgagaaaaatccatgtgctactcagtttttgaaaaaaccttttcatacttatctggattaaatctactctcgattcttgaatcttggggcttgaatctcgatctgactcttggaagcctgaacctcaaatcttgaatctgattctataaccaactttcctcttgaatctagaagtgtgcttgattctaacttgaacaccttgaaccc

SEQ ID NO: 255690 - DNA, 234 bp, Glycine max
cgtgcagtttggttttggagcagttcaattttttaaaactgagttacatttattaatgtcataagataattaattgttgtttctattcatgaataagatatacagcagctggttctttaatcttcaacatccaaactacggagtgtggattggagaggttaggctcagacttttgggaaggacttaagtgcccatgacattttctttttccatcacaatcctttttaatcaatc

SEQ ID NO: 255691 - DNA, 346 bp, Glycine max
ttaacactgtggatcatacttgggtgtatctttttaacaagagcttttggctctgaaaaattttttttaacttaaaaaattttcttcacacacactatgatgattgttagttctttggcaagggtaccaaatcgctcgtagtaataatttctcgataagccgagtgtcgtaccacatggattttgttacacttatatgaagtacttttcagtttgcaaatggtaaatttagtgtataaaattaaagggaaatttaaatctaagaaaaactcagcgataaataaagaataaagtctataaaatattactaaatctaataatcctaaatacctactcctaaataaaat

SEQ ID NO: 255692 - DNA, 404 bp, Glycine max
  unsure (1)..(404): unsure at all n locations
tgaaaaacaaataatcattatttctatcactgcatagncataatcaaagaactaccaacactagttgttgatttggatgatgaaacctaggtggctaggttctagtgggggaaaaaatcagcaatgaagtatgttgaagtttggttccctaatacaaaactaatcatgatggattaaagaaccaaaactctaaatatatattggtgatccctatctatggagctattttccactaattacaaaacccttgtctgatatggcttgatcattgatgaaaaggattatcgaatcctttttccaggttcctcaaccaactccaacaaaaaaaatagcatcattcagtatcttattggtgttgaggctatcggttgaaaatatgattctatctctatggttccatatac

SEQ ID NO: 255693 - DNA, 399 bp, Glycine max
ttgacaacattattagtgatatctcaaaagggggtacaactagacactctctcaaaagatttatgcaataacatggcttttgtatctatgattgaacctaaaaatttaaatgaagccataatagatgaaaattggataatagctatgcaggaagaactaaaccaatttgaaagaaataatgtttgggagttagttgaaaaacctgaaaactacccaatcattggaacaaaatgggtgtttagaaataaattaaatgaaaatggcatagttattagaaataaggctagattagtggccaaaggatataatcaagaagaggggataaattatgaggaaacatatgctccaattgctagattaaaagccatcagaatgttattagcctatgcattcataatg

SEQ ID NO: 255694 - DNA, 440 bp, Glycine max
  unsure (1)..(440): unsure at all n locations
ctggtaatcgattaaaccaatatgaaaatttccctgcaagctttttattcatgtgtaatcgattatgatcagcttggaatcaattaaaatagagttttaagcacaaaagaaattttctaactttagaacctttctttttactcctacatgatgatgcatgatgcacatattggaagatagagactaagatgcaacacataatacaacaattaatacaaatgccactcaagagagttaggcatgtaaaagacaaaacttcttcaatcttcttcaagcttcaaggctaagtcttcatgttgctcctcctatctctaataggtagttggctgccgatccaaatctcgagtattagagatttagtatgatattagagagttcaaaatgggaggactatgagaaagtagcggatcannatctctctaagttagctttatgggaaa

SEQ ID NO: 255695 - DNA, 412 bp, Glycine max
  unsure (1)..(412): unsure at all n locations
ataagcgcacgtntgggagacgatagtcaagttttctcgatatatgaagaagatgttccgagtacattggatgtggtacgaccatgccctcctgatttccagctcggaaattggcgagtggaggaacgccccggcatttacgcaacgagcataatgtaaacctttacggttttaaaagctctatagttgggcctaggctctagagtttttccttttgttaaggctttgtgtcttttgttgttgaatttataatacaaggatctttcttcatctgttcctacgtctctaacccattctcattcatttgcatgtttacttctttatttctgaaacggcagatctgatgaccagtcctccgaatggactaatacctgggacccgcttatcaacttcgagcaagaaacgagtctaa

SEQ ID NO: 255696 - DNA, 307 bp, Glycine max
  unsure (1)..(307): unsure at all n locations
attgccatgttggatgagttaaacatacccattcttgtttatgtgttttgtgatgatgtttgcgatgtttatatgctgaaattgctcatggaaaactgttagagatgaaaggttgagtttacctatggttggaaagtgagaatgtggtgttatgagtggaaaaagagtgaggcttttagagttggaaggttaagtctgaattctgtggtaaatggaggttaaagtgagttaatactagcttgaaatgtcatttacgacttgngaaaatgcttggactgtgctatatagaaaacaaatgatcaaagtg

SEQ ID NO: 255697 - DNA, 325 bp, Glycine max
accaccgtccaacggactagttgtaatctctccctctaaacttttataacgcctttgaacttgcctcgccccttcttttaattctaattattgcttcacaatatatttttagtttaaatcatttttatattcgatacaatattttatattcatttctacttctaaattcatatatatttgtttgtgcctgaataacttgattttatatttaaaatatttaaatataaattatataactttcaaattttttaattaaatcaattttatcaatattggattcaaggcatattaacaggacataagatattgtatcttaatttaatca

SEQ ID NO: 255698 - DNA, 319 bp, Glycine max
agagggagagttgacaaatgtcggtaatgaacccttgggaaatatccgcgaaatgagggaaatacatctaagctacatacttgtgccaacgcttgattcttgcggaagatggattaactctaggtttcgaagggacgtaaatgcttgcaaagtctatatggagacgtgctcagagagagagagagagagagatgaccctcccttaattgcacgttatgtagagttggaaaaccacctaacttcactacttgatcatgaagagcagctttggaaacaaaaggccaaagcatactggttacatgatggtgattgccaacac

SEQ ID NO: 255699 - DNA, 363 bp, Glycine max
  unsure (1)..(363): unsure at all n locations
tgcagcctctccccaatattctattaaagggggagaagtatatgtaaaaaggtcaaccccttatgcacttctctctctttccaattngctttgaaaaaatggttccataacgtttccgcgaggaatcttgcgaaggttttcgaccgttcttcgacgttttcattcgttcttcatcgttcttcgatcttcaatgggtaagtacctcgaaccaagcttttcgattcattctatgtaccccgtggtggtccacacttgtgctttcgtgtatatttattctcggttcatttactttttatacccccttttacctttcttaagccattgtatttaagtcatctcctccctaaacctaaaaataaaaat

SEQ ID NO: 255700 - DNA, 340 bp, Glycine max
gaaatgcttatcttaacgcaaaaaatgtcatgctaatccctctgattttaaaatgaactcatggtatctatttatgcacacgcctacatgtggaatatcctaccctttatatcaacataaaggccatcgaacacattctaattgtcacacacatatatgcatttgaaaagaacatacattcttacgctcaaggcattgcgtcaaaattcacacctaatttatatcctaaacatttgctattacaaactacctacatatatttgaaaaatatatcatacaaatctttattgtttcactcacatttattcatattggcgagctatttacattatgcacacac

SEQ ID NO: 255701 - DNA, 268 bp, Glycine max
cagccgagtttgcataaatttctaattgtcataacatatgattcgcggatatgatttaagctttctttctttggttacattctaagccattggcccaacaactatcccaatgtatattattttaccctttgcaagccctttgagccaaaacacttgatattttgttggaacactaacctaggataaaagtttcctacctaatcttatgtcaagagaacaaaggttttttgaggggaattctatcatttggtggctaatgtgatgtaaa

SEQ ID NO: 255702 - DNA, 335 bp, Glycine max
tctagcttgcccccctcaggatataagaggccttgttatttatacaccttaaggtccttcacatcagaaccattttaatctttctctcccatcattcgactttttctatagaattttctgattctttttctcttcatctttctaaaagttcttggtcaaaaatttctcttctaagaaaagtgctttgttcataaacttgtgctattcatcctttgcagtctcttctccctttgccaaaagaatgaaggactaaccgcctgagaatcttttatggtccacttgagggtacatctacttggggagtgtatacaataacacaaagggacatctctggg

SEQ ID NO: 255703 - DNA, 321 bp, Glycine max
tagctgcctgtctcaagtccaaaagaaacttgtctcaacgtttatgtgagacagagtccaacatgttagccatcgtcagcaaataccaagaagagctaaatctatccacggcccatgggcataaagtggcaaacgagtatgcccaagtgtacaaggaaaaaaaggctagaggaagggtgatcgactcgttacatcaagaggcagcaatgtggatggaccgatttgctcttactttgaacgggagtcaagagcttccccgattgctagccaaggccaaagcaatggcggacacctactccgccccgacgagatccacggatt

SEQ ID NO: 255704 - DNA, 312 bp, Glycine max
ggtcttcgccaccgaaatgttcttttttttccaaaagaggcaaattgatcattctactaggacgacatgaaaaactggggcaaatgaagagggtgagaaagagggagaaacccatgctgtgactgccatttctataccggcaagtttcccaccaaacccaacaatgtcattacttaatcaataacaaacctccttcttacccaccacccagttattcacaaaggccatccctaaatcaaccacagagcctgtctaccgcactttcaatgacgaagaccacctttagcacaaaccaaaaaaacaccaaccaaa

SEQ ID NO: 255705 - DNA, 231 bp, Glycine max
caatccccttcttaaaatttacatcccttctttattatattcattgatcctgaaaatgaagataggggtatggtcttacattcactggttcaaagtatgggaggagggggatatggtgatttgtgggtctcgatggatgtaatgactatggtgactaaacatacggtgttaattgggcaatgaagttttggattgaacatgtgaggtggccatctgtttgtttgggttgga

SEQ ID NO: 255706 - DNA, 217 bp, Glycine max
aatgatagtaaaggtccctaagtaccatgttgtaagtgacacaatgaagtgtttcccccttacaactaaaatttaaagtggccattacaacatgacactttatggcttttttgagtgatttacagtcttgggaatattaattgattgaactccttggtctgatttttaaaaaagaaaattaaatccgaatgagtctgtatggacaaatggtttgcac

SEQ ID NO: 255707 - DNA, 399 bp, Glycine max
atggggtacccatcacatgtgtgactaggtggctgtcgggcgatggtgcacaacaagtttttcacatacacaaagcgcgcataaacccaccatcccctattgcccacctccatctgagctcacgtactcccacgtagcccatatcctcgtttctctcaacaccgggtccccatcaatccttccaagcttccacaacattcaagtaatacaacattcaaacagcacaagctatcacagccaagcaaaacagagcaaaggcagaaaactctgccaaaacaccaaccaaatcacagcttttctcacttaaagaccccagtaccaattccttcgatccaattccgtaaccggtggatcgactcccaaatattactggaagtctatagtacataaccctacatt

SEQ ID NO: 255708 - DNA, 432 bp, Glycine max
  unsure (1)..(432): unsure at all n locations
cagtctttagatttgggagcctatcctatccttgtgttcggactctcagccacttatgatagccgccgatgctcccattactgcttcccctaagctctttgtcctttcttcacgccgcatcccatgccttgcgaactccttggagtaccctcgcgttgtggtcactaaaacctcgtgcgatgaaaggcgtgatgctttcgtctgatggcactcctctcatgggacatccttcgcatgaagattgaatcctgattcttcctttcttctagcgagggaaccatntaacaaacgcccctccatgctagccaagagttggtcccaattcgtctttctttttcgacgcacaagcggtgaccttgtagcagatagacgggcctaccttcttagagaaaaaggtgtgaaaccagccccacatagagagctggagtacac

SEQ ID NO: 255709 - DNA, 380 bp, Glycine max
  unsure (1)..(380): unsure at all n locations
agcttctgtaatgcttccctaaaattcctattacccttattaaacatatttcacttaatatgggtgagaagggagagaaaaaatgaataaagtcaagtcctatatgcttccggtaagcttccgtaacttttccgtaaaaatacgaaagaaggaggggtgaacttatcaaaaagggggtgcaaatagcaattttaaaatattcgaatgggccttccagaatattttcgaaacagggttgcttctggaggaagcaacccagctcgcctgggcgagctgggtggcaacctcctccccttntttcctataaataggcgaaaggggctgttccaaatattcctaacccccgtggctatgcatttcaactgttgtgggtgaaaaaa

SEQ ID NO: 255710 - DNA, 224 bp, Glycine max
tgggtggtatattgaatggtgcatcttaactcatatcatatattttgtgcctcctgccttcttctaaataaatgaaaaggaaaaactctttgtttaatctattacaccctatcattatccattgcaccaagtggctaatgccttgtgaattacctcctggatcggtttaatccaataccccattctttttgagacaatgactgtgttatgaacccatgtaactt

SEQ ID NO: 255711 - DNA, 434 bp, Glycine max
agcttatgctgcaaacattaacaatagacttctgtgtccttagcagctttatcaaccacagcagaacaatatgacctctccagcaacagatacaaccctggatggaggaatcaccctaatcttagatggtctagcccttaacaacaacaacagcagcctgctccttcctttcaaaatgctgctggcccaaacagaccatacattcctccaccaatccaacaacaacaacagccccagaaacagccaacagttgaggctcctccacaaccttccctcaaagaactcgtgaggcaaatgacgatgcaaaacatgcagtttcaacaagagaccagagcctccattcagagcttaaccaatcagatgggacaattatctacacaattgaatcaaccacagtgccagaattctgacaagctaccttttaagcttgtcaa

SEQ ID NO: 255712 - DNA, 380 bp, Glycine max
tgcctgagccctagtgaacaatgaaggtgcactttattgttggttcttggaaaggccatgctaatactaataagatttctgtgcagggattattgtttttgcatgactgatggctcctttgggctggagatattggttgatctgcctcaagtgttttttaaagtaattgagaaatcttttgtcgcgtttgtttacatatacctaaatttggttgaagactactattcaacctgtggatatctaccatagactgtctctaaggatttatatttgacagatgaattatcattgacctgctttgcttgatccgtcctaagtcagagcacaaaggactacacacaacttcgaaggggtttctcctgttgggttcatgactatag

SEQ ID NO: 255713 - DNA, 408 bp, Glycine max
agcttgtataaaatatataatcagattcatcttcaactcttacacacctgtgaagaacaatacttaaccttcaaaaccaagctcaaggagaccgctttaagccataaacagcctataaaagtttgcaaaatagacccaacactccttaagcaacaaaactagaaggtttcactatatagatgataaatctcctctttaagttcactgtgaagaaaaacatttttgtagctaaaataaaagctaaaaatgcatggcatcatggccaagagaagattaccaaataccatgggagaaaaggtatcaacataatctttagaccataaacatgtctgaacctttgagtaacccagttttaccgtgtaattcactgacaatcaaaaattgcttgcctaaatgagaagaacttac

SEQ ID NO: 255714 - DNA, 408 bp, Glycine max
  unsure (1)..(408): unsure at all n locations
tgactcatatggtgaaagaagaattatttttgatggcgatctgcagaagaacatagaccacagactcttacaacacgtgtagatttctgattcatggcaagttgagttactatgttgaccaagccatcaagttttccttcaagctctttattgtcagtcgatgaagatgaatccatggccacctcatggactcctctaagaacaataacattatttcttacactgaattgttgggagttggaagccatcttctcaatcaaattcctagcttcagcaggggtcatatcaccaagagctncaccactggcggcatcaattatacttctctccatgttgctaagacactcatataaatattgaagaaagagttgctcaaaaatctggttgtgaagacagcatgcacacaaa

SEQ ID NO: 255715 - DNA, 392 bp, Glycine max
  unsure (1)..(392): unsure at all n locations
aagctttatgaattctgggcaccaacaggtttgtgtttttttgacagccaacaaacgcgcactcataatcatataataattcgaatggagtttccctaaactttgnttgaatatgttagggtgaagttatttaagatctacttgcttggctctcctttgagttgctcatatttgagaatttgggggactatttcttattggaaaaaaaaccgctctttgctggttattaattcttaccatgacttcttgagtcttatttcggagtgggagattgcggaatattgaagcgtctttggctggagaagaaatattcatatgtcttctcttctatgagcccgagtagaagatattaatattttttatacttggatcgaacctttaatgtacaatgt

SEQ ID NO: 255716 - DNA, 376 bp, Glycine max
  unsure (1)..(376): unsure at all n locations
aagctngcagcatgttatacaataattacgtgcgtggaccattatttgttttttgttaccttcgcttgaccacctcaaaatgtttaacacccatcgttgtgtaatccgcaaagtcttgcaacatttcggaaatcaaaacaagcattattgcgcaatccgtatagatccgcaacattccgaaagtcaaaaagagcattgttgcgtagtccataaagtttcgcaacattcccaaaagaaaatgggtgtcgttacgttatccatatagttccgtaacgttncggaaaggaaacaataaacaacacaaaaggtggtgtatctagtacaataaggggtgcaaatagcaattatcaaatctgggcagaggattcttggcatt

SEQ ID NO: 255717 - DNA, 260 bp, Glycine max
tgaaagggactttgttaatgtataagataagaaagtctcagttaatttggaaaatgaaatggtggttggaaggataaccgttaaagagggtgtcagagtttcccaacggtccacaggcttcatgtgttactttgtcaacaattgggtatattcatcggactacagttttctctttagtaatggttgggcaattcacactatttggattaattccatatcaaccttcctctagttctgtttggctttgcttctgccctttt

SEQ ID NO: 255718 - DNA, 362 bp, Glycine max
  unsure (1)..(362): unsure at all n locations
gataatgacccatgacaagttggaatccctaaataaacggatggtgagagggttaatagtggatcgcatctaaatttcatggccacaagtatcatatataatgtacgacataatatgcaaaaacagtgctttgttgtattacaaagcattaatctgtgttaagcgaattaatcttattatggataaaagttatgacaagacgtttccttttgatttcaatttccgatcattgcttgaacttttctnttcttattaattatgctttaaaccaaaggcttgtttgcgcacataattagatttagataacctttctaagacacattatttaatgttcttttttatgaaattaaccttctctagat

SEQ ID NO: 255719 - DNA, 345 bp, Glycine max
  unsure (1)..(345): unsure at all n locations
atgataaaacatgctctattntcatctcccactccaagtaagcctccggatcattctttcctttaaatggaggaatgttgagtttaataccatcaattcggttttgtctaagaacaccatcattccctcttctcctcctttcttcttcattatgatctctattctccatttgatccaacctctcatggagcgcatcatctcgtngtttcattaacctcttcaaatgttgcatcaaagcttgcatttggaattgcgaaagccccactccatcattaggattagtacctgacatctcaaacaaacaaatcaaacggtacaagacaattatagttgctgtttgaatac

SEQ ID NO: 255720 - DNA, 255 bp, Glycine max
ctcggaaattcaatggcataactttcctccatgtcgatcagcgcatacatatcgagacgctcgaattgacaacgggttttcgaaaattcaatggcatactttcactccatgtcaatcacacatcggttcggacctgaaatgacaatgagctctcaaaatcaatggcatacttttactcctgtccattagcgttcaatttggacctcaaatgacacaaagcttcaaaattaagggctactttactcgattcatcag

SEQ ID NO: 255721 - DNA, 369 bp, Glycine max
agctttatgagaaaccattaatactaatgttgttcctaaacaaaaatcaattgaggaagcttcgccgagtgtccccattgaaaaacctttattcaaacctttcaaagttagtgataaggcttaacgaaaaattagggaacttaaaaaaactaaatccttaattgaaggcgtaggtgacaatcatagcgaattactaaacaagattagtagtttgcttaaggtcattccagatactccccaagcttcggaaaatacttccaaaatggtaacaagaagtacctccaaattaattaatgttattaatgaagatagtgaccaaaacttatataacacaactgagataggatcagtgtcagaaaagaatttaaa

SEQ ID NO: 255722 - DNA, 282 bp, Glycine max
aacccaacagaattttaacaatttctcccggaaagcaacctctaggatgttaataaacagtcatgataattgttgaaactggacaataaaatcttccttgaagatgaccttttaaaacacaattagcgggtgctatgtccagattaataacttttacagaatcacccttcaattatattgagtttaattttaaatactatcttctatttttatttcaaaaaagaattgacatttccttttctagtgggggctttgtaaaaaatcgctgtcatatattttaaa

SEQ ID NO: 255723 - DNA, 394 bp, Glycine max
  unsure (1)..(394): unsure at all n locations
agcnttttgtgaaagaatccagcacctcattttccagttctgatccaacagaactccaatcaatccccaacttctcaattgcattgtacatgtcttgagcctctgatacttttgcatcaagcgttcttgaaagaataccatggtccatgaatgcttgaagagcttgtactaaaaaggttgaaatctatagaggcaccaaataaacgcaaggttatttcagcaacctattaatgaatgatctgaactttaaactttttcacaccaacattaatccatattatcccacatggccatccagtcaaggtaaaaaaataaggaaaccgatataacttactgtatctggtccaataacagaattaacataaaatgtgtcagggtaagatggatttttcac

SEQ ID NO: 255724 - DNA, 371 bp, Glycine max
  unsure (1)..(371): unsure at all n locations
tgtatntaaaatgttttanaaatactntcaattaatatttgaatntttattcctttattaatatatatgtgaggggtagagggtgtcacaattgttgttggtttgaaatggaatccgggtggaaatgccttggctatagctttaaagggattcttgtcccaatatttcggcttcatttgcaaaacagttgaaaaattatttttgtaaatataactgttagtgggttttggggctggtgttgtcattggggttattatttgtttttcttttggagaattgcaaataacttttgtgcctttggctttttggattaanggttttagatcaatttcagattgatcatctgattcacaggctatgtcagcccatgt

SEQ ID NO: 255725 - DNA, 401 bp, Glycine max
catcatattatgcattgttgggctgccttgctcaaaaaattgatgaattgtgctgggtgatatattctgcttttagactttagatgcgtgccaagcgaattatactactactgagaaagagctactagccatagtttttgctcttgaaaaattccattcttatttgattagtactcacattattgtttatactgaccatgcaactctaaagtacttgttgaagaaggctgattcaaagtctaggttgatccgatggatgctctggctccaagactttgacttggagatccgtgataggagcgcggcacaaaaattgggtgttgatcatttgagtcaaatcgaacatgtgttcgatgaggactcacccattcggatgatttccggatgacattatatatact

SEQ ID NO: 255726 - DNA, 273 bp, Glycine max
ctcaattactccacttttttttttggtccacctctcattaacatactataactacttccttaaggatcaagattttgaataactttgcaaacgtttactcactacaatataaacctaacctgaattaggtcgtccacggatgttcaaatttatgggaatttttatattaatttatttataataatataataaataattataatattgtttatttgtaaactaagcaatactataaaattagcatatatcaatctattttatatgcttatattg

SEQ ID NO: 255727 - DNA, 319 bp, Glycine max
ttccatttattcaatactctctatttatttcaccggcggggaggggtagaggggcttgggtaaaggcagtgttgaaaatagagagagaaaaaaaaggaatctgtgttactataataaatagtactccgtactagtaataaactccattcagattattttctttttcattgacactgataaaaaaactagtagatatctatatcatataaataaattagatgtgattattctacatccatacaaatatatctttacttatattttagtgataaattatcatataataagctcttagaatacatgtgtagagtaaacgatc

SEQ ID NO: 255728 - DNA, 237 bp, Glycine max
tgattcttgattcttggaatcaaatttcctcttgaaccctgaagtgttcttgattcaaaccttgacatttttgacatcttaaacaacttgagcattttgaactcattctttgttatcatgaattgaccttggagcttttgtcatccctttgtttcattaaacatcttgaataacttgattcatcttgatgcttttttctcaaaggatgcctgaatggcggtcacacttttggtggat

SEQ ID NO: 255729 - DNA, 394 bp, Glycine max
tttttgttaaacataattaaaccaaacttaacccgcaaatccctcatgtaaggctaaatttcaatcctgcttcaatcaagttctaaggcaataatacatcttccaatgctaaagtcacttaactgtacacacaaatgggtgatcagaccaaaagcatacaaagattaagcattgaaggaagcattgaacacaaaaaacataatcaattagatattaggtatttacataagctattcattagaaatccccaactagggtgtgtagtcagccattacaaagaaaccctaacaataaatgagattaaaagcagagaatgatagttccttacacaagaagggggattccttctcctcttctcagcatctcacactcactctctactcaataatctctc

SEQ ID NO: 255730 - DNA, 338 bp, Glycine max
cagcttaatctgcagaaaaaatatttctatttttcagtctagcgccagtccactgcgcttaaggcctgagtaaaatttcataagggcgtgctaactcaccctgttgcgctaaacgcccaatcaaaatttcaattttaattttatgttcttgtgaaaataacctattgggagagatccaggttcacatttcaagaagcttgggagaagtatacagatattgtggtgcctatgaaactactactaaagaggaatgtggtagtttattacctccaggttgaccagttcaaggtggaactcgataaaatacactgcgatgaggagttgattgattttaatga

SEQ ID NO: 255731 - DNA, 386 bp, Glycine max
  unsure (1)..(386): unsure at all n locations
tctaatgactcctctgcggctttcacataaggcataaaggatgggcagctcaccaagatatcttcctcgcctgatacgattaccagatgcccttccactacgaatttcaacttttggtggagtgttgagggaacaactcctactgagtggatccacgggcgccccaacagacagctgtagggagggttaatatccattatttggaaagtaacttgacaggtgtgagggcctatctgtactgggagatcgatctctcccctaacctctcggcaggtgccgtcgaaggcacgaaccaccattgaactcagttntaagtgggaggaattgaatggtaatttctccaaagtgctcttatgcatcacgtttaaactgggaccattatcgat

SEQ ID NO: 255732 - DNA, 370 bp, Glycine max
ctccaatcaatccccaacttctcaattgcattgtgcatgtcttgagcctctgatacttttgatcaagcgttcttgaaagaataccatggtccatgaatgctcgaagagcctgtactaaaaaggttgaaatctatagaggcaccaaataaacgccagggtatttcagcaacctattaatgaatgatctgaactttaagcttttcacaccaacattaatccatattagcccacatggccatccagtcaaggtaaaaaaataaggaaaccgatataacttactgtatctggtccaattacagaattaacataatatgtgtcatggtaagatggatatttacatttgttgaacgcacatcaacctctgcttttt

SEQ ID NO: 255733 - DNA, 377 bp, Glycine max
  unsure (1)..(377): unsure at all n locations
aaatacttttattaanatttgaatttttattcctttattaatatatatgtgaggggtagagggtgtcacaattgttgttggtttgaaatggaatcccggtggaaatgccttggctatagctctaaagggattcttgtcccaatatttcggcttcattatcaaaacagttgaaaaattatttttgtaaatataactgttagtgggttttgcggctggtgttgtcattggggttattatttgttcttcttttggagaattgcaaataacttttgtgcccttggctttctggattaaagttttagatcaatttccaattgatcatctgattaaacgctattgtcacccatgttttcttttggaattttgtccggccaatt

SEQ ID NO: 255734 - DNA, 377 bp, Glycine max
agcttggaagtgtcttcactctcaaactcttccacaagaacatcaccttcctcattggccctgaggtttctgcacactatttcaaggcctcaaagactgatctcaaccaacaagaggtgtatcagttcaatgtgccaacttttggacctggggtggtctttgatgttgattactctgtgaggcaagaacagttcaggttcttcactgaggctcttaaggccaacaagctcaagggttatgtcaatcagatggttgcacaagctgaggaaccaattacgtcttttggtgtttttgtttgtgtggctattgattgaactatatgggaggaatctcacgttgatgaataatctattggtcttggaaataatcattgaaac

SEQ ID NO: 255735 - DNA, 325 bp, Glycine max
aatgtgacctaaatgcttatgccatattgctcctgagtttgtattatcaattctacgcttagtaccacacaattctgcattaaaggattcaccataggaagctacagtatcaagtaaatatagattatcattaaccaagagtgaacaagttccaacaatatctgaattaaaagacaacctgaacacattgtttccaaatgaacacaaataactcagtttgtccaaataagaaactgaaaccaagtctaaatgatggtacaacataagtgtctttcacatccaaataaaaactcgtacataataataatctaaagttccctatagc

SEQ ID NO: 255736 - DNA, 261 bp, Glycine max
ttctttttttgatatgaactccagggattggcagaacgcccaacatcttatcccatgcaaatataaagaactcttaatttttgaattggtggggactttcgttcccacacctcgggaaaattcttcaacaccttcatgtttacctgggccgttgtgtacattatttcaacagcttgcatattgtttagaagaacacaaagtctatcgaacatatcatacgcatactctctattcttcatggtgaagcttccataatggttg

SEQ ID NO: 255737 - DNA, 457 bp, Glycine max
  unsure (1)..(457): unsure at all n locations
actcaagcttataccgacaaaantgcctcaatcatttccaaatatgcatgtgtattatgacgcatcaacaagaatcaagccaaggatattgtgcaagcaatcaatggggcacaacacaccaaatggttatgatgatggatggctcaaattcttcacaaaggataactcatcactttcaaattgagctttcaaaactatcatgacatgtacagaagaatcaaggatttcaagtcacaaaatgtctagaactcttattttcaaaacaatgacccatttcttgaacatatcctataattcaaagaaaaacatgcaaaatcgtacgtgcacacaacaatgacccaaaatattaaactataaatccgacgaaactaacaacattaacaaattaacaccacttacaaattaacaaaaccaacaaaactagctaaaccaaagatcactctcccccatacttaaa

SEQ ID NO: 255738 - DNA, 335 bp, Glycine max
cctgcagctgcaacttgagatagagatgtctaactttctggcataaatcggggggtccgactatgggtgagatggataacacaatcatttggggctccaataaaatgatgtggaagatcatgacagcctggctataatcatgggcccgactcatggtgaggttcataacaacattattcaagggctcaataactttgatgaaaagatgccaacaagttgcatcattctgggctccgctaatgtggagatgctaacacataatcagggctggatagatgggggatcaaacacttagcataatttggggtttactaggggagatcaaccaaatattt

SEQ ID NO: 255739 - DNA, 354 bp, Glycine max
ttaaaatgtttttttagataaataagtcaggttataagcctttaaaaaaacttaagcctgatgggccaacatacttagaaacaatatttttttaataaaaataatattattaatatgagatataatattataattattaatgaaatcacaaaattatttttgtggtttgacgatttaaattattttaatatttgaaataagtcaattcctataaccataggtggatagtaggaataaaaattaattttttgtgggacttaagaggctttaatagtttgcacatgtaacgtttgtagcaaagtttgccatgttttgggtgaaaataccctattattttaatgaaattttgacttg

SEQ ID NO: 255740 - DNA, 323 bp, Glycine max
gcaaaaccaatagaatatttgagtatggttctgacctaagaaaaaaaaatcaaccacatgctaattaatacttttatgataatttattaagtggttaatttgttaatgataataacactatatatagtgaatattctttaaaatcaagtttctaaaaaataaggtgaagtactatctagatacttggggtacattgggtatacaagtctcatagaattttgaactgtaaatcaaaaatttgtgcatttcaaaacatgggctacttgatttacattgcatgaatggctggagctcctttattataaacaacaacgtcgtattga

SEQ ID NO: 255741 - DNA, 432 bp, Glycine max
catgcaactggatatgactcgacttgctgccttttagagaaataggcctgcagtcatttaaggattgaggatgattcgatttatggataagggccatgaaggaagcattgctgcctctaggaaagcttccatggcagtggaactcatccacaaatctcctgaattcaggtctcagaatcttccaaaaagccttatataaagtggaaattaaaaccatcgggacctgggcatttatcttcaccacaacttcaaacagcatctttaatctcttgatcaaaaaaaggggcaatgagaccctctcttgattctgatcaatggactgtaagaaagccccatcaacggtgggtcttaacctcttatcttcacaaaatctatgaaggaagaaattaaaagctgtatccttaatacgatctggctgttgagactcatttc

SEQ ID NO: 255742 - DNA, 356 bp, Glycine max
  unsure (1)..(356): unsure at all n locations
actaagctgtagccttgatcttttcatcaaggagccttttttctttagatcaaggcagggatgggaagaagaaaatgatggagatccacttcaggaaaaaatgataagaacaacccaccccatggaagcctggataaagttgagatagaaagatgatggaggagaggagaaagacacaaatttgtgctanatgaggctgaacttaaggaatttaaatgacaagtgaaaatgccacactggcttttatacataagtgccacaaataagggaattgattcattcaattacttgattgaatgattgcgagcaatgataggatttacttgtcaccctatcagacagtaaatgtcctatgg

SEQ ID NO: 255743 - DNA, 287 bp, Glycine max
  unsure (1)..(287): unsure at all n locations
acgactaactgcgagcgataatctttgcatgaatctctaaatactataatgaaatggctaaatgaggacatgatgaagcctgattttcatccaactctttgaccaacaactacctggaatgaaaaggcatcctttgctcccttttggagctgaatgatatagcccaaaaaaatttgaaccctgaacttaaataattatctactgatacctctgttagattntaggagagcatatgcatttaaagaaaagttacactaaatctggcggagggaattctattcaatgaa

SEQ ID NO: 255744 - DNA, 411 bp, Glycine max
  unsure (1)..(411): unsure at all n locations
gagatgaggaagngnngaacggcgaaactttctgcttttattgttgaccacacagtggtacctggagatatgtctcgggggtcatgagaccttggggacatcaggtggggtgctattgcccaaaaccaagcttgaccaatcccgacccaacccgggcatattcggtcagtgagaacctgtgatgtacctaagcaggcgagctcctggcagtcaacagattaaaggaacaaagaccacaaagcaaggagacttgtggtggctggccagctgtgaattttgtgtgatatgtggataatggcctctggtaatcgattaccaagggtgggtaatcgattacaaggcttaanaatgaaaacaagacgctaagatggtctctggtaatcgattaccaacgggtgtaatcgattacca

SEQ ID NO: 255745 - DNA, 345 bp, Glycine max
  unsure (1)..(345): unsure at all n locations
atgaacggcctcataacttctccattaaactatgcccgcaagctgtttgtgaaaattcccctatattgactgtttgcaaaaattcaaaacttatcatttatttgttaacattcgaatgttttctaaaatttatagaatcctttaacaatcttgtaaattcatgaagccttcttaaatcttaagaattcatttgttgaaatttattagaatccaaactacaaaatcctantcataaaagtcttttaaaaaaatcctaaaagcattagattcctaatacgctattgaaatcccaggatttctagtgagtcctttaatcttattggaatcacccctaaagaggatttt

SEQ ID NO: 255746 - DNA, 222 bp, Glycine max
ccttgacactcaccttgggacttacctagtggatattttttaacttttttaaactaacccagaagtggggcgaagaatacttttgacatgaacaacaatgaatgaaccttgaggatttactaacggaggggatgtctttgcccaaatacgttgatagaagtaataggggttaatatctatggctgaaatgacattaaagtgtaccgacagttgaatcgctca

SEQ ID NO: 255747 - DNA, 441 bp, Glycine max
  unsure (1)..(441): unsure at all n locations
tggacagagcanatgagaaaaangtgtgattttgtgaattctagagccatttctagagtaaattgggtgttgaagagtcaaactttgaatgggtggcgttttcaccttaaaaacagtttgagcaagtctaaatcaattttatacagttgattgagatgagagtttaccccaaaattacccaattctcattttcacttctcaaaccttgaaaattcactaaattgatgggttttggatatctagattttgatttaccttgatctgaagcttgttgttggtttaaatatgatttatacatgatttacgacttgtaggatccaattttactcaaattggatgtgaggaagttggatttccaaatctgccatattgtgcagaaaaatgctgtcaaaattgtgcaccaagtttttttatatagtgcacaaaatggttgtgtattgc

SEQ ID NO: 255748 - DNA, 296 bp, Glycine max
  unsure (1)..(296): unsure at all n locations
taaatcaaaaagatagccaccataactggttaatacacgcttccctgagaccacagtgaagattgaaaagcccattttgcggaaggtattcgcaaacccaataactattcgtaagagcatatatttggcttgacaagagaagaagaaaaaatattttttatgagataacagaaaanacaaacgccagtatgagataaaaatgattattggacatgctttatatttttttggtcacaattatctttctttgaaacacaattgaaataccgacatactgttagacattaatattaaat

SEQ ID NO: 255749 - DNA, 384 bp, Glycine max
  unsure (1)..(384): unsure at all n locations
tgagaaggcactggggacatgcctgagtcttggaaactgatgtgttcaggccatattcctgaatcaagaactccaatgatcacatctgtggccaagttaaaagcactccaaagtgatcttccattccttaggccaagaaagtgaagcgtgtatgttgtgtggagggttgacagttcatcaggtatggctgagaggaaaccatcaacttggtttaagtatttgaggtgtttcttggaaagatgggcagcaaaaccaaacatgctggtttcatatgtgtaaaggagatgaggggctaaattgtcgtcttcttcatcttcttcttgcattgaagatncagaaatgaaatcaatgattgattcaaccatggtttttgctgtctgagtg

SEQ ID NO: 255750 - DNA, 293 bp, Glycine max
tttaactttttcttcaaggttttttcttttcaagtttttgcattaattttcttcccaagcacttgaaattttcttcttttgaatcctacttgtcagaaattacaatggtattaaattctttattatttcattaaaaacaacagtatagtgaagaaattttaatcattcttaaccaaaatcgactatcaattaaactcaaatttcacatttatcaaatttatcagaacttttgaacaggtgtagatgttattggtcaaaatacatgaaagggaaaacaccttatggagtacttc

SEQ ID NO: 255751 - DNA, 231 bp, Glycine max
  unsure (1)..(231): unsure at all n locations
ttatcaagccaaagagtaaatagtgcttttaagtggtgtggttggagtaaatgtaaacttgggtttgtacatgatgtaaagtgtacattttggtggtgtaatttggagtagatgtaaaattgggttatgtacgtaaaattaatggaaaagatgtaattatgtgtataattgtctgtcacctttcctttntctctctgttaacatatcctcttgctgcactgtgtaatgcta

SEQ ID NO: 255752 - DNA, 344 bp, Glycine max
  unsure (1)..(344): unsure at all n locations
ctgcagctgtgctgggaaaaagatgcttgtgaaagaggtatatatggttgaactgagaagggagaggaagttaaagtggctggtggagcaagaatgatactactcaacaatgaatatcaaggagaagagctttttgctgacccttatattttgccagccacttccttatgggcctcagcaagtaaaactattataagctacagtcaatctgttaaaaaaccaacagcttcaatttcctttatggggacaaagtttggtgaccctgcaccactgatggcagcattntcttctataggaccaagcctattgggaccagatgtaattaatcctgatgtgactgcacc

SEQ ID NO: 255753 - DNA, 365 bp, Glycine max
actaaaacctgaactatgttcggagatataataactaatgacacagaaacaagaaattttactatccaattatctacaacctgtgatattttttacaacaaaatctataaataaaacagatgttgtagattttctaaaaactatcacaaattatcaatttaaaattgagataatttttaaaattcaagggctaatataaaagtggaagaaaaaataagacccttcaattaaaggattaaaagctttaaatgctcaccaaataagaaactagcattttcaatatttaatttttatacaaaaagctttggtaacaaaaaattatagccacacataaacacctaaccaacatctctaaagctatttgg

SEQ ID NO: 255754 - DNA, 366 bp, Glycine max
atgcaacttagattgctgtttaaaaataaattccgtttgcttacaactggagtctgataacttgtttcctcttcttgacatctatataaattaattctttaagagtatcatatcatctataagttgaaataatgccccaaaaaattatatttaaacaacgaattgttaatatgtgggttgcgaattgtgaaacaaggttgtacttttatatgcatggtgcaagtggttgctggcaaaggccatgaaacatatcaagtataaggtgataagaaggaattctttgatgatcgagaagagtgccgagaggcattgcaacatgttgatgagcttcaccaaactggaatagatacaagtgaatttccatgg

SEQ ID NO: 255755 - DNA, 371 bp, Glycine max
tcgaatagaacatatacattaatggattggacttctattgtcctacccataaaatctactaaccctaggtataatatgttagcattttctctacattttctgtttaaatgaatgtggttctccaagtagttcatagtggaggaaactaagaaaatataccccacagagaagaggagggggcttttattccgttaatttgcccctttggtgacgcgttgtatttcttaaccgcttcttcaaccagctctgtgctttcttcttctaccgtctccatttccatttccgcctgcaacattcattcagagctaggttcagtttccgccattgatcaatgctccctactctctgtttccaggttccaacactcgatc

SEQ ID NO: 255756 - DNA, 300 bp, Glycine max
tgggaagaatatatacataacaaaggtggggcgcacaccaaatctacctggtggcacaatacttgaatgtgtgtgccaaactgcaagttcttccaaaaaagtgtgtggagaaatatgagaagacccacacggtggaaactatcctaaccataggttctcaaaatagcacttgccattgccacaataggcagttcataacactaactgtaatgcatataatttaaaataacctctttcatagaaagaaaaaccgaaacacacctgaatttgtgataccactcaaaactataactatgcacc

SEQ ID NO: 255757 - DNA, 335 bp, Glycine max
  unsure (1)..(335): unsure at all n locations
atgttttaaaaanactcctaattaatatttgaatntttattcccggatcaatatatatgcgaggggtagagggcgtaacactcgtcgttccttataatagaaagccgagtggaagagccttggctatctctataaaaggatgcctgtcccaggatattggatccatatgcagctacaaggataaaacataccttgttgagacaagctgggagagaaacagaagaaggttgttgctgttgntggtgtgtgttcttttgatggaaataatggatgacctcatagtgtacggaggcatatgagtatgtagcattggtgtctaagtctctagatcttct

SEQ ID NO: 255758 - DNA, 398 bp, Glycine max
gaatcttcttcaagttttgagctctcatcacgctcttcagtgcaaccatattgttttgaatgccattccctgattcatcgtgttcctcatcgacacactctctcttttcatttcctaccacgatgtactctttctcctccacttccatcatgaatgcatgacacaccgctacagattcaaacacatctctcccaacaccagtaacctacacaaaatcagtggtgcccatggtttgtctatgtcatatcgtctaatcacattgcacttcagatcttgcctccaacgacttctgcacatcaacaacactcattgatgacttatcttgaagtttgaaagagaaagtaagtgtaaatgagaagggacgatggaaataatacaaagacaaatgttgttttaaa

SEQ ID NO: 255759 - DNA, 361 bp, Glycine max
  unsure (1)..(361): unsure at all n locations
gaccttgaaactaagctgaccatcccgaccacccggcatatcggtattgtttacctgtgatgacctaaacagcgaactcctgcagtcacagataaaggaacaagaccacaaagcaggaggcttgtggggctggcagctgtgaatatttgtgatatgtggattgggcctctggaatcgattaccaagggtgggtatcgattacaaggcttaatattgaagacaggaggctaagatggtctctggtaatcgattaccaaggggtgtaatcgattaccatgctntgaaacgaagtcaggaaacttagggagcctctggtaatcgatcaccaacctgtgtaattgattcacacagggatgggtcc

SEQ ID NO: 255760 - DNA, 433 bp, Glycine max
  unsure (1)..(433): unsure at all n locations
agctntaggagaaaccattaaatactaatgttgttcctaaacaaaaatcaattgaggaagcttcgccgagtgtccccattgaaaaacctttattcacacctttcaaagttagtgataaggctaaacgaaaaattagggaacttaaaaaaactaaatccttaatggaaggcgtaggtgacaatcatagcgaattactaaacaagattagtagtttgcttaaggccattccagatactccccaagcttcggaaaatacttccaaaatggtaacaagaagcacctccaaattaattaatgttattaatgaagatagtgaccaaaacttagataaacaactgagatggatcaggtcagaaaagaatataaatcataaactccaacactgaaaaccccctccaaatatattataacgtccactgccctgactttatta

SEQ ID NO: 255761 - DNA, 387 bp, Glycine max
agtcgaccctgcggcatgcaagcttgacttgaacaaagggtttattattttcggaatttgaaaatgacgcaaaaacagagtaatcaaatgtggataaggaagaggggcattggcccgtaatgccttatgcattcggtaccgaaccaaatgggccccgtaattcggagaggtgattcttgatgtattaaagaaggagataaccaagcttttgccagctggaatcatttatcctatctccgatagccaatgggtgagtcccgtctaggtagtcccgaaaaagactggcctcacagtgatcagaaatgagaaggaggagctgattcctactcgggtgcagaacagttggagagtctgcattgactataggaggttgaaccaggttaccaa

SEQ ID NO: 255762 - DNA, 347 bp, Glycine max
agagtgggtaatgagttttcgtttctggcttggatgaaacattctttagtataatgaacatttctatctatatgattaactctggattttgagtcataccttatccaaaactaggcctacctgactctttttactgtgtaaagttataaaatattgttatatgaatagtataagttatgcaatagctttataaatactctatagaaggaaaaaaacgtaaacttgagtataatataaattttaatcagataatatattatgttaaatttggttgggttggttagattgaatttacatgaaatcaaatctgatttattcaaacaaatgggttattaattttaatttgt

SEQ ID NO: 255763 - DNA, 58 bp, Glycine max
agcagggccaccccaacacacggacacaaacaccccccccaccagagaccgagcggac

SEQ ID NO: 255764 - DNA, 383 bp, Glycine max
  unsure (1)..(383): unsure at all n locations
agcttgcccattgcaagagccattngacccatgttatcatcatcatttccactaccattgggtcctagggaagtagaggaaagtatttctacaagagattgttgcaatgcttccatgccttgatttaaagcatcctcagcctgctgggaagactgttgtagattacaaattcccatcaactgctgatctgttaatggctcaaggtggttcttgatgatctgaaacccaaaatacaagaaacgagtcaaaaacaaacaaattatgtacacaagtgaagttaattactatcattttagaatgtggatttgacctaactcgaccccaaaaattagattataaggtgagagttacacctcacttatatgctctgtcttgatcttatc

SEQ ID NO: 255765 - DNA, 341 bp, Glycine max
gataacactggtgttggaacattcaatgttttttttttccaacctccgtcacccttgttgttcaaattcctttgatctctaagtacatcagtcaatacacgttccatttccaaattccatgtaaaataacttcttgtttcctcattattttttcctaaaacttttcttttgtccgtcattttttcattagatgactccattgaagttaatgtcacttattcaacctgcacataactagtagatatgacctactttattcatttgactagtccacttcacaatcatagaaaatatttcaagcaaagtttttatgcaatagcaaagtacgtaaaagtctatct

SEQ ID NO: 255766 - DNA, 259 bp, Glycine max
tgggatatacggcatcgccccccgccacgaagacgaaataatttgtcccgctaatttttggctttgcacatttgctttccttgcatatttgaccatttcaccagggtgcttcttttaaggtgcatcggctttaaagaaaaaagtcgtattgataacacactctaattcattttacaaccaattgcgtttcatattttgactttggtcttggctgacaataaacaaatcacaagagagttggatttgttgccacattgag

SEQ ID NO: 255767 - DNA, 280 bp, Glycine max
ggataaagcctcccgaacttcacttatatatatatatatatatgagaggatattttcaaacaataattttaaataatatatgtgaaccaatgataatataagatgtgatgagtgataaataacacgacagggagaaataatattgttgtatatacaacagcaaggaaacagggaatcacatttatttatttaatcggatactgacaatcttgacttagtgcgcatagacaactaagaggtgttgagagttcgcaataataatgcttctttttgaacacgc

SEQ ID NO: 255768 - DNA, 345 bp, Glycine max
  unsure (1)..(345): unsure at all n locations
tgttaaccatttcaagcaactgcatgagcgttttctctctattatatgaaccanatagagtcttccagggggagcaggagggtgaagttggtggccaagtattctatgaaaatggagaagtataagaaggctgcaagtgatattctcactcccaaagtggggtatggtttggcggatgagctcagacgggctggtttttgggttcaaactgtgtcagataagccacaagctgcagatcaagcattgcaaagccacatcgtggatataatggatcataggcgggttgagtgtgtggtccttgtgtctgatgattctgattttgttgacgtgataaatgaaacgaaa

SEQ ID NO: 255769 - DNA, 428 bp, Glycine max
  unsure (1)..(428): unsure at all n locations
agctngaaattctatgttgggctctatctgaagaggaatacaccacaatctacaactttagaagtgcaaagataatatgggacccattagccataacatatgaagggttgtcataggtaaagaggaacaaactaagtcttctcacatgtaagtataagttatttactatagaagaaggtgaggacatacaacctatgtgttggatgcttttaaaccatattaaatgaactaagatatttagccataaatttgacaattatgatgacaaaatttttagaagtttgtctagaaagtggagaccacatgttacagcattgagagcttcatagagtcttgacaccatgtccctagaagaacttgttggaatcttaaagctccatgaacaagtactttaaatggatgaggtaatcaagtagggaaaatgtctt

SEQ ID NO: 255770 - DNA, 350 bp, Glycine max
ctatccttattgcttgcctccggacttcactccccgtgttcttccggaagatttaagccaagcccctacttttgaggggcaactcccgccttatgacgactatcccgggcaagacgatgaggaaggagatacccatcttagccccctgctccacctcaaagatccgtccccccatgaactaccccaaccaaacatagtccgccatatcccaacttcacccacacccgtaaaagaatctgttcccttcgtggaagataagggaaagattgaggcgcttgaagagaggttgagagcagtcgagggcctcggcaattacccattcttggatttagcggatttatgtctcatgc

SEQ ID NO: 255771 - DNA, 409 bp, Glycine max
agcttcatcagatgctgcatttcggtatcagctctctttattgaagaacgatatgcacttcttgcattataaattagctctatcgcggggcaactgtcggcattgggttccttcaacgttagcaagatgtttttcggtttcaccatcgactttgtcatataagcaataattttcttttctttcttagacaatcgcccgacgtatggatgtccaactaaggacttcgccaattcatgattgtgaatcccacagatcaacttcaccatccaacctttccctccatgcactggtttcccacgaagtctgaagggacaatcacatttcctactcccagggtcttttctaacgaattctttatttctacacttgtacgtaccactcctttcacacccaattaagacaaatgaac

SEQ ID NO: 255772 - DNA, 364 bp, Glycine max
tatgaatactaagcttctaaagaagtttctcacaaagcttctcattgttttttctcaaagaggtgagcttagttattagaggggtatgtgtagttaagctttagcttctcaagaaagtttctcaaagaagcttctcaaggaagtttctcaagaaagcttctcaaggaagcttcttaaggaagtttctcaaggaagctacctaggctataaatagaagtatgtgtaacacttgtggtaactttgatgaatgaaagtcttatgagacacacttcaaagttccacttctctccctcttttattccatcaatttcgtgctccccccttctctctttcttttcctacattaaagcatcctcttcaagct

SEQ ID NO: 255773 - DNA, 437 bp, Glycine max
  unsure (1)..(437): unsure at all n locations
agctntgaaccaaaccaaaccctgtcatgtttatgtctagccattctacaagctttgagccaaaatcttgactcaccataaaccttgacccagggtgagaatgccaatccttaccctcggaagcaaaaaaaagaagagaaggaaaatttccaatcaaaggaaaaaggagaaggaaaatttccaatcaaagaggaagcaaaaaaggagagaaggaaaatttccaatcaaaggaaaaaagagaggaaaggaaattcccaatcaaagagtgggagaaagcaacaagaaaagaaagaaaattcccaatcaaagaatgggagaaagaaaaaagagaattataaaagaagaaagttcctgatcaaagaaacttgaagaaatgtgccgaaaggtcttttgaccacaacgatatctgaacaatacagaatttgtaccaaatgaac

SEQ ID NO: 255774 - DNA, 345 bp, Glycine max
tgaatagtgaatctctatattgcaaaattatgattttattcctaaaatgaaatccttgcacaatttcaattcaaatctaggatatgaatttttttccacataatccaaatccctaaaagctaggttgatcactcctaacatgcatctaagcaaagaattgaaataggatcacataactaagggatttgattagaaaatagagaattacatacttaaattctacttctttcactcaacaatcgaaaatttaattcatttggatcatgaatggtccaaatagaacctcaaaagatgaattacaattcaagaaagagagagagaattttgtgattctatttttgtaaa

SEQ ID NO: 255775 - DNA, 340 bp, Glycine max
cccaagctgggacaggcttcaccttaacagcgggtttttgttttttttattggcacacaacccaaggctaagactagcaaatgtgacacccgcctagagaagattggaggaagaaaatatgacaattattattattaattatacaggcaaggaattggaacttgaggcaggtatctgaagattttggggtaaaggaagtgggcattttctcttcttttcataatctctattccgctgtaattgatttcaacacattttgcttttgctatttctactgatgattttgggttcattgagaactttctctgttgtaaggaactgagctcacgatggattatgt

SEQ ID NO: 255776 - DNA, 398 bp, Glycine max
gacctaagcactgcagctgcactaggataggtgaccgcaattgtattttgaaccacggatcaagctgaaccgcaagaagcatgcggatcaacctattacgcttgcggaacaagtcgatccgcgggaagcttctttaattctaaaaagccgaaaataggtcataataatgaaaaatggctacaaataagggtttacgcgtacttttgaagcatttaacctcgaatatgaaattgaataatggccgtttaagtcataatttcgaaaatcggtcctgaggctttttggttctgatcaacgaatgaaagtataatgcctgtcaagatattctgttcggcgcgaatcatcatttgaaggtatcagtggtttatcactctattcaaacatgtatggcaccgaat

SEQ ID NO: 255777 - DNA, 263 bp, Glycine max
aacatcaaaaagccaaagtgcgtgacaatcaacacaagatgatttaactaaagttcacataatcaatcagaagtcacaaccaaatataatccaatcatcaataagttaaaaccaaatataatccaagcataaataagtaaaaaccaaatataatccaagcataaatgactaaatgccaattatcgaaagataacgaaagttcaaaaaatgataacgtaaaaagcatagccaaatacacggctaataataaaagataataataa

SEQ ID NO: 255778 - DNA, 357 bp, Glycine max
agctttttggagtagaaacatgggaccatttctttttatttcaaaaaaaaggaagtcgtatctagtcaaggtctgagagaccatacaagtttcctaacgatttctaattatgtgggccattaagtctatcatatgctgacaatagccgagaagcccatgaatctctttgggggtggagtaggtgtctgccattgccttggccttggctaacaagcggggaagtttttgactccggttcaaagtaagagcaaaccggtccatccacatggttgcctcttggtgtaaagagtcgatcacccttcctctagcctctttttccgcatatactcgagcatactcatccgcgattctatgctt

SEQ ID NO: 255779 - DNA, 345 bp, Glycine max
tcttttggacctcgaacaagcaattatttcttttttcataaccatgctatgtgctcgcgactggtctctttcttcccttcgcaacttgagttcactattgctaccccatagagctccacgaaatttgttccggccatactcttccttgcgagccctcttggtctcttgttcaagggctcttgcggtaattgcattctcctcccgtaacccggcacactccttccgaatgtgtgttgcggccaacttgaacttctccttggcaaatttcgcctttcctaactcgcttttgagagcttggacttcttcgtgctcttccggtgcttcaaaactctcttcgctgacgac

SEQ ID NO: 255780 - DNA, 387 bp, Glycine max
  unsure (1)..(387): unsure at all n locations
agctntattaaatanttatttattttgnatgtgaaacccttcggttataaccgttttacatatattacagtatgatttacaggttttttcaagttgtattaatattagtctaattaaaattagttttctaaattaagaaaacctatttcaaaatgagaaattcgtattcaaaaatattcacaaaatagtttaatttactttctttttagctagcattatattacatataaattttccttatatgtaattcaatatattaaatgattataagaattctggacttataaatgattaattgtatatatgatatagttgtgcattattatgataagttgtgacattaataattgacacaagtgataatgagttatattcttggtctttaat

SEQ ID NO: 255781 - DNA, 339 bp, Glycine max
  unsure (1)..(339): unsure at all n locations
ttttatgaaaggatgggactcttctttattgtttttgaanttcaacgcttagatacactggtaatcgattaccaatatctttgtaatcgattacaccattttgaaatctattggaacgttgcaaatttagttaaaagcttttgaaatcaaactttgccactggtaatcgattacaggaaactggtaatcgattaccagagagtataaactctggtaacttagaaaattttgagaaaactcttttgaaaaacaaaactgtgctatgtttgtttttttttttttgaaaaatcttttcaatactatccttgtgaagtcttcttgatttcttctcttggaact

SEQ ID NO: 255782 - DNA, 404 bp, Glycine max
agcttgtagaatggctagacatgatacatgtcagggtttggtttggttcaaggataaaagggatgccccacattatttccatgacacaaatgcaaaaatgatgatttggaaactttatgcaaaactggtcatgcatgcacctatgtggacactcaagtgtcaaatttttatggtcatgtgatgctaaggctcaggattcatttcctctattttaaatcaacccaatgtttccaaaatatgttcttttaacaatttgtgcattcacccgagtccatttcgggcgtccgggaaaattttcacagcgttcacccttcaggtgtacacattttttcaaaaactagttatgatcaatgaattttttgtttcaaagaaaagttggaagtcatctcttttcaaaagcatgt

SEQ ID NO: 255783 - DNA, 349 bp, Glycine max
ctatgaaactaagcttttgaggctggggtcttttgtttcgtgatattcaaagaacatgtgaggatcagaaggcagttgggggttacaagccataggtataggttcttcataattgggtgtgtggttacaatcactgttagtcagttgggtgctttgctgttggttttggcttccaagtctgataagaccttcttcaattctggtgaccttgtggtaagcatttacattgcaatatattaataaatagagtttaattttgatgcacttttttgggtcactgattcattaacatgaaatattaactgattttattaataactaatctctttggaaaactataggctaaagg

SEQ ID NO: 255784 - DNA, 417 bp, Glycine max
agcttaccttgagacaagttgagggcatttttctctgaaaaggggaactccgtggtttgcacggtggcacgacaagacgagacgtcggacgcgcgacaatgtactacgccctctgttggttaattctgaaaatcgagataatcctggataaatctgaagtcgtgtataaacactgtcagattgaatcaaatttcggggttcaaccaaaattgttcaatcggataaaatcagaagattataattcaagagttctgttttggtcttgtgaggttttcacatgttatgctttctgaaccaggatgattatctataatcaaagaacaggtggtttttggcggttgatggaagttatttatttttaaaaattgccgctgatggaagttctagtacttccatgtaacttccaagcgttgatgg

SEQ ID NO: 255785 - DNA, 345 bp, Glycine max
  unsure (1)..(345): unsure at all n locations
tgagagccttacctatgctaataaaaaataaaggtttatttattgtaaaantattaattaaaattactattaaatacaattatatatattaaagtatgtaactatttaaattttaagcgatattttttaattggggactatgatttacttactctatcaagagaaactatgtactgtgggtctccacaaagtctcaaacacattcacacgagcccaaagcaagataatcccaatttggttcatgggctaaaagctatttttggtgcccaacaatgctcaaaacccaaagtgagtatctggtttgtaaactaatcgcaactgggtctttttatagcccaaagaaat

SEQ ID NO: 255786 - DNA, 410 bp, Glycine max
  unsure (1)..(410): unsure at all n locations
agcttaattgtctcgctctcgacattacattattttgtgtgaaattgttcctactaccatctggtccgatggcagtcaacaaagcgccacgatattttcagttaaaaatatgtcatctacttgcacaattggcttgtaatatttaaagccctcaatgcatgggttaaacacctacaatacacgattaagaatcagcctacgagactcatcctcaccatcctccattgaagatgaagtcttgtattttactattgtaacgggtacaaagtgttgagtatgtgtcaatcatataggcagataactgtatgattgttcccaacttccaaatgccatattaagggctttttgtttagtcgcccatacctttntatatgaaacaatataaccaaatccgtggtatatgtctgcaa

SEQ ID NO: 255787 - DNA, 348 bp, Glycine max
ttacaagcccttcgaccttggcttggttagctttcttttcttcttcactaaatgtagcattgcctttggtgaaaaattggacatgtaccttcctaatggatcctccatttgagccttccaccaatttgctttcaaatgaaaccttctccaatgtgtcagccaaggcagtgcccccgattatgctgaagttatatacataggctgcctcatcaattgcatcaactctgtgcagcacatactttgttttgtcacctgcatatgcacccattaattcatctaattaaaatcatgactaatttcattaatttgtactatgtattataattaaggttttaaatattggtcgca

SEQ ID NO: 255788 - DNA, 468 bp, Glycine max
  unsure (1)..(468): unsure at all n locations
gtcccggatccttaagncacctgaggcatgcaagctnttgagccaaatcctgactcaccataatccttaccctctgaagcaaaaaataatagaagggaaatttccaatcatagaaaaagagaaggaaaatttccaatgaaagcaaacaaagaaaagaaggaaaattccccaatcatagagtgggagaaagcaaaaagaaaagaaaggaaattcccaatcaaagaatgggagaaagtaaaaaaggaagaagaagaaggaaagaaagctcctgatcagggatcgaaggacaaacagaagaaatgtgcagaaaggtctttggaccggacaatatctgaacaatacagaattgtcaccaaatgaacaaaaaagatggaaaggaaaccacgacctaaaatggtcttctccctttgattaccaaccaaaatcccgtgcgctagccactttttcgccccgcactatacaaaaaaa

SEQ ID NO: 255789 - DNA, 349 bp, Glycine max
taaagtatgcccgagtcattcatccctatgagttttttttgaagtattggcgatcagaattgccattccttggattacggggttgaaccaagctcatgcttttacaaaaaggttcatcaagtcaagttgaaatatggaagtaaccgtcttgcaaaattggggcaaaagatgaatcgagtcacatcactgcttcgtttactgccaaacatatttaggattgtttatgtccttgttacttccagtttcaccttgacaaagatgtcatggaccatgttgaaaatctaaattgattcaaccccatgtcttgcgtaaaaattcgcaatacttcaactgtacatcattcgcatgc

SEQ ID NO: 255790 - DNA, 425 bp, Glycine max
  unsure (1)..(425): unsure at all n locations
nnnagctggagcttctttcttgattctagccatctctatttccacccttatgttttcttcgctctggtgtgcatggaaaaatagttttctggttgacggttccccgacttcaatagggatcatggcgtccatttgggaagaacagtgatgagcccaaagagttagaccttgtggcctcaataatcttaagagggataggcttacaatgcagaagaagcaacaacaatcaatttaacaatgttctttaaacatgcaagacacaattgattgcaacaaaataaataagataagggaagagagaatgcaaacacaattttatactagttcggccacttcccgtgcctacgtccagtactcaagcaacccacttgagatttctaatattttgtagaatcctttacaaagcctgaaccacacagggacaa

SEQ ID NO: 255791 - DNA, 347 bp, Glycine max
tagcgtggcgcagtgctacaacaccatcaagtttttttcgtatgaaacggaggtgcgtttgcgcgaccccatgtatggctgcgtgggcttcatcttgctcttgcaacaatgactatgcgaaatcacaacaaaggtacacaacgcgaaagagttatcaacctacctcaaccctaggccatgcaggttcttttagccaatcttggaatgttacaacatggtggtgttaatgttgtgcctcatttggatcaaccaatgttcaatgtcatgtccaaccatattttggttgggcacgatgttggacaaatggtggtttgggacccataacaacaagagtttctagaagctca

SEQ ID NO: 255792 - DNA, 431 bp, Glycine max
agcttggagggttatacatcgttcgagctatttattccataattgtcaactctacagaagaggacaatttattctttaagcattacgccactaggctcaatgcttggagggttgtacatcgtccgagattaacatcctgggatcaccgactctatgggaaggatgacttggtctttaggcatctacactaccaagctcaagactcatagggctatacatcacccaaggtaaacatcccaaaaacactcaatgatcggctttttctatagacactaggtagccaaaaccatggctgacttaccctaccaatcagaaagcaaaatgattaaaggtatcgtatgatagtcgtaccttaaaaacgtgacgacatgatcagaggatcaccacggcctaacattgtagatgcccacaaccatgcaccctataccatg

SEQ ID NO: 255793 - DNA, 353 bp, Glycine max
  unsure (1)..(353): unsure at all n locations
tggggcaatgcttgagcatttcaaacaccgattgttcttttcatattgttattatagnggagctccaaatgaatctaattgtgaaacacaagaaaacactctcggttgaagaacacatatccatggtctaggttaatcttcacccggcatgtaaacatttgttattctcatagcacacaataatttcttggaaaacaaataaataaattaaatcttttttcctttaaattcatacttctaactagaataacagatactccagattagacactgcctttagagaaaattcgaatcaataattatcacaaatatctcccctaaccaacttaggcatgctccgaaactctacaaca

SEQ ID NO: 255794 - DNA, 345 bp, Glycine max
aaacaataagaaggaaaaatgaaaggggcgtcctattcaaaaccccaaccaattatgaaatcccctatctcccacttcacacctcggaacgcaccgttctaatagagagaggcgctctcccatccccttaggctggggagaggaaatgtccccattttttacgacactccggggaacagatatccagagaagatgacggggtggggcctgtaactcaaaggaataaagcacgtggctaccaaccacggggccgggggttcgaatccctcctcgcccacacccggccaaagaagggaagggattttccccctgggggagagaacacatgaaccggccaccggacca

SEQ ID NO: 255795 - DNA, 350 bp, Glycine max
  unsure (1)..(350): unsure at all n locations
tcagcttaaatggactgaatcanaaggcngattttatttttttttttanaaacaacaacaactccgaattggatcagtttctcctcaacaaataagtgcttgggcaaaaaaaaaccttcctcctggatagattctggtggaagcttcaaaaacgtatactttttagttacaaacccatataccctaaaaaaatggactattttgtgaaaaaatatttgggcctactaaaagcgggatttgtgcttgtgggaattatcgagtactcccagataaataggacgacccaaaattttgtgaacaatgctgagtagaatttattgattctcggatacgtagatatcaaatgggct

SEQ ID NO: 255796 - DNA, 416 bp, Glycine max
  unsure (1)..(416): unsure at all n locations
agctngtcgagttcttttcttagccctattttctntttgcttttgcttcttccttaaggcattgtttcttctacaagttcttcaaatctcttgatccaaagggactagatcttcttaagaaactctacctcacatacatggaacaaagcacctaaagaacatgttagcaaagtactcaagagtaatacaaaaacagaatttaaaagcaaagaattgaagaataacgaatcattgcatagaatatgaaattagcataagttgcctaatacgagaaacaagtccccgacaacgaagccagaaaacttattacatcattgacaaatgtaccaattagtgtagtattttcaatagtaagtagaaagatggtcacctcaaggacttgtttgtactaagccttntngtgtaaactcaacaac

SEQ ID NO: 255797 - DNA, 342 bp, Glycine max
ttggagtttccagtgccaattcggctatttttttattccagacttctttagatgtaccctctacttgtaccacaaaggatgtaccctccaatgtgttaagacaaagttctcaggcggttaaacctttgaaactttgtgaatggggatacaaaagaattctcaggcagttagtcctttgaaatcttttgtatatggaagaatcaaaagaattctcagactatgtcattttgaattctttgacaagggagaagggagacacaaaagaattcaggcggttagttcttcgttcttttagaaaagggagaagagagacacaaaaagaattcaagcggttagtccttg

SEQ ID NO: 255798 - DNA, 375 bp, Glycine max
  unsure (1)..(375): unsure at all n locations
agcttctttctttgatggggagactacatctagtgttatcagngactgaatgaaccttgatgtattcattctatgtttatttggggccttcaactttactcatttagttggaaaggcatgttcgtaattccatttggttgggtgattgtgagcatacgaatcttgtcacagtttcttggaaaaaaaattccagaccttttagtgagggacaaatcaaacatcgttcttttaaagcgctaaataaagccttaattcttgctctcacttggaaatatgcttcttcatcaacccaatgggtggatatgcttagagctatggtcttctaagatggagtatagtgttgaaatcatgtaaaatcatctttgtgatcaggta

SEQ ID NO: 255799 - DNA, 343 bp, Glycine max
  unsure (1)..(343): unsure at all n locations
ttaagaaattactcaatccgaggtggtttatttatagtctaatnagaagcaaactttgggttcttgttctgtaactacttgctatattactaatttatcctcattacaaaagagaatgtgttaagtagaaaataatggctgcatcagttggcagtacagatatttccttatccctttggtcctacccatttggcattctctagtaactaggtaatgtataagctgagccgaatttatgattggaacaaccacataaaatgggaagttataagcaaatttaattttgattttttttgcccataataattgtgttcttccatcaactgtaacccaaaacctttag

SEQ ID NO: 255800 - DNA, 270 bp, Glycine max
aaaacagaaacaagagacgcgaaacggggaactcgcagatcccacggaaacgacggaaacttccgaagcgcccgcaaaactcccacgaacattttccagcaatcaaagagagaaacgccaagggcggaccctctctccacccccccaataagcaaaagggaggggcgcgccaccgccacagcagagctccccaaacaccgctcggagaactcgaggccaagggccgggcatgcccccaaaacaaaccccccagcgccaggaacccccaaa

SEQ ID NO: 255801 - DNA, 348 bp, Glycine max
gttgacttgagttatcaagtgattatatttatgtggccatgacatctatttaaagaactacattatctctatcaatcatctttaaatcatctatctttcaatcttctctcaacatcatacaatacctttcaactctttctacagaaatttctcttcatctttctaaaagtttttgttcaatactttctctttcaagaaaagttctttgataaaaaacttgtgttattcatctttttcattctcttctccctttgccaaaagaacgaaggactaaccgcctgaattcttttggttctctcttctcccttacaaaagattcaaaggactaaccgcctgagaattcttttg

SEQ ID NO: 255802 - DNA, 424 bp, Glycine max
agcttggatttaaagttcgaagtattttttccatgaccttcacctcatcaacatcttcaccattttttttaagttgattgactacggccaatactcgagaaaaataatcagaaattgactcggactcctccataaacaaacgctcaaagtcacctctaagagtttgaagacgaatcttttttacctgctcaactcctttgttgcaagtttgaagcttatcccattcttctcaaatgtatcttcatccaccgattgataaatgagaaagagagctttcttgtctctctttcttgactccttcaacgtctcctttacaccttggcttagcgagggcttatcttgctcctcgaagccattctctacgatatcccacacatcttgagcttctagtagcgccttcatcttgatactccaattatcatac

SEQ ID NO: 255803 - DNA, 340 bp, Glycine max
tctctctaagagagcaaggaaagatgccattgttttaaggatctagtgcggccccacaagcggatatgaaatttgacggacaccaattccaaagcgaagaacaccaacattgctttgaagcgatcaagggctggtctttccttaaggagagacgggtccagttgagggagggagaatacgttgagttccatgaggaagtttctaggaggcaatggaattctattccaatgcatggcccacagaggagggagtcagggataagcgctcctgagtgcggggttaatggatcccctttgataaggatgccattaatcagttcttggggcatccattggtccta

SEQ ID NO: 255804 - DNA, 321 bp, Glycine max
gcccacataattattcatgtttgtacacatcaaaagccaaacaagggtccctatactcaataaacacacaatggtcgctaaaacaacaagccctgtaacactgtaaaagttgatgaatcacgtgttcatagcgataacaacgcgaatgctataaacaaggggagaaaaaatagcccaataaggggacatccaaactctcactctgctaatcgctatataggaattatttctataaaaaaattctagcaagctgccactatttgagaacgaaggacaaaataatgcacgcaccctaaacaagaccaaaagctatgtacccgg

SEQ ID NO: 255805 - DNA, 434 bp, Glycine max
agcttataatatattgatacgctcgtaattaaacttcggaaactcttgagaaattcaaatggtcttaacttttcacacggatgtccgattcgggcgcataatatgtcgagaggctcgaaattgaacaacggaagctcttgagaaattcaaatggtcataacttttcccacagatctccgattcaggcttataatatattgatacgctcgacattaaacatcggaaactcttgacaaattcaaatggccataacttttcacacggatgtccgattcaggcgcataatatgtcgagaggctcgaaattgaacaacggaagctcttgagaaattcaaatggtcataacttttcacacggatgttagattaagacgcatcacatatagagacgctcgataatgaacaacggaagctcttaggaaattaaaatggtcat

SEQ ID NO: 255806 - DNA, 349 bp, Glycine max
tgaatcggacatccgtgtgaaaagttatgaccatttttttttcacgtgagcttccgttgttcaatttcgagtgtcaccataagtgatgcgcctaaattggacattcgagttaaatgttatgaccatttgaatttctcaagagcttccgttgttcaattctgagtgtctcgttatgtgatttgccagaatcggacatccgtgtgaaaagttatgaccatttgaatttttcaagagcttccgttgttcaatttcgagcctctcaacatattatgcgcccgaattggacatccgtgtgaaaagttatgaccattagaatttctcaagagcttccgatgtttaattttgaggg

SEQ ID NO: 255807 - DNA, 432 bp, Glycine max
gctttgatgaaaaatttggagaggttaatgaattctctatatgatgcgctccatgagaggttggatcaaatggagaatagatatcctaatggagaagaaaggaggaagaaagggaatgatggtgttcctagacaaaagcgaattgatggtattaaactcaacattcctccctttaaaggaaagaatgatccggaggactacttggagtgggagatgaaaatagagcatgttttctcgtgcaacaactatgaggaggaccaaaaggtaaagcttgccgccacggagttttctgactatgctcttgtgtggtggaacaagctacaaaaggagagagcaagacatgaagagccattggttgatacatgggcagagatgaaaaggatcatgaggaagcggtatgtgccgtctaattactcaagggatttgaacttc

SEQ ID NO: 255808 - DNA, 350 bp, Glycine max
tgattcataccaaacgtgacaaggttaacatgtttttatcaaatttcttcacaaataactatcatgaggcataaacctagttaaactacccatcataactcccaaaacccaatacccacgaaaatttatgtgagaagaagtctacccaaacctgaaattttgaagtcccacacgtagaggtgcgcttcacgactccgaaaatggcttcctttcgcgatttggagcagaaaaggtgtgtaaaggttggagctttgatggagcttcaatggtggaggaagaagagagaatagttacgagagagagagggagaaaagcttctaaattttctgagtgaggagagagaacataac

SEQ ID NO: 255809 - DNA, 430 bp, Glycine max
agcttgtctccttgcaaaggaacttcctattgtttttgttcaagggcataaaaaaatcccttgggtgaaatgggaagtattttgtctctctaaaaggatgggggtctaggaatcaaagatatttctaaattcaatacagctctgatgggtagaaggatatgggctttatcttctaatcataatcagcttggggttagaatcttattgtctaaatatggtggatggtcagatcttagcagtgggagggataaatcctggcagtctcattggtggagggacctttgaaagttatatcaacagcctgagttcagaattatccaccaccagatggtatggaaggtgggaggaggggaaaaaataaaattctcgaaagataatttggtgggggaagattataaacttgaacagcaattcaatcagctattcctga

SEQ ID NO: 255810 - DNA, 348 bp, Glycine max
  unsure (1)..(348): unsure at all n locations
ttgaagntattatattttattattagcattatttttctttagggcgagccctggngcagcggtaaagttgtgccttggtgacttgttggtcatgggttcgaatccggaaacagtctctttgcatatgcaagggtaaggctgcgtacaacatccctcccccataccttcgcatagcgaagagcctccggacaatggggtacgaagtttattagtattatcatacatataattaaatacttatatgggtatggttttctattgtaattgatgtttatgattttgtaatgttatatgacatgacctcgaaagttattattatgttgtaattagagaatattattatttaat

SEQ ID NO: 255811 - DNA, 366 bp, Glycine max
  unsure (1)..(366): unsure at all n locations
tgttgtgaancaaggaaagatttttctactgccatgataaggtcatctgtagttttaggagcctctttgtgttgtaatgaccgaatgacattaaagaagccaagatctaagacgttaaaatctaccgagtttaggggttgagaaaccaatcgaatgtcaaaatcgccttcactagcagcttgatggaagtcgttgtcatcttcatcaatgtgacatggaacattgtcttgttgtatgaaaatattttctcctctatctcctattggccatttagctttgattgcaggcaacacatggtgaataaaaaaatgcttgcttacttgtttatttattgaagatattggtttcttttttatagtccctgca

SEQ ID NO: 255812 - DNA, 348 bp, Glycine max
taaagaattttgtgggtaacactcctttgaattttctttctccttctgtaaaaaaaaaaatgacatttccttctcctattttatagcatattgacttagtgaaattagcaatttgtatacatgtatacagatatgcatgttacctggtgtggagaagtgcaagctgttagaaaaaaaataaaaaatgaaagaaaataaaaaagaagaagaggcatagtctttaattaaataacaaaataacagtagaacaataattttaattgacaccacataaatcaataatgcactatatcatataataagaacaagaaaaaataaattaggggaagaaagatatagtctgggttg

SEQ ID NO: 255813 - DNA, 427 bp, Glycine max
agcttgcttctacacaagattcttactatttgtgcttaggtgtcaataggcatgtaaagcatgaaggacatgcacaaagtgtgactatatgatgtgacaatggggtgtagtaagcaaattctcacttccccctctaaactttaattggattgggcttctaccaattcaattaaatttatttcccaacacacacatcaaatattcacttagtgcatgtgaaattacaaaactacccctattacaaaaactagtctaggtaccctaaaatacaaaagctaaaaaatcctatatttctacggtaccctacctacattatagagtcctaaatacaaagacaaaaaaataatgaaatcctaatttaatatgtacaaagataagtggacccaaccttgtctcatggactcaaaaatctaccctgaggttcatg

SEQ ID NO: 255814 - DNA, 363 bp, Glycine max
  unsure (1)..(363): unsure at all n locations
acactatanaaaacccgagcgtctacacaggataacactactaccaaatttgtttttaacattggtaagttaacaggcaggtttgataaaaatcgatgttaacaaaaaagcgggggcaaaatagtaaataacgagactttattaacatcgggtttttaaaaaaccgatgttaagaaaaatgccgtggcataatttgggaatattgcgcatacgtatttgaagaaaatcgatgttaacgaagtgactttagcatcgggtctagaaaaactgatggtaacattaattaattaacatcaagttttcagaaaaccaatgctaaccttagttcgttaacatcggttttctaaaaactgatgttaacgt

SEQ ID NO: 255815 - DNA, 408 bp, Glycine max
agcttataattggttgttcactcgatcagttttatctgttctctttcgctactataatgttgcttcctaactcagcgttatgccgatttgtagggaagattgcttttatttttggctatattttgtgtatgttcttacccaatccatgacaaagagcattggggatcgatgctgctctttgcaattcgcattgtgtgttacttgaaaaggaaccatgaagaacatatattagtgtttgcttattgggtaacgttttccatcctcaactaggcgaactcttgctagctacttggtttgttcaacttgacaatttgacaatctcttgaaaaactaggaaataacatatatggtgcctcattcttttgctaaagtgaaatatattgctccagcttccatggttttttgtag

SEQ ID NO: 255816 - DNA, 337 bp, Glycine max
tgaacatataaaaacataactgcttaagtatttttctttttaatagccaatcacgcccccacagggattcctttcttagttacatactcatctattgagatttgagacacaaactcagttgaattcacgttctttcacacttgactagtcaaaaacattgctgcgattttttccttttaaaaaaattaagctagcaattacaatgcgacaattctaacttctctatcaacttttctgcaaactcactacttctctatcaattttcatgcaaacattgtagcctaaacctcaaggttttaaaaaagtctgttattgcaattttggccgcaatatcaac

SEQ ID NO: 255817 - DNA, 418 bp, Glycine max
agcttcaccaccaagagaatgccttttatttaatcttagagatgaagcttcaatggagaataaaaacgagaaagggaggggggagcacaaaattgaaagagaaaaagggggagagaagttgaactttgaattgtttctcacaagtttctcattcatcaaagttacaacaagtgttacacatgtttctatttatagcctaaataggttccttgaaaagcttccttgagaaacttcctttagaagctagagcttagctgcacacacccctctaatagctaagctcacctccttgagatgagaaactagagcttaactacaccgccctctaatagctaagctcaccctcatgccaaaatacatgaaaatataaaaaagtccctactgcaaagacaaactactcaaaatgccctgaaataca

SEQ ID NO: 255818 - DNA, 344 bp, Glycine max
ttgaacaatatacttggccttcatttatttgtttttgggcttggcggccacgctcaactaagtactttcgacacctactgtacgttgatttcaccaatgttgttatgggaatgttgcgacaatcctttaaaaccttattgatacattctgagaggttcgttgtcatgtggccatatcgacgtccttctctatcgtaagccatcgtccatttttcttttgagatgcgatcaatccatgttgctatggctagactcagttcacgaaatttttctaaattttgataaaaaatgtgcttgcaaggagtgtaggctgcataaaattagttatgaataacaatttaaagt

SEQ ID NO: 255819 - DNA, 185 bp, Glycine max
agcttcctcttttcttcagttgccggtggttgttgatcgaggccatacccgaatcatataaacatgaaaatgcagtaactaggaagtgatcctaggtcgtttcccaacgagcagtgacaagccaaatgttcataatatacttgcagtaacagtaacgatggggggggggggggttggtaacatct

SEQ ID NO: 255820 - DNA, 343 bp, Glycine max
  unsure (1)..(343): unsure at all n locations
ttggaaagtgttgtttttcaccctttctctatattaatctgctggcttanagagcgtctgctaagcgcaacactcatgggctaagcgtgaggaaaactctggaagaagatgagttgtacaggttcactaagtgcaccgcttcatctcactaagtgcaccgcttcagtccatccgctaagcgagaaaggcacgcgctaagccaaaattcactaatgtgcgctcagcggtccataattgcgctaagcgcaagagcatgaacaaggccacctatttaagcctgaaatcaaattttagagaggaagtttggactgggatttagagctttccatgtctagagattcta

SEQ ID NO: 255821 - DNA, 432 bp, Glycine max
agcttgaagacaagactatacgaggtatctttcttgtgtatatcaatatctctaagggctaccgtgtctacaacttgcaaactaagaaactcgtcatcagtcgagatgttgaagttgatgaatatgcttcatggaattgggatgaagaaaaagtggagaagaacgttcttatacccgctcaactacctcaagaagaagatgaggaagaagacccaggtgaaccacctttacctctatcacaacaacaagatcaagaactatcatcaccagagtctactccaagacgagtaagatctttggtggacatatatgaaacctgtaacttggccatacttgaacctggaagctttgaagaagcgtcaaagcaggaagtatgggtcaaggcaatggaagaagagatacagatgatcgagaaaagcaacacatgggagt

SEQ ID NO: 255822 - DNA, 346 bp, Glycine max
tgtggatgtgggtggtagtggtggagattgctttcttatgatcttgcaaaaacaccccaccatcaaagaagggatcaactttgacctacctgaagttgtggccaaagcccctcaaatcccatgtgagcctctgttatgttttggtttatatgatctttggtgagatttggttgtgggggtcacatgtgatgaattattatgtgatttgtaggtgtaacccatgttggcggtgacatgttcaagtctattccccaaggagatgctatcttcatgaaggtcagtcattactccaaaatactctcttctttacgacatattataagatatatagttttgaatcattttg

SEQ ID NO: 255823 - DNA, 427 bp, Glycine max
  unsure (1)..(427): unsure at all n locations
agcttgtgacaagtaacaagtttatactatttgctataaaatataaaaaggtcaggtctaagtataactaaacacaactattatggtatgatttaattaatttgcgtgcatatgaatatataagtaaaacaatatctttttttatatatttttatatttaatatacatatattatcattgcattaatatagtatacagaataaatgtaataattatatttgttatataaaaactattttacataacattaaatattgcatttttttcaatatagtatattggttaaaattaataaataatgataatacatacatacatatatatatatatatatcttanattcttaaaaaaatatttgtataatatacatatattatcattacatgtatggacttcaatcaatatactatactatataaatgcaata

SEQ ID NO: 255824 - DNA, 338 bp, Glycine max
tcctttcatagtaggaggggatgtttctttttttaggaacttttcaagtcattccaatactctactgaaggatccccatgaatccttttttccctaataagggaagtccacaaatagaaggcatacccttggaagctaagggtggccaaaggaagatgacacattgcttctcattgctctaccaagaaaaccgtgattatgaggggccaagacatttatagtagccaagatgaggctactactttacgttcctctagtgaaagtgaagaagcaaaagaggtagaatctagtgaagaaatctacccccaagaaaaaggggacctcttaatagtcaaaag

SEQ ID NO: 255825 - DNA, 420 bp, Glycine max
agcttaatatatataggttcacctctattatggtattaaattatccaaagtaaacctttaaattgtcttgtagactaggtcaaactttcaagtagggtagttcaagtcattaaataaaagacttttaacaagtaaagactagacttgagtcatatgcttgagtttcgaccaaggttagaatcacatttagcatagcctaacatatgaatacaactcgaaaaattccaataggagagagaaagacacaatggtgtgtgagacacgcacatgtgtctttcttttctattgaattttttttagcaatgacgagaattcagatccctaacatctgtatggtttaacttaacttattctcactcctacatataactaagctttgtgtacacatatatgagttaatgttgaggccctttcatgatt

SEQ ID NO: 255826 - DNA, 334 bp, Glycine max
ttcttaatcatggcttagttcttattaaaagattattcgcgaacatgtatagtgatctaagttattactagtttttttttgaaaaaaatgtttttgaaaagaaataataaaaaaacattttgtaatttggttttcaaaactgttttagaaatgaataaaaaggaaaacacccatacaatctcagagtttcaacggtaatgaagcaaagatataatatatgttagggttattcttcctacacctcacaaatttcttctagacccaacatattttaaaaaattctaactttatccttttttacttctttttcgttcctcctttctttcttttcttc

SEQ ID NO: 255827 - DNA, 435 bp, Glycine max
agcttggtgtaacatctcaaattcattttctgaaatatagctttaaaattgtttaaataacaaatattgtggaatgcatgtcatcaaatttagtttctatttctaagttaataaaatatcttaatatattttatttttcttttgggaaaagaagaaacacgagtgtgtgtgtgtctgtgtgtgtgtgtatatacatatatattgcatttgattataacatgtacatataattaaaatgctcacgaataaatggtattgtcaaaaagtgttctatatttaaaaaccatttcaaaagttgttgtcattttcctccaccattacataatactataataaaatataacttataaagaattaacttccacaaaataaaatgaactgaaagaaaatatgtaatcatacatagtaagccttagtggcccttaagatataaac

SEQ ID NO: 255828 - DNA, 346 bp, Glycine max
  unsure (1)..(346): unsure at all n locations
ttagaactacacagagtggcctgtctcttaatatttgttaattcgntgcctgtgcaatcttctcaagtcaatatgttttgtctaattctagcaatctctaatttgtttagatgtgtcaactacaatgataatttctcctgggcctgtggtggatttcttaatttccaatcaaaatgtgagagatccttttcaacttgactgggctaaggtgaacaagttttctgaatactttttcatctcccatcattgatattgtaaggctcaaatttgattcccccctatccccttttaacattttaacaggccaaaaggaccctaaaaaatctgaggattaaaactagcccat

SEQ ID NO: 255829 - DNA, 435 bp, Glycine max
  unsure (1)..(435): unsure at all n locations
agctngattaaagtatagttggaaattttatcattttaattaaacccttttagttaagcaaagacatcgcggcctcacatgcatgctcatccaaaatcttatcttacgaggatgatttatctacggttttatttatcaaagcaattacgtgccttcatgaaggcacgttcatatcatattttaactttgttgctaagattctgtattcaatgtatagttgacttgcattatatggaagcaaatgctaaataagcacttatcatttactagtatttgtctatatatatatatatttcatgttgcattaattctaacatcttcaactatatctcagttcagttcaagtatcaataagcacacacacaaaattaaaccataactctcaatattcttaatttcttatagagcattttccacattacatagtcgggaaca

SEQ ID NO: 255830 - DNA, 367 bp, Glycine max
  unsure (1)..(367): unsure at all n locations
acctatanaaactcaagcttggagaggatgcttcaatggaggaaaagaaagtatacttttatgagaaagggaagagcacgaaattgaaggaggaaaagggggagagaatttgaactttgagttgtgtctcacaagactctcattcatcaaagttacaaaaagtgttacacatgcttctatttatagactaggtagtttgcttgagaagctttcttgagaaaacttccttgagaagctagagcttagctacacacacatctctaataactaagctcatctccttgagaagcctccttgagaaacttccttgagaagcttccttgagaagattcctagagaagctagagcttagctacacacacatcta

SEQ ID NO: 255831 - DNA, 420 bp, Glycine max
  unsure (1)..(420): unsure at all n locations
cggatcttaagcacctgggctgcagctgtgaaatacaattaaccttcactctttttttgtgtatttntggcactccacatggtacatattctccatacttgtaaagatctcttntataaaagatttaaaatgatttaatcatttaacctttaaagattttgaataaaacaagaatttgagagtttcaattaaaaggaaagtaaggaaataactattataattaagaaattatactcacataacctattattaaaaacctaacatgacattgataataatagggttataattaaaccataaattatctataaggaatggaataacttaatcatttcacatggtttttaatctctcatttaggttattaaaatttcttgatggattagggtagaaaggtctaggttcgataggtgtgattaa

SEQ ID NO: 255832 - DNA, 334 bp, Glycine max
cttacccgctgaagaacgatttttttgaaaatctaacgaacaacgtcgaaaaacggtcgaaacctttgctagatttcttacggaaaacgatacggaaacgttctgaagagcctcggtttataattttttcatggaaacaattttttcaagcgaatttcaaagagagagaagtgcctaaggggctggacccctttctttttcaattcctcccctatttatagcaaaataggggaggtggttgccgcccagctcgaccaggcgagctcagctcgcccaggcgagcagggttgctttctacataagcaaccgtcttctggaggaatcttctggaggg

SEQ ID NO: 255833 - DNA, 430 bp, Glycine max
agcttgtgggttaccctccaaatgactgtattaatttctctagcaactttgtgaatcaactaaatgacacacctcgaagttcaacttatgctcaggcaccaactttaactgctactcagtgtcaacaattgatctctttcttaaccaatcacatgaaaaccgaaaacaccattgatgtagtagccacaaatgttacaggtatctggatgaatgttgattttaataatgattaccgcacttggatcattgactctagggatacttctcacatttgttgtctcaaagagctgtttgattcatatactaccatttttaactctcatgttcttctgcctaattccacgaaagttaaagtagaaggaatatacagtattaagattaatgaagccatttttcttcataatgttttgtcatacctacattcaaattt

SEQ ID NO: 255834 - DNA, 414 bp, Glycine max
agcttgctttggtgaaggagccctcagagctatattatattttcataaaattccttcaccaaagcaagatcaatagtcccatcagccaagttggtgaggccgttgtgaagaatacgcctctccaactttgtcttgaagttgtcaaactccgcgtggtatacctcaacctttctttctggcaaaatattctttcccaagacattatctgtttaacggttccaagcatcaagcgaatggaaccgtctagtatcatattgagcagttggccttgccccaatgctcttacatttcctggaggccatctgtaacacaaaggaacccaaaaagttagttagaccacaagttattcaaattgaaaaacacgaaaataggactgagaaaaacaatggcagcttagcgagacatggtccactc

SEQ ID NO: 255835 - DNA, 357 bp, Glycine max
actaagctttaggctagtcttatgtttctcccctatttctattttctactaggaaggcccattgagggtcacaacaagcctggataacggagcatacagactacaagaactggatggtaaagcaattccaagaacatggaacgccacccacctgaagttctttttcagttgacctaaatgcaaacccaatcttgtactctttttcctactcaggtcttttgttccaaaaatagaaaaactagggttttggcagaggttttaacgaggcacatttggaataacaaagggaatttgtactcaatcaaatacattgaataaaaattctacaccccttccttttcacatttctcttatcca

SEQ ID NO: 255836 - DNA, 432 bp, Glycine max
  unsure (1)..(432): unsure at all n locations
agcttcaagccaatattagtgaagatctattgagtcgacatcgacataaataaccagcaaagaggcaactaaaaaatgtgaatgtatgtgtatgaaggttttgatgatgccaaaacaaaagcaacacatgttttatttcaagaccaagaaaacaaagatcaagaaaaaagttaagtcttagtctatctttgttaaaagaatctcttagtgattgcaaagggttggcctcacaacatagtttttaaattaattataaaaatgttttaaaattttaacattttctgaaaaaggcatntttccactggtaatcgattactaggcattgtaatcgattaccagaagcaaaattattttaaaaagctttttcagaaaatntgaaattcgaaatttacaagctgcaatcgattatcacttgtctgtaatcgattacca

SEQ ID NO: 255837 - DNA, 257 bp, Glycine max
aagggcaagccttacccgcgaaagcgacacgaaaagaaaggaaaacccccagcaaggagaaagcagaaagaaaacgaaaggaaattccccatcaaagaacgggagaaaggaaaaaaggaagaagaaaaaggaaggaaaggaagtccccgagcaaagaagcagaagaaacgtgcagaaaggacactttgaccagacaaaacctgagcaagacagaaatgtcaccaaatgaacaaaaggaagggaaaccatgacctaaa

SEQ ID NO: 255838 - DNA, 441 bp, Glycine max
  unsure (1)..(441): unsure at all n locations
gaccttaagcaccgcggctgcaactgaattatgttggggcttcattattattttgtcatcaggttgtcggactaaaatnttatctttgtcttcattaaaaggaccaaggtattcatttgattgtctgaacactaaaaatttagtatcattttgttcagtaggtgggatcacccctaaagggatgacctctacttcagggctactccaagatgcatatcagcatatgtagatgttaattcagacaaaatgattgtgaaactaacaaatcggtgagaaatgatgtggaaagaagttgtgttgaagatgtggttgacttccattcattttgttgtgattaggtaaaatctaatgtggtttggtagaaattgacatgagtgtttgatggggttgcatcaaatccaagtgaataaatggattagggatatgaaaaataatggggtt

SEQ ID NO: 255839 - DNA, 343 bp, Glycine max
tctcatgaaagtttctccaggaagcttctcacttttgaagctacctaggctataaatagaagcatgtgtaacacttgttgtaactttgatgaatgagagccttgtgagacacacttcaaagttcaacttctctccctcgtttcctccttcaatttcgtgctccgccccccccccccccctctctctttcttttcctccattgaaacttcctctctaagcttcttatccaaggcattctcttggtggtgaaactccttattccatggcttattccctaatggatggcgcctcctctcacctcttctcttttatcttccgctacatcttcatggtggaaaatcac

SEQ ID NO: 255840 - DNA, 427 bp, Glycine max
  unsure (1)..(427): unsure at all n locations
agctngtatacatgttgaggtttcttcttatcttcaaatgcaaaaggactacttcatatnttattatttttatttctatttttccacttcattcccgcgcctcaaatttatgtaacccttgagttccaaactcctagctttattttactatttagtatagcaatagctaattaatttttagaaacatactttgtgtttttttaattattttagattgtattcaattatctatgaaatcattgagcacgaattataaaaaaaatgagatttttttttttgtttaggacaaatatatattaagagttccgttcaaatggaaaagcacccttggtccttttttggccactaattttgcttaatcccaattaacatattaggggatattctgatcattaacaaaaatgatcttcagtgatgagatatctaa

SEQ ID NO: 255841 - DNA, 192 bp, Glycine max
  unsure (1)..(192): unsure at all n locations
gggacgataagtatantaatttnaaggaggagatagggngctggtggtggacatnaatggttaantnnatggntaagttngatccagaaatagttntngaattttatgnnaatggttggccaanagaggagggngtgcgtgacataaggttctgggtaaggggtcagtggatcccgttcgatgcagatgcta

SEQ ID NO: 255842 - DNA, 386 bp, Glycine max
  unsure (1)..(386): unsure at all n locations
tgcatgtgaatnacgacgcatcgactagaatcaagctcaggctatagtgcaagcaatctatggggcaaaacacaccaaatgattatgatgatggatggctcaaattctcacacaggtaaaatcattactcttaaattgggctttcaaaactatcatgacatgtagagaagaatcaaggatttccagtcacaaaatgtcaagaacttttattttcaaaacaattacccatttcttgaacatatcctataattcaaagaaaaacatgcaaagtcgtacgtgtacacaaaattgacccaaaatattaaactaaaaatccgacgaaactaacatcattaacaaattaacacaacttacaaattaacaaaaccaacaaaactatgcaaacc

SEQ ID NO: 255843 - DNA, 331 bp, Glycine max
  unsure (1)..(331): unsure at all n locations
ttttncaaccccnttggtatcattaaaaagcgaaagtacgtgagatggaaatgagagatnataagggaatacaatcagatgagaatganagtgtnagggataagcaagttgagatggaaatgagaaataatcgggatatattttagagtataaaaaaacaaggcatggagtaggaaagcataaaagttggaaaattaaattgtacaagaaatatagagtatttaacataataatttaaactataagaaactaaagagtcaaaatatacggattattagagacatataattagaaactaaattttaagaaggttgaggtggtggtggaagat

SEQ ID NO: 255844 - DNA, 246 bp, Glycine max
agcaaacctcctataaccaagccacagtacatcatgaacaaaaagccgcccagggggaaccggacacctggacaaggaacacctaagaccaagatactccattcaggagagcattagtgagaaactcggaccagagccaaggaaattacagaacacactacagaagactccccctaaaagtgaaagagccggaggacggaccaacagacaacaacgtcaagacgctacagcaccgtcttagcaaca

SEQ ID NO: 255845 - DNA, 341 bp, Glycine max
tcgatgaaggaaggaaaggggggaactttgatttttaggggtgctgctgaattgattattcagagatttgtcgcgagcaatgtctctggaggtgagtgctttggcggagatcccacatgttcttgatagttgtcaattggtgggcttcactatatcttgattggtctggggaagattcaattgaatcacgactttgacagttacatagccttatattgtgaattagtaatccaaggagcagcttatacaaattcgtttttttttataaaacaaccagcaaacctagaaacaaactttcaaatatgtaataagaaagtggtccttcgtccaacacgtagaag

SEQ ID NO: 255846 - DNA, 419 bp, Glycine max
agcttgccccggtatgcacaatatttgctttatatccttcctctggttgggcttgcacagttggccctcctttgagatcaaggggtggcccgggaaaaagaatggttgaagggaaattattggtcccttaaccgggagcttaagtcttggtcaagcattaagggcagaggaccttaaatcctcttaaggtgtggatatggagcccactgaaagtgaggacgcgtagccctcaaaaggcgagggagagcgcagccctctgaaggcgaggacgtgtagtcctctcaaggggaggacatatagtcctctgaagacgagggcgtgcagccctccgaaagcgaggacgtgtagtcctttcaaggcgagaacgtgtagtcctctgaaggtgagggcgtgcaaccctttgaagatgaaagcatgta

SEQ ID NO: 255847 - DNA, 294 bp, Glycine max
gacaaggggccccagatatcttaagaagggggggggttgaattaagatattacaacttatttccccaattaaaattctatttcactttctattcaagctataaattcccttaataatgaatttcttaaatattgattcaaatagaacaatctgaatatgaatataaaacaataataaataaaggagtttaagggaagagaaaatgcaaactcagatttatactggttcggccacacccttgtgcctacgtccagtccccaagcaacccgcttgaaagttccactatcttgtaaa

SEQ ID NO: 255848 - DNA, 411 bp, Glycine max
agcttctaataataaagtgttctttactttattttttactcctccagtcctaccatagtttcacggcgtatcttttttttccgcatcaaaacattctatatggaaaagttaaacaaaagaatttaggtttatatatgtcttttttctaataataatcgatcgatttttgaatttgattcttaataaatttttattttatattaaattactaacagaataacacttttaattgttaattgacacttttgttgtttctaatacattaacaaattttatatttactttttcataattatttttcatctggaatccgtcaaactaaaacaaaatttattatattattaaaaaataaatacaatataacccaaaaataaaaacaatattttattaaacacttgatgtaaaataaaa

SEQ ID NO: 255849 - DNA, 237 bp, Glycine max
taaaatatttgaacgaatttcaattggacattatcaaactggaaaatctttttaaaacttaacagaaatagggtgatggaggatccccttaacaataattatttccccttaaatatgagaaaagaccaacttgaaatttacgaatataacactacagaaattgtgcgacttgcataaaattagagaatgcctcaattaaaaggtgacaataatacttaatgaatgtaattcaattgc

SEQ ID NO: 255850 - DNA, 418 bp, Glycine max
  unsure (1)..(418): unsure at all n locations
agcttgcttgaaagcattgctgctatctgtctatttatttttcaagantnntacctttcctcgaccagcctgtgcggtaagcacccgcataaagcaattagtcattaattctgcaattttaaaatcgatcattcccatatttatgttaacaaaagaagtgctacaagtttaaccatgttttcagcacaacattcaatggatgttcatcaatacttagagcattaagcatgtaagtaaaatcatctatactacaatttttgaattttgttagataaatatatcttttatatgcacttttatatattttatgcttgctaacatcactctaatcaattttctccatatttatgttaaccaaaggatttctaccaaattccatgtattcattacaacattcaggggacagtaatatcatcct

SEQ ID NO: 255851 - DNA, 333 bp, Glycine max
actcaagctttgatccgcctctatattttcaacaaacccattctctcttcagataatgagcttctggggaaagggagagggcacaacccccactccctgaatacactcccatcctaagagcaaggtaaaactaaccctagactgcatcaccacgaaaagagttgggcgaactatactgcccacacccacatctacgggaatgggtcccaaagaaaaaccagacctacccctataattccaaagcacaacgcagcgggcaaatacaccaacgccacgatccccgatcttgtggagcaaaaatcgaggcattaagcgaaccaccggtcctccatc

SEQ ID NO: 255852 - DNA, 419 bp, Glycine max
  unsure (1)..(419): unsure at all n locations
agcttatctctntggaccaacatgtgcaagttcattatcaatgccggcctcggtccgccgttggagaacgttaacggtgtgttctccgacaccggctggtatgccaccaaccagttcaccgtcgacgtcatcttcagcaacaggatgaagcagtaccaatgcctcactcgagatccttccgtcgccgccgcattcttcgtccccttctacgccggctntgacatcgcccgctatctatggggttacaacatctcaatgcgcgatgctgcatcgcttgacctcgtgaattggctcatgaatagaccggagtggaagatcatgaatgggagagaccattttcttgtcgccggtaggatcacatgggattttcgaagactcactgaagaagaatcggattgggggaacaagcttnttgtttt

SEQ ID NO: 255853 - DNA, 327 bp, Glycine max
  unsure (1)..(327): unsure at all n locations
caaaaccgcggcaggcaggacagtgtgatctgcgncccaaccaggcnaacagatacggccgggaatcaccagccgcacacaggcatggataaccgctagcagaagtgcactcgaagctgaaattcaaaaacacaacaaaggatggggacggtgaaccgacaaaggagcatatgtaccgaggaacgaaccacactagacgtgcgcataaaggctaaaacttcgaacggcgcacacctgagactcagaacccggaaagaagaaaaactccagtttcgaaaaacgcagcggcaaaaagcccaccggcacaaagacgctccctaaggacac

SEQ ID NO: 255854 - DNA, 431 bp, Glycine max
  unsure (1)..(431): unsure at all n locations
agcttcctctaccggtgaaaaaacatngtctgccatcgcttgtaaaaaaattgcgcaatgtcggctgaaaaacatcagttggggctgtttaactaccgatgctggctactgttttttctattccacccctgaataatacttggacgatgtcgatttggaaatgttcgatcggagtcatccggtcatgcttctttttaagacctcgatctgtcatcttttcctggccgacgtcggctagcatttttttcgatcaatatcggtgaatcatgctttttgccaaggtgggctaacgttttcgtggctgatgaaatgagagcatgccagtgtcggccgaaacacaatctcgcacgaaaaaccctagccgacctacattgtaatttttgtaggcaataccgaacagcaaaacttcgtctaccataaagaaatattat

SEQ ID NO: 255855 - DNA, 350 bp, Glycine max
tcccaagtttttaagttcttcctcaaaactgttcttttcaaagtttccaaagtcctattaacaacttccgtttgcccatcggtttgtgggtgacaagtggttgaaaataacaatttagtgcccaacttgctccacaaagtcctccaaaaatggcttaggaacttagagtccctatcactaacaatgctccttggcaaaccatggagtctcacaatctccttgaaaaacaaatcagccacatgggaagcatcatcaatttttttacatggaataaatgagccattttagaaaacctatcaacaaccacaaaaatggaatctctaccattgcttgtttttggcagccccaaa

SEQ ID NO: 255856 - DNA, 422 bp, Glycine max
  unsure (1)..(422): unsure at all n locations
agctngngcataatatcatctctaatattccaatgtacattattagagaagaaaattatggttttgtcaacattcactttttggcccaaactagtgcaaaaaatgtctaatattttcttcatagcatcaacctgcaccaagtttgcttctacaaaaagtagaagatcatctacaaaggcaaggtaagaaatttttggaccaccttcagataattgaataggcttccaaattttctgctccactacatgattagttaggtgaaataatttctcaatgtaaagaacaaatagatatggggagataggatcttctgccggactcctccgaaaggaatgaatttttctagagcttctccattacactactcttggaaggaagggatgaaatgcacaatctaatcaaattgaaaaaactttcaagaa

SEQ ID NO: 255857 - DNA, 348 bp, Glycine max
tgatagaggccgagtggttgacttttcaagaggactggcccaacataaaaacaaacccgcttgccaatcatggagggggggcggttaatgccatcgaagtgagtaagtcacaagggcctaagcttttggaagatgtaaagacccccagaaggtttatctacaaggctttgcaaaaggtgggcatgattccttgtggcgggtgcagagaagactcttgcttaatgcatccgagtgtactccatgacatggaaacatgttcagcagtaagagatctattacaacggatgatagaccaaggccggcttgaggtcggcagtgagagggaggaggaacaacatgtatacatgc

SEQ ID NO: 255858 - DNA, 405 bp, Glycine max
ctgcactatgattttatgatatgattcgttctgttgagctggagaaccagtttgttccggacaagataccaagtggttcatcagcaaagcagtggacattcacagttctttctggcttcggaataaattccttgccaaacttctttgtcttcttattgcacctgtggtgggtgccgggtatcctttccttaaactcgaggtgttctttcatagcaaatttcaagaattttggcactactatttatgggacgatttacaaagtatgttgaaattggatatcgatcatacatatatcttcgatctccatgcgttcgctataaaaaatgataattcggttgaagaaatggcttgggaaatagaatggaaccatgtggacgttaaatattcacgtgtgtcagcgtatga

SEQ ID NO: 255859 - DNA, 286 bp, Glycine max
ggaagaaacagcaaagaaggacaatctatttaaaccgcgatgggggcaaaaccagccaccgcaccggaaagagaagccgaaaaagaaaggcccgattaaaacggggaccaagagcacaaaaacaccaaaaaaccagagaggccgggcgcacgttggaaacgtccaaccagcacacaccagactcaggctcatgggaatcaagctcccaccagatacgcagaagaggcacatactccgaattgtcctaaaacatggctctggcgaaaggacgctcgggaagcctgaa

SEQ ID NO: 255860 - DNA, 371 bp, Glycine max
tagcatacatatatcttcactgcataccgcgaatcgcattgtatatacatttaagggtgtttatgtatatatcgcactaaatattaatatgcatatcacaggatgaacttgcggaaaaacaaatacattaacatatgcacaaaaaagaatgagtttcgaaatgttgaagtctaacaaaaagaaaagaatgctaagcataaccttaaaataacaaaatgatgatacaacgagagcgtgaatcaattggtacaatgttattgtatcgtaaaaaatatggcaattaaatctactgcaagaatttgatagagttcacattcacatactataaatggacattgtcttagtcgttctattcaaagcagaaatgctct

SEQ ID NO: 255861 - DNA, 131 bp, Glycine max
cagaaagcctacaaggaccagcaaaaaaaagaaaaaggcccaaaggcatacaagcactctgactaaaacagggagcccaaggccgaaaagaccctaccaggcggtaaactgcgaaaggacaaccgcaggaa

SEQ ID NO: 255862 - DNA, 422 bp, Glycine max
agcttctgggtacaaagaaactgtatgagtctttgtttttaagctaaaattcgtattgctcgcctagcgcacaactgttagtcgatgaatacgactaacttttgtgtataaaacttgtataaattgtaacaaactcctccaatttatggttattttgtagtgttgtaattactttttgttaaagataggtaataaatacttagtacttccattttgggtgtttagtaatcattttctctcaatttcatgttaattaggcaagtttgtgaggtgctgattttcatcctctcgctaagccaatctgctggcttagcgagccatccgctgagtgcaacactccttggctaagcacgataaagaatctggaagaaggatgagttgtgcatgttcactgagcgaagggtcatcctgctaagcgcact

SEQ ID NO: 255863 - DNA, 341 bp, Glycine max
ttttggtcaaaagaattgggtatgcacaatctttttcttcatcatggcctcatttatacatttcattctataattcagagaatggtgccaagattattacccacagctagtcgttcactcacagtttaagttcacactctcaccggttttggttcaagcttttctttctcaatcaatctgtctactgactaacaattctaaatgcaagttcacattcttgttctttctttgtataacatacacacttgctcaaactcatgaaaagaaacacaaatttcatcacaatcattcattcgatccaaaatccaaccatacaccaattttcacaaaaagataaaagt

SEQ ID NO: 255864 - DNA, 428 bp, Glycine max
agcttgagatgttgtgaaatgacaatggttcttattattgaccctgaccttcttgattgatcacgaccatggtcaatgtatcacggctattatcaagtgaaaatagtatcaaatcttcatgaaagtgcattttccaacttttccacttgattgagcaattgtatttctacaagataaaagctaatgtccaaaccactacaaaaaaaggatatttctaacgaaatattttccacaaaatttattatgtcaagaatatttgaatttttgatggaattttcaaaggattatattccatgggaaatttttgaatttgtgacagaatttacccaccaacaaatttttcatcaaaaagtattttaccgaagaaatacagatccgacagaatttaccaccgagttagtcagaaatttaatataattctgacggat

SEQ ID NO: 255865 - DNA, 345 bp, Glycine max
tatcaatttggattcacgttaatttggcttattaatttgtacaaattgtacaagcttttataaattcaggaaacacattgcaaggatactagaacacaaggttaaaacaactataaggaaacttaaataagatttaaataatccagcaaacgtatgattctccagacttcattgcattttggatgaaaagttttgtcttgataatctccatcatggttaatagtttagggagattttggagataatacatgtaaaggttgatttcttttaacaattatggttgtattataaggatactgatttgagtattatttccacccattgctcagaatctccctctctaaa

SEQ ID NO: 255866 - DNA, 95 bp, Glycine max
ggagttccaaaacacaccgccggatgggagcagacgcagctaagagaacgaaaaggacaaacagactgaacaccaaaaaacccaacacgccaaag

SEQ ID NO: 255867 - DNA, 420 bp, Glycine max
agcttctagctctataatattatattctatcttactttcctttctcctcctcccccatgttctcttcactttccttcctcctcccccatgttttgtctttctttcttttctgattacgcactcactcacatgcatgtgtaacaactaaaataattaatataactattttaaaaccattactaaagctttttttcataatagcgtttttagcacttttattaagacaaccctaacactacaatctatatcccgtgcatgtcatcccatatgtggctagaggtttgtattgtgttgtggtcaaggctgcttacgcactagtgttcctgatgaaacactacaatttctacagttgccactttagaaatttggaaaatcaactaatgttgttagcactctaaattaggtgaatatttatttgca

SEQ ID NO: 255868 - DNA, 336 bp, Glycine max
tgtcaaggttgcgtagacatttatttattgttcaacgtatatgcaaggggaatctaatggtttcaaaagcttgatattgaaagagaatttgttctacattctatattcattgttttgcccatcaacttcaatgagttcttgttacattggcaaaaaaacatgttcaaattgcattaattgttattcaatttagttgctaatttgtctaatattgttggagcatcatgtaagcactgggatatttttcgaaaaagtcaaattacaatagtgaaagaagcattgcaaaaaggagaaatctcaagtgagcatgacttgaatcaagagagcaggaaacac

SEQ ID NO: 255869 - DNA, 347 bp, Glycine max
agcttagccctagaggggatggtctcttttttgttttggagaggatcaataccaatgcctataggttggacctcccacaacagtatggagtcagcaccacttttaacatttctgatttaactccttttgcagcggagctgatattgacgaggaggaactaacagatttgaggtcaaatcctcttcaaggggaaggggatgaagctactcctcctaggaagggaccaatcactataaccctgagcatgaggctccactaacattgggctctacctgctcgaaaaggccctacggttcttatgaaccttagggttaatttctgagcccatgggccatggttgggtccaa

SEQ ID NO: 255870 - DNA, 273 bp, Glycine max
ctggagatatgtcgcgggggtcaagagaccctggggacgtcaggtggggtgctattgcccaaaaccaatcttgaccaatcccgacccaacccgggcataatcagtcagcgagaacctgtgatgtacctaaacaggcgagctcctggcagtcaacagataaaaggaacaaagaccacacagcaaggaggcttgtggtggctggccagctgtgaatcttgtgtgatatatgcggtatggtctctggtaatcgattaccaagggtgggtaatcgat

SEQ ID NO: 255871 - DNA, 436 bp, Glycine max
  unsure (1)..(436): unsure at all n locations
agctnggacataccattgaagttcgctacattattcatgggtacccgccgggatacanagctttcattggaggatcaagcgtaaataatgtgatagcggtagaggggaaggtcacagatgatcaagaacaacgtcatgaatcccaagagattattagtttttctccagagcagtgcaaagccttactcgctttaatccaacaaccatctgcaggaagcacagtttctaaccacccacaaaccaaacaggttgcctccatatcttctactgatacagtgactaacccaggtataccttcttcccttagaactcaaaaatctacctcctgggtattagactcaggagccacagatcacgtaacatgttccttaagtaaccttcattcttttaatcgaatcgaacctatcatggtgaaactcccanacggccagcatgt

SEQ ID NO: 255872 - DNA, 346 bp, Glycine max
  unsure (1)..(346): unsure at all n locations
tggtctccgaagggaccccctgggcatagtttattttggcaagagctannccaactcagtgggacacaattaaggatgagctctgcataccatccacaaagtgatggtcaaacagaattcatgaataggattatcgagcagcacctgttggacaagcagcctcaaaaatattaagaaggaggggttgaattaaaatttcattgactattcctaattaaaaaatttccttttctttattattccctagattcaattatttctttgttaacaagttactaaaataataaatgaatgaaagtgacataaagaaatataaacccatcataaagtgtaagagattaaggaa

SEQ ID NO: 255873 - DNA, 450 bp, Glycine max
cttacagcacctgaggcatgcaagcttgctgcaactaggaagaacctttatggttattgaatcacttgggaacgggacctaccaactaaagaacttatccaacaaggagattccaagaagttggaacgttactgacctcaatttttattataagtaaacttgtaaatgctgatgtactctttttcctactctaacattttttcctatgaggttttttgttagagagatttaaatgaggcacacctgaattttccattgaataaaaatattacttttatcattgctattggctttatagatttgagaagaacaattcatttctctaactagagacccaacctggtacatataaaatcgaataaagatttggcttactacatagatcgacacccacagtcggctaaagatagataacaaataacttagttatttagctaaagaagaccaaaa

SEQ ID NO: 255874 - DNA, 347 bp, Glycine max
  unsure (1)..(347): unsure at all n locations
ttctctgagcagcacaatattgaatatgctncttgtcttttgcattataagcagattgaggagtttagggcatacttcagtgctgctctttcttctacaaatgcaaactcatctcagggagtgaaaggccctgcgcgacctgatcgcataagtaaaataaggctacaatttaagactttcctttcagaagcaactggattttaccatgatcttattacgaaaatcagagctaagtatggtcttcctcttggttactttgacgattcagagaaccggattgtgatggagaaagatggaaagaaatctgctgcgatgaagaaaggcttagtagcttgtcatcgctgtct

SEQ ID NO: 255875 - DNA, 429 bp, Glycine max
  unsure (1)..(429): unsure at all n locations
agcttctaaactttgtacaagaatgaagctctgataccacttgttggacaagtggccttagatatcttaagaagggggggttgaattaagatatcacaaactattccctattaanaattctactttgattttaacccaagtcccatgattccttttaaaatgaattcctaaataataattcaaattaaacttattgaatagaaaaaataagcaataataaataaaagagtttaagggaagagaaagtgcaaacgccgtttttatactggttcggcaaagttcgttgcctacgtccagtccccaaggaatccgcttgggagttccattatctcacaaattctttacaccttctgaaacacacaaggacaacccttcctttgtgcttagatgctttacaacaagagactcacagtctcttagccctttttc

SEQ ID NO: 255876 - DNA, 346 bp, Glycine max
tggaggggttgatggggacctgatgctgagatgaactatgataagggctacgtaggagtacgtgagctcagttgaaggtgggaaactggggatggtgggttcatgtttgatttgtggatgagggagagttgatttgcaccatcgcctgatcgccacctagtaccacatatgacgggtaccccataatcctacaagcttgaagtgagaaagcgtggaagagtcagtcttcctacttttgtatgttgaccacagagtggtacctggagatatgtcgcgggggtcaggagaccttggggacgtcaggtggggtgctattgcccaaaaccaagcttgaccaatcccaacc

SEQ ID NO: 255877 - DNA, 412 bp, Glycine max
  unsure (1)..(412): unsure at all n locations
agcttgtcttgtgcagaattatgttagatattatcctgacacagattnttccaacattccagagcacaccatagtgccaattttgggaaaagggctctagaggcagcaagaggagcaatttttgtagagatacctaggttttgtaatctcattattgttagggtttcttctataatggttggttaaacactcttgttggggatttctaaagaacaactgatgtaattattttaatatctaattgattgtgtttcttgtgttcaatgcttctttcagtgcttaaattatgtatgctcttggtctgatcacccatttgtgtgcatagttaggtgactttagcattgggaaatgtattgttgccttaaaacttgaatgaagcagaattgaacttantcttacaagagggatctgc

SEQ ID NO: 255878 - DNA, 337 bp, Glycine max
tttgagatgggtcgcaatgtttctttatccttgccttatagaaagctctgagtagggcccctgtcactgttggacagttgcacctgtcactgttagacagccaaaggtagttactttcggtttggtcagttagaatttgcctcatgtatcttgctctatatatagagcccttctgtacattactcatagtctaatacaaattcagttttatacttctctctcataattataacatgttttctggagctactgatgcctaaccaaggctgtcgatccactgcaaacaccttcaactccaaatttgccaccagcaaatccccaaactctggtgaatttt

SEQ ID NO: 255879 - DNA, 359 bp, Glycine max
attcacatactcactgatatctgttgtgggcacaacagtgcctacaacttggattgttatgggccctgaattaaacatggccctcgaaaaaaccattgtgaaaccacgaaatcttccctgagggaacataactctgctttgacattgaacttgcatgtcgctctccatgcatccatgaaagcctgcaggtacaattaaccaacatcaaattagtgataattttcccccctaaggattttgtttgtattacaattttgagtatgatcattgctcttgtggatcttatgatctctccctacagactacagtacttgcaacagtttgcgaatggtatttacgccaacaatttattcaaacac

SEQ ID NO: 255880 - DNA, 239 bp, Glycine max
aggacgtaaaacccacatcgacacagccggctagaccaaatcgatcgcaactcaaggtgacacaaaaataaaaatggggagaatccaataaaaccaggggccaagccctaaacaaagaacggcgagcataaaatcagaacccatattaaaaaagaacaaggcaggggggtcaagtagtaacccaaagacgagcggggggagaagaaaaggcgaaacgacctctcgcaaaaaaaacaaca

SEQ ID NO: 255881 - DNA, 431 bp, Glycine max
agcttgaaggcgtgtaacccaccattttctataatataatactagtaatatgtctactatcattgctattatttctttctttgtcattgagggaaacacttgggctgccagatccctccacctttgggcatattctctgaaagatctgtgccccctttttgcacatgttctgtagttgcatcctatccgaagccattatactgacactacctaatgaaggcaaccattaggtccttccaagaatggactcggggaggttccaagctagtgtaccagataacaactaccccactaagactttcttggaaggaatgtatcagcaatttctcatcctttgcgtatgcccccatcttctgacaatacgtctttagatggttcttggggcaagtagtccccttgtacttgtcaaagtccaacaccttgaacttggg

SEQ ID NO: 255882 - DNA, 360 bp, Glycine max
agaatacctcagctttgatgggggtgaaaaaaaaacacaaggttgtttttatcataaaaggagaaaatgggaatgtatgtatacatgaatttgatgaatgtcaaaagaaaaatcaaacaaggctcaaaagaatcaaacaaggctcattttgcttcaagattaatgcaagattgtttcaacaaacaaagccttgattcaagatttcttcaagatcaagccttgcctcaaaatgaaaggtttcaagtcattcaaggcacatgtaatcgattaccaatacatgtaatcgattaccaatggtttgaaagtgtgtaatcgattacacatcatatgtaatcgattaccagagactctgaacgttga

SEQ ID NO: 255883 - DNA, 428 bp, Glycine max
  unsure (1)..(428): unsure at all n locations
agcttgactaggcgagttgattctagctcttattttctctttagntattagccaattcgattaagaatgagaaatgcctataagaaaacgtccgattgattttccgctttattttactaaaaaaaagatgttttttgattattatattatttttcatctctttttgttttccaacgtggttacggcacgaccgaacggtcgaaattcattttaaccgaagtttacggatcatacaattcaaacgttcggtggaaatttattttatttttaagttaagcgagaaatgacttaagtaaaatggcttaagcacgtcaacagggggtatgaaaagtaaatgaaacgagaacagaaatacacaaaacacaatttggaccaccacgagtacatagaatgaatcgataagcatggttcgaggtacttacccgttg

SEQ ID NO: 255884 - DNA, 342 bp, Glycine max
gtctttaactccacccctgactaggatgttgttatcggtttccccaacccctgccttcgcaccttactttcccacctcaatctcgtcgtgaatgtcattcagaatcactaatgttgctctaaatttgctctgagctataaagattaattggatttatgatttgaaattccaaatgtattgattaatcttgggagatttgttgatcttaagttaatagcattaattcctaaattatgcttttctaactttttaattaacccactacaaaagcatccacttcaaaggcattgaataaagatgactaaacatgaaaggaatagaccaaaggggttcatgacacta

SEQ ID NO: 255885 - DNA, 425 bp, Glycine max
agcttcatgatgaatcaagattgtattctataattttttatgataacaaaggtgatgacaaaaagctcaaagatcaagaacaattcatgataacaaagatgatgatctcaagaatcaaagaatgagttcaagatgttcaagattgaattaagaacacttcaaggttcaagaggaaatttgatttcaagaatcaagaatcaagattcaaggttcaagcttccaagaatcaagatcaagattcaaggctcaagattcaagaatcaagagaagaattaatcaagataagtatgaaaaagttttttcaaaaactgagtagcacatggattcttctaaaacatgtttaccaaagagtttttactctctggtaatcgattaccagattggtgtaattgattaccaaaaagcaaaatggttttcaaaaagct

SEQ ID NO: 255886 - DNA, 360 bp, Glycine max
  unsure (1)..(360): unsure at all n locations
ggacctatgaaactcagcttgcacaaanatataatccttttttaactattttttggggggttttagtccaaaaaacgtaataaaactaaagtcatgctatcacttaatgtccaaattagatggaaataactaaagcatatgaaaggaaaatggttcaaaaatgttgatcggttctcgaaaagtttaggaaccaaaaccataattgccgaaaaattcaaggatgaaaatcataatttacccctatattattactattaattaaattaaaatataaaatgttattattagttagaatatttaaattatgattaattactataattaaatatttcataattaattggtaaataaactaaagag

SEQ ID NO: 255887 - DNA, 425 bp, Glycine max
  unsure (1)..(425): unsure at all n locations
agcttcaccaaagggtatattntattggttttgtgtgcnatattctcaagacttatcttttatcaatgagttatatataaagagacaatcaatcaacatgtagcaacaaaatactggcagtaataataataacgttaaacaatagaaattaaaaaccaaacatcaaacattcttattttaaagacttgtgttcacaagattatttgaccaagtaaaagataacttcttaaggtgggaatgaaagtagtgaaatgtttttagtttttcacataaactaattctaaaagcattttatctgtaaaccatcattaataaagaaaatatattttaataataatttcaaattataagaaaatatttttcaacattctcacactaatttaaaatttaaagaaatgaaataatataaaaaagcattnttaata

SEQ ID NO: 255888 - DNA, 333 bp, Glycine max
tgctcggcttggcgaaaatgatcattcttacttttctgagaagacccggggacaatgtggggataacttggaacttatgggcttcaagtgagaacaaatgcttctttttccacttgggaagaagttcaaagtttggctatgaaaatggttcaaactgagaaacatttggtatttccattggtttataaacttattgagctagctttgatattgccggtgtcgacagcatctgttgaaagagctttttcagcaatgaagattatcaagcctaaattgcgcaataagatcaacgatgtgtggttcaatgacttgatggtctgttacactgagcgg

SEQ ID NO: 255889 - DNA, 419 bp, Glycine max
  unsure (1)..(419): unsure at all n locations
ttaagccctggatttggctatgtntttatgacatttgaatacttaatatttcttttattatttgattagtatgactgaacatgatgattatatttacttgctcttgggtgtttatgggtatgaaagtttacacctaattattttgatgatgtatgactagaggtatgcatttttatttgggtattatgaatgactctctggattatatgacattctataaagtattatctttctaagatngatgaatgattaagatatcgtggttgatggtttctattcttgtgtatggcatttatgtatgggttttatatctcttacctttctaagattgatgaatggtaaaatatcttgcttaattgtttataggctcctgatgaaaggtattatgatgtttatattctatgcacttgattttgtga

SEQ ID NO: 255890 - DNA, 400 bp, Glycine max
  unsure (1)..(400): unsure at all n locations
ctagcaactggcttaagcctgtcactactaaaaaaaaaaacatttaacatcggcactttaaaattggttttcaataaaaccgatggtaacaaaagggtggtcgcataattgtaaataaaatgagttcattaacattgtgtttccaaaaccgcactcactcatttgaagctcacacctcattcacactcgttgtcagtcgtgttctcgctctcggtggccactctccatggcggtgacgagtttatgaaaagagagttatcggtctcggtgtcggtattggcaatgaaatatgtctttctcttacctttggcaacttaaatgaaccaaattcgattcaattctatgttagggttccacttcttccctgcttataactngtaattaagaataaacaaatgtt

SEQ ID NO: 255891 - DNA, 403 bp, Glycine max
aggattgttttatattgattgaaagaatgaattggataagattggttgattgaatgaattaattagtatattgaaaagaaaattaaagccttgcttttatagactcttcgcgtgcggtcaagaagaccatttagaagagttattacttctagaaaaacttaaaaccaatttaaaaaagtcaaaacctttgtgaagagttcatctcttgatttattcacaaacaatcactggtgatcgattacccaataagtgtaagtaattacacatatcttttatgtgaaaggatgcgactcttcacattagaatttgatttcaacgttaaaggcactgttattgattaccaaacatgtatcgatacagcttttgaaataattggacgttgtaattcatttgaaacttttca

SEQ ID NO: 255892 - DNA, 432 bp, Glycine max
  unsure (1)..(432): unsure at all n locations
agctntgagcaaattcaaacgacaataactttgtactcggatgtctgattgagtcccgtaatatatcgagacgctcgaaattgaatgttgatgctctcagccaattcaaacgacaataactttttactggtatgtctgattgagtctcgtaatatatcaacatgctcgatattgaataccgaagctctaagcaaattcaaacgacaataacttttttctcggatgtccgattgagtcccataatatatcaaaacgctcgaaatagaatcttgatgctctgagcaaattcaaacgacaataactttttactcggatgtctgattgagtcccataatatatcgagacgctcgaaattgaatgttgattgctctgagcaaatcaaacgacattatactttttctcggatgtctgattgagtcccgtaatctatcg

SEQ ID NO: 255893 - DNA, 502 bp, Glycine max
  unsure (1)..(502): unsure at all n locations
atcttaattgaccgctgctgcagcttaagagttaaagttctcctttaactctattagcttcctgttgagcacctncctctatcacacttggttgaccaactgtctgaaattgttttcttccatccaaaangtgaaaaacttgaatggtttaggcccccattctttataattcttatctaataaaatccatgagtgatctgatatcttacgtgagcctactctttgtctttttactttccacaaatcaatcagatcccttgttaataagaatatgtctaggcaaattctacactctccatttaggctaatccaactcgaaatcttcccaattatagaaacatcacacaaatccacaactaccacaaaatcngtaaattgttgtatatttgatgcatagactcgaacatttctacttacccttttctttggcctcacaatggaattatatgatgatattttgtcacccaaacaatataacagtatatgtaattaaatatgttac

SEQ ID NO: 255894 - DNA, 303 bp, Glycine max
  unsure (1)..(303): unsure at all n locations
tctcgggtgcaccacttctactgctctgtgaggtctgacttctttgattatgaacgaccctaaacacttggatnttagcttacctgggaatagccttatcctcgagttaaagaagtatacctcactgccctggctggaattattttcctttgtagcttacttatcatgatatgcccttcgccctttggcttctaattcttgatgactcgtaagcttttatctcatctctttagttcaacaactgtacttcttctttctccgatgcgttgtatcaaagttaccaacttgagacccaatatcttt

SEQ ID NO: 255895 - DNA, 456 bp, Glycine max
  unsure (1)..(456): unsure at all n locations
cccttttgtgccactgttcgagactgtggggtcaatttcgccatttcctctctcaacgcactttccgccactctctgnttctttactctctctgatttccagaatgtgagtcagttactcctctcttcatttcccaaatccggatattcacgttaaaatagcagctaaactaattctaggtaaataagtgttctcgtgtctggtttctaattccggaattgattctaggtccaaaattgaaataaactttaagcatgtttttgcgttgaatgaaaatttttaaaccgaacaaacatgtgactntacttcaaaatcaattntacttncaattcaatttgcaaacgatcactcaattacacactaaaacttctgaaaacgtaactcagtggtagtttgtgggtgttgacgaattgagtttatttgttgcagaatcgagtgacngagtatgttcctctt

SEQ ID NO: 255896 - DNA, 437 bp, Glycine max
  unsure (1)..(437): unsure at all n locations
agcttattccaaacttaagagagttgaggttatttgattgntctctttcagatacaaatattcaatctctgttttattcaccttccaacttttccactgctcttaccatccttgatctttcttcaaataagctcacatcctcaacatttcaactgttgtcaaactttagtcttaatcttcaggagctttatcttggtgataataacattgttttgtcatctcctctctgcccaaagtttccttctcttgttatccttgacctttcctattgttctctntcagatacaaatattcaatctcntgtttattcaccttccaacttttccactgctcttaccatccttgatctttcttcaaataagctcacatcctcaacatttcaactgttgtcaaactttanccttaatcttcaggagcccttatctggtgataataac

SEQ ID NO: 255897 - DNA, 365 bp, Glycine max
atctgcattatcaaaatctatttagaatgaaaccgactttataaaattaattttaaggattgatttatgtttaagtttctcattataaaagcaattgtgcaaaacccaatagaaatatgtttattcaatgcaaaagttaaccaaaattactttaactcactaattctaaatccataatccttgaattattttctaacacatgataatgtatgaaccaccaatgtcaccctagtggtgagaggttggaatagtatgtatgatgttatacattcctacttcaatataattatcatatacaccaattaaatatctttatcatatgacacatatctcaaagttagccacacttaagttaattgcttctt

SEQ ID NO: 255898 - DNA, 437 bp, Glycine max
agcttgtagcaaatatttacggtaataacttttcactcggaaggccgattgagtcccgtaatatatcgaaacgctcaaaatttaaaatcgaaggtcgcagcaaattttaacgacaataacatttcactcggaactccgattgagtcccgtaatatatcgagacgctcgaaatataaaaccgaagctcgcagcaaatgctaacgacaataacatttcactcggaagtccgattgagtcccgtaatatatcgagacgctcaaaattaaaaccgaagctcgcagcaaatgctaacgacaataacatttcactcggaagttcgattgagtcccgtaatatatcgagacgctcgaaatttataaccgaagctcgcagcaatgctaacgaaataacatttcactcggaagtccgattgagttccgtatatatcgagacgctct

SEQ ID NO: 255899 - DNA, 263 bp, Glycine max
aatcaattttatactctactatgaataaagccgtttttttcaatggaatttttctacttttacgaagttattcattttccatcaaagaagaaagaagtacaaaatctaccggtctattctcatattctagctatgccactagctatgattggagcttgcaaaacagcccaacccgcacatagctctatgaactgcacctgccttccgtcttagttcgtaactacaaaacttcttctttgaaagaacgcaccttccgatagaaa

SEQ ID NO: 255900 - DNA, 448 bp, Glycine max
  unsure (1)..(448): unsure at all n locations
tatcttgatactatctcaaagcccaatnnctcttactcgcgttaagcgcgagggtagtgctaagtgtatcatcgcgatttcaaagcctatttaaagcctgtcttgtgcagaattatggtacaccctttatgacaactcttgcaccctttatagaatggccagggcacataattccacaatagccatagtgcctatttatggaaaagagccctataagcagaaaagaggagcaacttgtgcattgaagcctatggtttgtcatttgagagagattattgagtagagagtgagtgtaagatgctgagaagaggaggaggaatcccccttcttgtgtaagaaactatcattctctgctnttaatcatcattattggttgggtttctttgtaatgctggctaaacaccctatntggtgaattctaatgaacaactgatgtcaatacctaata

SEQ ID NO: 255901 - DNA, 81 bp, Glycine max
aaaaagaaacgaggaaaaaagagcaaggggaaaaaaaggccaaaatacctagatatgcagggaaacaccgcaaaacaccga

SEQ ID NO: 255902 - DNA, 449 bp, Glycine max
acccagctcgcccaggcgagctttgttcttcctctataagcaacagccttttggatgaaccttctggagggcccaagtaagcctggttgctatttgcacccccatttttactaagtacaccccctacatttttttggtgaatcttttttcgtaaagatacggaaacttacgaatttcgtaacgatacttgttttctttccgtaatgttacggaaccttgcggattacataatcatcccctttgtgacttacggaatgttacggaacctcactaattggcaacgatgcttccatttgatttctagtgtgtaacggaaccttcacaaattgcctaatgatgggtgccaagcacctcacaaggaccaaacaaaagtcgcatgtcatcaagcaaaggtccccggacgaatatatggtatgacagttgcccctctttacttgtctcttattgga

SEQ ID NO: 255903 - DNA, 425 bp, Glycine max
ccacctttcagctacaatatcggttttagaaagcaaaatatagattacacagcggtggggatgtctcctccacctctaagaacctacaaattaccctaaaacctaagatcctcttgaaagctgggggttttggtgctcccttgcctctttcacataatgcacaattgttctcccagactaaagactctcctctaagcacacattctttttacgccaacttcaactttaaagggctttctgacctcgaaggctcacttagcgccattctcgctctaagtgcgagtaagtgacttttggcttagcgagccaggcacgctaagtgccagaagagacaaactactcgttaggcgagctgatggtgcactgagcgcgtgcatgcgttgcagattctcttcaagaatcccttgactcactaagcgagctga

SEQ ID NO: 255904 - DNA, 389 bp, Glycine max
  unsure (1)..(389): unsure at all n locations
gcctcttgcatcttcttcaaagacttctcgtgccgctgtttttgctacatggtgtccaagaagaagtacatctacaccattgatgatgactgctttgtgagttttttctttttttgcctttctggggggaactcaattttgttaatggacaaaacttacatgcaattcttttaagtgttttttagtgtcattctgcaatcagaattatcagaattagagttttacctcgataattctcataataaaagtgaatttagtatttttttttctccaattagaattatcagaatcagagtttcacctcgataattctcataataaaagcttacattaaatgtcagcgtaaattaccgaagtgaaactcaaattntgataataaaaaaacaaaa

SEQ ID NO: 255905 - DNA, 391 bp, Glycine max
  unsure (1)..(391): unsure at all n locations
gatcttatttagctcaacatcatatggaatatagttttcagttcctacaacattccacagatcaatgtgtattgaatagtgtgttggataaaaggagaaatattttttgcaaatagatgtttttctcaagcagatatgaaattaccaagttactggcagtgtcgtctaatgaataaaactagctagttttgatggtgaaaataaaatattttcgtccaatatttgaaaaaaatagtgttntcacaaaggttcttcagaagttatgtgaatatgtgtagcaagataagcttaagacaatactaatcaaatatgggttaaatgttggacatgctgctgaatgatatgctagttctcaaatgctacttaaaaaaaaaattcaagtggaatcaat

SEQ ID NO: 255906 - DNA, 443 bp, Glycine max
  unsure (1)..(443): unsure at all n locations
agcttgtactattgcgtatagcttatcttgttaccgngngttatcgtttattnntcaatttataatgtttgtaggattttgcttcatttcttaaaactaaattaaatgacattgaggcttgagcacgaatattagagatttgtggttgttcctcaaccctcatatacaggttccttgattggctaatataatcgaaacaagtatttctgcctcatgtttctttctgtacagntaaatttcttttggatgcttagaaatatttcataaaatttaactaaattatctaacttgtaagaggatttgtggttcggattatacaagcatataagtacaatcctttaaagtcatttcaccctagtaaataatatatgaattaagtatttatacattaataattaataatgtgaaataattttatatataactattcattattataacat

SEQ ID NO: 255907 - DNA, 399 bp, Glycine max
agctcgccacccagctcgcccaggcgagcatggttgcttcctccatattcaacagccttctggaggaatcttctgtagggcccaagtgggcctagttgctatttgcacccccatttttactaagtacaccccctgccttttttttggtgattctttttcgtaaagttacggaaacttacaaatttcgtaacgatacttgttttctttccgtaatgttacggaaccttgcggattacataatcatcccctttttgacttacggaatgttacggaacctcactaattgtgcaatgatgcttccatttcatttccggtgtgtcacagaaccttacggattgtgcatcaatattttcttttgttttccggcatgtcccagaaattcacaaattgcctaatgat

SEQ ID NO: 255908 - DNA, 442 bp, Glycine max
  unsure (1)..(442): unsure at all n locations
agctntacaccaagcttgattaacctagtattctttttcctaccaagccattgttggctctatacaaatcaacaaatttgttgtttgtttgcacaatgactaacttttaatcatcttataggcagatatacaatcttaacacttagtcttttctctcaaagtgttttgtgagcttttatgaactatacaagaatttacaaagagctttttacaaaatgaatttgaatgatagcgtataggttcgtgtcccatgtcttcaaagcttttgctatttacaggccttcatcttcaaatatttcttgtccctaaacaaatagtttccatcacttgagcttgcgtctgatgattgtggttgtaggagcatttaatgctttcatataatatacttacttctttatgctgganaaccactttngtattctttcatgtagaacacttcaac

SEQ ID NO: 255909 - DNA, 432 bp, Glycine max
  unsure (1)..(432): unsure at all n locations
acaacattcaagcaattcaacattcaaacatcatgaactatccaaaaccaagaaaatagggcagaggcagaaaagtctgcccaaaacacattccaataccacagctttccttactcaaataccccagtaacattctcttcgttccgattcgttaaccgttggatcgactcgagaattttactggaggtccctaatacataaatctacattttgaccgttgggatctactagaaaacttccataacccaatatgtacaaccctttccacaaccagcaatgcataagcattttctgcacaagcacaaaattctgctgcacattntaacagcaaaattctgcataatagtgcagaatttcgaaatcactcttgccctcatccaatttttgcccannatggatcctacaagtcctaaatcatgtattaatcatata

SEQ ID NO: 255910 - DNA, 364 bp, Glycine max
atagcatgaaaaagcccttcgataatatgtatgtatgtaaatatgtagcatgaaaatgccttgcaaaatatgaatatatatagcatgaaaattccttgcataatatgaatatatatagcatgaagtgccttacaaagtgttggatgggtagcgtaaaagtgttcttcaaaatatgtgtatttgtgagtaggtagcaaaagaagtgttccaaaaaaatgtgtgtatatatataggatgtagcacgaaaagggttgcataaaaatatgtacatggatgtgtgtcgtaaagtgcttttcaccaaatttttatgtgtgcacatgcatatgtgtcataaaatagcatggccctaatattgattatttat

SEQ ID NO: 255911 - DNA, 298 bp, Glycine max
  unsure (1)..(298): unsure at all n locations
ccctcttattactaggctatttgaaatctttagttcctgaatgtacaacctcaaattgttggtcgttcccctatttcttttctgcaaaatagaatatcaaacgctgggaaacacatggatgaagtccttagaaaatcaatattcaagaaaacatggatgaaatcacaattaaaaagcacaactacctatcttttagagtcctttgagtaatttgtcttgtctccttatgtggagggggtttgtntaataatgttatacttttgccttccaaaaaaaacttatgactaatcctcttttc

SEQ ID NO: 255912 - DNA, 474 bp, Glycine max
  unsure (1)..(474): unsure at all n locations
gctaacaatgagtcgnatatggtactcattaaccacactaattgttcaataagggacatcaagttttggtttcacatgcattttacgtttgataaccacaaacgcgttagttagaacactagatcagaagttagaagtgtacaagtttggcccaattcagtattcagaaatagattagcaccacacacaccactctaaacctttcggtacaatttcacactttttctccaaacctttcaaaaagtggaacgatcggtgttntacaaagataaattcagttatcatagtgttttcacagttttcactctttcagaatggtttttcactccacttgcaacacagcatcgagtctcaaaactgggacgtaccatgttccttactctcctccactccaccacctcaactcgttaatctgatagcgtgatcaacatgcaagagaaagataatccttgaagcatacaataacagatagca

SEQ ID NO: 255913 - DNA, 453 bp, Glycine max
  unsure (1)..(453): unsure at all n locations
tgagaaaacttccttgagaagcttctttgagaaaacttncttgagaagcttgagcttagctacacacacccctctaataactaagctcacctccttgagaagattcctaaagaagctagagcttagctacacacaccccctataatagctaagctcacccccatgccaaaatacatgaaaatataaaaaaaaaagtccctattacaaagactactcaaaatgccttgaaatacaaggctaaaaccctatactactagaatggccaaaatacaaggcccaaaagaaggaaaaaccaattctaacatttacaaagaagagtgaatccaaccttgactcatgggctcaaaaatctaccctaaggttcatgagaaccctanggccttctttagtagctctagtccaatcctcttggagtcttctatccaatacccttggggggtaggattgcatcac

SEQ ID NO: 255914 - DNA, 415 bp, Glycine max
  unsure (1)..(415): unsure at all n locations
gaaagaagctcatttgttgatgaagnctatgcttccctctgaagatctgaatcttgtcatgttgcaaagacatcaagaaggtcttctctgaaaatctatcaaatgctacattgagtagacaatatcagaatgaaattataccagagtcaacattagaatggtgaaattgaggactctaagaatgagaacatcataatgatactataatgacaagcgtgaacgaaagagacctttgagtgacgtaaagaggaactgacggagagctcacgataggtgaggggagtttgttataatttaccgtntntgataccatagttggggtcagggaacctaactatgggaatatatacttgtcccgtttgcaagctggttttctagaaaaccaatgctttgactaatgggatgcaatatatct

SEQ ID NO: 255915 - DNA, 328 bp, Glycine max
  unsure (1)..(328): unsure at all n locations
gccgctgcatgcaagctntaaaattngaattaaaacgttcagattctgttggtaatctattaccatatatgtgtaatcgattacacagggcaaattttgaattcaaatnttaatagctgttgtaaatcagatttggtcactggtaatcaaatacatcctctggtaatcgattaccagagagtaaatttctttgtaaagaattcttaacttaattattttggccaaaccttttgctacttcaattggaattcccttcctatttaatataccctttctaagactctatagatggtcttgatcatccatcttgaatatctttaattgcttt

SEQ ID NO: 255916 - DNA, 437 bp, Glycine max
gactttataccgagctcaacttctggctttttggatgtttattgaaagtatttacaagaatgcactcttaaacacaaatggcatacaacctcctttaataaacacaaacatcaatgtaaatttagaataaactcatgctcatactccctaacgaacgttcacttgcacaatatattctcctaactaagaaaaatgcacccacgcacaatcaaggcacctttcgcacctagattatttatatgtacttacgaggtgtatttgtcacctacatcacatgtacttccttggctaaattgacacacacgcatactcaaagcatgtttgctaccataaatcgcacacgtgcacattctggtatttctaatacctatgcatatacaaaactttgtgatgaatcttgtgtatctacacaataaggtgctacatttcatgcttta

SEQ ID NO: 255917 - DNA, 425 bp, Glycine max
  unsure (1)..(425): unsure at all n locations
agctntggacgttggatatggttttggattatagaaggagaagaaatgggcgttttccaaagctacttggactacaaggctcaaaacgcacaagtgagtaatgctctcggaaacagaaacatcgcgcacactccagacatattctaaaagatcccaacggtcagatcttggacatccgtcctatgaacctccagaccaaatttcaagaagatccaacggttaactaaatctggccagcatttttaccaagacagcttcatgtagctttcttgagaagcttcattaagaggcttcctcgagaagcttcctcgtgacttctttgagaagcttcctcgagagacttctttgagaagctagattcttatctacccacaatcctctatgaactaaattaacctccttaaaattattacggataaaataat

SEQ ID NO: 255918 - DNA, 280 bp, Glycine max
  unsure (1)..(280): unsure at all n locations
attaccagaagcagatttcagtaaatattctcaacagtcacatctttttatgggggtcttgaatggctatcaaaggcctatatatatgtgacttgagacaagaatctgctaagagtttttcagaacaaaaaggtcttatcctcttataaagcataatcgttttatcctcttacaaattccttggccaaattacttgtgattcaataaggaatctattgagtgctcacatngttcaatctatctctntcaagagagatttcttcttttcttcttcttcatt

SEQ ID NO: 255919 - DNA, 364 bp, Glycine max
  unsure (1)..(364): unsure at all n locations
agctngccacccagctcccccaggcgagcttgtgtgcttcctccttaagcaacagccttctggaggaatcttctagagggcccaagtgggcctggttgctatttgcaccccctttttactaagtacaccccctgacctttttttggtgaatcttttttcgtaaagttacggaaacttacgaattttgtaacgatacttgttttctttcggtaaatcttgcggaaggcttgtggattacataatcatcccctttttgacttacggaatgttacggaacctcactaatngtgcaacgatgtttccatttgatttccggtgtgtcacggaaccttacggattgtgcatcaaatattcttttcttttt

SEQ ID NO: 255920 - DNA, 470 bp, Glycine max
agcttttcacctgtctttactaaattagatttcatcatcagacttcagaaacatgataccagcttgagagttaataaaaaaattaatgatgcatctttgttttcgatcagtccatgcatcagacataatagtacaaccatacttgacccatttctccctgtggcctttcatcaaattttcagtgtattcaacttccttcttcaggagtggaacttttatgtcatgatagcttggaatgggaaaatgtggcccatattgaccaatggctgcaaccatattctcaaaacttttcaatttaatgagggtgaatgacaaacctgcttggtaccaaaagcgggcaatatattaatgcaccttcaatacttcattcttatccattgactctcttatgttcatttgcctcaacatctccatttttctccgattgattgcatttctggattctacaaaatctgccattggtccttttt

SEQ ID NO: 255921 - DNA, 425 bp, Glycine max
  unsure (1)..(425): unsure at all n locations
tatcttatcagtggtgcaagatgatatngtttcatacctgttggtttgctctgatgccgcgtttccggttgatggccgctggattaaagcaagtagggccttatattgctctggggagaattgaacgagatcctgggattcatgctgctgagtttgatcatccagggttttgttatccatcgtcaccatgttattgactgtggatcttccattaaagggtttatatcccagcgggtatccgtgcttccagtaacacacatcaatggtgtgtcctatctttccacagtgtgtacaagtctttcttccgccattactcttgtttctttgttcgtgattaagaggcataccatgcttcttatagcacacattntcattgtgacccattcgaccacagtaatcacagatggactctgcagcattaatgg

SEQ ID NO: 255922 - DNA, 344 bp, Glycine max
tatcttgagaaagttcttctcattctgtttttcatttctgactttatggcatgagatgaaattcatagattggacctcttgctagttgttattaatgaataactgtgagactattgtttaagctactttccttgatatctatcttatgcctaactccatctatgtgttcagttcacattttattcttctctttgaataactacatattttgtgaagacaagtgataggtgcacattgcttcgtctttctcatcatgcaatcagtaattttttatgcatacacctctgtacatagtcactacatgtcattatcacttgaggacaagcaaaactgttaatttgggg

SEQ ID NO: 255923 - DNA, 261 bp, Glycine max
gaatcgtgcctaataccgacacacatttacatctaaccgtaactgtttattaactaattcttccctttcattataatatttggttttatattgaaggtagacaaaaagcagtgcacgtgacaagagtgatgctattattctcattttttttgtttagtactcaaatgatctactagtatttgtttacacatgtcactattgtgtgataagctcgaacaaattatattattgacattatgcttgtgtttatattaaaatggg

SEQ ID NO: 255924 - DNA, 444 bp, Glycine max
  unsure (1)..(444): unsure at all n locations
atcttaagtgaccgctgcatcaagctttcgtgtaacactcngtgagtgattatttattctntttctatcaaacatatactgtttgtgaaagccaggaggggcgtattgacaaagaataattgggtcttaatctcagggggagattaagtgtagtgccaagagtggcttatatagtactcattttagccagaagtggcatggagaatacttggtagtaatcaaagatttgactatttaaacccttcaaggttgaaggaaaactggacgtatcccaagagttgggttgaaccagtataagaactttgtgttttcattactgcttctatataacttattcttttctttaagtcacttctacactatgaatatccaagtttgcgaactggttttccatgcacaatgctatttcanaccctttggaaaaacacttagtccattgatatt

SEQ ID NO: 255925 - DNA, 264 bp, Glycine max
  unsure (1)..(264): unsure at all n locations
gcttatgctagatcaaaatgttggcttgcttgtaagggaagtngaacaggaggtcctaaaggtgagggccaaatttgatatcacccattgaggcatatgcgtcaagctaatgacgttaaaagagcgcttcctgggaggcaacccagttctaatttctttcatttggttttcatgcattgcataagttggaatttgctttatgatcattgaaaaaggggtatatcagcttatactaagttatagatattggggtttgatctaaat

SEQ ID NO: 255926 - DNA, 477 bp, Glycine max
  unsure (1)..(477): unsure at all n locations
agcttctcctacttttccctataaatagggtaaggagggaagaacaaaaatgttcaaccctcctggtatctgagaatcacttaaaattagtgagaaaaattgtttctgtgaagaaaatccaagctgaagcgcttccgtaatgcttccgagacgtttccgtgggtgatttcacgaagattttcaatcgttcttcgtcgttcttcggtcttcaaccggtaagttcccgaaatcgatcttttcaattcattctatgtacccctagtggtcctcatatgtttcacgtgcttttatttttatttcatttactttccgtacccccttttgacatgctttagtcatttatttaagtcattttctcgcctaatcaagaaataaaataaatttcaccgatcattcgtattgaacatctnnttaattttgttaaaatgaaatccgatcgttcggtcatgccgtaaccacgtttataaccaaaaaaag

SEQ ID NO: 255927 - DNA, 476 bp, Glycine max
  unsure (1)..(476): unsure at all n locations
agctntctcagggaaatttcttgcaaaatctaatattcgaaaagttattttacaaggaaatgccattttaaagcaaagcctagcaacaacagcctacgaccctttccgagtgtaaacctagaacaacttatatacttacgggcatacacgcatattcaaggtattttcgctacctaagaaatacacatgcacatagccaaggcatttgctaattaagtcaacaaggcatttcgctacctaaattgaataaggtatcttcgctacctaacacaacacacatacatttcatgagacatttgctacctacacgcaacacacatacattcacgaggcacatgcaacatatatacattntatgaggcattnttgctatcaaaatttacatacacacattcaagtatttggctacctgaatttatacatacacgtattcaagtatttttgctacttaaaatacatatacacatatttaagta

SEQ ID NO: 255928 - DNA, 398 bp, Glycine max
  unsure (1)..(398): unsure at all n locations
gataccgaatgataattccaataatttcattcgtacacgtgagatgggatagcccgagggaaaaaaatattttttaataatcagagtattagttgacacaattgtgataaagttatacaaaagataattactagtatcatatcaatatatttaaaaatattctcgtatatgcgttgaaatcatataattcgattactagtattagaaattcatacataaaacttcgtccgtaagtatatacaaatttatgggtggtgggtatagatgtattaatagtaacaatgtgtggaggtgttacaatttgaaatatgttgatttgatcatatacagaattatgggttctgctaatgccgnggctagatatgatacagggtgatctggtaggttataaccgatgc

SEQ ID NO: 255929 - DNA, 450 bp, Glycine max
  unsure (1)..(450): unsure at all n locations
agcttgtcggccgcgtatgacgaagggcttttattacgacgttagtctctgcgtgctatcaggctnttcgtcttacagatagcaaaaaagaatgtttatacggataaccacttgggtatttccgcccgtcaacgtgactcaaatgtcagtatgacaaatcttgtgagcgtggaagatgacgtaaatcttcgcgtgtcaacggtcttgtcggccgcgattgacgaagggcgcagaagacgacgtcagtctctgcgtgctatcaggctnttcgtcttacagacaanaaanaagaatgtttattcggatatccactcgggaatttccgcccgtcagcgtgagcgtggaagatgacgtaaatctccgcgtgtcaacgggcttgtcggccacgattcacgaagggcccataagacgatgttagattgtgcgtgctatcatgcatttcgtcttaca

SEQ ID NO: 255930 - DNA, 443 bp, Glycine max
  unsure (1)..(443): unsure at all n locations
catgcaagctggggaagaaacatgttcttctcctcttaatatccacctaatgtcttntagaaagaaaccgtataccgacactgttcctacgagaatatttctctgcgacagttctctatcttctgcttataaatttctattctattactaatactgtcattataatcgagactggaatgcaaatgtgatatatcgaatcttccttgtctaatttcccaaataaagttctggtctaaataggcattcattttgcgcacacaataattcaaacctaatatactgtaaatagagaatgtgagttggggttcagatatgatctattcacaaaataaggaaggaaagattttatcttacaactggtacaatgatgctctgcctctgatatatgattttggctataacaataatggatatccatctgacaatgaacctctgcattggtg

SEQ ID NO: 255931 - DNA, 421 bp, Glycine max
  unsure (1)..(421): unsure at all n locations
agcttanatagttactaattgngtntgcttatgctcaattatctggaataaaaaaattcaagagagcttaagacttattntgattcacaaatccagccacaactcagcaccacaactcaacttcatcataggcatcatgtaggaaatttagaaaacaaaaaaaaagttcaacaacaagactacttctaggaattgatttagaacatgctatgaactaaataacatgcatgaattacactcaaaattcaaatgataggctaaaaatgacaagaatacatgaacaaatgtatctagaattcaatcaacaaaataaaaattcaacacaaacttagaacataatgtgacaattattatgaataaacatgactctaagacaacatggattaagtgaattacacttagaattttgtggtttttttta

SEQ ID NO: 255932 - DNA, 390 bp, Glycine max
  unsure (1)..(390): unsure at all n locations
tgggaactgtgtttggccccattcttcttttcgagccctcttcgtttctcattccaacgcttcagccatggccacgttgacatccctcaactcgtcacattcctttctaactctaatggttgatgtcttgaacttttccttgactacttgagttcttttcagttccacttttaaagctggcatcccttcgctctccacaaggacctcaacctcttcctcacttgaaacctttagcattgggtgccaagttatcttttgcgtccgagccttcagccacttgtgatagccgccgacgatcccaatgtcgctgtctccaagctccttattctttctntgcaccgcaatccatgctctttggactctctgaagcattcttgcattggggcactg

SEQ ID NO: 255933 - DNA, 379 bp, Glycine max
ttaaagccttttctaatgtgtgagtgagtcttcattgtgttgcatagcatggtcagcctcttgctcaattacctccaccttgaatcatggcttgttatttctgggatgcttaattgcttcaaataggttgaagattaccttctgatcatccatgctcatctctaagtttccattccccatgtccaccacatgttttgcagtcagcaagaatggtcgccctaggaccaagggaatcttctcatcttcttcaatgtacatgatcacaaagtccaccaggaaggtgaagtggtggactttgatcaggacgtcttcaaccactctgaatgaccttgtgatggagcactctgccaactagagcatcatcctcgtagggtcaatc

SEQ ID NO: 255934 - DNA, 458 bp, Glycine max
  unsure (1)..(458): unsure at all n locations
tgagctgcagcttctacttggtgctcctattttgtttcaatccgacatatattaacttctcgaagtgtgggtngcaaatgtacattccaatccttgttgagcattccacgaatcagactaatctaaggataataaagattagtattagaaaatagacttttaacatcggtagttttaatattaagtaatttcaacattggttattaaccagtattgagactattgatgttaaaaatctcgacattaacatcagtttttgaaaaccgatgttaactaaattatacaacattgagtttctaagaaaccgatgttgtatagtaaaaaataacaaaagaaatgtnaaatatgtataaaacattggttttacaaaaatcgatattgttggtgagtgacaaaatcaatttntcttacaaattgatgttgttttctgcttactaacatccggtttactaaaaatc

SEQ ID NO: 255935 - DNA, 193 bp, Glycine max
agtgaggcgcaaccattatattggacttgaaggggttttatataggcacataagtgaaaaaaacttattgatataagaaactagctagaatggaaatcataaaagtgatcgatataactgagattttgtgtttgtatgtggccacatgaaagagagatcaatgatgacattggagtcatcatgattacaaagg

SEQ ID NO: 255936 - DNA, 360 bp, Glycine max
  unsure (1)..(360): unsure at all n locations
tagagattagaannttatgattcccgattcgaatcctacattccgataaaattcacctacttattgattcatattattaatattagacgaatctcattntttgtatcttacggtacatgaatgaatctgcacaatttcatatcatcaatacaaatcacatgattcaatagtttgattttcttttatttttctttcaccaattctcatgaaaagaattgaaaagtcatttaagtgaaattgatcaatgacaaggaattagaggaatatatttntaaaattgtcctatttgattatttcacaacattatttgtcattcatttattcagtgcatgcactatatttgtctatttcactgcttca

SEQ ID NO: 255937 - DNA, 450 bp, Glycine max
  unsure (1)..(450): unsure at all n locations
gctagtatttaaaatttacaaaantttttattttattttactttttcttaactaactctacatataaaatatcattaaagtgacccaaacagtcatattttaagaaggatgtggatttaattattactgtcaatatgagaaatttattggtcaataatctataaatacatcttgataaacaagataaacattctttaagttttgaggtctaattcagataattcgataagattcaattcatctaaatttttaaaataaaaaatctctacatataaaattgcctagaatatatgaaattattatcaacattatgaattataagtagttattgtctacacattatttttaaaaaaatcttattcgacagtattatatattcgacaccaaataaaattgcttgttaccattgctaagttatcttcagaaatacgtcaatgggcaacacacatc

SEQ ID NO: 255938 - DNA, 374 bp, Glycine max
  unsure (1)..(374): unsure at all n locations
cacctgcggcatgcaagctttgagccaaaattctgactcaccattttctcttgacccagggtgagaatgtcaatccttaccttcggaagcgaaaagaatagaagggaaatttccaatcaaagaaaaggaaagaaggaagatttccaatcaaagagaaagcaaaataagaaaagatggataattcccaatcaaagagtgtgagaaagcaaaaagataagatagaaaattcccattcaaagaatgggagaaagataaaagagacaaggaggaaagaaagctcctgatcaaggatcgaaagataacagaagatatgtgcatagaagtctttggaccggacaatatctgancaatacagaattgtcaccaaatgaaca

SEQ ID NO: 255939 - DNA, 343 bp, Glycine max
  unsure (1)..(343): unsure at all n locations
agctngaagcattttttacaacagagagtttcatctccagatcatgtgttgattggccaaactgctaggctatcaatttgaagttaagtacaaacctggcttagagaatagagccgctaatgctctgtccagatgtcatggtgaggtaaaaatgaattctattatttcttttcccttgtgggctgatagacagaaacttttggatgaaataactaatgacccgtacattcaaaagttactgaaagaagtgcaggagtctcctgatgttagacctgagtttcaggtgaaacatggagttntactttatcatggcaggctggtgatttcccccgaatcaccctct

SEQ ID NO: 255940 - DNA, 455 bp, Glycine max
  unsure (1)..(455): unsure at all n locations
tatgctttctattcattctatggacccgtgttggtccacattgngtttcgggtatatttattctcgtttcatttactttatatacccccctttgacgtgcttaagccattttatttaagtcatttctcgcttaacctgaaaataaaataaatttccaccgatcgtttgaattgtattatccgttaacttcggttaaaatgaattccgaccgttcggccgtgccgtaaccacgttggaaatcataaaagaggtaaaataataatataataataaaaaaaacgtcttttagtaaaataaagcggaaagtcaatcggaccgtttctctttgggatttctcattcttaattgaattgactaataactaaagtgagactaaggctaaaatcaactcgcctagtcaagctcgtccataanaataggtntttggaagttatcatttcaatttcttactaaag

SEQ ID NO: 255941 - DNA, 417 bp, Glycine max
atttcgagagaaatatttgacaaatacaatcttgaagatttaaaagattatgtgggattgtattgattttgtgggattttaaaagactttttacaatcaagattcttaacccaaaattttaatggtattctaacacaagattttaagatttcaaagtactttatggatttttaagattttgaaagatcaatacattttaaacaaaaaaataacggaagttacaaaagtgaatgaaacagatgataaataaattataatgttcgaataaagaaaataaaaacgatagaatatgtaaaccttttaataacaaagtcattattgcctagaaaaattatgacacaagtgattctcacttcatgttcgcctatatattagcatttctccacatatctgaacctatatgatgcctccatatat

SEQ ID NO: 255942 - DNA, 447 bp, Glycine max
  unsure (1)..(447): unsure at all n locations
acgagcatgcacttttcaaacaagaaataaagatttctttatgtgtcnctgacagnctctagagtcttagaaaaggcatatttaatatgaagggaattccaattgtagtagcaaaagggttggcccagaaatttaagttaaaaaaaaaagtctttttcaagaaatttgctttctggtaagcgattaccagaggatgtaattgattactagtggccaaaactgatttacaacagctattaaaatttgaattcaaaatttgcactgtgtaatcgattacactaatatggtaatcaattaccaacagttattgaacgttttaattctgttagtgcttagctctactgagttttaaaagatcggctaanatcttgttaaaacataagcacttatacaatgatggaaagctggagttgctgcacatgatgtccaacgttatgtcaaggaatc

SEQ ID NO: 255943 - DNA, 380 bp, Glycine max
gcatcttaagtgaccgctgcatgcactgggggaatcaaactaaggaactctttatgcctttattttttcatgggtgacaatgtatgggggatattttggcccaaatagttgcaagccatatttctgcacgagaggaaatatgtcataaaaacacactgctgaaagatactcaccattaagcatagcacatagtcacacgagaactaaaggaagaaaaataccagcggcttacatatgtgtggcattctggggtaaacccagtggtatcttacccattatgttgttagaactgacatcactatagaaaccagacgttgaaagaagtaaataacatgtcctgacaataaaccatcggcataagaacttaaatctatacaatt

SEQ ID NO: 255944 - DNA, 458 bp, Glycine max
  unsure (1)..(458): unsure at all n locations
gcaagcttaacgacgggtcttgtaaaccgctttttatacaaacgttttctatatgtcggtnttataaaaccgcctttgtttgtaagcctattactacnggtttttacaaaaaccgcctttgtctcatttgtagttatttttattaattatttatgcttcagtctttggtacgcgcatgcctttccatctcccttttgcccttcacccttcacccttcaccttgccatgacctccatacatctcattctcgcccttcaccctgccctgacctccacaagctcgtcgtggacatttcccaacctgtgctctgtcccgtctccggtgaagggtatggtttttgtgagaacggaaacacctaaccctaatatttttgctgctccaagaggtaaggggtgtgttcagatgcctatacccacaatggtcaacatccttaggttttctttttccatcttctactg

SEQ ID NO: 255945 - DNA, 474 bp, Glycine max
  unsure (1)..(474): unsure at all n locations
cacctgcggcatgcaagctaaagctggtagcttagcctaatgtgtggagaatatttgaaaaatatccaataatatctttgattatatttttagaataacttagagtatcttatattttgttaagattattctctatatttcctaatatttcatgatttgtttccatattgactattagtataaataaggattagtgctttatgttttagtcatactataacacatcatatcaaataaagtcaacatcaataatctcactgtattcagtttcttaattcctattcctctctctctatacctaaatccatatagttttaacacacgtaatgtatcagttcacactagcataaatntaaaaacaaaatccaaatgatgatcataagtggcgcacatggactgacatgtaacacattatatacatgcttccattcttccctatattgtttcatgcagtattttccccccataaaacat

SEQ ID NO: 255946 - DNA, 391 bp, Glycine max
  unsure (1)..(391): unsure at all n locations
agcttgtcggccactattgactaatggctcttattacgacgntagtctctgcgtgctatcaagcttttcgtcttacagatagcaaaaagtttatacggataaccactcgggtatttccgcccgtcagcgtgactcaaaagtcagtatgacagatcttgtgagtgcggaagatgatgtaaatctccgcatgtcaacgggcttgtcggacgcgattgacgaagggcgcagaagacgacattagtctcttcgtgctatcagggctttcgtcttacaggcaacaaaaagtttatacggataaccactcgggtatttctgcccgtcagcgtgactcataagtcagtatgacagatcttgtgagcgcggaagataacgtaaatctcctcgtgtcaac

SEQ ID NO: 255947 - DNA, 482 bp, Glycine max
  unsure (1)..(482): unsure at all n locations
tgcaagcttaacaacacttaatgttcaatgccccttctatactatgtgtttatctaagcaatgcattaaagacatgttaatttaattgaataataaatgcgagtctttattaggaggtgtgattaattcatttaatataataaatgggcggattattcagggagtagttgaagatttgatttattctagactattactttttgttgaacaactgacctcaataacttaagagggggtgaattaattaaatnttaaaattttcccgctaacaaattttaacccccttttaaatgatacatgatagactcagaatgcagaagaagaagaagaaacaatcaatttaataatgttcttttaaatgcgcaagacanagtaaactgcaataaaataactgagataagggaagagagaattgcataatcattttatactggtttggccactccccgtgcctacgtccagtccttaagcaacccacttga

SEQ ID NO: 255948 - DNA, 389 bp, Glycine max
  unsure (1)..(389): unsure at all n locations
agctngtctcagcgttatgctatacggttacttcatgctagctatcatcgctaagtaccaagaagagttgggtctagccatggcccacgagcatagaatcgcggacgagtatgctcaagtgtacgcggaaaaagaggctagaggaagggtgatcgactctttacaccaagaggcaaccatgtggatggaccggtttgctcttaccttgaacgggagtcaagaacttccccgcttattatccaaggccaaggcgatggcagacacctactccacccncgaagagattcatgggcttctcggctattgtcagcatatgatagacttaatggcccacataattagaaatcgttaggaaacttgtatggtctctcagaccttgactagatatg

SEQ ID NO: 255949 - DNA, 342 bp, Glycine max
  unsure (1)..(342): unsure at all n locations
tgcaagctngttctacacatgtgttctttgcttttctcttcccacaggtttatcgagggttcccactcagggtttctatttttgctttagtgtttttagaaaacaaatatgctttggctcanagggggtagcaaaggataaaagagtgtttgggatgttgaaacatgaccatgtgtcatttcaaatcttgacttaaatccttttgtagtttggattttgggacaaaaccttaataacaaacccctgattgtttttttcttttctttttattttatattaccctaatttttgcctaggctgccctttcggagttttaacctaccgggtgagaaattntgatct

SEQ ID NO: 255950 - DNA, 303 bp, Glycine max
  unsure (1)..(303): unsure at all n locations
agctngcttatggaattcttgttggacacattgttcgtaatccactatacactgctgngaggggtttcttcactactttcatacccctgatggatggaacaatgttctgggacctctgtaagcaacggttagtcaaagattagtgaagttttataataaattcttattacccaacaaaaggaagatccatataatatatgttgtcacatcttctaattccacttgcttttggcgatgttacacgacaacaagaggagacctgttgaatgctctaggttcaatgtatactggctgtctcttcct

SEQ ID NO: 255951 - DNA, 350 bp, Glycine max
  unsure (1)..(350): unsure at all n locations
gaacgaacaaaaatggtgaagaacggacgatgaacgatgtaggaattggtcacagaagcgattcgaaagcgcctcagcctcantttttcttcttctttctccttcttttcactaatttcactaaaatgctcttaatgtaagaagctgaaccctttacctcaaccccctcacgcctatttatagtaaataagggatggaggttgcacaacagctcgctcaagcgagttggttgcttcctccaaaagtaacattgctctcccaggcgagctggttacttcagccctaagctttttggtggccaggcgagccagaggctatcctgtgtgagccaggggcctgaaaaagtcacc

SEQ ID NO: 255952 - DNA, 455 bp, Glycine max
  unsure (1)..(455): unsure at all n locations
tagcttcanctttcttcttctatcatgttttctgtcaccgccactaccatcctaattaaatacgaacacaacctatattttgaaactcaaactgaatcaaaaaaatactacacgcaagtgatattctaagtttttttaaaaaaaaatattaaagaggcgttgttaagtgttaatttatttcaccaactacctttaaaatccatcaaacaaaatacaataaaataattcattacgagcaaaaatctaaaccgaacaggagaaagaatagagagatctgctcaacacgactacgaaagagatatttcaaaaactggttcggcaataaaatgattgatttgatgattccaaaatgatcactggcgtacattctaagatgattntacaagaaatattggaaataatatcgtgaaaaatagcatttgtactaatgtnnttagaataaaatggatcatcat

SEQ ID NO: 255953 - DNA, 406 bp, Glycine max
atgtacatggtggggatcctctaccaattcaaaaagtttcctatttgggctatttataatacccaaggaggtctttgtggtcaacgacctgtcatgtgggtcattgcccacaggatccttgtcacggcaagacccagaggaaaaagaagttggtcgcggttcccgatggtccacggcagaggccctggctggagccccgtcgtccctggatggagatgtccccgacggccacgagataacagtatccatgtcgtcgtctgctacatcaaagaacacttcctcagatgaactccagaagctcctcccatggcagtttacgactgtctccttatccccattttcttcgaccatgtctatgcgatgagtcactccttcgatgttgacgtgaatgacgtgctggattaac

SEQ ID NO: 255954 - DNA, 242 bp, Glycine max
  unsure (1)..(242): unsure at all n locations
atgcttcgtattgctggtgcctgttttatcatttgctttctttccatcggtctgatttccactttcaacaggaccattttcagaggacactttattgagctcaccctgcaaaacanagtccaacgaatgtgtaaaggtagatctaagcaattcaaaacgaacactaagaatctgaataagcattgttggtggagactttatttatttgttttaataactacatacgagtctaagaatataat

SEQ ID NO: 255955 - DNA, 371 bp, Glycine max
ttacaagataatgcttatcttaacgcaaaaaaaaatgtcatgctaatccctccggtttaaaacgaactcatgtgcacgtttaaagtaacacatttatgcacatgcgtatgtgtagaatatcctactatttatatcaacatagaggccatccaacacattctagttgtcgtacatatatatgcatttgaaaagaacacatattctcacgctcaaggcattgcgtcaaaatttacacttaactatgtcctaaacattcgctatcacaaactacctacacacactcgaaatatatataccatacaaactttcattgtttcactcacacttacgcatattggcaagctatttacattatgcacatacttgcattc

SEQ ID NO: 255956 - DNA, 314 bp, Glycine max
  unsure (1)..(314): unsure at all n locations
attatnngaacaacatatttaaaaccaaaacttaatccacagatccctcttgtaagactaaagttcaattctacttcattcaagttctaaggcaacaatacatttcccaatgctaaagtcacctaaccaggcacacaaatggtggatcagaccaagagcattcaaatatttagcactgaaagaagcattgaacacgagaaacacaatcaattagatattaaaataattatatctgttgttctttagaaatcctcaacaagagtgtttagcctaccattaccgaagataacctaacaataatgagaattcaaaac

SEQ ID NO: 255957 - DNA, 261 bp, Glycine max
caaaccatggagtctcacaatctccttgaaaaacaaatctgccacatgggaagcatcatcaactttattacatggaataaaatgagccattttagaagacctatcaacaaccacaaaaatggaatctctaccattgcttgtttgtggcagccccaaaacaagatccatggattaatcattctcaggatactccggaattggcatgggagtatcaatccatgaggctttaccttagactttgccttcttacatacactgcat

SEQ ID NO: 255958 - DNA, 374 bp, Glycine max
  unsure (1)..(374): unsure at all n locations
agcttgtgttcgaatttcttcttaatttattgtgatgtttacccatgaaaggaaataaatataacaccagcaatggaattattgattttgactcatcaagtttggtgaaaaaattgaccattaatatattacatacagattcatgaatcatgataaattaaaaaggggagttatttattgtgaaactgctacagcacgaattaccacgaaaacagcccgttgacatcattgaagagaacttaaataaaaaattatgaaaaaaaatatatattttgatggaaatcatagatgtgattntacgtattagataaattcataaaatgaagccttctcctaaattaaagtataannattattaaaattacttctttaat

SEQ ID NO: 255959 - DNA, 401 bp, Glycine max
  unsure (1)..(401): unsure at all n locations
tagcttatnntatttttcttctcttaaaagttctctatgaaaaacttatctaaacaagaccttatgttaaataattaattttagtcaaagtatagtctaccagattntgaaggggattgaacaaggtcatatagaggcttgtaaatgtcgaaaaccgcaatcttaagaccaggaagttgcttttgaagactcgttgcagctgagttgagcttcttgttaaatccttgagcatcagtgttgattcttgagacacaaccattctcatggaaaccaaatatagtccttgcagcaggtaggcaacccaatggtgggagtgaagtcactccaagtctcctgcctcccaatccatacaagtcctgcgtccaaacaaaaaagcagccgaaccattaatntctcaacat

SEQ ID NO: 255960 - DNA, 421 bp, Glycine max
  unsure (1)..(421): unsure at all n locations
agcttctcccattgtgacaattattagccttaattgagtaagctttcctttcaaacccaagaggtcatagaaacgacttaagatgatgatctccaaatttgaagggttgggggaggaaaaccatccaagagagaaaacgaggtaaatagatataaaattttcagagtgtatgatcatgtgaaaattcaataagtgaggaatcattcctcttatttgaagggatttttaatatttgaaggattatgtcgcataattcttaattntcaagggatagtttatgatttcttttattttgattatttaggaaataaagtaagacttaaggatgaaatgggagttatcatagtaatggtaattaattatttaatattattatttatcaagcgtgatattcgtctatatctgataataaaatgatgat

SEQ ID NO: 255961 - DNA, 441 bp, Glycine max
  unsure (1)..(441): unsure at all n locations
agcttctcattttctactgattgntactatcttttgaaaatttcttgcttcttttactagcatgcagaagacaaaaganaagagcttaggtcgtattcaaaagtaactaatgaaaatgcaaaaagggtactatcaccatctaaaagaactgctataagatcaaaaggcaataccattaaactgatcaaagtttattaaatttcagctccctgcatgcaattcataatggagataacactttgttaatgattgtgtaagtgccaaagtgatcaccacanaagacaacaaaaaagcgcagtgtatggactttngctctnttagctagagactgatgtgatttcctttacttagcagtagcataggcacgtacnagtaactttaccttcctaagcatcttatccaatatccacactccatcatcaataatacacatgaagcata

SEQ ID NO: 255962 - DNA, 317 bp, Glycine max
  unsure (1)..(317): unsure at all n locations
ctgtgtaatctaaacggagctgttataactcttagtcatactactatctttatgggaatgggacattaatggaaaaaatgaataagagttaatacacgagaagtttggagntttgggacatgacatgatacatgcatgatgttaattggaactccaatgagtgtgtccgagtgccattaaagtcactggagtaccacgcatcacctgctttacactgggtatgctttgcgtaatcttatataattcttttccacaccgatgcgtgtattactcctgttcttagaaacaccatatttatacttagataaaaaatttaa

SEQ ID NO: 255963 - DNA, 292 bp, Glycine max
  unsure (1)..(292): unsure at all n locations
gagttatagatgctcaaccagacacacacaaagtcaaggtccaaagtaatgacttgcaaaatcatatcatagcttacaatcttagggactaaaaatggaggtcactccccaccttaacaaatacaaaccaaacaaaatcctcaaataacagaaaaatggaaatgtaggtatagatcataacaagctaatgactttcaatcccaaatacatgtaacattaatcccaaacgaaacccatcttgtgacgtgtaagccacatnccttatcttacagcaagtctcacatttcaaatc

SEQ ID NO: 255964 - DNA, 88 bp, Glycine max
tgaaaatttttcattttttaccttttttaattttattcttattgcttaggtccccatggtcagagcaagcgcaccccacacattcgcg

SEQ ID NO: 255965 - DNA, 459 bp, Glycine max
  unsure (1)..(459): unsure at all n locations
gatttgaatgcaagaggcatggtattgaagcattttttgatgactccccttttggccagcgctttattgggctgcaccataatgttctctttgcacctagatgtttgataatgttgttcatcatgtacatgttgatgtagaataggtagcaagaggcaataccttccaaatgaagtgtatgtatgttgaataggtagccaaggttttgcaagatgtgtatctatgttgagtgtagcacgaaactgcatctcaaatatgaacatatgacatgaaatggctntgcaaagtgtgaatgagtagtaaattttctacctttcccatgaatgtgtgatgtgaaattgctttccaaataaatgtatatatgtgtatagcatgaaattggctctcaagtgtgcatgtatgtatgaataaaatgaaanaatgcccccaaatgtgtttattatgtagccaaataccttg

SEQ ID NO: 255966 - DNA, 365 bp, Glycine max
agcttctacttatgtggagggcgggctttcttactttcttgtctccaacgcgagctctgaccactgttcttccttcccgcgatgcttcttttcatgtccgcctgagtgggcttatagcctaaaccatacttcccacgatttccttgggtttttatcaagctagttatgccgccgttgtctttgcctaaacccatcccgggttcataaccgttccccaacataactcgggccatcattaccgctgcatcggacagacaagggtgcccaaagagggagtccacggaggaaatgctgaccacctcaaaagactggaaagcagtttctaacgattcttctgcggcttccacataaggcatggaggatgg

SEQ ID NO: 255967 - DNA, 407 bp, Glycine max
  unsure (1)..(407): unsure at all n locations
agcttctaaagatntatgcatattgagttttatcaatngctncccctctattnttctttgagagttagcatcataaggggtactcactgacttaaagtcataataattatacttcctaaggagtttctcaacataatgcccttgggatagtaatatactatctcccttccttataactttaactcccaaaataacacttgtttcacccatgtctttcatatcaaatttagatgctaagaaagaattatgtttaaaaactatatcattgcaagtaccaaaaataagcatgtcatccacatacaagcatataataacatgatcatcattcacagactttgtatacacgtatctatcaacatcactactataataaccatcaacaagtaaagtctcattaaacatttcat

SEQ ID NO: 255968 - DNA, 502 bp, Glycine max
  unsure (1)..(502): unsure at all n locations
cttaagtcacctgcggcatgaagctnataatgggttttctctttattgttactagcatcaataatagtaacaaacttttcttccaacatagcaagatcatgatccaaaacaccgaggtgaaatnggacttgctcatttcagttagagaagttaatcccattaaaattggcacagatgatacataagaattcagtgaattaagaacatgtattacataataaaattcacataagtgttttgagacataaaatacatgtcatacatatgattcattcagataacggtcaatgtatattgatgttctcctttgggtgatacaccaacacacaacatacaaatatgatgatngctaataaaaattcttaacattattgacaattaaatatgcaccaattagtagagtatctatttccttttgatatataaataaaactaatgatacacacanaattgctacaattatattcattaattataagaacaactaatcaacctttgggag

SEQ ID NO: 255969 - DNA, 446 bp, Glycine max
  unsure (1)..(446): unsure at all n locations
agctngagtcacagcctaaatgtaaaagatacctacattaaagaaacactgaatgtggaccccatccacttgatggggctaaaaccacattcgaactgagaatcacaagacaagacaaaaagcaactaaaatatccagctaatgcaaccaaacaaacctaaccgaaagctacagtttcaaaggtatccaaaagcaaatttaaaccagaaagcagcagaagaaactatatgaaaaagagaacaccaaatccatcatgcacaatattgcatcttaagcttttctatagatcatctccatgagatccatttccttcttcatctgaacctccggcgccatctccatcgcaacatcataacccattgtgccatcttccacagcagcatttaccatcgtaggcacataggcaccaccaccaccatgtagctgctgacaccccgccaacttca

SEQ ID NO: 255970 - DNA, 415 bp, Glycine max
tagcttctgcatgtctatagagttctagagttagataggtccaagtttcaaagagtcttgacaaatttgttgtgtgaagatctgcacagaccaaagctggaagatgaagccgtcctgagagctttagatgagattatgagtgattgtgagggctctagaggtggaggagacatccccactacttggatttttgcaatctttcatctttctcttctctttggtggaaaggaagcttcccaattatggaaagctaaatcctctgttggatcttccttgagggacttgatgtaaatatctttttatctatctaatgatggtttgtgtgttcactgtgctatcagaacttcattctaccattgctttgccttgatcacgtagatgtatgttgttttaggatcattcaacagaggaaact

SEQ ID NO: 255971 - DNA, 413 bp, Glycine max
  unsure (1)..(413): unsure at all n locations
cttctacatactatactgaattttgatgctgtgngtttaagagtaagtgggtcaatgccaatactggtgtccgtcaagacgaaattggatttaccttattagacttaaataaggtgggttatatggacgaacctttcattatggcacaacaagcaagacaggtgtnttacgtcctagatccttgtgattcaagatattcagtggttctacaaggcagaccatgtggtttaaatgagtcacacaatgtatgcacacttgacatttgtgaaactacacctttntccacaaaaattccttctaccattgactcatatcatgttgatgaggtgcaagcaaatcgtaatgatcatgatgaaggactatgggaatacattgtcacttaactgtaccctatgaaactaatgaaaaacttg

SEQ ID NO: 255972 - DNA, 454 bp, Glycine max
  unsure (1)..(454): unsure at all n locations
atctngnttatcttcttcttcactacatttataatcatcgggttgagtcttctctatgggtgtcttactagtttagctccatcctctaaanttattcgatgcatacatgtggatgggctaataccaggaatgtccgccagggtccaacctatagccttcttatgcttcttgagaacagacaacaacttctccttttgctcatcaacaagggaggcagatataattacaggaaaacttttgctatcatccaagtaaacgtattttaaatttgatggcagaggcttcaattctggtgtggccggctggatagtggtagaaagagatggtttctcagcctgtacctcataaagaaagtcagaggtatgtgtatcttcctgaaacatggtagtcctatctgactctattaaatcaatctcgagaggtagaacaccaccaccatcagacatgcaatcaa

SEQ ID NO: 255973 - DNA, 418 bp, Glycine max
gcgctgcaactacgatacagtgagatattttttgaagaaaatattcgttcagggcgaccccagatgacattgattcccaaaaccaatattcgcgtagagaaccgagacgagacaatcaaacatatgtgagtcatacacctcaccttttttcttcagtaacaaaaaaataatgatggggattattacactcgtagacaatacagagggcaacaaatgatcaactacaagtggtaatatcaagccccagatccctcaacgcatctgtagcagcatccttacaggaggtatgcggacgctatgctttccttatgtaattctcaatcccatcactaagcagaatacgtctgtccaatacaaaaagtgcaagatggtcaccacaatgagcacacttggcgtaaaaaacaatattactacaagg

SEQ ID NO: 255974 - DNA, 334 bp, Glycine max
gagttagctcaatccatccttgccttagcagatcttggcattcttgtctggctgcttcaagatctatagtgtcatccctggatgggttgcttttgttggattgatatcttcattcaacctgaatggtagatcaacacagtattccttgtttttccataaaggatatggatggttgaaatctttatgattgtccacaacaggaggaaattttttggttaaactctccaaattttctgctaaagagatgagccttgtaccctctaaaaaaggcttgaattctcttttgaacatgatcctggtaaatagattttgagtttattggcagcagtataca

SEQ ID NO: 255975 - DNA, 441 bp, Glycine max
  unsure (1)..(441): unsure at all n locations
tgcacgcatgcaagctactggagggacatcatgacttgctttctttctgacatncatcaccaatcctgccttcttcttattatcagaatgggaatgcctctacaccacttttgtcaaggattttcttcatgccccttaagtgcagatgtccaaacctttgatgccatattctgacttcatcttctttggaggatagacatgtggaggagtagctggtttcttggtgtgtccctaggaaacaattgtcctttgatctgctgcccttcattaaaacttcactcttctcatttgtcaccaagcattctgactttgtgaagtttacattgaatccttcatcacacagctgactgatgctgatcaagtatgcagtcagccccttcaccaacagtactttgttcacactatgaagtccatcatgaactagcttctccatacaaatga

SEQ ID NO: 255976 - DNA, 333 bp, Glycine max
gtgcataaataacaaataagtcatcataacataaatcatatgtctaagtcacttgcatctagaagccctaattatcttctaacggtgtagaaagaatctttgcctagtggtcttgtgaatatgtgcgctagttggtttctccgatcttgcaatattaaatcacagatacctttttcctaagactaagtgctaattgactatcaacacttactgtagaagccagcttcattgctacctgatgatgaatcaagattgattcatgatgatgaatgaagatcgattcaggtgttgtgatgattacaaacatgacgacaaaaagcccctgagaatgat

SEQ ID NO: 255977 - DNA, 432 bp, Glycine max
  unsure (1)..(432): unsure at all n locations
agctngtaatggggcctaggacatagtatggaatattatggaataagtggctgaatcccaatggaatagagaagctatggggaataagtgccaattaagaaaacataagaaaataaatatgaagttaagataaaatttaaacataacgagtaaaaccaagagtctcatcattctcttcttattcactcaactttactgtctttctttttctttgtcgatttttttttttgctctgtagccttttgagaaacagcattatattcagcatgtccaacatttaaccaatatgcaatgtatatcaagtatggctcaaaatatatcatgaagcatggccaacaaaacatgttatccactgaaacaaaaacccccacacttattcctaaaacaattccaaagctccaaaattccttaacgatatggtgatatcattgg

SEQ ID NO: 255978 - DNA, 476 bp, Glycine max
tattgtaattgattacatagttctttttgagacaatgatttgtttcttttaggagtctctactttaatcgattaattggtgatataatcaattacttctcttttaaaagtgtttcagaagtgaccatgaacactttaatcgattacatcaagaatctaatcgattatattattcttgaaagtttttcagttttgggacgaacactttaatcgcttgaaatggtaatataatcgattacttcttcaaaataatcgattacattgtatatttaattgattacagacggttataactgttttctctattaatagtcaccttgtgttctcacttctaataacttctgaacgagctagaattaagagttgatattagtaaaagaaagaagagaagaaaagtgctagaaacaatgtgactacaacttctaatctctgttatgaaatcatattgtgagagtgagtgtgattttatcttgagtc

SEQ ID NO: 255979 - DNA, 466 bp, Glycine max
tacccgccatccttatagtcacctgccgcatgcaagcttcggaagaaagtgatgaggtacaagcccttttgctaagcttgaaagagcccgagtagtcgaagagaagttcaagtccatatccatcaaagtctgaaaagagtatgatgaactaagggacgtcaatatggccaccgctgatgccttggaacgagaaaccaagaatgcccaaaaggaagaacacgaccaaagctaagttttgaggggcttttatgggcagcaatagtgagctcaagctccgaagaggtgaaaggaatcatcacgggtcaaaggcatgatcttgaaagacgagctaaaggtttgccttatggtcgaaagaaatttgtcccaacagttaagcgagactgaagggaatatgtgggccatcatcgataagtgcaaagagaagctaaatctatcggcgactcacgagcaaaggcttgaggatgag

SEQ ID NO: 255980 - DNA, 439 bp, Glycine max
  unsure (1)..(439): unsure at all n locations
actttgttgggatacccaatgtgagcatagtttccaaactcttagtgaaaaattgacgaccactccaatgctagttttgcctaacccaagagaaccctttaaggcgtattgtgatgcatcaaagatgggtttacgaagagtgttgatgcaaaatggccaagtaatggcctatgcttctagacaactcaagactcatgagaggaattatcccacccatgatctggaattgactactgcagtttttgcccttaagatgtggaggcattacctgtttggctccaagtttgaggtgttaagtgatcataagagccttaagtacttgtctagtcagaaagagctgaacatgcatcataggagatggctatattntcttcatgaatatgaatttgagcttatctaccatcacgacaaagccaatgtatgtggtgatgacttgagt

SEQ ID NO: 255981 - DNA, 419 bp, Glycine max
gcttgttgaaattgccatgtgtggatgagtttacatacccattctgtgttaggggttttgtgatgatgtttgtgatgtttatatgctgaaattgctgatggaaaactgttacaaatgtaaggtataactaacctagggttaaaaagtgagaatgtgatgttatgagtggaaaaagagtgaggctttgagggctggaaggttaactctgaattctgtggtaaatggaggttaaagtgagttaatactagcttgaaatgtcatttaggacttgggagaaagcttggactgttctagagagaaaaacaaattatcaaagtgaacaaagagccatttctagggcaaaattgggtgttgaggagtcaaattttgattccgtggaaatttaagtgtaaatctagtttgagcaagattagattgat

SEQ ID NO: 255982 - DNA, 381 bp, Glycine max
tcttagtttcagatgatgcaactgactgtgtagctacctcatgcactcctctaatgactatagcatcatttctggtgctaaactgctgggagttggaagccatcttctcaattaaatttatggcttcagtaggagtcatgtctccaagggctccaccactggaagcatctatcatacttctctccatattactgagtccttcataaaaatattggagaagcagctgctttgaaatatgatggtgagggcaactggcacatagatttttaaatctctcccagaattcatacaggctctctccactgagttgtctaatacctgagatatccttcctgatggttgtggtcttggaagcagggaagattgtttctaagaacactc

SEQ ID NO: 255983 - DNA, 406 bp, Glycine max
agcttgcctaattaacttgaaattgttttatattgattattattacacacacaacatggaagttctaagtatttattacctatacttaacagaaaatacttataacactgcaaaataaccattaattggaagagtttgataccaatttacacaagctttataacacaaaagttagtcgtattcaccgattaacagtatgctccaaccatatgcaaggccatgtacaattatgaaccaagattgaagcactccaaatgtgtgatccacatcctttcttattgcttcttgatgttgagcaaaccattatgttttatgaccttgtggccttgggatagtcttcataagtgtcgcctagtatggatagaaaccatctactaaaatgttccctatgttatattacgtttca

SEQ ID NO: 255984 - DNA, 422 bp, Glycine max
  unsure (1)..(422): unsure at all n locations
atatcacatatatgctccagctgtaggggagtgttagantacttaacattctcttatttattattatagatagaaattagggatttattccttattactcccattattagattcatccaatgtaatcaatattgatcccatttgctcattataaataaaggctcttttttttatcgacaaagataatatattagatagataaaatgcagtaccagaggtactgatatacatatatattagaccttactgctggttccacagtcagacagtcctagtctaaaggagaaccaaagtaaggaataaattaaatatacatatgttgccctgcatactattctagcctctacttgatacaaaaaccttgactaatactacttgaccattggttaaaatggattgtgaaatctttttcacaacccctt

SEQ ID NO: 255985 - DNA, 405 bp, Glycine max
  unsure (1)..(405): unsure at all n locations
agcttatgtccacaagctgctatatcttttccttattgagncttaagtctgctggatttctcttttcactggacaaggatgtanggtaatatcaaagtttgaatgccttttagcttaatttcaatggttcaaagttgtcctcatggatctcatatatggcactgcaaataatatttaattttctgaacatgaatttctggagcactaaaatgatatgtcatatgtgtatacattactgataagcctgttcttgttccatgtcaatctataatttttcttttctgtataaggccatttaattaaactgtctacaaaaaaagaacttttctgatactaactgagagttgttccatcttcaggaaatcatccgcaaaatgcttctattggcattggatgaccctcata

SEQ ID NO: 255986 - DNA, 379 bp, Glycine max
  unsure (1)..(379): unsure at all n locations
atgactggagggagagagaaggagacacgaaatttatgcctcatatgaggtttgaactttgaagtgtagttctcaaatgatcaaggttgaaaaaatgcacacacaatgccttcatttatagcctaagtgtcacataaaattggaaggaaatatgaattctattccaatttaacttgaatttgaatttgtagagccaaatttggagccaaaatttcactaattatgattagtgaattttaactatgtttcagcccactaatccaagatcaagtccaagattctccactaagtgtgcttangtgtcatgaggcatgtaaagcatgaaggacatgcacaaagtgtaccatatgatgtggcaatggggtgtagcaagaaatgc

SEQ ID NO: 255987 - DNA, 440 bp, Glycine max
tcacctgcggcatgcaagcttatcaacatcaaacttggagaaagagttcttggggtcaacacatgagaagcgatcaagtatgatgttactttcttcactaaagcggtgatccatctccacacatattttatcaatagcaacataaaaaatctttgcacggtaatgatgaagattattgatggtcctcccttctgctcttgaacgaccccgaaccggtatttcgtcatccataattggtaccggaatactgttagctacacaaaatccttggacatcggcagaaaaattattccagccactctctctcattgtgcccaaccgagctttgacaacatcaactaattccatggcatgcacaatattaagatcttttctttgcaatacatttgaaagctcgcttgtgataccatacaactttaacattaacctcaaaataaaag

SEQ ID NO: 255988 - DNA, 399 bp, Glycine max
  unsure (1)..(399): unsure at all n locations
caagcatcttgatagttggagtatctggtatgcactcattgttgttctacgtatattggaaaatatttcaagttaaaaaataataaataataacctttcgaaatatacaaaattacaacactcatatcatctcaaagtctttgaacttggangaaatattaagtgattgacgattataatccatactaatcttcatataataggtaatcaagtgttatattttttttctttcttttttgtggcgaataagtgttaatttnttatacgagaaacttgaatactcatccgattctgatagaaaccaacccaaataataaacacatgatgatcctgaactacctaaaaattgtcactggcttgaaatgaaagataggatgacacataatcctcctcttctct

SEQ ID NO: 255989 - DNA, 387 bp, Glycine max
ttattgttttattaagaggtgaaagagcacagactttcctaaatgctttaaagattaatcttggtgacagatatgcttctgaaacgtttatgaagttacctcatgggctctaaagaaatgttttcacctgtaaaggatacgatatcaacaagtgttcattctgcacgaaattacatgacgactagtttcaatgcaaaatattggggttagtctaagggttgaatctcaacactttcttactgtgcatgatgacaatccccattaggcatccatgccttactttggagtcattgaagaaatttaggagcttatttctgccaaatttagtgtatgtgttttcaagtgtacgtgggttgataccgatatctgcgtgcaaactggtgattt

SEQ ID NO: 255990 - DNA, 389 bp, Glycine max
  unsure (1)..(389): unsure at all n locations
ctcacgatttagagtgtgcatgtgtctaacaatacagatgttcgtatgacacatgttgtgatttaatgttttatcacaatatgatttggttacattaattatgacaattaatgagtataaatttagtcctaaataacattagcaattaatgaatgtaaatatgcatagttgatcttctaaaacaatttgaaatatgcatgattatataaattgaattttgtaatcaatttaaaaaaatcatataccaactaatgttattcaatcggcaacacatacacttctaatctaaattactgcagttaaattattgagcttttttatatattatgaaattattttaaattaggtacattaatttatgaaaantaattaatattttaatgaaatta

SEQ ID NO: 255991 - DNA, 455 bp, Glycine max
  unsure (1)..(455): unsure at all n locations
tcgaccgggatccttnagtcacctgcggcatgcagcttttttgaccttgacaggcatctatctcctctttcagaaccatgctatgtgctcgcgactggtccctttcttcccttcgcagcttgagttcactattgctaccccactgagctccgcgaaatttattccagccatactcttccttgcgagccctcttggtctcttgttcaagggctcttgcggtagttgcattctcctcccgtaatccggcacactccatccgaatgtgtgtagcggccaacttgaacttctccttggcaagtttcgcctttcctaactcacttttgagagcttggacttcttcgtcttctttcggtgcttcaaaactctcttcgctgacaacttttaacttggcgagccaatctaaacctcgtatatgaactttcaaccattcatggtacccaccaatgatgccatta

SEQ ID NO: 255992 - DNA, 377 bp, Glycine max
  unsure (1)..(377): unsure at all n locations
gcttgaacgtcgctggcaatggcgggagcgtggatgccgctattgacagcagcggaacagggatgccaacgtgcgcagtcccgccattgggtcctgcggcacaccttanaagagttgttggaggacgatgcgagaaggagaatgtggtggatcttgttattgtgctgtgaatggaagatgcacaagagagagttgtagaaagcggagtttgcaaggtgagtgacattctcggatgagagagattatgacgccaaactcggtcactcggttacatctttttgattaaataacagtattaaaccagatctaaacacctgtctaagtttgacaccaacaacttaatttttggtttcaatacatattttacacactgtttg

SEQ ID NO: 255993 - DNA, 375 bp, Glycine max
aagcacctcagcttggatttttttcacggaaacacagtttttcactcaaaacagctgaaatgcatagcataggggtcaaggaccctttggaatagcccacttcccctatttataggagaaagggggaggaggttgctgcccagctcgcccaagcgagcaggtggcttcctttggaagtttcctgatgcacccccaaattcataagttccccccctttttcgtattttatggaaaagttaaggaagtattacggaagcctatcagacttgattttattcttttttgtccttcctctcaccaatcttaagtggaaaaggcttacccacggttacggaaattttacggaagcattacgaaagcctcggaggtccattt

SEQ ID NO: 255994 - DNA, 466 bp, Glycine max
  unsure (1)..(466): unsure at all n locations
ngctnganggtttctttgacngaagatggtggtagaatgtgatgggggaagatggtgcttgaatcttggaagagagaagaaaaaaaagaaataatagaacttgtgtgtgtgcaagagtgttttgggtcaatcgagaagcaagggagaggcgcagcggaaataaactgaagaaatgaattatgacatcaccaagctattgtacaacatagattaaaatatgataaataaaaaacgtgtgctaaatttatactctaattgcttttaattacattntttagtacaatatttaattacgttaattacttttaaatatgtggtcttattatataatgctttaaattggttttgagccgagcataattattattgagatacaatgtgacactattntgcgtggcgaaacccttttcttaaaatgagaaagaataatggtataaactattattaattctgcttatcatatata

SEQ ID NO: 255995 - DNA, 405 bp, Glycine max
caccgcggctgcagcttaacaaaatgacagggtgtgttttactggatcatcttcactctgggggaaaagtgattaattatttcctgggctgataaaaaatatattaagtccctgtcatcagtccagtatatgatatttcattgcacgactggacagttatttactcctttgggattcaaagacaagacagcttctttctgctgtaggtcctatgcttaatttctttgtccgtggcggcactgctctatagttctttctatcgggatatgcatgcctggaaactaaaaagatttagcgatttttgttcatcataatctctgatatttattgggaaatcagttaaagtgaccctgttataaaacctataaactgtgttaacaataaacctatattctgaaagggact

SEQ ID NO: 255996 - DNA, 400 bp, Glycine max
  unsure (1)..(400): unsure at all n locations
tagtcatgatcattgtataggntgtatttgatcatatgatcagcaaaataaacttatcatcacattctatttttttcaacatatcctgttatagtgcttcttgtagtcactggatttatttatcttatcaactaggaggtgtgcaagagcctcttgtgaaccaaaccacacagaatcataccacaaaatacaaacttaaaacaatttaataaccaaacacatttttttaaaacaaacaattcggctatctgaactganttactaaagtgaattgttgaactggcatccaacttaaatacttaatatcaaattacataattctggagaatctgaacgcattgcttcatatttcaacactaacctatatacttcaaacttgaatctacccaatcattaagtg

SEQ ID NO: 255997 - DNA, 389 bp, Glycine max
attttatcagctcaacaaaagttcgtagatgcacaacttgttataaatgctgctctagatcaaagtggcaaatgggatcaaggagaattgttgagaactaaagctaaactacggattgcacaaggaaaattaaagaatgcagtggagacatatacttttcttcttgctgttcttcaggttcaaaataaaagtttaggcacagcaagtaaggttgtgaaggtatgtgtcaatgataaatgtagaatatatcacttagattctttaataactcaaattatcaacgggaaaggaatattagaagcttcgctcaaagtcttaaactctacctcttaacatatgtagaataatatattactttttctgatttatctttcatacagaataagggg

SEQ ID NO: 255998 - DNA, 399 bp, Glycine max
  unsure (1)..(399): unsure at all n locations
gtctaatnttttcggacatctatagattnttttatactaaatccatattaaacttgatttcgaccagattgagccattctatcacctgcaatcctcaacacttgtacccatatctaacatgaatctggtttaacccccaagaaattaaaggctattttcttgatcagaaaatcctacaatggggtatgataaaaggaagcatactaattaaaggctattttagcatacgcttcgacaaactaaactaaattgataaaaggaagcagcatccctcagaccagcagtattgcttttataaatggggtatgatttgttcaaaagggtctctgttctgccgtggtaaaacagaaccatctaagaaattgacatcttttatttttattttntattctggtttct

SEQ ID NO: 255999 - DNA, 438 bp, Glycine max
tgcagcatgcaagctaggcttaacgcgtgaagaaaggagcttatctcttgttgcgctaacggataagcaactgaaaatatttctaattcatgttctacttatctcttcacacataattgtaacaaccctttttgttcattactaaacaagctgaaatcaatcacaatcacaagcaagatgtcttaactacatgcaaaaaataaaaatgaagattgagaagggaaagaaaagttgggttgcctcccagtaagcgcttctttaatgtcactagcttgatgcatcatcctgttatccaggatccaataatgttcccacttcaaggaccttcttctcaggtcttctttcctccatcacatgaactttaaaatagacattccggtcaagtggctctttatcttcatgaaatagatcaaagctgattttctgatcttctatgcc

SEQ ID NO: 256000 - DNA, 245 bp, Glycine max
  unsure (1)..(245): unsure at all n locations
gaatntagaatgaggtaaatttggagcagactctcacctcacacaagtctataacatcaatctaaacttgctcaaactggatttacacctaaatttgcaccgaatcaaaatttgactcctcaacacccaatattgccctacaaatggctcttggttcactttggtcatttgtttttctctctagctcagcctaacctttctcacatgtcctaaatgacatttcaagctattattaactcacttta

SEQ ID NO: 256001 - DNA, 432 bp, Glycine max
tctgccgcacctaataccgagctgcactacctataataagtgatggatctatttatccaggtgctcgtcgataatggttccagtttaaacgtgatgcctaagagcactttggagaaattaccattcaatgcttcccacttaaagccgagttcaatggtggttcgtgccttctacggcacccgccgaaaggttaggggagagatcgatctcccagtacaaataggccctcacacctgtcaagtcaccttccaaataatggatattaaccccccctacagctgtctgttggggcgcccgtggatccactcagtgggagttgtgccctctacactccaccaaaagttaaaattcgtagtggaggggcattttggtcatcgtgtcaggcgaggaagacatcttggtgagctgcccatcctctatgccttatgtgga

SEQ ID NO: 256002 - DNA, 339 bp, Glycine max
  unsure (1)..(339): unsure at all n locations
attctccccctctctcaagcanattcttcttgatatcatttatatcttcatgatttacattctcccgctttttgatgatgacaaccacctataggttatgagcaacaacaaagaaaatatctatttgcatatagtttactcccccttggttttacaatgattacttatatgagacaatcgaagatttccaactcttcatatataaaaagttgtctcataaagagtagataatatttcttactattttatcttttatctttctctccccctttgtcaacatcaaanacaaatcatgaatagagagaaaaatgttacccacttgtgtaatgtataaaaatc

SEQ ID NO: 256003 - DNA, 429 bp, Glycine max
agcttggtatctccttcttcactacatcattatttaccgagttgagtcttctctatggctgtcttactggtttagctccatcctctaaatttattcgatgcatatatgttgatgggctaataccaagaatgtccgccagggtccaacctatagccttcttatgcttcttgagaatagacaacaacttctcctcttgctcatcagcaagggaggcagatataatcactggaaaactttcgttatcatccaagtaagcgtattttaaatttgatggcagaggcttcaattctggtgtggtcggctggattgtggtacaaagagatggtttctcaccctgtacctcataaagaaagtcagaggtatgtgtacttcctgaaacatggttagtcctatccgactctataaaatcaatctcaagaggtaaaacac

SEQ ID NO: 256004 - DNA, 364 bp, Glycine max
  unsure (1)..(364): unsure at all n locations
tcaagcttcgggctgctcaatggctctaagttgctgcatggaagggttaaggtctgtttgttggtcancatangagcacaaaccacagacccttacaacaggtacaaatttctggttcaaggccagctgggttaccaagttaaccaatgtatccaatttgccttcaagcttcttagtttcagatgatgcaactgagtttgtagctacctcatgcactcctctaatgactatagcatcatttctggcgctaaactgctgggagttggaagccatcttctcaattaaatatctggcttcagcaagagtcgtgtctccaagggctccaccactggcagcatctatcatacttctctccatattactg

SEQ ID NO: 256005 - DNA, 369 bp, Glycine max
aacgaccgaatgaatcattggaactcatgataaatataatctctgaacctcgacttactaaagcccaagtgaactgaggctattgaaatatttataaattacattgagatatacttcgtatcctataagagaacgctgtaattatgcttttttatcattaactaaaatttcttgagaatcacaaatttggatggatttcacttcttatataagatgtgtttgatttagagaatgaacatcgaaaagatataaatagaagaaattttttcgaatcaaagcagagcgtatgttgtgtgggactcacatgacagatctcatattaaaagacaaaacttgttgtatatgatctgggtggtcaacccattggat

SEQ ID NO: 256006 - DNA, 328 bp, Glycine max
  unsure (1)..(328): unsure at all n locations
acccagcttatcctcatgcgtaagccactaatgtctcgctaagcgcatggtttangcttagcgagacaacacttcttgaaccttcataattntctcctttttacctaaaatcgaagtgaaacttacattaaattaaataggaaggcttctactgagcacaaatgaaaactaaactagaaatatttacaatcctcccaaaaataaccataaattgggagattatttacattttggaaacttttctatacaaaaattagtcgtaaaagatgactaactgattgtacgttcataaaattgttcgctttcggcaagtgcgcccaatctcaca

SEQ ID NO: 256007 - DNA, 431 bp, Glycine max
gatccttaagtcacctgcggcatgcaagcttaaaagaactattgagaatcattcttttcactaaaaacttaaacaaatataaaaatttccacactctaaattaacacttaaaacttatacaaatatataaattcccacacccactcgagggtgtagatgtatcttgttaatgaaaaaataaaagtggaaattttgaatgcttattatgtactatttgattattagtatgagttaaccttgtggttgtattatgggatatataaatatatatatatatatatgttgcgaatgtgatgtggaggtggtagcattatactactagtaagtgtgaagtatgattagaaaacgaaagggttgatgtttgttgttgtcataatcacatggggcacaggttttgagcacgtgtttttatttttattaaaaagttatta

SEQ ID NO: 256008 - DNA, 407 bp, Glycine max
  unsure (1)..(407): unsure at all n locations
atacatcttttctgctagaatttttatatnatgcctagtatatacaattcgcggataaagcataatagtacttgaaatgaataacccaccacttgtaagaattcatcccatgaatatatttccaacccagaattttcaacttcttgcttttgttcaggggtaacctttccgaagcttacaattgctgaaacacagacataaaaatgaatgcttctttctgaagcataagcattttacgaaagaaaggagagaatcgacaaaactaactcttgagatactttgttgcatttggaaatgtcttcaatagctgaaaagtttcaaaaacaaatatatgggtaagactgactatttacaaaagaatgtacacagctctcaaattctttctaacaattaaactgctataaaac

SEQ ID NO: 256009 - DNA, 444 bp, Glycine max
gaccttatatcacctgcggctgcaacttgatttatctcaacaaagcatatatttttatcacaacaggtgcgatttttttggttaattgttagggtgttcctactaaattcttcttctatcttcttctgtccacttatctctaaggttttgtgttgtggtgctagtgcttacatctactacagggggtatgtaaggccttattcctattgcttcctaaatgtttaaatctatggcttcaatgaaaatctgcatacgggttttccaatagtagtaaccctcaccattgaagataggtggtctatggatggaatttccttcagggaacaaagaatttgaagaggccatgaatcttgaagtggttaaactttctacaagatacctgctctgataccacttgtgggatcaagtggcctcagaataataagaaggggggttgaattaatt

SEQ ID NO: 256010 - DNA, 343 bp, Glycine max
atgaatgaagggttaggaagagattatcatgaaattttgtgctctaaaagagctctgaaatctgaagtttaattttcaaatgatcaaagttgaaaaaatgcacacacatgacctctatttatagcctaagtgtcacacaaaattggagggaaatttgaatttcaattcaaattttacttgaaattgaaattgaatttgtggagccaaattttggagccaaaatttcactaattatgattagtgaatttcagttatggttcagcccactaatccaagatcaattccaagattctccactaaatgtgcttaggtgtcatgaggcatggtaagcatgaaagacatg

SEQ ID NO: 256011 - DNA, 300 bp, Glycine max
tcaaattccggtccggcttctgcagagccattacaccactaaactacttgaaggttgaattttttttctttcttttggacattttatttttccccacatcttcaggaaaagtatataatacataccatctatttcccccttttcacctgcaattctgttgagttggatagcttgttcacaagttgttgtgacaaccactatcttgtggggaatggaaagcatattcttgggtgaataaagtgcacgtataaagattatgacccttcacatttctcattctctctctctctcttcgggttg

SEQ ID NO: 256012 - DNA, 422 bp, Glycine max
agcttgccacaccttggaaacactgcctatatttatttcatcaatgaaacatctcacacatctcattgtatcccagtgttactttttggagggcatgccaaaggggattgataagctcacaaatctccaagttctcaagggatttgtcataagtacttctataaagactccctgccaaatatctgatctttacaatttgaaagaactaaggagactcagcatacatataggaagtgaggcttgtatcatagatggggagtttgatagcttgggagagttgtcggcacttatacatctcaaaatatcatggggagtgtctgaaacaaggtacagtgatttgcctccaacattgaaaaagttgcatcttgaaggctttcctgacaaaaagttcataattcctgaccctaccagctttcagtgat

SEQ ID NO: 256013 - DNA, 337 bp, Glycine max
  unsure (1)..(337): unsure at all n locations
tgctgtatgacaattttcggggaaattcctccatgtgcatatgctgctcaaataatgtccatgaataatctaattgattatcatcaatagcantttgtatctgcaaactaactttggctgggtcttgagcctggaccaggattctttcagccacactagagaaatatagtccttgaagagtaaatttattctctgatccaagtggaaatgctcgagaacttgagttggctaaataagagccaacagacttaacaatagactggacacttttgttactagaaactcgggctgtgccataatngccattagcaaccatgacatataaaacaaagggata

SEQ ID NO: 256014 - DNA, 359 bp, Glycine max
  unsure (1)..(359): unsure at all n locations
gcagcagagaacggagcggactgattagaccggcaccaacaaacaaaagatagcccccaaactgccgaatacacgcttccccgagaccacagggaagaaaggaaagcccaatngcaagaggcgatacgcaaaccccaaaactaccagagagagcatatatccggcatgacaaagaagaagaaaaaatacttttatgagataacagaaaaaaaaaacgcaagtatgagataaaaatgattatcggacatgtggaaatatgtacggcacatctacccttcttggaagacacaacggaaataccgacataccgggagacattaaagttaaatncggacacccctcaaggccaaaaatttgaa

SEQ ID NO: 256015 - DNA, 351 bp, Glycine max
  unsure (1)..(351): unsure at all n locations
ttgtttacaaatacctttccaatgagaaggtattgggtacaagcctgactcttggaaactgatgtgtttaagccatattcctgaatctataacaccaataataatgtctctgccaagttagaagcactccaaagtgcacttccattatctaagccacaaaagtgagggtngtatgttgtgtggagggttgatagctcatcaagtatggctaagaggaaaccatccacttggctcaagtatctaatgtggttcttggaaagctgggccacagaaccaacatggtgggttcatagtgtaaacgaagtaagggctaaaaccactcttttctactcctctcttttgattgggcgg

SEQ ID NO: 256016 - DNA, 373 bp, Glycine max
agttgtggatatgatttgaaaaaatagagggactatactcgcctcctacctgaattccaaattctaaatagtaatgttatggtagagcatgggacttaacaacaaagcttgttttcgagaggcgttccctaagaataggtttcttatttgccgaagctgctctacaacatccttattttcttttgggtggtgatcaagcatctgtagtcctttcaaagatatgcttgaacagaaagtgagctgctaaccaaagtgagtatatcattccattttttgattgtctgatttttttaatcactggttatctatcaaatttatgtagtaaagcttgagcaatttttttttgtttcctgttgtagctgctcatgtaggc

SEQ ID NO: 256017 - DNA, 327 bp, Glycine max
gtcatgacaacatgccatgtcagcatctggtttcaaaaacggcgacatcttcgtgtccactcggagctctgttccggtgtgggagtactcatcgagcatgtccaatacaccaacaccctaccttggaggttcttagcttcttttctagctcctcactcacgaacattcccggaaccctagttatgacatcctgcgagttcacgattctcaggacttttcacgtttgggccgcgagcttgtccccgaaggcccgattacctaccctgggcccaccaaaggaaaaaacaagcacagaaaggacatggacactgcacatgctgacatcat

SEQ ID NO: 256018 - DNA, 423 bp, Glycine max
  unsure (1)..(423): unsure at all n locations
agctnttgatttcaatacaagatagcgtataaatgagggcattgtgatatgaatttccctttaggccaacggctgatttttcgggctgcaccatgatgtttgcctagcttgtgtaacaatgttattcaccatgtacatatatatataggataggtagctagagacaagacccttcaaataaaacgtgtatatgttgaataggtggtcgagtgcttcataaaagtacacgcgtttgaatgtggcacaagaatgcttcccaaaatgaatacatgatgtggaattgcctctcaagtgtagatagatggcatgaaaattccttttcaaatagatgcaagtgtgttcatgatgtgagatgggctctccaatgtgcatatatgtataaataaatgtgaatgaaacaacacaaaatttgtatgttaatga

SEQ ID NO: 256019 - DNA, 332 bp, Glycine max
  unsure (1)..(332): unsure at all n locations
taaagatccagccttcatataagccctacaagcaagctttcatcatctatgaagaggaaaagcactgcttccagacctcaagctcagtatgataccaggagattccattctttggacgcttggaatagatacatggataacattctcggccggaatatcctttcggagaaaaatgtgcagatttatcatactgagtttgatgagtntaaagtggaattggagaggcgtaatctacacaaacgctcgccaatctccaagatggaagcatagatctagctatggtgaaggagttttatgctaatttatacaccacaaaggagcaagcacctaag

SEQ ID NO: 256020 - DNA, 430 bp, Glycine max
agcttgagaaagatctgacagactcaacctaatgttaatgagaatgactattgcaaacaatattaagacaactctccttaaaatcgaaagtgctaaaaagtttatgggattagtgggagagcgctctcaaacggctgataagtctgttgctgggacattaatgagtacattgaccaccatgaagttagatggttcacgtactatgtatgaacatgtcattgagatgacaaacattgcatcaagacttaagatcttgggaatgactgtgaatgagaactttcttgttcagtgtcttttgaactcattaccgtctgagtatgacccattccaaatgagctataatagcataaaagatgaatggaatgtgcatgaattgcatagtatgttagctcatagagaagtgggacttaagaatcaatgaagtcactta

SEQ ID NO: 256021 - DNA, 425 bp, Glycine max
  unsure (1)..(425): unsure at all n locations
aaccggtgaagtcctaccaaggacatgaaatgttgtaagtcttcgttnttattacaactaaaatcatgtaggtgcatgctcaattagtactacattttatctttcctttcgagaacaaagaaggctagctcagacaaaggtgtcaatcttgttgggatcttatccagccagggtcaaaattaagagtgccgaccttgtcgagatgcctaagtctgactagtcatccctccaaaacatctacaatttgttgttttttaagttcattttccttcaataagacaagataagcaacacaattaatattttgactgtcattaaaactgatacatggtcaacaaccacacgaattacacaattatcttaccgacatgatacctatggtacatgggtggcatcccaccaatgacacaatatcttactgcatg

SEQ ID NO: 256022 - DNA, 387 bp, Glycine max
tgagttttgcccaacattactctaggaacttcttcgcgacaaaacttagatacagttctgtatgtaattttagtattgttctcaataaagagaaatgccaccgaaaatttggcatagtaaccaatgtaaattagaacatcaattctaaccggagaacaacattataaacatctaaagaagtatatttaagtctttgtccctcatatttaaatgcaagttctaataccaaacaaactgaacacttggcattgaaacaccaaaagaatctcaatatctcatagtatggtgatcacgacccatctatgattgcatagagccatacacgtccttgtcacaggtcccaacttctgcatcatacctcataaaaattgtctccatttcaaatgc

SEQ ID NO: 256023 - DNA, 424 bp, Glycine max
  unsure (1)..(424): unsure at all n locations
taatagnctgagagtcccacttgcaagtgtggatccaacaacctgagccaccacataaactggaacctacaatgttacatggatgatagttatatcaccgtgaatatgccaataatttcaagataaaatgagaccattggatgtagtgaaagaggactaaaggtttctctaattccattacttttcttgctacctatgttcaataacgcgttttgtttaccaattataaactagcgtaaaaaggtcaaggcaaataagtattttaatttgagatattatatttatacatgcaatataagtatacaacacattcttttctcaataattctctccggtatatcatacatcttatctcacaattttttatatagcttcttggctctctttatttatttggaaaacaaagtgtgtggagatacatata

SEQ ID NO: 256024 - DNA, 417 bp, Glycine max
agctttgttccttttttattaaaagagattttttgatactcatcacattgtctaaaaaggccctgaggtggatctaaatgcctctgatcattcattagcatattcatgaattggtggcatgctcaccactgtgtgcttctttagggaactcaccattactaaaaaacccaaaggcacccctataacacccgatccaaaagtaagatggataacaaagagggagtgcaagaacagatgaaggccgacatgtccgccttaaaagatcagatggcttctatcacgaaagccatgctaaaaatgcaaaaatcaatagaagacaatgctatggcagccgctcccaaaacagctagggaagcagaaccggtgctacagcccgcaatgaacttgggccgggacaaaagcgcgacgggtttaatc

SEQ ID NO: 256025 - DNA, 282 bp, Glycine max
  unsure (1)..(282): unsure at all n locations
aatatatattctgaagtatgtatctcatacccatgatgtttaagtttcaatactatattgaattcctctctcaatttaaaatcacaaattaatgttgaatgtttaataaagaaagaaatagaattgctagcaaatattaaaatgtcttggatactgccgttgtatatggattaatttttaaattatttaatatatatcatgtattacctttttatataccaaacctcccaattaattatttgtacatgtatttcatatcngatgatctgaatgagattcaca

SEQ ID NO: 256026 - DNA, 430 bp, Glycine max
agcttgataggtaaggactctatttgcgactcataataattacaagttcaaactagcttttgtatcttatacagcattttgtcatccaactgaatgcttattattaagcagggatttgatgaatccaatattggagaaaaggcatagcagagttcctgtctattatgagcagcctacaaatattattggacttgttctggtatcatatgcacctaataattttttattttcaaactgacagtctaccatgattgtatattcatttttctttccttgaaatctctcggctccttccatgaggccattttttctctcagtgagtacgttttatttttatgccctcaaaattaaatattatgtctagataaatgtttgacataattaatcttaaagtgatgtaacttatatttaaatttcatagggttttctt

SEQ ID NO: 256027 - DNA, 386 bp, Glycine max
  unsure (1)..(386): unsure at all n locations
tgtcacctacaacgagatgaattaaggttcanatattctttgagagatctccatatttagtatccgattatgtctggaggatggttaccttcgaaggagaagacttgtgggaaaccaaaaaaaaaatggctacacattaacattagattatacattntttacatttaatgtataattaactaaaattatatttctaaattatacatttgttaaatatatgactttttttttgtcaccataacattgatatagagtaactacaaactaaccacaaaattctaacaaccacgtcatgaatatttcattgtattttacctcataatttgaccaagctccaaattcataagccataacacaatattgaacatatatttttcatatattaa

SEQ ID NO: 256028 - DNA, 402 bp, Glycine max
  unsure (1)..(402): unsure at all n locations
tgcaagcttnttaaagttttttggttttccaaatcttgaaaacaaaagtgtgctattcatctttttcattctcttctccctttgccaaaaagaattcgccaaggactaaccgcctgaattccttttgtgtctctcttctcccttttccaaaagaacgaaggactaaccgcctaaattcttttgtgtctcccttctcccttgtcaaagaattcaaaatgacacagtctgagaattcttttgattcttccctttcccataaacaaaagatttcaaaggactaattcattgagaattcttttgtttccccattcacaaagtttcaaaggactaaccgcctgagaactttgtcttaacacattggagggtacatcctttgtggacaagtagacggtacatctactt

SEQ ID NO: 256029 - DNA, 353 bp, Glycine max
  unsure (1)..(353): unsure at all n locations
ctatataatactcatgcttgctcgagaagcttctatgcagactggatctttgagttttaataanggccttcaatggtgactttcatccatggagttgcaacggaagataaaggagaacatgtgagaagaagcgtcatccactaaagaataagccatggaaggaaaagcttcaccaccaaaaggatgctgtggataagaagcttattgatgaagctctatggaggaagagaatgagagagagagagagagagagaaagaggaggggggcgtgggacttgaaggagaatagggagagaagttgaactttctccattcatcaaagttatgacaagtgttacacatgtctttattta

SEQ ID NO: 256030 - DNA, 448 bp, Glycine max
  unsure (1)..(448): unsure at all n locations
gtcacctgcggcatgcaagctagtctaaggccataaatggatttgtttatctctcnaacaaggtttttatcaactgaagtgtacccttttggaagttccatatacacttcctcaaatagaccaccattcaagaaagaattatccacatcaagctataagattggccaatttttagcagctgcaatagccaaaaggactctaactgaagtaagtttagcaattggagaaaaagtattcaaaaaatcaataccatcttgttgtgtgtaacccttagctaccaatctagctgtatggcgatccacagtgccatcaggcttgaatttcactttgtacatccacctgcagccaatgcattatttaccaattggaagaggaaccaaagtccatgtgttattggattccaaagctttgatctcagctgtcatggcttggcgccattctggaaaag

SEQ ID NO: 256031 - DNA, 425 bp, Glycine max
  unsure (1)..(425): unsure at all n locations
tatcaagtngcacaagtaatataagatggtaggatcgattatcttatttcacagatactatgcttgtatatctaacgattaagcaattagtgactcaaatcaaatcttgttcattgattaactagacgaattaactacaaagcaagaaacacaaaggttgagaaaaccataaatatgcgaataaaccacaggataaacaataataacaacattatattaaaagatagtttagaatcattacattaaaaagagtttggtttgtagagttcccaacaacgggtggtttttagtctcttattattatgagagacttacaaatataaaggtgggataaaaagggagaaaatggaagagaaatagattgaaacggattggtcagaacttcgaaaacaaagtttagaatcattacatcaaagagagtttga

SEQ ID NO: 256032 - DNA, 424 bp, Glycine max
  unsure (1)..(424): unsure at all n locations
agcttagcanaggaccagaggggtgccttttttttcatatccnccggaaaactcatcacctctatcatatctaataattctcacatttatgtctaattgccctcttacttcattgaagcaaatttctaaggcatccattgcctataaaatctcgggaagtaagtagacataacctggacgtgaataatcatcaataatgatgataaagtatcattcctttctgaaagaaccaacatcaaaaggtccacaaatatcagtatgcacaatctcaagaagctgagtgcttcttgcagctcctttctttgtatgttgtgtacgtttcctttaatacaacccacacaaatatgtagatccgtcaaatctagataaggaagaatcccatttcttattaatctttccatcctttctctagagatgtgaccca

SEQ ID NO: 256033 - DNA, 367 bp, Glycine max
  unsure (1)..(367): unsure at all n locations
ggtacaaaacttaggagaaatcaagaacaaactngttctctcatcgttcgcgtgtatgatatccactcgacaaggtttgaagtagaggagaccttcaatcctataacgcaacgtggcggacaaaaatggacagttaacttgaatggccattattgtcaatgcggaaggtattctgcgcttcactatccattgtcacacattattgcagcttgtggttacgtgagcatgaactactaccaatatatagatgttgtttacaccaatgagcacatcttaaaagcatactccgcatagtggtggcctcttgggaatgaggcggcaattcctccttctgatgaagcatggacactaatcnctgacccaacta

SEQ ID NO: 256034 - DNA, 428 bp, Glycine max
  unsure (1)..(428): unsure at all n locations
agcttaagcacgtctgataaaccaatgatgttcttcatcaccaaaccttgtcaatctgattctctatctgtgaaggaaaagttcatccatgcaaaggtatgactatactctgcttgtacacttcaactctttctaacagagaaagatgttctactactttttccttgaagacctgtaaaagggtgagatttagggaatgaggaaggaaagcagatgaatgttntgttgattttggtctaatttaaagtaatatgcctcaaataaatccagatgagagtttagactgaggaagctgaagaaaaaggaaaagaaagtaggattctcacaattagaattcctacctaggcatcaaataaaattgatgcatcacatgtctaagctctttagcagcaattaatgataattggatatatcgctgagacaaaact

SEQ ID NO: 256035 - DNA, 356 bp, Glycine max
  unsure (1)..(356): unsure at all n locations
aatgactatctctgcttggttcctaagcgagcaatatattgatgcaccttcaagacttcattcttatccattgactctcttatgttcctttgcctcaacatttccatttttctccaattgattgcatttttggatttttacaaaacttgtccattggcctttntttaatctcacactttgtctttgcggccaaagcagtagcattgctagagtcctcaaactcatcttcactttcatcacatccaattggttcactaaattcaaaatctcttattttggcatattaccaccaccagtactattgtgagtgggcccactttntttggtagccatatatcccttgagctcttccacta

SEQ ID NO: 256036 - DNA, 414 bp, Glycine max
agcttaaacatacaatttcgagcgtctcttcttttacgggactcaaccaattccgagaaagagcttattgcgcttgaatatgctctgagcctcaacattcaatttctagcggttccatatattacaagactcaatcagacatccgagtaaaaagttatcgccgtctgaatctggctctgagggtcaaaattcaatttcaagcgtctcgttatattatgggactcaatcatacatccgagtaaaaagctattgccgcttgaataggctcataggctcaacattcaatatctagcgtctcgatatattacgggactcaatcatacatacgagtacaagttattcgccgttgaattggcccagagctttaacatacaattctgagcgtcttgatatatatcggtactcaatcacaca

SEQ ID NO: 256037 - DNA, 331 bp, Glycine max
ttcatacgacaataactttttactcggatgtctgattgagtcccgcaatataacgaaacgctcgaaattgaatgtataagctctgagccaattctaacgacaataactttttactcagatgtccgattgagtctagaaatatatcgacacgctcgaaattgaatgttgaagctctaagcctattcaaacaacaataacgttttactcggatgtccgattcagtgacgtaatatatcgggatgctcgaaattgaatgttgaacctctgagccaactcaaacgacaataactgtttactcggatgtctgattgagtcccgaatatatcgagac

SEQ ID NO: 256038 - DNA, 426 bp, Glycine max
tgcttgatgtgagagagtgtggaagagtctttcttcctactttggctcggtgaccatagagtggtacctggaaatatgtcgcggtgatcacgagaccttggggacgtcaggtggggtgctattgcccaaagccaagcttgaccaatcccgacccaacccgagcatagtcagtcagtgagaacctgtgacgtacctaaacaggcgagctcctggcagtcaaccaataaaagaacaaagtccacgaagcaaggaggcttgtgtggcaactggccagctatgtatcttgggtggtatctgaaatttagcctctggcaatcgattaccaagggtgtggaatcgattacagggcttaaaaatggagacaggaggtttaatggcctcctgtaatccatttccaagtgtgtgtaaccgattacagggttacaa

SEQ ID NO: 256039 - DNA, 419 bp, Glycine max
  unsure (1)..(419): unsure at all n locations
nnttggattagaaacatgggaccaactcattntatttcataaagtcgtatctagtcgaagtctgagagaccatacaagtttcctagcgatttctaattatgtgggccattaagtctatcatatgctgacaatagccgagaagcccatgaatttcttcgggggcggagtaggtgtccgccatttgccttggccttggctaacaatcggggaagttcttgactcccgatcaaggtaagagcagaccgatccatccacatggttgcctcttggtgtaaagagtcgatcacccttcctttatcctctttttccgcgtatacttgggcatactcttccgcaaccctatgctcgtgggcccgggctagacctaactcttcttggtactttgcgatgatactaacatggtggtcttcgtctcgcat

SEQ ID NO: 256040 - DNA, 426 bp, Glycine max
  unsure (1)..(426): unsure at all n locations
agcttgcaaccaaccacaatcacatgcactttctcctgcgtcacgataaacaatcacaggtgcagttcaattcacacttcgttattactaaactgaaaattgtggtatgtgactcaaaatcactaaaggcacaagcgggaaggtttcttgtggtgctgtcataactgaattagttntggcaccaaagtatagtctttgttcctaggactagcatctaaagtgtatatatgtttgatcgtgtaattcatggagggctggctgaaaaactgaggagttgcagaaaattcagagagttcataaaggagatagtgagctaggtgattgagagaggttttgaaaagaaagaagccaagagagatcaaagctgcttgtattgaacttataatttcatgatcaatgtgatgatgatgagctgcattttacggc

SEQ ID NO: 256041 - DNA, 360 bp, Glycine max
tgccacgccaccctttatcgacgagttcagagaccaacttatgtgtcacagttccaatggtgccgcgggcaaagccactgaggaatttgagagctgagtaaacccaaacgttggctgagaaagtggcaaggaaggaagagagggacatgatgaggcatgataagaagagcatgttcttgcgaccgaatgaggagtcagccatagtggagaatacaagcccaccaacgaagcagcccgcgaagaacatggaggctggaaggcccatgatgaaggagctcgaacactccagcccaaattctgagatgatggaggcatgcgtgggcccactccacgcccatgaatacttggaaaggtgacatg

SEQ ID NO: 256042 - DNA, 343 bp, Glycine max
  unsure (1)..(343): unsure at all n locations
acattgtgtttcgtgccattttattctcgtcttggttactttttataccccctgttgacgtgcttaagccattttacttaagtcatttcttgcttaacttaaaaataaaatcaatatccaccgaacgtttgaattgtattatccgctaactcttgtttaaaatgaatttcgaccgttcggtcgtgccgtaaccacgttggaaatcaaaaagaggtaaaaaataatataataatcaaaaaacatcttttagtaaaataaagcggaaaatcaatcggacgttnttctctttggatttctcattcttaatagaattgataataactaaagggaactagggctaaat

SEQ ID NO: 256043 - DNA, 433 bp, Glycine max
  unsure (1)..(433): unsure at all n locations
agcttcatatnntaaattgatggacaaacttatattatttatagaagataaaaaaagctaaaagatatttcacacaaatatcatataattataacctataaaacaaaactgattctcagacccatgtgatgttaccattttggaccgatccatgttagacgccccttcaattattacgtaacgcattcatgttacacgctccctgcaattatcaggtaacgccattaaacgcacggtccccttatgaacttcaccaagcaaaactattacacagtgtatggtagcaactacaattctaatcctaagcagaaattatgaaggaaaagctataatggaaatttctcatgtattcatttcaattctggatacatatttataagcagcacaagctaaacggtgtctgtgtcccactgtgagtgcactgagttgtaac

SEQ ID NO: 256044 - DNA, 456 bp, Glycine max
  unsure (1)..(456): unsure at all n locations
gtctgcatataacgataatggtatgtgtcacattagtgatnggatgttaaaaatntggattntcatggaaatatgatggcaacagttacctaacaagctgtactactttnttttattataattntccaagataagtgactgtgtgctgccttgtcgcatataaatttggatgatcctttgtggggcatcacctacatagaagtggagcgttgtaaatcacatactataattaacaatttgttagaatacaaaaaataaataaaaattagagtatgcaataacatatcctctaacatactcttttgattagaacacatatttctacaacatgcaactcttccttcgatgatcaattgaccataaatgtattcatatatctatatcanaatctacaacatgcaaactaatatttctgacaactaagtttgtcccttaaaaaaacaaaaaatgattatt

SEQ ID NO: 256045 - DNA, 452 bp, Glycine max
ttaagtcacctgcggcatgcaagcttcctctctaaacttcttatccaagttgggtcctctcacctcttgtcctttatcttccgctgcaactccatggttgaaaatcaccattgatggaccttactgaagctcaaagatccagcctccatagaagattctcaagcaagcttccatcaagtggtatcagagcacaagagcttcaagtaggtgctccttaaacctccattaattttcatctttaccttcttctccattgtcgtttcttcatttttctccatgtatctcctcacatgtcttgtgctgaatgttgttaacatgcttttttagaaattctactgattaaacttgttatagaagctagatttgattttttatggttcaaatttcttgttcttgttcttgaaccatgaattgcgttgagtttaagttcttttgagttttgtattgctatt

SEQ ID NO: 256046 - DNA, 472 bp, Glycine max
  unsure (1)..(472): unsure at all n locations
tctactgaaggtgtgttcgtaatttctctatacttgcttcacctcaaaatgagcttgtgaagatgaatgtgacattaacttggtgtgaaagacaagagcaagcctttgctttgctcaaagaanagctcactaaggcacctattctagctcttcctgacttatctaaaaattttgagctacaatgtgatgcctctggagtgggtgtgggagttgtattgttcaaaggtgggaccctattgcttattttagtgaaaaacttcatggtgttaccctcaaataccccacctatgataaagagctttatgccttaatgttggatttcccttgcagcttctttntattccactttntcttcgttcaaatatattcaaggaaaatctggtttaccggaaaatgcaccggatcgtcaagtatttaaaaattaaacggatgaatccgagtatcgaacacagggaactaatgttagcttgaa

SEQ ID NO: 256047 - DNA, 373 bp, Glycine max
tcttttgccatttatactccagacggaatggtttcttgagtgctgcattaccagacacagggttaaaagaactgtacttgtcaagaatttgcacatacttggaaccagaatcaggcaacgctgctatacgaatgatgccggaaaatggcttggatgtaacctcaaaaggaacatggttcaagtagattgtggaggaggtgtatatgatccatgtctgagtgttgttaagcttaagggtgtgcttggtgttggaatcatcggaagacagagaaactatggtgtgcactgttttgatcgaaagaggtgttggctttgtgacacaagcagttatataacggcttcctctgacaagaaagaacctatggttggagct

SEQ ID NO: 256048 - DNA, 295 bp, Glycine max
ttctgagtgacaaaatcaccttctttttgtcacttctgtcatcttctggatccaaaccatctgggagtgtcacaaactttatctgtgctcccaagtggtcaatttcactcttcattctcttttggttgaactcagtgatcaaaaaggttattttgcacccattgttggcccacaacttgatagaactgcataagtggattcatgtgtcctacaattggataacgcataacaagaaagtgtgggtaactcatatctgttgatgtaaattttacaaaggaataagggatgggacaat

SEQ ID NO: 256049 - DNA, 429 bp, Glycine max
  unsure (1)..(429): unsure at all n locations
agctntgatatgatcatgggccatggacattttttctatactgagtatggaacttgggtgttatccacgtttgacataatgatgtacacgtaagggagcaactgaaagaggattatagctcagcatcgtgatttgaggaaaaattagttccatataattgttggtgacatctaatgggtacacaatcaagcattgaaaccttttggaagtacaagtcatagaggagacaaagactttggattaaaaatgaactagaaaggacccaatggacctatttggaaacaaagtattggtgattttataggtgcctgctgatcttccgaaaagaaaaaaaaaggtaaagaatcatttcagtggactccctaaaattaagagggaaagtggatgatgttaaaagccaattgtttgctaaactttttggtatgtgat

SEQ ID NO: 256050 - DNA, 350 bp, Glycine max
  unsure (1)..(350): unsure at all n locations
ngctaacccatggaagctcctaatatctcccacactntttgtggtgggccattcttggatggccttgattttctcagggtccacttagaccccatttctaccaactacaaaccctaagaaagctatattatctacacaaaaagtacacttctctatatttgcatagagggtgttttttgaaggactgaaagaacttgcctgagatgtcctaagtgatcatctaggctcctactatacactaaattatcatcaaatatagaaaagtgaaatgcatcctatataacaagggtctttggcttagcgaagtgatactcgcttaaccaaatacatgcccgaaacatattgggctc

SEQ ID NO: 256051 - DNA, 416 bp, Glycine max
ctgcagctgaatcgacatccggtgaaatgttattaccatttgaatttctcaagagcttccgttgttcaaattcgagcctctcggacttttatgcgcccgaatcggacatccgggagaaaagtttgaccattggaatttcttgagagtctccaatgtttaatttcgagcgtatcgatatattataagcttgaatcggatatcccggtgaaatgttttgaccatttgaatttctcaagagcttcttttggtcaatttcgagcctctcgacatattatgcgcctgaatcggacatccgtgtgaaaagttatgaccatttaaatttcgcgagagctttcgatgttttattcccagcgtatcgacatattataagcctgaatcggacatccgtgtgaaaagttatgaccatttgaaattct

SEQ ID NO: 256052 - DNA, 310 bp, Glycine max
ggatgtttatgcctccgccaacacattacccactcgaaagagaaaaaaaaaaattataccgtttgatcgaaaaatgctgtgacgtcggcacgaaagatgaccatcgagtctataataaaagataccggagacgccgacgacatttctaattgaatcatcaaaattatcaggatggatagacaaacatactgtaccagcttatgagtccgatgaatttttcgcgcattgacaatttttttcaacctgccgataatatatttcagagagaggttttgtcgggtcctccaaatacaatgaggtggctggtttt

SEQ ID NO: 256053 - DNA, 418 bp, Glycine max
agcttatcgcatttccaggaaatatatttgttttgaagatatggaccttgctgttcgtgctagtcttaggagatggaaatttttgtaccttggagacctccaggtgaatgaatgttccatttacttattagtacttccaaagtcagtgattaatgttctacatgcgattaatggagaatatgaattacacatgattatgaaattttgttatccatgcacctttatgtacttgagaatccctaaacttttatgtcttgtttgctctttccactcctggaaaaaagtgattctacgacggtcaaataagggatacaacgatgttttttcgaacgtcgttgaatgtgacgttgtcgaaacataaaaatttcaacgacgagtcccataacaccatctttgatagtgagcaacttttaaagac

SEQ ID NO: 256054 - DNA, 395 bp, Glycine max
  unsure (1)..(395): unsure at all n locations
ttcagcatttgcacaaacaccccaactcactccaaacaatatttttgtgaatcaaacaaaaggattntgttaatttctcaagaacaaagatgaatacttaaaggcaaatgtactaattagaattcccaattggacacaaaacaagaatcaattgatgaagaaaaaagaaactcatggatatggaatngacactgtcataccctaatttcgtccagggaccattgtttgtcagcatgcgaccttcgtttgaacacctcaaaatgtttaacacccatcgttgtggaatccgtaaagtttcgagatgtttctggaagaaatcggtcaaaaacacgaaaacgagagtgtatttagcaaagtggggtgtgtgtaaataaactgttacactctaatttcat

SEQ ID NO: 256055 - DNA, 427 bp, Glycine max
  unsure (1)..(427): unsure at all n locations
agctttaagatcaaactctnttctattntttttctctcaaatgttcttcattcttcttcctcttttcacttttgttcttttttcttgcacaaaattttgtggctcttccactggtgatgatcatggaaggctaaacattcaatcaatccaaggatccactccaagcaatgctgaatttgagttttggtttagtatttctaatttgtgtgaatgttcatctttttcttcaatcctatttttgattttcatgattatgaatattcttaggattgaaaacgaattaggttagggattcctttcctaatttcaaacttaatcacattgtttggatgatattccaacctaatttgagatctcaatgaatttagggattaattgaattgaactaactctaatggcattgattgaactttcataacatgatcat

SEQ ID NO: 256056 - DNA, 476 bp, Glycine max
  unsure (1)..(476): unsure at all n locations
tataagaacaaaattgcctcaatcatttccaaatatgcatgtgaattangacgcatcaacaagaatcaagccaaggctattgtgcaagcaatcaatggggcaaaacacaccaaatgattatgatgatggatggctcaaattctcacaaaggtaaactcatcactttcaaattgagctcttaaaactatcatgacatgtagagaagaatcaaggatttcaagtcacaaaatgtcaagaacttttattttcaaaacaattacccatttcttgaacatatcctataattcanagaaaaacatgcaaattcgtacgtgcacacaaaaattgacccaaaatattaaactgaaaatccgacgaaactaacaacattaacaaattaacacaactaacaaattaacaaaaccaacaaaactagcaaaaccaaagaacacttcctcccatacttanacaacacatngtcctcaatgtagcacaat

SEQ ID NO: 256057 - DNA, 427 bp, Glycine max
  unsure (1)..(427): unsure at all n locations
agctntactatacaaggaataaccaatgttaattccttcatctgacttagcatcaaactttcctaagttttcttttccattgtttaatacaaaacacttgcaaccaaaaacatgaagattcgagatgtttggtttcctaccattgatcagttcatatggagttttctgtaaattgggtcttattaaatccctattcatgatatagcatgcaatattaacgacttcggcccaaaaatattttggaagtggagtatcatttaataaggttctagcaatttcttccaaagacctatttttcctttcaacaaatccattttgttgaggggttctaggtgcagaaaagttatgttcaatgccatgcttatcacanaataaatcaatattctttatttcaaactcacccccatgatcactcttaatagatata

SEQ ID NO: 256058 - DNA, 349 bp, Glycine max
  unsure (1)..(349): unsure at all n locations
accttgaaactcagctttgaacgtgctgttttcaccttctttctaaccaatctaccggcttagcgagcgtccgttgatgtgccatcattttcttctattttctaaaccctctntgcaccatattaattattgataggtcttaattgtcaattaattaggcaattttattatttgggctcatttagctaatttgatgtttttaatctaatttcaggaattaatgaaacattgggcttaatccggattttggttgtggacttgaagagggcaaataaagcagcgcttaccttagttaatttctaattaggaagattcgcaatcttattttatgttgttcaagggttatttc

SEQ ID NO: 256059 - DNA, 414 bp, Glycine max
agcttgcattcactagaagagaaagaacttttttttaggactttgactggaaatgttagtcagtttgtcagattgattgtgaagctcttgatttgttggcagcccaacctcattacaaacctagaaagtccttcggattcattttgggggtttatttctgtatggtatgagatgatatgcaaaagttgggacttctgttagttggttataatggaatgatcctaaacacttgagcttgagtgaaacaacgactgtgaggctttggttgatgattctttccttgatatctgccattctcactaacttattttagttgtgactctaatgcatatgttcctatcattgaaaagctgcatgtttgcgaatagcaattgattgaagtattccatgatattcacttcatatgaatgaatt

SEQ ID NO: 256060 - DNA, 346 bp, Glycine max
  unsure (1)..(346): unsure at all n locations
tcatttcaatcatgcattcaatccactataaccatatcataactatactaaaactgcattntcaagaagtcaagttaaaatgttctatctgtatcaggactttcaaaatcattccaaaacaaaaagtatactataaaccatattaacatatcacanaaccataatagttcatatgtactaaanaccgtacaaccaatttaccacacaaacagaataattaaaatgtactaagaacaagataataataataataataataataataataataggaggataggtaatcagatcttgtcattcatctcaatcttactcctcatcatccaaatgtagcactagagtcccc

SEQ ID NO: 256061 - DNA, 452 bp, Glycine max
atcctctgagtcacctgccgcatgcaagcttccatcacaaatagaagttgtcaaccaatgcttggaagtttatttacgatgcataactagaacaaagcctaagaaatgggcctcttgtcttccatgggtagaattctggtttaacaccaattatattgcttcaagcaagatgtctcctttcaaagctttgtatggacatgatccccctcacattctcaagggatcgaccattccttcccgccttgaagaagtcaataaactaacaattgcttgggatgaattattggctactctaagagaaaatttgctgaagtctcaagatatcatgcgagcaaataccaatagacacagtcgggacatagaatatgcagtcggtgattgggtgttcttgaagatgcaaccttacaggagaagatccttggctaaaaggattaatgaaaaactctcccctc

SEQ ID NO: 256062 - DNA, 412 bp, Glycine max
agcttcatgatgatgaatcaagttgattcatgttgttttgatgataacaaagatgatgacaaaaagcccaatagaatgatttcaagattgagtcaacaagtttcaagaatcaagagaagtttgatttctagattcacgagaagatgaattcaagattcaagagaagaattcaagaagacttcacaagggaagtattgaaaagatttttcaaaaaacaaacatagcacagttttgtttttcaaaagagtttttcccaaaattttctaagttaccagagtttttactctctggtaattgattacccgtttcttgtaatcgattactagtggcaaagtttgatttcaaaagctttcaactgaatttgcaacattccaattgatttcaaaatggtgtaatcgattacgagatattg

SEQ ID NO: 256063 - DNA, 459 bp, Glycine max
  unsure (1)..(459): unsure at all n locations
tctggtgggacatcttgacttgctttccaatctgacattcaccacanattctgccttcttctattttcagattgggaatgcctctaacagcacctttgtcaatgattntcttcatgcctcttaagtgcagatgtccaaatctttgatgccatattctgacttcatcttctttggaggatagacatgtggaggagtaactggtttcttgaggtgtccatagataacagttgtcctttgatctgctgcccttcattagaacttcactcttctcatttgtcaccaagcattctgactntgtgaagtttacattgaatccttcatcacacagctgactgatgctgatcaagtttgcagtcagtcccttcaccagcagtactttgtccagactangaagtnncatcatggactagctttccatttcagttatcttttcttttgagccatctncaaatgtcacat

SEQ ID NO: 256064 - DNA, 413 bp, Glycine max
  unsure (1)..(413): unsure at all n locations
agctnggcacagtatgcagattctttattacaagaagaactctcaaggccacatatctcatggactattcgcaaaacaaagaagggacccttcgctagaaatggaacctccgaagatataattttagaagaaggtgcacttgtggacaccaatttccagactcctaccaatgcatcctactaatataaatctctcgcaagaagatcgcttatcccttggcaagctacaagaatagatgtacttgtgagatcaaaccacagtgtaccctcctggtttgcacatctcaagagcaactagcatcaagatggttgctgatagagtttgttcgcgtctactaattattttataaattgtttagtattgattttattagtttgcgattaatttttttattatggaattatggatcatta

SEQ ID NO: 256065 - DNA, 250 bp, Glycine max
tatgcttgcaacatttataatagactcttctagcagctttaccaacaacaacagaacaattatgatctgtcaagcaacaaatacaatccaggttgggggaatcatccaaatctgagatggacaagtcctccacaacaacaacagcttgtccctccctaccagaatgttgttggtccaagcaagccatatgttcctcctctaatacagcaacaacaacaacagtagtcacaacatagacaacaagcaacta

SEQ ID NO: 256066 - DNA, 434 bp, Glycine max
agcttagctacacacacctctctaatagctaagttcacctccttgagatgagaagctagagcttagctacacaccccctataatagctaagctcacccccatgacaaaaaacatgaaaataccaaaaaaaagtccttactacaaagaatactcaaaatgccccgaaatacaaggctaaaaccctatactactagaatggccaaaatacaaggcccaaacgaaggaaaagctattctaatatttacaaagaagagtagatccaacctttacccatgggctcaaaaatctaccctaaggttcatgagaatcctagggccttctttagtagctctagcccaagcctcttggagtcttctatccaatacccttggggggtaggattgcatcatcccctccagcttggaaaggatttgacctcaaatcccgaggttctt

SEQ ID NO: 256067 - DNA, 475 bp, Glycine max
  unsure (1)..(475): unsure at all n locations
tccatcaagtggtaatcagagcacaagagcttcaagtatgtgctcctntaaacctccattaatttttgctntaccttctcttccattgttttttcttcatttttctccatgtatctcctcacatgtcttgtgataaatgttgttaacatgattctttagagtttgcaccgattaaacttgcaatagaaattagatttgattttctatggttcaaatttcttgttcttgttcttgaaccatgaattgtgttgagtttaggttcctttgagttttgtcttgttattttttgtggctgaaacctaaaccataaaattcttacaaaaatattaaattagaagaaaacctcaaaaatctagagtgacttgttcacctattgtagttntgtcatagaagtcatgtctcgtcatgaaacttgcacataagattcttatgttggctgaatttatttcttgttcttgtctactcattngtcatg

SEQ ID NO: 256068 - DNA, 459 bp, Glycine max
  unsure (1)..(459): unsure at all n locations
cgcatcttaagtcacctgcggcatgcnaagctgaggcgttggatcttctnatcattggtttcatntgcttcttgaagatcatggcagcggaatagagaaggaagaaagatgattggagaccccacttcaaggagatgatgagtcaagaagaagctcaccaccacaggaagccatggataagagcttgaaggaaggcgaaaatgagtggagggagagggagagaaggggcactaaattttatgcctcaaatgaggtctgaactttgaagtgtaattctcaaatgatcaaagttcaaaaaatgcacacacatggcctctatttatagcctaagtgtcacacaaaattggagagaaatttgaatttctattcaaatttcacttgaatttgaaattgaatttgtggagccaaaatttcaataattatgattaatgaattttagatatggctcagcccactaat

SEQ ID NO: 256069 - DNA, 370 bp, Glycine max
ctcctccaactcggtgcccgtccaacaacggacatctgccctaccacaaagagccctcgcttaagccccaactcctgcaaggcctcgtcctaccggtgactttgatcctggcacaagttccaatcttggggaggaaccctccagtaaagaagcttccaaagttcaccccgattccgatgtcatacggggacttgtttctttccttaatcgccaaccagttggcggtggtgacccccggaagaatataccagtctcctttcccgaggtggcccaacctcgacgcgacctgtgcgtatcacgaaggtactccagggtattcgattgagcagtgtgtggccctcaagcataaagggaaaagcttgattgatgc

SEQ ID NO: 256070 - DNA, 416 bp, Glycine max
  unsure (1)..(416): unsure at all n locations
tgccgcatgccaagctagctaagaagtatacacccgtgttaataatctttttggnatctatcttcaactaaaaatggagaatagctgcattctaacttttctcctcctcaatctccactcaagtacaacaaaagctgccttcaatgttggtggtggagttggtgtaagtgttggtgttggtgttggtgttggcaatgggaatggtggtggtgatggtggcaatggtggagtggtttgggttggtggaggtattaacagcccaaagccacctagatcctcagagcctaatcttgaaggagcttacacagctcttcatgcatggaaatctgcattcactgaggaccctcttaagaatttatcaagtagggttggacctaaagagtgcgcctacaaaggagtttttttacaaaccctca

SEQ ID NO: 256071 - DNA, 457 bp, Glycine max
  unsure (1)..(457): unsure at all n locations
gcgatccttatagtcacctgccgcatgcaagcttgtagggttaaagtctcatgattgtttcttgctcatgcaacaattgttagccgtggctatacgaaacatcttgccaaacaaagtcaatgtcaccataactcgcctgtgctttttcttccatgctatatgtagcaaagtgattgatccagtaatgtttgatgagttggaaaatgaggccgcaattatactgtgccagttggagatgtattttccccctgctttctttgacatcatgattcacttgattgtgcatctggtcagagaaatcaaatgctgtggtcctgtttatctacggtggatgtacccggttgagcgatacatgaagatcttaaaagggtatacaaagaatctatatcgtccggaagcatctattgttgagaggtacattgcaaaagaagccattgaattntgttcagaatactta

SEQ ID NO: 256072 - DNA, 395 bp, Glycine max
  unsure (1)..(395): unsure at all n locations
ntcaccagatcatataagataaatgcattcaggcaatctgcagatatatcctcccaaacgtcaaattctccgcctatatattcaacctttccatctctggcacgtggagtgaatcttcctccatggtgcaatattaaagttatattgtcattcattctacacaatcagaaaccacaaacattgtcatatattatgaaataaanaacctaactcanactcaaacataggcacatcacacaacaacatgcaatgtcatctataaaaatagagcatcataaatgaaaataataaaggaccataaacatccctgcgaagcgcgaagacaatgcaaatgaaaacccttgaacatataataccccaaatgaatccaccacaacaatgccnatgaaaatgaa

SEQ ID NO: 256073 - DNA, 430 bp, Glycine max
  unsure (1)..(430): unsure at all n locations
agctntattaanaatcataatagaaaattattattagtaaaatctacaagaataaaataaatcttaatttattttctattttatcttttagaactatttacatccattttattaaaaaaaaataatcttataaaggcaagatctattttttatggagaaaaaaaagaaatttattcaatatatttatgtaaaaaaaattactttnttgtgggagtaactatccccattatctctatgtagaccagctagtggctcgtggtactagtactcttcataattcatatcctttcattatggttgggaaacttgctagtttggacctctcacaagtcacaactcacaactcacaagccaagtgataccctcttgtgtcttgaccattgaccaaatagggctagggtgttgccgctaggatcaatatctcccacaa

SEQ ID NO: 256074 - DNA, 330 bp, Glycine max
gagagggagggatgttcctatctatgttatctttcatgaaacctgtcccccctttctttttgcaagaaatttatcattggtttaaaacacataatgtgttgagctataagtctataactaagaattttgttgtcattcatataattatccaccgctagtcgaagatacggctgtgtgtgatgttctaatatggagtccacctctagggaatcacactgtgcgttccttctccacggcatgtggatatttatggtgcaccgacattgatattatgaaggaatcaccgaagatatggcctttctttgagcttgcttggcatgtataactctt

SEQ ID NO: 256075 - DNA, 427 bp, Glycine max
agcttgccacccagctcgcccaggcgagctatgttgcttcctccaaaagcaacagccttctggaggaatcttctggagggcccaagtgggcctggttgctatttgcacccccatttttactaaatacaccctcttgccctttttttggtgattcttttttcgtaaagttacggaaacttacggatttcgcaacgatacttgttttctttccgtaatgttacggaaccttgtggattacataatcatccccttttttgacttacggaatgttacggaacctcagtaattgtgcaacgatgcttccttttgatttccggtgtgtcacggaaccttacggattgtgcatcagtaccttcttttgattttcggcatgtcccggaacttcacaaatttcctaatgatgggtgccaagcacctcacaaggacc

SEQ ID NO: 256076 - DNA, 432 bp, Glycine max
  unsure (1)..(432): unsure at all n locations
ntagaggactacacgtcttcgccttcataggactactagtcctcgccttcagaggactacacgtccttgccatcagagggctacacgccttcaccattagaggactacacgtcctcgccatcacaagactacatgtcctcacaatcagagggcaacacgccctaacctttagaggactacacgtcctcgccgtcagaggacttcacgtcgtcaccttcagagggctacaagccttcacctttagaggactacacgtcctcgcaatcagggggctgcacgccctcaccttcagaggacttcacctcctcgccatcagagggcagtacgccctcaccttcagaggactacacgtnctcgccatcagagggctacacgcnctcacccttagaggactacatgtcctcgccatcagaggacnntcacgtctcgcca

SEQ ID NO: 256077 - DNA, 322 bp, Glycine max
  unsure (1)..(322): unsure at all n locations
cggcaaaaccgagccaagagacagaccccaagaggagaaccccacaaatacgatgcagaccgnttgaaataaaacactggggggaggccagcctggcccgcagagcaaagcgggaagagaaacacagaagcaagggccataaaaattccgggcgaactgtgacggcaagcgtgaaaaaaacaccggcaaagagaagcataataccgcagggcatcgaaaaggagtaaagcctcaaataacaaaggcaaaccactgaagccgttaaaggcaaaggaagaggaacagaggaccaaaaaagagaaagaacaacattgttcaggca

SEQ ID NO: 256078 - DNA, 330 bp, Glycine max
tatgatacagacttatcggactttgttactatgctttaaatattgtcatgtttatgaagtttatatcatagaactatccacatataccattaatctctttcaaataatcgaatgctgtatcatttttccatgtgactagtattatgtggagaaaattgataaattatatacatttgtcaataggtcaataaatttacagaagaatcccatataacaaaatatggttggcacatggcagtgctatctagtttctacagagatgcgtctcgtacatatgctcaaagtcttggtcttccaatccagtgtagtgtattgactaccttaattaga

SEQ ID NO: 256079 - DNA, 426 bp, Glycine max
agcttgcctaattaacctgaaattgttatttatgattattaaacacacaaaatgaaaatacttagtatttattacctatacttaacagaaaatacttatatcactacaaaataaccataaattgggagagtttgatacaatttacacaagttttatacacaaaagttagtcgttttcaccaactaccatgtctctaacaacttatgcaattcagattcctaatcttgagtcaacttgtgatcctccgccgatatctcattatagcaaactagtccttgcaatgctatgaagatggcctggtaatgagctagttttaatttaccttccaattctatgatgttctctgaaatttgttcaccttgtaagcagaccagttttccttgatgttgaaacttcattgtcagctgagcacaattccagttgatg

SEQ ID NO: 256080 - DNA, 354 bp, Glycine max
  unsure (1)..(354): unsure at all n locations
tgagaaagtccttctaattctgtttatacatttctgacttgatggcatgagatgaaatgcaaagattggacctcctattagttgttatcaatgaatagcttanacacttgtgcttgagtgaaacagtagctgtgagactgtggtttaagctactttccttgatatctgtcttattattaacttcatctaactgtatagttcacattttgttctcctatttgtctagctgcatattttgtgaaaacaagtgataggtacacattgcttcatctttctcatcatgcaatcaataaattttaatgcatacacctttatacatanacacttcatgtttacccactgaggacaagtgag

SEQ ID NO: 256081 - DNA, 426 bp, Glycine max
  unsure (1)..(426): unsure at all n locations
agctnnttgcanagcttacggtaaaatttgtgacttatccatggtagaagtctccacagaggccattgcctccctcgcccagtattatgatcagccgatgaggtgcttcacctttggggacttccagctatcacctatggtagaagaatttgaagagatcctaggatgccctctagggggaaggaaaccctacctcttctcagggttctatccctcattagctagaatttccaagatagtccaaatctcggcgcaggaattagaccacaggaaataagtcgaaaatggggtggttggaataccaagaaaatatttggaggcaaaagcaagaatcttggcaggtaaaggcgagtgggccccgttcatagatattcttgcactattgatcttcggaggagtccactttctgaatgtggatgggttggt

SEQ ID NO: 256082 - DNA, 412 bp, Glycine max
  unsure (1)..(412): unsure at all n locations
ttggctntgaagacttgctccaatggctcatcatgtcttctattgaacctttcttcataggctcgaagagaacccatcaattggtctacggtcattgagtctaaatccttagactcttcaatagcacaaaccacataatcaaatttagcgattaaggagcgaaggatctttttcaccacacgaacatctttcataaatttctcataacgcttcatttgggtcacaataaccaacgccttgttgccaaaatctgagatagattcagaatccttcatatgcaatgattcaaactctctacgtagaggttgtaggcgcagcatttttaccttatcaaccatttcaatggaggttttcaaatcccccatgcctcttggatgtggtgcattgacataacttgacatacttcatccaa

SEQ ID NO: 256083 - DNA, 450 bp, Glycine max
ggatccttaagtcacctgcggcatgcaagcttgcttctacaggtcttacccttatctttctttggttttgaaggtgcagcccccaaaattccatgggcttggtccttccttggataagagtgagagccataagatttttaagaaggctttcttttaagtttctccactcttatacaaagttggactagctcatctaggtccctatatggaaagagttcaacattgtccctcacttccatattaagcccactaaggaacctagctatgcttgttctttcctcctccctaagtccagctcttaaaaggagtagttccatttgttctctatattcttcaacactcatactcccttgtctaagcctttggagcttgtccataatctccctttcataataggagggaatgtgcctcttcctaaaggcactcttaaggtcattccaatactctact

SEQ ID NO: 256084 - DNA, 314 bp, Glycine max
tctacatgtctagatagttctagagagagaaaggtccatgttctacagagtttgagagattttgctgtgtgaagacctgcagagaaccgagcttgaagaggaagctgtcctgagagcttgagatgagtttgtgagtgattgtgaggtcctaaaggtggaggagacatcctcaccgcttggatttcttcaatccttcatttttctcttctctttgttgtaaaggaagcttcccagttatggagagctaaatcctttatgggttgttgtggaagcaatgccttccaagaatattttgatgatgcccaaaaatcaag

SEQ ID NO: 256085 - DNA, 408 bp, Glycine max
ttccccctggtcggaactggcagtcctttcacacactaaaactttcctttgaaaggtagctcaccaaagattaaccataaatgatatcaagaaagcttgtcatatgtctgatgaggacacttgtcccagatgtaaaactcatcaagaatccatcatccatgccttctatgactgtaagtttatcaaacatttcggtctaacttcattgaccaatctatttaggttaaattcttcagcataggtactcatgattggctccatttcaacttttctgtgaagaatatgaaagctcccttgggttcctggtccactttctttggttctacgctgaatcttattttgaaagagagaaataatattgtattcaacaatatttctaatcttggctcttctctgcatcaccatctc

SEQ ID NO: 256086 - DNA, 294 bp, Glycine max
gcttcacaagaaccaaatcacccttcttgaattgcacatttctcctcttcttatctgtcttccataaatacactttaagcttggaaaggagttggtctctctgctgcaaggactccttaagctgattgggatctatcacatcagcttcataatgactcacagagggtggggctctaccaaatacagcttggataggggtatttcccaactttgataaaagaagtgtcgacctcaattgacccaaagaggcatgaaaccaatttttggatgtcaataccaaacactctatgctat

SEQ ID NO: 256087 - DNA, 424 bp, Glycine max
  unsure (1)..(424): unsure at all n locations
agctntaatgtgttctccctcgtggaactactaactgtagtaacagttgcagcccaactatccggtagtgatgacaatggaatcaatgccttcacctcatcctcaaatttaatctgcaccattccaactgggcaagaatagtattaaattcattaatatgatcagttacagagataccttctcccatcttgaggttgaacaatcggcacatcaagtatactttgttggctgccgacgacttctcgtacatatctgataacgccttcattaagcctgtagtagtcttcttgtttatgatgttgaacgcgacattcttggctaatgtcaatctgatcacgccaagagcctgtcgatccagcaagttccattcttcttgcttcatgtcgtctggcttaaccnctaataagggctgatacagcttatt

SEQ ID NO: 256088 - DNA, 464 bp, Glycine max
  unsure (1)..(464): unsure at all n locations
tgtcgtgccatcactgttccgggccaaacccattccatgctcataaccatctttcatcataactcgggctaccatcaaagaggcaacagacaaacgtggttgtaccaaaggagacttcacataagcattgttcacaatttccaatacttgaaaggatgtttctagcgactcctctgcagcttcaacataaggtgtagaagacaaacaactcactagtatgtcctcttcgcccgacactataatcagctaatcctccaccacaaatttcaatntatggtgcaatgttgatgggaccaccccaacagaatagatccaaggccgacctaacaagaaactgtaggcggggtttatatccatctcttggaagttatctggcatgtgtgtggcctaatctgaatcgggagaaatgacctctctctcacatcatgacgactaccataanaagcccttaccaccatggagct

SEQ ID NO: 256089 - DNA, 422 bp, Glycine max
agctttatctatgaatttaacaatgtgagggggggaatttgcttattaaaagattcaagaatgatgtttcttcaccagctcaaaaaaaaaaagaataaaaaagaatggtgtttctttcctaaaaaaagaaaaaaaattaaatagaataatgtttattagtctttaaaaaaaaactatggttcttgtatatgatcgagtgagatatcattttgtggagtctttactgtggacacgcgtttcaaaataattttgttagccaagtttttttatattcccctaactgaaaatttggtgataaacaaacataataaacggaaaaaatagcaaaatgataaaaattttatttatttattagtaaagtaaagtactaaggtgtataaataatgtagctaacttttattcgatttaagaattttcatatc

SEQ ID NO: 256090 - DNA, 463 bp, Glycine max
  unsure (1)..(463): unsure at all n locations
agctctgccttcaacaatgacagacatgatgtttatgaagtgggagcatcaagcatgacacaattggtaatggatgactcgaaagccattaagccattaattgttccagcaagcattgttactttgattaagtttgattgggaaaatttacttacaatatatttaaatttatcttatcatataaatagcaagtgttcgagacaatntataaaaataactaacgatatgtttataaattatttttaacttagttcaataaatttttaaaaattgattatagcttataattaacttatttaaaaatagttcaagtctttggtgaacttggagtatcttctaatcatagagaataatttttcgaaatactttaacatttttttacatatattccttcatatatatagaattagagatccaatttttactacatattaagaggataataatngtctatatactctat

SEQ ID NO: 256091 - DNA, 434 bp, Glycine max
agcttggggtgtcactagatgactcaaatattaatcctgggtgtatagttaacatgaaccactacccaccatttccaaatccagagctcacagtaggtgtaggccgccactcagacttcgaaaccattacattgtgtatatacacggtaaaggagattgggatagtttgcaaaatgggctgtgtaagactaacagggacccataccatgtggagatgaggaaatgtgaaaatgacgaacaggaggcaacatgtagccatacaaaggggagtgcaaatgataacatgactaggggtactcataataggcttggcccaatcactatattagaaaagctaagggagatagtgataagtaaggaggtggtgctatgagtagattggattagggcttggtatgactagagtggttacaagccttgccaaatgcaatgct

SEQ ID NO: 256092 - DNA, 368 bp, Glycine max
  unsure (1)..(368): unsure at all n locations
gtagtgcacgatatgcttctagatgaaaatacattgctanaatgttactatcaggccaagaagataccgtgtctgatgggtatgaagtatcataagattcatgctttccctaatgccctaggtgtggggtatcatggtacaaagtgaaggatgatgctgagtgtattattgacgaaaactcaaacaaggccccccaacgaaggtgttgtggtatcttcccatcattccaaggtttaagcatctatttgctaatggagacgatacaaaagaccttacatggcatgaaaatgggagaaactacgatggaatgctccgtcatccggctgattcggcatagtggaagaagatngatcatttgtatccgtatt

SEQ ID NO: 256093 - DNA, 379 bp, Glycine max
agcatgcagccgttgcttaaaaagagaacttttataataacatctgcaccaccaatgaaacatacgggccttattaaaatcaaagcttaaatcttattaaatactcaataaataattaatcgaagtacgaatcctaaataaatttctcgtggattggatcccttaaatattaaacttgtcccgaactaagatcgaaaaacgcgtcacatctcatacggtagatattaggccgaactgactgtcgagatgataacatattaacactcaattactcaacattaaacttttgacatattagggactcacatatataacaaaattattcgagacccaagcaaaaattgttcattccattatgaggacattacagatatttaaa

SEQ ID NO: 256094 - DNA, 421 bp, Glycine max
agcttatccttatggcctgcctccggacttctttccccgtgccaccccggaagatttaagccaagcccctactttcaaggggcaactcccaccttatgaagactatcccgggcaagacgatggggaaggagatacccatcttggccccctgctccacctcaaagatccgtccccgcatgaactaccccaactgaacatagtccgccatatcccggcctcacccacacccgtaaaagaatctgttcccttcgcggaagataagggaaagattgagacgctcgaagagaggttaagagcagtcgagggccttggcaattacccattctcggatttagcggatttatgtctcgtgcccaacatcgtcatccctcccaagttcaaagtaccggactttgataagtacaaagggacgacatgtccg

SEQ ID NO: 256095 - DNA, 317 bp, Glycine max
  unsure (1)..(317): unsure at all n locations
tatcatgaaactacnctaaaccaagaaaacagggtagaggcagaanactctaccccaaacacattcaaattccacagctttccttactcatataccccaataacattctcttcgtcccattcgttatccgttggatcgccttgaaagttttactggagggtcctagtacataaaattacattttggccgctgggatctgctaaaaacgggctggaacccgaaatgtactactcttcccatgactagcaatgcacaagcattttctgcacatgttgaaaaattttgttgcacaattcaaaagcatttttctgcataat

SEQ ID NO: 256096 - DNA, 456 bp, Glycine max
gcgaccttaagtcacctgcggcatgcaagcttgcagcaaacacaatgtctggtcttgttgttgacagataaaacaaactaccaattatacttctataaacagaatcatctgctttatcaacaccatcattcattgataacttttcattcacaacatttagagtggcaacaggcttatcgggtaaaggagctggattgcttccattttccactgtttcccacagactttgagctctcaaataagttctcatcttggcagcccacatatcataatgctctcttgcaagcactggaggtggaggtaaggattcactattggaagccattggttgaaggttttttgagtgaggttttcttgctggttttctcttacacactcaaactgcttttcagattatctttctctctctcacacaaacccttaaagatcattgaagctcttgataccgtgttaaag

SEQ ID NO: 256097 - DNA, 342 bp, Glycine max
  unsure (1)..(342): unsure at all n locations
aatggatgagtagganagaagtccatgatatgctaattgaagagtttcaaggttgtttatatttaccacttcatctaactatgatccttctaatgtcgtgtctgcgattagacagaagttggctctatcttcctcttttgcttcttcaacggacaatgtgtgacaccctctacccctcacatatatactaacaaaggaataaaaattcaaatattaattaaaagtatttttttaaaaacattnttaaatacaagccttccaaagggataaaaggttcacaatcactttcttttacatcatattcaaacttgtccaaataaataataaagtcatctgctcgaa

SEQ ID NO: 256098 - DNA, 422 bp, Glycine max
agcttcctgtaaaaaaataatctgatttctttcttgtgtattagaattccttgttcaaacttgggacataatttatttattttgcgagttacgtattaggttagacagctttaaataagattgatcatttaaggaataatctaacatactcttctctctattaaaaatactaaattaataagacgatagacatatatataacaatgaattaaacattgtaaatgtaatatatatataatctatttacatataagataaatgttaacaatatttttctgatatatttatattttgttaaagggtgatttatggacaataattaagggtgtttgcgtagtccatttattgctttcattttagtaaaaacagaaaatgtatttgaaaatgtgtttgtttaaattttaaaatattttaagaaaaga

SEQ ID NO: 256099 - DNA, 208 bp, Glycine max
  unsure (1)..(208): unsure at all n locations
aggagacaatgcctcatgaaaacagcgacaccgggcgtcgtaagaagcaacattatcacaaagttgacacgggaaggtcaagcgccattcatgccgcgagagccatataatacgaacaatctcgattatgacagcaatgctagctcgctcagcattgaacntgattaaggggagagaccacagaacaatcctgccactagatccctat

SEQ ID NO: 256100 - DNA, 425 bp, Glycine max
  unsure (1)..(425): unsure at all n locations
agctntgactngagtcatcaagagattattaatatgtgaccatgacatgaatttcaacaatcatcaatcagctntgaatcatctatctttcaatctatctttcaatatcttctttcatctctttaaactctttctacaaaattttctgattcatttttcctcatctatctaaaagtttttgttcaaatactttctctttcaagaaaagttctttgatcaaaaacttgtgctagtcatctttttcattctcttctccctttgccaaaagaacgaatgactaaccgcctgaattcattagtgtctcccttctccctttccaagagaattcaaaggaccccacctgagaattcttttaattcttccatttctcttaagcaaaatatttcaaaggactaacaacttgagatatcttttgtttcccctta

SEQ ID NO: 256101 - DNA, 431 bp, Glycine max
  unsure (1)..(431): unsure at all n locations
tcaanatagaaaactaactgatcgacgaacgatgaagaactatcacagaatcgaccacagaatcgttacggaagcgcctcggccttgatttttcttcttctttctccttcttctcactaatttcactcaaatcttgttgatttcaggtgttggacccttccttcagcccccctcacgcctatttataggaaatgaggggtggaggttgcacagcagttcgccctggcaagctggttgcttcatccctaagctttctagtgggcccaggggctggaaaatgttcccaaagtgaccattttggccctcttttgaacatcttgcacattntcatccgaaacatcacaaaaccctatggattgcgcgacaattagtgttaagcagctcaatttggccggaagaatcccaatgtgaccacnatcatcccagacaaa

SEQ ID NO: 256102 - DNA, 428 bp, Glycine max
  unsure (1)..(428): unsure at all n locations
agctntgcttctatagatgcaggctctgctttatagacaaggaatgctctaagctctgagcagganaacctgtaagaactggagatgctggtgctggagggagatgagagatagaaagagctaatgtagatggggcctcagatcttctagccttggatttctgggttcccaaaaagtgaccaaagggccatccaagttccagtgattctttttaataaagccaaattaatggctgggctcagagattcaaaggtcagagaatcagatgagactcctcgagccttgcataaggcagttatcaaggctggaaaacatagcctcgaggagtcgtgctgagctataagagagatctgacctgacatgaggggccccaagttcatatccctctgcattacaagcccgtagattaacatagccctatccaaagt

SEQ ID NO: 256103 - DNA, 406 bp, Glycine max
tggacgaataaggtgatgcatctatgaaacacaacaactaacaagtatgaaaattgtaaatatatattggttttagggtttacacacgaatggataaaaataattgtttgtgttttacaaatgcagggttaagtttgcacattgggccttaaagagactactaccgaatagccttggagacctatgtagtgtttgagaagccatgaacaatatgatcactctacaacatattgaaattaaggcatcgtttgagacaactacacatgtggttgggcatgtgtttaaagttaccttatacaagaaactatttggcatggtatcaggtatgtgtacaccaaattgttgctgatttgagcatgtaaatatgctacattgatagtctcatataatatatatgaaactacta

SEQ ID NO: 256104 - DNA, 399 bp, Glycine max
  unsure (1)..(399): unsure at all n locations
gatcctatagaacgaccagaggcatgcaagctcgctataagcattttactgtgtttctcctgataatncactccaagggcgaaccgctctttacttcgatttgcgtgctttccaaaaccaaatttttaaggcaattatcttaagatgattttcatgcatcaaaggttaacgaacatgtttgacccttgtctccgcttatcaaaaacgcggaaatgtattttataaaactaaatgcacaggaacaatataatgtgctgagatgatattattgttgcgtcaatacaatagggaaaccgtatctgttcacatatctagttcgtaacaatagagacgagacaaggcttggggcatncacacgaggcataaataccaaaaagggtcacttttacattttatata

SEQ ID NO: 256105 - DNA, 201 bp, Glycine max
aacacgagcgaccagacaggagattttttcagaatcgagctcagacttctcggaccacctagaacccacaaggccacggaggaaaagggaccggaaaaccaaaaacccgagaataaacctaaaaggtgggaaagcatgaggaacactgcaacaacatgcagccgaaggactaaaggtggcgggggcgacaaaattgggagg

SEQ ID NO: 256106 - DNA, 425 bp, Glycine max
  unsure (1)..(425): unsure at all n locations
agcttggaaagcttctatggacgcccaactatgaaccacctgtgtaaggaaggatgacattttatttccttgggtggaaagaattcatcccattttctcacaaagacagatgagaaaaaagaagtaatgatggatagcactttgcttgcacgcctttcgtagaacttggaggtcttcttgaaaataaaagtatactcatcactgaacccgtatgcaaggattatatctgcatactcttcaagaacttcaacagcacaagagttcatcaatttcaaggcatttgaatcatgaggtttatgaagtttactagccttgatccaaacaaggatgatattgggaaacatggcttcatcctcaacttcaaaacacttgacatactcatatttggtggttgccatactgcatgcaaanatttacacatgtat

SEQ ID NO: 256107 - DNA, 400 bp, Glycine max
  unsure (1)..(400): unsure at all n locations
tatcatacacaataatttataagttatgacagtacanataccctctacactatnggtgcgtattcgaattgnntctaatttattctacataatctcattctttccattctgcttcagctatttcatgacacctgcaagtttggattggaccttcttaaggatatttattatgccctgcagttgggccagaaagcaccccaacatgcacctacatcttccgattcccatgaaaccccaccttcaagtatttgatctctagcactacgactgagagagtaataaaagcttcattaatgctcaatgcagcccctgagcgcttctacaaactctctttacgattccaacccagatttatcatctctcgttcaaccttccacgtccacatgtcacccacaatgat

SEQ ID NO: 256108 - DNA, 406 bp, Glycine max
agctttagcattcaacataaactatccaaccattaactttctaaggggggttatgtatctaattcatccaccttgtgctccataccttgatgacctaaaatacggcacacttgtcacttcgggggtgcttattcgaccattcattctctatttaattttcatgcgaatggataactttgactacaaggcaatttttgttacttttagatttatcataaacttttgtggcctctaaagttccctaatcgtttgtcaaggtatcactagctagtactgccatgatgaaacattagacttcaatacaactcttgaactttcaactctcttgtttccacgtgaacaattacatgctattcttaaatttcatcatggctgtgctgacatttatggaatggtttagtaatgg

SEQ ID NO: 256109 - DNA, 456 bp, Glycine max
  unsure (1)..(456): unsure at all n locations
ttaaccataataagttcaactacaatgtcctcaacaatttctcattgttgtttctgtcttgtaccatttgagtttgcaatataattgttccttccaacaacactccactgtccaaatataaactacaatatcatcaactgaagacaacaggaagatggaaaaccatagatttataagcaagtctgattcagcaaaaagccaggagcaacatatagcgtattagacaacaaaaagtccatcttgatgttcaacatagtgtccatgcaagtttcaatccagcttcatcccatactgaagatgattataaccaaccaaagacaccaccttcatagtgtcatgcaactgccaatcgggctccacacgatgctgaagatcattgtgcgttatcaaagttaacaattttatatctttacattcagctcatatcagtanataatggtaatacaatatccatat

SEQ ID NO: 256110 - DNA, 429 bp, Glycine max
  unsure (1)..(429): unsure at all n locations
agcttctaaggaggtgagcttagttatgagaggggtgtgtgtanctaagctctagcttcccaaggaagttttctcaaagaagcttctcaaggaagttttctaaataaagcttctcaaggaagctacctagtctataaatagaagcatgtgtaacatttattgtaactttgatgaatgagagtcttgtgagacatacttcaaagttccacttctctccctcttttattccttcaatttcgtgctcccccctctcactttctctccctctttctttttctccattgaagcatccttccaagcttcttttccaaggctcatcatggtggtgaagcaccttcttccatggcttattacctagtggatggcacctcctttcaccttttctcctttgtctttcgctgcatctccatggtggaaaatcaccattaa

SEQ ID NO: 256111 - DNA, 373 bp, Glycine max
  unsure (1)..(373): unsure at all n locations
aagattcctaaagaagctagagcttagctacacatacctctctaatagctaagctcacctccttgagatgagaagctagagcttagctacacaccccctataatagctaagctcacccccatgacaaaaaacatgaaaatacaaaaaaaaattccttactacaaagactactcanaatgccccgaaatacaaggctaaaaccctattctactagaatggccaaaatacaaggcccaaacgaagaaaaaacctattctaatatttacaaagataagcgtgctcatgcttagcccatgggctcgaaatctaccctaaggttcatgagaaccctagggccttcccttggatctatagcccaatctacttggagtct

SEQ ID NO: 256112 - DNA, 446 bp, Glycine max
agtcacctgccgcatgcagcttgtctcaatattcataacctatttgtatctattcacataaatatcggtaaccatatattgtaatgaatattcattatgagttaataaatcaatcacctactaaactgaatttacttacatcatacatagatgtagtatagatatgttcaaacatttgtcacctaaaataatttcagttacatctgcatgtgcgatgaaaagaccttctttcacattaggtatctcaaattttgacccatcccatgacaactcaattggcttttggtaaacatcaaacaagtttgatcgaggccgtacccgaatcaaataaacattaaaatgtagtaactaggaagtgatcctaggtcgtttcccaacgagcagtgacaagccaaatgttcataatatacttgcagtaacagtaacagtaacgatggggggggggg

SEQ ID NO: 256113 - DNA, 448 bp, Glycine max
  unsure (1)..(448): unsure at all n locations
tagagaggaaccttcatggaggaaaagaatgagagagttatagagaggcttggaaattgaaggagaatagggagagaagttgaactttgaagtgtgtctcacaagtttctcattcatcaaagttatgacaagtgttacacatgtttttatttatagcttaacacatgggaagctttctttgaaagcaatgaagataagttccttgagaagctagaggggggctactcacacccctcaaatatgtaagctcacccccatgccaaaatatatgaaaattcaatgggaagcttccttgggaagcaaggaagaaagcttccttgagaagctagagggaggctactcacacccctccaatagctaagctcaccccctgccaatatacatgagaatacacagaanatttctactacatgactactcaaaagcactaaatacaaggtaaacccta

SEQ ID NO: 256114 - DNA, 423 bp, Glycine max
agcttctacaaatattataagggggaggatttttcctttgacacgccgtggagaaaaagtcaatttaatgcaaattatgtctccaaaaacaagaccctgatagatggctatttaaaaatatatgaacgcctatgcggtgcgaagaaggtacataacatatctcttatacttccttctatacactaccatttgatacgattcttggaaatattggtaggggtgacactccatttataggcagagatctacctcattatggcattacagaaccaagttaaaactccaaatctgattaaaaaatgatgcttaagaaattgcaagttatgcctctatctatatttatatttactttaatacatggagcggggcacaggccagattctatcgacgggtctaattggaatcaagctcgtcacaccgcca

SEQ ID NO: 256115 - DNA, 357 bp, Glycine max
  unsure (1)..(357): unsure at all n locations
tgacaccacaaataaatgagtacgtatatatttttcanttatatgatactcactttattctttgttaacgaaggatatatatatatcttcactttctagagaagaacaaaatgttgaatttgcaacatgacatggatcacgggtttgttttgctgacactgtggaataaaaagtattngatcacttgactggattaacttgtattctataaagaataaagtactgcatgtgcatgcacagatgcatatattaagccgaccatcatactcattggaccgctgttacggcaatatatttgttcaataaaacaagatcatcttttctgtgtaatagggatcatctgagaattttatttga

SEQ ID NO: 256116 - DNA, 452 bp, Glycine max
  unsure (1)..(452): unsure at all n locations
cccgcgacctttagtcacctgcggcatgcaagctntaatcccaaagtccacgaacttatctgtatccactttanttgaaggtgatgagaatgaagtngtgcattttgctttgccaacaggcaacccaagcccaggagaccattcctatcaaacaatcactcattcactcacataccccaaaaacctaatttggagttcgtttcttctcctttgagcactcacagtcgtcgcccctcctccttcttccccgcgagtcacgattgcatgtctggtgaccctgtccaaagaacttacttctcctttgagcacacacagtcgtcgccccccctttctcccccgcgagtcacgactgcaagtctggtgaccatgtccaaagaacttacttccccgcgagccgtgcctccctatgtcgcacctcctcccccgtgagtcatgcctccctttgccacgcc

SEQ ID NO: 256117 - DNA, 316 bp, Glycine max
  unsure (1)..(316): unsure at all n locations
aaccgatcgtttaagtcgntatctcgcctaataaatgattatatgaatttcaaccgaccattcgtgttgtaatgtcgtntaatcactgttaaagcaaaatctaaccgattgttcacactataacctcagttaaataaaaaaaaggcaaaataataataaaataatcaaaatatcttgaaaaanaaataaaatcaaaaatcaaaacaatcaatcggacatttttctttgaaagtttccttgaatgaattgactaataaccaaagtgaaactaaggctaaaatcaactcacaaaccaagctttgtccgtaaaagtcac

SEQ ID NO: 256118 - DNA, 414 bp, Glycine max
  unsure (1)..(414): unsure at all n locations
tgcaagctntaaagtatgatggtgcttgctcttgcttcttagctagtnggtatctgtatggtttgatacacatcaaaactccatggagaagagtttaagaaatacctagatccatggatgtcgatcaaacaaacacagttggtttccttcacaactttgcatgaaaggttttttatgtgagacccacaccgtttttaaagatttctttggtatttcaatccgatcagattatggaagtttaatataacttaagttcccatttctctttctttctcttcatttcattgatattttgacttcaccaaatagatcctttgagtgttaaatatttcattgtgattcattttagaacacgttcttgatatatcattgctattgcattgccatgaccttacttntttctatgagttaatt

SEQ ID NO: 256119 - DNA, 205 bp, Glycine max
ggcagaactgggctctggggtctattgccaacaacttgacatcccaccaaccgggctagtcagtcatggaacctggatgtactaacaggcgagctcctggtagtccaccgataaatgaacccagaccacaaagcaggaggcttgcgtggtggctggccagctctggatcttgagtgataattgacatatggcctctggtaatcga

SEQ ID NO: 256120 - DNA, 445 bp, Glycine max
gatccttaagtcaccgcggctgcagcttccgtgttaatttcagcgtcttttatattatctgcccgaatcggtcttctgtgtgaaaagttaggaccattcgaatctctggacagctttcgttgttcaatttcgagcgtctcgatatattatgtccccgaatcagacatctgggtgaaaagctatgaccattcaaatttctcgagagcttctgttgttcaatttctagcgtctcgatatattatgtcttcgaatcagacatccgagtgaaatgttatgaccattcaaatttgccgagagctttcattgttcaatttcgaacgtctagatgagttatgcgaccgaatcggacacccgggtgaaacgttatgaccattcgaatttgccgagagcttctgttgttcaattccgagcgtctcgatattttatgtccccgaattgaacttcc

SEQ ID NO: 256121 - DNA, 470 bp, Glycine max
  unsure (1)..(470): unsure at all n locations
ttcaatgttcttaagaaaaagctaacttatgcccccattcttgcgttgccaaactttcaaaaatcttttgaaattgagtgtgatgcttcaaatgttgggattggggctgtgttgatgcaagaaggccatccaattgcttattttagtgaaaagttaagtggtcctacccttaactattcaacttatgataaggagttgtatgccttagtacgggctttgaaaacatggcaacactacctttatcccaaggaatttgtcattcatagtgaccatgagtccctcaaatatatcaaggggcaaggaaagcttaacaaaaggcatgcgaagtgggtggaattcctagagcaattcccttatgttatcaaacataaaaagggaaaaggtaatattgtagccgatgctctttctccgcgtcatgcattactttctatgctttgaacaaattgattgtcttgatgtntgaaaacatg

SEQ ID NO: 256122 - DNA, 427 bp, Glycine max
agcttactggtaatcgattacaggatgttgttatttattacaggctgctcgttcatgtgtaatcgattacaccggatggtaatcgattaccagagcctatcctaggctagtttcttaagagaatatctatgtttatgctaaaatacattctatatgataaattttcactactaatacactaaattcaatcattcaattatcatatacacaagaaatcataaattctatcataaaaacaagaattcaaccaagatcaaacaaacaaaataatctacaaacaataaataagagtaaatcaatcaatcaatcaatcaaccaatcaatccctatttttctaaatctcttacatctaagagacctaattctcttctaatagagaagaacacttccttggggagaggtttagtgaaaatatcagcaagttgat

SEQ ID NO: 256123 - DNA, 453 bp, Glycine max
  unsure (1)..(453): unsure at all n locations
ctgtgcttagagagagcttagactcttctttggttntnttgactaaaacaaaattgattctcatcaaggaagctattcctttatggagaatcctccttcggcttatcgattctttgtggattatggcgtcgttctgttcatattcttcatcttatccatattttctatttttctgttcttgagttctccgaaggtcaacaatggtggttcttgaatntgcatccggaatgattcaaaccaagtgtccatggcttggattgcatcacatggtatcagagcttgaattcggagagcaattacaaaatatatcctcaattaggtgcagtttatcattnntcattttgagtcttttcagaaaaatgagaaactaattttggtttgattcttggttaattgtgtgtttctgtgtgttttgagtaatcttgatgtgcctttgatttcctatcttttgtg

SEQ ID NO: 256124 - DNA, 429 bp, Glycine max
agcttgggttcctaggcctagaattgctttcttgcactcattctaaatccttcacgctgtccctatatatataaaacagtcccacaatcccaagcttaccaaaccatgctcatatgtcattgaggcattccacggagcatttggtgggcacatgtttaggcatgaatagcaagagagtgggggcaatgtatcatgccccattgcttcaagatgaaacataggcctaaggccgtcccctacaacctctcaattcaaaccaatcaagcatgaaaacaaaccaaaaattgccccacaaatttgagcatattcccacaatttatagcaccaaaagaagaccaaaatacaccaatggaaagctagaaagctcaaggatgggatacttactctgtggagtgagtaggagtaccaacaatgaaagcaaaatgcaac

SEQ ID NO: 256125 - DNA, 373 bp, Glycine max
actcagctaatgatcaagttacaaactcgatattgtgtcattttataactcgaagataaattattcaacaaacttaaataaaataatttgaagaacagaatgagcccaagagtttatactcaagatataactttgggactcaagaacaaattaaggcccatttttttttatgagatttcgtatttatatattactgatgataagaacacagaaacaagacagatcactttaaagattttagacttagaaattgatttatttttcttttagagaagaataatgatgtctcactcaagacatatgtgagaaggtaagtgataagtcatatgtttgatcatcactagttgccttgataagaataaatttaattctt

SEQ ID NO: 256126 - DNA, 448 bp, Glycine max
taagtcacctgcggcatgcaagcttgtgcaaatcaaatcactcctacatttcatctctagcatgcattttctttctttacccactcctcacgtttggttttttagggaaaacaccataactaaacgcgccgcaagggatccctatcgcaccagatccaaatctagaacgatgggtgatcaagaggagacacaggaacagatgaaagccgacatgtcggctctgaaggaacaaatggcctccatgatggaggccatgttaggtatgaagcagctcatggagaagaacgcggccactgccgccgctgtcagttcggctgccgaagcagacccgactctcttggcaactacgcaccatcctcccccaaacatagtaggacggggaagggacccactggggcacgatggcagccctcacctgggatacaaccgagcggcttacccttatgga

SEQ ID NO: 256127 - DNA, 405 bp, Glycine max
  unsure (1)..(405): unsure at all n locations
ctgagcaaatttaaacgataaaaactgtatactcggatatccgattgagtcctgtgatatatcgagacgttcgaaattgaattcgtaagctcctagcaaattcaaaccacaataactntttaccgaaatgtctgattgagtcacataatatatcgagacgctcgaaattgaaaacagaagctccttataaaactcaaaaaccaataactttttactcggatgtctgattgagtcctgtgatataccaagacgctcaaaattgaatacaaaagctccttgataatgcaaaccagaataactntttactcggatgttcgattctgtgcctaaatatatcgggacgcttggaattgaaattggagctctgagctaatcaaacgatataacttttactctgatatccat

SEQ ID NO: 256128 - DNA, 420 bp, Glycine max
gcttgatgagaaagatgctgaaattttatcttgtcaagggttgatgactacaacaatggagtatttatgtgaattcgggttctgaagaactgtcgcctaaacatacacttttaaaggatcaaattgcattgtctatagaacttggtaaaatttttcttggactcaaaaggatgttggttactatcaagtgacactttgcatgccaattttgcttgatgaatacttacttttttagtaaaacagtaatcttgtgttaggaataaacttagtatagcgacactctatttatggttaaattattagtgcatagttctatgttgctctaagcattattggaattgcttacaaattggttgaaagggacttatcttgctaattaatgaagatggaagctaacatggtgacttctttcttgcttgc

SEQ ID NO: 256129 - DNA, 425 bp, Glycine max
  unsure (1)..(425): unsure at all n locations
gcggctgcagcttcgaacatttcacgctgatgtcttttcttatatactctacagnttaccagggaccatattaatagtggctagtggggtctctgagtgcaatagttaccgttgactactcttttatgtgctcatcgatctacttatagggcccgacacatacgtttgcaaacgtatttaatagcatgatgttagtttggctgttaataatgtatgtgcatcttctctataccacaagtgagcaatgatatatatactacccctaatccttgaacttagctgatagtgttgcttaatgtttccttcgcgggatgcggttgggcttgttagcacatccaactcaacagcgaaaaaaaaaaaacaatttaaaaactttgtattaatttttaaagaaatttagtaacatattggctaacatgtttttt

SEQ ID NO: 256130 - DNA, 324 bp, Glycine max
  unsure (1)..(324): unsure at all n locations
aatggtcgactaacatggatacgattcctttctcgatatgcctctctgtgtacagaaactatgatgggataaagagtactttactccttctaaaaaaagtgtactttacttattaatatataataaaagacaacacttgcgatattaatcttatatactactaatactagtggtataatagacaggaaaaagttaaccacgatgattggatttctgatatagaaagttacatcggcttaaatgcattcttttgaatgtacactatcacaaaatcaattggngacttaattaattcttagacaaatttcaagtatatatgtaccc

SEQ ID NO: 256131 - DNA, 417 bp, Glycine max
atgcaagctcccaatatatagagaaatctgtttttagctcttgggacaacaccagcattgctcgaaaattcgccattctatactccgcaatatgttaagatatagaataaaaaatgcaagaccctcttatagttctatcgatatgtaaaatatgtctgcaatatgataaactgttaaccaaatgaaacttaatctgccctttataaattgcagagcccatctaccaaggtgtaatttgtttttcccatttcaaatgaatcaaagacaatattcaattagtcgagcaacttcatttaattaatttctacaaaaacatctaattaagataaccatacgttacaatactttcggtttcaagctgggcttgggagttatggactatgctaacaagcaaataatgtaggtcaattcattaca

SEQ ID NO: 256132 - DNA, 427 bp, Glycine max
agctttgagatgactcaattcatcccacttatccttttcccagcttggtcacatggggcatagacattgacaatatgcaaccactggttttcttttacccatttgcctaccaacattagaaagtgcctacccttaaccctcctttcaacctggaaatcagagttactccacatgcacagcaagccacctgaagcttggattgaaggaacaaagtcccaagatacagaggagtctccccacatggattgacaaataagcttgtcaaaagagtccttttttgtctcttgaatacagacaaggtccaccttttgtttcatgataatcctcctaatggcagtccacttaacttccctgcccagtcctcttgagttgtaggacagaataatcatggttgaactattttaatacccatctcagttgcaagctt

SEQ ID NO: 256133 - DNA, 461 bp, Glycine max
  unsure (1)..(461): unsure at all n locations
tnctcattctcctnctcctnctggcccgagtggtcctcatttctctnccacatctcctccgccggctacctcccttccctccccgaccaaaccttcaccgccgccgccgaacggctctcctactccttcctccgcgacgccaccgccttcctggccttcgcccgcgaccgacctaaccttctcaggtttctttctttttctcaatttcaatctgagcttgttgaattcgatgctgaattgagttgaattgaattgaaattgaatggtggtaggttgctttctacgagagacattgcagcggtggttgagcacggctccccctttctcttccgcgacgccgacgactccgtcaggaagatgaagtcctttctctccaacggtgacgccaatgttagtgtcactgtgccttctgcttagtnttctcttttgggttctcactagttggagttgaattcactatg

SEQ ID NO: 256134 - DNA, 424 bp, Glycine max
cactgagctgcaacttagttaagtaactttgcacaaaaatgttttaaacctcatcatatagaagcaggactaaatttgcatccactgttttgaatttttaaataataataatagagatcattgagccaaacactcccaagcagctacatgaatcaacatagacatcacatgtccaaactcccgatagtttaaaatactaaagaacaaggagccaaaccacttgtcatgtagtttctcactattttgcatcctccccttgtgtcttaacataccatcagcaatattataaaggcattaaagacgtcacaatatttcacacacagaagcatgggaagaacccatagaggtgcccatacgtggggcgacattttcaacttttgcacatgaacacttcaccgcaactgatattatttcaggaaaaaaa

SEQ ID NO: 256135 - DNA, 382 bp, Glycine max
tgagtgaaatgggggaggagatggatggtattttgaggctctgccgcctatggggggcattcggttctaagcctaaactaccacctgtctactggtcggaagcctctgtgatgttgaacctatgatgtaacaaccaacacggttatgcatgcatcttgatcggcaccacattctgcgccatatatccacaagttaatgtctgttctaacacagtaccactgaatgtggaaagctacgctataatgggaagcatgtcggggtgcaaactgataaaatacggattggggccaaactacttacacgtgaagtggcaatcacactcaaattcagttaagatctatgtcatctctagcattgtgggggatgaaaagagcgtgtacat

SEQ ID NO: 256136 - DNA, 302 bp, Glycine max
ttaccacatgtttctacaatatgatcaaatggtgaaattatgtcgaatggaagcacgagaaatggaagcaatccaggctttttcaataattatgatgcttacatcacacaagaatggaataaaaactctttcagctagcacatagcaaactacccctttacagatccatatctttgcccacccccacaatgccactcctcctagctacagaaaatacataaaggccccctaaccctcacatggtcatatactaaaaccagcaacactgctgcaattgccacacttgactggctctgaatact

SEQ ID NO: 256137 - DNA, 287 bp, Glycine max
tgtgatttctgtcttgatcattgtagcccccctttactctatcactatcacagcgcatatatttttgtcctacaactttaccccactttctctgcttttcaattttactccttcttccggctttcattctcattatcttcacattcctcctttctctctctttcattattgagagagagttcttctctccagacctcttaatcctatggctctgcattttcttctcctcctgctttttgcagtgtcttttgttgctgctgatgaaggttagtgacttgacactttta

SEQ ID NO: 256138 - DNA, 432 bp, Glycine max
agcttttgcaagctggaatcatttatcctatctccgacagccaatgggtgagtcccgtccaggtagtcccgaaaaagactggcctcacagtgatcagaaatgagaaggaggagctgattcctactcgggtgcagaacagttggagagtctgcattgactataggaggctgaaccaggttaccaaaaaggaccattttcccctgccattcattgaccagatccttgaacgcctggcaggtaaatcccactactgtttccttgatggtttttctggttatatgcaaattactattgctcctgaggatcaggaaaataccacattcacctgccccttcggcacttttgcttataggaggatgcctttcggcctgtgcaatgcccctggtaccttccagcggtgcatgattagtattttcagtgaatttttagaaa

SEQ ID NO: 256139 - DNA, 349 bp, Glycine max
  unsure (1)..(349): unsure at all n locations
nntacagttgaacaaaagaggagaatacattagttaaagccttactagagagtttttaatctcttgaagaaactttaaagagctaagttagcttgttgacgtatctcatgactctagaagagccttacaaagggaaactctttgattgtcgaaaagaaattaactttatgaattaaattcattttcggatcttttcctgcttgaaacgaaacattntggtgttttcttcttgcaggttttccacccactctcttattttcagatctcctttccttcttctcatcattcaaaacttgccacaataaccaaaacgaaatgcataagcaaagagaanaagaaattggaactc

SEQ ID NO: 256140 - DNA, 422 bp, Glycine max
  unsure (1)..(422): unsure at all n locations
cgggatcttaagtcacctgcggcatgcaagcttgtgctcaacctggtaatgaaaacatgtcacatagatgtactaagagctacttgccttcctcttnttatgtttcttccagtatattttgtgaatataatacatttgacttccttaaaatgtatttatgctagtttcaataacatgtgtggaaaatctgggaatagtagctttattagttaatatttattgtacatacaacatactgtatccttgttctatgcacttgatatgtttagggccctaagattaaggtgtattgtggggagaaacatgggaaggtagctgaggatttgattccctagagtgaaaagtgtaaccttatgtattattcagtgcacacatgacatcaaggagccgtaaattctaggagagattaactatggagagga

SEQ ID NO: 256141 - DNA, 370 bp, Glycine max
  unsure (1)..(370): unsure at all n locations
gctacccttgaaacataaatggcatacaaccnccttcaataaatacaaacatcaatggtaatttaaagcaagcttatgcgcatacttctttacgaacgttcacttgcacaagacattcttataactaagaaaaatgcacccatatacaatcaaggcaccttcgttacctagattatttacatgtacttccaaggtgtattcgttacctacatcacacacattttctttgctaaattcacatacatgcatactctaagcacttcggctatcananatgcatacgtgcacatcttggtatttctaatacctatacatacacaaacttcatgatgagtcttgactatctacacaataaggtgctacatttcat

SEQ ID NO: 256142 - DNA, 414 bp, Glycine max
gcttgactagtgtcaaggaagaacatggaatcgctctatgttcctcactgaatgagatgacaaacttggagaaactacgcattgaaacaactgcaggtggagtcattgatttacctattatttcacctctgccgatgcttcagaagcttcgcctggatgggaagttaaaaaagtttccagagtgggttccacaactccaaagtcttgtaaaattatctttgagatcctcccagttaaccattgatccattgaaatcactacaaaatatgccacatttgttattcctcgaaatgttggatgcttatgaaggtgaaagtttgtattttgaaaatggaggatttcatcaattaaaggaactatctctcggattcttccctaacttgaaatccatcattatagataaaggagcactgt

SEQ ID NO: 256143 - DNA, 364 bp, Glycine max
  unsure (1)..(364): unsure at all n locations
ntgaaggtgcgtagtccaccattntttctagtagaatactggtaatgtgtctactatcattgtcatcgtgttttttttcgtcattgaggtgccacttgagctgccaagttctccacctttgggcgtattctttgaaagatccgtgccccttttttttgcacatattttgtagttgcatcctatctgaagccattataccgacacagcctaacgaagacaaccattaggtccttccaagaatggactcgggaaggttccaagttagtgtaccaggtaacagctaccccaataagactttcttggaaggaatgtatcagcaattcctcattttttgtgtatgcccccatctttcgacaatacatct

SEQ ID NO: 256144 - DNA, 407 bp, Glycine max
gtgatgttgcgcgtactgatgggtaccatgaggtgtttgctggggtttgacccatgcgggtgttgaagagacggcatgggcatctccttccttcctttttgcccctgttgccccgattcttttggcgttcacgtttgtggaggaaacgtaatcaaactttcctctcttcaatccaacctcgattctttccccggcaaacaccagatccgcaaagctggacggcatgtaacccactagcttctcatagtaaaacactggcagagggtctaccatcatggtgatcatctttctctcaaccatgggaggagctacttgtgccgccaaatccctccatcgctgcgcatattctttaaaggtttcaccctctcttttaaacatattctgcagttgagtacggtcaggagcca

SEQ ID NO: 256145 - DNA, 334 bp, Glycine max
  unsure (1)..(334): unsure at all n locations
gaatgtactagttccgcttcggagtacgacagtcaccgctttaggagcgctgtacaccagcagcgcttcgaagccattaagggatggtcgtttctccgggagcgacgcgtccagctcagggacgacgagtatactgattttatgaagaaatanggcgccggcggtgggcaccactggttactcctatggccaagtctgatccagaaatagtccttgtaatttatgccaatgcttggccaacagaggagggcgtgcgtgatatgagatcctgggttaggggtcagtggatcccgatcgatgccgacgctatcagccaactcctgagatatccgat

SEQ ID NO: 256146 - DNA, 386 bp, Glycine max
gatctcattgcgaactcgcactgtgaattgtaattaaatttctaaccgcctacaaaccaccattattagtccaaacacaaaacttaaataattttttcatactcgaaatatacacacggtatcatattgtgtcatggatatataattactatgtcatcacctctaaatgaacgtaagacaaaaaataaatttatagacagtaacatgaaaataacatttttccggatatcaaaattttatataagtcaatccaaaaaataattttttagttaacaaatgataaggaggagttgtatcacaataaataatgtaatttcaaataaaacaataaataataggatttattactttattcgaaatacaagcaaaatggtaatattaattta

SEQ ID NO: 256147 - DNA, 237 bp, Glycine max
aaaccaacccatttattacatttatggacacggggccctcggggacaaggctaaggacacctactactaactatatacaagacaaacactatttctttttacacgaaaaaaagaacataatccaagcaaaatgctacacgtatcaagtgcttacatgttctcccgcgagaattcataacggtatcaactacatatcaacaaaaaaaaaatgctccctaaaaggaaagcaatatgcgg

SEQ ID NO: 256148 - DNA, 363 bp, Glycine max
  unsure (1)..(363): unsure at all n locations
cagcttagtcttcatgttgctccccctatctcttaccatttccccctttctggctttgatgatgccaaacttgaatatgacattgagtgcatttggagggtccgagtcttgagattagagacttatgtttcttagtcaatcctgaatgcttaagaaaatatcaatctatatcatcatcatatatcttactatatatatatatatatatatatatatatatatatattatgaccacaagcatgtcattgcatacaaaagaataatgttcaaacttgagatcttgtggttcctaaaatacttctatgtgtaagggcatatnttgttaaaaatatatattgtaagggcatatgtatatatcaacac

SEQ ID NO: 256149 - DNA, 254 bp, Glycine max
gagatacaggggagcaccaaattgaatgaggaaaagaggaagagaagtcgaactttgaagtgtgtctcataagactctcattcatcaaagttacaacaagtgttacacatgtttctatctatatccgacgtagctgtctcgacaaacttccttgagaagcttcttttagaagctagagcttagctacacacacccctctaataactaagctcaccttcttaagaaacttcctagagaagcttccttgagaaact

SEQ ID NO: 256150 - DNA, 422 bp, Glycine max
agcttgcttcagtataataggaatctccaatataaatatcttgatgcatactgatgatcttgattcctgctagctgatttaagaatatcatgctgatttatagagcagtttaagattctagatccttcccccatttgtttttcacagtactttatgtaggccagtctgattaatcaagagcgcagcatcataagatatctgcacaatgaaatcatgcctcaccttccttgtatttctgagcttttattgcaaatcccaaattgcatggtattaatgttattatatacattgtcttcatgtctgtgcatcctacaatggataataatatagcttggtttacttttattcggaaagcaaatggtgctcggttaattaacttctaaggtgtaactgtgccttggcataggatgctaaatgttctt

SEQ ID NO: 256151 - DNA, 203 bp, Glycine max
  unsure (1)..(203): unsure at all n locations
gactattttcttcaatccagttaggatattgtggaagatgaggtggttaaagcagtgcacaaagcccttgagacaggtaccattgattaaaatattgcagaaacacattgctcttattcttataagttattattataaaggtcgatactcctgttcagctaaatgagcttangtcaacaactttatacaatgacatatttgga

SEQ ID NO: 256152 - DNA, 420 bp, Glycine max
agcttgtgccttgagtaatttccggcgaatacttcatcacgagacatgagaaggtcatccactacatcaatcctggaagaaccggcgatatgatctggaaaaaaaaatggcttgcgcccatatgttatctcataaggggtggaacccgtgctactgttccacgaagtgttatgagatagttccacccatggtaggaactttccccacgatgttggccggcggtgaacaaaagctcgtaaatatccttcaatcactttattcatgacttctgtctgaccatcgctctgtggatggtaggcagaactcattcgaagatgagtgccactaagcttgaagagctcttgccataacccactaatgaataatggatcacgatcggacaccaagcttctgggaatgccgtgcagcttgacaacaatg

SEQ ID NO: 256153 - DNA, 423 bp, Glycine max
agcttattacaaacatattacatgtcatgtttcatgttaggccaataaaaatgctcatgcaaaattccaaaatgtcccatcaatccactacatgagttcccttaacttacatttcacacaaggaacaaagaggcacccaaatcttattgttcttactcaagaaccccatcatacctataatagccctcaaaagcatgtttagaacaagaatcccatacttgcccaaaattagaatcattgacatataaatgaataccttctggacaatgcattggccacaacatttttcttaccattcttgtacttgatcatatattgaaacatctcaatgaagttgaaccacttggcatgtatcttttgcaaattgccttgagttttcgaaaacttcaaactttgatggtcataatgaattatgaactccct

SEQ ID NO: 256154 - DNA, 434 bp, Glycine max
tcactgaaagtagtattgatgtaattattattaaggaattctatgcacacctctacgacccagaagacaaggcacctaagcaggtgagggttagaggtcatctgatcaaatttgatgaaaatactttgaacacattcctgaagacccttgtaattctggaagagggggagaatctctgtgctttattcctgtttccactcctgaagcctgatcctcaggagttggctgctaagctatgcatcctacgaaggggattcgagttaatgttgatggtttcctttgaagatctaaaaagacatgaccctcttctcaacctagagcgtctttcttttctaactgggtcctacctccaacatcgatgcacactgacaggtcagttatctatgatattatgcatggcatgatgtggttaccattccacatattttctattg

SEQ ID NO: 256155 - DNA, 470 bp, Glycine max
  unsure (1)..(470): unsure at all n locations
ccggatcttaagtcaccgcggctgcaagctgttctgattctgatatgaaaagctctgtgtttttaccatcactgttatggaaaagtactacatctggccctaatttagatcgtcgaaactatctaccaccaattagtgctggtgatctaaacagcggtgacaactntggttcatcatcagctggccatgagcttangaagtatgttaaggattcggaatatgtggggactcacaagagcataaacctgaatattatgcctactggttgttttgatacaacagctgcatcatttcaaagcgttcagattacaggtgaagaagataagtttcaagattcaagattgccttggctganagccaagcctgtacctaaaggaaagcccaatgaagaaagtccaacctcaacccaagttgactccttccttttgaatncttataaatctgcgtgcatgcattctgatttgatgttc

SEQ ID NO: 256156 - DNA, 448 bp, Glycine max
  unsure (1)..(448): unsure at all n locations
taaacacaacatcttgantaataggttgctcgagggtttggcaatcttggagaaatactttatgaatcttttgtagaatccaacatgtccaaggaaatttcggatgcctttcacatttactggcagaggtagctnttcaatgacatcaatttttgctttgtctacctctatccctcgagatgagatcttgtggcccaacactattccttcttggaccatgaaatgacacttctcccaattcaacaccagatttgcctcaacacaatgtctaatcagatgctctagatttgccaggcagcaatcaaaagaatggccaaagacggagaagtcgtctatgaatacttcaatgtacttttccaccatatcagcaaagataaccaacatgcacctctganaattggttggtgcattacatatgtgaatgtatgaaaacatgattttgatgatg

SEQ ID NO: 256157 - DNA, 451 bp, Glycine max
  unsure (1)..(451): unsure at all n locations
gcttggaatactaacatttgcagccctgtgtttatgtgggatggacatcccataattctggacatgtcaaaatatgcatatgaaaactattttttaaacaagtaaacctttcagggctttattaataaatcaaataccaattctcctaaaagatttcacttttttgggggaggctctattctctaacattcatatatagaacatgagttcatgacacataaacaagatccaaccactaatataaaattgtattcaaagaataatactaatgaaagtaatacatataagagcagaacagatgtagatagcaaaacactaaaataatcttcaaaattattgtgtgatataactnttaaagnttaattataatatatatatatatatatatatatatatatatatatatatagagagagagagagagagagagaggggatggatcaagttactc

SEQ ID NO: 256158 - DNA, 430 bp, Glycine max
  unsure (1)..(430): unsure at all n locations
tgatactcttagctgctgtaggtgtgatgacaagacccatagctattgttactntgggagaaatgaaattgtggctcgcaccactatcaatcaacaccaataaatccacattctgtatcgtcccttcaaccttcatggtgtgagactcgcccatgcttcccaatacccccatcagtttacattccacctccacttcttcttcacttttcaccgtcacattctccatacttacaatttccccttcctctgtcatggtttcaccttctcctaggattagaaccctaagaactcgttctggacatttatgcaacgtagggtggtattttcccccacatttgaaacaaagacccttcgctctcctctctttgaattcatcattgtggatacttcgtatccccttccacctcttcgtcatgccggaatgcggacc

SEQ ID NO: 256159 - DNA, 323 bp, Glycine max
  unsure (1)..(323): unsure at all n locations
ctcacacgntcaacattcaccttctagcggctaattctatttcgagactcaatcagacatccgagtaaaaaggtatttgcgtctgaatttgctcaaagcttaaacctttaacctcgagcgtctcaatatatgacgggactcaatcacacatcctcgtacaaagtgattgtcgtctgaatccggctacaacttaaacactcaatttcgagcggctgatatgtcaccggactcaatccaacattcgacaaacaattattgtccctagattcggtcagaggctcacatctaattccgaccgtttgggtatatacgagactcactca

SEQ ID NO: 256160 - DNA, 467 bp, Glycine max
  unsure (1)..(467): unsure at all n locations
agcttgcagactataccttcgaccaaacacggtcgtgtttctgtctcggcccagatttaaagcgggttgcagtaccggctccgcttccctaaccgtactggaggcggntgtcgaggctttatcctctatggttttctggagttttaacatgacctccgagatggaagccatttgatcttttaaggccgataaatcggccttcatctgttcctgcacgccctcttcattatccatttttctggatcgagtgttataggggtgccttggtgttttcttagttatgatgaaattcctaaagaaataaacaacggtgagtatgccaccaaaacatgagtatgcaaatggatgatcggagcacttggatccaccccaaggtttttaaacaacgtgatgagtccagaacttctcattttataaaaagaacaaagctctcatctagccaagattatacaaaggtgttacaagag

SEQ ID NO: 256161 - DNA, 450 bp, Glycine max
  unsure (1)..(450): unsure at all n locations
tctcagagaagtttctcattgaagcttctcaggaggtgttcttatttattagaggggtgtgtgtagctaagctctagcttctcaagaaagcttcttaagtaagtttctcaaggaagctacctaggctataaatagaagcatgtgtaacacttgttgtaactttgatgaatgagattcttgtgagacacacttcaaagttcaacttctctccctcttttcctccttcaatttcgtgctccccttctctctctctttttccccaattgaagtttcctctctaagcttcttatccaagacactctcttggtggtgaagctccttcttccatggcttattccctagtggatggtgcctnctttcaccttttctcctttatcttccgctgcatctccatggtggaaaatcaccattgaaggacctcattgaagctcanagatccaacctgcatag

SEQ ID NO: 256162 - DNA, 394 bp, Glycine max
acctgagatgcagctcgagaaggctagacagaacatgttagtgtttggtttggttcaaggataaaagggatgccccacattattttcatgacacaaatgccaacatgatgatttggaaactttatgcaaaactggtcatgcatgcacctatgcggacactcaagtgtcaaatatttatgggcatgtgatgctagggctcacgattcatctcctctatctttagtcaacccaacgtttccaaaatatgttcttttatccatttgtgcattcattcgagtccatttcaagcgtccgggaaaattttcacagcattcacccttcaggtgtatacacatttttcaaaaactagttatgatcagtcaatttcttcaagaaaaggtggaagccttctctt

SEQ ID NO: 256163 - DNA, 413 bp, Glycine max
aactaagctggaagaaagaagccaactgaactcaactcccctaaatggaatttttgtaaagaaggcatgaaggctccaatatattttttttctcacaaagaccagtaagctatggtgtaggcttaaattgacaatgctttgtgacacttgaatgaccccattggctggccatttgaacttgccactctatgccacaaagcaaaactaccaaaaatggaagggataggatttgccaaaaatgggtattctcattttttaccaaaactagtaaatcttatcttaatcacctaggttgttgtgctaatctccctaggaatatgtgtacccagagtgatcctcacgtaaagaacactttcacatagagttaaattacattgtcacttggtgcgcggttcaatttcactacagatgaa

SEQ ID NO: 256164 - DNA, 412 bp, Glycine max
ctttgatagcccttttgagcctcgtttccctcttcttgttttgaagctcactacaagccttaaatgaaaaaccatgatatcaccatatccttaaggaattttggagctttggaatcgtttcgggaataagtgtgggggttttttgtttcattggataatatgtttgttggctatgcttcatgatgtatttttgggccatacttgatgtacattgtatattggttaaatgttggacatgttgaatgaaatgttgtttctcaaatgtttcttgcttctaattaaaaaaaaattgaaaaagaaaaagaaaagcaataaagttgagtgaataagaacttaatggaaaagaatgagagactcttggcttactcttatattaaatttatcttaggtctcttatttttttatcactatt

SEQ ID NO: 256165 - DNA, 450 bp, Glycine max
tcaagaataatggcctcagcaaacttcttatttccagaatgaaattcaatcaatagacctccaatctttaatggagagggttaccactactggaaaacctgaatgcaaatttttattgaggcaatagacttaaacatttgggaagccatagaaatagggccttatatacccacctgtcataccctaatttcgtccggggattattacttgatgacatgcaacctttgattggttgtttcaagatacttgacaccctttgttgcacaatatgtaagtctcgagacgcgccggaagtcaaaaggaagcagggttatgcgatccgtgaaattccgtagtgtggcggaaaccaaaaagaggtgttgttgcgcaatccgtgagtttccgtaacttcttcgaaagctaataaagagtaaatacatgaatccgtaggattcgtaaccttacggaaag

SEQ ID NO: 256166 - DNA, 447 bp, Glycine max
  unsure (1)..(447): unsure at all n locations
aatcaaacgcggagcccaaaccttatttattttgggattncacaaantaggcttagcgagcacaccgcgctaagcacaagttaaaaaaaaagaaaaaaaaaggtatgatggggggaagaccaaaggacttcgtcctcgggttgctaagcgagatgccctctctaagcgcgtaaccttttaatgttattactgctgttagactacgcgctaagcacacaatccataactgcaagcaattccataaacttccctaagccaccaaccctcctcattctatccacttcactctttcttccccactccttctacttctttctttctctcctgcaccacctcatcttcgtgcattcttctttccatatcttctccttttcatggcatgctatctatgtaagcatagttcttaggatatntctgttctcttcgagttagcattcatgtttgcat

SEQ ID NO: 256167 - DNA, 471 bp, Glycine max
  unsure (1)..(471): unsure at all n locations
taagctccttcaactgcacaaggctcttaatatttgatttttattcttgtggaaccttcacccgacgaagacactgacaaaaacttatcttctccttcttggacaaagtatggcaggctgggggcaagtaaattttcttcccatcataccttggatgaaactatgatcgtatacccatatcagctagatcttgacgggtattcaagtcatccttcgtcttgccttgaatgttaaggagcgtcccaaccacactgtcacaaacatttntctccacatgcataacatcaatacaatgtctaatgtcaagatcacaccagtacggaagatcaaagaaaatggacctcttcttccatatgcaactcttacctttatcctttntttgggtcttcccaaatacagtattcacgtgttgaacccgctgatatacctgctcaccagtcaacggtatcggtgcaatatcatgctcttgac

SEQ ID NO: 256168 - DNA, 455 bp, Glycine max
ggctgcagctatgctcttaacactgttgtctttgtttaaatcccgagtaaaaatactgtagatctttttaaaaaaaaaattaaaagctttcccgaaaagtcaacatatataggtttgaaaagcattatcgcaattttattctaggggtacgttcaattagttaagaacaaatgtgatctctatcactagagattaagggtgttcataatttaggtatttacataattatatataatcatatttaataaataattaggttatataagtgagtattataattataattatatattaattttaaaatatggatataatttgatataattagttattatctttaaaatacgaatatatactatttatgagtaaactagctgtataacccattatataagaagatatatttgaaactaatattacataatcacgtagggataaataaagtaagacatttg

SEQ ID NO: 256169 - DNA, 461 bp, Glycine max
  unsure (1)..(461): unsure at all n locations
ataatgaactttctcttcattgctactagtanatttttatttacaaacttctcttccaacatagcaggatcatgatccaaaacaccgaggtgaaattgaacttgctcatttcagttagagaagttaaccccattaaaattgacacagatgatacataaaaattcagttaattgagaacatgtattacataataaaattcacataagtattttgagacataaaatacatgtcatacacatgattcattcatataacggtcaatgtatattgatgttctcctttaggtgatacaccaacacacaacatacaaacataatgatactaataaaattttaacaattattggtaattaaatatgcaccaattagcagtatctatttcctttgggcatataaataaaactaatgatacacacanatcgcctacaattatattcattaattatgagaataactaatcaa

SEQ ID NO: 256170 - DNA, 444 bp, Glycine max
agcttacctaattaacctagaattgagagattatgtttatgaaacacacaaaatggaaatactaagtatttattacctattcttaaaaaaatacttataacattacaaaataaccataaattgggagagtttgatacaatttatacaagttttatacacaaaagttagtcattttcactaactaacatgcatcctaaagtccaagctcacaacataaactatcctcattctttgattcatctgatacagggcaacttatttcatggattaccaaatgagggcccctatgcacatctggcaacgtacatagaaatttgtaacactgtgaagattgcaggagtgccacatgaagccattaggctaagtttattttcattttctatggcaggagaagccaagaagtggctccattcattcacgggtaacagtctgaagacatgggag

SEQ ID NO: 256171 - DNA, 479 bp, Glycine max
  unsure (1)..(479): unsure at all n locations
ctcagctntataggtgaaatcaggtgcagccatttcccttatagtctctctcacgagggggagggtgtgccatgttctcagaatgtgcaaaatcagaatgctcagaatcagaatgctcaaaattataatgctcaagatcaggatgttcaaaatcaccaataacagaatgcacagattcaccagttatggaatgctcaaaatgatcaaaaggtataaaatgatgcctaactaatctatgaaatgtcctatctatcttangatcaaagggttgtaagtcagatggattgcctctagtcatacactacattcagcatgcacacaactagttgccttgtcatgtaaataaaggtgtaggtttgaactacagctaccctcaaatgatatccaagtgactctgaaatttgtgagcaaccttataaaatgatgagaagatagcacaaantaattcagacaaaaattcatagtctaactatgaaagc

SEQ ID NO: 256172 - DNA, 332 bp, Glycine max
cccgttctacattaacggggccaaccgcttatggtaataagttctgctccttttgggcttgacacccaatcggtgaacaacggaattggaatcttcccccttggacacagggcggtcttcttggagcttagctctgctggtcatagcatcttgattgccacagttttgtgacacgaggcgaaactctcttaatatggatgctataggatggaaggatcaatttggcttttttacctcttaatttgacctatgttctgacttgatggatttgcgttgcaaaagcaatttggaactacaaacatagtggggtattggtctaacattaatggagc

SEQ ID NO: 256173 - DNA, 454 bp, Glycine max
  unsure (1)..(454): unsure at all n locations
agcttcngtgcttagctactngttatcattattcatcaaaatcataaaaattactcacaaacgaacatttgtggagagagcaacatttgtatttgtggggagaggagttgctttcagcaaaaaaaaaaaaaaaaaaaaaattcaataatgataaaaagaaaggtactttgaccgaacacgatgctaaagccattcaagcacaaactatatcaaaagcaatgtattccacccaacaaagtcaaggcaaaaactgaaacaacgaactcgctatgctgagatggtgtagatgatgtgatgcggatgacgcaataaatttattattttcttctaggaaattttcaaaccagtcaactgtcaacatgtttagtaaaaacaattgtacgttgattaaacgtagaaattgttttgaacatnttacatattactgccactgttaatacattgcctctataac

SEQ ID NO: 256174 - DNA, 467 bp, Glycine max
tattttacattggtttgaaaaaaataaagtttatcttatactgtgatttatttttcaatttttatgaaattatctatgtttattactttcaattaaaaaaaaatattgtaatgacagatactctaaagaacattttaaattctggtactcttccacggactaataggccaacaaaagaatgtatttttttattttaagctgttactttttgcataatatctactacggatgtgttttttattttaagctgtgataacaagtacaactcagctctatcttagttgattaattgtattttacatggtagtgcaggaagatggtattggtttgctgacaatcatcaagggaacttgcatgtaccgtcgctcaaggaggcatgaatttgtcaaggatttcatacctcccagtatgacagaattcagatatgcaatggatcaagtagttgggtaatttgatttgcaatatta

SEQ ID NO: 256175 - DNA, 334 bp, Glycine max
tctcaccctcttcattcgctccaattttctcattcgtccaagcaagatgattaaatttgcctcttttcagacccacttcgatcctttcataagtgaaaactaaatcagcaaagcttgaaggtgtgtaacctaccattttttcatagtagaacactgttaatatgtctactaccattgggataatctatttctctgttattaggggcgctacttgagctgccaaatccctccacctttgggcatattccttgaaggattcatgctcttttttgcacatgttccatagttgcatcctatccgaagccatattagaattatactgatactgcttaac

SEQ ID NO: 256176 - DNA, 479 bp, Glycine max
  unsure (1)..(479): unsure at all n locations
tnctcggngccatttcctgcgaaggcaaacattnggaatgttagttttaccaangaatgctactcttaagacaaaaatgacatacaacctccttcaataaacacaaacatcaatgtaaatttagagcaaacttatgcacatatttctttacgaacatccactcgcacaagatattcttctaactaagaaaaatgcacccatgcacaatcaaggcaccttcgttacctagattatttgtatgtacttccaaggtgtactacctacatcacatgcatttccttggctaaatttacatacatgcatactcaaagcattctggctaccaaaaattgcacacgtgcacattctggtatttctaatacctatgcatatacaaactttgtgatgaatcttggctatctacacaataaggtgctacatttcatgctcttttcaagtggttntactacctaaagccgcatgcaaattcaagtatattt

SEQ ID NO: 256177 - DNA, 474 bp, Glycine max
  unsure (1)..(474): unsure at all n locations
tgtcgttggagctgacccatcaactgccctaactctnttatactgttggtccctangctcttgaccttgacttgataggacctctttttaagtgaaggcatttgacttgatcccatgttttactaaagtgaacaaaaatcggtgcgaatcaaaactctgacatctatcatgggtggaatggatgaatgcatgaagaaatgaatatgacatagatgcaatttatgaatacgggagcctgcgaaattgtctccgtatttaagaaggtggcatggaccctccgttggtttgccaaagagaggggatcaaaacagaatccgtgcgtgatgcatatgcgaaaggcgcaacacgggaatgtacagtatgacaatattcacaaaatataagcaaaagggtacgtgacacttatgcatggcagtgtgaaaatggcacgcagcgtatccgcttcgtgccctattcaaggacctatatgggaga

SEQ ID NO: 256178 - DNA, 379 bp, Glycine max
gaaagaagtgtattaatagcttctcatccttagagtgggcgcccatcttacggcagtacatcttgagatggtttttgggacaagttgtccctttatacttgtcgaagtccggcactttgaacttcgggggaataacaacatcgggtactaagcaaagatccgtcatgtctgcgaacggatagttcccaaatccttccacggccctcaatctttcctcaaggagatcgagcttcctcctttcttcagttgccggggatggtccttccgtggacaaaactattggttgtgttgccatgttgggctgaggcaacatgctgtgtgccggcccttctgggatcgggggatataactcgacatcccttcgagcataatcttgagg

SEQ ID NO: 256179 - DNA, 468 bp, Glycine max
  unsure (1)..(468): unsure at all n locations
aactaagcttatagctataaaacttgtgtccaatcaattcctacctacatcttgtattgtttcaagctcccttatgtgcttcgcgaggacatagagaggatgtcagctatattctattgggggacaacattgaggataggaagatgcactggcttcagtgggagaaactaacaaaagcaaaagttaatggtggggttgggttttcatagaagcaactctgttgtttgttggtggacgataatttcctggcctctanggtgctcaaggcttgctatttccctaattcctctcctttggaagcaaagaaactcttccagtcaagctatacctggaccaacattgcctcaacaaacgatttggttgaagaggggatatcttggcgcatagggaatgatgatgcagtcaagatttggtctaacaggtcgatccccaataatctcattctcacagaagaatctgtagcaccct

SEQ ID NO: 256180 - DNA, 408 bp, Glycine max
gaatttgagcgtctcgattactattttactcagtcggacatcccagtaaaaagttattgtcgtttgattttgctcacagcttctgttctgaatttccagcgtgtcgatataccacttgtcacaatcagacatccgagtaaaaaattattgtcggttgaatttgctcagagccttttgtttcaattctgagtgtctcgatatattacgggattaattcggacatccgagtaaaaagctattatcgttagaatttgctcagagcttctattctcaattacgagcgtcttgatatactacgggacacaatcggacatccgagtaaaaagttattgttgtttgaatttgctcacagctttcgttctgaatttcgagcgtcttgatatactatgggacacagtcggacatccc

SEQ ID NO: 256181 - DNA, 476 bp, Glycine max
  unsure (1)..(476): unsure at all n locations
tgtagcanattcaaacgacaataactgttatctcagattttcgaatgttttccgtagtatatctagacgctcgaaattcagaacaaaagctctgagcaaattcaaacgaaaataactttttactcgtatgtccgattgtttcccgtagtatatcgagaccctcgtaattgaaaccagaagcccgtagcaaactcaaacggcaataaattttaactcggatgtccgaatgaatcccatgatatatcgaggcgatcgtaattgaaaacagaagctatgagcaaattcaaatgacaataactttttactcggatgtcggattgagtcccgtaatatatcgagacgctcgtaattgaaaacagaagctctaagcatattctaacgacaataactttttactcggatgtcggattgttttntcgtgtatatcaagacgctcgtaattgaatcggagctcgtacaaattcaaatggcaataa

SEQ ID NO: 256182 - DNA, 310 bp, Glycine max
  unsure (1)..(310): unsure at all n locations
accaattgtaaattgccataacgggagtgtattgacgtggtgcgcattgcggtctacttacatttgttgtaatgaccaacgccgcactgattncattattgatagatgacctggaccacgttgtaaggcggaagtctaaaggtaaataaccgtatgaatatatgctcacagaatttttatataactgttacaatatgtatcccaagcgggagattggtggaactttctattccaattattatagcgagctaatattataaggcaatcatagtagctggttatcattggtggattttactttatgtgatca

SEQ ID NO: 256183 - DNA, 323 bp, Glycine max
gctcggactagaagatcagttggataaatatcaaatgatcctcttgaacaatgttgggattaatcataggaatcaattaagtgaggaaacgggaatccaatggacgaatgatctaggaaaatacttgggggtacctatcttccataataaggtatcttgtgggactttccaatttattatggacaaggtacatcacacattgagtgcttggaagactaagactttatcttttgctggtgccgttgcctaggctgtcttgcagcattaccaacttatgtgatgcaaactactctattgccaataaaggtgcttgatgatattga

SEQ ID NO: 256184 - DNA, 188 bp, Glycine max
ccgcaacccaacgcaccaaaaaaaacccccgccggtgccaacccgaaaacaagctccacaaatacgggcggcctgaccctttccaaagcaagccatagccacgaaaaatttgcgacacatgcaggttttgacgacgaaagcacacatcgttggacaagcggcctcaacaactcaagaggggggggggg

SEQ ID NO: 256185 - DNA, 463 bp, Glycine max
  unsure (1)..(463): unsure at all n locations
agcttgtcccaacagttgagcaataccgattatattatgtgggccatcatcaacgagtacaaggaaaagctagacctagcagcaactcatgagcaaaagctagaggacgagtacgctaaggtgtcactcttgcaagcggaaagggtgatcgattcattccacggggaaacaatgatgtggatggacaaattcgcctttactttgaatgggagtcaagatattcctcgattgctagccaaggccaaggcaatgtcgaatgtgtactcggcccccaaggaaattcacgggctcctcaattattgccaacacatgcttgaactgatgtcccacataattagaagccgctaaggcaattgtatcgtcgccttgattntggctagataaaccttcttgttctctaataaaatgagggttgattaatcctatgtgtctacttaataactctgtgtgaatccaatgcttc

SEQ ID NO: 256186 - DNA, 472 bp, Glycine max
  unsure (1)..(472): unsure at all n locations
aagctgaaggcaactgatgcattggtaactcggtacccttctgttttgaataaaaatctgtacctgttgcaaggtgtgtggttgtgctcctctgctgaccaccatacagacatttgcccttccatgcagcaacctgaagcaatcgagcagcctgaagcttatgctgcaaatatttacaatagacctcctcaacctcagcagcaaaatcaaccacagcagaacaattatgacctctccagcaacagatacaaccctggatggaagaatcaccctaacctcagatggtccagccctcagcaacaacaactgcagcttgctccttccttccaaaatgctgctggcccaagcagaccatacattcctccaccaatccaacaacagcaacaaccccagaaacaaccaacagttgagggcctctcacaaccttccctcgaagaacttgtgaggcanatgactatgcagaacatgcagt

SEQ ID NO: 256187 - DNA, 379 bp, Glycine max
ggcctatcaatttttattccagaagaaacgaacagaggcctccaacttacaggaaagggctaccactactggaaaacccgaatgcaaatttctatagaggcaatagactcaaatatttcggaagccatagaaatagggccttatatacccaccacagtagaaagaattacaatagacggaagcacatcaagtgaaagcataacaacagaacaacccagagatagatggcccgaagaggataaaagacgagcacaatacaatctaaaagccaaaaacataatcacatctgccctgcgaatggatgaatattatagggggctcaaatcgaacgagcgctaccgacacgtcacacactctacaactaacacatgaaggaaca

SEQ ID NO: 256188 - DNA, 415 bp, Glycine max
  unsure (1)..(415): unsure at all n locations
cccccacgaaaaaatatttttgaatctgtcagaactcgtaaccctaactcaaatataattacatctgtagaatatatgtgatcttaaaaaaatattctcacgtggagctaacttggaagttgataacttcaggctccgtttaagtcttaacaatattgctatttacattagacagctgcttcttcttggtgttgttgcaatatactttttagtttatgcgaatagcatgttctccacacagttaggatttatcaaaagagaaacaaggtcatcaaaatgaatcaaaaatgaaaaaagagatacacggtcatgaanatgacaaaaaacacatataaaacaataatgcgccaaacaaggccttacatttaactagaaatccttcagtttccatcacacattaataattgagctaata

SEQ ID NO: 256189 - DNA, 175 bp, Glycine max
aaagagcaagccaagaaacactagaaacaaagagcaaagccaaaagatcagagagcaaacccaaaacaggcaagaacaaaagacagcgaaaccagaacaaaaaaacccaacaagaaaggacaaaaagtcccaaaacgtgaaagccacgaacttgcacaaaacctcttaccaaaga

SEQ ID NO: 256190 - DNA, 435 bp, Glycine max
  unsure (1)..(435): unsure at all n locations
agctntcataagtgaaatcaggttttgctttttttctaagagtcctctcacgagggggaaggtgagccattttctcagtatgaaaattactgattgaatgctcaaaatctgaatattcagaatcaccagcaacagaatgctcaaaaagcacacaatgacaaggatgcacactatgcctaactaatgtatgaaaggttctatctacttcaagatcaaaggattgtaaatcacctggattgcccctagtcatgcactatatgcagcaaatcatgtgtttctcaaacaagcaccaggggagggttaaaactacaactatagtcaaacgatatccagatgagctaaaactacatctaaaatgcagtatttacgaagtgatcctaggtcctctcccaatgagcaatgatcaacccaacattcataacagataatagtgaa

SEQ ID NO: 256191 - DNA, 359 bp, Glycine max
  unsure (1)..(359): unsure at all n locations
tattcaaaagacatgtgagtgtgagtgtgttatnngatccntatgncgatcgcagncttcaccacattntataagttatcaatcaatatcaaatagaaccaaagcatttaaaaacccaaagacaataccagacatacaaatatgttgatggttgtgcgaaaatacaacgttaaattgtagaaaattccaccttattctgatggctaagattgtggattgttagacgatataattatgagtaatcactggactcttgaaataataagtcataccaaaactattaaaatgaaagaataaagcatatctaccaaaagaaaatacagatcttgatgggccacacaagtttattattgtgattt

SEQ ID NO: 256192 - DNA, 215 bp, Glycine max
aaaaaagaaaacagactgagagacccaagcaaaaaaagcaagaaaccaaggggccaagcccagcacaatctaaaaggtcaaaggctccaccgtaagagaagagagatgccgcagaaaacgcccgagagagcaaaaaacaaccagtagggcccaggccctatgcggctaccagacgactgaaaactcctagaaccttaggcaggatgcaggccagc

SEQ ID NO: 256193 - DNA, 281 bp, Glycine max
gctgagggactaccactcatgattattgtttggcacatatgcacattttttcgcatgaggccctgactgcagctctcaccttaggattcttgaaatctgccccttttgccagtcgagtgctctatcagactatactgcctgctacaagatacttgtcttcgaatgatggaagtccataggaccgtacagctaccgaaacttttgaagaagtacattctactttgcgagctctctcaaatcactaaggttgggagagcctggtgaagcaactgctggaggga

SEQ ID NO: 256194 - DNA, 451 bp, Glycine max
  unsure (1)..(451): unsure at all n locations
gcttgaaaatgctggatcaacctatatttgttttcaatctaattttgatttctttctagattctaatcttggttaaggttaccaagggtttatgtgagttgatagggtttcaaatcttgatccttctcttgtaaggttcaagggaagagtagaatattagggaattgcatgtgcatagagtttgtacttcgttctctattaatggaagttctaaggggtcttagaaaatctacatgtaggtcttcttcaggacaaaaccaatataaattttgcgtgtgattctctctttctctaaacattatttttgtgaatcaatattggtaatgaaattaatgtgaaagggccataaaactctatcttttatatgntttngtattcattattttcgttgtctgataatctttcttaacacatgttctgagacaatcctgattacattaacgggtgcatg

SEQ ID NO: 256195 - DNA, 466 bp, Glycine max
  unsure (1)..(466): unsure at all n locations
ctgcttccacaagtntatctttggatgaatgctcttctataacctaagcttttgaatcctagaaaaaccatgatttgttggcagcctaaccccattacaagcctagaaagtccttcggattcattttgtgtgttcatttctatatgatatgagatgaaatgcaaaggttgggacttgtgttagttgtttatgatggaattgttggatcaagtggcctcggaataattaagaagggagggttgaattaattattaatttgccttgactaattaaaaaacttatccttcttaatgttactatatttaattaggcttttactactaagttaagaaagtaaggaacaaaaatggaaacttaaccaaaagtaaaagcgataattaaaagtacacaactganaataaagagtgtagggaagaagaagacacacacaagaattatactggttcggccataaattgtgcctaca

SEQ ID NO: 256196 - DNA, 464 bp, Glycine max
  unsure (1)..(464): unsure at all n locations
atgcaagcttnctcgaggccatttcctgcgagaactaacatttataagttagttttacaagataatgcttatcttaacgcaaaaaatgtcatgctaatccctctgattttagaacgaactcatgtaacctatttatgcaaacgcgtatgtgtggaatatcctactatttatatcaacatagaggccatccaacacattctaattgtcatacatatatgcatttgaaaagaacatacattctcacgcccaaggcattgcgtcaaagttcacacttaattatatcctaaacatttactattacaaactacctacacacatttgaaatacatatcatacaaaatttattttttctctcacatttatttatatgcatattggaatgctaattacatcctgcacacacttgcattcgaaagagaattccatgctatcatacatccatttaggaaaataatcattcacac

SEQ ID NO: 256197 - DNA, 470 bp, Glycine max
  unsure (1)..(470): unsure at all n locations
tggtaatgtcaaggccaaatatgggtggagtgacaaaagctttaattttctgcttgaagtagtgcacgatctgcttccagaggaaaacacgttgcctaaaagctactatttggccaagaagatactatgtccgatgggtatggagtatcagaagattcatgcttgccctaatgattgcatactgtacagacatgaatttgaagaaatgtccaaatgccctaggtgtggggcatcacggtacaaggtgaaggatgataaggagtgcagttctgatgaaaactcaaagaagggtcctccagcgaaggtgttgtggtatcttcccatcattccaaggtttaagcatctttttgctaatgaagacaacgcanaagaccttacctggaatgcaaatgggagaaactctgatggaatggtctatcatccggctgattccttctagtggaagaagattgatggtttgtattcggatt

SEQ ID NO: 256198 - DNA, 212 bp, Glycine max
gacaaagcgcccccccaactcgggaacaaaccagaacaagaaccagaggcccaaacaacgacaaagggcccgccaccccaaaccacaaaccaaacaaaggaccataaaaactcggaaccgacaaaaaaagacccggaaagacattcgcgcccagaaacgagccaacgacacgaaccactgaaccgaaaaaccaaacgaacccaaccctcaag

SEQ ID NO: 256199 - DNA, 457 bp, Glycine max
  unsure (1)..(457): unsure at all n locations
agcttctatataagctgaacgcacnnancattatacacaagctgttgtttattcagaaaattagagtttatctcttttatcttagtgagagtgattctcctaaattcttgagtgattcaagaacaccctggctgtatcaaaggactttcacaacctttgtgtgttgccctcgctggaaagagagattctttccttcctttcatcttcacccttgttctttcaaaccacaattccagaaaattcacctctgcccagaattatcttgtggccataactcccattttacgcactcaaattaagtgattcttgagcctaaattgaatttcaaaaccagacctctcaccgcgttttggaatcacctcatttggagctctgtagcttcagttattgccaattctatatttctgtgcagccaccacttaacctacgtgttaccatcccattcatccattttatg

SEQ ID NO: 256200 - DNA, 452 bp, Glycine max
  unsure (1)..(452): unsure at all n locations
aganattgaataacggaagctctcgagaaattcaaatagtcatatcttatcacacggaggtccaattcaggcgcataatatatagagaagcttgaaattgaacaacggaagctctcgagaaactcaaatggtcataacttatcacacggaggtccgattcacgcgcataatatatcgagaagcttgaaattgaacaacggaagctctctagaaattcaaatggtcataactagtcacacggaagtccgatttagacgaataatatatcgagacgctcgaaattgaacaacggaagctctcgagaaattcaaattatcataacttttcgaacggaagtccgattcacgcgcataatatatcgagatgcttgaaattgaacaacggaagctctcgagaaactcanatggtcataacttatcacacagaggtccgattcaggcgcataatatatc

SEQ ID NO: 256201 - DNA, 347 bp, Glycine max
  unsure (1)..(347): unsure at all n locations
ctgattaacatcactaactcctttggcaatgtttcaagctccatgaatcctcttagtgacaaaagatgtacattttggattttgcatatacaatgaggaacgccttttattttgcgggtatatgtaagattgggacctcgcaaatgctccaatttagaaattaaatgaggtagaggcttaaaagaggaatcacttaaatctaaaacccattacgatttggatctttctatccatgctatcaaagaggttcactgtcaattcccattccatggatgggaaaaattgtcactcttctggacttatggaacanagcatggctaagtgagtgatctcaacaactgataaat

SEQ ID NO: 256202 - DNA, 459 bp, Glycine max
  unsure (1)..(459): unsure at all n locations
accngaggctgcagcttgctcctatgcagtgacactatcctctatatttattatttatgttgcgacagaaccaaatgcaaaggagcttgctaaccccaccactccaaacacaatctccacaccattgctgaaaactcctactacaagaaaatatgatttgttgattctccacaccattgctgaacactccactacatatagttctcgaggctggaataacattcttacgagccaaattctatttagagggaatgtgatcctaaagccgcttccatgcacagcctctgatctttaaagcatgttctctaccttcaatccttccccacaccacccttcctgcaaagacacatcttcttcaccgaaacttgcttatttattgccacctcatattatcgacgataactcaataccaatgtcgccttcaccccccatgatccctccaaaaaatactactttacc

SEQ ID NO: 256203 - DNA, 317 bp, Glycine max
atatcgagacgcccgaaattgaaaaccgacgctcgtaacaaatgcaaaccgcaataacttttaactcggatgtatgattgagctccataatatatcgagacgcctcaaattgaaaaaagaagttctgaccaaattcaaacgactataacttctcaccggattctgattgagcccgtatttattgacgagcacgaaattgaaaaccgaagctctgaccataatcaaaccacaaaaactttatattcggatttgcgattgagtccctgattatatgaagacgctccaaattgagaacagaagccttgaacaaattcaaa

SEQ ID NO: 256204 - DNA, 447 bp, Glycine max
catgcaagcttgttccgcttgaattttcttttttttcataaattgaaacagatgcctcagtagagaaagaaaatgttgcaagacctgttattcactgaatatattgttaatactatggcgtcaaaaaaagatcgcttatactattaataaaatatttctaaaaggggagtttcgatgttgaaagtacaatcgtctctaattatagaaaagtctaaatatgtttttatccttaataaacacttactttttgtatttattttataataattgtgttttacgtcgaatttttaataaaataatactttttttattcttgacactcttgtttgtttttaataaattactgaattctatcatttgtttatgataatctttagtcgggacaaataaaattcattaatttattaaggaataaataaaaattcattaactttctaggaataaaat

SEQ ID NO: 256205 - DNA, 276 bp, Glycine max
gggataattaacattggttaatggtgatctacatttcatacacatagaacacgggtaattatatcataacagtttaaaggggggtgtttttcttcaatgactatacaattatctaaaaaatacacatttattttaattagtcggtgactaattaaagcgtctaatcatatgatgttcaataattaaaataatttacagtttcgcaccttgaaaaattacaacttatactgacagagaaaactttgtgctgcccatctggcatcgtaaaattaattt

SEQ ID NO: 256206 - DNA, 141 bp, Glycine max
accttgcggacctcaggtggggtgctattgcccaaaaccaagcttgaccaatcccgactcaccctgggcatagtcggtctgtgagaacctgtgtataacctaaataggcgacctcctggcagtcaacatataaaaggaaaa

SEQ ID NO: 256207 - DNA, 391 bp, Glycine max
  unsure (1)..(391): unsure at all n locations
gcttcctccagaaggcaccgncttctggaaaacatcctggaaggcccaagtgggtctggatgctatttgcacccccctatttactaaatacacccctttcgtaacgatacttgctttctttccgtaatgtnacggaacgctacggatcacgtaatcatcccttttctggcttccgggatgttacggagcttacggattgcgcactaacacttccttttgacttcagcatgtcatagaacttcacgggttgtgcaacaatgctttcttttgacttccggcatgtcacggaacttcacgaattgcctaacgatgggtgccaagtacctcgaagtagtcaaacgagggtcacatcccaaccacggatggtcctcgaacaaattagggtatgaca

SEQ ID NO: 256208 - DNA, 483 bp, Glycine max
  unsure (1)..(483): unsure at all n locations
acctgcggcatgcaagctngagggaaaacttgatgccttggtcatcttagtaactcttcttgccatgaatcaaaaatttgcacctgttgcaagagtctgtgatctatgttcttctgcagatcaccatacagatctctgtccttctttgcagcaatctggagtcaatgagcaacctgaagcttatgctgcaaacatttataatagacctcctcagcagcaaaaccaacaacagcggaataattatgacctttcaagcaacagatacaatccaggttggaggaatcatccaaatctgagatgggcaagtcctccacaacaacaacagcttgcccctccctaccagaatgatgctggtccaagcaagccatatgttcctcctccaatgcaacaacagcagcaacaacaacaaagacaacaagcaactgaggcccttcctcaaccttccttagagggagtagtaaggcaaatgaccatccagaatat

SEQ ID NO: 256209 - DNA, 420 bp, Glycine max
  unsure (1)..(420): unsure at all n locations
tggcttattccttagctgatggcgtttcctctcacctcttctcctttgtcttccgctgcatatggnggaaaatcaccattaaaggacctcattgaagctcaaagatcgagcctccacagaagccccacaagcaagcttccatcacaggtggtggtatacccatgccaaacactttggagggccctcagtttcgcccacgaccacaacccttgcattttgcggtgggaagaggccctcctgctatggctgaaaagggaaagtttgatcatatagaggaaaagctcaaggacattgaaggaggcgaagattatgcctttgttaacctataagagttgttcctagtacccagacatggtcatttccaaattcaaggtgccggactctgacaagtacaaggtgactacttgctccaagaaccat

SEQ ID NO: 256210 - DNA, 426 bp, Glycine max
  unsure (1)..(426): unsure at all n locations
agctttgttcaaagcaaacttgttccanatttgtgggatgcactgtgtaagaattgaaatggtcaaagtaaatagtatccacacactgtttctgtatatataatgttcctgtatattctgtgttaaaaaaaactataagtacaaatgaaattaataagtgtgtatgttgtaatttcatggatgaaatctaagtgcctaaataaagggaaaatgtggggtaggaatgaatgaaaaagtgaaggttattctatggatgaatgctctcctagaacctaagcttttgaatcctagaaaaaccatgaattgttggcagcctaaccccattacaagcctatatgtgtgttcattgctgtatgatatgcgatgaaatgcaaaggttgggacttgtatgtgaatgtatgtatacatgattntgatgatgtcaaa

SEQ ID NO: 256211 - DNA, 409 bp, Glycine max
gcttgtctcaacgtttatgcgagacagagatttcttttttgctatcatcgccaagtacgaagaagagttaggtctagccaccgcccacgagcatagaatcgcggatgagtatgcccaagtatacgcggaaaaagaggctagaggaagggtgatcgactctttacaccaagaggcaaccatgtggatggatcggtttgctcttaccttgaacgggagtcaagaacttccccgattgttagccaaggccaaggcgatggcagacacctactccgcccccgaagagattcatgggcttctcggctattgtcagcatatgatagacttaatggcccacataattagaaatcgttaggaaacttgtatggtctctcagaccttgactggatacgacttctttttgaaataaaat

SEQ ID NO: 256212 - DNA, 442 bp, Glycine max
  unsure (1)..(442): unsure at all n locations
tggatatggtttaagcatattgtttttttttcttctacaatatctatatcttactagttaaataatcagatagatttgtcttagggatgttccttgattgttntttttattcatcttgcagactttctgtcatttcttgggtcacaattcgtggcctctgtttaatgaataaatatttatttgccttttaaaaaaacctttaaaaatggttgggaatctttttatgtccatgaataattaaaacatgtgcttgtctaatattttttctagaaatatatattatacttactaaaatatcctctgagcatacttggtgtatntggaaactatcttgtagcacactctaagtagttggttagagcacaaagattccaataaagagggtagttgggtagcggataataaggagtgtatatgcatattcttactcatcaagagtgat

SEQ ID NO: 256213 - DNA, 447 bp, Glycine max
  unsure (1)..(447): unsure at all n locations
agcttatctcggatattctccatctatcatttatattatccagnatttagcaaatattgtcaaactttgtaaatgcagataccatcaaatcaaaccttgacatatgacagacctaaacttctataatctcataaattgctttttccacatctaactcttccttctcaagctgtatgtttgcatgcaatcgagatccttgaaatgaatctgaagtattaccatcgttagacgtgataccaacatctgcataaaacataaagccacaattctactaaggaaattgagttcaaaaattaatttctacactttaaactcgtggaatcatagagaacatatattaattacatataaaaaaagatggaaaaaagagaagaaactaacagctaaatttttctattagagtgtaatgttcttctgtagtattccaaaagtcaaccatttgaaaga

SEQ ID NO: 256214 - DNA, 395 bp, Glycine max
  unsure (1)..(395): unsure at all n locations
accttttgtgtattatgtagtacctctggtacttcggttcatatataatatattatcttcgccttccaaaaaaaaaaaaacttgtacaatttacaaaatactagtataccattagaagcagaagacacttggtaccccatagctttatatgtgaaactaagtgagcccatcagccccaaaaagaaggaaggaacttcagcttctaaatttgaaggggagcccgaaagaaagaggacaggttaagattgaatgttaattaatggggattggaatatcttttatttttttctttacagaggggatcgtgaattctctggttacaaaagtgatgganagaaatcctaaccctgaaaaataattattatacattaaacaccaaataaaatataattaat

SEQ ID NO: 256215 - DNA, 456 bp, Glycine max
agcttgtccagctgtcccaaacatggtgtacttcttccttttaaggcaccagagaggtatgaccagattatcctttgtatctattcattttctttatagaaatagaagcatataataatcttttttctttgttggattaatgtttgtcataaacgtcaaagaacgaaaaaaaaaatgataggaacctcatcctcaacataaacatttatgccttatgttgtccattataggagactgttgcccaaatgggattttgctgcggatgtaagcataggtggattatctagattaaccctagaggtttcagccttatttttgtaaataatacagcagttttctggatagcaaatgacacgacagtttagtttttcatttttcttttgaaacagaacattaggtgattttcagatgattagttcgctaggtgtgaatggaacggaagtgcttatccttttc

SEQ ID NO: 256216 - DNA, 261 bp, Glycine max
ttcaagtatgcccgggtgcttgacaagctcaaggctgagccgccaaagaggaactaccatcgatatcgctttggggaagttcgaaaccaccaagtactactgcacagtcatcgatgcccccggacatcgtgacttcatcaagaacaagattaccgcgacctcccaagctgattgggctgtccttaacatcgactccaccacctggggtattgaagctggcatttctaaggatggacagactcgcgagcatgctcttcttgc

SEQ ID NO: 256217 - DNA, 452 bp, Glycine max
  unsure (1)..(452): unsure at all n locations
agctnngctatggngctnctatggaggcnggttantnntatttccanggggccctttaagggcgattttccaccatggagatgcacggaaaacaaaggaaaagaggtgagaggaggcgccatccattaaggaataagccatggaagaaggagcttcaccaccaagatgagccttggataagaagcttggagaggatgcttcaatggaggaaaacaaagagggagagaaagatataggggagagcacgacattgaaggaagaaaaagggagagaagttgaactttgagttgtgtctcacaagactctcattcatcaaagttcctacaagtgttacacatacttctatctatagactaggaagctctcttgagaagatttcttgagaaaacttccttgagaaacttctttgagacaactttcttcataagctagagcttatctacacacacccc

SEQ ID NO: 256218 - DNA, 414 bp, Glycine max
aatggcacaagagacttaatgagttcattgtctctcacgggtacatcacaagtccctatgactcatgtgtttatcatagtaaggtgaaagacgattctcacatctatctattgctctatggggacgacatgctcaaagcatctcacaatttgttggaaattcagaaggtgaagtcactactcaatagtgaatttgagatgaaagacttgggagttgttgaaaagattttgggcacggagatcaagagggataaagtccaaaagaagttctttatgcataagaaggaattcattcaaaaagtactaactcattgtgggatggcatctgcaaagcaagtatgtagtcccttggcaaagtccatttgtttatttgaactccatactactcagtcagaatcaaaaaaggaatacatgt

SEQ ID NO: 256219 - DNA, 399 bp, Glycine max
  unsure (1)..(399): unsure at all n locations
agcttgactggagggattgtatatgtttttctctctgccagagcttccacagtccataagagagctatatgccattaactgttcatccttggagactgtaatgttcactttgagtgctgttgaaatgctacatgcatacaagttacacacgacattccaaaattgtgtaaaattggatcaacattcactcagtgctattggagtaaatgctcatgtgaacataaaaaaagtggcatatgatcaattttcaacaattggaaccaactcaatcaagtttcttggcggtccagttgatattatctaccctggaagtgaggttccagagtggttcgtgtataggactacacaggcttcagtaactgtngatctctcttcttctgttcatgttccaagatcatg

SEQ ID NO: 256220 - DNA, 449 bp, Glycine max
  unsure (1)..(449): unsure at all n locations
cgttatgcgagacggagaccaacatgctagttattatcgccaagtaccaagaagagttaggtctagccacgacccacgagcatagaatcgcggacgagtatgctcaagtatacgcggaaaaagaggctagaggaagggtgatcgactctttacaccaagaggcaaccatgtggatggatcggtttgctcttaccttgaacgggagtcaagaacttccccgcttgttagccaaggccaaggcgatggcagacacctactccgcccccgaagagattcatgggcttctcggctattgtcagcatatgatagacttaatggcccacataattagaaatcgttaggaaacttgtatggtctctcagaccttgactagatacgactttctttntgaaataaaatggagtggtcccatgtttctactccaaaaagcttgtgcaatcanatcactc

SEQ ID NO: 256221 - DNA, 439 bp, Glycine max
  unsure (1)..(439): unsure at all n locations
gcagcttgaccaatcccgacccaacccgggcatatttgtttgtgagacctgngangnacctaaacaggcgagctcctggcagtcaacagataaaaggaacaaacaccacaaagcaaggaggcttgtgtggtggctggccagctgtgaactttgtttgatatatgggatatgggctctggtaatcgattaccaaggtgtcgcaacctacccttcggcgggagggcgacgcgagactcgcgggatgcgtgttccacgaatggaatacgcgcggagtcgccaccaacgtttatttgaggaaaacgtcagaaaaaccagaaaagacgcgatctacaaacttttaagtgaaagggtcgggagttgtatttacgcacggngaaggtattancaccccatacgtccgtcccaagggacggcagcctttaatcgaatgtgcaaacat

SEQ ID NO: 256222 - DNA, 287 bp, Glycine max
ttactctacgacatcacaataatccatcaagaataaagaagatacactctttgacacatacacgaaacattatgcatatgccatatattacaactttccaaaacaaggaaaagaaaggccctacgtgtgtgaacctaaccaactataaatctgggtgtacaaaacacatcaacaagatacatgtggactcatataatttaaccaaattatacaatttactacagcactttcacatcaacacatgcatattcaactatcacatcccatctttatattgagatattaca

SEQ ID NO: 256223 - DNA, 163 bp, Glycine max
  unsure (1)..(163): unsure at all n locations
cccacccaagcgaggtgagacgaagacaagagacgaaccccccccgcgaaaaaccacanccccgccccaaaacgcattcatgggcacggntcccctgcaaaggccggccaaacaccctagctggggattcctaacgaacaaccgaggcacacacccacaacca

SEQ ID NO: 256224 - DNA, 467 bp, Glycine max
  unsure (1)..(467): unsure at all n locations
agcttatgctgcanatatntacatatataccttctatttctcagcagcaaaatcaaccacagcaaagcaattatgacctntccagcaacagatacaaccctggatggaggaatcaccctaacctcagatggtctaaccctcagcaacaacaacagcagcctgcttcttccttccaaaatgctgctggcccaagcagaccatacattcctccaccaatccaacaacagcaacaaccccagaaacagccaacagttgaggcccctccacaaccttccctcgaagaacttgtgaggcaaatgactatgcagaacatgcagtttcagcaagagaccagagcctccattcagagcttaaccaatcagatgggacaattggctacccaattgaatcaacaacaatcccagaattctgacaagctgtcttctcaagctgtccaaaatctcaaaaatgtcagtgccatttcattg

SEQ ID NO: 256225 - DNA, 388 bp, Glycine max
  unsure (1)..(388): unsure at all n locations
cagctttgtatactatctttcttttcttttatttattatcccgnataagcttattacctgatccaattttaggctgctttatcatttttcatgttttttctttaacacattctcctcttagtcttgcatctattataaaaaaaaaatgcctgctatatatcaacctcttcaaagtttacttgtcatcaactctggcatattcctagaatttgatatgtactacactaatggggccatggcaacacttgttgatttttcttcctcttccgggtaaagcctctggaagtgcacaatatgaaacttcaggatccagtgggactgctagtactagtgctactggccttacaggcattatggtggcaaaatcaatggagtctcatatcagaac

SEQ ID NO: 256226 - DNA, 455 bp, Glycine max
  unsure (1)..(455): unsure at all n locations
agctnggaaaaataattacagccatataatttttttttgagttcatcaacagncgggattgggaagctgtccttaattgttattgcattcaacgctctataatcggnacaaaaccaccacgttccatcctttttctttaccaaaatgatgggtgaagaaaatggactantgttgggtgtgatggtgcctgcaacaaacatttcttgtaccatagtttcaatctgttgctcttgactatggggatatctataaggtctcaccttcactggtttggcatcctttaccaatggaatggtatggttctgagttcttgaaggaggtagttcatcaggcacaacaaagatacttctataattatgcaacaacatcaccaaatctgtgtccatatctttaggtaattcacgccatttatcctcaggcacatcctggtgcttatactacanagtaaaaacttc

SEQ ID NO: 256227 - DNA, 400 bp, Glycine max
tcactggaaatgttggaaacggcaatcatcattaatctctaaccctgcactctagataaagcatatgcaacaatgttttcttttcctttcttgtagcaaacttcatagtcataccccatgagttctgtaagccagctatgttgccctgcaaaagaaattttctgttgcaacaagaactgaagactattatgatcaatcctaatcacaaaatgtttgccaaccaaatagtgatgccattttccaattgcatacattataacaaacaactccttttcatacactgacaaggcttgatgcattggagagagagctctgctgataaaagctagaggatgaaccttctgcatcaatacaactccacttcccttgtagaagcatttgattattgacaaattcctcc

SEQ ID NO: 256228 - DNA, 392 bp, Glycine max
  unsure (1)..(392): unsure at all n locations
agcttggaggcgttgcaatcgcatgttgattcatggctcactcgntccatgagtccttcgatcaaacaatttgtgatgtggatggatttggcatttgaaatctggaaagatctcaaggatcatttttcaaattctgacaagtttcacacttttgattatcaagatcaaatccagagttgtaagcaagctgattccagcatttctgagtattatactcgtctgaagattctgtggaaagaactggaactgtatcaatggtttttgctatgtacatattctattccctcttttgaaggccatcgatttttcttaacagttgtcaatgactatagtagattcactttgatctacttactaaaaactaaagctgaggtaaaactgtgcttcaaact

SEQ ID NO: 256229 - DNA, 457 bp, Glycine max
  unsure (1)..(457): unsure at all n locations
agctttggagcttgaacacattntatctttttacatgtccaactctttgagtggcattntgtattgattgtttcatcttagtcttaatctatccatatgtacatcatgcatcatcatgtagaagtaagaagattatttctaaagttagaaatttcttcaatgcataaaactctccattttaatcaattactaggctattcgtaatcgactacacaagtcatttggagcttgtagagagatccttgttcggtttaatcgattaccagttatctatgatcggttacacaattcagttggagaccatgtttggtttttcatgagtctctgctttaatcgattaccaggtgatcatgatcgattacttcattctgaaatgtgttcttagaagtgatcaagaacaatttaatcgattaaatcaagaatctaatctattgcattgatcttcaaagctttccag

SEQ ID NO: 256230 - DNA, 422 bp, Glycine max
  unsure (1)..(422): unsure at all n locations
ttattacattgagngagatgatgtgcaaagttgggaactttactttccggtatcatgattgaaacactcagaaccgagacacttgtgtgcttgagagaaacactatccttgtgaggaatgaagcatggtgaatctttcgtgatgcttgtcatacttgctaacctattttatctccaagtgcatcctttcatgctcctatcatgagatcatgacaaatgtgaactccagaattagccattgaagttgtttgaaatgttattgttaaacggttggcaactgcaccaattcgtcccaagtagtaaagttaaaacgaaagtccgagtgtcgaatccacaagaactctatttgtacttaggtagatgaatatttaattaagaacaagatctggaaaaggttgtaaaaaaatagtagaataaattgga

SEQ ID NO: 256231 - DNA, 454 bp, Glycine max
gcgacctgcggcatgcaagcttccacttattagtgcacagctccttcatgaatttatgatttgtttgtcaacgcgctcacatgcctctggttgacaaagggtgcagatgacgacgttagtatctacatcctataggactccgagtctgacggatagcaaatgagtgtgtacggataaccacatgggtatttccgcctgccacatgacttcacaggtcaggattaacagagtcgcaacatgcccttttgcgggcgagcgaggcgaggctcacgggtgcgcttcccaagggaggaaagatgcgcggagtctgcaccaacgtttatttgtggaaaaccttataataaccgaaggaagaccgtcaaaacaaaaattctaaattcgggagttgtattaacgttggaggaaggtattaccacctctcacgtttggttcgaaggacaacaacctatttttt

SEQ ID NO: 256232 - DNA, 468 bp, Glycine max
  unsure (1)..(468): unsure at all n locations
acccggatccttaagtcacctgcggcatgcaagctntgaacaatatacttggctcttattttattgtctttgggcttggcggccacgctcaacaaagtactttcgacacctactgtacgttgatttcaccaatgttgttatgggaatgttgcgacaatcctttaaaaccttattgatacattctgagaggttcgttgtcatgtggccatatcgacgtccttctctatcgtgagtcatcgtccatttttcctttgagatgcgatcaatccatgttgctatggctagactcanctcacaaaatttttctaaattttgataaaaaaatgtgcttgcatggagtgtaggctacataaaattagctatgaataaaaatcttaagtataaatgacagtaaaataaacgtgaccatcaaatatgaaatcttatccaatttcttcaacatttctttttgcttgcattattgaattt

SEQ ID NO: 256233 - DNA, 439 bp, Glycine max
  unsure (1)..(439): unsure at all n locations
acattatacacatatcattctttatggtaccgaaagaacaatcgcacatgaatggcatatagaggaattttggcatctattctgaaaatggcaaggaatacaactgacaatttggtaacatgaacatgttctgtaagtggatgccattcttttacctggaaattgatggtgactggaccacaatagatgccaaaaactcaaaaaacataaataaaattaactcactttatttttcttcctttgacagagagtatccttgcagggttaaaccctaaacacacaatacatgtctaggtataccaaatgggaaagagggttttcagtatatgtaatacttacaggtaccaccacaaccaattaaaatgctaacaattaaacacanaagggcacgagtttaacttatttggcttcacatcctttgtgcatattcaaagatgac

SEQ ID NO: 256234 - DNA, 440 bp, Glycine max
  unsure (1)..(440): unsure at all n locations
agcttacaaaatatggaagggtgataagattgactttcttgcatgcgccggagcattctttggagtactatntgcatctgtggagattggtctacttgctgcggtaatcattgccacttccatatcttctcactcccttctgaaatgactttacttattaattataattcgctatttaaaacaaaataataagtatattcttaattctctagcatagacgactttaaaagatatttgaaaaactatattaattttttcatatgataattatatatatatatatatatatatatatatatatatatatatatatatcctatatatactcgacttaattatttgtgccaattatagatatataatttattaaagtatatgggaaaatatagttnttaaaatacaataaatgggagaactaaaacacattttagaaaagaatc

SEQ ID NO: 256235 - DNA, 447 bp, Glycine max
cacctgcggcatcaagctttgacgactatccaacttagtatttggacggagaaagatctatatataggcttgctaagggtagagagaggaaaactagagatttggatcaagtaaagtgtgttaaggatgaagaaggcaaagtcttagtgcatgaaaaagatatcaaggaaaggtggaaggcgtatttccacaacttatttaatgatggatatggatatgactctagcagtctacacacaagagaagaggaccggaactataagtactatcgtcggattcacaaacaggaagtaaaggaagcgttgaaaagaatgagtaacggtaaggcggtggggccagacaacatacctattgaagtgtggaaaactcttggagatagaggtcttgagtggttcaccaaactctctaatgaaattatgaggtcacaacgcatgccggaggaatgga

SEQ ID NO: 256236 - DNA, 375 bp, Glycine max
agctcttggaacttagagttaagcatttctcttcctccaactataatatctcatccaatcaaaaccctcttttcaatagtctctctctctgactcactccacaataagtgtcgattttttcctaaataagtgaaagtgtagctacaccttcttttgtgtgtttaccacttttgagtgccacagagttctgagtttcataggagaaaaaaaatgacagaagaacaaaccaaaacggttgagtcagaatcagtaacaccaccacctgctgctgctgctccttcacaggttccttctgctgctgaggctgaacatgttcctgaggctccaaaggatgtgactgacgagaaatctgtaattccagtgccttcttctgat

SEQ ID NO: 256237 - DNA, 467 bp, Glycine max
tgcagcatgcaagctgcaagacacgactccattaagatctgtccttgttctttgattaaaaaaagcacatgcaatgctaaaactcaaaaagggagcagctaaaaattataaaaggaatgttcagattacgataggatttgtcaggccgttaagttagcgacgcataattattagtgtcaaacaaatgcgaagcatcacggatgtatgtgtcacgctatgattagtgataaagtgtaaaattaaaagatttggctcgggttaggcgcaataggaatcgtattgtttttttctaccctccctctcaagataagggagaaaagctcatgatggtcccatggtacgaggtccctccttgcatatatataaaatcatgcactcacactatgtggggctctcaatcctaagaaaatctattcccatcacaagtcacagccgtgacctcagtaatagtatcattacataattat

SEQ ID NO: 256238 - DNA, 190 bp, Glycine max
  unsure (1)..(190): unsure at all n locations
cccccaaaaagctaagcgnacccccacgacataatacatgaaaatacaaaaaaagtcctactaaaacactactcaaaatgtctcgaaatacaaggctaaaatcctatactactagaatggccgagatacaagggctacacagacgaaaaaaacctattctaatatttacacagataagccggcacatact

SEQ ID NO: 256239 - DNA, 467 bp, Glycine max
acctgaggcatgcaagcttatacagatacaactttgaattgaacaataattatttctaaccacgttcaaaataacttagaatatataaaaataaaataaatagtttttaattaaataaaatttaaaataatttacttcatctatctgcaccacatggggctgatatctaatttcttatgaaagcagagcactctatgttttctcaacactcattcccttcgttcttctcgtattacaacatatggctttaacatagtctttctattccttagacagtagacacctgaactaccacttattacaaaataaaaaatcaacttatggcccatttatttatgctttataaaagagaaacaaacactatttttacttaaaaagatatgcttaacagaaataataataagtatgtgaattcttcaaaagagaaaacaaaaagataaaagaaagagcgtttctcactttcctct

SEQ ID NO: 256240 - DNA, 329 bp, Glycine max
ccgtatctttgtctaaaggtcaacaacctcaccaataattatggcctcgtctaacttctcatttcctgacggaaattctattaatagacctcttgtgttcaatggtcagggttatcattataggaaaacctgaatgcatatctttatagaagccatacatttaaatatatgggaagccattgacaacggtcccttattcctaccatggtagtgagaaacgcgattattcaacaacccccacaagaatgggatgatgattaaagaagaaaggttcaatacaatttacaggccaaaaatataatcacttctgcactacgcatggatgaata

SEQ ID NO: 256241 - DNA, 410 bp, Glycine max
taaaataagtgaaataaagagggaagattaagtgcttacaaaaaatgcgactcacaaattctaaacttcgtttttgaagatctcatggcgaaaagtgagttgtgaatttctcttaagttcaagaagacactcattcactcaagaaaggttcttgcacatgattgattacgttatgtctttccttgactatgtttttcatgtgtttctacacattgctagcatatgcaggaatctcaaaaggcatactataataggtttttctagttcacgctaacggtaggtttctcttaggctcttattcacagaggaccctagggttgggtgccttaatctctttctctgggtgggaactaaaatcgatcgcgattcattgaagaatctatactggatagctccaattactgaaatta

SEQ ID NO: 256242 - DNA, 438 bp, Glycine max
  unsure (1)..(438): unsure at all n locations
agctntacagcagaatttagtaatgacctattaattctataattaaaataacttaatgccattaacctagggaattaaaaaaacttaatggctgggtgtaactgaaattgtggcaaccaaaagtcaccctcaacagccaacaagttcaccaccatttggtctcccaaaaggatgatgcctaggttgccaattgggcccttattacaacttgaactaaacctaactaaagcccttttagttgattaacccaaaacatatntttggtcagccaactttacaaggattgggccattatttagacaaactaaacactctaaaattgaaacaaagtggtgtcatttactcctcctccatttgggccatgatacaactcacaaccttggactttttctccttgaaacttgtgctgtattcaaacacgatggacagcacttgttg

SEQ ID NO: 256243 - DNA, 440 bp, Glycine max
agcttccatcatacacgccctcgtttttgtatggctacacgccctcacctttagaggactacaagtcctcgccttatgaaggctacgcaccctcgccttcagaagactacacgtcctcaccttcaaaggactgcacgtcctcacctttatagggcggcacgccctcaccttcggagggctgcacaccccttcgcttttagagggctacgcgtcctcactttcagtgggctccacatccgcaccataagagaatataaggtcctctgcccttaatgcttaatcgagacttgtgctctcggttaaggggccagtcgtttcctgttatcagttcctgcgccaccccctgatattggagggcgccaactatgcgagcacagccagagagggaggctatcacgcagctactatgcataccggggcaagaattcacccgtgccact

SEQ ID NO: 256244 - DNA, 458 bp, Glycine max
  unsure (1)..(458): unsure at all n locations
agcttataagaacaacattgccttaatcatttcaaatatgcatgcgaattangacgcatcaacaagaatcaagccacggctattgggcaagcaatcaatggggcaaaacacaccaaatgattataatgatggatggctcaaattctcacaaaggtaaaatcatcactttcaaattgagctttcaaaactatcatgacatgtagagaagaatcaaggatttcaagtcacaaaatgtcaagaacttttattttcaaaacaattacccatttcttgaacatatcctgtaattcaaagaanaacatgcaaagtcgtacgtgcacatgaaattgacccaaaatattaaactgaaaatccgacgaaactaacaacattaacaaattaacacaactaacaaattaacaaaaccaacaaaactagcaaaaccaaagaacacttccccccatacttaaacaacacat

SEQ ID NO: 256245 - DNA, 388 bp, Glycine max
  unsure (1)..(388): unsure at all n locations
agcattttctcgtcgcctgtgtcatatgtttattcttgaagcgaagctttggggtctcacttgcggcctccatatagttgcttctaccaactgtcttttaatggaaaaagagtctgactctctattgggggtgaatttcatcaacaatgggtgtccaaattcctactcatgttttgattaaatagaagaaatcaagaggatcacatctagctttcagaattgctccttcttccctatgatttgagaagctaactagttaattgactcctttatccagtatggattctctcaatacaaagagttttattttttatttcttgctagcttttgcgcgagatccctttttggggacttanattgcattccnctattgacgaataataaatct

SEQ ID NO: 256246 - DNA, 323 bp, Glycine max
caccgagctcaactagaacacagaaaagacaacctttttatgtctccggagcccggaaaccaggtgaacagaaccgctatccgtcgtccctcgtgaggattcacggagctctataactgaaaaactgcacctatgaccactacaaagctttataaagaaacaaagacaacgagagagagagagagagagaaatagcatggtgctattagcctagaagacaactgtcaaattagctgacctggcgtggcatggattcggcgaacaagaaggaggggcacggaaacaagcggcagacacatcaaacgttgtcgttgctgcattgc

SEQ ID NO: 256247 - DNA, 434 bp, Glycine max
  unsure (1)..(434): unsure at all n locations
cttggtctttttttctcacaatcattaaatgcctttgatgactaggcgctangagtccaaattggaattggtttcttctccagattatcgcgattcagttgaaaataaaacaaaatattgttcaatctgattaagtgatttaagttatagaaccctagcttcaagtgacttagacttgggttttaattaanattaatattaaccgatttacattaactaagtttaagtagcttagattttattagctagtgaagctagaattttatttagcccatttctttcacaaaattcatattgatcattctcctaagtctatttggaattatcaaaattgggccaagggtcttctaacaattctataaattattggagaaggctaacggacaattanttatattctaagaatgactagattgtcatatanaacaaatata

SEQ ID NO: 256248 - DNA, 454 bp, Glycine max
  unsure (1)..(454): unsure at all n locations
agctngaagcatgcaactattcctgagaactctttctccaacttatcaatgacgggctatcatcctgcatggaccacaccatggtgcccaaaactctaccagcacaggggtttcacttgcaatgacaaggttctttcagcttgaagagtgttgctaggtgcacccagtattattgctggtgcacccaacattcttgaaaaatagcaaaattgcccttacttagttttccacctacggatcagcttaatccgtaagttgatctgtcagtctcttccggattgatcccgaacttctggatcaagttgatctggaagtctcttacggatcaagttgatccgtaagaggaaaaataattataatataattctaaatacaacatatttatgtataatataactaaatctattctttatttactaatcataatatattcataaatattgctctatataaa

SEQ ID NO: 256249 - DNA, 439 bp, Glycine max
  unsure (1)..(439): unsure at all n locations
gcagctntttgttcatcacctttggcatcatcttttgttgtcatcattgttatcatcaaaacacctttgaatcacattcaccatgaaactttgcttctacagagaaaatatctgaacaatacggaattgtcacacgttaataagaaaagaaagaaaaccatgacttgaggtggtcttctccccttgatcgccaacaaaaatcctgtgcactagtggctntttccccccgcactaaacaaatatagaaaaggaaaaggccaaaacactcaaagccaaatttcccaccaaaaagcaccctttccggagatgtcaacatcttctagtagagacaattttagtctcacaattatcaagaactacgtaggtctgagttcctcatcacaaattgaggatacgtaggagcaaaaaccgtgcttttgtcaccacccccctttgtacc

SEQ ID NO: 256250 - DNA, 461 bp, Glycine max
  unsure (1)..(461): unsure at all n locations
tcgaccgggaccttaagcaccgcggctgcagctaatccctgaaattgatgtttgttattngccctggattcagctagggattactttccttagcacccttatgttcaatatgttcgataaataaaaataattttttttttttgctatgtgcatgagagtttcaatgctagttgtcacacaaatgtattacacaaaagtacctatcacataaagagtggctatggaatttagaatgcatcaagaagttttagattgtgtgcctacattctttggaaccaaaggcattgcatggaaaaattactacatacccatacctaacgggaatttctatttacctgctgtgcctttttgagggagatgtcaccacatgttatgcaggatggtggaagcagtcaatatttgatcatcatcatgattntggaaagaatggtactcagtgaaagagcagtctatgcaatgat

SEQ ID NO: 256251 - DNA, 446 bp, Glycine max
  unsure (1)..(446): unsure at all n locations
ctgcagcttggaatgcataaattacttttttggtactgaccgacaacaactcttgtgcattagagaatcataactcactgcaggctttctgactcttgatattttttacaaaaaacttcatttagaagttctctggccgtaatatttgacttcactggttaatgtttaaacaccaaattatcaccgcagtcctctatgttggttcaacaccaaattatcaccgattctcactttgactaataatatcctttttttatatatagatcaaacaaatttatgtaatattacttgattggtgatttaattagctagaataaagtgatgaagcggcaacagaatgcaggggaccagtttttgcagacgaaaattgaagaagctggngcactcgttggtttcttcttggtcttcttgttcttctttcaccatatacatantgttctcactct

SEQ ID NO: 256252 - DNA, 444 bp, Glycine max
  unsure (1)..(444): unsure at all n locations
agctnttaacatcaaatagcaatagctcctatctagagttctcttatttcacttatattggcaggtggttcttcaatttcactaccgctgaatacaaagaacccttcactcttccttttacaagctgctttattatagctaatttagcaattaacaggaataacagacttgcaaatatatcaaaagtaggaacagatttgaagacaatgttagctgatataagagtgtgagagggtctctgatgtaatagtatcgttagcagagcttaagcactgacaaaaacagcaaactatgatcagagcaagtatcagacttgtgaaatccataatcctggggaattctttatctttggtagaacagtgctgaatgtctattcagtaagccaacatgttatatgttcagaatatgctgctttgttagaatggaggaaaactacactttatt

SEQ ID NO: 256253 - DNA, 396 bp, Glycine max
ggatcttaagcacctgagctgcagcttgaagtggtgcccatctttttatatataatactggcaatgtgtctactatcattgtcatcgctttttcgccatttaaggtgccactttgagctgccaggttctccacctttgggtgtattctttgaaagatttgtgcccccccttttgcacatgttctgtagctgcatcctatccgaagacattatactgacactgtctaacgaaggccaccactaggtccttccaagaatggacttgggaaggttccaagttagtgtaccaggtaacagctacccagtaagactttcttggaatgaatgtatcacgaattccttatcttttgcgcatgcctccatctttcgataatacatctttatatggttcttgggg

SEQ ID NO: 256254 - DNA, 445 bp, Glycine max
  unsure (1)..(445): unsure at all n locations
agcttctatataagctgataccatttattttattcacaagttgagttctattcagaaaattagagtttatctcttttatcttagtgagagtgattctcctaaattcttgagtgattcaagaacaccctggctgtatcaaaggactttcacaacctttgtgtgttgccctcgctggaaagagtgattctttccttcctatcatctccacccttgttctttcaaaccacaattccagaaaatccacctctgcccaaaattatctcgtgaccataactctcatttcacacactcaaattaagtgattcttgatcctaaattgaatttcaaaacgagatctttcacctcgttttggaatcacctcatttggagccctgtagcttccgttattgccatttctatatttctgtccagccaccacttaacctacgttntaccatcccattca

SEQ ID NO: 256255 - DNA, 419 bp, Glycine max
  unsure (1)..(419): unsure at all n locations
taatagtttggaggattcacaaatgatggagtgattctgatgtctanaaatttcaaacatatactaaaaaagaaaggaaaattntagtaaacctctagaaggaaagaccccatatttaagaagaaataaaggaggagagcaacacgatcatttgctttgaatacagaaaatctgaacacatgaaagttgagtatcctcaactaaagaaaaagagttattctggtgatgagaaaaagaaaagtataatggtcatttagatgacttacatagtgagaaaagtagtagttcacatgatgaacaagttaatatatatttgatgatcaacacagatgaaacagctgatgtaacaacttggtatcgaattgaaacctcttttgttgtttatcaaatgatgaagaggaaatgccttatgatattat

SEQ ID NO: 256256 - DNA, 209 bp, Glycine max
actcgaagcaattggtcaatctgaacagtggatcagatttgctggtgatttcttgaactgtggtccactacaacttcctttctgctatcttgggctgcctataggtgtcagtctgagaaggaaggtggtgtaggaacctattatcaataaattctggctagatgacaatagaggcgagaatatataatggctggcagaacaccctaact

SEQ ID NO: 256257 - DNA, 311 bp, Glycine max
  unsure (1)..(311): unsure at all n locations
tgggcaaattttttttttctatctaactaattagaaataatctgttatgactttaaaaatagttattattaaagtcaacaaactaagtataaatgataatttatgagtaaatgataatagaaaaaatcttaacattataaaggcatatattattttctctataatatactagctatttgcattttaaattttaaaataataaaaaaattattattaatataaaaatcatcaacagttctacagatcagttnntgataattaccccagcaaagtggccaaacatcataactaaaagttactttacatatata

SEQ ID NO: 256258 - DNA, 390 bp, Glycine max
  unsure (1)..(390): unsure at all n locations
gctttgccggaaatgtattatgaattgtttgtttttaaaacaccatttcctaagtaaccatgcattaagcaccatgttcaattattttgtttttaagtgaaacgggtttatgatcccaacatggttggcttcgggtgcctaacacatgaaactaagaatgtagtgtgaagtttcacgcttccccctttttttgttttgttttgtagaggaaaacgcaaggatgagcaaacatgccacaaatggtntcactcttcagatanaaagtttgtgaacgcatatgcatgatgatgccatgagtcatgccaaatgtgatgcttgaatatgataacggacanatcacgatatgcccatatgatgtatgagagatcttatgcgatcatgatatgaatg

SEQ ID NO: 256259 - DNA, 375 bp, Glycine max
tcaccaaaatcagccacaacagaacaattatgacctctacagcaacaagtacaatcccgggtggaggaatcatcccaaccttagatggtcgaatccttcacaacagcagcaacaacaacaacaaccttattttctaaatgttgttggcccaagtagaccatacgttcctccaccaatccaacagcaacagccctagaaacacaaatagttgagctcctcccaacctttccttgaagaacttgtgaggcaaatgactatgcaaaacatgcagtttcaataagaaaccagagcctccatcagagctaactaatcagatggacaattggctcacagtaaataacaacaatcccaaattttacagataccttctcatct

SEQ ID NO: 256260 - DNA, 253 bp, Glycine max
tcttattagtttctccaaaagataatatttaacttatgcataagttaattttaaattaaagggaagcttatttcttttttattattattttcctctcataagagtgcttatggagaagtttatgcaaacaaacccatgttatatatcactgcacaaggggaaaagagaaagaaaagtcagttacaatagatttacacatgtctccacaacatttaatcaccatcacatattactgatgaaaaagtccaatatt

SEQ ID NO: 256261 - DNA, 417 bp, Glycine max
  unsure (1)..(417): unsure at all n locations
gcttctaaactttatacaagaatgaagctcttattccacttgttagacaagtggcctcagatatcttaagaagggggggggttgaattaagatattccaaactacttccccaattaaaaattctatttcacttttattcaagttatgaattcccttaatggcaatcttcttaaatattgattcaaataaaacaatctgaatatgaatgtaaagcaataataaataaaggagattaaggcgcgagaaagtgcaactcacattatactggttcggccacacccttatgcctacgtccagtccccaagcaacccgcttgagagntccactatcttgtaatccttttacagttctaacacacaggacaatcttctttgtgttatattctttacacaaggactacagctcttatcttagaaa

SEQ ID NO: 256262 - DNA, 252 bp, Glycine max
  unsure (1)..(252): unsure at all n locations
agtttagatcgacttgttgacgctatgtgttatgccaaaagataggtatttttttgcttccttttacttttgttgcttgaggttgtgccttttattatacaaccaatggcatgacaattatctttntaataattcattttacatgttcattttttttgtgatctaattctgatttgaataaagcttgttcttttagtgtttttctaaaaaccccttgtaattttgctaggggttgatctatacccatatggg

SEQ ID NO: 256263 - DNA, 386 bp, Glycine max
  unsure (1)..(386): unsure at all n locations
gctgaatcggacatccgtgtgatatgttattatcatntgaatttctcaagagctttcgttgttcaaattcgagcctctcgacatcttatgcgcccgaatcggacatccgtgagaaaagttatgaccatttgaatttcttgagagtttccaatgtttaatttcgagcgtatcgatatattataagcttgaatcggatatccgtgtgaaatgttatgaccatttgaatttntcacagcttctcttgtcacctcgagccttcgaatattatgcgcctgaatcggacatccgtgtgaaaagtatgaccatttaaatttcgcgagagcttcgatgtttatttcagcgttcacatatataacctgatcgacatcgtggaaagtatgacattg

SEQ ID NO: 256264 - DNA, 278 bp, Glycine max
  unsure (1)..(278): unsure at all n locations
tacaagattaagggttaattactaaaggtcatgaacattctctacacgcatatgagcttctaaagttagttgatcttcttgaacttatcctgagacaatgagcttttgatgtgaatttatttttatttgagcttttccatgtttaggatgtngataagtataaattgggaaatccaagaaaattattaccttaatatcaaatgcatgagcttatgggtggatgattctaggagtaccttgaactaaggagctatggaggttggtgggataaatctgat

SEQ ID NO: 256265 - DNA, 283 bp, Glycine max
atcacattggccatgttatcatcttcctgaactccatcttcatcttctggggcctctgcgggccctacccttacctgaaaactgggtctgtctccaggctatgcaactgtggccccgaactgcttgggagtaggccatgggtaaggactgggatcctaccgtgctgatcaggatactgtagaagctctatcaactgacctgaccctatggtagccgcttgtggcatccaatgctgcatataaagtcatctctgatggactgaatgactctaaatatggtgctg

SEQ ID NO: 256266 - DNA, 359 bp, Glycine max
  unsure (1)..(359): unsure at all n locations
actatcatgatggggttgggttgagtggtcaatgatgtgtggctgctgaccactataggaaacacattgcaccacgtttctttgttgggggaatggctatttcctgttagcactttgacccctcccttatctggccaggctctgataggctacaagctcgccctaatntggcctgaacaatccctttagcctgcctacccattctttcttccgagcctaaaattcacagatgttttcccgacctgagggcaagtgcaccccgagcttatactttggattttatcttttcccccatctaaacactggacactatttaaacatctgccaagtaactctatagacatgtatctcgttttggg

SEQ ID NO: 256267 - DNA, 307 bp, Glycine max
gatatttgcacaaaaattatggagaaataagaaaagagtggtttaagagattcttgccaaagctttgagaaaaggagtcttaagaacactattatggagcttggaagaagaaaatggtggttgtactctcttgaaggtctcatgcaagaggaagaagaatgaggttccaagtttttgttgtgtgaaggaaatgatgacttatggcccaagggagtgtaagcttaattggaagcatgaatgacccctttgatggccaagattaacgtgcaagagggtgtcattagtgggttgtttgctttgaatttta

SEQ ID NO: 256268 - DNA, 197 bp, Glycine max
aacagggggacgctggctagtctccctatgattttacctagtgaaatgacttgacttaccagtacatggtctattttgtcatgtactcctaggcatccgatgagaattttcattggaatggtctcacattgcatataggattgagtcttagtgtatctgttgcataatgtttgtgtaatgatcattgtgaattgtta

SEQ ID NO: 256269 - DNA, 361 bp, Glycine max
tattttctatgaattcagacatgtgattttaaaatgagagtgagttgagtcctgtttatgaggtgttttaagtggtgtaaggggaggtaaattgcagtccatttgaacagttagttaaatgagtgagttgaaaatgaaattggatttcaagtctgtcaaccaaactggtaatttacttgaagactacccaattcctcgggttccttgttttttttccttagctcctttggtcttttagaccatgtggttctgacttcccaagttcagtccatttagaggtttggatgtagaccatgggtgatgttgttgtgtactgttatgcacaagtctgatttcagttttttatgaatttgatttgcag

SEQ ID NO: 256270 - DNA, 343 bp, Glycine max
  unsure (1)..(343): unsure at all n locations
atgatgcatataaattcataaaaggatgtattntagtttgtcccacttgttcttcgtgaagttaagtgaaactcaaacggtcaggatgtgaatagggagatataaggttggtagggagggaggaataagttgtgggattgaatctttntactaacaagaattaacaactaatatttgttgatcgnatcnataccatgcgaatagtaaatcaagagaaaaaagtatatttatcatattatttaacggaaatactacctgcattgattttttaaaaaaagtacctggattgcatagttgaaaataagtgttttctatgaagggtataagtattatactatattta

SEQ ID NO: 256271 - DNA, 193 bp, Glycine max
aattcacgaaagaaccacatgtagactctaatgagcttcacaatttatcaataaacaaaaattagttgtttccaacaaagaaaaacagaaattaattatttccttgttgacaaaacaagacaatcgcgcgttaggattttcaagtccataacactcagaatcagctaaagccatttccacagcattctacagc

SEQ ID NO: 256272 - DNA, 302 bp, Glycine max
  unsure (1)..(302): unsure at all n locations
ccgtgctgtgacttgcattcctatacagccaagtttcccaccaacccaacaatgtcattactcagccaataacaaaccttctccttacccacncgccagttattcacanagggctccctacaatcacacaaagactacctacnntgatttcaatgacaaacaccacctttagcatacaccagaacaccaaccaagatatgatatttgagcgtagagcctgacaatcacccaatccagtgtctatgtnactngctccatattacttaaaatcaatggagcataccctatcgagtatcacctca

SEQ ID NO: 256273 - DNA, 383 bp, Glycine max
  unsure (1)..(383): unsure at all n locations
tttatttgcccctagagtattatttttctttcattctaaaacggagaccgattctttatcagacctaataaggttattaaagtcatctttcctcttctaatataatagaattgactactttggaagaccacgttagatatgaactcatttggtggaatggtgaccaacaatgtggatgtaagtgcaagtgctgcacacactcatacgcactagcctcctaatnnagtaaattacccgcaggagtatatattaatcagtcaagtgcgtttatgatcgtgcactttgcgattngtcttagaataagtgatgtttctctaaaacacggtcttgagatatattgatatgcatcatatgcatgatttgtaaattttcgtcaattctac

SEQ ID NO: 256274 - DNA, 349 bp, Glycine max
  unsure (1)..(349): unsure at all n locations
gcgggtgagaattcaggggcatttttgtattattcaaaagaaagaaatgacagngatagataccgcgatacaatcaatctaatttactcttctagaaaaaatcaacttaagctacttcggttctttagattccgtggctatcactactaaaaaaaataagtctgtaaaattaggtcttaaaatttttaggatcgattataacccgatattgaaattatcgatcttaaaatctgctcctcatatcgcacacaaatcatgctgaagtgcatcacaacatctatctctagatgataaattgatattgtgatttgatgctgcttgtcatacaatatcagtgaagaaaactgtg

SEQ ID NO: 256275 - DNA, 150 bp, Glycine max
attcatgaaagttcaattccagggaggaaattgagcttagcgcgcttagcgctgctacaataatttttcaacaaagaaggaattgcgcttagcgcatcatctccgctaagcccaaatcagtgaagttcaattctagagaagaacatgggc

SEQ ID NO: 256276 - DNA, 290 bp, Glycine max
  unsure (1)..(290): unsure at all n locations
catacacatgcatatttgttatcttgtgataggagcaggatcgttttacgcaatagtcaaataccaagccaaatccaaagacagagacgaatcgaggtaagcggtaacgtggccacgattngctgcacaatgtcatctcctgcttttaggtacttagggacgggcatgagtggaggctaggcccatgatcacggttcatcgtccatgtctagctccggacaagcgagaaacgctgctgggaggcagcctantatcctttanattcctactttattatggttgttgttatt

SEQ ID NO: 256277 - DNA, 431 bp, Glycine max
  unsure (1)..(431): unsure at all n locations
agcttaagctctggagagaggaaagagataatcattattacatggcatggncttaaaagaggagttagcagctcgctcaagatccaagaaaagtttggcccaacacttaaaagccacggagcaaagcatgctagctataataggacagtacaaagaagagttaaaccagtctttgacccatgagcaaaagctagaagaggacttcgcacaagcatacgccgagaaggaagcaagaggcggggattgatgctcgcatcaaaacaccatgggatggataggttcgccttgaccttaaatggaagtcaagacctcccgcgactactagccaaagcagggccatggccgaagtgtgtcagccccagaggaaattcacgggctaatcaattactgtcaacacatgataagattaatggcccatataattagagatc

SEQ ID NO: 256278 - DNA, 412 bp, Glycine max
  unsure (1)..(412): unsure at all n locations
aactatataacatttctcttgttctagtttaagctctccttcctctctctctttctctctctccccctctcttcttttttctcctttnttttggttttggcaattccagttctgacttttagttttatcaataaaatttcgttcttcaatctataatttcgttctctattgattaatggaaggctaagtccccatcattggtttctcttgaggatcaagccagttctctttgacgttattattatgggtaaatatgttcagtttttcctcttcactaattacctctgaattgttgctattaattcatgcatgttagtgcttgttaattgctctgccttaattacgtcatgctaatgatcgttatgataattggggatgtgttgttaacacataatgaatgcctatgtaaatt

SEQ ID NO: 256279 - DNA, 311 bp, Glycine max
  unsure (1)..(311): unsure at all n locations
caactttntatttntattggtaaaaggtgggagaggcaccttcaattcacaggaatacaaggacatgtttggattacagtttccaaatttaagtttaagttaaacttaagtttacaaactaaatttgcaagaatatcctaatagttgtttttcccaaattgagtgttgaggcaaaattttaaactcaacgttggattgcagtgcaaaatatctatagttggtctcctaagtaagtttaggctaatttaacttaaactattttagagaaaataacatatgtaactattttctttaatgattaaactccattg

SEQ ID NO: 256280 - DNA, 343 bp, Glycine max
cttataagaaatggttagttggatactatgataatagtctttgcttttgtgaaatgtccttattaagagtttaagtagttttgaattaattaagtatttaaccgaaacaccaataaataagagattcttttatgattaaaaaaattactttattgatattttaaagtaataaatattctgaagggaaaaaaaatcctcggtcacaatattgaatggaagagtagattaatcaactgtgtattgatggctcagattcacttatgtgcagaatgttctatagacacatagtctattagtgcactgttctaataagactctaaaaccccaattaagcaaataattg

SEQ ID NO: 256281 - DNA, 285 bp, Glycine max
  unsure (1)..(285): unsure at all n locations
actaacagtcatgtaaaagcaactaataaaacttttataatatttttttaatcaaaacttttataatcataagatatagtaaggataacatcataaaaacagagaaattccagcaccgataaaatgaaaataaaatatattatctcttaatacggtagaaaagatattatattctaactatgcatccataagttntgatgcaggagtagatcttgagctttgcaagatatgtaatttactaaccttacctccctcccttaaaagagatgtgttgcatccccgtat

SEQ ID NO: 256282 - DNA, 257 bp, Glycine max
ttagcactgggtgactaaacgtaaggaagttttttttgatggccatgtgaacgtggagttataaagttgtacgatgcacgacaaatacggtggtgggcactcaattgctttgtacgggtgattaacgatattgatacaaacaagccccatggggaaatctctgctgctccaacatgattgtaatgattggttaatgcgaagtctatgcatgctactgagcctgcacgggactgatagcgtgcatacctatgtttgca

SEQ ID NO: 256283 - DNA, 356 bp, Glycine max
  unsure (1)..(356): unsure at all n locations
cactaaaggatttcaccttcaaaggaccacaaacatctgaatgcaccaattcaagcaacttatattttctggagggaggatgcttcttgaaggatactttggtctgcttaccaactatttaacgagaacatttctccaaatttgcattcttcaatcctagaagtatatccttcttggctaaacaattcatcccctcgtcactgatatgacaacctttggtgcacanagatgccttatatccataacattcacactatctctagcaaccaaagcttttgcccaatatagctttaaaatttctccccttggcacaccaagttaccttgtgagtttcacttcagaacatggtgtatata

SEQ ID NO: 256284 - DNA, 233 bp, Glycine max
aatgggggaaagtgaaaaaaaaggggtagccttcttggcacttctctctctctcgaaattgctgaggaaaattatttccgtgaagaaaatcctagccgaggcacttgtgtaacgtttccgtgagtaattacgtgaagattctcgaccgttcttcaacattcatcgttcggtcttcgttttcttctctctcacgggtccacttcgaccgagcttttaattaattctatgtaccc

SEQ ID NO: 256285 - DNA, 346 bp, Glycine max
  unsure (1)..(346): unsure at all n locations
tcaacccatcttgcctgaagtacgtaataacattaattcctataatttaaaatgggtacttacgtaagtcttttttaaatgttttgtactcctgtaggaagcagagaaggatgtgagctcaccattgaagactgttgaggaggaaaaggcagctgaggttattgatccattgggagagttggtgaagaacttgttcgcgtcaccaaaggctgcgaggtgtatgggatggtgctaaattgggatctataatgtcaaagatggcttcttcatcacacaccgctgatgtgagcaagataatattangagacaagtgtttaaacatctccattctacagctatggcttat

SEQ ID NO: 256286 - DNA, 346 bp, Glycine max
agcttgagatgaggaagtgtagaagggtgaatctttctgcttttattcgttgaccacagagtggtacctggagatatgtcgcgggggtcaagagaccttggggacgtcaggtggggtgctattgcccaaaaccaagcttgaccaatcccgacccaacccgggcatagtcagtcagtgagaacctgtgatgtacctaaacaggcgagctcctggcagtcaacagataaaaggaacaaaacccaaagcaggggctgtggggctggccactggaatttgtgtgatatatgggttggggcctctggtaatcgattaccaaggggtgggaatcgatacaaggcttaaaatg

SEQ ID NO: 256287 - DNA, 379 bp, Glycine max
  unsure (1)..(379): unsure at all n locations
caactcgaaacctgctgcaccacatgctcctcaagcacatctagcagaaaaatagctgctgtggtagtggaggcaaacatggtcgacaacaaggtggactggattctagataccggtgcttctaaacacttatgcgccaacaaagagctttttcaccagattgaggatgctgatgacggagaatgtgttttcatgggaattcagctacaactgagtgcttggaaaggaaagattctccttaaacttacttctggaaaaacattatctttgagtgatgttttgtatgttccctctctgcganggacctaatttctggagttgctaaatagactggataaaatggttttgaagtgcaaagagtataactaaatggaacttg

SEQ ID NO: 256288 - DNA, 403 bp, Glycine max
  unsure (1)..(403): unsure at all n locations
agctgaagaatctgtttagaatttctatttagttcacaattctttagntggatattccatgaaggtttaaaatcatcagcagcatcacagaggtttatgtgtttttgttctacattgtgcaaaaggcatgactggttattttctttaatccatattgccgtctgaacttgtcgagcaataagtctccagcacattgctgtagtcaaattcatcaacttatcccaaatgaccgataatctttatcttctataagcagggggggctgaataaacaaagtacccattaaagcgaagaaggcgattcaactccttcagtaaaatcccatctgcnaanacanaataatagacataacaagtctgcagatacatgcatttcatgatactgacaatatgttatcatcacc

SEQ ID NO: 256289 - DNA, 185 bp, Glycine max
gtcgtatctagtcaaggtcttagagaccatacaagtttcctaacgatttctaattatgtgggccattaagtctatcatatgctgacaatagccgagaagcccatgaatctcttcgggggcggagtaggtgtctgccatcgccttggccttggctaacaatcggggaagttcttgactcccgttca

SEQ ID NO: 256290 - DNA, 439 bp, Glycine max
  unsure (1)..(439): unsure at all n locations
gcttatttactttacctttactcactttagatgatcctataaaactattatttgatgcttgcatgcaatcactattctactcaccgcaatgcccaagcgaccaccaattccaaaagtagcttgaccaatatctaggtaggttttgagtccaggtttgctttctaaacatcttattaatagcatcccagtataacaacacatgatagcaaatattagaagtattataaggctgaggaacgctcattctctcatgatatggaatngaagaattctatcccacataatatattggttccttcatagaaaacaaattatntaagtccctgaataatgaaataacattctttgtcataaacaatatatccatgtctttggagtggattgagtttaaaaactaaatattttgtagtcattaaataccattgtatttacatatgac

SEQ ID NO: 256291 - DNA, 321 bp, Glycine max
  unsure (1)..(321): unsure at all n locations
ctacctcatctcatgattctcagcccacagtcgcacttcttagaagctcttgggcttctaatgtaaacaatgcatagaccttacccgacttatcttgtactaaaattcagctatgaattggaagaataggaactgcaaagatcaaagtcttggtcacttggtcataaaaggtgtcacagacatgctctcgcgaaagttcgcggaacgcttgcagtctataacctcangtcataacacaatcataacaaaaacttgtagctgtgaaggtgcttctttcacgttgagagtataattcaaaaacttgcatctacggatatattg

SEQ ID NO: 256292 - DNA, 371 bp, Glycine max
  unsure (1)..(371): unsure at all n locations
atacctattaaaanaggagaaaatagaggggtagttgagtgcaaaccatgtgcttatataggttattatattaattgtacataaatagaaaatatttggtttagattatgtgcctatataaaccgtaattattaatagaatcagaatattatttctgattacgaaactcttccctcaactagaagctcaactctcgttattacaagactttattccaacaataataaaacatataaatgagttccaccaaaaataaataatttgaaaagcaagttacgggtgttggagaaatcagagaaagntctatgaagnatatcttttccaatagctggaatggtcatcagtagaaagaaaatcatgacaacataaca

SEQ ID NO: 256293 - DNA, 435 bp, Glycine max
  unsure (1)..(435): unsure at all n locations
gcttctaaacaacattccatcacttgtgttagttctctttggatgcaaacattaaccaagttcactacttacagtaaacaggccatactaatagtaaaaaacgtgtgcacattccatgaaggtacaaagttaaaggcaaaaatgaaaagggacacacaaaccttcgatggcagggtgacatggtcacggtacgatatgagtcaaggcacgaagctgtgacagcatggccacgatcttatgacaacacacacagatcagagaaataacctttcaaatgatgtaactactgttaagaccacagagaactttgcaatttgtgagcttcctcttcgaattcaagacgctaatgttanaggcactctaacactgcanataagaaacacanattaatatattcaccnacaaattaaaacattagaanataaatatgacact

SEQ ID NO: 256294 - DNA, 379 bp, Glycine max
  unsure (1)..(379): unsure at all n locations
atccttgagtcacctgcggcatgcaagcttgtagggttaaagtctcacgattgtctcgtgctcatgcaacaatggttagccgtggctatacgagacatcttgccaaacaaagtcaggttaacgataactcgcctgtgctttttcttccatgctatatgtagcaaagtcattgatccagtcatgtttgatgagttggaaaatgaggccgcaattatactgtgccagttggagatgtattttccccctattttctttgacatcatattcacttngatgcatctggcagagaaataaatgttgtggttctggttatctacggtggatgtacccggttgagcaatacatgaagatcttaaaagggatacaaagaatctatatc

SEQ ID NO: 256295 - DNA, 332 bp, Glycine max
  unsure (1)..(332): unsure at all n locations
cacaacaagttttccacattcacaaatcgcgcataaacccaccatcccctgtngcccacctncaactgagctcacgtactcccacgtagcccatatcctcgtttctctcaacaccgggtccccatcaatccttccaagcttccccaacatccaagtaactcaacatttcaaacaaccaaccatcacagccagaaacagggcanaggcagaaaactctacccaaaacaccaaccaaaatcacagcttttctcacttaaacaccccagtaacattcctttcgtcaatcgttaccgtggatcgactcaaatttactgagtcttagacacaaccta

SEQ ID NO: 256296 - DNA, 106 bp, Glycine max
tgataaaaaaataaatatgttgcaatacatagatattgagtattatatacaatatataaacaaaaacatgccacaattgtgcaattttttattattatttctatta

SEQ ID NO: 256297 - DNA, 245 bp, Glycine max
agtgaccgtacttgctggaattgtgacaagagatgtcactttatcaatcagtgcaaggcacccacaacaacaagccacagaaacaagaagtgcgatgatgatgaatcagcaaatgcaacaactgatgaacttgatgatgcatttaatttgcagtttgggatagtctgttgattcatggatcatggaatcaggtgcgtcgttccacactactccccctaaagaattattgtctaattatgtttctg

SEQ ID NO: 256298 - DNA, 361 bp, Glycine max
  unsure (1)..(361): unsure at all n locations
tttccacatccacaaagcgcgcataaacccatcacccctggtgccacctcaactgactcacgtactccatgtagccatatcctcgtttctctcaacaccaggtccctatcaatcctcccaagcttccccaacattcaagtaattcaacaatcaaacaccacaacgatcacagccaaacacagggaaaggcnataactntgccaaaacaccaaccagaatcacagtctttctcacttaaagaccccagtaacaatccttcgtccaattcgtaaccgttgatcgactcaaaatgtactggaagctctagacataacctacttttaccgtgggactactagcaacaccagactcatcacatact

SEQ ID NO: 256299 - DNA, 289 bp, Glycine max
  unsure (1)..(289): unsure at all n locations
atcttgttcataattttgaggactcgttctactaccttccgagattgggttgttgttctctatttggctaacgttgctctcttgtcaatgcacaagagcgacgaatcaatccctaattattttaagttgtaaccgctaatcaagtgctctaaatcaaaataatagggatttntgttcaaacgcctagcattaaaaatcatattgaatataatctcatcatgttgatcggaagaacccttactctcctttaatgatgatttttagaaaatacatctgaattggctatcct

SEQ ID NO: 256300 - DNA, 347 bp, Glycine max
  unsure (1)..(347): unsure at all n locations
aaanngaatttatgaaatctttgttatcatggtttgaagattctcaaaccagatatacttaacatgagaggaaaatatcaacattgagaatccaaatatttgaattcaagaacaatagatctgtatattatttaagaaatagagggtcttacatggttgtgatattgtctgaaagcttattagtaggaatngaatcttcctcgattgcctgaggcactgaatataacaaacaacagtcagttgaaacagntatagtcttagactgacgtctgaacaagtaaatctcactctcattatgtcngggcacacactcctattttggatccaaaaagtatgcataaccgagt

SEQ ID NO: 256301 - DNA, 264 bp, Glycine max
atacccttaggtgctttgctgatggcttcttcccgttccaagcttcaattggagtcttgtcttttacagacttagttggacatctgttgagcatgtaaacagtagtgtagactgcttcagcccagaatatgttaggtagtcccttctccttgagcatcgatctagccatttccataactgtgcgattcttctctcaacactcatttgtgaggaaatatgcgactgaagttttcgctcaatgccttcatcctcacaaaatctttc

SEQ ID NO: 256302 - DNA, 326 bp, Glycine max
  unsure (1)..(326): unsure at all n locations
gatgaaagatcttgcgaagcctctcttgtattaggaatcaagatactaagagatcgctttcaaggtatcctaaggttgtcacaagagagttatatcaataaggtcctaaatagattccacatganagatagtaaactaggagataccccgatagctaaaggagacataattagtctcaaacaatggccccaatactgaccncgaaagacacagatgcataagattccttatgcatcagcaattatgaagtctaatatacgctcaagtttgcacttgtcctgatataacatttgtagaggagtctgggcaatatttgagtatcctgg

SEQ ID NO: 256303 - DNA, 290 bp, Glycine max
  unsure (1)..(290): unsure at all n locations
cctcatggactcctctaagaacaatagcatcatttcttacactgaattgttgggagtnggaagccatcttctcaatcaaattcctagcctcaacaggggtcatatcaccaagagctccaccactggcagcatcaatcatactcctctccatgttgctaagtccctcatagaaatactgaagaaggagttgcttanactctggcggcgaggcacttgccacaatntcttgaatctttcccagtactcatacaagctttctccactaagtttcctgatgcctgaaatgtttt

SEQ ID NO: 256304 - DNA, 274 bp, Glycine max
  unsure (1)..(274): unsure at all n locations
cctgaaattctgcagcatttgcaaagcagattcaaattaattgaagttatgtacgagcactgcagcttttacaaaaataagcactacagcttatntaagacacanattctgcagcatttgcagtatgtgggtggaaaaagggggggagtggaaattcacgcacacacatcgctgcagaagcttggatggcagatgtttccgtaatgatgttgctggcagctgtattcagaatcacaaaaaagatgagtggatctggaaatagaccctactggac

SEQ ID NO: 256305 - DNA, 307 bp, Glycine max
gggatcacatttatggagatatactacgcaggaaaaagggtcttggtatatcattcatccttttaactattctgataaatgggattttaatttgtattccatctacccgtaaaatttggtgataaaatgtggttatgattgtaggaggggaaataataactggaaatgtaattgagaaaatagacattgacacactttaatgccaataaatacttgttgtctaaaaccaattgtaactgctccttttaaattacttattttctagatgttgcttaagtacttaatttgatcatgcatgcctaatgac

SEQ ID NO: 256306 - DNA, 436 bp, Glycine max
  unsure (1)..(436): unsure at all n locations
gcttcaccctataagaagcttgctccaaattgcaattcacataattgacttagagtntaattttcacaactatactgtcacgacccacccttggaccatgaccaacgcacagactatgactttcttagtttggccagcctatcctatataaaataacctgtaaaagaacacataatatatctagacaaatctatataaatatatctcattctatccatttaatatcaagggccgcagttgcaacaccacccttaacatattgtcgaaaatatccacaatnaacaatattgattataagtactaatcatcaagtatctcaaaacatcataagtcatcctcatatatctataagagagaatcattaattcaaataaagaatctcttaacttatactacctggtcctatagctgattatctgagtacaaccaatattat

SEQ ID NO: 256307 - DNA, 264 bp, Glycine max
  unsure (1)..(264): unsure at all n locations
gaaggtgtttactttttttctttcagctgcagctcgtagccagaaaatcaaaaaatactgcaattactaccccgttattttaaccaccgtattatcctaacaaaagccctactaaatatacatggctacgctatctcctaccacagccaccgccctatacctaaaattgaagagtgatngataacttgagctagtttaaagaaagcagtctaaagttaaattgtggaactgaacaatcacagccgtgactgatataatatgatt

SEQ ID NO: 256308 - DNA, 309 bp, Glycine max
tcttccctcttcaacatcatcctcaagtctttcaagaagaatatcagatatagtctcaaagatttttaatcgaagaagaagaactattgttgaaaatatggtagctatacaaagacctacgaaccatattagaatcccattagaagcattggcaataaaatatgaaaatgtaagagggtccgggggaaatgattgaacctcccccccctcccctcattgaaaacaatttggtaccttggctacttttttttttttggttttttcgttgggaattgagctacggctacataatgtcagctctcgatttgt

SEQ ID NO: 256309 - DNA, 353 bp, Glycine max
  unsure (1)..(353): unsure at all n locations
tttgaatcaaatttaactgaatttccccataatacttggtggattgattttagatgtacaactcatgtntctaatatgatgcagggattccttacaaactgaaccataaacccgaatgagatgtttgtcttcatgaggaatatagtgaaagttcaagtggaagttgttgggacttatcgtttaatccttgacactacgctccttacaccattgaatgtttatgtactattattctagggaattagtttctttgtctaaacttgatgttactagatactctttaggttgggaatcgttgttactttgataacctacttgatgattgaactagtcacttatgatgttatataatt

SEQ ID NO: 256310 - DNA, 332 bp, Glycine max
tggggcaaaacacaaccaaagaatatgatgatggatggctcaaatcctcacaaaggtaaacctatcactttcaaatcgagttttcaaaactatcatgacatgtaaaggaaaaacaagggattcaaatcacaaaatgtcaagaccccccatctcaacaacacccatacttgaaatttctatattcaaagacaacatgcaatttaacacacaaaactaacacaattaacctaaaccaacaaactaacaatataacttattaacacaactaacaaaccataccaaagacacacttcccccccaactaaacacacattgcctcaatgacacataaa

SEQ ID NO: 256311 - DNA, 378 bp, Glycine max
  unsure (1)..(378): unsure at all n locations
ttggtattttctctgaaacccttctcctatatgtgaaagttgctcccttgtaatagagagctaaaatcctttgttgggaatctctactgaatacttgatgtaaatattattattatctatttgaagttatcttcatgtgttcaatgtttctatgtccgcttattgtatgcatgcttgtggtttgatcaccctgtgcngatgctcacgaactctacantggaaatgtactgtttccttataacttgatagagcagggctagataactgcattgataggaatagagttgtantctatgaataccactaacttttgtgtattaaacctgtgtaaatngatcaaactccctcaatatatggctatttgtagtgttgaattac

SEQ ID NO: 256312 - DNA, 413 bp, Glycine max
  unsure (1)..(413): unsure at all n locations
agctttggagagaaacatggttccnacttattntatttcaaaaaggaagtcgtatctagtcaaggtctgagagaccatacaagtttcctaacgatttctaattatgtgggccattaagtctatcatatgctgacaatagccgagaagcccatgaatctcttcgggggcggagtaggtgtctgccatcgccttggccttggctaacaatcggggaagttcttgactcccgttcacagaagagcaaccgaccatccacatggttgcctcttggtgtaaagaagtcgatcaccccttcctctagcctctttntccgtgtatacttgggcatattcgtccgcaatcctatgctcgtggccacggctaacctaactcttcttgtacttgggatgatacancatgtggtctcgctccat

SEQ ID NO: 256313 - DNA, 451 bp, Glycine max
  unsure (1)..(451): unsure at all n locations
ttaagcacctgcggcatgccaagcttctttggaccttgaacaagctattcttttctctttcagaaccatgctatgtgctcgcgactggtccctttcttcccttcgcaactggagttcattattgctaccccataaagctccgcgaaatttgttccggccatactcttccttgcgagccctcttggtctcttgttcaagggctcttgcggtaattgcattctcttcccgtaacccggcgcactccttccgaacgtgctgccaccaactcactcctctngcgagttttgctttctaactcgcttttgagagcttggacttttcgtcttttcccgtgcttcaaattctttcgctgagacttttacttgggagccatctaacctcgatccaactttagccattctggacccacaatgatgccttacgagtgctctagctcttgtctttcttaccg

SEQ ID NO: 256314 - DNA, 471 bp, Glycine max
  unsure (1)..(471): unsure at all n locations
ctcgacccggatccttgagtcacctgcggcatgcaagcttctccggggcttcttcagtcaagatggtgtcttcagtcattnttgtctcatcaacagaattagtgtcttctcttcctaaggtcaaaaccacatccattgctgcttcctaataaaataaactacctaatacaatacatgcaaagcaaagacacaacaaggattagcaaactgctggggaaagaaacaaaaattgaaggaaaatcaaatcaagattttgaatggcttccacatacagaaaaatctctaccaattctctctatgaatgaattctggaaaccacacatgcctgcatgacagagaaaattttactttcacaaaacctcacactaaagaaaagggaacaaaggtatctctcatcaatttaagaactggcacccattattcacagaaatcgattacttaccaccaaagagtaaaacaaacatttatttt

SEQ ID NO: 256315 - DNA, 242 bp, Glycine max
gtgacttaactggtgggagtgactagcctgctccaaatctgatccaaaactcaattccttttttggccatcctggtcattctccatgtttttaagcagtttccccaagagtaggttatagaagaacatttgactatcacaggtgttgaaggacccatgaaaaagtggctgtggtgcttgaaggcttaagtttttagcttaatgtcggtaatttttgtggattgggaagatatggccttggca

SEQ ID NO: 256316 - DNA, 282 bp, Glycine max
  unsure (1)..(282): unsure at all n locations
tatagtcaacccaaatgtggtacttttgggtatacttaatttgataattcgcaagatattgacaatgtgattgtgagaattgaattggattgtatttgtttagataacttcccctagcctcaagtctaactaggttggttgctttgttgtctcaattatgatttgtgcatcgatatccctcccatgttacagacaaaactcttttttcattcttttagcgaanaaactctttntttcattctgtttngcgggcaatattgcgctttgatatcatgtataatt

SEQ ID NO: 256317 - DNA, 363 bp, Glycine max
  unsure (1)..(363): unsure at all n locations
tgtgggtcccaaaagaggcaaatttgatcatcctactaggacgactgagaaaactggggcaaatgaagagggtgagaaagagggagaaacccatgctgtgactgccattcctatacggccaagtttcccaccaaacccaacaatgtcattactcagtcaataacaaacctcctccttacccaccacccagttatccacaaaggcatccctaaatcaacacnagcctgtctaccgcacttcaatgacgaagaccacctttagcacaaaccanaaaaacaccaacaaaaaggaatttgcagcaaaacctgtgggncaccccnattccgtgtctatgctaaactgaccctatcactcataattaat

SEQ ID NO: 256318 - DNA, 317 bp, Glycine max
  unsure (1)..(317): unsure at all n locations
acaattttaattttggttatggttgattaattatatttcattaacctcatcaattcttcttttcttaataataaaaaagttaaattacttatttggcttttataatttcataatttttattttttttagtctttataatttgaaagtgaattttaatcctatcattatattacatctctttaatcttttaattttaaaaataagttttttaatctttatagtcctggtattttcaaagtataatactaaaagagaaatannattaaactatataactanacataatattttaactatagaactaaaagaataaaatg

SEQ ID NO: 256319 - DNA, 338 bp, Glycine max
  unsure (1)..(338): unsure at all n locations
gaaatgacaaccaaacagatggaatgaatatgttgttcctcatcttagtccctactcccccaaaatcgttcccatctccaatattttacaagaacaaaaatttggacctatcctagatatatatgctctatctccatccatgttcagtgaaaattattattactttatgacaatatatttcgtatatttttagctagaattaaaactaattntagaggtcattaaatataattgaaaaagccataaaaatggaatgattcatagcataaactcaactccttacaaaataaagatgtcaagtgtagccctagtctaagagggtatttcctcttaaagta

SEQ ID NO: 256320 - DNA, 163 bp, Glycine max
tatcgagacaatgtccggcgacgacattcgtttgagcgagaaacaacaaccacgacacagtaccagattcttccaacgatactgctctcacctttccttccaacggttgtatcacaatccgagatccaaaagcgagagcggaattggaatctccacattttat

SEQ ID NO: 256321 - DNA, 268 bp, Glycine max
  unsure (1)..(268): unsure at all n locations
acacacccctctcataactaagctcacctccttgagaagctttcttaagaagaatcctaaagaagctagagcttagctacacacacctctctaatagctaagctcacccccatgacaaanaaacatgagaatacaaaaaaagtccttactacaaagactactcanaactccnaaatacacgctaaacctatctactagaattgcaaaatacaaggcccagacgaaggaaaacctattctaatatttacaaatataagcggctcatact

SEQ ID NO: 256322 - DNA, 132 bp, Glycine max
  unsure (1)..(132): unsure at all n locations
tcttgatttcaagacttatattgtcatcatcaaaaagggggagattgtagaagcaaatgactttgatgttttgatgatgatcatgatgatttgatgcaaatgatgcanatgcgctnttcaagtttaaattca

SEQ ID NO: 256323 - DNA, 384 bp, Glycine max
  unsure (1)..(384): unsure at all n locations
aagctgaggaaacttattctatgattatggnaaatgcttttggtcccaaatctttgaggttgttttttccaataaacgttggttatatttctctttatgttatttggaaagttgataattaacaatgatgaaattagtacattagttttttttaaatccaataaaaccatcttatttacctacttttattagtttgtgtaattatgttaaaaatgccgtcataaaaaaaccgatgaagtagtaatataatacatttttaagcaaaaattcaaaccttagtttgttttatcgtaatattcgaaaataaccgacatagatcaactctctaggtacattagtttttttggcattttgtggcctaattttttggtgcttttgttttat

SEQ ID NO: 256324 - DNA, 427 bp, Glycine max
  unsure (1)..(427): unsure at all n locations
agctttaattgactggcttgactccacttgtttatacctaaattatatgaaagatggttgtgtttcccttntaaagtgattttgagtgataagaaaagaaaaataaaaagtaataaataaaataaaatagaaaagcgcgcacatatatatatatatatatatatatatatatatatatataatacttgatgactctgatctttatccttttattttattttttatttttctaataacacaatctaacagacatatttagatggaaaatattaattatattataagaacaatattatatgtgtaataatttttacaattcattttattctatttccattgcataataattattanaattatctcatactttgctcaattttaaattaatttttcttcaaaaaatatataaatatttcaaatcattctc

SEQ ID NO: 256325 - DNA, 362 bp, Glycine max
tgcaagctgtagtggggtgggtcaaaaatttacttgttttctaggattcacagtttacatcttcaaaagcccagtcttaactaccccacgaacatattttcgtgggaacaaaaagccccctcactattccctttttcttaagttgcttttgaccttattgcaacaacccaactcattgtcttttttttttaacatacaacttatttggtgtgtgcgctaatgcttaacctttttcttttcattcgtttcaactttcctcccctaaatttagagtaaatctttccttgaaccatatgttttcctaaaatctacacaacggattaggagaaaatcatttaaagtgcagggttcaaatcacgaca

SEQ ID NO: 256326 - DNA, 373 bp, Glycine max
gctttactggatgatgccgatcgaactttttctatctgatatcatgcaaatttcgttcacggattgaattgaaaactcaatagccgacatcgatcgtgaaatagccccgactgatatttttcagccgacattgagcaatttttttaaaaaaactctcgctggcagataatggttttttttacggtagaggaagttttcttgtttttgtgttgcataaaaaatatacaatgtaggtcggctaggtttttttgtgcgagctcaaccgaccatttgtttgggccgaaactggcatgttcccaactatttggccaggaaaacattattccatctcggcaaaaaagtattattcaccgatattgatcgaaaaaattga

SEQ ID NO: 256327 - DNA, 362 bp, Glycine max
gctttccctgttcaattaagagtttttttttttctcttccgaaggaaaattaggctcctccatcatcatcatcatcatcttttcttttctgtctgcccatattattttgcgggtgatggcctggcaaaaataaaaggcctccgctgagggggggttctggagagaaagaaaagtcaaataggagtatatgttggccaacggaacgtgttttttgtttccgcaaaaatttcacaacaaaaactgggatgaaaaatatttataacagaaggacgttttggtgttcaacaatatattttttgccgtgttatttttatcccaaaaacacaatggaaaaagttcccgattgaaatgtgttccctggt

SEQ ID NO: 256328 - DNA, 252 bp, Glycine max
cattattcaacttttctatgccatcataaactgggtcctgtcttacatagtcttaagcatcccattattgtccccaacattagaatttcaggtcaaccacacccaggatagtttcattcttcttgaaaccgccttatttcttttttatgatccctgctacatttacgattacctggataaatactttaattatcatccaaatcccctttcaaatttacctattccgttcatttgctaactatttatcattgt

SEQ ID NO: 256329 - DNA, 353 bp, Glycine max
gcttgacctgtgggatgaaaaccagcttgtgatcttttatagtctcaccactcatataatgaaacatgtcattgaagttggcacctgtgttgagtgccctgcaactacactttatcaagtgtggtgagttagctgcatcattgttacttgctcatgcccaagattataaattgtgctcaagggtgcggcttcaatttgtttcttgatattgggggaaattgaatacaatgtggcctatgtttgtcacaattgtgctgtgggacacccctacaacctctaaaaattgtgggtgaaattgcacacccaaaagtttttaaaaccttggcatgcttatctattgtttacccttgcaa

SEQ ID NO: 256330 - DNA, 209 bp, Glycine max
tggagattgttgacccaccaccacacccaagattgtcaatggcaacaacacaaccgaaggcttcataaaccaactaagactacaaactttatgttgtatctatacacatctaacacttacacgagcctattgctccttgcacttcagtcatcattgatgttaagaataagaatgcgacacacggtcttatttcagaatcagcattatca

SEQ ID NO: 256331 - DNA, 365 bp, Glycine max
gcgcgcatgtcaactgggaatactagattgatttttatttctttattggagggggaaagtacccaaagatccttatacaatttttcattgccattactctcttggcatgaagcataaaggatattcctatattaccactaaaaacttcagagttttctaagagaattcaataacattcagaatccactttttgttctcaggaatcctttacacaattgcggaattggcattttcacatgtgtctgactcacttaattgggactcttaataactattctgaagacctaggggtacttctgaataggggctttacctaactattacccactaccggataaataactaaatttatagtggggattatc

SEQ ID NO: 256332 - DNA, 367 bp, Glycine max
agcttctgtccctgagaaactggttcctttaatacatcatggagtgaagattgctgaaaaccctagccttgcaacaagttctagggaagttgacaaggagatggacaagaaaatccgcagtatcgtgagtagcattttgaaagacgcctctgttcctgatgctggtgaagatgttccaacatcttccaccccgaatgtttctgtgccggatgttgagaaagatgttccaacatcttccgggccaaatgctgaagccctcccttcacccagtgaagaggaatcaacagaagaagaggatcaaacctcagaggagactcctgcaccacgggcaccagaaactgctccaggggacctcattgacctggaa

SEQ ID NO: 256333 - DNA, 357 bp, Glycine max
ctcagcttttgtttagagatttttattgtttcccggaaaacaggggggtctttaataagaatgaccgccccccatgcacaagatgcttatagtaatcaaacaatcacaattttgctgagatgatacaggaaattaaacttttagcccactttatgaaagaaaagcatttggacttagaacgttgctacaaaagcaaattccccccactaatagctgggacctacctctcttcaattatatactttgtttaggcctcgcagctctcttgattatatcatgatacccatgaaaaactaacaattgattatacaaatccccctaaagtagaattgcttagggaaagcccaaactccactg

SEQ ID NO: 256334 - DNA, 359 bp, Glycine max
agcttgggggctgctgttctgtttttttgtgagcttgggggtttttgaagtgagggggaagagttttgggtgaagaaaacgttccccctccacccctttatattttcgtacaggggttgctcgcccacgcgagctaacctgtaattttttttttttaagaaacattaaccatgcctcccccccttacgggttagcgtttgcctactcgaacctacttaagttagaatcaggcgtcgattactttatttaaaacaaataatagtaataaaatattgtgaattcaaaggatactgggctgccatgcagcgacattctctactttgttagcgccgggaagggacaacggtcagccgtgaccc

SEQ ID NO: 256335 - DNA, 312 bp, Glycine max
gcctaagagaccatgctgttatccttcaaatgtgggcttatcgcacatgcttgatgcagcaggctttcaacttggcttttcgcattgagtgtgcactggcacactgctccaattttttaacatcttacacacctatgctatggggtcaactttattaaattaaaaccaaaattctgtaaattcactaaccttagcattctcgagataaaaactcagaagaagataaatccttatcattttaaatcaaaagaagcattcttaaagaagaaattagattattgttatggaatttacatgttcagattcaatatg

SEQ ID NO: 256336 - DNA, 309 bp, Glycine max
tcatatataggacatattgtctcaaaattaggataactattaggggggagaaccttcatactataagattataatcatcatcatacaatgtctattgaaagatattgaattatttatcatgtcatgtgcaatttggggatgatgcctcaatctaaacaaaaaaggaaatttcattttagtcgtgtattgtattgaataattattacgcacaagcatctgaggaagtctttgttttcatgcttaccctctgtgtgacataaaaagttaaaagctaactggtgcaaccttaccttttgggggagggcgacg

SEQ ID NO: 256337 - DNA, 440 bp, Glycine max
  unsure (1)..(440): unsure at all n locations
aatcttaagggggtgagaagcataagccactacctgtcctcgctgcataagcactccacccaaacacatcttggatgcattatagtacaccacanagggttcgctcgggttgggtaatgctaaagctggtgtagtggttaacctttccttaagtgtacgaaaactactctcacactgngcattccacacaaaagctngacccttatgaataagctnggtcaaggtaggctaacttaaaaaacccctcataacatgtggtntaacctgctaaccaaggaactctaattaaacactgattagactctccaactataccgctctattggaagactatgtatcctcctgatatactgcctagagctactcttaccaactatatgacactacatcatatatgctgaggtgaacacacctaatctctatgtcttctatttgatcac

SEQ ID NO: 256338 - DNA, 355 bp, Glycine max
agctttgagaaaatttatacttcaattttttttttacatcgatgtcggagtgagactcgtataatatcgaaacgctcgcaatggaataccgaatcccagagcaaatttcaaacgacaatatctttttactcgggtgtctgattcagtcccgcaaatatcgagacgctcgaaattgattattgaagctctgagcaaattcaaacgaccatatatttttactcggatgtctaatagagccccgtaatacatctggacgcttgaaaaggaataccgaagcacggagtaaattcaaacgacaataaacttttactcggatgtttgattcagtcccgaaatatattgaaacgctctatgt

SEQ ID NO: 256339 - DNA, 316 bp, Glycine max
gccttaaggaggaagattttttttttcatgatatcccgccaacgaggaacttgcacaacatcactgaccaacatacgtgacataataaaggaatatcttcccacacacctggttgcaaatgaggaacaccatgaccttagggcttactaaaaatcacaacgacactcttgcttggatgaagacaaatgatgcaactctcactataaagatagtgtatgacgcgcagggaacttaccggaactagaataacgaactcctcacaaggatgaccacatggaagggtcccgacagagagaagggatcttaagggaagctt

SEQ ID NO: 256340 - DNA, 159 bp, Glycine max
  unsure (1)..(159): unsure at all n locations
agaagctagagcttatctacacatacctctctaatagctaagctcacactcttgagatgagaagctagaacttagctacacacgccctataatagctaagctcacccccatgacanaanacatngataatacaaaaaaggtcctactacaaagactact

SEQ ID NO: 256341 - DNA, 374 bp, Glycine max
gcagctttgggattgtaatgttatgagagtatgcctgctctgagtcaaacatccctggttttgtgggccctttaagaagataaaatagtacaaccagggaggcaacaatgagaactgggccaatgattcctgcattttgagttaaggatgccattagattgacacaataaatgttaagtataactgaacatgactaccatattatatagatgaaggaaaatggtgaagaattgaaaataaatctggtagtcatgaatcctttaggttgatgacgttgtaatttgtgatttggcaccctcaaaagagttcaggaaaaataataaaattacttgaatgttacaatgctttactacttaccggcaatcataacaaat

SEQ ID NO: 256342 - DNA, 357 bp, Glycine max
atctttaatcatgtattatcaaccgatcaaaggcaatggaaatcaattaccaaaacattgtaattaattacaacttttagaaattaataaggaactgttgtaacatctatattaagacaaactcatgtgaaaacatatactgcttactggcaatttaatgatcaacgaatttgggaaatcgaaaactagagagaaaaaactctttataaacatgttttgagaaaaatcatgtgctatttaatttatgagaaaaactttgcatactaatcttgatagaccctttccttgattcatgaatctagagtcttgaatcttgatcttgatacctgagatcttgaaccttgaatcttgattcta

SEQ ID NO: 256343 - DNA, 367 bp, Glycine max
gcttgaatgcagagaggagctaggagattctgttattgttgggctgcatttgaaattttgaaaaactcttaactgatctgcttattttttgcgtctggttctttctaattgctaacctaatagtataatactgcttgttgaatttgcttattatgaaatggtatatttgtgttaattttgattaatatgttccattgtaaactgtggacaatgatcttgctttaaaaatatacatcaaagccagagctactccaaaagttgttgctgcctttgctgagagaagggagtttgacaagattctaatatactcttagcacgtagaggcttgtttatttatctatcaaataatactgatttttgttcatca

SEQ ID NO: 256344 - DNA, 181 bp, Glycine max
  unsure (1)..(181): unsure at all n locations
tatntggaaaccattcttgtgtttacttattgctacgttgatctggattaaaggattatccaattcccctttntcgatcatagaatgatgganattaatttcatgtcttgttagaattacacttgactataatatgaatgtcctggattatattgtcntctatggcctaaatatactttct

SEQ ID NO: 256345 - DNA, 318 bp, Glycine max
gcgggaggaattgtattacgtgttggttatatcgatttggagggataacttcccggataaacacatatttgattacacaaagatatatcgtatcattcttcgaaatatttgtattgttctactttataaaaaaaaaactgaccgaaaatcatgaaactaaaccctcaagatatatcaattattgaagcgattatatctcttacaataattgtcttccttatttgcacgatttaggaaatcaattcttgcggcgtacttaaaaaaacttgctatttactactcgggtgggccttgtgagtactattttataaaacaaaa

SEQ ID NO: 256346 - DNA, 243 bp, Glycine max
  unsure (1)..(243): unsure at all n locations
ctcacttattcaatgcatgcactttatttggctatttcattgtctactttccattcttctaaagtcgagccttcacanactcaaatataactaactattttgtttatgagactcgagtacggtgatttatctattcgtagcttaaaataattacactgaacactatataatttattggatatatnttaaattattgttcattggctctcaatattaagactcagtacagattatttttcattg

SEQ ID NO: 256347 - DNA, 301 bp, Glycine max
attatacaatccaaccaatgggaaaaatggggtaagcaaataatgtagaatttgataaaaaagagacatgaaattgggagatagaaaaaaacccctatgagttctttccttattctggaaaaaatgatgaaaaagtggcagcaccaaatgaagttttgtactccaccttcttcaccaactcaatcaaatcatgaaacatcatctttcgaagggagctcaagtgaaagaccaaaagaccaagaaaaatgagaagccgttcagacatacatgatgaaactgaaattataatgatatatcttgc

SEQ ID NO: 256348 - DNA, 351 bp, Glycine max
actctcgattccttggaactttattatttcttgactctctggcctcatcaaaattatcttggaagtcattgcttccacaatattatcacaagggatcggggtacggtaacctacttgtttgtatgtttgtcttaatgcggttctggtcaagtttagttcaacaagaaacatctgaggacaatgcttaatcaagattaggctatactatcacgagggatcgaagtttatcattttaggagacaccatataacacatgagcattgttaagtagagaatatccttattacaccaagcacctaatatgatgaccaacatgttgtctacttgtctttacacatcattactctcatg

SEQ ID NO: 256349 - DNA, 465 bp, Glycine max
  unsure (1)..(465): unsure at all n locations
tgaagaaagcaagatgtcaagcggagagtatgatctcaagactagaattaatatagactcttagaaaagtgtttgaaaagcacaactgatctggcaagtgagtttctatcttaacaaanaagttacacagcattntagtctctggtaatcgattacaagaaggtagtaatcaattaccagtagcccaaatatttctgaaaatgggttttcanaagtgtaantcgataccatggatctgtaatcgattaccaatgcttataacgttcaatactaatttgaaaaacctgttatcgatacacaaacatgtaatnattatcagtggtctgacattgaattcaattttcaaatgaagtacatctttgagaacagttatactgagttgcttcttttcctaacctttacaatgtgtatcatttatcggacgtattgaatgtattatattatttaaggatctggacgtggtaa

SEQ ID NO: 256350 - DNA, 281 bp, Glycine max
tttttttaatttgatctactaaatctattctttaattttaatcaggttttagtccatatttttctttggaaatagggttaaatcctaaagtaaacgctcacaataaatgattaccaatggtggagctggaattggaatccccaattcgatggtaactggagtgcgaagattggaagagtgacaatcagcccaggaacaagagaagataacatgcagaagtgttaagaaaggtttttaaacagtttgggtaatgattggaagggctgttacctgttgctaac

SEQ ID NO: 256351 - DNA, 313 bp, Glycine max
  unsure (1)..(313): unsure at all n locations
ctggatccttgggctctagtagttcttgatctcattatcagtccttccagttagatgcttggannatttggaccacctgcattgcggaattggtgaataattctgtaacagacagtgacagatatctgaatagtactgcgtttgttttgattgtaagaaattttgaaagctaaactgacatgagagttaatttcagataggataatgaccattgaacactttntntttttnaaatacataacattaatcggtatatcttgtttctcacatcatactacttatataattgtatgtttgctctttttttcctctc

SEQ ID NO: 256352 - DNA, 364 bp, Glycine max
agcctgcaagctttatgtggaggtgaggcctatatttttcttttaaccctttaaaaaattataggaattccatgatgtaaacatgtcggttagccccaccattattaataccatgttcatgcaaaactattttcataagactgaacttaatctagaatggttattcatgaattaagccgtaaatagtcgcgaaatttaatacattatccggtaaaacaagttgtaatgtcaaatcatggcagcatgccccactgttttttttccccttacttacgagccttactgggttcttcatgaaggaggggaagcttttatcggggaaaatgttggtattcaagaactattgagaagagagaagtgaaag

SEQ ID NO: 256353 - DNA, 226 bp, Glycine max
aaaaaaaacttttgcccaacgtgtataacgaacaattttgtctaactgttaaattattatttttacgtattagaagtaatattgtaaatattgatggttagaattttcacatctataaaaatgttgatgatttagcctcatatagtttattgctttaagaaatttatatctattttagatatcatgacatttagcttaatttttttttttttaaataacatataca

SEQ ID NO: 256354 - DNA, 366 bp, Glycine max
agctttgatgtttgtgttgaatgtctttttttttacagaccaaaagcaagaaattaggtgcatatagagctacaaatgtcttggaattgatacatacaaacatttgtgggccatttcatacacctttatggaatggtcaacaatattttatatcattcatagacgattactccatatatgcatacttgtttcttatacatgaaaagtcataatctctatatgtggtcaaaacatttaaagttgaagttaaaaatcaactcaacaaaaaaataaagtgtgtcagatctgacccggggggggaatactattgcacatatgaccatttaggtgaacaacgtccggtgcctttgccatgtacctaaagga

SEQ ID NO: 256355 - DNA, 284 bp, Glycine max
  unsure (1)..(284): unsure at all n locations
tcagctatagtcatcttggattgaacaagcttccgccatgtgtttaattattcttatgtcattncttcatttagctttggagagaatgtcatggatcactgtatataccacaatgtcagttggagtaagatttggttccttgtattatacgtagatgatattctgcttgcaactaatgatnatggtatgctatatgacgtgaaacaatntctctcaaagaactttgatatgaacgatatgggagaggcatcttatgtcatatgcataaagatccatatagaaag

SEQ ID NO: 256356 - DNA, 223 bp, Glycine max
cttgaagctttgggcagctggtgttccaaccacaagtgggcgccactcgtattgttcctctttcaagacccttttggtacgctctttccgaccagctagtgaaaaatatgcctgggaaaccacacccaacatgaaggggagcaatgaccccacccgtggctactccttgaatggaccttttaaaaaggactcttatccgttgggacactactacgcttccaca

SEQ ID NO: 256357 - DNA, 344 bp, Glycine max
cgctgcaaacagagcgggtttgttttttttgtattaatcccttaatgggcctgattttatctgaaatttacggataaactaaattggcatgtaataatgaccggcgagatttattatctgtattaactttgtccgatggatatctccacgtaaaattattggcacacatgctcatgataaaatacccgaaaatatatttttaatggaaatactaaccgactcgattcttttgtcgagagcaccaatcgtattttttaatgggaaattatccaccagatcttttcagtgagaccttttttttttaccagggtagctttgggggacattagcatgtgtaatgctac

SEQ ID NO: 256358 - DNA, 339 bp, Glycine max
  unsure (1)..(339): unsure at all n locations
tatggctcatgtgatatgggccgattgaataaatgcttattgaagtaatttaaagagagaattctgaactganactctattgaaaatgtgaaaatgtacaaaactgatgagcctctgttagactgtacaacccctatatacaatgtagaagctcttcaacgagagatgtcaattataactgtctaactgacacttgactaacaacagagagctataagcttagagagaaaaatgagagcatatatgatacagttatcaagaaacttatgctcttgtcatgcttaattaaacaaacacnatctaaatctctatctagttatggtatggaagacatgcagt

SEQ ID NO: 256359 - DNA, 369 bp, Glycine max
agcttgctctaaatttacattgatgtttgtatttatgggaggatgttacatgccatttttgctttaagagtaatgtcccactaaaactaactttccaaatgtttgccttcgcaggaatggcaccgaggaagcttgcctcaaagaggtccaggaaagacaaggcggccgaaggaactagttccgccccggagtacgacagtcaccgctttaggagcgttgtacaccagcagcgtttcgaagccatcaagggatggtcgtttctccgagagcgacgcgtccagctcagggaggacgagtatactgatttccaggaggaaatagggcgccggcggtgggcaccactggttactcccatggccaagtttgatc

SEQ ID NO: 256360 - DNA, 381 bp, Glycine max
gcaaagctttactctctggtaatcgattaccataggatgttatcgattaccagcggccaaatacgttttataacagctataaaaatttgaattcgaaattttaaaagctgtaatcgattacacaattgtggtaatcgattaccagcagttagtaaacgttttaattcaaattttaaaagctgtaatcgattacacaattgctgtaatcgattaccagacaggaatttcagaaaaataatttcaagagtcacaacttttcaaaggctttactcatgaccaccaatggtctatatatatgtgacttaaacatgaaattgctcagagattttcagaacaacaaagtgtttatcctctcaaaaagcaatttcattttatcctctt

SEQ ID NO: 256361 - DNA, 365 bp, Glycine max
  unsure (1)..(365): unsure at all n locations
agctccggaactcctttgggaacatgtgttatttattacaagggagtttgncattctcccacttcctatgccaccctaaagaaggtaatctttaactttataacaagctttatctttggatgataatataacttatgctctttgtcatttcttttttcacataaatgtatatgaaagccaacatgcacggttactgtatcaaacagtaactttgggcaagacccttgtcctaatgtgttgaagcggttatcagttgaagctgtttgctctccaaccaatcggaggggctgaatgaataatgaaggaagccacccttttacgtgtagtatgaagggacttaacaagaaaaacgaatggaccataat

SEQ ID NO: 256362 - DNA, 227 bp, Glycine max
ccacatgcgaacgcggtcgttgccttcttgttttgcatctgcgtacctcaaaaagctctgcatccaccccaattcgttcttcacattcttcacttgctctcttacccctgccagctgtgaaacagacaccgccgccactgctgcttgtccaccagcagccccgtcagcttggtaacgaccgttgacacagcaacctcgcgcctactatggtggcgtcttctcttctc

SEQ ID NO: 256363 - DNA, 375 bp, Glycine max
  unsure (1)..(375): unsure at all n locations
agcttattgtagaactgctcaccaaaatactaattgtatattttttaagtacaagattattcaaaagaaacctggacaatgacaaagtacaaggaaataagggggcactaattattcacctcttttctcctctcagctctttcaccacacttaaaactgaatccataatttggaagtgtccccaccctttgaggtttggaatcgtctgtgttggtacttctaggtggataaaggttaaaacacaatatacacagcaccacacttaataataaatttaaacaatagagacccagtagttccagattntcactcatcactcactacgtgaaatacaaaaacccaaaaaaggatacaaggaagattctccttctcctt

SEQ ID NO: 256364 - DNA, 171 bp, Glycine max
  unsure (1)..(171): unsure at all n locations
atctacttggaggaagagaagatgatgaaatcttcaggatcataaaggagctataggttggtctatctccaacttaaaaagaataattccttcttattgtatgcataagatcattatggaggaggatntcaaacatgtggcttaacctcaaagaaggcttaatcatgtgat

SEQ ID NO: 256365 - DNA, 381 bp, Glycine max
  unsure (1)..(381): unsure at all n locations
acctgcngcatgcaagctttgaacaacatttggagaggttaatgaatcttcgatttctaatgaagaatagagatcataatgaagaagaaaggaggagaagagggaatgatggtgttcctagacaaaacccaattgatggtattaatctcaacattcctccctttaaaggaaagaatgatccggaggcctacttggagtggtagatgaaaataaaccatgttttctcatgcaacaactatgaggaggaccaaaaggtgaagcttgccgccacggagtttttcgactatgctcttgtgtggtggaacaagctacaaaaggagagagctagaaatgaagaaccaatggttgatacatggtgtgagatgaaaaggatcatgagga

SEQ ID NO: 256366 - DNA, 347 bp, Glycine max
ttctcgctaagccaatatgctcgcgtagcgtgcattctttaatcacgacactcctgggctaagcgcgatgaagaatccataagaagatgagctgtacaagttcactaagcgcaccacttcagttcatccactaagcgagaaaagcgcctaagcctaaaatactaacgtgcgctaagcggtacatacatgcgcttagtgcacgagcgcgaacaagggcgcctatttaagcctgaaatcagatattgtgaagggagtatggattgggattcacagctttgcatgtctatggtctctagagagagaaaggtccacgttctatagagatttgagagaatattgcgtgtgaa

SEQ ID NO: 256367 - DNA, 354 bp, Glycine max
agctttttttgcaaaggaggtggtacctttggtccatctgtgatgacaggcttaaattgatcagtaggcgatgatacttcatacatagtctttgaagcatcaccttgatggatgtctttacccctatcagtgacaacaggatgagatggaacaaaagcaggtgcttgcccacggggagttacaatcacaccattcccactagtaatactatctttgcgaatgctatcacgattagcccaccatagcttgataaaacgattacccattacagcatctggtgcgcttaaagcagattcagcctcttctctcttggagaattgcacaaaagcccgttcactgttcaatggaatataa

SEQ ID NO: 256368 - DNA, 421 bp, Glycine max
  unsure (1)..(421): unsure at all n locations
tcagctgctagtcttcatatttgatgaaaaaagagttatgcatggaatcatgtatgcatgattatgccacagtatggagaaacatggttgaagtaagtccacaatgttggagtaacgggtaacacgccatttggtaaggactatggtntcatatgtacctgtatcacgggttctaccaagttcccaaagtcattgaccacttccggatattgtcngattacgggactactctcggtccaacaacgtccatatgaaagcctcgtttgagtgtagtatcgcgtatcaaccaattcaagactactcttgattagccaccgcactacgtnctaaaggctaagatgggttaaaggtaactataaggtctcaacttcatangtcgcttggaaatattaatgctgaacacgactactcatgccaacat

SEQ ID NO: 256369 - DNA, 252 bp, Glycine max
agcatgcaagctttggtaatcgagacacatatattatttcattcccaccgacgttcctgaaaaaataaaaattaactctttaaagggatctgatttttttaaaggttatcatgtatatctaagagtctaacttttctgaatgagccttcttgaccataagtgaagagattatgaaactaggcttctttacgattatgaataccactcttcaaattttgaacactataataatcaaatccttactatctttgt

SEQ ID NO: 256370 - DNA, 339 bp, Glycine max
  unsure (1)..(339): unsure at all n locations
acacaccaaatgattataatgatggatggctcanattctcacaaaggtaaaatcatcactttcaaattgagcctctcaaactatcatgacatgtagagaagaatcaaggatntcaagtcacaacatgtcaagaacctttattntcaaaacaattacccatctctngaacatatnctataattcaaagaanaacatgcaaagtcgtacgtcacacaanattgcccaagatatanactgaaatccatgaactacaacattacaattacatactaacaattacaaaccacaaactgcaaaccaagaacactcccgccctcccccccccatattaacaacaat

SEQ ID NO: 256371 - DNA, 364 bp, Glycine max
  unsure (1)..(364): unsure at all n locations
agctngnacagtgggaaaatttttttatttatttaactaaataagaaaccctacttgcttgtaaaacaagatcagatactttcttagttaatcgaactcatgccaatagtcaattggattgacttcatgaagttagtaataaaatcattaaacaaaaccacggatttgactaggaagaatatagggaattataaataaagagaaattatctaaagatcgtataatgagattgcaaacaaattctttaaacaagaaagattgcaaacacgaagaaactttaacatatttatattaatgatgatttataaacattctattattggtaatgtcgattgaagaaatttatgttattgatttaccgaaa

SEQ ID NO: 256372 - DNA, 286 bp, Glycine max
  unsure (1)..(286): unsure at all n locations
acgatcaacanagtactttccgcacctactatatgtcgacttgaccaacgttgttattggaatgctgcgactatctttcaacaccttattcacacattctgatatggtggttgtcatgtgaccatatcgtcgtccagatgtatcgtaagccatgcttcatttttccctttgagatgcgatcaatccatcttgctatggctggactcaattgacgaaatttttctaaggtttgatcaaacacatgcttgcaacgagtgtacgctgcatcaaatatgatatcatcaaa

SEQ ID NO: 256373 - DNA, 348 bp, Glycine max
acttttcttggaccttgagcattcagtttactcctttttcaagaccatgctatgtgctcgtgactggtctttctcttcccttcgaagcttgagctcatcgttgatgcccccaaaagctccacgaaattggtctcggccatgctcttccttgcgagccctctaggttttttgttcaagggctcttgcggtagctgcattttcttttcgaaactcggcacactctttctggacgtctgtagcgactaacttgaatttttctttggcaaggcttgcttttcctagctcttgttttagagcttggacttcttcatcctcctccggaacgtcgaaattctcctcaatgataaa

SEQ ID NO: 256374 - DNA, 355 bp, Glycine max
  unsure (1)..(355): unsure at all n locations
agcttctagtcgtccatagaccttttcattggtacggnccaacaaacgttgcatctgtgcattcatcgcatccagtaacagacgttgagcgccgtccaactgatgatactcgtcaccaccaccacctgctccagccataattcaacaggaaaaaaaaatgtgcaataaaaattattaagggtttaggacctcacaacactcttctcacgtgtttaacttttagatggtagtacactcgtgtttaatgctctcaataggcttttgtgtaatgaattccctcttgccttttaccactcgtgtttcctcttaaggtcctggatggaccacattagacacacaaggtgatcttaaattt

SEQ ID NO: 256375 - DNA, 313 bp, Glycine max
aaaaaagaattatacataattattctaaagaaatcccatcaacccataatgtgaaatataactaatcgtattatattagcagtagttattttgaagtattatcgagatgatgaaaagaatcaatagttttttaaacaaataaaagatttacaaaatcaaatccaaataaaaacaataaatgatcaaaaataatttttgacggccgcggaaaatgaaactaaaaagttatagtttaagctgctttcaacaaaaagataactgggaattaggaagatgatgttgaacacgtacaggtcagaagaaacgtatacta

SEQ ID NO: 256376 - DNA, 366 bp, Glycine max
  unsure (1)..(366): unsure at all n locations
gcatgcaagcttncatcatgaatgaagtgatctcttatgttagggggcttagtcctctcatgatggacttgatccttggcaaaacaaaatgcatttagacagtggcaaaaaatgattgccttttttttgtggaaacccaagattgctaattagacccttcagccaagttcattcctttactggttcttccaacgccatgtactctacctttgtaatggataaagccaccatgggttgaagtgtactcttccaactgagtagagtgttgcttcccatgtccttcatctcaaattcactacttagtattgacttctacttctaaattgccaacaaattttgagatgctatgagaatgtcatcaacata

SEQ ID NO: 256377 - DNA, 95 bp, Glycine max
gataaacacattcattaaagtctctcattacatttactcatgtagttatatggatgacatcaattttggttctacttatcgatctctttgtgaag

SEQ ID NO: 256378 - DNA, 342 bp, Glycine max
accattcatggcaagacctattataatggagttacaacatgataatcctcttgtgggtgatgcctcaaacacttcaatagcctttacaataactccacacttgcagtacatgtcaataattgctgtgagaacaatgacattcaactcaaaatgacccctttttacataatcatgaacccactccccatgtttaagtgctcctaaatgggcacaagcacttaacaagctcaccattgtaaattcactaggctcaaccctctctccctgcatcttgcggaaaagctccaatgcctccatcagcctctttattctaacataaccactaatcatagaattccaagt

SEQ ID NO: 256379 - DNA, 250 bp, Glycine max
  unsure (1)..(250): unsure at all n locations
ctgttgtcctnncacccatcacatacagggagggatgcaaacacaacacaacttactggccacatagaagacaatgtgtcttggcatagctaacgctctggctcatcttcatctagagaccagaatcaaaatcatacaatanggatatatatgccaagtatgtattcttagaccatctctgcttcaacaatggcatcgccgtcctctcctctgaatatgactgcatcatgcacttcactaccctctccac

SEQ ID NO: 256380 - DNA, 380 bp, Glycine max
agctttttcttaagctttttctacaaccttttctccccctttggcagcatcaaaaagccaaagaactcggaaatcaacacagatataacaatggatatagatatggatatcagagtataaaacacaataagccaaactcacaaagaagaagtaatcaaaccagaatccaaataacttaaaaatgtcaacaaccacaaaacatccaagactgaaatttaaaaaccacaagataaataagcaaagtacttatcataataatgtaaattctaagaaactaaaagccaaaatacacggcttataaaagacatataatcaaaaactaaaatctaagaagatggaggtggtggtggaagatcgaaactctgacgaatgtatccgac

SEQ ID NO: 256381 - DNA, 575 bp, Glycine max
  unsure (1)..(575): unsure at all n locations
ctcagcttgctctcacctcactattcattcacctatgtcaatacactataatacttttaacatcgatntatgattagtaatatttcagggtgttacanaattcaccttacctattaatgattgaagttatttttaattctttggaggggaagtcttcanaatggattnttcccttattttatctacttcngcttccttttgatggataatgaaatctangaattaacctgcagatacactaaagtctcacttcaatggattcaatntcaatcaatgttgtgtcattcttttgaacgacaaccttaaatgttgtagatgattatcttttgatntctgatttgcaacgacatcatctatttagacttgcatcgaatttcaatcaaatcatgaaataagatcagtgctctttgtatgttcaccaacattttcanaccnatggcatactatccattatatgtcctaatgccctggcatcganagtggttagaatatattntgggatgatattgatatatctngatatatcaataactaaattcattgctctgtgatcattactatcaccatgcatatat

SEQ ID NO: 256382 - DNA, 339 bp, Glycine max
ctgctttgcctgctataaaaccacctctggcatctcctaagcacatcaccccaaatttgagaaataatcctgagatctaaaagcagcatcaatattgcattgaaaatgaccaattaataggaggcgccttccaaccttcactcatgttggatgtggatccgctttcaatataaccatcaaactttcgagccaataaccaatctgcataaaacatctcagcccttgaaactgtttttttcgcatggaatggaagtggcaccccttcccataacagctgatttctacctttcaaatactgcataatatcactccaaataaggccctcttcgaatgaattgc

SEQ ID NO: 256383 - DNA, 402 bp, Glycine max
  unsure (1)..(402): unsure at all n locations
tagaaatgatgatagttattggcacaaacattgagttctcaaactgctactaaacttgcaatcaaagatattgtatatatagtaatgaactttccatccagcaacacaaatttgttttatttgtacacttaaatctgttagattgcatgttcaacttaaatgtcaaatttctatcttacatcttttatttggacaatatctaacanaagatgcaacannagaagtaaagtaaccttgtatcagagatgggcatcaattctttatatattgcttgtctagcgcaccacaaattcttttttatntcttntgtccatgggatagaactngtntatatagtnctcattttctctagttacaatcggtattatacttgcatgagccatcaatgaacttaaaaatgac

SEQ ID NO: 256384 - DNA, 372 bp, Glycine max
  unsure (1)..(372): unsure at all n locations
agcttcaaaacacagcaacacaaaatctatgtgttcataacccctcaatttaatggatgttctaggtttgagaagtgaaattgaaaatgaggtaaatttgaagcaaactctcacctcacacaagtccataacatcaatttaaacttgtccaaactggatttacacctgaaatttcaccaaatcaaaatttgactcctcaacacccaaatttaccctaaaaatggctctttgttcactttggtcatttgtttttctctctagctcagcctaacctttctcataaatcctaaatgacattncaaactaggattaactcatttgaaccttcatttactacagaatccagatttaaccttccaactcacaaagcct

SEQ ID NO: 256385 - DNA, 269 bp, Glycine max
  unsure (1)..(269): unsure at all n locations
tcgctgaggtaagctacgatgtacgtgctctgcacaatgtagtcgggctatctagatatcttgccaaacanagtcaggttaacgataactcgcctgtngcttttcttccattctatatgtagcaaagtcattgatccagtcatgtttgatgagttggaatatgaggccgcaattatgttgtgccagttggagatgtantttctccctgctttctttgacatcatgattcacttgattgtgcatctggtcagagaaatcaaatgttgtgg

SEQ ID NO: 256386 - DNA, 212 bp, Glycine max
ttcttccaaattaactggggcaactttattagaaaaaaaacaaaatccctttgaatatttaaaaaattgaatcttaaacttcaaaaaaaaaaaaactgtgttttaaaaaaaataagagtgaccatggctgaaaatttgaaaaacaacagtttcttgattttgcacatctgaaaggcatactcatgaattttttgcgccattacaccacaaca

SEQ ID NO: 256387 - DNA, 298 bp, Glycine max
  unsure (1)..(298): unsure at all n locations
gctacagacgtnctgaaagagtgtgccnggttacgagaagaaaatgcagctaccgcanaagaccttgaacaagaaaccatgatggctcgcaaggaagagcacgaccgtgacaaattccgtggagcgttgtggggcagcaacagtgagctcaagcttcgaagggaagagagagactgatcacaagcacatagcatgggtttaaaagaagagttagccgtttgctcaaggtccataagaaacttgtctcatcgtttatgcgagacanagaccaacatgttagctatcatcaccaagtacc

SEQ ID NO: 256388 - DNA, 362 bp, Glycine max
agcttgagtgagccaccataagattgtgtacttttttgttaacacatccttgtaaccctactatcattttgtatagtggaagaatctccatattgaagaattataatcgggtgctgccattactacctttaattactaagagcctatcttaacttcacgaagcgggaaagtccgagttttcccaacaatttctattggagcttgaaagcccttataattgtcttttatttgcgtggaatgtgtggggcatcatatttaagatttaatttccattgaagcttggaagcccttgcattttggaaagaggctaagacaaacatgtttctttcacatttttttttattgatctgattccaaaagct

SEQ ID NO: 256389 - DNA, 369 bp, Glycine max
agctttgatagtttacaagaggtttaaataatttgaaacactgccttgggatttggctcacgtcattcttttactctctacttcattccttaaaagtatgtttgtagtggcattgcatgtttatatggcattctgacttaaatgcttgtttttttattttgtttttcgaattctttttgtcactatgttgggttggccttacataatcaaagccaaacacaagttggtttacaattttttaccttaattactcttcaatctttaataattggttttcattgtaggtacaagtttttgacttaaacttacgaagttaagtcttcttctacaaccagtgtacttcaatccataattttgtataatacagca

SEQ ID NO: 256390 - DNA, 354 bp, Glycine max
  unsure (1)..(354): unsure at all n locations
ttgaacttttattttttttgcaaattgtattatgtttaaaaatggttttaataagatttgtatntgnttgtntcgcattacaaataagtattcttttgtatttatacaaataatatgtatgattgcatggtggtatgaaatagttttaaattttaataggtaataaatgaatcttgagtttttatgttaattatttgatgaaatagtctatgtattaatatgttttgcgttaatattagcatttggtattgtatggagttacatctgaatgttaggttaggtagggtggtgacgttacgtaaactaggtaagtatgctcttgtattgatgaattgaatgcaaaaaaactgtcgt

SEQ ID NO: 256391 - DNA, 368 bp, Glycine max
agcttgagaaaatgagaaggtgtatttattcctccaagagctttggctaatgcttacaaggcaatctccaattttaacagccctaaagatcccatgttcgacactggatggatttgaaagaatcataattttgttctaaaagatatacaaggaggccctccccaccaatgagctgagaaaaaaaaaatatctcacctttgaatccgcttgctatatatgtaaaactaggaggaatctaaaaatctttgctcccatgtatttctagactaccatcaggcttggaacatgtggaagataagaaaatgcttactcctagtaaggaaatacctgatgggttttttatgtggagagatatattgtgtaaagga

SEQ ID NO: 256392 - DNA, 379 bp, Glycine max
  unsure (1)..(379): unsure at all n locations
ttctacattgttataggcacatgatacttaatagaattaannaataagtttcacaaagaaacacaagcaatacgcactaagtacacagaagataaggtgaaataatagatgcacatagagaattatactggttcatttcttgccaccgttctatgtccatnttttntgcaactaaccaagtttccattatcctttacaaaatatacaagcattttctctattggctcttantagaaatcttatnctttaagttttaaaacccaagtattgtttttaccaagccacttctggctctacacaaatcatcatgttcatttaatgattgctacacacaaacaaggttatcgtgttgcaggcgaataactaacttaagcacaat

SEQ ID NO: 256393 - DNA, 372 bp, Glycine max
agctttatgaaccctatcattttttatgtttttgaattatgagaagatgatcacttacccacaattaactaataactcagagtgattgattttaatatagaagtgaaaacgataaaaaaagatacaattaactgaaaaacatcaaagaactttattaaaaaaaggaactagagtacaagggtacaattacatcccaatttgagttctaagaagtttagccaactgtggtcataaaataactaaacaaaatacaatattgcattagaaataaaagagatcaaaatccttaccgattcagaccctaattgttcctggtgcaattctcatcttaaaagctattgttgctcataaaatgtctaatgaatttcaaat

SEQ ID NO: 256394 - DNA, 356 bp, Glycine max
  unsure (1)..(356): unsure at all n locations
tctcagctngcaagcnagatccccaaagatatgaatccatataatagttcttgtgtatcaagataagccaaaatagtttctttacttagtgagttattgagaagttgaatgaaagaaagaaacactagttgttattcttggacaaagagaggcttcaaagcctgctttttaactttctgttgggctgtttgtgctgatcagtgtcacaccttttgtggacggtgaattgatgagtgtgaattctgaagtctgtgtaattctcccttcccccaattttctctctctattctatctctntcnttctctatntattagatcttaactggttataattactggcaactctcttactatct

SEQ ID NO: 256395 - DNA, 366 bp, Glycine max
agcttgacaactagttcaaagagttgatctctttcttttactttgacaaatgttatcattagtatccttttccactaaactttttactttgtgttgaccttcacaacaacataccaagactatcatatttgggttaattgatcaaatctgtatttcaaaaccattcttcttagcaaatgaattataaaattctctaaccttttcaagagactcaaactctaacccaagacaaggttggatattcaattcttcagcatcatttgaagcatctctcggcataacctccccaaatgaaagtggtgtatccatggacatgacattaatggactcaatttcttgtatttctatattaccaagagtatttgc

SEQ ID NO: 256396 - DNA, 316 bp, Glycine max
  unsure (1)..(316): unsure at all n locations
taactgttagaacgtgcattgtgtgcatacacaatatccggtacaccacaatataatggtgtaatagaactntaatggatatggttaggagtatgctaatcaattagactctacccgtatctttgtggatgtatgccttgaaaactgccatgtatttgttgaatatggtctctagtaaggcagttccaaagacatcttttgaattgtggcaaataagacacctaatataatgcacctgcatgtttgtggtgccaggtacaaataagaatttacaatccgcaataaagaaaattggatgcaagaacaatcagtggat

SEQ ID NO: 256397 - DNA, 368 bp, Glycine max
catgcaagctttcccaatttatgataaacttttgcctttggcgaagctttaaaactaaaattgcagcatgccctcgactcgcagttagctattgaggaacaatgcgcaatcttactcgaccattatgctacggttagtcaagtaaaacatacctgcagttgcactacttttatatttcttccattacatagtttataagttcaggcgccatgttgaccaagcgttagtgaaatgtggtcgtctagtttccagcttttgcatttacttgtaacttcacataaattcattaatgaaatgaaatgttacatattctacacgttcattttcaggtaatacaaaaaaaaatgactactcactgaaatcccctt

SEQ ID NO: 256398 - DNA, 365 bp, Glycine max
  unsure (1)..(365): unsure at all n locations
catcggatgcaatatataacacagatatttgctgtggcatttaatggatcttaaatacatgactcatnttttttaacttctgtgttggcctttctcttctatattttatgaattttcaggtaattaataagttctttcagatcaggcaacattctctgaaagaatatgaagatatgagttggaatgagaaatgtgcatgtcttttgggtgactctgangacgtgtggagtntcaatgatgcttccacctctanatacattgtaagatntcaaagaccctgatattccctntccttgatatcangtgatgtgtcccttgctggtatatggatggtgccagtatacacctgctaaactcacccatct

SEQ ID NO: 256399 - DNA, 322 bp, Glycine max
aatgaaaaccggtaatatagataaattggccatggtaaacaatttcactatcataagggtggtgctctattcctcattgctttagggtttcatgagtgcccaacaaccatatcatcgtattactttgcttttaacagaggccaaacagctgcttttgcaaataagttgacatttgagaataaaatcatgtaatgtaattcatgcccctctattcatgtgaatacttaaatacacgcatgctttgtttgcaaatctctgggtaaagggttgactgggtagttgtataaaagctcttgataatattattttggacatcccacaa

SEQ ID NO: 256400 - DNA, 380 bp, Glycine max
  unsure (1)..(380): unsure at all n locations
agcttgtaggattatgcggtacccatcacatgtggtactaagtggcggtcgggcgatggtgcaagtcaactctccacatccacagatcacacataaacccaccatccccagttgcccaccttcactgagctcacgtactcccacgtagcccttatcctcgttcctctcaacaccgggtccccatcaatctctccaagcttcgacaacatccaagcaattcaacatcccaaacatcatgaactatcaaaaccaaggaaaacagggcagaggcagaaaactctgcccaacacaaaccaatatcacagctnttctcacttaaaaaccctagtaacattctcctcgttccaattcgttaaccgttggatcgacttgaaaatttt

SEQ ID NO: 256401 - DNA, 393 bp, Glycine max
gtcccggatccttaagtcacctgcggcatgcaagctttggagaaccaagccaatcagaatgctatattaaatatagatgggaatagaggtaacaatggcggtaatgacggaccgaggcaaaaccgggttgagggagtaaagctcaatgttcctcccttcaaaggtagaagtgatccaaatgcctacctggactgggaaatgaaaactgagcacgtatttgcctgcaatgactacactgatgcgcaaaaagtcaagctagcagcagctgaattctccgactatgcccttgtttggtggcataaataccaaagagaaatgttgagagaggaacggcgagaggtaaatacatggactgagatgaaaagggtgatgagaaaaaggtatgtgcccact

SEQ ID NO: 256402 - DNA, 357 bp, Glycine max
  unsure (1)..(357): unsure at all n locations
tccactaccgagccctcactntcaccgcgtatgcaatttttcaggttgatgaaaccgtagcgaactgcggaattcaccgtttttaccacttgccaatttttaaaagctctggcaatggctttcgcaatagtctctgtgggtgctaaaatacatgactcgctagtttccgcagtcaccgcatttgttcgccgaaacataccccctctcaaaaaatttgtacccctcatctattattcacatgataaaactcatgccgcacgcggaaattccactgatttacgcttgcctttttaaaacctctggcattgttttcctcagagttcgttggttgtaaatacagagcgtagttttcactac

SEQ ID NO: 256403 - DNA, 366 bp, Glycine max
gcaagctttagcttggatagtacaacttgtttcttcttagtagttttttcaccaaattcttcttcttgagctcttttctccttttgatcatcatgagctcagtcacatgatctaaaaatacttgttcatccatttgtgagatatcgtaggtcatttcatgatggatggcgggaatgcttattaggtcataaatgtcaaatttatcggattttcatatgcattttgtaatgtttattcagcattttggttaacttttaggccttgttttgaatcacataaactttaaatccaatttttactttatcaaaggtagaattttatgttttagttctttttaatgagattttggtagtttttcagcaaatg

SEQ ID NO: 256404 - DNA, 372 bp, Glycine max
  unsure (1)..(372): unsure at all n locations
ctctctctgtctttgcttcgctgatctcatggggaaatcacattgaactacagatcacctcctaaagctcacataagctcatcagtgtatcaacacaaactcaatggtctcttaacctcttaatttttgttacttcttcattgtgtctcatttctcatgattctgcatgctgtctaatgtgtacataatctttaattcaccattaactgcttaagctaattgatttttggtcaattttgtctttctaacantattgtatagttaggtccttatttgctgtattttggctgacctaactatatttcaaatataagttaaaactcaaactaatgatgtaccattgattgctaaaatatttatataactgccata

SEQ ID NO: 256405 - DNA, 373 bp, Glycine max
agcttgaagctcaaggaaagcttgaagaatatttttgaagaagttttggcttttacatgcgcaactcccttgagtggcatttgtattggttgtttcatcttaatacaattgatatttgggttgcattgtgcatcatcatagtgtgtataaagaaaagtttctaagttagaaaaatttcttcaaaggaaaaaactctctgttttaatcgactacagcttcattgtaatcgattacaataagctgtctgaagcttttagagttgagtcttgtatgagttcaatcaattaccgatatctcatattcgattacactgttgtttgagacaatgactgatttatttaagagtctgctttaatggattaccaagtgtatt

SEQ ID NO: 256406 - DNA, 326 bp, Glycine max
  unsure (1)..(326): unsure at all n locations
catcaagtacatgtnattccagtttaactntaataagtacatacaaaatttattcataaattcattaatcaatacttaaattaaccacaatccaaaaatgctaaatcaagaatagatccaaattaactttaanaagtttcataattngaagacaaccctagtcaacattcgaaataccaaaanagttaaaattaaaatattccacanataactttccacgnttttacaactctatatcctatacattgtttccttacataaccaagtcccttcttttgtccatctcaatacaatttcatcaccttttgcttgccataatcataagc

SEQ ID NO: 256407 - DNA, 322 bp, Glycine max
gacctgcgcgcatgcaagcttccaagacggaagcagattttttttctcattaccacaatcgtcgcgagtgtaagttcttgtacaattaaaaaaagctctcaaaacactttgtttatcctaagagaaaacactatgagcgaaactagtctatccatctgcaagacaaaagagcgtgagacattgtgcaacgaaaccaacaaatctcttgatatgagacagagccaacaacggattggcacgacaaagaacactatctgcaacaaactaagcggaaaacctgagtacaggatccagaaaagacaacgataaacactcgtatctt

SEQ ID NO: 256408 - DNA, 370 bp, Glycine max
caagcttgctccacaatgctaaggtgttttctttctcaaagcttctttgttaattcatctctgttaattaaaagattgaaacgatgcttattaagggagtatctgttaattgaaattctggcaaggctattgttagcttcattgtagtgttgagttttgggttttgttgctaaattaagggagtatctgttaattgaaatctctgttaattgaaagtttgaaacgatgcttagtgttgaattctggcaacgctaaggtggtcccccgaacatggacaaattatctgttaattgaaattctggtttcatcaagggtgggtagtgggttctattgctgccttttgagtagtgggttatgttgctagtacact

SEQ ID NO: 256409 - DNA, 383 bp, Glycine max
  unsure (1)..(383): unsure at all n locations
gatctancattcatagaatctgaanaggggtaattaagtcataagagttcanagtggagggcattttcgtaaatgactatacaactagtttaaaatgtctaattatatgatgtagaataattaaaataagttagagttgtaacaccctaaanaattacaacttcaactaatagataaaactctgtgttgtgtcatctatgtgtgtatgaatntaatttcaatagttatatatactgttttaactattaatctcttcgggtgtgtgtgtgaagaatgcattgtacactacgtgtctatgtaattaagctctgtctgcgggtcactctggntatatgtattactagggagactagcacaatagtcaagaaagtancacagtatca

SEQ ID NO: 256410 - DNA, 369 bp, Glycine max
agcttcacaaaacacaaacaattctggatttgtcatgattcctccgttgcggctgcatatcaatttcattaagctaagctccatataaaaggtcgggttggtaaaaaaaaacttggtttccacctgtcgcaacctaccttacgacgggatgacaaaagccaaaattagttataagcccattcttctccttgggagaaaatgagaggagtctcccccaacgattattcgaggaaaacgttataaaaaccaaaaagaggtctgcgaattttgaaaataagggtttgggagttgtttacgcatggggaaggtattaacaccccacgcgcctgttacatgggacgacagcctttaatcaagtgtgcacaatgt

SEQ ID NO: 256411 - DNA, 249 bp, Glycine max
cagatgatctgtgattgagctattataaccaagcgatatatagacactgatcagttatgtcaaactattctatactaacatcttatcataaatgactgtctgactttaacaaatattaaacttatcatgatacattgattgtgattcatgatcttataatacatatgatatcatcaatgcataaccttatttctttatgactattcttatagatcagagatatataatatacatagcaatcttatttat

SEQ ID NO: 256412 - DNA, 354 bp, Glycine max
catgcaagcctctcactccttagacattaacaggatggggttttctttcaatccatcaacctagcttttcaacttcaattcctctcgcagagatctttgggcctaacacaataccttcttgtaccatgaaatggcatttttcccaattaagcaccaaattgggctcttcacactggtgcaacactctctctaaatttgatagacaacaatcacaggatgaacccaagacggagaaggcatccctgaaccccttaatacatttcttcaccatggccgcaaaaatctccctcattcatctttggaaagttataagaacattgcaaagaccgaatggcatttgcctataggaaaaca

SEQ ID NO: 256413 - DNA, 384 bp, Glycine max
  unsure (1)..(384): unsure at all n locations
cttcccttcgcagcttgagttcactattgctaccccatatagctccgcgaaattngtntcggccatacctcttcttgcgagcgnctctggtctcttggtcaagggctcttgcggtatttgcattctcttcccgtaacccagcacactccttncgaacgtgtgtagcggccaacttgaacttctccttgggcaagtttgacttcctcactcgcttttgagagtttgacttcttcgcctcttccgagcttacaactctctcgctgcgactttaactggnagccatctaaccttgatataacttcatcatcgtgtaccatcatgatgcatacaatgcttagctctgactttctaacgggttccatcctatgatcttgatatctgact

SEQ ID NO: 256414 - DNA, 367 bp, Glycine max
  unsure (1)..(367): unsure at all n locations
accgcggctgcactgaagagaaggngaaggttatcttcctgcttttattcgttgaccacagagtggtacctggagatatttcgcgggggtcaggagaccttggggacgtcaggtggggtgctattgcccaaaaccatgcttgaccaatcccgacccaacccgggcatagtcagtcagtgagaacctgtgatgtacctaaacaggcgagctcctggcagtcaacagataaagggaactaaaaccacaaagcaaggaagcttatgtggtggctgggcagctgtgaatattgtgtgatatatgggttatggcctctggtaatcgattaccaagggtgggtaatcgattacaaggcttaaaaatgaagaca

SEQ ID NO: 256415 - DNA, 317 bp, Glycine max
accttgtcaacaaattatattattaattctttaagggcgtacaaaggaagcacagacgagggctcaactaaaccatgtcggttctgtgttgccacaaccctcaccttatctattttgctttggtgaggcacatggtaagcctcaaaaccctcagccttataataaaaaaaagctgaaaatgaatctctcttccactcatggttgatcgatagagaagacagagagagaatgaactgacgatgaaacaagatgaacgacctatcgggcgtgtgtaattatggagatgtcattgtgaagaatgatagagagaaaaagtg

SEQ ID NO: 256416 - DNA, 299 bp, Glycine max
  unsure (1)..(299): unsure at all n locations
ctacggattccttactcgtgagcagattgttctagggtctgcttatttatagacaaattgatcagccctaataattctgctattgtctcctaatcaggttttcatatagaatggttttaaccaatcactagaagctactttcgagaatccttttaccaaatctatcctaaaagaaangatctatactttctacctagcggatctactatgtgtcaatgtggtgtcaacaggaagcattagcatacttgctattatcgggggttgaatatcctattacaattactctattggaacatctg

SEQ ID NO: 256417 - DNA, 364 bp, Glycine max
ctgcagcagcaagcttgaaggggccccttgttgctttttaaaaaaattccaaaacttttcatcagcatctttatattattttaggatttagtaccatagaatcattctattagacatgtaattaaattgagtttagataaagttttccttcgagaagcttgattttaaatagccatctataattgcatttgtgatcgcaagttaataatttttgacactttataactgtattacgactatacttacagtcacatttttctataattatcagcaatgcaaaataaaaaataaaaaattcatcacaatgcaacggcaacatcaatttaaatacatgcttccaaggtatatcttcataatatttatg

SEQ ID NO: 256418 - DNA, 480 bp, Glycine max
  unsure (1)..(480): unsure at all n locations
gagagacgtgtgcaagatgatgctngataaataaatgaatttggtgtaactaccgaaggattagataaaactaatcaaagcttatatatgctacgttntcgggtgcttaattnnttgtgtcatatttctagagccatagtatataagaatggctcaacgtatntaattntaggtctaaaatagtatttgatatcagaattttcttattaattataattaaatacaatggttcttaaatataaaaaacaatattttattanaatgaatatatatntctcattcacagttatattttgaactttcaagatacanatcattatngaatattacatagattaagtgcgataattaactagtttncatannnaaattaatagcttacataatacatggcaagtgaatctgataccaaaaagggtaaaatgactagaacatacaaatattatcaatccataataacaacagtttgttaaaacaata

SEQ ID NO: 256419 - DNA, 373 bp, Glycine max
agctttggagtttccaagtgccaattcgtcctcttcttttgtccagtcttcttctggcttcaattcatcagagggctttccttctgtgtccaacatcttgggatgttcccagcctttgatgacaactttccaggttctgctatccagcgatttgaggaaggccaccatccttgctttccagtattcatagttggttccatccagaattggtggtctgttcactggtcctccttctttctccatgttcatcaaaatttatctccctagatctcactcagtgatttcgagtgcctgctctgataccaattgaaattctgataccaatgccagatgtcgtacaggatgtcacgacatcacgcttcagaacatgcag

SEQ ID NO: 256420 - DNA, 388 bp, Glycine max
gacaaccacctataggttatgagcaacaacaaagaaaatatctatatgcatatagtttactcccacttggctttacattgattgcttatatgagacaattgaagatttcatatttttcatatataaaaagttatctcataaaacaatagatattgtgcaataaactctcttcaagagaagaatattacaataaagatcatgtaggaatccttatagattgtgcaagtgtgtggccaaggattttctttgagagagcatttgacaatgaagatcttcttgaatctctctcattcgctttgagaggatagacactattgtaagccaaactctctctctaaactcgtgcgcagtacctattataggccttgatggcattcacaaatctatg

SEQ ID NO: 256421 - DNA, 371 bp, Glycine max
agcttgtccttggtttagacatgattgatacattttttgggacttgtaggattcaatttgggcaaaactggatgagggaaattgtgatttcgaaaatctgcactttatgtagaattttgctgtcaaataggtgcagcataattttggctttgtgcagaaaatgttgtgtatttgctggttgtggaaagagtattacagattgggttctagacgttttctagcagatcccaactgtcataatgtagatttgtgtgctagagacttccagtaaaattttcgagtcgatccaacggttaacgaattggaacgaagagaatattactggggtatttgagtgtgaaaagctgtgatattggtttgtgttttgggca

SEQ ID NO: 256422 - DNA, 443 bp, Glycine max
  unsure (1)..(443): unsure at all n locations
tctatcatgtgttgacagtaattgattagccgatgaatctcctcgagggccgtacacacttcggccatggcttttgctttggctaatagatgtgggaggtcttgacttccattcaaggtcaaggcgaacctatccatccacatagtcgcttcttgatgcaatgcatcaatcaccctccctcttgcttcttttagacgtacacttgtgcaaattctccactagctttgtttgtggccacagactggttaactcttcatgtattgcctatgatactncatgctttctctgggcttcaagtgtgagccaactttttggacctccgcagcactactctctttaaacatgcatgcccctgacgatctttacttttcgacttgactcatgtgtaccccattgtctcgaattctctcgctatcctcgtgtgtgctttgctctgtcaagct

SEQ ID NO: 256423 - DNA, 385 bp, Glycine max
  unsure (1)..(385): unsure at all n locations
cctgtctgcatgcaagcttagcanatggacctaggtgttgcccactttcatcgtatctttcgtaatactcaccacctctatcagatctaataattttcacctttctgtctaattgcctttctacttcattcaagtaaatttctaaggcatccactgcttgagatttctcatgcaataagtagacataatcgtgacatgaatagtcatcaataaagatgatagagtatctttcctttccgaaagaactaacataaggtccacaaatatcagtatgcacaatttcaagaagttgagtgcttcttgtagctcctttctttgcatgtttagtttgttttccctttatacaatccacacaaaatatttagatccataaaatctagatcag

SEQ ID NO: 256424 - DNA, 366 bp, Glycine max
agcttcatgaagatgaatcaaatgggattcttgttgttttgatgataacaaagatgatgaaaaaaagcccaagagaatgatttcaagattgagtcaagaacaattcaagaatcaagagaaatttgatatcaagaatcaagtttcaagtttcaagaatcaagaatcaagaataatcaagattcaagactcaagattcaagattcaagagataactcactcaagataagttctaaattttttttcaaaacattgagtagcacatgaagttttcaaaaaatcttttaccaaagagtttttactctctggtgatcgattaccaatagcaaatattgttgtgaagaagctttcaactgaatgtacaacatt

SEQ ID NO: 256425 - DNA, 134 bp, Glycine max
aggtgagggactctgttatgtgacctatggttcttatatgccgggcagaacctgggactagtggggtttccaaacacttgcatccaccaccgcttttgcgtaaactggtgcctacagcactctgcgtcaaataa

SEQ ID NO: 256426 - DNA, 369 bp, Glycine max
ccgcagctgcagctgtaagaaaagaagtttacatatttctgaacccaagataaagagggtagaaggcaaagccacgttgactcattcttcaattttcataattaaattgaatatcagcccaaggtcaaatggaccatatgtatggaccatgctttaagccaaaacggatcttgcatgaggtagaatataaaaggcataaaatcattctcgggtatccatataataacttaagtttttggaggaattgatgaataccacacattattcaagctgaaactacattctagtgattaaagcatgcaagtgacttagcatcataatgcatgaatcaaaatcaatagttgcaatgatatgtggctatgtaacaag

SEQ ID NO: 256427 - DNA, 426 bp, Glycine max
tcagctgatttagcaaatgaaatggccagtcataccttatgcattgatcactaattatgattatggatatggactttttattatctatttaatttacataaattaaatatctataaaaatggcttacgtgtgagataataaaaggcgtccgttaaaataagtatcttatttattgacaatagagggcaattatttaattacgaatacataatctattctgatattgtagatatttatgattcatatactcgacatatgaaataacattatgtaaaaaaaaatgcacgagttagttagaggttaaaacgttttttcgtagactgataaaacacctagatgcttacttctagtattcatgtgcttatagatagtattccattgagataatgaatatactcaatgacagacaattttcttggaaaaaaa

SEQ ID NO: 256428 - DNA, 370 bp, Glycine max
  unsure (1)..(370): unsure at all n locations
agcttgttccaaatcccttccatttaatttcttttgctgctttngaattcgtttcacattctaagcaatcctaaacaattaaccatggtcatcctagaagctaaagctcattccaaatccctccaatttagtctcttttgctacttttgaattcgtttcactttctaaggaatcctaaacagtgtagatcaaataatttttttcctttcacaatcaattgcattgaaaagtgggagtatgacattacaaacacactagtagctgagtagctttcacattgaatcaaatgttagctataatcaatgggaaggcacataacaagagataagactctttctaaacaaatttgaaaattgaaaataaaaatacc

SEQ ID NO: 256429 - DNA, 450 bp, Glycine max
  unsure (1)..(450): unsure at all n locations
acgtcatcttccgtactcacaagatctggctatctacatntgagtcacgctgaccggcgganatacccgagtggttagccgtatatacattcttcttgctatctgtaagacgaanagcctgatagcatgcgaagactgacatcgtcttctgcgcccttcgtcaatcgcggccgacaagcccattgacacgcggagatntacgtcatcttcggcgctcacaagatctgtcatactgacattngagtcacgctgacgggcggagatacccgagtggttatccgtatnnaacattctttttgctgctgttagacgaaagcctgatgcatgcgaagactgacatcgtcttctggcacttcgtcaatcgcgggcgacangcccgttgacacgcgggagattatgtcattttccgcgctcacaagatctggcatactgacatttgagtcacgctga

SEQ ID NO: 256430 - DNA, 365 bp, Glycine max
agctttggaaagagttgtttttcacctttgcgctaagccaatatgctggcttagcgagcatccgctaagcgcaacactcctaggctaagcgcgaggaagaatccaaaagaagatgagcagtacagatttgctaagtgaacagcttcagctcatccgctaagcgagaaaggcgggctaagccaaaaatcactaacgtgcactaagcggtccatacatgtgctaagcacacgagcacgaacaaggccacatatttaagcctgaaatcagattttgtgaagagagtttggactgggattcagagctttgcatgtctaggttttctagagaaagaaaggtccaagttccagagagttttgagagatatt

SEQ ID NO: 256431 - DNA, 372 bp, Glycine max
  unsure (1)..(372): unsure at all n locations
agcttaaaatgacccgtaaaatgatatatattacccgagctcatcacaggaaaaaattgcatcttattaccttancttgccagggattactcagatgctccattcggagattgtagcatcctacaattcctgcacaagacagataggctaaggtagcataaaatccaaaattaaacaacaattatcaattaagcccaattatttgtctagaaccaaaactgtgttagagtggaaaaattatgagttcaaagaaaaattcacatgagcttagaagaatatataataaaatattaaactaaaaacgctcaatcacttacccaacacaacaaaacatgcaaggggaatgtccaaaagagtccccttatcattaat

SEQ ID NO: 256432 - DNA, 368 bp, Glycine max
agcttctacaagtgtcatctcaacaaccttattttatttgaagatagattaatgtggttttattcaactatgtttatatataaagacatgtaatttttgatgtatagcaaatctttttaaaattatcacttgacatgttggttgtctagggtgataaaattctaactcaaatgaggaatgttgatgttcaactggatagtgtaattttttatgttggtcaaacttatgttattcaaaactttgaagtagaaaagaatagtagtcattataaagcaacatgctatggctttaaaattaattttatgaaggaaactaaagtcacaactcacgaaataccagaaatacttgaaacaatgtacaacatcaca

SEQ ID NO: 256433 - DNA, 257 bp, Glycine max
accattatttgaccccagaaatttctctgaataatccttattctttctacactttaactggaaaacttaagaggttaaccatactaaagaatcggtgggaatatctcaatttgtaccattttaatattgtataaactctatcccaatacgcaacaaaacaatgacacttgttgcccacacaccttaaaaaattgggatgttacagtttccaccaactaacattccataaccagtggtagagttttcatcaaaagcat

SEQ ID NO: 256434 - DNA, 381 bp, Glycine max
  unsure (1)..(381): unsure at all n locations
attgtatcagtaatggattccacaaagctgtcatcaaaattgtgtatagctcttcattttaatcacgattgcaccaaggtaacataatttaagatctcattagtgttttcatgattntgacctggtactttgtctatgctatgcacaacatgataataagtacgcaaatcaactataaaacagaacacaaaggtgtgtgatcaagttcacactgagtcttgagtaattattngccttgatctggtaatagaagtgttacgtgttgaaatggtggaattacgtacaacggtgttattgttaaaaaacacaattgctcagcagaatagtcccttcaatcatatagtgactaatgagtcatcataattataataataatgacta

SEQ ID NO: 256435 - DNA, 376 bp, Glycine max
gcttatgattgattaaaacgtaccatattttgatattcttaaaattatttttttaataggtgatatgaaaatatgcttaaacatcatcaataatcaattatatttactaaacataagtttatcggtatagattaaacacttaaatgtttttaatgcattcattcaagttaaattaatttttaaataactaatcttgggaatctaatgtaaatctaatatatatatatatatatatataaaagtcaattccaattatattcttatactagtactatttacattttttaataacaattacctccataaatgttaatgacctttaattggtaatattagtaataatatataatttaaaaacgcttctatttgtcccgaa

SEQ ID NO: 256436 - DNA, 247 bp, Glycine max
acaaagaataaacttgacaacgcacaaacggtgaaataacatgggtgttggatcgagcagcgaaagtaaagtcagctgcatgaaactaaaatccaacctcaccttttgaaaaaagcgagtcgaaaaaaaagatagtgaaagtgtgaaacttggttttcctaaacgcatgtgggcagcatacaaaaccaagtgatgataacaaggtgaaagtcaaagactccgaatgcccatggcagagacaggctaa

SEQ ID NO: 256437 - DNA, 372 bp, Glycine max
agcttgccttacctgcaaagactttggctaaatgttattaaaacaacaggctggcgtccaccaccatactcaatttctccacttgattcttgtgctatttgtcttatatgttgcaaggcctgcataattaatttcacaattgtcactcactaagttttgaaaaagttaaacatatctaattcatttaacaagcaactaattaatcttacaacaattgtcaacttttgagtcaagaattctgatgattcatacagaaacctgagtactttaagtacactctagagcttcattcaataagtcaaacaattgaggactataggttctacaatataaaattcacaaaatgacttggatatatattacacatctaaa

SEQ ID NO: 256438 - DNA, 391 bp, Glycine max
tactctacatgcaagcatgcaggctggaaagagcccgggtagtcaaagataatttcttttccatatccatcaaagtctgaggagagtatgatgaactaagggacgttaatatggccaccgatgaagccttggaatgagaaaccaaaaaagcccgactggaaaaacacgaccaaaacaagttttgaggggctttatagggcagcaatagtgagctcaaactctgaagaggtgaaaggaatcatcatgggtcaaaggcatgatctggaatgacaagctaaaggcttgccttatgtcgaaaagaaatttgtcccaacagttaaagtgagactgaagggaatatgtgggccgtcatctatgagtgcaaagagaagcttaatcttgctgcgactca

SEQ ID NO: 256439 - DNA, 370 bp, Glycine max
  unsure (1)..(370): unsure at all n locations
agctttgggatgaagtaaagagaacattctgggttggataacactgatcgtaaaaaaatcttgattatcttcaaacaagctttggaagcttatggatgttgaagtttccaacaaggttgaggttcttatgagacgcagacgccagtcataaattgaaaattgtcgaagggtaacagtcacatcgaatctcaatgtatctctgggattgggtttcaccacttgttcatttatcacacgaatgctgtagggacccatcctttcttcaacaattttggggttgatattgaaggatgacgaagaactaatgttngcaggttcgatcatcattgggttcatggtaggagaggttaacttctcaaagaatgatcaa

SEQ ID NO: 256440 - DNA, 304 bp, Glycine max
  unsure (1)..(304): unsure at all n locations
taccgtagccttcattgttatacgagaatttgaaacatttagcgacctcagtgctgtcattcctgtattcagatataaagatatacanacatgtgttaaccaaagcagaacanacttntacttgatccaattacagggcaaggggaggaattaaaaaccgatacacanatataatattctccattcaatttttattttctgattatccgangttcaaggggtatataaagtattgagggcnagcaaaaaataccagattcaatttcaagtttatccgttagttgaattctggacangttactgt

SEQ ID NO: 256441 - DNA, 371 bp, Glycine max
agcttgaaacaagaaaagagtgatgcattgtctcatatgaaacatggaaagaagagaagcacaaaccaaccttttgtgttgcaaagggtagctgaaagaagagagggtgaatgaaagactccttcaaagtttgaaagagccattgtatgtcttatacagataaaaaagagaaagagaattatggaacaatgtgtgtgcctgaaactcacacattgtcatagctctgacagaaaaagtgaagggtgtgtgtgtatgtaatgtgatgtagtaagagtgcagacagaaaaactggtttgtcagtttttggagcctaatgaggaaagatagatagataatcattcataaataagccatatttcttatggaaaatg

SEQ ID NO: 256442 - DNA, 347 bp, Glycine max
  unsure (1)..(347): unsure at all n locations
ttatgttctacattnggattcagattgcacgtatttgatntttntgttanaataaagattaccggtaacaagtttattattaaacttatttatgtgcaatacttagatcgcacttaaggacttcaatngatatctttaaagacttaagttaaaccagttggaaatagacatgtttgagatcatattgcatacaattnctcatgtgctcattcatattgatatatatcattgagtgtattgacgaaagccatggcgattccattantgcatgtaattntcaagtgaacgtctaaagataaataacatacacatgtgtgcctacgaattgtgatacaattgttacacta

SEQ ID NO: 256443 - DNA, 363 bp, Glycine max
agctatggtgataaaacttgcttgagaatcttttttgagaaaactttgttgagaagctacagcttcgctactcacacccctctaataactaagctcacctccttgagaagctgccttgagaagatacataaagaagctagagattagctacacacacctccctaatagctaagctcacctccttaagatgagaagctagagcttagctactcgcaccctataatagctaagctcacccccgttccaaaaatacatgaaaatacaaaaataaaagtccctactataaagactactcaaaattcctggagatacaagggctaaaaccctatattactagaatggcgaagatacaaggcccaaaag

SEQ ID NO: 256444 - DNA, 222 bp, Glycine max
  unsure (1)..(222): unsure at all n locations
tctaagacctcacaatcactcacanactcatctcaagctcataggacgacttcctcttncagctctggtctctgcggatcttcacacaacagattctatcaaactctttggaacttggacctttctctctctagaactctccaattatgcagaagcttcaagaaaaggcccaaactctcctcacanatctgattatagacataaataagtggccttgttcgt

SEQ ID NO: 256445 - DNA, 377 bp, Glycine max
  unsure (1)..(377): unsure at all n locations
cgacctgaggcatgcaagcataagctctccccattttttgtttttaaatatcncctccaggaaaatttccattcccatccagtttcacaaaaggaacccatacttgccactgtctgaagtttttgagatgaaatttgataaaattatgggaatttttctttaagggttatcccaccacccacccaagagtctttccagaaaaggatttgatcacccctatccaatttttaaatgaactgcttagagacattacccatacttttgtgatgaataatggacctcaaatcaaaccaccaatgggagaaatgctgctttggtggtccctcttccaaacctctccaaccccatttatctaaaaggtttggaagaggtgattc

SEQ ID NO: 256446 - DNA, 303 bp, Glycine max
  unsure (1)..(303): unsure at all n locations
gtgaacattatgtactttctcctnctctggtactctctctgactctaccctgtgccctctctcttctctatatgatattgactctcacaggttctacatccattgtgatcgggttntgattggtctcatgcttacttttgtcaaacgtgtaagtcttgaaatgtcacttctatactagtcaatttcttgttgctatcctcgtgttgtttgacacacaacatactaagaaatttaaacgttgtctaattaacctcttccttttgtgaataaagcataataagaaaactatgtctctaatgattg

SEQ ID NO: 256447 - DNA, 362 bp, Glycine max
agcttataacaatatgtgttggactattttattttgctcggcctgtgaatcagagccattaaagtgcccgttggaaaccttcatgtgaaagttgtaagggcaaacaagcttaaaaagaaagatctactgggggcctcaaacccttatgtgaaactcaaactcacaaaaaagaaactttcttcaaagaaaacaactgtgaaatacaagaatttgaatccacaatggaatgaggaatttaatttagtcgttaaatatccagaatctcaagtcttagaacttactgtgtatgactgggagcaaggttggatcatctaataatgcctttttcattgacagaaatggatgtttatctccattgagcc

SEQ ID NO: 256448 - DNA, 356 bp, Glycine max
cttaaactactcattgaatgttgaattttcatggtacgctaagcctcacatctcaggctaaacgcatattgcaaaaaatttttgtgctgcaaaaagcgctaaacgtagcctgctaccctaagccccagatgctcactggaccttacaacttcaagttgggcttatcacgaggctaggctaagcgcatgggttttaaactcaaacgtctcatgggcacgctaagcatagttgtgcgctaaacgcgccatacaaatatcagtttttaaaaaaccaaaggttgaggcacttgggtgttatcccaaaaaccttcagcttctgtctttgtaaacttgaacaagtgtgatttttgctgcgtg

SEQ ID NO: 256449 - DNA, 261 bp, Glycine max
  unsure (1)..(261): unsure at all n locations
ttatctatctgatgatgctttgagtgatctctgcgctatcggtatttcaatttaatatagctttaccttgatcacgtagatgcatgttttgttaaggtcattcaacagtggacactggtntgattcttacaccttgataggacagggctagtctatcgtactatcatgagggattggngtacgataacctacttatatgatagttgtcttaatgcgggctcgccgaattagtccataaaaggatctgccgatatgcttgat

SEQ ID NO: 256450 - DNA, 373 bp, Glycine max
gcttaggggcatagaattggagtgttggatcttgaaatcctcacacatttcctttatcattttattgttcagattggtggcattatcaatgataatcttcctgggcaacccataccggtagattatctctttcttgatgaatctgaccaccacgctccttgtcacattggcatatgatgctgcttcaacccatttggtaaagtagtcgatggcaaccaaaatgaagccatgtctattcaaagccttgggctcaatagctccaatcacatctattccccacataaagaatggccaaggcgccgtcaagatgttcaaaggtacgagcagagcattgacgttatccacgaaagcctggcacttgtggcactttctc

SEQ ID NO: 256451 - DNA, 184 bp, Glycine max
  unsure (1)..(184): unsure at all n locations
accttctcttccattgttngttctatcattttctccatgtatctcctcacatgtcttgtgctgaatgttgttaaaattattntttagaattttcaccgattaaacctgctatagaagctagatttgattntctatggttcaaatttcttgttcttgttcttgaaccatgaattgtgctgagttt

SEQ ID NO: 256452 - DNA, 370 bp, Glycine max
  unsure (1)..(370): unsure at all n locations
ctgcagcttcagcgacccgctttggtgctttatttattccaaaacaaatccctcttatactgccattttgattcttaattcctgaatgtacaaccttcaaattggtgctcgctcccgtnatttgtttttgcaaaaaagaaaattaatctgaaacaattcaggctgaattgttatcgttattattactcgaaccataaggaataacagctaaacaagttatttaaaatgtaacttttaaattatgtggtatttttttaattacaattttacttcaatatctaattctgtgaatctacttaggtcgttttttaaatattaatatgaatttaaaggtgatctactgataatataaagtacttgctaatcacaa

SEQ ID NO: 256453 - DNA, 278 bp, Glycine max
tccactaactatattggcacaagctacataggagtcgacttttattggttacgataaagaaaataatagttccctccccaaaaggaaataagagattgatgataatactgaattcttcatgcccaaggaaagagacacattttaaaaaattaaaaaaatttacaaataatatgtgcagatgcaaaaatctcatgatgaatgtcttaaatacaagaccaaaaaatcctcaactatgcttcgtagtaaattttaaataatacctgccattttacaaataa

SEQ ID NO: 256454 - DNA, 375 bp, Glycine max
agcttttagcttgttacaagaaaatttattcccaactaataattaaaatcataaaattgagttccaccaaaaataatgtttgaaggaaaactcggggatgttggtgaagtcgggaaatattgctagaaagataacattgtcaaactaagaaaagtgtagggtgaaaattgtgtcttttcctctttgtattcccctataaatattggttattacaaataaatacaagctgattttctgccctgtaaattagcaaaactacggtaaatccctatattgcagttgttatattctaattaaggaaagaatctcagatttgcaattacaaataggcttttaaatggctctaaatatccagctgtattatgctgcaattaa

SEQ ID NO: 256455 - DNA, 374 bp, Glycine max
agcttagcctattaagtgttagtcaattatgtgatataggatataaagtatcttttgattctgaaaaatgtgttatcaagcatgaacatgacaaagatattgagcatataggtttcagagaaaataatgtttacatgattgatttgaaacaaaagtctgaaaatgatagatgctttctaagtaaagatagtgatccttggttatggcataagagaattgctcacattaatatggatcatctaaatagattattctcaaaagacctagttgttggtctaccataattaaaatttgaaaaagataaattatgtgatgcatgccaaaaaggtaaactaacaaaaacatcttttaaatctaaaaacattgtctctacc

SEQ ID NO: 256456 - DNA, 288 bp, Glycine max
  unsure (1)..(288): unsure at all n locations
tctcagctatctgcctccattacagtaccttcatagcaggggcatgaccatcaacatccagccgcatatgcaccaccaccgnctctacatcagcctncgtncttagagtccatctcagctcacatgcagaggattgagctccatatgcatgcatatatgcaacatgtggccgaccaataggcggccaatcatatgggataggtgcagctgaatcagagcttttaccagtacaccctacgtcagcagagctaggatcccagcccttactcgtggcttactcccgagtag

SEQ ID NO: 256457 - DNA, 355 bp, Glycine max
agcttgtctcttcagacttattggcagtttaattctttatttgtagatgctccctattttgaaggtggacttcatcgacccttaagatgcccaacaactaatctcatgcaagatttttcatatcttttgcttcttgtataattggggtcttgggttcccacaactaaaaaaaactgtccaataccttcaggtttatctgagccttggagtacatctatggaagagcttctagattgtttagaagaacttaaattcttctaaacatgtcatccataaactctttatctttcatgttgaagctgtcataatgcctagtcaaagtcgtagctatccttagtttgacatcttcagtccc

SEQ ID NO: 256458 - DNA, 302 bp, Glycine max
cctgaatcggacattcgaagtaaaagttatgaccctttgtaattgacgagagcctccgatggtcaatttcgagcggcttccgatgtgaagccacctaatcggacatccggccgaaaagctatgaccatttgaatttcccgaaagcctccggtggtcaatttcgaggatatcgacaaagtacgcgcccgaatctgacctccgcgtcaaaagtgatgaccatttgatatttttcgagaccttccatggttcattttccagcgtctatatatgtgatgcaccaagagcagacatcccttcgaaaa

SEQ ID NO: 256459 - DNA, 327 bp, Glycine max
  unsure (1)..(327): unsure at all n locations
ctagcctctcgacatattatgcgcacgaatcggacatccgtgtgaaaagttatgactcatttgaattctcgagagtttccgttggttaatatcgtgcgtatcgatatattataagcccggatcggaactcactgtgaacagntatgaccattngaatttcacgagagcttgcgttgtctatttacgagcgtgtctatatgtgatacgccagaatctgacatctgagtgaaaggtatgaccattcgaattctcgagagcgtctcgtgtcaatttcagcgtctcgacatgtgatttcctgaatcggcatccgtgtgaaagtatatcatt

SEQ ID NO: 256460 - DNA, 368 bp, Glycine max
gcttatgaggcttctatggaggctggatttttaagcttcaatgaggtccttcaatggtgattttccaccatggagatgcaacggaagataaaggagaagaggtgagaggaggcgccatccactagggaatatgccatggaagaaggagcttcaccaccaagagagtgccttggataagaagcttagagagaaagcttcaatggaggaaaagaaagagagagagagacaggggggagcactaaattgaaggaggaaaagagggagagaagttgaactttgaagtgtgtctcataagactctcattcatcaaagttacaacaagtgttacacatgcttttgtttatatcctaggtagcttccttgagaaa

SEQ ID NO: 256461 - DNA, 368 bp, Glycine max
  unsure (1)..(368): unsure at all n locations
agctntgtgtaatcgattacacatatttggtaatcgattaccactgtttgtttctgaaaaatctaaagatgtaactcttcaaaaaggttttgactctttcaaatgggttttaagtttttctaaaagatataactcttctgaatggctttcttgaccagacatgaagagtctataaaagcaagactttgttttgcattttgaatcaatgattccaagtctttctaacaatctcttacaatcctttacaagccttgaatctatttgaacttcttcttcttctttgtaccaaaagttttctggtttttccaaaccttgaaaacttgtgctattcatcctttccattctcttctccctttgccaaaaagaat

SEQ ID NO: 256462 - DNA, 281 bp, Glycine max
  unsure (1)..(281): unsure at all n locations
cacaagttgagttttattcataanattagagttatctcttttatcttagtgagagtgattctcctaaattcttgagtgattcaagaacaccctggctgtatcaaaggactntcacaacctttgtgtgttgccctcgctggaaagagtgattctttcctttctatcatctccacccttgttctttgcaaccacaattncagaagatccacctctcgcccacaatatctcgtgaccataactcccaatttacacactcaaattaagtgattcttgatcctaaa

SEQ ID NO: 256463 - DNA, 378 bp, Glycine max
cctgcggcatgcaagctttagccaatggacttaccttgatttaattcctttgatagcccttttgagccttgtttccctttccttgttttgaagctcactacaagccttaagtgaaaaaccatgatattaccatatccttaaggaattttggagctttggaattgttttgggaataagtgtggggggtttttgtttcattggacaacttgttttgttgactatgcttcatgatgtattttgggccatacttgatgtacattgtatattggttaaatgttggacatgctgaatgaaatgttgtttctcaaaggcaaaaaaaaaaaatctaaaaaaaaaaagaagaagaaaaatcataaaataaagcaataaagttgagtg

SEQ ID NO: 256464 - DNA, 357 bp, Glycine max
agctttgaatggaggctctttctcttgtttaaactgcatgttctgcatagtcatttgtctcacaagttcttttagggaaggttgtggaggggtcttaactgttggctatttctggggctgttgttgttgttggattggtggaggaatgtatggtctacttgggccagcagcattttggaaggaaggagtaggctgctgttgttgctgttgagggctagaccatctgagattagggtgattcctccatccagggttgtatctgttgctggagaggtcataattgttctgctgtggttgattttgctgctgaggttgaggaggtctattgtaaatgtttgcagcataagctccgggctg

SEQ ID NO: 256465 - DNA, 323 bp, Glycine max
ggaccttaagtcacctgcagcatgcaactgccacgggtgatgtggatttaaatcgaacagggagaagaatgcccactgtgtggcccctaagtccagaagtatgctgcgctaattcactgggtggctttgcccttgcttgtacatttcacaccaatcggtgtccattgacatgtaagtactgagaccttattttcctgaagcctacaaatgtagaaggagttccttatgttgagtcgccaggatataatattctatatttataatttaaaacagtatgtaataaaaaaaactgtatgtaaatattaattaatttaaaccatgtt

SEQ ID NO: 256466 - DNA, 428 bp, Glycine max
  unsure (1)..(428): unsure at all n locations
gcttcatgatgaatcaacaatgattcaaatgtggtttgatgataacaatgatgacaacataagatgatgacaaaagtgatgaacaaaaagctcaagtgaatcaaagaacatccatctcgagaatcaagattcaagattcaagttcaagaatcaagaagaattcaagactcaagaagaaagcttacaaacaagattcaagatctcaagaatcaagactcaagatctcaagaataaagatcaagattcaagaatcaagaatcaagactcaagactcaagatctcaagaatcaagatcaagattcaagactcaagattcaagaatgaagaaaagattcaatcaagataagtattaaaaaggtttttcacaacttggaatagcacatgagttttggacaaacctttaccanagagttntactctctggaatc

SEQ ID NO: 256467 - DNA, 452 bp, Glycine max
tgactcgtgtcgtctggaacatctctaatgtccaacaagctctgcatagctcctaacaccatctagaaataatcctacaataataattacaattagcaactatttttcagtgacaatgtatgaaagagaaatcaacaaaatccaatttgcattatctagcaagagtagtctccacctggtagatagtctgccagtagctgcccaggctgtggctgtactgggatgggcagtaaacatatatgcaagaccacgtggtggttgtctctcctcacgtggaatgacatggggatgggaaaccttgtaaaaccaaggcatatagtcagagttgcaacaaggtgggtgtgcattgatgcagtcactctatgatgcctctttgcaacatcttccccttcctacgaagggccttcatgggggggcggtgtccaacaacgtgtgacctctactttgtgcga

SEQ ID NO: 256468 - DNA, 328 bp, Glycine max
  unsure (1)..(328): unsure at all n locations
acatgaaggatttaaaatgagtgcccgaatgcaattctaggcctatgaacccaagcctttaatttcaatgtaaggaagcatgacttatgcttaggaatctaaattctggttgtgaatgtaaaaaggcatgaatattaggacatgtttgagaggtgtttttattaaaatttaaattcggctgccccatgaggaataccttgcacctatgtagcatgggaaatacctttcaacgggatgnatatatatatatatatatatatatatatatatatatggcataaaaatgccttgcaaagtgtgaatgaaancaaaaaatgcctttaaaata

SEQ ID NO: 256469 - DNA, 430 bp, Glycine max
  unsure (1)..(430): unsure at all n locations
gaccaaaagtccaaganaatgatttcaagattgagtcaacaagttcaagatcaagattaatttcaagtttcatgagaagaaatcatgaagattcaagaatcatgagaagtttgatttcatgattcaagagaatatgaattcaagattcaagagaagaaatcaagaagacttcacaagggaagtattgaaaagatttttcaaaaaacaaacatagcacaattttgtttttcaaaagagttttcctcataattttctaagttaccagagttttttactctttggtaatcgattaccagcttcctgtaatcgattaccagtggaaaatattgatttcaaaagcttttaaactgaatttgcaacgttccaattgatgtttaaatggcgtaatcgattacaatatattggtaatcgattaccagtgtatctgaat

SEQ ID NO: 256470 - DNA, 488 bp, Glycine max
  unsure (1)..(488): unsure at all n locations
atgaagcttacctgngtggtgtacacgtcaaggtattcatttggatctttgtaccatcatatttttcaatggtcaaatttttccaattcaagggaacacacactcccatgatgtcaagcataaaggggttcttgaattgcaacaactatcttcctaaggtattaagcgatgagggaatagtgtcctatcacacacttaagttagtggccttgggtagacaaaaagatgttgacttagcttctcttccttcatcaggaggattaacctcaggtnttcgtgacctattatattcttgtagatgtgcattttcgccccgaagggctatgacttctttgacgtgatgacaatgcattnttgagacctgagcttgntgccttctcatgaccggagacaagacgatctagtcctctacattaatcttctcattttaagatctgatggttgctccgttgactctatttgtccaggtctaatatattccataatct

SEQ ID NO: 256471 - DNA, 380 bp, Glycine max
aactctgcacaatgactatatacgtgactgccttagaaaccaatatatcactcatcactttaatcttttctctcaaaggctgcaaggcattctaagaacttagtatctatacaacagttttacaacagagctgtttactagaaaagaatgattcacataagttgttcatatcgttcttcttcaaagcttattctatttataaccttcatcttcaagtatccattgtctctcaacagatggattcttcattcgttcttcgtctcaagtcttgaggttgttggtgcatttaattcttcttaatgtagagtccatgttacgtgtcttacacttcaacaagaaattcatgtttacatcatagaaggtatgcactagcatatcat

SEQ ID NO: 256472 - DNA, 457 bp, Glycine max
  unsure (1)..(457): unsure at all n locations
atctcagagtcacctgaggcatgcaagctngcctgtccgatgcagcagtaatgatggcccgttttatgttggggaacggttacgaacccggaatgggtttaggcaaagacaacggcggcataactagcctgataaatgccaaaggaaatcgtgggaagtatgggttaagctataagcccactctggcagatataaagagaagcatcgcgggaaggaagagtggtagtcaaagctcgcggttgagacaagaaggtgaaggaagcccaccctgccacataagtaggagctttataagcgcgggtctgggggacgaaggtcaagtggtcgcgatatacgaagatgatgttccgagtacattggatttggtacgaccatgccctcctgatttccagctgtgaaattggcgagtggaagaacgccccggcatttacgcgacgagcataatgtanacctttac

SEQ ID NO: 256473 - DNA, 418 bp, Glycine max
  unsure (1)..(418): unsure at all n locations
tattcatttagtgctgaattctcattcttacagtttagtcagtttaagatctcttataattttcagaaagagaaatggtctcttaatgagctcatntcatactgtgtgcaagaagaggaaaggctgaagcaagaaaggactgaaagtgctcatgttgcaagtacctctaaagacaagggcaaaagaaaaagaactattgagcccaagaataagctgttaagggtccaacacaaaagatataaaatcaaggtgacaactgtttcttttgtaataagcttacacatgtaaagaagatatgtaccatatatcatgtgtggcatgcaaagaaagggttgcctaagctaccggaagccaactgattcagaaagatgaatatatgttggagctatagggcattttagaatattatatgtactag

SEQ ID NO: 256474 - DNA, 352 bp, Glycine max
  unsure (1)..(352): unsure at all n locations
agcttgttcgaagatcctcgagacgttatatgaggggccaatctttcagaanagactttcaagaaagttttgaagatttctctagatgagaactataacctgcatcctttcgagttcaaccattcccacttctgcaccgtggggtttgttacctggtgggagaaatattatttgagccgttcagttggagacactactatcatgatctccagacttgagagtggctttacacaaccaacggtcgagaatatccgctcaaaccttcaagctcgaggtattaaattacttttgactctccaaattgatatggtatttttgccttttctaatattcttattttaggcaaaacaat

SEQ ID NO: 256475 - DNA, 474 bp, Glycine max
  unsure (1)..(474): unsure at all n locations
ataaacaagtattctatcttgccactcctagttatcctagttttctctaagccactactggcacactcttagactctccctggatctaagacacccaagtattgtttaacactaaatcactcctaactttcacaaacaaataatgtttgattgaatacatagattcaaatcactcaacaaagtggatgaaagattaagctcaaatacaaatgagtaactttgctatgcaaaggatgaactaattaaccactgttgtgtatcatccaatgacttgataaaatctcacttcagaatgctcttgctttttactttgtattttttttcttctttcttgattttgatagcgtaaacataaagagtagatgaagatgaagactcttagtttattttgatgatgtattttgtattaacgaacacttattagtattaggaatgttgntacacttaaatttttggaaatgtgtgtaaatcata

SEQ ID NO: 256476 - DNA, 328 bp, Glycine max
ctgtatacatcattattgagtgcaatacccagtcaagaactctgcagtaaaaatgtaaaacttttgtccatctaagaaaataaagtaactgcgatgtgtgtcaacctattatattctcagttacttctgatatgtcttgatatatagatagggtaacagattcaccgaaagaggctgatgattttcatttgttgcattataggcttatttaataattctgataagctattcatattctacgattatgattgtatcattaccaccttgatccagattcaactaatgcaatcactggcattatttcaaataaaccattcgcgtatcaata

SEQ ID NO: 256477 - DNA, 474 bp, Glycine max
  unsure (1)..(474): unsure at all n locations
agcttgttggagaggtgaagatatggggttatattgnccatancaaaccatggaaatattgctatgtgcaaaggagctgcatttgcggtatccatggctgctcctgtttgagttatttgcttactgtcttcgaaaataacgcatgcacgcgttcaaattaaatagtctccatcaactttctgtctctctctgattgcagaattatcaaagtttggtgccacgtgaacttcttgcatccatgtagattttctatcttcattgccggtcacatacttttcccaaggataacaccacatgactaggtcaattaaatagatagattaaaataaatcatttaaattataattataatcattataatgatggattaacaataatttatctatacgtgtatgatccattacacactcgttcataatatgtgttgataaatctatctaatccattaagacactcgtcattataatgagtatc

SEQ ID NO: 256478 - DNA, 406 bp, Glycine max
  unsure (1)..(406): unsure at all n locations
atactagtaggatcgctgattctaaagtgcgcagagaaaactggtaacttggtgctgagaagagtaatgggctacttacaaaaacatgtaatgccctatgactctacatttaagggataataaagattcaaaccttgatgtagcctgatcatcggtaaaatctctaaacgttgtcctatcaccactaagcatggaccttccacgtgctcgaaatgatggatgttctggactgcaaaaccagaaatatttccaacacaaaaagaaggctgagaagtatttagaattatgagactgtttagattaagaataccttgccactaaatgcaaaatgataacatacatagagcaattcgaaagacaaacttggaatgtcctaagtactaaccaanaatattaatggaaaatc

SEQ ID NO: 256479 - DNA, 459 bp, Glycine max
  unsure (1)..(459): unsure at all n locations
agcttgcaattaagcacacagttggtgaaatgacatttcatctgtgactagttaattaccttctcgcgtctctgttcctgcctcgatattccagtctaagtgacttactagtgagccctattgcaatgctggtaaaatggaggatgcaatcatgcaagcgaattatagcaaagtttgtggcgtacacttggcgaatagacggttcattattaaacatcattttcattatggtaaagtaataataaggatgtacatgaccaaaagtgtggaaaataaatgttgatttgaaaatactatatagagaagcatattagaaggggtaagagctactgtgggtggaaaccactacaagctacttatctttctcaactttttttccaatccaaccagctactattgnggtaagagctactgtgggtggaaacctaattggagatgcagctttatgtgcagcatatg

SEQ ID NO: 256480 - DNA, 455 bp, Glycine max
  unsure (1)..(455): unsure at all n locations
gacacttatgacactaaccctatatatcttggttctcacattttntaacaatattagttgtttatntatttatttttggtaacaggaagattcaaactaataacctcttttgccctccttactttatttatcaccaaatcaatcttacatcttcattgtgtcgcaaactcttgaataaaaatagaatgtaaaaagtgtgaattctactaaaaaaaaaattacaatatttctttccaatattatttctatctttacttccaaatacactattaaaatacactattaagatacatgttctctcagccctaaacctttataaaattatctgtattctatatataaacaagttttgcgtaccatcatccttaaccccgagcgttatggaaaatagggtagtttcatacccaattcagctcccataaaattgtataaagtcccctaatccaatcactttt

SEQ ID NO: 256481 - DNA, 390 bp, Glycine max
  unsure (1)..(390): unsure at all n locations
agctntgacagtttctttgcaagtgatagtgtgtgccaaagccaatttgtccctgaagcaaccatttttacgaactagatatcaaagaaagccaaagccaaagcaaggaagtgtgcgatgaaataacatttggagaggaatgatgggacccacgattaaggaatgaaaacatggacatcgtagaggccctagcgcacggnggcttcaacaaggtgaacaaggcacggagacgagttcgcaattgcatgttacaaatgttggaggttgcagtcattacagtgattacaaatgttggagccattacagtgatttgatccatccaggagggaggtggagagaaagagctaggttttatgagggagaagagagatcaactctcaatagagaaaa

SEQ ID NO: 256482 - DNA, 408 bp, Glycine max
ccttctaaactttatacaagaatgaagctctgataccacttgttagacaagtggcctcagatatcttaagaaggggggttgaattaagatattgcaaactatttccccaattaaaattctatttcactttctattcaagttacaaattcccttaaaaatgaactcttaaataatgattcaaatagaacaatctgaatataaatataaaataataataaataaaagagttcaagggaagagaaagtgcaaactcggatttatactggttcggccacacccttgtgcctacgtccattccccaagccgcttgagagttccactatcttgtgttcagaattcttttacaacaagagaccctcggtctcttaatcctttagagaattagaaagaagagaagaatgaatctct

SEQ ID NO: 256483 - DNA, 444 bp, Glycine max
  unsure (1)..(444): unsure at all n locations
agcttaaagtatgcccgagtctttcatccttatgagatgtngntgaagtattggcgatcagaattgccattccttggattatagggttgaaccaagctcatgcttttacaaaaaggttcatcaagtcaagttgaaatatggaagtaaccgtcttgcaaaattggggcaaaagatgaatcgagtcacatcactgcttcatctactgccaaacatatttaggattgttgatgtccttgttacttccagtttcaccttgacaaagatgtcatggaccatgttgaaaatctaaattgattcaaccccatatcctgcgtaaaaattcgtaatacttcgactgtacatcattcgcatgcatccgtgctnttcattggttgcattgctcattgcattctttccttgaaaaataaaataaaataaaataaagtgaacttatcaaaaaggaca

SEQ ID NO: 256484 - DNA, 392 bp, Glycine max
  unsure (1)..(392): unsure at all n locations
ttgaaagctgagctcanaaagataagagtggttattgagtatctgaaggtggcagtcactatggttaggaaagaatgtgatgaactaaaagatatcaacatgactgtagctgaagcgctagatcgggaaacgaagaatgccagaaatgaagagtggagcagaaacaagttatgagggcttttctaggtagtagtaatgagctcaaacttagaaaggccgagagggacaaatcaaggatggaaagcctgatgttagaggataagttaaagagttgtcagaggtcaaagagaagtttgaaagaatagttgagcaaaacagaagaaagtatgttgataatcattgaccaatataaagagaatgtgaacctagcttgtattcatgggcatatgctg

SEQ ID NO: 256485 - DNA, 403 bp, Glycine max
  unsure (1)..(403): unsure at all n locations
agcttctttaatttgtgtttaatcaaatcanatnaaaccggatgtacaaaaanttaattgtgcaatgaattntatattaaatcaatgcacaaatgttctgaatttctccaccaattagtaagcttattaaaggtagtcatatctctcaacaaaaattaattatacaagcaaatcttaaattgcatatgctttttttattattcattanctttgtctctcatactctctctgttatttcctcttattcaaatatgcatcccattcaaatagacatttaagttgtttgcttgctttaatgtaaaaaaaaaatagttaatggcatgcatggttatattttaaatcaacaacttatatagaaagaaaagtattataaaaaccatgtatttatcaggntttcatctgc

SEQ ID NO: 256486 - DNA, 431 bp, Glycine max
ctctcactacattatagttgtttctgacattaattgaaaattataatagttatataacataattgagtgactgaaattccatatatattttgtttaataattaaatattatgtaaactaatgatattaggattaataacaataatataaattaataatatatactaaggatcaaaatatactaatttataaaacctgattatatttaaataaatatatatagcataaacatattttaatttatatatatgagaatatatctaatagtattatatttaatatactaatttacatatactaaatatactttaataaatatatatatcaacatatatctgtattatgttatatcgaaatacgtttaataaataatagtattatattccattcaataacattatttttattaaatataattcatatttattaatt

SEQ ID NO: 256487 - DNA, 426 bp, Glycine max
  unsure (1)..(426): unsure at all n locations
agctncancctcacactctctatgccttttttctncanngcaccaccattccgtaactggaattttccgaatcctctatcggttttcaaagtgtcaaacatctttcaatctctacaaatgtgcctcgaggtaggagatgtgaatgtatgcatacatgattctgatgatgtcaaagagaaatctaacaaggctgcttcaaatgataagcatttgcttcaagaataattcaagattgcttcaacaaacaaagccttgtttcaagattcactaaagaccaagccttgccttaaaacaatgtgctttcaagacatgcaaggctctggtaatcgattaccaggaagtgtatcgattaccaacacacagggttgagaaatagctgttaataaagttttgaattgatctttcacatgtaatcgataccatatg

SEQ ID NO: 256488 - DNA, 308 bp, Glycine max
tcatactttataaaaatcatcaccatctatctttaacttcttcacatattcaaatcttcactctttctactgaatttctgatcattctcttatcttttaaaacttttgacaacactttctcttcaaataagttttgtcaaaacttggctatcaccttttattctcttttcttgccaaagaacaagactaccgctgatttttggtctctctctcctttgcaaaaacaagataccgctgatctttggctcttatgggtgtgaacgaaacagaaggcatcctgggatattcaggaggcatcactgtgtaaa

SEQ ID NO: 256489 - DNA, 375 bp, Glycine max
tcgtgaccctactgctaaggatcccaagggaaaggacatacatatgaataagaagcaaatccgtgatcataagagtggcttgaaggaaccttccaacacaaagatcctgagcataaagagtcgaagaggatgaaacaacaattgctggagtttcctttggccaacctgttgtcgtccttttcggccttgatgaatcaaggattctttgtcaaggagtttgcttcgaactgtcttgtcgatccgagccttattttggatcatggcgtcacatgttgaatgagaatgatgatgcggccaattgggcacattctattggcttccattgaaggcgacaacaattgctcaacaccttttatgtgttttgaatactgtaag

SEQ ID NO: 256490 - DNA, 391 bp, Glycine max
gatgaaagaaaatcccggcttggtagcaccaggaccgcacgttctaactaaacgaaaattgaaatctgttcatccactgcaggaagatataatgtagtaataaaatggaaaagaaaaaaagacaattaccaacctgacaatgttaaaaagatcgtataactctgagcagtgtgagcaatcaagtgcatcctgccagtaatttcttgtcctgccatgacatatattggctgcgagagaacacagcgtaactgataccagtgggttgtatgtgaaccatgggcattggtaagccaccttcgtgcagtactgtggatttggaataaattgagtgacatattaactgataaattaactgatgcaaacaatcacaaagcattgtcgattataaaga

SEQ ID NO: 256491 - DNA, 397 bp, Glycine max
  unsure (1)..(397): unsure at all n locations
tgcggcatgcaagcttcggttgcagtgctggaaatgaatttttgttttccggaaccagaacctgtgaaagccatgttatcttttctgcacacaaaaaacgaaggcaaataattcagcaaagcaaaatcacacaaatgggatccaatccaataaaaacgaaggaattagtctcgcggtccttcggtatgagtgagacgttgtgaaacaaccaacccagttatagattcgtgtgaaaaaataatctttctgaagaataattaattgagacgaagaaggtgggagaactgatctatttatctgcatgagtgcaacggaagaaaaagaaaaagaaagatttaacattttcaatgaaagaagagaagagaagagagattgcntaccaatgaggagtagaaac

SEQ ID NO: 256492 - DNA, 458 bp, Glycine max
  unsure (1)..(458): unsure at all n locations
tgccgaacatcatttcccctcagcgttttgcttgctctctctgctcgcctcaagcctcgcaaaaacggtattctttattttatcttctccaactgctttgctctacctgcacagattcctttaacttccttgccttcttttctttccacttcattactatgcacatacacttcagtggtgcccctctcctcaaaacaacttcatagtctgtattttatagtgacccgcacaaccaataaaaattatcagagaatgatggtgaatttataatacagtatgatacatctcatatagactacttttttatttgccgcacgagctggactgctcaagcttcaagatgatgtacagacatgcggatatcaagatgtacaagtgatgtggganatgctacagagaacagaaggtgaagttatagaaaaccaccatcataagcgcatgcaattgcccttctggag

SEQ ID NO: 256493 - DNA, 354 bp, Glycine max
  unsure (1)..(354): unsure at all n locations
tcagcttacctatttggatgtgggatcatggcagttaggtcccagctttccatcggggattcagtcacaaaaaaaaacttaaatatttaggcatgtctaacacagggattattgattctattcctacacagatgtgggaagcacaatctcaggttttgtatttaaaccactctcataatcatatccatggtgagcttgtgactacattaaaaaatccaatatctatcctaactgttgatctaagcacaaatcacttatgtggtaaattaccctatctttcaaatgatgtgtatgggttagacctttcaaccaattcattctctgaatccatgccagatttntatgtaacaatca

SEQ ID NO: 256494 - DNA, 398 bp, Glycine max
  unsure (1)..(398): unsure at all n locations
tacgcatagatgacaatntagagagtgatccaatactttcaaatggatttccactgaatttattaataaacagattgagatatcttaatgatgaaaagtttccaaatgatcttggaagagcaccaccaattaaggtgttggaaaaatctagcatgtcaatatttttaaaagccccaatttgatctatcagattgcctgaaagttgtgaactccgaactgcaagtgttgtgattccctatgaaatacaaggagcaagaatttctaaaagttcattaacctgttggttgagtttgagatatgataaacctatctcccttaagttgcagagattagccaaagaagttggaatggttccttcaagtagattatatgacaaatcaagttcaacaagagaagtc

SEQ ID NO: 256495 - DNA, 400 bp, Glycine max
acctgaggcatgcaagcttattgataattagccatacaaagattaatctaatatcacagaagcacttcttgtgctttttgcatttgtcttcttggcatggggcaatgcacaaaatacccttgtgccagcaatcataacatttggtgactcggctgtggatgttgggaacaatgattatctgcctacccttttcaaggctaactaccctccttatggaagggactttatcaaccatcaacccactgggaggttctgcaatgggaaactagctactgatattactggtgaggaaatatcatcaaaattgcaacttacttagcatggatagaaatagtgcacatatattattttcattcttgttgaaataatgtttccttttgcagctgaaacactgggtttt

SEQ ID NO: 256496 - DNA, 444 bp, Glycine max
  unsure (1)..(444): unsure at all n locations
gctgctcctatagttgtcggttaaatagacttttttatgcaggaattatnttatcagtaaataaattgatctttatggattgttagtttaaaaagtttaatattatcaattaataaaaaatgattgtagacatgttttattagataaattcagccaactacataaataaatggtgagttgtatacattattagtagtgtaaatgtacaccatcaaagaatcataatttatgactcttataaataaagatgcctaagttttgcattgtaaaaaaaaaatcacaattcattacattgttaatataattaagataagacttatttgttttaaaaaagacctattgtaaatccataaaattctatcattagattagatgatagtgttacactctaatctaagtgcatgcatgttaatacgttattcttttctaacaaccctccacaca

SEQ ID NO: 256497 - DNA, 454 bp, Glycine max
  unsure (1)..(454): unsure at all n locations
acctgagggatgcaagcttgccacccagctcgcccaggcgagctgggttgtttcctttataagcaacaaccttctggaggaatcttctggagggcccaagtgggcatggttgctatttgcacccccattnttactaagtacacccctacccttttttggtgattcttttttcgcaaagttacggaaacttacgaatttcgtaacgatacttgttttctttccgtaatgttacggaactttgcggattacataatcatcccctttttgacttacggaatgttacggaacctcactaactgtgcaacgatgcttccatttgatttgcggttgtcacggaaccttacggattgacatcaatattttcttttgctttcggcatgtcccggaatttcacaattgcctaatgatgggtgccaagcacctcacaaagaaccaacatacaaggatactggat

SEQ ID NO: 256498 - DNA, 456 bp, Glycine max
aatcactagagaatcatctgtttcaaaacaaacatttttttgtaacgctatcagtttagttgtatgaaagacactagactgaattgagtgaaccttatctctactaacctagcatgtttcattgtattcaagcttattgtgtaaacactcgttaagtgattagaatacattttcaatcaaacatctattttttgtgaaaacctgtagtggcttaatgacaataaatatttgggtcttaatctcagagggagattaagggtagtgtcaggagtggcctatagagtacttgttgtaactacaagtgacataaagaatacctggttataatcaaagaattgattagtggaacccctcaagttctgaaggagaactggatgtatcccaagagttgggatgaactaatgttaaacctcttgggtttcgttactgcttctatataaatagattctttctatt

SEQ ID NO: 256499 - DNA, 224 bp, Glycine max
  unsure (1)..(224): unsure at all n locations
caaaaaaaaaaaaggtttgactgaccgaaccgannnnaggngagngcacaaaaaaaaatcgcttacaaaacaaggagcagagaacggacacacccaaagggaaggaaaaccatgaaaacgagcaccgagagagaaatagagaaagccgaacgaggcaagagtagcaccccaccaggaaaaaaagaaaaagagggaaaacacacaggactcaaaaaaagcaaacc

SEQ ID NO: 256500 - DNA, 252 bp, Glycine max
attaaactcctattattaccgctggagggtaaggctggtaaagcgtgggacattaagaaaaaaaggaattggtctatataaatactcgactatataaccattaatattcttttaagcactgtaaaacagagctcattcattaaaaataattatattctaacctacaattttactattttcgaaatatataaaactttaaaatttcataacacaataacttttaataactaatttacttataccaccttccat

SEQ ID NO: 256501 - DNA, 467 bp, Glycine max
gcacgcaacagctcatacgaaatagtatttctcaagatacaacatggtttttctagagttttcatcataaaactaaccctactttctcaagcattctaatataagaacttaatacaacacttttctaacaccaaatattataaccacaccactaacataattgtaaaacaacaacaacaaagatgttacagatagtataacgaaagagttctaataagtatatttctaatactttgaaatttgggatgttacaactaattgaagtttaaagaaaaataagaaaattcataaaagagttgtaggaaaataaatttaacattataaaatattatacatataaaacaatactcataattttaactgttatgttaattgttccaacattatattttaaatattataattaattatatcttcaaccaactatgtatattgtagaatagtaattaataatctttaaaaaaata

SEQ ID NO: 256502 - DNA, 473 bp, Glycine max
  unsure (1)..(473): unsure at all n locations
agcttatatagatgtngactatgcttgattcttatctganaggagatccactttcggatattgtacctttcaaggaggaaacttggtaacttggagaagtaaaaaacaagatgttgtagcgcgatctattgctgaagctgaattttaggctatggcacaagttatttgtgaattgatttggttaaaattcatcttacaatagttgaagattatatgggagggactcaattgtgataataagtcagcaatcaacatagcccataatcctgtaccacatgattgaacaaaacacattgaagtggatagacactttatcaaggaaaagttggatagtggtttgatttgtattccatctgtgccttcactaggtcaacttgcagatattcataccaaaggattacgcactccanattttgatagaataatatgcaaactgggactggataacatctattcttcagcttgaggggaag

SEQ ID NO: 256503 - DNA, 378 bp, Glycine max
agaagctagagcttaactacacacacccctctcataactaagctcacctccttgagaagcttccttaagaagattccttaagaagctagagcttagctacacatacctctataatagctaagctcacctccttgagatgagaagctagagcttagctacacaccccctataatagctaagctcacccccatgacataaaacatgaaaataacaaaaaaaagtccttattacaaagacaactcaacatgccccgaaatacaaggctaaaaccctatactactagaatggccaaaatacaaggcctagacgaaggaataacctattctaatatttacaaagataagcgggctcatacttagcccatgggctcgaaatcta

SEQ ID NO: 256504 - DNA, 469 bp, Glycine max
  unsure (1)..(469): unsure at all n locations
agcttgcaagaggataggagatgggctctttctaaggcctttatgtcttagatctcaaggacactcttgattgtaaatttacttttcctgtcatcaattcccatccaaattccattccttgtaaaaatgctcatatttggcattctatatttggtcatatctcagacaaagttttcaaacatttgaataataaaattggtttgcacctttctcctaatttctcttcttctaattgttttgtttgtcctcttgctaaatttagaagattatcttttcctaactctaaccatttatctaaattaccatttgactttattcactgtgatatatggggtccctatgctcaccctacctatgagggaaggagatttttccttacattggttgatgatggctcacgattcacttggctatttctgcttaagaacanatctgaagcttcaatctatgtgcaacaatctttcaccat

SEQ ID NO: 256505 - DNA, 478 bp, Glycine max
  unsure (1)..(478): unsure at all n locations
agcttctatagaaggttcgtttctaatttttctacaattgcatcacctttcaatgagctagtgaagaagaatgtggcatttacctgnggtgaaaaacaagagcaagcctttgctttgctcaaagaaaagcttactaaggcacctgttctagctcttcctgacttttctaaaacttttgagctagaatgtgatgcctctgaagtgggagttggagttgttttgttgcaaggtgggcaccctattgcttattttagtgaaaaacttcatggtgccacccttaactaccccacctatgataaagagctttatgccttaataagagcactccgaacttgggaatattaccttgtttncaagggaattgtcattcatagtgatcatcaatcacttaagttcattagagggcaaagcaagttaaacaaaaggcatngcaaatgggtagaatacctagagcaattntcatatgttatcaaataca

SEQ ID NO: 256506 - DNA, 398 bp, Glycine max
  unsure (1)..(398): unsure at all n locations
tctatccaaatggacttaccttgaattaatttctttgatatcccttttgagccttgtttccctttccttggtttgaagctcactacaagccttaagtgaaaaaccatgatatcaccatatccttaaggaattttggagctttggaattgttttgggaataagtgtggggggattgttgtttcattggataaccttgtttgttggctatacttcatgatgtattttgggccatacttgatgtacattgtatattggttaaatgttggacatgttgaatgaaatgttgtttctcaaaggatatagagtaaaaaaaaaacgaaaaaaanaaagcaataaagttgagtgaataagatcttaaatggcaaaagaatgatgagactcttggttctactctttat

SEQ ID NO: 256507 - DNA, 391 bp, Glycine max
  unsure (1)..(391): unsure at all n locations
agcttcatcgacatcattgccaagtccttttattccttgatccctgtgattttcggttcccaagttcttgtaagacagttgaggatcttgatgtttaggtcatcatatttaaacgtttttccaaaactaagcatgtgaatctcgtttgaagttctaaaatggtttcaccattcttcatttgaaaagcttcatatttggatacaagagtgtgctttcttgctcttcttacatccgtagtgccttcatgagtgacttcaagcattttccatatctcctttacactttcgcaccttgcaatatgaaagaattcatcaaaagataaaccacaagtaaaatgcttttagctttttgatcatcttgcactnttcttttctcgncatctttcatctca

SEQ ID NO: 256508 - DNA, 403 bp, Glycine max
  unsure (1)..(403): unsure at all n locations
caagcttgncgcgaataaaagattgttttttanttcattntngctgatngacacccctagcttatttttcctttttctatttgacacccctttntacttgtaacagccccattttttttttccttaacatgctatttttgctgtttgacatcccttttttctgtccgccatgacatccgtcattttccgctacgccatccgccatatttttatggcggattgttgactttccgccatctgccattaacaacattggtcttaaagcatattgttttgttcttattcgatgttaattggtagggagaggtcacatttgctttataatgtcaatagcatgtagtctgatgctattaaccttgaataagaaagaactatgtgaattatttatatcaagtcacttggg

SEQ ID NO: 256509 - DNA, 373 bp, Glycine max
tactacctggaccgtgcactgatatcattatggatcttttctatatagaataattggtagagcatagtgttttggaaagctcgtgatgttgaaatgatttgaagagaattctctaaggagaccttatataatttctgagcttaacaagagattatggcctcaggcaaggtccctctctgcactgaatttattctgagtaaaaacactttgggaagaactgaaaatacatacctattcatgttgttctgtccgtaaatgcacctgcctgcatgaaaatgccaacatttcatacttaatatgcttaaattttgatggttgaatgaaatttcatagtgaactatatctactaggtcactactactgacaaaatttt

SEQ ID NO: 256510 - DNA, 417 bp, Glycine max
  unsure (1)..(417): unsure at all n locations
gcaagcttttccatgaaagtccatgggtgctgtattgaaaacaattaatgactcagaggaagaggggaagaccatctcacatatgcacagtctacaatcacaaanaagaagaagagaggagttcccttttgcaaacaccaaagcttgaggttcctccattggtggtttcttggagaagaaaaaatgagaagagaatgaaggattttctttcttttgaatgaagtttcaaaaatgtgagtgtaaggaggtttatgactctacaaatcccctctttttacaccttggttctaggcatggaaatggggcccgaacccgtgaggctcaccccggacctgcccccgattntgaaggggaaaacctaagttgattgaggtcaggatcgggttcgagtgttcctcgacagccaaagttgggttc

SEQ ID NO: 256511 - DNA, 476 bp, Glycine max
agctggggctcttacctcactcaccgcacttttggtttcatttctagttatcttatacttatcccaagtttcagaatttctacacctagaccactccttgaaacactccttttttactctaactgtgctctgaatatagaatagtcataatcaatattaaatattgaccaacaaaaagtaaatgaaattccccaaaggaatgaaatcaacatggcttactgtcaatgacacttacaccagcccattctccaagggtctttgcacatggaactgtcaacaagctaacattgtgctttacacaaagggccttagccaatttaacatagtcaggctggtcacagtcttttgctataacacagttgcgcagcatgcttctcgatcccttttgcaccttcatgaatgccacgtgcaagaccaccataagccagcgtatttctgagcacgagttgtaatgcagtcatgatatccacaatttc

SEQ ID NO: 256512 - DNA, 350 bp, Glycine max
  unsure (1)..(350): unsure at all n locations
atattgacttatttaactaaatatgtcaaattttaataacatcattatacagaccacgtggaagctttacttgcccttaatttgactcatttaaccaaatgaatcaaagtttgacaccttcatacaaactaagtcgaaactttcaagagcttaactcgacatgccttatatacaccacccgcaatatgtacatagaaataaagttgaatatatacagaattattcaagaacaaatgagnaaacgtacaaaagtttttcatcagtagactaaaagactatgccgtcccagcatcaaacaaaatagttgaacaaactcaacggaacaccgctgatgaacaaacaaattaaat

SEQ ID NO: 256513 - DNA, 477 bp, Glycine max
  unsure (1)..(477): unsure at all n locations
ctaagcttctccgagccaacttgctccanggtcaagtcactgattaatgattctggacttgaccatgtngctgccactagaattggtgatgataggctccgaggcatatctggtggtgagaagcgcanagtctccattggtgttgaagtcattcatgatccaaaagtgctgattcttgatgaaccaacctcanggcttgacagtacttcagctttgcaaataattgacatgcttaaggtcatggctgacacaagagggagaactataatcctcagtatccaccaacccgggttcagaatagtgaagctgttcaattcattgttgctgttggccaatggaagtgttttgcaccatggaactgctgatttgcttggtgtgaatctaaggctgatgggtttggaacttcctcttcatgtcaatgtagttgaatntgccattgagtccattgacaccattcagcagcaacagatatgtgtg

SEQ ID NO: 256514 - DNA, 423 bp, Glycine max
  unsure (1)..(423): unsure at all n locations
taagtcacctgaggcatgcaagcttgtcctcctttcatggnctactaaatatgttctattgttccaccaattcatccttcaatctctccaagtccccctcccgatcattctttggctactaatccagcgcttcaactagaatcgaccccattatgatgcaatacttgcattngtaaactaccagaaaattatggtcttttcgaacctttatctttgacaacaactntagcatttgttcctattccttctttatataaataggaaatggagcataaatattggtaggatgctatagaaactgaacttcttgcactagaggaaaatcagacatgggacattgttccatgtcctccatcggttaaacctcttggtagtaaatttgtatccactataaagctacattcagatggatcaatagatcga

SEQ ID NO: 256515 - DNA, 459 bp, Glycine max
aacatcttcttcgaccctggtgattcttgactccatctcattgaagcacatgtccacttgtaactccaaagtatcaaacctttcaccaacaaaggtttgaagaccatcgaacctgtccaaaatcttttgaagaagagaggaatcttctccaccatgtccttcgtcatcaatgggttgagcacccattttcgcccaagagccatcatgctctttacggtatccaaaggatgcaatcacagcagcacctattataaaggatctcttgattggaacataaggttcagaatcaagagggatgttgaagtgttgaaggaagagggtgactaggtatggatatagcaatgaagcatttaatcgcaatgccttatgcatgcaatatcggactaagtgtgcccaatcaatttgtcagcctttatgaatagcccacataacaataagatcttcttcagaaacctgtgc

SEQ ID NO: 256516 - DNA, 419 bp, Glycine max
  unsure (1)..(419): unsure at all n locations
gctttgatttcctttgttccggaaacctttcttnnctcatgtgcacccaaacccaatctccgggttcgaagacaaccttctttctccctttgttggcttgtttagcataacttttatttttcctctcaatttgatctttgactctctcatgaagcttcttcacatagtccgcctttgcttgaccttctttatgcttaaaaacagaaacattaggcataggcaaaagatcaagaggagttagtggattaaaaccataaacaacttcaaaaggagaacaattagtggtgctatgaacagctctattgtaagcaaattcaacatggggtaaacaagcttcccaagtttttaagttcttcctcaaaactggcctaagcaaagttcccaaagtcctattaacaacttccgtttgccccatcggt

SEQ ID NO: 256517 - DNA, 394 bp, Glycine max
  unsure (1)..(394): unsure at all n locations
tcctgactcaccatataccttgacccantgtgagtatgtcaatccttaccctcggaagcaaaaaaagaatagaggggaaatttccaatcaaagaaaaagagaaggaaaatttccaatgaaagcaaaaaaagaaaagaaggaaaattccccaatcaaagagtgggagaaagcaaaaaaagataagaaggaaaattccccaatcaaagagtgggagaaagcaaaaagaaaagaaaggaaaattcccaatcaaagaatgagagaaagtaaaaaaggaagaagaagaaggaaagaaagctcctgatcagggatcgaaggataaacagaagatatgtgcagagaggtctttggaccggacaatatatgaacaatacagaattgtcaccatatgaacaaa

SEQ ID NO: 256518 - DNA, 393 bp, Glycine max
  unsure (1)..(393): unsure at all n locations
tgagggatgcaagcttcatacaattaatatagaacctatatcttaangtcacatcttatcagagcggtatgttcccgggcgctctagcatgaggttcttcataatcatccacctattcatctgctcccccgaacacaagttcaagatcatcacaggatccaaacacaacaacacacatggagtgagttatcacattcctagttaatagagaaacaagacaattaaatatacatattatataaatgagataccggttgcttaaacatagctcacgtaatttcaccactttgttattcaaaattcactttttaatcatcaatcacattacacaaagaatctcacacttcgatcaagatataataacacatcaattagcacgcatatgcaacaatt

SEQ ID NO: 256519 - DNA, 481 bp, Glycine max
catatgttcgtgagttgcgcgccataacctctgccttgaagtagtggcggcagtattttctgggccacccctttatcatactcactagtcataggagccttaaggaactcatgagtcataatgcacaaatacttgatcaacacaagtacctcaccaaactcatggcgtatgacttctttatacaattccttccggcctctcatatcgtgttactgatgctctctcccgagttttaaaggtggacaagggtatggcgttttggttgtcagttccacacttcaccttcatggacgaccttaaacgcgaactggaaaccaatcaagagttcgggcaccttcgaaaagagttgcaggaacaaccttcttagcacctaaactttgtgtactcgaatggtctcatactgcaaaatggtcgcatatgggcgtcccatgacctacagtttattcacttgtattgatgaattcctctcacacctacgggg

SEQ ID NO: 256520 - DNA, 405 bp, Glycine max
aaagcaaccttaattttttgaacatgaaagccatggaatgaaggttgctaatgttgaacaacagactgatgtataaactgataccactaacatagttgttggaatcaaagatccactgatcaattcttataaaattgaatctgtaattcaataattaatcctttataaaagtttgaattacttgacatgagaagtaaaaatcactttttacatgagtagctaatcgtttaaattaaattagttaactacccataataattagttaaaattcatattttgagaaaattggcatggagaggatcatgttaattttgaataatataagctcttcagaacttatattaaataatgttcaagtaagtttcattccgataacatgaaaattatttctaaatataatggtta

SEQ ID NO: 256521 - DNA, 417 bp, Glycine max
cccctctcataacttagctcacctgcttgagaagcttgcctaagaagattccttaagaagctagaagcttttcttcacatacctctctaatagctaagctcaccttctttggatgagaagcttagagtgagagccataatattgtgagccataagattttgacatagacttctttttaagatggtgctcaacccttattgtccaatctaagttagcatctacattgtccttcctatggaagtatgggagggtaatgttagcctcttgaggctttctctccttttctctcctatgggagtgaggcctaagatgtgacctatgccttccttcggaatagtcacgaaattcttcacttaagctctcgctagagttttgactactataggagacatatttggctctttcgattctttcatt

SEQ ID NO: 256522 - DNA, 392 bp, Glycine max
  unsure (1)..(392): unsure at all n locations
catgcaagcttgctgattacattctctcccttttttattttaattcttcttgacatcatcaaaatctgcatgatttacatgcttgctgnnttggctcaaaatttgttctataattggtggctagtttataccaattttagttctgaaatttcaattgaaaattagtgtgaaaacaagtgccaaaactagaggtttcttgagtcttttcttttttgtttttttttttactttaatctagagccattctaagtttctctttgagtcctagcttgcttttatgttcttttcattgctttaatgtgtgaatcatccttgaaaatttgtctagttaaaactatattaggttagctctcatctcatctttttgggcgccggatatttcttgtctcttt

SEQ ID NO: 256523 - DNA, 399 bp, Glycine max
tatacattccaatccactcaattttacaatttctcattcaaatcaatcacaaaacttcatttcattcaaaatcaaaccactgaatatcatattcaatcagttcactgttcaatcatgcttttgcacaagctactactacaaacaaaataacataaatttaaaactaaaatttaaagactgaaatttaaataactgaaacataaagcataaactaaataaactgataaaaataaactgttcaaaatgcaaaaaagataaagatcctgtcaatcctcatgtgggtgatcctctacatgctcattaagatccaacattggagcagctggtggatcctgtgaaatgggctgctcttgctccaatgctggtgtagatgactagtaatcatcagtaatgggtgct

SEQ ID NO: 256524 - DNA, 420 bp, Glycine max
  unsure (1)..(420): unsure at all n locations
agctataaattataaagggttaaaggtagttnggactccttaaagagacaaaagagaatatataacagaaaaatgatgcaccattgtgtgaaaccgtgtttactgtaatgttgtgtatgatcacacaacctttatttagtaatgactaaatataataatgagtaataatgactaaatcactaattactatctaatcataataacagagtaatatgtaatcttaacactccccctcaagctcgagcatatatgtcttatgaattgagcttgttacaaatgtggtcaacccaatataaactaaaggcagttcgggttgtgtggttgccccggataaacatggctcatcggtagccaacataggcttgcagtgacgatagagattcatgtaacgctcaccggagatgtgtaatgcgtatgtgc

SEQ ID NO: 256525 - DNA, 433 bp, Glycine max
atgcgggaggaccttacgtggagcgggccatcccgctttcccacccctagttagggggataatttatttaaaaaataaaaattaatattataaaatgggtaaaaaaattaggagcataatggtgaaatacataaaattaggagaatcaaaatctacctactaaacatatttatgtgattttttaaaagtgaatgggtgcatttacacccctcattataatgtggatccgccactccatgggagggtgtgtcctatgttgtgtaaaaatagcgtctaatctaatatccatccggtcaaaaagagaattttcatgaaaagatgatgataacaataggcacatgataaactgcatcttatacgtatatataagtggattgtgaatggtaaaaccaatcactcttacaaattaaattgaaaaaatgagtaaatagac

SEQ ID NO: 256526 - DNA, 422 bp, Glycine max
agctttctcccaagtcctaaatgacattttaatctagtattaactcactttaacctccatttaccacagaattcagacttaaccttccaaccctcaaagcctcactctttttccactcataacatcacattctcactttctaaccctaggttagttctacccttcatctctaatagttttccatcagcaatttcagcatataaacatcacaaacatcatcacaaaaaccataaaacagaatgggtatgtttaactcatccaaacatggcaatttcaacaagctttcaacaagagtcttcacaaataaccatcatgaagcagaaaactaacaaaactacccatcatatctcccaaaaccccatacccacgaaaatcaaaggagaaagaagccacccaaacctaaattttcgaagtcccactcg

SEQ ID NO: 256527 - DNA, 409 bp, Glycine max
  unsure (1)..(409): unsure at all n locations
gtagctagccagcagtggttttgtttctcaacctctatgatttacttctccttaattntgtcagtctactccatatgcaagagaatcatgcctttattgtaattaaagtttccaacactctaagttaattgaagtcttattaataggttttcatattgatcttatatcccatacccttaataattcatcacagttgatatattatggactttagaatgtcatattgggagcaaggtcttgaccgcaaatcctaattaataactagataatttagaagttgtggatcaacgagtacatcaataaaagaaaatcatatccaacagtatgtttctacctacctacttttcttgtagagaaaccaaatcttagtgctatattataaaacaatagtcgtgcgctaacaaaactc

SEQ ID NO: 256528 - DNA, 464 bp, Glycine max
  unsure (1)..(464): unsure at all n locations
agctnggagntnngagnncatgtgctngctccttgtaagnngcaactttaggccattgtgtgctcatagctctcagtatggaggagtttctttgtcttgctctagtcttttgcttgtttcatggagtttactccatatatatgctgtgtgaagccttgtgtagtgccttttcccattgatctaactctctagctttagttntgctcatttttacgtacgtgtggggctggtactgctcttgtgtttatttattttctttcgcgactttttttggaataatgagataatttcctagtgtcatcatatctctggaataactgaaaaaaatttcatttttttctgaaatcatctactatgtttaattcatttaatttcttgctcttctgaatcaggccaggagaaaaaatggctcgaaaaatatatggantttttatttgatgcctcagaatcttatattagtgatt

SEQ ID NO: 256529 - DNA, 435 bp, Glycine max
gccttgatctaactttgctgccaaactctgattcggagttttatatttatgacgcattgtaatcgattacatgtattggtaatcgattaccggcccaataaaccttctgcgaatagattacatgatgttgtgatcgattacacgctggctgttcatgtgtaatcaatcacactgaatggttatctattaccagatcccatcctacgctatttcttaagagaatacatatatttatgctcaaatacatactatatgactaattttcactactgatacactgtattcaaccattcaattactatatacacaacaaatcactaactctatcgtgataacaagagttgcaactggatcatacacattgatctactactcaaaggcaaaaagggaatcaaccacttgtttgaccttgcggactcaataatcttaagaggg

SEQ ID NO: 256530 - DNA, 426 bp, Glycine max
  unsure (1)..(426): unsure at all n locations
ccggatccttaagtcaccgcagctgcagctggacacatcttgcatatcatagtacttgccaatnntacttggagttgcaatacagtgatgctcgccacaaacgtaatgaatgaccgatacttcaaaacatcatcctttacccattcaaaaccagcaacgacaggggggactatggcgacccaatactatggctacatcgcacaagggaggacgccctaatgtcttcacaaccacttatccttgctcccctagaaacaaaaggggggagaatcatagtgaccaggacagatttctcgactagggaagcaacggaaggttacgccttcctgtggaggccagaagtgcctccaccagcatggcacataaccctcaacctttctgaggaagaggatccactgttagaagccccatgatgattgccctcta

SEQ ID NO: 256531 - DNA, 407 bp, Glycine max
  unsure (1)..(407): unsure at all n locations
acatactatatgaaatattatcattaaagtgattgttccgttaataaagagaaacttgcactattataaaaagcgtcgtagactgattntatgacgattctacaaaaatcaatgtcgtaagtaaagaggtgatatttttttaaataattgaataaaatcatctgtaaaaatacattatgacatcattttcttcaagaactgatgtagaatgcgagaatacaatgtcggttttagaaaaccgtcttcgaaaggaatactagagtacaatgtcatgggctctctctcactcatccttattttcaccttctttttcatctctctctccctcctccccaaccttacctctacattcgtgacctcagcatctgcaacttcaaggtctctacctcattcttattcgtcaccgt

SEQ ID NO: 256532 - DNA, 383 bp, Glycine max
ctattcaagtttagtgacactaaactatggatgagtacatcctaccactcacaaacggacgggtagaccgaagttcttaatcgcattctggaacaataccttcgttcctatgtccacgatcgtccttcccaatggttctgtttcctgtccatggtggaattgtcttagaatacatctatacactcaagcactgtggttactcccttcgaggtcacttacgacaaggctcccctttcgatcctacaatattggtgtggatcatctctagaagaggtcgttgatgacttactttcacacgtgctgacatctcccgacgtacaatgttactcctcaggccctaatgctatgtaagttgtgtgataccacaacgtgaatcactttac

SEQ ID NO: 256533 - DNA, 454 bp, Glycine max
  unsure (1)..(454): unsure at all n locations
tctaaactgtatacatgaatgaagctttgataccacttgttatacaagtggcctcagatatcttaagaatggggggttgaattaagatattccaaactatttcccctaattaaaaatctatttcactttttactcaagttatgaattcccttaatgacaatcttcttaaataaatgaaacaatttgaatatgaatataaagcaataataaataaaggagattaagggaagagaaaatgcaaactcagttttatactggttcggtcacacccttgtgcctacgtccaatccccaagcaacccgcttgagagttccactatcttgtaaattccttttacaagttctaaacacacaaggacaatccttcctttgtgattagaattcctttacaacnagagactcacagtctcttaatcccttagagaatgagaagaagaagaagaacaaatctctct

SEQ ID NO: 256534 - DNA, 500 bp, Glycine max
  unsure (1)..(500): unsure at all n locations
cttaatcacctgcggcatgcagcttggtgcttacagaataaatctcttactgattcagttataccagntncaagtggcatagggtttttatgtgtcatatatagtatgtacttgtaaatcaatttctactgcttaattgtggctagtcaaattaatataacattgtacgtaatgcacatgaaggtagcaattgggaaaaaaaccttattcttgatttccattctctaattaaggagtctaagaattgaagctcggctcaacttatccgtgcaagtaactgaacccaaagtgcaaagaagcataatgaataaaagtcaacctaaggcttattttctctactaacctatagacatgaaatttcaaactcaactatagaggacagatgcttggtatttccatcataattaccaatggtaaccatgtgtgtaggaggcagttaattctaaaccacaggaataaattcgacaaggtcgttcattttttccctctctggcttttct

SEQ ID NO: 256535 - DNA, 453 bp, Glycine max
acagcactttccttgttcattcaaaacaattgacttaaaacaattcttaacaagcaataccctctataccacaccgaacactgagatttaaataaaactacgaaatgacgaaggaagaaaagaaaaaacaacgcataaaatcgaaactaacagcaacagaacagtaaatacgattcataacaagcaaaacacaagggattcaaacaaaactacaaaacaataaagaaagaaaagaaaacacaacgcataaaatcgaaataacagcaacagaacactaaacacgatttcaaaacaagcagaacaaaaggattaataatgaaaccacgaaacgataaagaacgattagaataaacaacacataatatcatatcatcagctacagaacactgataacgattcgaaacaagcataaacgcaaggattcagctaaaactacgaaacgacgaagaaatg

SEQ ID NO: 256536 - DNA, 462 bp, Glycine max
acctgagggctgcaaggctggcatgctaattaaatacatgaattatttttttctacctagagcctagaggggactcaactcaacaagtgcatatacaataatgtaacaaccacaagacatgcatgatagtcacaaaaatcacttgggctatgtttgatctttgttttggaaatgttttttttttgtaccccatatgttaatatacacgagcaaaaatataaaatacaatatgtatttgacgtaacaaagaataaaaaagatagagatataataaatgatgtctacaacaaagtgcttaaaatattgaagtgtttaaatatcattattctttctatttaggatgctttaaattcagtttggagaacatatttgttcatgacatgataattaactcaaacaatgcgttatacttaaattgttatgaaactaatttgtaaaaaagaatgagtattttacaactta

SEQ ID NO: 256537 - DNA, 412 bp, Glycine max
  unsure (1)..(412): unsure at all n locations
actaagcttgatattgatattgaagaattgaccagcttttttttttcttatcnagaccgccatacgggacttattcatgttggtaatcataagtatattatataatcaatgactattctcacgtgactgataatgtgacataagatgaagataaacattctatttatgtgtaaggtaaaagacaagataaccttctatttcctaacttttttagtttatttaaatcgtagaatcacactcaattagctcatctcccaggtataatatataaatgtaaagtattccatatgatgataaattgataataaagcgaattttttatcaatcaaaattacaatcaattatatctgaaataactgtataacaattagaatcatgataacaaaatatttattatataaagaaaaaaatg

SEQ ID NO: 256538 - DNA, 199 bp, Glycine max
ttcttaatttttttataaaataaatttaccgggacttggccacttttatattaaaaaatatgtccttcctttaaatcttccaaactggcttaccaccatatggaccactttcaagttttttttctcaatatcccgaaactgttgaactctccactgaccacccactctagctttaattaaccctacctccccactactg

SEQ ID NO: 256539 - DNA, 389 bp, Glycine max
atcctggtttatgggtaatggtggctttagaaaatttccattggatgtaatgatgaaatctatgcattttcaagggaaaaagaggctaagttttgaattgcaaaacgtaacagttgggctaagcgcatatccaccactaagcgcagcttcaatgcgtttagcgccaaagagaatctggcagagcatcaacatcaaagccgcacgctaagcgcagcaagtgccttcagctatgctaagctcgagactagcgctaagcccaatttcacttactcacgctaagcgcgagggtggcactaagcgcagcgtcgcaatttcagagcctatttaaagcctatcttgtgcagaattatggtacaacttttattacactgttatgaaagcttctacag

SEQ ID NO: 256540 - DNA, 475 bp, Glycine max
  unsure (1)..(475): unsure at all n locations
gatccttgagtcacctgcggcatgcaagcttctcagaatcagaaacagccacaactactctctctgcttctccttcgggttccgcatcagcatagatctcaccctcctccaactccccttcctctttgtccacatccaccaccaccacatccttaggattcacagcaacagaggccagtcgatgggagctgttgcggttactgttagcattggcatcagagtccacttccatcacaaaaatatcattcaaaggcttattctgcacggcctgtgcccaagcaagattatacaagcccgatgcatagccgcgacatatagtagggtactttgagtaaagatcatgaacagcccaaaccctagcatcacttccattgggcttaatggtattatttaacaacttaacatcttgcttattgaaatccctcgctgaaatctcttccaccgaanngcagtatcgaatctcaccctcttcaca

SEQ ID NO: 256541 - DNA, 447 bp, Glycine max
  unsure (1)..(447): unsure at all n locations
acggaccttaaaactcagctcgaggattatggngtacccatcacatgtggtactaggtggcggtcgggcgatggtgcacaacatgtttttccacatccacaatgcgcgcataaacccaccatcccctgtagcccacctccaactgagctcacgtactcccacgtagcccatatcctcgtttctctcaacaccgggtccccatcaatcctgccaagcttgcccaacatcaaagtaatacaacattcaaacagcacaaactatcacagccaagataacagagcaaaggcagaaaactctgccaaaacaccaaccaaaatcacagcttttctcacttaaagaccccagtaacaattccttcgttccaattcgttaaccggtggatcgactccaaatttttactggaagtctctagtacataagcctacattttgaccggtgggatatact

SEQ ID NO: 256542 - DNA, 449 bp, Glycine max
  unsure (1)..(449): unsure at all n locations
agctntctctactaagttgcctgatgccttaaatgtcttttctgatggcagtggtcctagatgcagggaagaatttctccaacaacaccctcttaaggtcatcccagctgaaaatagacctgggagcaaggtagtatagccaatcttttgccactccctctagagaatgaggaaaagcctttaaaaagatatgatcttcctggacatcagggggcttcatggtgaaacaaacaatatggaactccttaagatgcttatgaggatcttcacctacaagaccatgaaacttgggcagcaaatgtattagtacagtcttgagaacatatggaacaccctcatcaggatattgaatgcacaagctttcataagtgaaatcaggtgcagccatctccctaagagtcctctcacgaggtggatgttgagccatgttctcagtatgaaaaatagta

SEQ ID NO: 256543 - DNA, 465 bp, Glycine max
  unsure (1)..(465): unsure at all n locations
tcatgatgatgaatcaagttggttcaagtagttttgatgatgacaaagatgatgacaaaaagcccaaagaatgatttcaagattgagtcaacaagttcaagatcaagataaaattcaagtttcatgagaagaaatcaagaagattcatgaatcaagagaagtttgatttcaagactcaagagaagattaattcaagatttaagagaagaaatcaagaagacttcacaagggaagtattgaaaagacttttcaaaaagcaaacatagcacagttttgtttttcaaaagagtttttctcaaaattttctaagttaccagagtttttactctctgataatcgattaccaatttcctgtaatcgattaccagtagcaaagtttgatttcaaaagcttttaactgaatntgcaatgttccaatggatttcaaaatggtgtaatcgattatatgatattggtaatcgatta

SEQ ID NO: 256544 - DNA, 450 bp, Glycine max
  unsure (1)..(450): unsure at all n locations
agcttctcaaggaagctacctattctaattatataagcangngnaacactcggcggaactntgatgaatgaaagtcttatgagatacacttcaaagtttcacttctctccctcttttattccttcaatttcgtgctcctcccttctctctttcttttcctccattaaagcatcctcttcaagcttcttatccaaggcaattcttggtggtgaagctccttcttccttggcttattccctagtggatggtgcctcccctctcctcttctcctttgccttccgctgcatctccatggtgaaaaatcaccattgaaggacctcattgaagctcaaagatccatcctccatagaagctccacaagcaagcttccatcagaatggctcaaaactgtgggcccaatcactactgattacttggcccttactatgaccttcagttggcaggatggac

SEQ ID NO: 256545 - DNA, 452 bp, Glycine max
tgtaatcgattacatcatttgtgtaattaccattctcttttttttcaaatttcaagtctaaagagtcacaactcttcaaaaacaaactgtgttatcgattaccacattcatgttatctactaccagtaaggaatcttcgaaaataactcccaatagtcacaactgtttaaaaagtttttgaatggccatcaaaggcatataaataggtgacttgcgatatgaaattccttatagtttttctgaacaacattgtcttatcctctcaaaaccaaattgtcttatgactctcataatattccttggccaaaacacttgcaaattcaataaggaatcttgatcaatcttcaattgtaatatccttctcttaaagagagaatatccttcttcttcttattcaaagagatctgtttaagagaccgagagtctcttaagttgtaaggatatctgaacac

SEQ ID NO: 256546 - DNA, 447 bp, Glycine max
  unsure (1)..(447): unsure at all n locations
tgcaagcttcgggagccagnntttgttgaattatatactaaattgcaaaaatttacaagttgtgctattttaaattaaaattctcataggaatatggagcattgggaaattgaaagccacataattctttgaaatatttgtgcattgttcaattcttaattaaataaaacaagaaaagtgaatttggtttcaaagttagcaaaccagcaacaaacaatgattaaagataaagcaagctacaaagaacatcataagaattcggtttgaagtgtctaatgtttcatctgatgtaaatatgttggcatggtctggacacatatggtgttcaaattcatgtctttacttcaattaaatccttcatctgcctcttccaaaaaaaaggagatttcatacaatatctcacgatacaccaaatctacatgtgacatagaggagtgtaacaacaca

SEQ ID NO: 256547 - DNA, 443 bp, Glycine max
gcctattaacctgaaattgagagaaaatgtattattttctctcaaaatggaagtactaagtatttattatctatacttaacaaataaatacttataacactacaaaataaccataaattggaagagtttgatacaatttacataagttttatacacaaaagttattcatatttaccgaaggatcttctttacattcttattagcagcctcaactgccccattcatcttgggccgataagacgtggaattatggtgttggattttgaaatcctcacacatttccttcatcatattgatgtttaaattggtggcattatcagtgatgatctttgtgggcaaaccatatctgcaaattatttacttcttaatgaacctaatcaccacattccatgtcacactagcatatgaagctggttccacccatttgttgaagtaatcaatgg

SEQ ID NO: 256548 - DNA, 475 bp, Glycine max
  unsure (1)..(475): unsure at all n locations
agcttgatgtttcgaggccttggaacatttgtcttttgctcctttttttatcaagccattntgggcctagtgcttgttccctcatcaagtctataattttagccattagaatacagtggattagggtaatgctgaacttgtattatttttcacgccactcttgaccttaagcttgttaacaatgctttgagtatatgttgataatgataagttaaagagatggcggaaattacacttttgaagtgtgataaagataaaagtagtatttttaagaactagaaagtccaactaaataagttgcaactacttttataagtgctatactttgcaagttccgaaaacctctggtgtcttgacctaattggcatattgagttttcatgttcagagggaattctgttgtagttgctaggaatgcatttgctggaaacaaaatgatgtaataatacagagcagccacaaatgtaaatttatat

SEQ ID NO: 256549 - DNA, 472 bp, Glycine max
  unsure (1)..(472): unsure at all n locations
cctcgccatgttgaacacactttttataccgacatttgtctgttatttcttattaggtgtttaaaataataaaaattatttttattggcttaaacacttaagttatcatgtttatataattgatacacttgaaaaaacataggaagatggttttaaaagatgaatgtatcatcattttaaatattttgttatgttatacatttcatttcatgagagtctttatgtttgtgtgtatatatgatgttcccgtgtcctaaattttagagattagtcatgttaaagttcttgcttcatagataaactatcaataagatgtttactagccctttaagtagaaacatgtggaaaatttttgtaatatttgaactcagaagtcagaataatgttactcaacattgctatgagattttatgcaaatttctcanaaagaatatcgattgtatagaaaggtgatggtgatagggacataaaa

SEQ ID NO: 256550 - DNA, 430 bp, Glycine max
  unsure (1)..(430): unsure at all n locations
agcttnttggagtagatacatggtaccatctcattttatttcaaaaaggaagtcgtatctagtcaaggtctgagagaccatacaagtttcctaacgatttctaattatgtgggccattaagtctatcatatgctgacaatagccgagaagcccatgaatctcttcgggggcggagtaggtgtctgccatcgccttggccttggctaacaatcggggaagttcttgactcccgttcaaggtaagagcaaaccgatccatccacatggttgcctcttggtgtaaagagtcgatcacccttcctctagcctctttttccgcgtatacttgggcatactcatctgcgattctatgctcgtgggccgtggctagacctaactcttcttggtacttggcgatgatagctagcatggtggtctccgtctcgcataaa

SEQ ID NO: 256551 - DNA, 428 bp, Glycine max
tatgcataattggagagttataaatagaaaaaggtccattttccaaagagtttgagagaatttgttgtgtgaagatctgcaaagaccagagctggaagaggaagtcgtcctaagagcttgagatgagtttgtgagcgattgtgaggtcctagaggtggaggagatatccacactacttgtatttctacaatctttcattctcttctctttgttgtaaaggaagcttcccagttatggaaacctaaatcctctgttagatcttccttgtaggtacttgatgtaaatatctttttatctatctaatgatgttttgtgtgttcactgtgctatcagaacttcattctaccatgcctttgccttgatcacgtagatgcatgtgtttttatgatcattcaacagtggaaactgatctgattcttataacttga

SEQ ID NO: 256552 - DNA, 456 bp, Glycine max
  unsure (1)..(456): unsure at all n locations
agctntcccaagttttaagttcttcctcttaactgncctaagcaaagttcccaaagtcctattaacaacttccgtttgcccatcggtttgtgggtgacaagtggttgaaaataacaatttagtgcccaacttgctccacaaagtcctccaaaaatggcttaggaacttaaagtccctatcactaacaatgctccttggcaaaccatggagtctcacaatctccttgaaaaacaaatcagccacatgggaagcatcatcaacttttttacatggaataaaatgagccattttagaaaacctatcaacaaccacaaaaatggaatctctaccattgcttgtttttggcagccccaaaacaaaatccatggataaatcaatccaaggatactccggaattggcaatggagtatacaaccatgaggcttaccttagacttgcttttacatacaatgaatg

SEQ ID NO: 256553 - DNA, 451 bp, Glycine max
  unsure (1)..(451): unsure at all n locations
ntcttgcaatactgataatgtatgttgcattcatcattttctcctgatcagcataattcataaaccaactatgaagcgtttcttaacacanatcttctcctggtctgccaaaagtggatgttttgtgtgcatatcaaactacaccattatgcaagtgaagaacataattttgttgctcacttcttgtggcataatgagataacttcagctntagagaatttcatgataatttataataaaatcatataacatatataaggacataataaatacaactgcaatcaaagcagcagatggattattgaatctgccagttgtcagaggttattgattataaatgacacaaaacagttttcttacaaaccgcaaccaaaataggacaggaataatgcaaaactatggcttatttaataatctaattagaatagaaaaatccaatgcaatataagta

SEQ ID NO: 256554 - DNA, 345 bp, Glycine max
  unsure (1)..(345): unsure at all n locations
aagatcaccaataacaaaataacaattcatctaaaaatattcctccaaaataaccatttgacccaatctaatatttctcaactttgatgttctttttaagaatcttctgtggagttgaatacccttccataggacaaatcctattcaacacttgtgtgttgggagaatctgcacataaatccacgaggttcgcttcagtcttttcgtctatggagtcaacaattgattcatcaaattttccaattagatcatgttaacataacaggacacgtgtgttcattgtgtatcgtacatttatatantagaaatgtattaatttataatttgtataatataactacctga

SEQ ID NO: 256555 - DNA, 449 bp, Glycine max
atcggtgagagtgtgatcttaaactgtgagtgaatgattatttgtgagtaataatctttgcatcaatcggtgaggacatgatgaaggccatgattgtgcatatacaatccttttgaccaaaaagcttaccttgaatgataattgtatcctttgcaccctttatgagctaaatgatattgtcaaaaatttgaaacctgaacttaaataattatctccagataccttgcttagattctaggaaagcatatggttcaaggcaaatttaccccaaatttgggggagtggagttgattgggatacagagtaaaaggtaaagcatcagcacacacaacaaatttgtatgttaaaaaaaaaagcaatcaaataaaatatatgttgttataataaggtcaagaagcaaataaaagtgagcaagctaattgtattgaaaagatcacttggataagtct

SEQ ID NO: 256556 - DNA, 428 bp, Glycine max
  unsure (1)..(428): unsure at all n locations
attaccagagagtaaaatctctttggtaaaaaagtcttgagaaaaattcatgtgctactcaattnttggaaaaactttttaatacttatcttgattaagtcttctcttgattcttgaatcttgagtcttgaatcttgatcttgattcttgaaacttgtttcttgagatcatatcatgaagtgttcttgacctttgagctttttgtcatcacctttgttatcatcaatacttctttgaatcaatcttgattcatcatgaagcttgctttacaatctcccccttctttatgatgacaacttctgaaatcaagaaacacacatacacactttttcctagtcgatcactcacatacgatttcattctctcccttgntgttgatttatgcttctctttaaataaggtgatactcatgtgagctcttgattaat

SEQ ID NO: 256557 - DNA, 463 bp, Glycine max
ctaagcgttcttacgaaaacttcctgagaagcttccttgagaaaacttccttgtttttcaagagtttagctacacacacccatctgataactaagctcacctccttgagaagcttccttgagaagctagagcttagctacacacccctataatagctaagctcacccgcatgacacaaaaacatgaaaatacaaaaaaaatcctactacaaagactactcataatgccctgaaatacaaggctaaaaccctatactactagaatgacaaatatacatggcccataagaagaaaacaacctattctactatttacaaagaagagtggacccaaccttggcccatgggctcaaaaatctaccctaaggttcatgagaaccctaaggccttctttatcaactctagcccaatcctcttggagcctcttgctcatggctctggaactggtcctttctatggaggatt

SEQ ID NO: 256558 - DNA, 452 bp, Glycine max
tagcttgagaaatatcaaacgacaataagtttaactctgatgtcctattaagccctgtaatatatcgagacgctcgaagttgaaaacggaagctctaataaaagtccaacaacaataacttttaactcgaatgtccgattgagtcccgtaatatatcgaaacgctcgtaatttataacagaagctctgagcaaattcaaacgacaaaaacttttaactcggatgtccgattgagccctataatacattgagacgctcgaaattgaaaacggaagctctaaaaaaagtcaaacgacaataacttttgactcggatgtccgattgtgtcccgtaggatattaagacgtaaacataagctctgattaatttaacgacataactcttaatcgatgccgattggcccgtggatttagacctcgaatgaaactatgttgaaaaataaacacaatattt

SEQ ID NO: 256559 - DNA, 452 bp, Glycine max
  unsure (1)..(452): unsure at all n locations
tcatttcgagcgtcttgatatattacaaggcttgtntcttacatccgagttaaaagttcttgtcggggacttttcttagagcttccgttttcaattacgagcgtgttgatatcctacaggacacaatcggacatgcgaggcaatagttattgtcatttgacttttcttaaagcttccgttatccatttcgagcgtcttgatatattacagggcttgatcagacatccgagttaaaagttcttgtcggttgacttttcttagaactttccgtttcaattacgagcgtctcgatatcctacaggacacaatcggacatccgagtcaaaagttattgtcgtttgacttgctcagagcttaagttttaattacgagcgtgtcgatatatacaggactcttaggacatccgagttataagtattgtcattgaatttgttagagcttcagtctcatta

SEQ ID NO: 256560 - DNA, 458 bp, Glycine max
  unsure (1)..(458): unsure at all n locations
gatccttaagncacctgcggcatgcaagcttgtagcaccacttcaccctacctttttctttgttatcggcaacaacatccaccatggtacccgttttcctcttaacgtacttagtgtaggtaacagagtaccgtaaacaatcctcaagaaagttcttaaggactctgcgagccaaacagcgaatcccgagtttcataatgttctacatgttgtcgcacaacaccaccttgtgccccttggctcctcccttgcctccctcccacaaccaccgtatccgccgccgtcacctccaccaccaccaccgaagccaccgcctccaccacgaccacggtcggtgcaggtttacgcttcgtggatagtgatgttcgaccatcaaggtcttggccgtgcaaactgctattcacaactctcgctccctctttttgcttcttcttatgaccatgaaacaatagtatctc

SEQ ID NO: 256561 - DNA, 487 bp, Glycine max
ctaagctcggctcgcgcactgagcgagactacgcgctaagcccatgttgctctctgagcctgaccttgcccactgagcgagagtgcgtgctgagcttgaccttgcccgttgagcgagttgtccaattcttcaatttttcttcaaggctttttcttctactttttgccttaatttcctttcaaagcacttgaattcttcttttcttgactcttgctgttcaaaataaccaagatgttaatttctcattatttcctagtaataaagtaaagaaattacacctatttattagccaaaattgactatcaaattaactcatatttcgcagatatcacatagttacacatataggatgattcatatttaactattagactcgtatgcatgtggtaccatttcgaaaatactttgtaaatgtagcttgaaagtccatatagtcaacgaattgtctcataatgagcaatctgacactatcactctcaccgagatg

SEQ ID NO: 256562 - DNA, 396 bp, Glycine max
ggaaagagcacacaagatgcaatggtgattttatattttgtttagaagacttgaggagaagaaaagaacatgagatagttgtatgtttagacaactcgtacaattttcaaatgtttgaaaactccctccaacagccataaacaactaacttccaagcttatttaatgagatcaatttgaacgagcttgttgcaaggaaggagtgccacaaagagatggtttggtcataaaagttgagtagctcaaaaagatacctcatatatataaaaaaaacttcttagtcaaaacactctatggtagagctaaaccttgtcgatccaaaaacaagtgtaaacacgttcatcagaggagtcacaatgaagaacgcttgcaacaatgtgtattctatccgtatccc

SEQ ID NO: 256563 - DNA, 458 bp, Glycine max
  unsure (1)..(458): unsure at all n locations
agctntaataaagagcaattctttatctctcattcttgaaaagaaattcttaggggtgactttattttcattacgactttccttctccattggtttatttgtttcaggtggaggcaaagctggcataggtgctgtctttaatggagataaataagcagagttccccttttctccattcactaattcaacttcagaagctgaatgccctctgagaggcttagttgtggcaggttcaaaattggcttgaacatgactgttagatctatttaaattttcaaatctttggactaaagtttctgcggcaggctcttcatcaaattcgtcttcagagtccctagagtgttcccttccatgagatgaagcactctcttcgtcgtcttccaactcaagaattccctctcctcccttagtctttgtatgtcatcagcatccctatatttgatcatacccttccatct

SEQ ID NO: 256564 - DNA, 426 bp, Glycine max
tgaagagctcagtcattggacaatcaaaaggtgtatgtttgttttagactctagagcacgagtcaactcagaccaagtagacactagagataatgtttgtgacatctgaaaccatgctactgcatccttatcaaaatgcatcgcaacaatgtcaactctagacgcatcaggagtattatgataagtgaaacatttctttgccttgaagatccactccatcaccggcgtcgttccattgaaatgaggaaatccaagtaagatctccttaacaggcatggaagcattaatcggtggcaccaacggtgagccattgttcgaaggacttctaatatgttgagaagcattctgcaataacagattcattgctaactacatctgatccatagaagtctggatctaaagcatcttatcattgtgctcttgata

SEQ ID NO: 256565 - DNA, 207 bp, Glycine max
tcactgcaaagcaccattctttgagcccacctcccgctcttattttgcgggcaaaacacaatagtacttgatatgacctggaaaaatgataataattctttcctcctcgatgcctttttcttgtttaatcctccaacccatgttcaagcctattcgaccgccggaggggaaattacttgaggaggctctctgtcttatgggaggaaa

SEQ ID NO: 256566 - DNA, 455 bp, Glycine max
  unsure (1)..(455): unsure at all n locations
caacatggtgcattgttgaacatagacacggttagaatctttttcgctatatcatatatagagantattggtcaacaaattatcaatgaacttattcttcatgaatgtttaaattgtcctattatttatgtttatatcaagtactttaagttaacaaagttttgcaattggtattcaattaaacattgatattattggtaacatgttcttatcttcattgaaggtattcgcattatcagttggtccttgcaagagaaaatacaaagagaatttcattcttatgcccacataatacaactccaacgaacacgatggcaatgaagctattgaattaatccacgagacatgttagtctattggaaccttacaatacagggtgaataatgttttaataatttattgatttaatgaaattcaaaaatatatgtgactaaattgctaaccacaagtttttt

SEQ ID NO: 256567 - DNA, 418 bp, Glycine max
  unsure (1)..(418): unsure at all n locations
agcttttactaaagggcattgtagctcnctttgggagggatccagtggagccctgcaagcggagattgagtttgacaaacatcgtttccgaagtgaggagcattatcgccatttcaaagcaatcaaggattggtctttcctaaaagaaagacgggtccagctaagagaaagagagtacactgaattccacgcagaggttgccaggaggcaatggacctagttgatagagcccatggctaagtacggccctgagatagtcatggagttatatgcaaatgcctggcccaccgaagaaggagtcatggataagcgctcctgggtgcggngccaatggatcccttatgatgaagatgctatcaaccagttcctggggcatccattggtcctagaggaggggcagcattatgagtacaccgag

SEQ ID NO: 256568 - DNA, 447 bp, Glycine max
  unsure (1)..(447): unsure at all n locations
tcctaatttctctactattgcttctcctctcaacgagctggagaagaagaaggtggcatttacctgaggtgaaaaacaagagcaagcctttgctttgctcaaagaaaagcttactaatgcacctgttctatctcttcctgacttttctaaaacttttgagctanaatgtgatgcctctggagtgggagttggagctgtattgttacaaggtgggcaccctattgcttattctagtgaaaaacttcatagtgccaccctcaactaccccacctatgataaagagctttatgccttaataagagccctccaaacttgggaacattaccttgtttccaaagaatttgtcattcataatgatcatcaatcacttacgtacattagagggcaaagcaagttatacaagaggcatgcaatatgggtagagtacctatagcaatttccatatgg

SEQ ID NO: 256569 - DNA, 487 bp, Glycine max
  unsure (1)..(487): unsure at all n locations
ggatccttaagtcacctgcggcatgcaagcttgaatcgataaaccttatgagtcatttctctgctagcttaaaataacttgtgtaatcgattactataaggatgtaatcaattaaaacagagagttttaacttcaggagaaattttctaactttagaaactttctccttactcctacaagatgatgcatgatgcacatatgaaatgatagagactaagatgcaatacacaatacaacaatcaatacaaatgccactcaagagagttggacatgtaaaagaaaaaacttcttcaagatcttctccaagcttcaaggctaagtcttcatgttgctccccctatctctaacatccgatggattctggccgccggaaatacactttntttgtagtgagtgtagtgtcaggagtggtccagaaagtacttngtgtagctagaaatggcatatagaatacttgattgtaatcaaagaaattattagtggaacc

SEQ ID NO: 256570 - DNA, 431 bp, Glycine max
  unsure (1)..(431): unsure at all n locations
ctgatntgttgttcgtcctaatccttattgggaggagtctcttaatgatctcacgttccaaggtattgatctcattaatgaaaccatctttaattgtctatttaaacttacattgtagtgtcttaatacaagggaacaagatacatgtagttatgaaaagggaacacttggatggttgggcgtcctacttgaaggaagaatcacctatttgatgaacaacttaaaggtagttgtcagtacgagccaatataaagtttatgatcacacctacaagctatggtccattggtggtacccttatcatatagcaacctattcaaaatgtccccatgaatatcagaaggatatgttaattggtatggtttcatcaattgcaagcaagtcaattatatgtgttntcactttatgatgtctatgctaatgattaattga

SEQ ID NO: 256571 - DNA, 467 bp, Glycine max
  unsure (1)..(467): unsure at all n locations
agctagatttcaggttatttatcttcaattcatatatttgaaagacatgattaatgtttttaaaattgtgtagctacataagaaaatgcatgtagtggtttaatgttggctggaatttaaagcaacaacatcaaaaaaataggagtaataaaaataagaatgttaagatagatgtgtgattatttaaaaaaagaaaaaaaaaacaaaatgattatatatgagaaaatattggtgtagcacattgagaaataaaaataatagagaattgattaagatgtttggacatgtataaagaagatcacaagagacgatagttagaagagtaaattacatgattnttagtcttgtgaaaaggaattgagggagttaggaaaggatgtaggagaactcatcgaaagagatctcaaattaaataattaatatatctaanattttgattngtaaaatatatataaaaaagaagtttc

SEQ ID NO: 256572 - DNA, 459 bp, Glycine max
  unsure (1)..(459): unsure at all n locations
tctccgaagggcatggtcatttccaatttcctgaatatatcttagaatctcgccttatggcgatccttctccttcttggaaggtaccacaggatatggcacttctgaaccttcattcacagctttttctcttttcttctctctagcttgtttacttctactcctctcttcattcttatttttttcatctttttctttttctttttcttggtcatttaattcttttttcttgaccattatttgtttttctttttcctgattgttttcacctctcacatcatctttgtttttatcagtacctttcttttcaatagctatcttcttggatacaaaactatcctcatcctctacctccataaacctcttactccttctcatcacaactttgcattcctacttgngaatttttctgtatttgccacaaactattggatgaccttgtaactatcttcttggacag

SEQ ID NO: 256573 - DNA, 426 bp, Glycine max
  unsure (1)..(426): unsure at all n locations
aaggtggtgtttggtaatggatgtgcggctggcgggccttgtggctgatttatgggtggcctttgtggttgattaggtattcttagctgatagggtgatgagtaatgagaagcgttgatattggcttaataatgacattgttgagctggtggggaatttggccacgtatgaacgacaatcacaacatgggttcctccctccttcttatcttttctaatagccacaggcttcccattcatcgaagcaggatgatcaaatgttcctcttttcaaacccacttcaatcctttcgccggcgaaaactaaatctgcaaagcctgaaggtgtgtaacccaccattttctcatataaaacaacggaacgngttactatcattgtatcatcttttctcctttntgacatgttctgtaactgcattctatctgga

SEQ ID NO: 256574 - DNA, 436 bp, Glycine max
cgcttatatagactttagagcttctattcgttgagagatcctatctagccgctgtctaatagctttggcgcttgacacggggccactattgtgcaaagagagatagagtgtggaccacaaacgctttctgtagcatatcttcaaagaagtacaattggccagtgttgcctattgctcaaagatgacttccattgtatgaatcgaaggaaacgttaactacatatgacaagaggaattaagaatgtcaagacaagacaatttaaatcttcccttttgtacgctatggcgcaagtttcttattgagcctatgaacgttactttcttgtgaatgttttcggtacttggatcaagtaattgttccattgctcttgtactgtgagccaagtgctatagcacttgtcttctaaaggctagatgttgaacatattgtacatga

SEQ ID NO: 256575 - DNA, 460 bp, Glycine max
  unsure (1)..(460): unsure at all n locations
agctngctngnggagcttctatgtatgctgtatcttagagcttcaatgaggtccttcaatggtgattnttcaccatggagatgcatcacaacgtttccaagttatgttatttcatcagttcaatgaattcatccattcttatctcggtttattccggaaaacaaactattagcatcagtcccttgtttccagaagatacgtttgctctttacgaatgatttatacttcttaactatatattcagaaaattatacacctatggtcctctatgaagaaattnttctttgtatatctacactnttatacatgacaaattttttctgtatacgcattggaactttctctctttacgtcacatgatcaaaccctatttacattcagagatcttcttcgttgttctccaacgcacacctatggctcatacaaaagtttctttatatacattcgttgctcacacaca

SEQ ID NO: 256576 - DNA, 449 bp, Glycine max
  unsure (1)..(449): unsure at all n locations
tagttctatatacaccattgacttcaatcacgttcctgtcttgangtctttctacaagatgccaagtttggattttctctatcattgagagctcctccttcattgcagcaacccaaatttgatttttcttggcttcttcatagtctgtaggttcacatacaacaatattgcacctgtcataaatatcagagagaagtctagtacctcttactggaacatcatcaacaagctcatcttaccaattttctgaacttggtgcaggaaagtttaagttcagatgtctaagggcttgatttatcatccttggattatcccaattccattcttcatcttccacaaagtgaacatccctgctaacaactactttgtcaattagcagttggataagtttataagctttgctaactgtgctgtagcactataaaaatcctggtaatgctcttttatct

SEQ ID NO: 256577 - DNA, 456 bp, Glycine max
agcttccttgagaagcttctttgagaagcttccttgagaagctagagcttagctacacacacccttctaataactaagctcacctccttgagaagcttccttgagaaactcctttaagaagattcctagagaaactagggcttagctacacacacccctctaatagctaagctcacctccttgagatgagaagctagagcttaactacacacaacccctaataatagctaaactcaccccacatgccaaaatacatgaaaatacaaaaaaaaaaatccctactacaaagactactcaaaatgccatgaaatacaaggctaaaaccttatactactagaatggccaaaataaaaggcccaaaagaagataaaacctattctaatatttacaaagaagagtggacccaaccttggcccatgggctaaaaaatctaccctgaggttcatgagaacccca

SEQ ID NO: 256578 - DNA, 476 bp, Glycine max
  unsure (1)..(476): unsure at all n locations
cttcacctttggtcctcctcatagttgttgcatgagaaaacatgctctattttcatctcccactccaagtaggcctccggatcattctttcctttaaagggaggaatgttgagtttaataccatcaattcggttgtgtctaggaacaccatcattttctcttctcctcctttcttcttcattatgatctctattctccatttgatccaacctctcatggagcgcatcatctcgttgtttcgttaacctcttcaaatgttgcaccaaagcttgcatttggaattgcaaaagcccccactccatcattaggattagtacttgacatctcanacaaacaaatcaaacgtaacaagacaattatagttgctgtttgaatacctcatccactcaagtgtatcacacaactatggctgttctctaatgaaaacactcttgccttttaccactctatatccccttgagttcttatgcaactca

SEQ ID NO: 256579 - DNA, 412 bp, Glycine max
  unsure (1)..(412): unsure at all n locations
ggggagcacgaaattgaaggaataaaaaagggagagaagtnggaatttgaagtgtgtctcataatactttcattcatcaaagtacaagaagtgttacacatgcttctatatatagactaggtagtttccttgagaagctntcttaaaaaaacttccttgagaagcttctttgagaaaacttccttcagaagctagagcttagctacacacacccatctaaaaactaagctcacctccttgagaagctagagcttatcttcacacacccctctaataactaaattcacctccttgagaagagaagctagagcttatctacacacccctataatagctaagctcacccccatgacaaaatacatgaaaatacaaataaaaggtcctactacaaaactactgaaaatcctgaata

SEQ ID NO: 256580 - DNA, 440 bp, Glycine max
gagaagctagagcttagctactcacacttcttaaaaactaagctcacctccttgagaagcttccttgagaagctagagctaagccacacacacccctctaataactaagctcacctccttgagaagagaagctagagcttagctacacacccctataatagctaagctcaccccaatgacaaaatacatgataatacaaaaaaaacgtccctactacaaaggctactcaaaatgccctgaaatacaaggctgaaaccctatactactagaatggccaatatacaaggcccaaaagaaggagaaaacctattctaatatttacaaagaagagtggatccaaccttgacccatgggctgaaaaatctaccctaaggttcatgagaaccctaaggccatctttagtagctctagcccaagcctcttggagtcttctatccaat

SEQ ID NO: 256581 - DNA, 287 bp, Glycine max
  unsure (1)..(287): unsure at all n locations
agctntgtatttttgtagggagnactgtttaagcgtgtgccttctgttaaggatagcaatacagttgatacaccttcatttaacatacagtcatctcattcagtgttgtcaccctgccaacaaagatttccatactgcgaccgttcgagatatgtatgtcattctcacacttatgtggttaactattataggcaatggttgacatgttactattctttagtagtacattgtaattcattgagtgagtcatagttccttgtttgagaatgaatacaacgattaatacg

SEQ ID NO: 256582 - DNA, 427 bp, Glycine max
  unsure (1)..(427): unsure at all n locations
actactcaaaatgcccagaaatacaaggcttataccctatactactataatgaccaaaatacaaggcccaataaaaggaaaaaacctattctaatatttacaaagaagagtggatccaaccttgacccatgggctcataaatctaccctaaagttcatgagaaccctatgatcttctttagtagctctagcccaagcctcttggagtcttctatccaataccattggggggtaggattgcatcatcccctccaccttggataggatttgacctcaaatcccgaggttcttcatactctgggctccttccctcgacacctgtaaaaagaataataacatatatattagtggtgttgggtatgttagagtangttaaggtctgataaccatttcctgtgcatcttcccatgaatgaacatggttcctca

SEQ ID NO: 256583 - DNA, 195 bp, Glycine max
caatcaatcaactgaaacaactatgagtctatgggtgcgcgcatccatatctaaaaggaggctcttgtcctactttgattttagtatacacatgctgtttactttttctacaccttgtccgcatccaatcctttgttaactgagaaacatcttggtataataagaactcaaatttaatagacgttgtctcaaatg

SEQ ID NO: 256584 - DNA, 457 bp, Glycine max
  unsure (1)..(457): unsure at all n locations
tgctgatctgcccagtcctgactattttctgtttccttcgntnacagatgatgcgacatctggttctgataatttcgaaagtctgactaatgacctacaaggtaactgaacatagcaatcattttaattatcctgcaatgtcaatgttgtttaatctgcatcctatgtctggatccatatttttttcctatagttactcaatctcttatttccttcattttgaaattctcagtgctgagctactgtgtatctgagactgacatctattttgattatcctgctatgttaatgttgtgtgtagatcctttattaatcagtcctttgaatcagactgttttgaaacttgctgcttacatatatgatcttattgaagcttaactgatgatatgatgttctaaaggccgatcagttctatcctgatcatttaggttgtctgatactactgcttttcccgttc

SEQ ID NO: 256585 - DNA, 352 bp, Glycine max
  unsure (1)..(352): unsure at all n locations
tattgcacccacattgtactaaatacaccccgtgtccatattgtttgaattcttnttccgtaacgtaacgaaactttacgaagctcgcgacgatgcttattctcctttctgaaagacacgagaccttaccgataatgcttctactccgtatttacctttcgaagaaggtacggaagcgtacggattgcgcataaaaccattttttgactggcgccacattacggaatttcacggatcgcgcaagcctgctttctttagatttctgagacgcctcgggacttcatttattgtggcacaaaggacgccgagtatctcagagcgactaaccacaaggtgcatggtatcaactaat

SEQ ID NO: 256586 - DNA, 386 bp, Glycine max
taactaaactcaccgccgtgagaagcttccttaagatgattcctaaagaagctagagcttaccttcacatacctctctatatgctaaactcacctccttgagatgagaagctagaacttatcttcacaccccctataatagcttagctcacccccttgtcaaaaaaacatgataatacaaaaaatagtccttactacaaagactactcatatgccccgaaatacaaggctaataccctatactactataatggccgaaatacaaggcccaaacgaaggaaaaacctattcttatatttacaaagattagcgggctcatacttagcccatgggcgtcgaatctaccctaatgctcatgataaccctatggcctttccttggatctct

SEQ ID NO: 256587 - DNA, 403 bp, Glycine max
gaatttgaagaagctcatgttctctagttgtacatccactcaataaagcatcaatttatttgcttccctaatttttttatctattttctgattagaaaataaactaagaaactataggagaacagaacttacataataataataataatggtaataataataataataaaacaaagcacacaaaaagaaacttgattgttgaatgtaatcaaatgtaataataacaaaaatatgatacaatgattcaacaattaattacgtgtatattaatatttaatgaatgggtatatataggaatcaattattatatgttaatagatggaacgaaagccataattttttgatgaatcatcgcatggtacgatgacttgattggatacaattaagtaataaaaaaatcatt

SEQ ID NO: 256588 - DNA, 347 bp, Glycine max
tgatgtgcattcaatctatgccattttgccacgtctttggaaaggatttggtggtctaatataagcctaacttgatggggctgaaaaagccccattttttttggaaatggggatgaacgcactaagcgtgttttgctacgctaagcgagttcatcacttttgatgaatatatgtgatattcagatgaactcgctaatttggccctgctctgcttaacgagtacaccttttatgatgaatgattgaatgttatgaactcactaagcgcgactgtgtgcaaagcgagtaatgagtttcagacacttataaaaactttcattgtttcatgcttgtggtaaacgagcatgc

SEQ ID NO: 256589 - DNA, 469 bp, Glycine max
  unsure (1)..(469): unsure at all n locations
agcttacaaatctatgttaagtccaagcctctatacgaaatanaaataaaattggataagataagataagattgatgaaataaaatctggataaaataaaatctggataagataagatttgataaaatataaattgtcgtgcgtctcttttcaagtccaaagcccaattctcggaattcaagccccaattggctttatagtctccctgaaattaaattaaaaacacataattagtcaagtaggcccaaataataaaattgcatanattattngacaattaaggctaatcagtaattaaaatggtggcanaaagggttaagaaatacgagaaaataatgacacatcattctccatgtctttcttccttgacaatcagttgatgagaagtgatatcgacttggaaatactttcttgtgaattttacttgtgacacttctccaatggcttgtgtctctctcactttttcttc

SEQ ID NO: 256590 - DNA, 426 bp, Glycine max
  unsure (1)..(426): unsure at all n locations
gcacgagttgttgccgaaccaggataaaattcttgtgtttgtcttcttcttccctacanctttaatttccgctgtgtactttacttttacgctttacttttgtttaacttacataacttagtagtaaagcctaattgaatttagtaacattaagaaggataagttttaattagtcaaggtacattaataattaattcaacccctccttcttaattattctgaggccacttgatccaataaataatgtacaatactacaataacccatattgctctccactgcagcgcacactggcaaatggtcatcatgttgcctaagggaaatcttgttatctggttttgttccttgcataacaagccagacaactaccttaaaggaataattaacaagtcagtgttgttttcaatacatttgcattaacattac

SEQ ID NO: 256591 - DNA, 387 bp, Glycine max
  unsure (1)..(387): unsure at all n locations
agcttccccacctcgaaacgtgaaagttttttttcttntcgggccacattggtttctatagaaggttcatacaagatttctctaagatntccaaacctcttagtattttacttgtcaaagagaatctgttccactctaatgaagaatgccttcaagctttcgacctcttcagaaagaagctagttatgcactagttatagtggctcccatatggtggcaagaattggaactaatgtgggatgctaatgactatgcactatgagaaatattacgatataagaggaatggaagatttcatgctatcgactatgctagganagtgctaaatagagcccaaatcaactacacaacaacagagagagagatgctagcagtggtttatgatgc

SEQ ID NO: 256592 - DNA, 457 bp, Glycine max
cctgcgaatgcaaacattttttatgttattttaccaatatatgctactcttaaaacaaaaatggcatacaacctcctccaataaacacaaacatcaatgtaaatttatagcaaactcatgcacatacttccttacgaatattcactcgcacaagatattcttctaattaagataaatgcacccatgcacaatcaaggcaccttcgttacctagatcacttatatgtacttccaaggcatatttgctacctacatcacatgcatttcctttgctaaatttacatacgtgcatactcaaagcactttggctatcataaattgcatacgtgcacattctggtatttctaatacctatacatacacaaacttcatgatgaatcttggctacctacacaataaggtgctacatttcatgctctattcaagtgttgttgctacctaaagccgcatgcaaattc

SEQ ID NO: 256593 - DNA, 405 bp, Glycine max
  unsure (1)..(405): unsure at all n locations
agctntgttcgcaaaaattactgtttaattttntaaggtccaacgcctcagcttttctctccaagtaaaaatggatcattttaaggtccaacgccttaaatgactaccttccaagtaaaaaagaatcacttgattcgccccttttgaaagaactacgtaggtctgatttccttttcgatggaggatacgtaggagcaagagccccgcttttgtcgacctcaaaaataaaaaagaaataaaggtttaaatacataattccacacaattctaatctaagtctattgtcctttgggacaaacgtgagaggtgctaataccttcctcaaacgtaaagataactcccgaatctggaatattcttcatgaccggtttcctttgggtnttctaacgttntcctttcaataaa

SEQ ID NO: 256594 - DNA, 424 bp, Glycine max
ttgtagttggttggagtttatatgattggcctgtgtgtgttgtcatttgcttattatgcacacagaaagaggatatgcactaagtgcgcctaagttgtctttccattcatgctaagttggcaagtcacgctaagcccaaaaacctttctgtttgaaaaaatttcaaattaggcttaacgcacaaatgcttgctaagcacgcactctgttctttgtcactctcgctaagcacacctattgcactatgcccaaaaacctctctgtcttgagtctatcatgaattgggctaagcacacaactataagcttagcgcacatacacccactcgctatggagcaaacgcgctatcaacactacacctctggaacttcagtagaagaatcgattttgcatgacatcacaagctaagcgagccactgttagtc

SEQ ID NO: 256595 - DNA, 464 bp, Glycine max
  unsure (1)..(464): unsure at all n locations
agctttgagccaattcaaacaacattatctttntactcgaatgtctgattgagtcccgtaacatatcgagacgctcgaaattgaatgttgaacttctgagctaattcaaacgacaataaaatttttctcggatgtctggttgagtcccgtaacatatcgagacgctcgaaattgaatgttgaacctcttagctaattcaaacgacaataacttttttcacggatgtctgatagagtcccgtaacatatcgagaagctcgaaattgaatgttgaagctctgagccaattcaaacaacaataacttttttctcggatgtctgattgagtcccgtaatatatcgagacgctcgaaattgaatgttgaagctctgagccaattcaaacgacaatatacttttactcggatgtctgattgagtcccgtaatatatcgagacgctcgaaattgaatgttgaagctctgag

SEQ ID NO: 256596 - DNA, 437 bp, Glycine max
  unsure (1)..(437): unsure at all n locations
tcaacattcaatttcgagcctctcgatatattacgagactcaatcagacatcccagtaaaaagttattgtcgtttgaattggctgagatcttcaacaactaatttccagcgtctcgatatgttacggtactcaatcagacatccaagtaaaaagttattgtcgtttgaattaactcagagcttcaacattcaatttcgagcgtctcgatatattacgagcctcaatcagacatccgagtaaaaagttattgtcgtttgaatttgcttagagcttcaacattcaatatcgagcgtctcgttatattacgggtctcaatcagacatccgagtaaaaagttgtggtcgtttgaattggctgagaccttcaacattcaatttctagcgtctcgntatattacgggactcaatcagacatccgagtaaaaagttattgtcgt

SEQ ID NO: 256597 - DNA, 229 bp, Glycine max
aatcaccggggaaaatcagttaggtccaccggttccattaagtataacggatataacctataatgatgacaataccccgtataggtaatgagaaggaagaaagaatactgtacaactgcctaaattggttcttaaatacagtaaaagttgaaaatctgcagctgtgaaagaaatggaatacctatagtaaaaatggaaaccctaattggcgatacctaacttcgctatg

SEQ ID NO: 256598 - DNA, 493 bp, Glycine max
  unsure (1)..(493): unsure at all n locations
gcagctgcaagcttcgatggtgtcnagaagaaaccacatgttcgtcatcattttttgggggagaatgtgaatgtatgtatacaagattttgatgatgtcaaacaaaaatctaacaaggctacttcaaatgataagcatntgcttcaagaataattcaagattgctcccacatacaaagcctcgtttcaagattcactaaagaccaagccctgccttaaaacaaagtgctttcaagacatgcaaggctctggtaatcgattaccaagaagtgtaatcgattacccgaagcaggtgtgacatatacctcgtgaaacacgttntgaatctgaatttcaacatgtaatcgagcaccatatgtctgtaacagattaccagcaacgaaactctggaattcacattcnaagatatcacccttcacatataactgtgtaatcgaatcacacacattggaatccataccattggaaagtttcagataatctgcaacactcac

SEQ ID NO: 256599 - DNA, 474 bp, Glycine max
  unsure (1)..(474): unsure at all n locations
aactaagcttgcacattagtgtttgcgggtgagaggatcgaagtangcctaatatgaggcaaatttgattacgctgcttcgatgaattctggtgataggaggcttggggcaaatggagggaataagaaggagggagaaacccactttgtggctgtcgttcctacatggccaaatatcccattagcctgacaatatcaatactcaaccaatatcagtccttctcattacccatcaccctaccatccaagaacgcccaatcatccataaaggccacccacaaatcggccacaatatccacccgatgcacatccaagaccaaacaccacccctaataccaataaaaacaccaaccagggaaggaattttccagaatagaagcctgtagaattcaccccaattgcaatgccatatgctgacttactcccctatctacttgataatgcaatggcagtcataagcccaacaaagggttct

SEQ ID NO: 256600 - DNA, 276 bp, Glycine max
ctgatttgcaagccaaagatttggcatcctttgggacgttggcatatggtcccaattggaaaaggctattgcaattcttctttctccttagttcaagatttacgtaaggtatggtggtagggatttggaacctaaaccctagcactctgaggcttttcaactgaaccccgaactttaaccctaatttggtgaaacaaaccagtacccagtgttgtatttgaattctatggttaccacaaaagtatagagacaagctatcctattctccatcgcaat

SEQ ID NO: 256601 - DNA, 413 bp, Glycine max
tttcaaggtttgagaagtgacaatgagaatggggtaattttggagcaaactctcatctcaaacaagtctataaaattaatctaaacttgctcaaactggttgtacgacgaatactccaccgaatcataatttgactcctcaacacccagattaccctagaaatggctcttgctttcacttgtgtcactcattgtcctcatttgctcagcccatgctctcccacaagccctaaatggcactttaaactaggattaactcactttagactccaatttacactaaccccaaatttatcttctctaaccctgaaaatctcacacttttctacctacaacattgtcattctcacatttaaccctaagttaacttcccccttcatctgtaccagtttttcatcagcaatttctacacac

SEQ ID NO: 256602 - DNA, 396 bp, Glycine max
  unsure (1)..(396): unsure at all n locations
agcttaaaagaaaatggatatatgcgggtaataaaattgtgtctttattagngaaaagatactttaagtgttacataaaggagccaaactgggaccaggatggacctcatttcatatgcaccttgtttcacaacacaaaaaagaaaaagcaaacaagctgaaaatctatggtagaaactagcaagacagaaggggtagctccttttgaacttattattatcctaatgcatttaaatacaatttgcaggatcccagcggccacggcttttgtgtctcgggagatgttgctttgaaaaggcggtaagggcataaccatacccctgttctggagcgtggaccggtacatataatgccctctcaacaccctgatttgtgaacgtgctttggatggttgat

SEQ ID NO: 256603 - DNA, 345 bp, Glycine max
  unsure (1)..(345): unsure at all n locations
tcggcatgctttgtggaaatatctaacaactcaaactttattattctcttgcttgttgttttcttgttcatggttttcattgaatgctgtggtgtggtatgtggacccatttggggattcaaagcactagagacaaattgtagccctttttattgttattccttttcaatctttcttttttattttgtttggttgaaataaaagtaattgtacttgtggatgcacaactatttttttctacgcgtaatgtatacttttatatcatgtattaataattaatgtggatgagattatcgcgtgataatgttttttnttttcaaactaagttactatagctgattatct

SEQ ID NO: 256604 - DNA, 407 bp, Glycine max
  unsure (1)..(407): unsure at all n locations
atccttaagtcacctgcggcatgcaagcttcacatggagctatatcaatgaggatgctctccattatctgcaacagcagaggatgaggatgagctcactcctcctgagcctcttgattntgatgcaggtacacatacggctcaggaggaggaggctattccagagcaaattccagagccatctccagcccctgcgtatgcacctgatgatgccacaccagtggttgagccgaagcagactattcaagattctttattagctctagcactggatcttaatgaagaccaaccacaagaggagcaggacgtttaaattatttgcattatgaacactntagtttaatttcagntattntatgatttatgtcatttaaatttcagctnttatgttgtagtcttttaatttca

SEQ ID NO: 256605 - DNA, 437 bp, Glycine max
tctcttacctctcgagttcttcttctctaagctgtctctctctgatctcgcgtcttcttccctgcgagtcccttaagcttttcgcatgcttctcgcttcgtggaggttccctatccctcgaaagctatgtatcatagccactttatgtattcggatcacacaagagttaattctcaaagcaaacaatatgctgatgatatcaagtactattaggcatacttactatgtgccaacaactattttggtattaacttcatcctcgcctttatatattctagccaaaccaaagtctaatatttttgaattcatctttgcatctatgaagacattgcttgccctcaaatctctatgtataattgttaatctagaatgatatgctagcttacaggaaccgaatacataggggttagtttagttctcgatgagtatgtatattc

SEQ ID NO: 256606 - DNA, 439 bp, Glycine max
  unsure (1)..(439): unsure at all n locations
atggaccccattccatcagtcatttttgttgctttatgaggcattnttgaaggccatgaagacaagttgaagcattcgaaatcaacacacattaagatagatctcttggtgagaaatctgtatttttagcttcaaatctttctgtgagagttacccacttatgtcttgtgctttcaaagcttctaatattcttagatagaagtgtaaaacttagttaccgagtcaaatccctcttgtgaggagaagatctgccatctgtgcagntgaatcacatatatacttattctgtaaagtctagcagtggttggcagtgaagaaatctatggtattgttggtgtaacaaaggcctgtgngaagtccaataggaaactatcaggttgttgaaatccagtggttttcttgttcagttgtgaactggttgtgttagtgaaatctcatc

SEQ ID NO: 256607 - DNA, 383 bp, Glycine max
ctgatgattgtatatcggtgctataacttattacaatttcacctccatgtgtcaagaagaggctacccttgctgaatgctacaaataactcttcttcaaagggatagaaagcacttcttaaatttcctaacagtggtgagtccttttgttttggggtaaaatgaaaaatatgttaatgattgtggtttttacttttttcaagcaaaacaaaacatgtagagcaaattaatggcagcggacattctaactatatgtttgaatgtcacacacatgacatggcctattcgaatgcaaattgccatagagacaattactacattggcctatctgcatacttctaacatcatgcaccgtgatgtcaaaaccaacaacattctacttga

SEQ ID NO: 256608 - DNA, 370 bp, Glycine max
  unsure (1)..(370): unsure at all n locations
gaatttctcgaaagctgctatgtttattttgagcgtctcgatatattatacgcctgaatcgaacctcagtgtaaaaattatgaaccattgaatntctgtagagcatccgttgttcattntcgagcgtctctatatgtgatgaaccttaatcggacctccgtgtgaaaagntatgaccatttgaatttctcgagagcttccgttgttcaatttcgagcgtctcgacatattatgcgcccgaatcggacatccatgggaaaagctatgactatttgaatttctcgagagcttccgttgttcaatttcgagcgtctggacatattatgcgcccgaatcggacatccatgggaaaagctatgaccatttgaatt

SEQ ID NO: 256609 - DNA, 444 bp, Glycine max
  unsure (1)..(444): unsure at all n locations
agcttanttcaataacttccatgtgaatcttatcataacaaacttatttcaatacccctcaaacacaaccaataattatattcattgtcttaagaacttatgtcataagctctaatgtaataagatcttaatgaataagcacttaattaaactgtttcccatacgtgtcctaattgcatccatgcatgttaatattagcttatttttctttcaaaatagctaataataaaaatattnttgaaagtgctttcgaaaaggaaaaaaaacaataattgaagctcattcatacatgttatagatgcttatgctatccacacccacaatacttgccaattaaaagcaatgaaagaaaacttaagaatttcagagtttagaccatataaacaggagcttttttgatatcaaaaagaatattgttgtntataaaaagaaaatgtattgtca

SEQ ID NO: 256610 - DNA, 484 bp, Glycine max
  unsure (1)..(484): unsure at all n locations
gacactttaatactaccttgtcaaaagggaagcaagttaaaaactctgttgaagtttaaatatagtttctacttcaaaaccccttgaactacttcacattgatctatttggtccctctagaacaatgagtttgggtggtaattactatggcttagttatagtagatgattactcaaggctcatatggactttgttttaaccaaaaatgaagcttttggtgctttttaaaaacttgccaaggtgattcaaaatgaaaaaggtctcaacattgtttcacttagaagtgatcatagaggtgaatttcaaaatgagtcttttgaaaacttttgtggagaaaatggaattcaccataatttttctgccccaagaacaccccaacagaatggttttgtggagaggaaaagtagatcccttgaagaaggttgaagaacccttctaaatganataagggtaccttngtactcttgggctaatgctatacata

SEQ ID NO: 256611 - DNA, 420 bp, Glycine max
  unsure (1)..(420): unsure at all n locations
agctnagatatctaagagatttctatccttcgttgttagcacaaataaatgccaaccatatggatctttcttgtaactaggtacatctacatgttctaattgagtgttatattgaagcccccctttgtgaccatcatattcattaaacaatgatttcaaagaagactttacccttgacttagacccactttccttgtccacatcaaaaagtgtatcaatcgcctcaatcatatattttactttagaccttggatcagcaagtagcaacatgtgcaacttattaggatcaccccaactacttttatatgtctctttcatagttctagtcatctatgtgtagcactatctctattgctacagttaaacaaatcagttattttatgccaaatacctaccacttcttacatgtacatgttacta

SEQ ID NO: 256612 - DNA, 392 bp, Glycine max
  unsure (1)..(392): unsure at all n locations
gaagacattgataagacagttacagtgaaaaatggatgtgagttgagcaagggtcactactancacaacaattcaatggatggatctttgactatattgattatggcggactccacaatggcaataatggaaaatgtgaagaatgttgtggcccccaataagctcgtagagcttgctctttattatcctaaggcattatttaatgttgaattccttcaaatatctaaatgtattaattctgtgttcttaataatggaaaaacattatttaaggttggtcatacataaattacatcatcagaaggaataaaagtttttttttttttttttgtgactcttgcaaaagtggttttaccttgattacctaagtttactctaatgacattgaaaaat

SEQ ID NO: 256613 - DNA, 426 bp, Glycine max
  unsure (1)..(426): unsure at all n locations
agcttcaactagggatagaattcttgctttaatntgaagagtatcaagcacttaatatcaattgtcgtataaagattatgtcacaatggaaatatttttctccttttccaaggcatgaatgattttcacaatttagttggaaacatctataatttttgaattgaagataattcgttttaaaattttcctaactcaatattgtttgtaaggaattttatatagttgattatcttgatggacttatggacactgacagtgggatacgaaacattgtttcaatgtttgaaattgctaatattctatccattttntaagtacatcatcaatctgaattctcaattaatgtgatgcttggtattcaacttttatttatcataattnntttcatgctaagtctggggagaaagaactatacaaataagtaca

SEQ ID NO: 256614 - DNA, 426 bp, Glycine max
tcaatggctctgttcctgatatatttccactcagatttggtgctttaacaactactctacatctatgctctgttgcatacctaataaaaggaatagccaaaacatataaaaactgctaattcgtttggtagataagaattgctaaaccttgataagtttgctttgaaagttctaaagggtcaaccacaaatattttttctcttataattaagtaaatatgtctggtagttttagttatgaaggagcatttgagcctgctgctttcactctttaacaacaatatggttggtttcaagctcacaaatgattataaatatatatgcacttactttcttatttattttatctatactctgattgtctttgtcaatctcattctctctctactttgtatcacattgttgattaacattatcacttttttta

SEQ ID NO: 256615 - DNA, 445 bp, Glycine max
  unsure (1)..(445): unsure at all n locations
ggatcttaagcaccgcggctgcagcttgctanagatgccagattgttttgtggccgaaggaactagttccgccccggagtacgacagtcaccgctttatgagcgttgtacaccatcagcgcttcgaagccattaagggatggtcgtttctccgggagcgacgcgtccagctcaaggacgacgagtatactgatttccaggaagaaatagggcgccggcggtgggcaccactggttactcccatggccaagtttgatccaaaaatagtccttgaattttatgccaatgcttggccaacagaggagggcgtgtgtgacatgagatcctgngttaggggtcagtggatcccgttcgatgccgacgctatcagccagcttctgtgatatccgacggtattggaagagggccaagaatgcgagtatggccagaggaggaaccggtctgat

SEQ ID NO: 256616 - DNA, 372 bp, Glycine max
  unsure (1)..(372): unsure at all n locations
cctnttaagtgcgggtctgggagactaatgtcaagtgttctctatatgtgaagatgatgttccaagtacttcggatttggtccgaccatgccctcctgatttcaagctgggaaattggcgagtggaggaacgccccggcatttacgcaacaagcataatgtaaacctttacggttttaaaagctctatagttgggcctaggctctatagttttcattttgttaaggctttgtgtcttttgtttttgaatttataatacaaggatctttcttcatctgttcctagtctctacccattctcattcattggcatgtttacttctttttctaaaacggcagattcgatgacgagtcccccgaatgtactaatacct

SEQ ID NO: 256617 - DNA, 459 bp, Glycine max
  unsure (1)..(459): unsure at all n locations
agcaagctntgcttctacaatctcccccttttttgtgatgaccacgtatgaaatctagagacacacacacacacacancttttcctaatcgatcactcacataaattctccctctctgtttttgaatttatgcttctcttaaaattaagttgattactcatgtgagttcttgatttaatccctatttctctcctcctttggcatcaacaaaaagccaaagtgtgtaacaagtataagacaaacatataatcattcacaaggcatacattggagaatataaaccaatcatgaagcaagaaacatgaatagatcaaatatataaaaactacatacaaaagaatagaaaacaatcaaacaagataacttaaccattcatgaaacttagatagacaatacttcattcataacatcaaacagactagaatatcatccacaattattcaatatacatatatgaat

SEQ ID NO: 256618 - DNA, 434 bp, Glycine max
ctgcatgtctaggttttctatatagagaaaggtccaagttccatagagttttgagagattatgctgtgtgaagatttgcagagaccacagcttgaagcaagagtcggtttgagagcttgagatgagtttgtgagtgattgtgagatcctagaggtgaaggagacatgctcaccacttgtatttttgcaatctttcatcttgttcttctctttgttgtaaagaaggcttcctggtatggaaagctaaatcctttgttggatcttctctgtaggtaactgatgtaaatatatttttatctatttaataattttttgtgtgttctctgtgctatctgcttttcactccagtatgcctttaccttgatcacgtagatgcatgctttgttatggtcattcaacagtggaaactggtctaactctataatacttgatagt

SEQ ID NO: 256619 - DNA, 447 bp, Glycine max
tagagaggaaggaaatagagtagattgaaatagaaaaggtgaatggaaataggtgagaaataaagtggaaattaaaagtgtttggctgaagagaaatacagaagaaataaggaaacaaataaagagatgaatggaaataggtgagaaatagtgtggaaaaatgctagtggacccaccccatttccactctatttccattcaacaaacaaccaacattatttccactccccgtatttccactctccccaccctatttccatgttgccaaacagggcatacaagagcacactatgccactttataaagtataagggtatgttactgaaggggattgtgaatccagaggcaacattcaaagatgtttaaggggaagccaaccaatcattcaaatggaagattaaggaattaagtgccactgatctatttaattgaaaattactgagtact

SEQ ID NO: 256620 - DNA, 463 bp, Glycine max
atccaagcccataaataaaatataatctagataagatctagatgaaataatatctagataagatctagatgaaataatatctagacaagatcaaatctagataagataagataagataagatctagatgaaataatatctagatgagatcaaatctaaataatatctagatgagataagataagatttggtagaataaaatagtctgctctcttcaagtccaagctcaattctggattcaagcccaattgcctataattctcctgaaattaaattaaaaacacaaaattaatcaagtaggcccaaatgataaaactgcataattaatttgacaattaaggctaatcagtaattaaaatggtgacaaaaagggttaagaaatatgagaaaatgatgacacatcaatcatgttgactctttactcccaaaatatgtcacttctagagcaattaacccaaacacat

SEQ ID NO: 256621 - DNA, 411 bp, Glycine max
  unsure (1)..(411): unsure at all n locations
agctttgaacaatatacttggcctcattttactgtttctgggctnggcggccacgctcaacaaagtactttcgacacctactgtacgttgatttgaccaaggctgttatgggaatgttgcgacaatccttcaaaaccttattgatacattctgagaggttggttgtcatgtggacatatcgacgtccttctttatcataagccatcggccattatttctttgaaatgcgatcaatccatgntgctatggctggacttatttcacgaaatttttttaaatcttgatcaaaaatgtgcttgcaaggagtgtaggctgcataaaattagttatcaataacaattntaagtatatatggacgttanataaacgcgaccattaatatgaatcttcgcaacttttcaacattctttt

SEQ ID NO: 256622 - DNA, 431 bp, Glycine max
gacacaacttgtgcttgattgtattctctttcctccggtattggtcaaaaagattaaacaaatatgtatgaacccctgctacactgcgctaaatacatgctccctctgccctctcctctggaacacgccatagcataaacgttcggcccactggctgaatattgcaactagggcatgtgtatcccgccagcagcgatatcttttgattggtaaccgtattttcgttccgccagtacaagaacacctccagagtaagtttacaaagagatcgtctgaggacaaaaatttctaaaccgcggaaccctttaaaaaacataccccctcaaggaatttgtgtgaaaagaaaccctatcttgtcgagaaactcctcattctccttcttcttctgctacccatggcttcgtcttcttctgagcctcctccaccttcta

SEQ ID NO: 256623 - DNA, 404 bp, Glycine max
  unsure (1)..(404): unsure at all n locations
agctngagaacatacttagttccatgaatcatgtatctaaaaagtttccaagtgtgcctgatcattcctgaaattctcgcaagtggcagagttactgaagtgtttataccttctgtgcaggtagcagaaggtgtctccaccgccggggctgtgattgctttggcgcacaaatataatgtaaagctgccagtcttgacagcagttgctcgtattatcgacaatgaacttacccctaagaaagctgttnttgagttaatgagcctccctcaggttattctgaccctcctaagaactatattggtgttatatcgagtttatgaatttgattgatgacaatntctcatgataggttgaagaagtatgaaacctaccagcacatcccttatttactaagctgcttttaa

SEQ ID NO: 256624 - DNA, 470 bp, Glycine max
  unsure (1)..(470): unsure at all n locations
ctaagcttcaagttcagccttgtgtcactntatttttatccaggaatataacatgaaagactgccacaaattgcagcttctttgctaagaaaatatgttagaatttcaatgtgattatagaaagcacagataaactcctgaaagcattactaagtatacactacatttaccatatgaaatcatctatttgtttcacactttgaagaggggctggagaggtgacaaacctggatctcaggtagatcaaccctcataaagggatttgtctccaactcatcctcaatggttgagggaattgttgcttggccagcttgccattgattccgagcccaggctaattttttttgtatcctcaaattgtccggctcaagtgtcagagcaaattgcaagttgttcactgagtactggagaagaagcaatntcaaactcttacaagtgattaatgatataagtggaaactagcatataac

SEQ ID NO: 256625 - DNA, 345 bp, Glycine max
  unsure (1)..(345): unsure at all n locations
agcttcaaggccaacaattnttaaatagttatcttcctgtttaagaagaatgcatccaactaatctaaggcgtatttcattactaggtatgaaacttcttattctttgtctatatatatgagaatgttctccacaattatcattttctagacaaacttctcaaaattttgtcaatatgatcaaagttatcataagttntgcctagagatcttaattcattaagtatgtgttgcaacctgccctccggcggnggcatgaacaaggcttgtcgaatgggccaaggggtgcgtcttccattgaaggaaaacgtgtggagtcaccaccaacgtttatttgaggaaaatg

SEQ ID NO: 256626 - DNA, 459 bp, Glycine max
  unsure (1)..(459): unsure at all n locations
tgttggattatggtgcacctgtcatatgtggtactaggtggcgatcgggcgatggcgcaaatcaactctcccacttccacaaatcaaacatgaacccaccatccccaattgcccaccttcagctgagcttacgtactcctacgtagcccttatcctcgttcctctcaacaccgggtccccatcaacccctccaagctgtcacaatatccaagaaattcaatttccaaacatcatgaactaccctaaaccaagaaaacggggcagaggcagaaaactctgcccaaaacacattcacatattacagctttccttactcaaataccccagtagcattctcttcgttccgattcgttaaccggtggatcgacttgaacattntactggaggttcctagtacataaatctacattttgaccggtgggatctggctaaaagtgccagaacccaatatgtactaca

SEQ ID NO: 256627 - DNA, 401 bp, Glycine max
  unsure (1)..(401): unsure at all n locations
agcttgaagaaatatcttatctttctgttcaagncgnggnnngatacaaccaggatcatggacaaaattgagcttgaagttgcagatgttggtctacctaaacaacttgatatgtatacaataatttgaagacttcttgagctgcaaaagagaatttgagtttatcttagtggatgtgtaaatctaatataaagatatacgtctttcatgaagaagtcattaactaataaggcttggatcttggaagaaactcatcatgaagatagatatgccattttgtcctcacaatgtaactcaactgcaatgctntgaggatttcttatgttgtaatgttccaaatgacatgataccagtgctcgaatgtcaaggatagatntatctataaatctaatgaagacatc

SEQ ID NO: 256628 - DNA, 378 bp, Glycine max
  unsure (1)..(378): unsure at all n locations
ggaccttagatactcagctggtgggaggaccgacactctttaattggcaaggtctgtgatcaaagccaaaaaccctattgccctgttggacttctccgggtccactgggtgtctatgaggcgtgatctctgcaaattgatatatggcatttgagatcaactgggctatgtgaacattcacctgtgtcaagatggcatagaccaactggcacttcggtagagggaggtcggaattatggtcactatggagaatgttgctgagcaacaatgtcatccaaatctgtgtcaaggtggtcatgctagtgcgcatgatccgtacccgtcttcctgccatgcttcgggcaatgtncttgcccgaaacacacaatcactatctgat

SEQ ID NO: 256629 - DNA, 442 bp, Glycine max
  unsure (1)..(442): unsure at all n locations
aacgcttgcatgtctagtgattctagagagagaaaggtccaacttccatagagtnttgagagattttgctgtgttaagatctgcagagactagagcttgaagcgaaagccgttctgagagcttgagatgagtttgtgagtggttgtgagatcctaaaggtgaaggagacatcctcaccacttgtatttttgcaatctttcatcttgttcttcttttttttgtaaaggaggcttcctggttatggaaagctaaaatcctcttttggatcttccttgtaggtacttgatgtaaatatatttctatctatttaatgatgttttgtgtgttctttgtgctatcagcttttcattgtagtatggatttaccttgatcacgtagatgcatgcttcgttagggtcattcaacagtggaaactggtctgattctgatgaccttgatagga

SEQ ID NO: 256630 - DNA, 424 bp, Glycine max
  unsure (1)..(424): unsure at all n locations
acacatacaagagagcttgtaacatatcttntacacgcggagcgataacatgcagatctgtggaacccttaccgcccactctgtcgtcatggcgagacttatgaaggcatataggtttagccttctcaatgtagtctgaacaaaattcaatggcttcttctgcaatgtacctttcaacaatagatgcttccaaacgatgtagattctttgtataccttgtaagatcttcatgtatcgctcaatcgggtacatccaccacaaataaacaagaccacaacatttgatttctctgaccaaatgaacacataagtgaatcatgatgtccaagaaagcaagaggataatacatctccaactggcacagcataattacgggcctcatttccaggcatcatacttgaccggatcaaggactttactacata

SEQ ID NO: 256631 - DNA, 450 bp, Glycine max
  unsure (1)..(450): unsure at all n locations
tatgactngatctttttacaaatatgtagccactgattttttcatacccttttaaatcactttgttttattggtaataaaataaaaatgtcatgggttgtacccatgcctgttgaatgttacaccaacaaaggtaagaagaaaagacaattatttgggttctctaacccataacatcaagaaataaaaaataccacactcaccaagaagaaataaattagatttgtaatgtaccaagcttcaaaatgttcaatcatgtctcttgctttctcttcttctcaactgagttgaagttgaaaatgttcacattaagatctattggaataccaaacaatttcataaaacttcatttggatctcaaccccccctccccccaaaatagaaacaaaaaagaaataattttaaaaggaatgcaaaagcaatacttgtatgaacacaattgcaacattta

SEQ ID NO: 256632 - DNA, 445 bp, Glycine max
  unsure (1)..(445): unsure at all n locations
agcttctcaagtcagtatgcctcattctatagtgattcaaagactctaaagggcccttcccagtttagggcaagttattcttttgtattgtcttttcaaccttcactacacattctctttactaagtcttttgctttaaactcccttctgtgcagtntggaatgaaacttatgagttgttattgttagagttagccatagtggccaatccattttaggctacaatttgtattacgactttggtttatatattttatatacacaaggggcatatcaattattatgttataggtttatagcatgataatgtcattaaaatagcttattcattcaatggcaaatcaagtgggacttgattgtgggattcattgaacaatgaaacattattctaaaagtatatgtagtcaagtattattggtgactagtgtgacaatagtgcattgagt

SEQ ID NO: 256633 - DNA, 467 bp, Glycine max
  unsure (1)..(467): unsure at all n locations
taaggcgtagttctcacgttcaacaaggtatgcaccttctgtagtgaaaataaatcaaataaaaatggcatgacttcaaagacgggtgatatccccaaccatagcagtctatatatgaacaaagatggtttttataaaacctccttcataacatacacatcataagcggtgttataaaaactgtcgttaacgacataatatagttggtattaattgcaaaaataccaccgtatcatgtactacatcggttttttaataaccgatgtagatagagcgatgtggaatgttacttttgtagtagtgaaggttgtttcaagcatggctaatgagtgaattagttatctattattacatattgtgaaacaacatcaatagtaattatcatagccagagatatcaatttatcttatagtttggtatgtagttatcttactgaggatgtatagaacgttgatgtngcataacat

SEQ ID NO: 256634 - DNA, 388 bp, Glycine max
  unsure (1)..(388): unsure at all n locations
agctataaaagttaaaatagtgaagcatgtcttgcaaccaattcaagactcagactttaccctagactgatcaatttcagaagatgctaatgagatcactccagcaagtgcttcaagtgctaatcctgtgaaatgcatngaaagtttacagtataattatagataaacagcaatatttccaagaatttcataattctagtttcaactttcaatgcagaaaacaaaaaatcttaacacattgccatataaatcattaccagcagcataggtactagactctggattattagaactataacgccaccttccatcactttggctcagagcctgccaattaatgcaggacatgaaatcacattgcacatgacagttcanattgcaattacag

SEQ ID NO: 256635 - DNA, 408 bp, Glycine max
  unsure (1)..(408): unsure at all n locations
accttgaggtgcttgaattgaatcaaaatgtcttccaaggaccaataccatcatcaattggaaatctccatangcttcggagattggatcttcacaagtcaggactaaattccagcatcccaaccaaccttacttatcttgatatgtcaggaaatagcctcacaggttccttatcttaaagggaattagcattaactcgttgtccttaaagagacttatcattaacttgtcgcccttaaagggacttagcattaactcgtcgtccttaaagggtcttatagttgtgtgatggtacaattcatagttcacaactcaatgcacacaacatctcaatcacatacatacacaatttatcacatacactcgatttcaatcataatggtataatctcaattaacacgttatcac

SEQ ID NO: 256636 - DNA, 414 bp, Glycine max
  unsure (1)..(414): unsure at all n locations
aggcaatcgttgagcaccttctcggcgattactgtcgcattgctcatcagctggagagcacgcgaaatgctcccacctaactccgccagaaccatcttgatcttcttcccttcaacaattcaatttccaaattagggtttggatatgcaacaccaacacggaggtttcagattcagattattggtctatctctcttccaccgccggtaaaatgagcggngcattattgggagggaaaaaaagtaaaactgtaaccactacatactaatgggccttggctcggattgggccttcattntgtaacccatgtcatgtgttgttccgtacgtaactgtattacatgatgatgcttgttatgtggtgagggaaaacaacgaaaagaaatatagatatggcaatctcatcagagataggt

SEQ ID NO: 256637 - DNA, 340 bp, Glycine max
  unsure (1)..(340): unsure at all n locations
ttctcacttatattcaacttgccaaataataataagtcatctcgctcaagaagcatatagtctcatacattaatataaacattattctaatgtcacatctatcatagcgtggtgtcccgtgtcctctagcatgaagttcttcatagtcatccacctattcatctgctcccccgaacacaagttcaagatcatcacatgatccaaacacaacaacacacagggagtgaggtatcacattcctagcctatagagaaacaagaacattaaatatacatattatataaatgagataccactgacttanacatagctcacgtaacttcaccacttcgtcattcaa

SEQ ID NO: 256638 - DNA, 370 bp, Glycine max
  unsure (1)..(370): unsure at all n locations
ttcttccttggcttattccctagtggatggagcctnccctctcttcttctcctttgccttcaactgcatctccatggtccatagaagcttcacaagaaagcttccatcactaccggggaaggggagtatgctgatgaaatcttctcataaccacaaatgagattttggatgttagcgtttcgtttctaaatgaccatttagaggaaacactgggttcaacaaaaatagaagaaaatcactcaaagtgtattaatctcacacgggtaagtgtttcatcctaattccgaaccatagatatgccatgacttgatcttgcaaatcatttcctatcaaatcaaagattacatgcgtgatcatggatcagtaggac

SEQ ID NO: 256639 - DNA, 451 bp, Glycine max
  unsure (1)..(451): unsure at all n locations
tgaagaggatgctntaatggatgaaaagaaagagagaatgtgggagcacgnatatgaaggaataaaagagggaaagaagtggaactttgaagtgtatctcataagactttcattcatcaaagttacaacaagtgttacacatgcttctatttacatactaggtagcttccttgagaagctttcttgagaaaacttccttgagaagcttctgtgagaaaacttccttgagaagctagagcttagctacacacacccctctaataactaagctcacctccttgagaagcttccttgagaagattcgtaaataagctagagcttagctacacacacccgctataatagctaagctcacccccatgccaaaatacatganaatataaaaaataagtccctattacaaagactactcataatgccctggaatacaaggctaaaaccctatactact

SEQ ID NO: 256640 - DNA, 417 bp, Glycine max
  unsure (1)..(417): unsure at all n locations
agctntctccccaattttctatatttaggtgtgagaagtgaagtagagaaaggttcaggcccttatgcacttctttctctctcgaaatagctgaggaaaattagttccgtgaagaaaatccaagccgaggcgcttgtgtaacgtttccgtaacgtttctgtgagtgatttcgcgaagggttttgaccgttcttcgacgttcttcattcattcttcatcgttcttcagtcttcaccgggtaagtacctcaaaccaagctgtttaattcattctatgtacccgcggtgggccatatttgnggtcatgtatttttattctcgttttcatttacttgttatacacccatttgacgtgcttaagccatttatttaagtcattttctcgcttaatctaaacataaataaatttccaccgatcg

SEQ ID NO: 256641 - DNA, 453 bp, Glycine max
  unsure (1)..(453): unsure at all n locations
tgcccagagaaggagtccactgttgaaatgcttaccacctcaaaagactggaaagcggtttctaatgactcctctgcggcctccacataaggcatagaggatgggcagctcaccaagatgtcttcttcgcctgatacgatgaccaaatgcccttccactacgaatttcaacttttggtggagtgtagagggaacaacccccactgagtggatccatgggcaccccaacagacagctgtagggggggttgatatccatttttggaaggtgacttgacaggtgtgagggcctatctgtactgggagatcgacctctcccctaacctctcggcgggtgccgtctaaggcacgaaccaccatngaacttggctttaagtgggaggcatttgaatggtaattctccaaagtgctctttggcattacgttcaaactggaaccattatcgatgagcactt

SEQ ID NO: 256642 - DNA, 229 bp, Glycine max
cctttagagagcataatatccgcaggtaatccgggagccaggaaataatacacaatcaggggaccgtcccttctatgcacacccttgagagctgccttcgccacaagccagagatggtgatattcgaagctgccatggcaattacagagctcaatggagcaactagccgagaactaacaccggcaattactggtcttcagctattcctaagcccatctaagccagtcat

SEQ ID NO: 256643 - DNA, 231 bp, Glycine max
ttaatgcgtcaacatggtgatggaattatggttgcttggcgggttgccctggtctctttcaaccaatcgttgattttgggttgacggcaacccccttccatttgtgcttgcaatatcgcgccatctgcatcatatgcttaactggatcctggtcgccctacaaactttatgggagcggcagcacctgatggtttaccgtatctggatctgtcaaacacccaggcaaaccat

SEQ ID NO: 256644 - DNA, 282 bp, Glycine max
aaaaattggtggtatatctttactaagcaatgaatgtccttactcttaaccttggtttagtatgattccaaatattaagagtgtgttcggtttcccattttgaaacaccaaacttttgttgagatgcataaatggtgaccccgcaaattgttaggattatgaaatatgggtgataactaataaatatgctaagtattttaatgatatatgtccatgaaaagtagaaatgaacaagcattctaataagttcaggacaagctcaaataggatgtcttatacaag

SEQ ID NO: 256645 - DNA, 436 bp, Glycine max
gtagcacttcaaaccgggtatatgtacctctaagacctattactttttgaagtctatcaggggttctccatccagattcaagtctaacctataaaatattttaacacacacgctctatctatgaactatgtaatacacacaactactcaattgttttcaaaatctcaattatttttcaaaattatttcaactcattgtgtgtcaagtgattaaactcgtcgggttctcaccgtggagcccatcacaaactcgtcgcgcattaacccgtcacccttaaaggatcttaaagttatgtgattgcagataactcataacttaatatgtacaacatttgaggacacaatctcattaaataataatattttctaattccaacataacaataatcgcggtcatgtcataataacactacaagagtcttaacatttgtcataat

SEQ ID NO: 256646 - DNA, 182 bp, Glycine max
tggaatatgggggggtttgttattgatacagttgtgctgatgattgggcctacttgagattgatatggaaagtggactctaataatctgtttaaagtcgacaaaaaaaatgaagaaaaaaacataattaggataatttaatggaaaaagagaatttattctttagtaaatatttattttttt

SEQ ID NO: 256647 - DNA, 475 bp, Glycine max
  unsure (1)..(475): unsure at all n locations
tgctcttgacccatcttctccttgaagtggcatctccaatctcctttccttcttttccattccactgccattgatcttcgagaagcaaaggactccattgatgaataacatccaaggcctataagctctacatggagctacatcatgtggtatcaagagcatctgcatctaagtgatggtcctttgctccctctatcttttgtttggtcaattccctttaatttcttgttcttcatcgctttctccatgtatctcctccattgtcttgtggtttggtgccatttacagtagattaaaaaaagtaatccgattaaatcttatatctacacttcttcttgcattcntatgggttacatcttatatatctactcttgaatcatgttcttgtgttgactttaggttctatcattcttcagtcataatctttctgtgctgaaccttttagatctcaattgtcttacacaatattgatcag

SEQ ID NO: 256648 - DNA, 407 bp, Glycine max
  unsure (1)..(407): unsure at all n locations
ttacaagaactgatccaaatatgtttgaatttttatcattactgaaagcaacctctgcatcagtacacttcttaaaaaccactctagcccggctgctccctctatcaaactttgtttcagattcatttagaggtccaaatcgcctaaaaatcttatttaagtgcatntttgagggaacagaatccagctcagcaaagttcaacacaagctcagccggagaattctcatctgcacaaacaaaaggcttttcatgaaccacaacaagattgctgtctgaacattgtttcctcgaataggacctacgagtataaactataataggtttttctggctcagcaggggcatgctgatagtctcttctgttgcttctccgcggcagcttttnttcagaaccactctggatgccc

SEQ ID NO: 256649 - DNA, 483 bp, Glycine max
  unsure (1)..(483): unsure at all n locations
ctaaccagctaaaagtntatatagaaaatntattaaaagatttttttgtcatatgacatatggaatattcatcaactttattaataattaattttcatcaaaaaattggattggtttcctttagttgaatttttcttctcaattatattttttcattcataagactcaaatataaaatcttatttaggcagaccaacggattaacatatcttgctggtaaaagtctaaaacaataatatcatcatatcttgtactctccaacagaagcttatgacaaaaatgaaattaccaaaggatttgtgatgaagatggcggaatccatgatacttctgtgcttgtatttgtctggctagaagatttttccctagctccaaattcttcaagacaaaatgagacttcaaattgctctaatntagcctttntagattataagaacacaaaagaanacatcaacggtcactattaattctccattaaagaatt

SEQ ID NO: 256650 - DNA, 110 bp, Glycine max
  unsure (1)..(110): unsure at all n locations
agcttgggaaagtctagtggattggccttttttatctagagaatgatgactaccttatgaagnttgaaattgcttgctcaccatcactggcggacctacactatggtgag

SEQ ID NO: 256651 - DNA, 459 bp, Glycine max
  unsure (1)..(459): unsure at all n locations
ccccttcatggtggaactntttgcatgagtattttcataatacaattctcaatgttctcgaccatgtggccacctttggagaccacctttgccttttgcactccatactaagatgtacaattaaagaaatcagattttctgtacacacatttgcattgaacatcaacacaaggtttcctcttcccaacatcatcaaagatgccctgaaaaaacaatataaaacagaaattcacgtaagagaaatagtcaaatgcagtggttaggtccagtgaagaaggcacataatatgcacacaggtatgtatatattatatcaatcactagcataattttntatggttggatggaatgaagatcatcacattctctaccacgtgacctcagtacagaatttcaaccatttggcagtttatagagatgaaaatgaacaatacagaaaatatgctctattcagattcaa

SEQ ID NO: 256652 - DNA, 403 bp, Glycine max
  unsure (1)..(403): unsure at all n locations
agctntgtgggggatacagaacaacatactttgctcatgcaggatgcactcccttccaattggtctatggcaaatcttgtcacctacttgttgagttggagcacaaaacttattgggcattgaagtttctgaattttgactcaaatgcaactagtgaaaataagaagctccaacttcatgaatgggaggaactgaggtttcaagcttatgagaattccaagatttataagcaaagagttaaaatttaccatgataaaaagctttcagaaaggaattttcagcctggtcaacaggttttgttatttaattctagattgagattgtttctaagtaagctgaaatccaagtggtctagaccattcttcatcaatgaagttatgccacttggagtggtgatattgga

SEQ ID NO: 256653 - DNA, 477 bp, Glycine max
  unsure (1)..(477): unsure at all n locations
tcttagtctcgggtgatgaagatgaatttgtggctacttcatgcactcctctaatgacaatagcattatttctggcactaaattgcttggagttggaagccatctactcaattaaatttctggcttcagcaggtgatgcaagctccattggagcttgtaggcctaggatcttcttcatcaatggattcctttgcttcttggaagatgaatggcagcggaatggagaaagggagagagagaggagacgccacttcaaggagaagatgagtctagaagaagctcaccaccataggaggccatggataagagcttggaggaagaatgagatgaatgaagggagagggagagaagagcacgaaattttgtgctctaaatgagctttgaaatctgaagtttaatattcaaatcatcaaagttgaaaaaaatgcacacacatgacctctatttatagcctaagtgtcacacanaattggaggg

SEQ ID NO: 256654 - DNA, 405 bp, Glycine max
agctttcttgagaaaacttccttgagatatttctttgaaaaaacttccttgagaagctagagcttagctacacacacccctctcataactaagctcacctccttgagaagcttccttaagaagattcctaaagaagcttgagcttagctacacatacctctctaatagctaagctcacctccttgagatgagaagatagagcttagctacacaccccctataatagctaagctcaccccatgacaaaaaacataaaaataccaaaaaaagtccttattacaaaaactactcaaaatgccccgaaatacaaggctaaaaccctacactactagaatgaccaaaatacaaggcccaaatgaaggaaatacctattctaatatttacaaagataagcaggctcatact

SEQ ID NO: 256655 - DNA, 464 bp, Glycine max
actcagcttgcattgaatacttatgaagcgatgggaaacttttttctgtaggattgggattaattaggctacaaggccattagaaaatagtagaaaatatataccaggcaaacgttttcatatatcttttcatttaagtcatattatattattcaattaatgtagttaattgtttgagcatgcttttccaaaaaaaaatagtgtaacaaagcaaactaatgcatttttttcttagcttggacatgttgatttggattctagcacgtgatattaacttggcttcaaataggaattatgaaagtggatatatattctttattaaggttaatatattggataaaatgacaaatagacttgatatgattcttaatgaattaaggctaatattcccgatgggaattcacaaacatcagtggctttattcattgattatcatctagggttttgcatcgtgatcaccacat

SEQ ID NO: 256656 - DNA, 386 bp, Glycine max
agcatgcaagccgacctgaggaaaaagtgccatgttttcataaccatgaacctgatgaaaaccctgagcaactagcttggttttgaacttgtcgatagaaccatcaggattttcttttaccatgaaaacccatttgcacctaatagcttgtctattaagaggaggggaactgagttccaagttctattttttagcaaagcataacactcctcttgcatagctgcaaaccagatgaattatccgggcttgttaatagtcttgggttcagaatgaccaaggaacaatgaaggatgtagtctaggattatgaatttcagacttggacctagttcgcatacgatgagtattaacaggaattgaagttggcgctgggacacacttactatg

SEQ ID NO: 256657 - DNA, 383 bp, Glycine max
  unsure (1)..(383): unsure at all n locations
tctagatgggataccatgctacagctgctccggncaatctgttttgataganatggaccaataactttgcgttcgcagaatacgcccccatctttcggcaatacatncgaagatgccctttcggacatgtcgtccctttgtacttatcaaagtccggtactttgaacttaggaggaatgatgatattgggtacgagacataggtccgctagatccgagaatgggtaattgccgaggccctcgactgctctcaacctctcctcaagcgcctcaatcttttccttatcttccacgaagggaacagattcttttacgggtgtgggtgaagtcgggatatggcggactatgtttggttggggtaattcatggcgggacggatctttg

SEQ ID NO: 256658 - DNA, 413 bp, Glycine max
  unsure (1)..(413): unsure at all n locations
agctntcttcaagtactttatgtggatatttgttttccaatgagtattagtcaggaacctcatgaattgactaacaaaacttactgggaaggaaatatccggcctagtgattcaaagataattaagcttctccacctttcgtttgcatctcagtggatcagagaatggaactccatcaacagtcagcttaaaccctgggtccatatggatccccttcttcgagtacataacctcaatacctaaaaagtacttcaagacccccaagtctttagtctgaaactgagtttgaagaaaactcttcaagttgccagtacctttattatcacttcttgtaatcacaatatcatcaacatacaccacaagtaagatgctgccaaggttagtatttttataaaatacagtatgatcacttt

SEQ ID NO: 256659 - DNA, 563 bp, Glycine max
  unsure (1)..(563): unsure at all n locations
tccccactcctttttnncttatcctcttcgcaatccctcttccccaagacgggcnnatgtgactcgtagactacgcgaatatgaaactcagctcataactcaaggatgtattgctgggagaatatatatcttgcctaatagagggctagtccatagaggagatcaagcaatgatttctaaataactcttaaaatggattcagttcttcctttgtttgaagcatggcattcttctttttaagattgaaaacttctcacttatcttttttcctagatctaaattagatattctctgagagaagggacttcccaccatctgaagctatatagtagtttacaaaaatataatttattcataaaagagaacaaagaaataaaaaaacagagaggaaattttagttcatgaggaaataaaaaaacacacttaagagatttaagcacctttcgctcagaccaacacatgttggtacctcatgaggaaatatagtctactcttcaatcttcattgatgaagcgctcaaatagatccactcattcactaaataggactcttgctatagaaat

SEQ ID NO: 256660 - DNA, 348 bp, Glycine max
  unsure (1)..(348): unsure at all n locations
gggaccatgcgtagtangagccaccattggcaccgtaaactttcttgggcaactgaggagaaagatcaatgtccatgttgttcttttggcttgtattcactgcgtaaaaacaccgcgggtggggtgggtatttataaagttaagtgtaacagaaaaggaggagtggcagtggcacttaaaggtaacagtcatcatccacgggaccactactagtccttatcccattctcatctacaatcaatgcagctaggtaggtaattcgaatcattttcttttcaactaactgttaaattcagattatggataattataaattacagaaatgattctagtacttttctttgtatg

SEQ ID NO: 256661 - DNA, 476 bp, Glycine max
acacttaaatactcaagcttgccgagaaaaaaattacataaaaatattactgaatgcttgaatattaattacgcgtaaaactgaagttctaccatataacagctccaatgcatgcatgtcgttgtagtagtagtagtttaattttgactttggtggatcatacaaattacctaagtcttgggaatgttactactatataggaataaaattgaaaggaggttaaatgattccttggctcattaaagaggtaggttgacaaatctgcgatgcataaacacgtaccacaaatgatgatggtctcttcttattcccaccaaaaagagattatttttaagatttgtatctgtgacattcaaattataactacaagtaatttaccattacaaaagggttcatcgtcaattattgaaaaataaattagtaaaacaatatttttccctataattcttcatactttctggtttaaaaaaataaaa

SEQ ID NO: 256662 - DNA, 402 bp, Glycine max
ttgatgtttggggtgaatgcataaaatgttaacaaaccaaaagccagaaattatgtgcatatagagcttcaaacgtcttggaattgatacatacaaacatttgtgggccattttatacaccttcatggaatggtcaacaatattttatatcattcatatattattactccagatatgcatacctatttcttatacatgaaaagtcacaatctctggatgtgttcaaaacatttaaagttgaagttgaaaatcaactcaacaaaagaatcaagtgttagatctgactgtggtggtgaatactatggcagatataacagttcaggtgaacaacgtccgggaccttttgctaggtacctaaaggaatgtggaatcgtcccacagtacaccatgtcggggtcacct

SEQ ID NO: 256663 - DNA, 434 bp, Glycine max
  unsure (1)..(434): unsure at all n locations
tctggnactcaattaatatattatctattnttgctgtatcaaaaaaattcttcaaaccccccaccccaaccccccttgcttccacaagtgctgctctacacattntatcaactaaatggtgtcataataggaaacatgtaatataaagttcatgcaaatacatcactataaagtagtactcaggtgcaaaactacaacatccttcacactatggataattatgaccaaaatggaaagacaagcaaattcagttgaaaattatatctagagaactagagtgcaaagattatcatattttttaaattcttggtaggatgaggattaaggattgtcaaactattagcctggtgtcaagatattgactaagatcttatctggttggttgagtgagggttcaggagatactactttatcaatgcatggcaattatattc

SEQ ID NO: 256664 - DNA, 345 bp, Glycine max
  unsure (1)..(345): unsure at all n locations
ttttaatcaccctgaattctgaagatccncaaaagtgcaattaaccatattattagcacaaaatcggaaacttatagttgcagctataagcctatgacataatatttctaatactgccttttgtttgaaaagtttgagttgaatctgttattaagggatttgggctaaatacacggtattttatatcaaatatgttagttgaaatgtaagggaaaaaaggccaatatttagcatctgcagttcattgaagaatatgtgcttgaagatggttcatagctatccaaatcatgtctcgagttctcatatttttcaagtgttaaaataattttatggcttatttcttta

SEQ ID NO: 256665 - DNA, 470 bp, Glycine max
ggcgagtgaatttacataatgtgaaatatatattccgtttttgtattttttaccaaacaataatctttgataggttttggtagcattagaatctgaaccacccgaccacgatctctctttgcctcccttctctctttttttatatatcctactttcttttattatcaagtgaattgtataactctaaatatttaataaacataacttattaacataatactcgcgactaaaatggtgataattaaatatcttatttttatttatacatttaataataaactaatatattgataaaaaataatatatatatatatatatatatatatatattaaataatataaacgtatcaaagtttatagaaatgcgcataatatttataagttgaatttattagcacatattgagaagggaaagaacatttacattctcatctcattatacatttttcgtggaagataatactcgcata

SEQ ID NO: 256666 - DNA, 287 bp, Glycine max
atgacttctttgcggcttccacataagaatagagatgggcagctcccaagatgtcttcttgcctgatccaagaccagatgcccttccactcgaatttaacttttggggagtgttgagggacaactcctactgatggtccaccggcccccaacagaagctgtggggggtaatatccttattggaagaactgacagtgtgagggctattgactggagacgactctccctaacttcggggtgccgcaagcacaacccttgacttgttaagggagcttgaggaatttcaag

SEQ ID NO: 256667 - DNA, 250 bp, Glycine max
  unsure (1)..(250): unsure at all n locations
tactaagcttcagccaatggactaccttgaataattcctttgaagctccntgtaccttgttcccttccttgattgaagctactacaagccttaaggaaaaaccatgatatcaccatatccttaaggaattttggagctttggaattgttttgggaataagtgtggggggggggggggagaatgacaccgaaactctactataagattgttagatgctcccttgtggcctcttagaacacaaataatttct

SEQ ID NO: 256668 - DNA, 408 bp, Glycine max
  unsure (1)..(408): unsure at all n locations
agcttatttcattntaataaacacagggagattctttgtaactattnctgaaactgcatggatcttgcccttaaaatattaagtttgtattataaaagaattgtaaataactgtgggttatcggcacaaaccattagatccaaactgccccctctatttgaaacctaaagcctccatattcgtgaatatacattatattttataccaaacaaccaaaacccacccatattattatatgggttagagaaacatcatgaatcacgaatatttttttttggtaggcaatgaattacgaatatattagattgaaattgatatttaaaatatagaatgacccaaatatcaaactaagatttcaatcgttttccgacttctaaagtttaatcgcaaaaatatgattgcgtctat

SEQ ID NO: 256669 - DNA, 478 bp, Glycine max
  unsure (1)..(478): unsure at all n locations
ctaagcttctgccctcaaacttctatgggtcttaaacctatgtgttttgattgactttgatttattcaatagataatagtgctaacaacctctgcccaaaaggactttggcaattcaacatggtttaacatgcacctgacttgctccaatatggttctattgaactgttccactaagccattttgatgtggtgtccctctcacaattaagtgtctagcaatgtcattctctttgcaaagagttttgaacatttcatcataaaattcaagcccattacttgtccctagtttcttcaacttccttcctgtttgagtttcaactagaactttccattcttcaaacactttgaatgcttcattnttgtgtttcagaaaatggacccagaccttttgagagaagtcatctaataataaaagaaaatacctcgcccctccgtgtgactcaattctggatggtccncatacgtcagcatgcacat

SEQ ID NO: 256670 - DNA, 417 bp, Glycine max
  unsure (1)..(417): unsure at all n locations
agctttttcaaagtcaactttgaagatctgcttttttatntttgcanttggcttcagctaagacttcattagcaatcatcacaccatggagaatataacttcctttgagaaaggcagtttgcctttcatcaataatgtgaggcaaaacaagggtcagcctattagcaaggactttagatactattttataaacacaccctataagagagatgggtcgataatcattaagagattgtgggttattggtcttggggataagggctatgaaggatgcattgcttcctttggggaatgtgccatttatgaagaactcgtccataaacctgataaaatcaggttttaaaatatcccaaaactgtttaataaagttgaagtttaacccatccgggccagggcttttatcaccaccacaagccc

SEQ ID NO: 256671 - DNA, 485 bp, Glycine max
  unsure (1)..(485): unsure at all n locations
gctggaggtagtcatacctcacaaaatatatatatgtatgtttatgtatcaagataccttggatatgtatgtatgtggcaaaaaatacctcacaatatatatatgtatgtttaggtagcaagataccttggatatgcatgcatgtggcaaagaatacctcacaatatatatatatatatatgtatgtttaggtagcaagataccttggatatgcatgtaagtggcaaaacatacctcacaatatatatatgtatgtttagatagcaagataccttggatatgcatatatatagcaaaaatacctcacaaaaatatacacatgtttaggtagcaaaatacctcatgaaaaanaaagaagaananaaaacaagaaaaaaatatatctttcgggtgaaaagcccacatgcttttgaanagaattaacttccagcttttcttttgaaaagattcaccgatcaaaacanagggttctgttgaaaatgtgt

SEQ ID NO: 256672 - DNA, 420 bp, Glycine max
agcttgatgaatcaaaggctcatgaacactataaatctgtcttgtaagaaaaaaaactgaacccctttccctcattgttgaacttgtgaaaatggaggaatgaaggcttcaaattcttttttctcacaatgaacaagaagataaggcataggcttcaacgtgacaatgcttattgacacgggaatggccattttgaatgtgtcacttcatgccacaaatgggtagttattccttttacaaaactaccaaaaatggaagggataagatttaccaaaaaaggatatttttgctttttaccaaaactagcaaatcttatctaaatcgcctaggttattgtgctaatctcctttgaaatacatgtacccagagtgaatctcacacaaagatcactctcacacagttaaattaaactaccgctca

SEQ ID NO: 256673 - DNA, 450 bp, Glycine max
actaagctgggataaacaatggatcatctaaatacatctctttgttataactactttttcaggggaccagatcctatagcctttcaccccatcaccataacccatgaacaaaccctttttgactaggtaccagctttccttattgacatgataataagcattgcgcaaatactcttaggtttgagtagtttgttgttttgccattccagatttcaataggaagtttaagttctatagttgtagaggtgttctattgatcagaaaacaagttgtattgatagcttctccccaaaaacttctgttgagaccagcattagacaatagacatcttgttctttccaagagtgttatgttcattcattcagcaactccatcttgctaaggagtattcctaacagtaagttgtctagcaatatcttcatctctgcagaatttgtaaattctattgac

SEQ ID NO: 256674 - DNA, 424 bp, Glycine max
acctgcggcatgcaagctctgctatgatgcacgtgtgacttgttagttttgtggcggctgctaaggatagcagtgtagttgatactctttcatttagcatactggcatctcattgagtgtggcatccccgccaacaaagatttccttactatcatcgttcgaggtatgtatgtgattctcacacttatgtgcttaagtattatacgcaatggttgacatgttactattctttagtagcacattgtaattcattgagcgagccatacttccctgtctgagattgaatacaccgattaatacggacagcttggattaattgttgtattcaatcttgaattgtccgtttggacaatttgagaagacatattgcctctacttcattttgacttataagttaagcatgttgtgttttttttactaaatt

SEQ ID NO: 256675 - DNA, 421 bp, Glycine max
  unsure (1)..(421): unsure at all n locations
ccctcggaagcgaanagagaagaacggaacaccccaatcaaagaacagaaaagaaggaaaattccccaaccaaagagcgggagaaagcaaaaagaacagaaagaaaactcccaaccaaagaatgggagaaacgcaaaaggaagaagaagaaggaaagacagctcctgatcagggatcgaaggataacagaagaaatgtgcagaaagggctttggaccggacaatatctgaacaatacagaattgtcaccaaacgaacaaaaagaaggaaaggaaaccacgacctanaatgggcttctccctntgattacccaaccaaaacccgcgcgctagcgactatttcgccccgcactaaaccaaanaacagaagaagaaaaagccaacanacaaatcacaagcccaaaacacacaaaagccgaaaaa

SEQ ID NO: 256676 - DNA, 347 bp, Glycine max
  unsure (1)..(347): unsure at all n locations
agctttgagcctattcaaccgagaataacttttgtattttttggccaaccgcgcgcgcgcgtgaatttggaggctctaattacaaaacagacgctgttctagaagggaagtgaccatgacctttgactcggatgtcggggtgacacccggatttattgagatgctcgtaaaagactaccatagcgttttgcataatcgaaccactataactatagcctagcttgagagaatgggtccgttnaacctagacactctttatattaaaatctcaaattatttacatgcaccattatattttttttacttacacgggagcaccttggtgtgcgatctattatgaacaagct

SEQ ID NO: 256677 - DNA, 356 bp, Glycine max
ctgccaatgtgcttaaatccttcacagatcgtctatagacacttgctgagccatgaaaactccacacctcggtcacagacttaggagtaggccatccatgaatagccctagccctctactgatcaacttgcgctcctcttgaactcacaacataaccaagaaacacaccatggctagtccaaaagatgcattctataagatcggcatacaacagatcttgtctaagcacagtcaagacagattttaaatgatcaatatgcacctcaagtgacgtgctatagataataatatcatccaagtacaccacaacaaactttcctatgaactctctcaagatatggttcattaatctcatg

SEQ ID NO: 256678 - DNA, 412 bp, Glycine max
  unsure (1)..(412): unsure at all n locations
agcttgtaggattatggggtacccatcacatgtgttactaggnggcggncgggcgatggtgcacaacaagttttccacatccacaaagcgcgcataaacccaccatccccctgttgcccacctccaactgagctcacgtactcccacgtagcccatatcctcgtttctctcaacaccgggtccccatcaatcctcccaagcttccacaacatccaagtaaaacaacattcaaacagcacaagctatcacagccaagcaaaacagagcaaaggcagaaaactctgctcaaacaccaaccaaaatcacagcttttctcacttaaagaccccagtaacaattccttcgatccaattcgttaaccgttggatcgactccaaaattttactggaagtttatagtacataagcctaca

SEQ ID NO: 256679 - DNA, 430 bp, Glycine max
ctcagcttctcaagaagcccgaggaagcttctggaggaagcctcttattgaagcttctagagaaagctacatgaagctgcctcagtaaaaacactgcccagccatcgttaaccgttggagcttctcgaaatttggtcagcaacttcaccagacacttgtccatgatctgaccgttgggatcgctaagaagatgtctagagtatgctagaatcttccgttcccgagagcatctcttatttaagcactccagccttagctttcatgtagcttaggaaaaacgtcatttcttcttctttctttcttccaaagccatttctaaagttccaagcactttttccatcacccacagccaccattagccaccacaaaccatcattgttctccattgaaaacccacaccgagaggaacccttcaaccgaagtggaatct

SEQ ID NO: 256680 - DNA, 414 bp, Glycine max
  unsure (1)..(414): unsure at all n locations
agcttatgcacgaaaaatgtaattatgaaattgtttattcttctaaaaacaccatntcctagttaaccatgcattaggtaccatgttcaattattttgtttttaagtgaaacgggtttatgatcccaacatggttggctcgtggtgcctaacacatgaaactaagaatgtagtgtgaagtttcacgcttcccccttttttgtttttgttttgtagaggaaaacgcaaggatgagcaaacatgaaaacaaatggtatgcaattttgcagatcaaaaagtttgttgaacgcatatgcatgatgatgccatgactcatgcaaaatgtgaggctggaatatgataacagacaaatgcaggatatgtccattatgattgtatgaagagatgcttatgcgatgcatgatatgaatgcatt

SEQ ID NO: 256681 - DNA, 365 bp, Glycine max
cttattactaactattctgaattctttagttcctgaatgtacaaccttcacattgttgctcattcccctctttcttttctgcgaaaaagaaaatcaatatcaaagaaaacatggatgaagtcctaaggatgccatgtacatgtgtatttctgaagatatagtatttatattccatcaagcatacattgactgttgattacatgtaatagactctttataacatggttgccccaaatcacaattaaaaagcacaactaccaatctttcagagtcctttgggtaattcgtcttgtctccttatgtggcagggttttgtttaataatattatacttttgccttccacaacacaacttatgaccgagca

SEQ ID NO: 256682 - DNA, 393 bp, Glycine max
  unsure (1)..(393): unsure at all n locations
ttaagcgaccgcggcagcagctttttgaaaaagcctttttaacttattttgncaccaccccttctcataggtaagctacctccttggaagcttcttaagaagatcctaaaaaagctagagcttagctcacatacctctctaatagctaagctcacctctttgagatgagaagctagaacttagctacacaccccctataatagctaagctcacccccatgacaaaacatgaaaatacaaaaaaaagtccttactacaaagactactcaaaatgccccgaaataccaggctaaagccctatactactagaatggcccaaaatactaggctcaaacgaaggagaaacctattttatatttacaaagataagcgggctcatacttacccatggact

SEQ ID NO: 256683 - DNA, 319 bp, Glycine max
aaagcttctcaaggaagctacctagtctataaatagaagcatgttgaacacttgttgtaactctgatgaatgacagtcttgtgagacatactctcaaagcccacttccatacctcttttactccctcaatttcgtgctcccccctctctctttctctccctctttcttttcctccattgaagcatcctctccaaggttcttatccaaggctcatcttggtggtgaagctccttcttccatggcttattccttaatggagggcgcctcctctcacctattttcccttggcttccgctgcatctccctggtggaaaatcac

SEQ ID NO: 256684 - DNA, 352 bp, Glycine max
atggacttttttgggtactgatatggctgggcaagtcaccagtggtctttgcttcattcactctaaatcttttttttttttaaataaagatcacgtttttattcaatatatttttagtttttcaaaaagaatgcaaaaccttgctaactagttcctccaaacacaacactctaaatatatgttttttttaatatatggttttggatctgacgcataagcttttcattatataatttgtcttcggggcagctaatgaggtttgagagaagctggctgtggtcggtttcaacacaaacatgaatagctacttgcaacacagcttcatatgccattaacgagagcagctaacacc

SEQ ID NO: 256685 - DNA, 426 bp, Glycine max
taagctcattcaaatgcacaaggctcttaatatttgtagagtattcttgtggaaccttcacccgacgaagacactgacaaaaacttatcttctccttcttggacaaagtatggcaggctgggggcaagtaaattttcttcccatcagaccttggatgcaactgtgatcgtatgcccatatcagctagatcttgatgggtattcaagccatccttcatcctaccttgaatgttaaggagcgtcccaatcacactgtcacaaactattttctccacatgcataacatcaatacaatgtctaacgtcaagatcagaccagtacggaagatcaaagaaaatggacctcttcttccatatgcaactcttacttttatccttcttttgggtcttctcaaatacaatattcacgtgttgaacccgctgatata

SEQ ID NO: 256686 - DNA, 416 bp, Glycine max
gctttgcggatttgccttcgcggcgaattatttttattggtctaaaaagagcaaatctgatcatcctgctttgaaaaatgcaaaaaaaactggggcaaataaagaggatgagaaggagggagaaacccatgctgtgactgccattcctatatggccaagtttcccaccaacccaacaatgtcattactcagccaataacaacccttctccttacccaccacccagttatccacaaaggccatccctaaatcaaccacaaaacccacctaccacacaaccaatgctaaacaccacctttagcacaaaccaaaacaccattgaaggaaggaatattgcaacgaaaaagcctattgaattcaccctaatttcggtgtcctatgatgacttgctcccatatccacttgataattcaatgg

SEQ ID NO: 256687 - DNA, 479 bp, Glycine max
tctagccaaatggacttatcttgaattaattcctttgatattctttttgagccttgtttccctttccttgttttgaagctcactacaagccttaagtgaaaaaccatgatatcaccatatccttaaggaattttggagctttggaattgttttgggaataagcgtggggggtttttgtttcattggataacatgttttgttggctatgcttcatgatgtattttgggccatacttgatgtacattgtatattggttaaatgttggacatgctgaatgagatgttgtttctcaaaggctacagagcaaaaaaaaatcgaaaaagagaaagaaaagcaataaagttgagtgaataaaatcttatatggcaaaagaatgatgagactctcggttctactctttatgtttaaatattatctttagatctttttattattttcattcttttcttaatatgcacttattccccattgctcctcta

SEQ ID NO: 256688 - DNA, 351 bp, Glycine max
  unsure (1)..(351): unsure at all n locations
attatgcattgagtcgtagtgtaaattgttcctatgtataatgccctganattttgataactgaaaatagatatttaatgttattcttgaattatttgattaattcaaatgagttgaggtggtgtgggaattatcaatgtgtgattgcttggtgtggatgttaggatacgtggaatttgtttgacctgtgttggatatgtgagaggtcaagtttgacagaaaaacaggttttggtaaaaccatgatctcgcattcattaaccattggatcgcccttgaacttaaactataggtttgtgactcacgtctgcgcgttttgaccattggaatttgccaagcacgctaatcgcaa

SEQ ID NO: 256689 - DNA, 335 bp, Glycine max
tgcatggcataatagaagcatgcaatgtatttaggttgaaaactaattggtggaagccaaagggaagaacattatgatgtcatctagacaaggttcatatatctgtttactttgtcttttcttaatttctttccttgtattgttttccatgttaatattgtatttaaattgcataataaaggaaatgggtttgcctgttaagctatatgagtggtaccttgatctaaggcggtatggaatagtgaaaatgccaaatttggccttggatttgaaaggatgattctctttgccactggcttggaacatattagacatatgattcccttctcatgata

SEQ ID NO: 256690 - DNA, 366 bp, Glycine max
  unsure (1)..(366): unsure at all n locations
ctgcaagcttgtcaaagtaaggcttgaagggtttttttgttttgttatggcgnccaacagggaaacattgaaaacatggtgaatcttggaggattcaataagcatgagccattaggaaaataagggccaataagttttgtgacctggtgaccttcctctaaacgcatatataattgattgtggcaggtcgactgagtttgtgatgagggcggagaccaatgttcaccccaccattgacgaagaagtgaacatctcagtggtaagcgcccaccaaattattcataaaagctttgaccttttgttaatggcgacatacaatagcatgaatattgtggggtgtaaccaacaagtcatcaactacttctg

SEQ ID NO: 256691 - DNA, 378 bp, Glycine max
ttgagccaaaatcctaactcaccataaaccttgacccaggatgatatatgtcaatccttaccctcggaagcagagaagaagagaaggaaaatttccaactccagaaaaaaagaagagaaggaaaatctccaatcaaagagaaagcaaaaaaaagagagaaggaatatttccaatcaaagaaaaaaaagagaaggaaaatttccaatcaaagagaaagcaaaaaaaagagagaaggaaaatttccaatcaaaggaaaaaagagaggaaaggaaattcccaatcaaagagtgggagaaagcgaaaagaaaagaaagaaaattcccaaccaaagagtgggagaaagtcaaaggaaggaaagaaagctcctgatcaaggatc

SEQ ID NO: 256692 - DNA, 296 bp, Glycine max
tggcttattccctagtggatggtacctgcgcttacctcttctcctttgtcttccgctgcatctccatggtaaaaaatcaccattaaaggacctcattgaagctcaaagatccaccctccatagaagccccacaagtatacttccatcataagtgcactgaccttgtcggatggcccacacatgggtgacaagtgtggttaaagaatctaactatttctgaggggatccttatgcgctttaattgctccatggtctttgccactgctttcgcccttgtccatagctcatttgacata

SEQ ID NO: 256693 - DNA, 273 bp, Glycine max
gatgccccacacgatatccatgacacaaatgcaaaaatgatgatctggaaacttcatgcaaaactggccatgcatgcacctatgaggacgctcaagagacaaattctagggtcatgtgatgctaaggctcacgattcatgtcctccattctaaaccaacccaacgcttccaaaacatgtgctattatcaatttgtgcattcatccgacgccattacgggcagccggcgaaactacacagcactcacccttcaggtgagacacatatttcaaaa

SEQ ID NO: 256694 - DNA, 414 bp, Glycine max
agcttcagtgttagcgacaaaaggaatttgcttttacctaacctcttgaaatttcattttgcctctattatgtttgaattgctaacatttaaatttaagataaggacataaagaatggaatgaacaaaggatattcctcttgggtcacttcctcaaaaagaagatacaaatgcagctgtttgtactttttttgttgttgtctgactctgctattcctctctctaaccaaagcatgccatgttgctctatgcctagatgtgagacaacggtcatatcaagaaagcgagcatggatcccacaacggatacttcactaaagtctatataaataaagactcaagttataaagtgaagtaaagaaatgaaatatgaagtgaaacctcaaagtgaaagatttgttttctacaagtcattg

SEQ ID NO: 256695 - DNA, 477 bp, Glycine max
  unsure (1)..(477): unsure at all n locations
tcaagctntagtcttcatgttatccatattgctctccttatctctaacaagcttgatacaaccactaggttgagcaatgactaattcccaatcatctaatagatggatatataatctcaacacttagtcttttcttccaaggtattcaaagctttttataataaaaaaatcaaataagagcacgtaaattcatgtccatgtcttcaaagcttttggtatttctcaagtgtttgttgtctataaacggatagatttcttcacttgagctcgcatttgaagattgtggtcgttggagcatttaatgcttacattaaatgtatgtactccttcatgctggaaaatcactcttgtgtgatttcgtgcttatcactntagcatanaactacttgctttaagtcagaccagatctatcactagcagtgcatgtcttttgatgaatgttggcaacttctaaatcttgaacttcatttattcttc

SEQ ID NO: 256696 - DNA, 332 bp, Glycine max
aaaaaacgcgcaggagaagaaaaaaatcaataacgaataccaatcagggcctaaaggtggggagggataatccctaggtaaaaccctgcacagcttaaaaaaaaaagtcgaacgggactataaaagttatgaatcacattcatagctgccaacggacgagacaaataaaacaaccaatctatgcgcatagaggaacgcctctttttccttttacaactttaaaaaataaattaaccgataccaagaattaatttgttatattacccaccgatatatcactcgagctctgaatcagacatcagcttaagcacgaaaaaatcaacaaatggagc

SEQ ID NO: 256697 - DNA, 449 bp, Glycine max
  unsure (1)..(449): unsure at all n locations
tgatgtcattcaaaacacactatgtcgacctatatgaattttattatatgcattgnttatgcaattgtattcattatgcgatataatttgttgtaacccgttactaaccaattaatattattaagtactcgtttggttaagcaagaaaattgttggcccaacaaaaatcatttacgcgtgcagcatacattattgtcataattgacaacacataatgacatgcatgcgtattatagttagaccgcgacaacacattggctgacttgactacacattctgaaggaaacataatcacgaaacatgttcacgcgtgtctatttttcttgaaacaaagttaagcaatcgctcggtcacaaccatctatatatatgacagacacggctaataaatcacacattatcttatnttccaatagtcctcccgtcgatacacacagtatgacattttta

SEQ ID NO: 256698 - DNA, 406 bp, Glycine max
  unsure (1)..(406): unsure at all n locations
agctttcttgagaaaactatcttgagaagctatatcttanctacccacacccctcttataactaagctcacctccttgagaagcttccttaaaaagaatcctaaagaagctagaggttagctacacccacatctctaatagctaagctcacctccttgagatgagatgctaaagcttaactacacattccctataatagctaagcttacccccataacaaaatacatgaaaatacaaaaaattccatactacaaagactactcaaaatacctcgaaatacaaggcaaataccctataatactagaatggccaaaatacaaggcccaaacgaaggaaaaacctattctaatatntacaaagataagcgggctcatacttagcccatgggctcgaaatctaccctaag

SEQ ID NO: 256699 - DNA, 293 bp, Glycine max
atgatcacgaacctttgttcgtggagcagaatgatagtagtagagtacaagaagtgagattcttttgtggagcccgtgagctgacgtgatgacgctgggattattttgggagagagttgtgttttgttaatcaactccgcaactggttacataattctttctgttgaattgaggatgtaaatcacaaatttaattatatgtatgaacaaatttactttccattatgtgaatgatatgtactgacgtaccatatatatatatatatatatatatatatatatatatatatatat

SEQ ID NO: 256700 - DNA, 412 bp, Glycine max
agcatgcaacttgcagttgcggagggggtacaaatatttttctttgcctttcgagtcaaacacgggatatatgggcagaatcatgaacacactaatcccattaattataagtaaaagcatcaaatgataaatactaacaattacgtgactaaagcaaacggcctaatttagaaacatgaaaagtagctgtcatcacttccgccaaaatagtttggatcctattctgtagtaaccgtaagctcaaataactggctagctttttccttgtctagaaaaaattacattagaaaaaagcaactgatatcgactgagcatcttacacatcttgaaatttactatgaatacatagtctgaagtaggtacgttatgttaaaaagagatcatgcaagagaagcgctttggctggaattac

SEQ ID NO: 256701 - DNA, 478 bp, Glycine max
  unsure (1)..(478): unsure at all n locations
cgatattattggattngcaagttagaatacgaatgacgtattagttattctcgatcttaacgataaaccttctttttttgtgtgtgtgtatacagaatcacagcactgatattagaatctattatctttatcttatgctagtatatataaattatccagagcttccattactaggccagttggcaagtgtcttatttatttatctaaataagcttaattaataactatcttaataatntatattaaatatttttaaaatgttctaaaattcgtttgaaacctatctagatataaattaattattaattaaggaagacttacttatgccatgttgatgttcatgaatgaacttacagacttcacatatatcacgtagcaggctttatactaattaatagcccattcttctaaatcgatgatggcaaacgcatagataatttctactagtatcccatanatcatccacggtagacacgtt

SEQ ID NO: 256702 - DNA, 476 bp, Glycine max
  unsure (1)..(476): unsure at all n locations
tatccatgcctccttagtggatgttgcatcaaanatcttctctttctctccatcatctaatccttgatagatgaggaagagagctttcttgtctctctttcttgaatccttaaaagtctatttttgtgcttggggtagtgaagtcactactagaaaataaggttttaacattggttatttaggactttcaagatcggttattaacaaatgttgaaagtaccgacgttgaaagtattaacgttaacatcagtttttgaaaactgatgttaacgtaaaataacaacatcagttatttaaataaccaatgttatataataagaattacaaaaaaaaggtatatatgttcataccaacgttgacagttaacatcgatttttcatcaaaaccgatgttaacttccaaacgttaacacgttaacanntcggttttttaaaaactgatgttaagttacaaacgttaacatttggtttcttaaa

SEQ ID NO: 256703 - DNA, 413 bp, Glycine max
  unsure (1)..(413): unsure at all n locations
agcttgaaattgcattcgggcacctattntgaatcttctatgctgnctctacatatataaaacagtcccaccatcccaattttgcaaaatcatattcatatatcattgggggcatttcaccgagcacttggagggcacacgtttggacacaaattgcaagagaatggggacaatgtggcatgccccattgcttcagaatacaacataggcctaatgccttctcacacaaaccctcaactcaacaaaacaagcatggattcagatgtgaattgcttcatgaattttgcaaaaaatgagcaactaaagcaccaaaacacatcaatggagagccaaataaccaagggaaattgcacttacttgtggggagtgaattaaagcgtgaaaagggaagcaaaaactcaacaatggaagct

SEQ ID NO: 256704 - DNA, 486 bp, Glycine max
ctagcaagtttccttcttagttgtgagggctagcatcaatcttatgtcttattatgttcgttagggccaaagccaccaccccaacctccgtagccaccacgcccaccaccatagccaccacgccagccaccatagccaccacgcccaccaccatagccaccacgccagcctccatagccaccacgccaaccaccaccacgccaaccaccatagtcgccatagccaccacgccaatatttgctttcatctaccccatttgcactacgcttccctacataaaaaaacaaagaagaagagaaaaacaataacaattattaagtaacgactaacataatttgcgctaggcatccttcttaatgcttaatcaaaatgcttatacaattagttcacagggaaattatacagtgagttattattccatatagacttattaatcatagaatgactcgatatggagcattcttccaacttgaaaatatcggtata

SEQ ID NO: 256705 - DNA, 419 bp, Glycine max
  unsure (1)..(419): unsure at all n locations
agcttgcttcaacttccattttcacaggtcctttttataatatagntgngataccactttgtcggttttatggaagaaaagaaaaataaattagaggagcaaacccgagaggaatgcgttgaatatttgaaaaaggaatggaatgatcaattttattcattagcaccagtacatttataataattcaaataaaatagaaaactatcatgttaccaagattttagcaatccgtggataacaacctaacttgctcctaaagtgtaggaaccacttattaactaaaacaaaaactaaaaaaatagaagataaagataaaagagccccataatgcaatccaaaagcagataattaacaaaggacctctatggcttgttgttttactgagagagatatgctcttcttatgtcaattatttatgg

SEQ ID NO: 256706 - DNA, 412 bp, Glycine max
gcctttagcagatgtcactctactccaagtgtttgaaggatatgttgtattatgaaacacaagtatattaaccaagaaaacatcatggtggaaggaaattgtagtgctgtgattcaaaagatccttccacccaagcacaaagatcctgggagtgtaaccattccttgttcaattggagaagtcactgtgggaaaggctcttattgatctacgagccagtattaacttaatgtcactcttcatgtgcagaaggttgggagagttggagatcatgcccactaagatgactttacaacttgctgaccgctccattaccagaccatatggagtaattgaagatgtgctggtcacagtgaaacattttatcttcctggaagacttcgtggtaatgaatatctatgaagatactaaca

SEQ ID NO: 256707 - DNA, 184 bp, Glycine max
aaaaattgtggtgtgcctgcaactcctgtacacaaatcactacctgctttttaattcagattaagcttacttactatacagactttcaaaaatgttacgcttttgctagcttacttggattaagttttcacagcctgcctaatttgaaacccttatttgggacctcacaacatctttcttacgt

SEQ ID NO: 256708 - DNA, 469 bp, Glycine max
actaagctgctaacgaaagcggtgcagctatctcccacagagctctctatgatgtggaggttgagccatgctctcagtatgaaaattagtagaggaatgctcaaaatcagaatactcagaatcaccctcaacaaaatgctcagaatggccaaaatgctcaaaatgcacagaatgaccaggatgcacactatatctaactaatctatgacaggctctatctatctcaggatcaaagggttataaatcacctggattgcccctagtcatgaactatatgtagcaaataatgtgtttctcaacaagcacctaacaagggggtaaaactacagctatactcaaacgatatcaaaatgagctgaaattgtgtgaggaacactcctaaatcatgaaaagatagcacacacaacttcacattctaactatgataactacctaagcacagtgtagaatagaggaaaaaatacttgaa

SEQ ID NO: 256709 - DNA, 365 bp, Glycine max
ttatgatgcaagctcaaaaggctacaatttgttcaattcaaacgatggaaagacaattgtgagccgagatgtccagttctatgataaaggcacatggaattgggaggagaaagaagacacttattattttttcccgtactttgaagaaatagatgaagaagccctgactccaaatgatttaactccagcactttcaccaactccttcaaccaatgaagccttatcatcttccgaagggagttcaagtgaaagaccatgaagaatgagaaatattcatgaattatatgatgaaactgaagttataaatgatctgttttgtctttttgttgacagcgaacccttaaactttgatgaagcaatgaaag

SEQ ID NO: 256710 - DNA, 474 bp, Glycine max
  unsure (1)..(474): unsure at all n locations
gtctattttcgatacatgttcaccacattcttagtttattttcagancattcctagntaagcaaacaagtagcaaaggtcaaaacgagaaattcaacacaagcgtcattttgcaaaatttatagtatattcatttattactcacaatgtacactntatacatggaatcataatccacaaatgtataatttcagaatgtaagtttattttcatcacacaaagtcccaataattcccaataccaaatttcatgtaacatgtcactgtagcaaactatcaaacaacttgtatgcatcacttatggcactcaagaacttagccaatcaaatttctaaaaatgggttccagcaccatcgacacacaataagcctgacaaagagaagaaaacccctcataccttgaagtaggaatcanaaatggcaaagaagaatatcactagcacactcgcttctatccaatgagtctatgcacacatg

SEQ ID NO: 256711 - DNA, 381 bp, Glycine max
ccttaagccccgcggctgcagcttccagtgtgtctaccaaactttctatatttttattatttaaaaatacacagataggaactgaaatataatactctcgattttaaaattaaaacttgttcgatcacttgtgcattacaaattaattaatattttttcttgacgaaacaaatggatgttaattactcatcgaagtgaaattttagctttaatttgagaaacaaaagattgtgcctcatatatttatgggtttggaatggaacaaaaggtaatgttcccttttttatatatatatatatatacatacttatatatatatatatatatatatatcattcatagaaaaaatagacatataataatctttcattataatgtaat

SEQ ID NO: 256712 - DNA, 367 bp, Glycine max
  unsure (1)..(367): unsure at all n locations
cagagacccgagccgaaaggagagccactacactacaacaatccgccacccaatagaacacactgtaaactgtggccagcacaaaatcagactatcccatgaatacaacaaagcacgccattaccggcaaaaacgtggctagcccacccacaaaagacaccgccntatcataaaaaaaaacgccatacataaaaagaccacactgattagtgcgcccaagaacctataaaacatccacaccgctccaacccgaggaaaaggaagcatccgacgggactaacactgtccaagacttggaaggtgccggagaaataagaataagacaaccaatggaagcaacccacggtagaagcgggtgagccacaaa

SEQ ID NO: 256713 - DNA, 412 bp, Glycine max
agctttattgcctactcagcaggtcctttaagtagtatttgccgaaagaatggcattccaagtactagaattcttattagctaatacctcaaaaatatagttacttgtattaagaacaccacactgggcatacattgtaattagggagctttggacaaatgtttctaattcaaagcctgctacaactatatgtgcatggatgggcattccatgaaccaaaaggtcatcaggagacaaaaaagcactgataagattaacaatagtaatgtagtttacaggcacaccttcttctctcaacaaattgaaggcttcaatcgctgcattaagttctttgttataagcatgttcacctattatcgcattccaagttactttatctctgtcaggcataattttgcacaccctttgtgca

SEQ ID NO: 256714 - DNA, 407 bp, Glycine max
  unsure (1)..(407): unsure at all n locations
agcttctccaaaaggcatagagatttcctgtttcctgaaaaagncnaggaatatcgctagatggtggtccttatctttcatggaaggaaccacgggatatggcacttccatacccttatctgaagctttttctttcggcttttctctttctttttcactcctactcttttcttcatcttcattttttcaactttttctttttcttctttttctttggcttttcctacctctatttctttttcttgggctttaattactttctcctcgatcgttatttgttattccctcctctgactcattgcatctgttacctcattcttctttttaacaagagtgttcttcaaagcaacgacatcctcatcctcagccgccacaagcttctcgcttaatgttacaacaactctaca

SEQ ID NO: 256715 - DNA, 458 bp, Glycine max
  unsure (1)..(458): unsure at all n locations
ggaagataagactatacgaggtatcttccttgggtatagctttatctctaaaggctaccgtgtctacaacttgcaaactaagaaactcgtcatcagtcgagatgttgaagttaatgagtatgcttcttgcaattgggatgaagaaaaagtggagaagaatgttcttatacccgctcaactacctcaagaagaagctgatctataagacccaggtgaaccaccttcacctccaccacaacaacaagatcaagaactatcatcaccagagtctactccaagacgagtaagatctttggtggacatatatgaaacctgtaacttggcaaaacttgaacctggaagctctgaagaagcgtcaaagcaagaagtatgggtcaagacaatggaagaagagattccaatgatagagaaanacaacacatgggagttagtaaatcgtcctcatggaaaagatatca

SEQ ID NO: 256716 - DNA, 412 bp, Glycine max
agcttatgcgcctgtttccttacaaacgttctcttgtacaagacatttaaccgaaaaacatgcgcccatttacaatcaaagcagcttcgttacctagattatttacacgtacctccaaggtgtatttgttacttacatcacacacatctccttggctaaactcacatacatgcattctcaagcattttggggcaccaaaaattgcacatgtgcacatcttggcatttctaatacctacatacgcaaacttcatgatgaatcttgactatctacacaataaggtgctacatttcatgctcttttttttcaagtttttgctacctaaagccgcatgcaaattcaagcatatttttctttactgactaaaattgcattcaaatttaaaaggtatatttttttgcaatatgttttc

SEQ ID NO: 256717 - DNA, 402 bp, Glycine max
  unsure (1)..(402): unsure at all n locations
ngaaggcaaactggatgcattggttaacttggtaacccattttttcttgaatcacaaatctgtacatgtcgcaagggtttgtggtttgtgctcctctgctgaccaccatacagacctttgcccttccatgcagcaacctggagcaattgagcagcctgaagcttatgctgcaaatatttacaatagacctcctcaacctcagcagcaaaatcaaccacagtagagcaattatgacctttccagcaacagatacaaccctggatggaggaatcaccctaacctcagatggtccagccctcagcaacaacaacagcagcctgctccttccttccaaaatactgctggcccaagcagaccatacattcctccaccaatccaacaacagcaacaaccccagaaaca

SEQ ID NO: 256718 - DNA, 276 bp, Glycine max
  unsure (1)..(276): unsure at all n locations
attgtagtggtggtgttcaacacattctttcccctaaatacaaagaacttggagttggcatgataccgggttccattggtaaggttgctgtaagaaaagctctcatagacttgggagctagtatcaacttaatgcctctttccatgtgctggtgacttggagaagaagtgataatacatacacgcatgaccctctagttagcttattgctccatcgcaagaccatatggagtgattgaagatgntttggggaaggtgaaacaccttatattccagc

SEQ ID NO: 256719 - DNA, 464 bp, Glycine max
  unsure (1)..(464): unsure at all n locations
tgtaagaagaatggcattgattagtatttatttggttatgtataacaataagattatccaaaaggacaataggtcactggtgccagacccttgtacagtagataaagggaagccagtgccaaataaaaagtcccatggaagccttaaaactaaaagtaatgaactatggtgcaacaattcacaattcaacaagaaagtcttttcccactacatgaggtcagttacatggattaaatgccaccataatgttttattacaaatcatgtccatggagaagccattgacctctaaattcttcttaatggtttagcctataattnttttcagcctcactttaccacataggactactttctaccctcttaagtggggcttctacgggtcttctgcatagatgcccaaaccacctcaggttagattctaccattntttctacaacagatgctatctcaactttctttcta

SEQ ID NO: 256720 - DNA, 424 bp, Glycine max
  unsure (1)..(424): unsure at all n locations
agctttcacgggattgttcattccaaantccttttcttccattcatactncntccattatacatatcaacaattatctttccacagacaaaaagaaggtattcaaacatgaaatagtcctcctccgtccaatgattaatcaaacaagaaatagaatctacacatacatgtatgtaaaaaccaattaaaaaaaccacatcataatcctaattgatagaaaccccaatcaattaccacatattagaaaagacaaagagaacaaaggaaaccacattaacaaaaaagtgcgaacatttaaaataaaaaccaaaactgaaaaattgagttgagattccaagaagcaacacatacataaatatatagcagctggaaggaagaattctagtgaagcaaagaaggagggttcacaaaggaaattgtttttt

SEQ ID NO: 256721 - DNA, 471 bp, Glycine max
  unsure (1)..(471): unsure at all n locations
ctttgaactggttgtgcggnttggtttgctatgttcctcagtttctcgtatatgtctccaaatgtttaggtcacaaattaaacatgcacacttacacacacatttatatttcatttacttgtcgtatgtaatgtctcaaacaattgaagatacaagtttgcatttccagttgccatagtccatggccggctggtcttctgcactatccatattagagtattagagtgtatatctacatattcatttcattntcatttgtaatcttgtttagtttctctgtaacagaattagcctttctgttattatttagtttcttgccgactcagcatataatattcatctctgtaattntcaatctaatactcagattacattttcccctttcttctctcttacctaaattctattaatccataaagtctagtattgccgttcattcccaanatagggaaatagctcatagtggtgaac

SEQ ID NO: 256722 - DNA, 368 bp, Glycine max
  unsure (1)..(368): unsure at all n locations
cgatgaataacaaacgaagaatggcgaagaatggcgaaaaacgttagccgaattgatcacgaaaacattatagaagcattacggaagcacctcgacttggattttctccttctttcttcttctcctcactaattttaagtgaaatctgattgccaaaagggctaaaccctttcccctcagcctccaatgccattttatagggaaaatggaggaggagcttgccgcccaactcgcttaggcgagctggtggcttaagcttgaagcaacatgctcgcccatgcgagctgttgcttcctccagaagattcctgatggacccaaggctaaataacaccccataaattgatcagttcactcccnctatttgag

SEQ ID NO: 256723 - DNA, 465 bp, Glycine max
  unsure (1)..(465): unsure at all n locations
ngattaacacccagtgatctttgtcctaacaagccactactgttcataaacaaatcagaatagatntgtggttgaagattgctgagagactaaagctagaatcgtcttacagataaatatacaaattagtccttagtctttttctctcaatgtgttcaaggtattttgagagctttttctaactttacaataatatacataaagctntttgttgaaaaaatgatgaatgtttttcgtgcaagattatatcttcaatcttcaaagcttctagtttatataggtcttatcttcaagtatctgttattcacagcgggtatatatcttcaattgatcttcgtctgatgaaaatggttgttgggagcatttaaatctagcattgaatgcacatttattccaaatgtagatagtcctatcttcaacccttgtgtgttaaagaatngtagcangtagtgacttctttgtatt

SEQ ID NO: 256724 - DNA, 403 bp, Glycine max
agcttcccagatgtagcagtctcttcgtcacttcttaccttctttaaattttcaagtttcgtaactgagaaggcagcattttgcatgcgcagccagtcatgcgaagcctttccagattaagcaagtcaccaatttctactggtaaactgtaaagacttacgcagccagttatatcaagaaaacgcagctgaagaagctttccagttgaagcaggtatctcttcaaacgcagcacaggaattaagtctcagtgtttccaagttcttgaggtttccaatgccatgagacaatgcaataaaatgcatgcacctagtgatactaagccttttgattgaagtaatatcatagaatccagcaggcagtttcactaaatatttgcaataatcaatccacaattccaatag

SEQ ID NO: 256725 - DNA, 484 bp, Glycine max
  unsure (1)..(484): unsure at all n locations
tcatgatgatgaatcaagttgattcaagtagttctgataatgtcttttgttgatgacaaaaatctcaaagaatgatttcaagattaagtcaacaagaagaaatcaagaagattcaagaatcaagtgaagtttgatttcaagattcaagaatagattaattcaagattcaagagaagaaatcaagaagacttcacaagggaagtattgaaattttttttcaaaaaacaaacatagcacagttntgtttttttcaaaagagttttctcaaaattttctaagttaccagagtttttactctctagtaatcgattaccaatttcctataatcgattaccagtggcaaagtttgatttcaaaaagctttcaactgaatttgcaacgttccaattgatttcaaaatggtgtaatcgattacaagatattgggtaatcgataccagtgtatctgaacgttgaaattcanaatcaattgtgaagagtcatat

SEQ ID NO: 256726 - DNA, 420 bp, Glycine max
  unsure (1)..(420): unsure at all n locations
tgcggctgcaagctgaggagngaataggttgctgtgttattcttgttggggaagaagtgctctgagcctgccttgcaagggtttgagcatgtgtatggggacattgttggtgggtttatagatgtcaaggaattgtgattccttgttaagcatatggagggaatggtgaggaaaatggatagatatgttactgtcactaggaatttgtcagcgagatggaggtgttgaatgagttggagcaagcaatgaaaaagtttcagcataaccagcacgaggagagtaggagggcttttgagcataagctcatgtggcacaaacaagatgtgaggcatcttaaggatgtttctctctggaatcacaactttgataaggttgttgagttgttggcaatgacaatttgtaccatttatgccatgaatt

SEQ ID NO: 256727 - DNA, 397 bp, Glycine max
  unsure (1)..(397): unsure at all n locations
tattaacggcatactttaagcattataggagttggtaagttatcacttctacattaggaccttaatgggtcatagacaggcgctagtgctcgtagagctgaaccttattggaccttgggaaaccatggncgttacactcaaaccttcttatttcaaatcttctttcccttacacaattgcacactctcctcccaaccatgcactccttccatgacaacaaaacatttcctctttctttcatgagaatccttcctctctttcactccatctgacactccaatttgacatcttgctatgatcttcctctcttcctcactttcttggttgatctaaactgatagcctaatctcttgccacaactacgagaagtcttacaagctctcaatacctatacata

SEQ ID NO: 256728 - DNA, 367 bp, Glycine max
aatagatgaagaaaatgaattaaaaaatattagtgggtgttatttgattttgaatgaacatgatagcaatttagatataggtgaaagcaacaataaagaagtagttagtgacgaggataattataattctgattctccaactcatgataacgaggaggaaattcagagactagatgattctatttttgaaaatatatatgatccaagcccatgaatacaataatattaactagaccaatcgtttcagtttaaatgagtttttcaaaactaaaaatagtaaacacttacttaagatcaacaatgtctcaacaaaattgaacggattgacattattgtctattataaaagaaatattaatgaaattaat

SEQ ID NO: 256729 - DNA, 451 bp, Glycine max
tgattcagattaaatggccacttgtgtagtgggtacgtattttatgttcatattatgctacttttgcgttaattgtcattttaattttgttattctattaacaggcatgatcagagaagatccatcaataaaagtttctttgattcaagagaggattaatagtgaatttgcctacaaggtgtcgtacaaaaaagcttggttggcgaagcaaaaagccattgcacttgaatatggcgattgagaagagtcatatgcgaaactttcgtcgtgcctaacacacatgcaaaatcattctcctggatcatattttcaaataatacatgacgattttattgttgggaacacagttagtcgcgaacaccatcagtctcatagagtgttttggactcttggtcaatgtaaggaggctctcaagttttgtaagccaatcatacaagttgacgacacacat

SEQ ID NO: 256730 - DNA, 421 bp, Glycine max
  unsure (1)..(421): unsure at all n locations
ccgcggctgcagcttgtaattattagctgagctttatatatttatganncaaccttaaatatatcatttttatgttcaaatattcttttattctcttttgggcttatttttatcttatcctctaacatgaaaatatatattaaatacttaattaatgtgcttaaaattattaaaagaaaaacactttcctgctcaagttatgaatgagataaataagccaatcttaagctttatatttttctaacaagtcaaactcaagatttaaatttggttgatttaaatgagtcaaacttgagtaccatattattttggtcagcaaaacttgaacttaaagtttttgactcagtttgactcattcacacccctagtcacaatgtacaaaaatatcaatttccctgagtgatatccagtaactgaaatt

SEQ ID NO: 256731 - DNA, 420 bp, Glycine max
  unsure (1)..(420): unsure at all n locations
ataatcgaatgagcgtataggaagaataaactcagaatactttatcgcgcacgacatagcgacttgattttcttttacattcacatgtccataagatatataatcgaagcggccttgagaacataatgccgtgcacaggtgtatgacatcgaagatcttctgagacaacaaggagaattctaatgagcaagaagctataaatctcaggtcaaactgtttataagtactatgatgaaagtaacagtattatcttccatatctagttgcatctcaatgaatccaaccaattgcattgatagttttgacaaaagccaccgggtctagaggaacacagaaccttcaatcatagagcactatagcgcgctcctaaactgtgaagactctngacanatcatgccaaaaggttacatatataaagac

SEQ ID NO: 256732 - DNA, 407 bp, Glycine max
  unsure (1)..(407): unsure at all n locations
agctntcgtgtaaggtgtaaatcagctttgtttcttatttatagnnctaaacgctacaaatgactatgaaatctcattgccgctgagaattgaacatagaaaaagaaagggcttggtgcaggctttancactaaacgtttttagtatcttagaaaaagaaagggccctcagcctgtgagttaggcattgccacagaaaaataagaaaagaggggagagagacagtgggagaagtagtaatcttaaataagcttttgcttcatatcatcattgtataataagaatggctacagagtttttggtccattaaaactctcaaataggttttcagattcagcccttgagaaggggaaaatattcggaaattgttaggagactccatgttcctcaaattacctggngtatgtt

SEQ ID NO: 256733 - DNA, 479 bp, Glycine max
tgttagtgtgtgtttaaatgtctaacataaaagaaatattatgttattatgtttatttgaagaaaattctatcagtgaaaataaaatattttgaatatgaattttatagtatttttttaattagattacgttggtgttaatgatttattagtgtgctaataattgatgaatgtttcaactttcatttaaaaaaatttgtagatcatatctatttgaagaaagtatgttgagtacgaaatttattttaatatgaagctgtagtatttttttaatcagaataggttcatttttttgtgtgttaaaaattgataagcgttcaagttgaaagtgctaattgatgatgttctgttgttccttgtatcatatttaatctaatatatctgtagtaattctgtaattacctatcttcattctgaagttattattggtaagaatagattattttactactaacttcgctcatgaactattctatttcg

SEQ ID NO: 256734 - DNA, 396 bp, Glycine max
  unsure (1)..(396): unsure at all n locations
agctntgaccaaatatttctaaagttattttgtgttttcttcactaagaaggaacaagagaataaatccaaacaattgaaacaaaggaagaaggtttttaccaaaaattgaccttttgcgagtattatcattgacaattaataaaatccaaaacatatttcctatcaagcatgcttggagagactcccttcacttgaacacaaagacaacatgcaacagctgttgcagaacatcatagttaggaacatttttccaaagagaaatttctagaaacaaaaaataattgcattccaccatacacactggcaaatctgaggaattcctttttgggcctaccctcaaccaaggccacaacaaaagcagcagtaaaagtatcaccagaaccaattgtatcaa

SEQ ID NO: 256735 - DNA, 344 bp, Glycine max
accctcattaagagctagctcttttcttcctctattgcctatagctgaatacaccctagtctgattctctatttggttcttaaccctctcatgcatcttctttacaaattctgacctagactccccttctttatgtataaaagaagtgcccagtgggaggggaatgaggtctaaccgtgttaggggattgaacccatagacaacctcaaaaggggactgctcggaggttctatgaacccccctgttgaggcaaattttacatgaggaagatactcatcccaagacttatgggtgccctcagaagagcccttaacagggtggataaagacctattcactacctct

SEQ ID NO: 256736 - DNA, 354 bp, Glycine max
agcttggagccatgcattgggattcttatagtatttcttcatcctcaaccctttttcggagccccatgaatggcgttttcgttcatgcgtccttcacccacgagtttggagtcgtccgtagtgattgcttaatgcaattctccattctccatcctttttcggagccccatgaattgcgtgttcgttcatgcgtccttgacccacgagtttggagtcgtccgtagtgattgcttaatgcaattctccattcttaatccttttacggagccccatgaattgcattttcgttcattcgtcctccacccaccagtttggagccgcttgtagtgattgcttaatgcaattctccatcct

SEQ ID NO: 256737 - DNA, 455 bp, Glycine max
  unsure (1)..(455): unsure at all n locations
gagaatcagcaagtctgaaatccaatgtgtttttttacccaattgacccacagagagaatgtntatgtctttgcccatacgctgcttatgaagtcaaggtaaatgcaacattctactagggctcaaatcaatcaaaccctcaccatagtctgttttgtgcaaaccaattgaagcttagttgtagcatgaagttttgctgctatcaagtttagtgttgtcaacttgtcattcttttatagtgatgatgcctatgaactcagcatccattgtgaaaccaaaatcatgagaatccagtgtggtcaatccattgtgaagaagaaaggatgcatgtgaaatacagagctctgcacaaacaataaggactaaaactaacataaccatancttcagaaattttaataatcagtaataccatggacgaaccttcagttntggagccaaatcaaacaattctca

SEQ ID NO: 256738 - DNA, 352 bp, Glycine max
cccgaaaaacaccatttcctaggtaaccatgcattaggtaccatgttcaattattttgttttggtggtggggggtttttttttttttaaaaatgggtttatgatcccaacatggttggctcatggggcctaacacatgcaactaaaaatgtagtgtgaagtttcacgcttccccttttttgtttttgtagaggaaaacacaaggatgaacaaacatgaaaacaaaatgggttgcaattttgcagatcaaaaagtttgttgaacccatatgcatgatgatgccatgactcatgcaaaatgtgaggctggaatatgataacggacaaatgcaggaacgatatgttcattatgat

SEQ ID NO: 256739 - DNA, 473 bp, Glycine max
  unsure (1)..(473): unsure at all n locations
tatgtgtgacanaatnganaatattnttcttagctttctatgtgactgacatgcttcattaggagttntgtagtgtcctataggccctgcataaggcagataggttaagtaagcacaaaaatccaaaaataagccacaatgatcaattaagctcaatctttacctaagaccaaaactaagttaaagtgagaaaataagggtcaaagaggtgtcaattgagctaaaaataatagcaaaatactaaactacaaatgctcaatcactcggcatactcctgacattatgtattacgcacaaataccatgttcctaaaggagtttagcaaatggacctaggtgttgcccaatttcatcataccttctgtagcactctccacctttatcaaacctaacaactttcacctttctttctaattgcctttctacttcattctaataaatttctaaggcatctatntcttgagatttctcatg

SEQ ID NO: 256740 - DNA, 349 bp, Glycine max
  unsure (1)..(349): unsure at all n locations
catgcaagcttatccaaaaagtaatggaaaaaatttttttgattatatttgtnacagacacatactcttattaatacactttattatcacgtaaatttcttcggatacataagtcgtacgacttatttcatacgtttcatatattatttaataattttacataatatctaatagtaagggaatttaattatcatatatcgataggataaatatttgttatgctaccattcaataaaaaaaatgatttattttaagaaaatatatttacaactagttttaattaattatcaatgtaaaaataatgaataccaaaatgcattaaaattaaagtcataatataaatgagatg

SEQ ID NO: 256741 - DNA, 396 bp, Glycine max
  unsure (1)..(396): unsure at all n locations
taggcatgggagggcatatcacaggaggagcatatggagctatgtatgttattatatggccttggagttgataatgtcttatatgctgaaattgctgatgccaatggaagaattcttgatagagaagccatgggggaagacttattttgggctataagaggaggtggaggtggaagctttggaatccttctttggtggaagataaagcttgtttctgtgccaccaactgtgacagtttntacagttaccaaaacccttgagcaaggtgcaaccaagattcttcacaaatggcaagaagtggcaccttatattgatgaaaacctcttcatcagagtcatcattcagccatctagtgatgcaagaaacaagacgtagagaaccatcgcaacttcttac

SEQ ID NO: 256742 - DNA, 476 bp, Glycine max
  unsure (1)..(476): unsure at all n locations
tcatccaactgaaacatggaaagaagacagtattgtcatactctattttcatctggggacaattgcacgtagacgtgcagattattgccagtcatgttgcgctgattaaaaccaattgacgagtgatccgtaagattctgtgacttttcagaacgaaatgagaaaacaactcaaaatgacggtgagaagatcaatttacggcgagttcttcagcactgtgcccatctaggcccatcaggttgcttctggagtaaatcaccagctcggctaggcaagttgggcggcaacctcctcccctattttggctataaaagggtgtgggaggctgaagggaagggttcaacacccttagcaagcatatttcacttaanattagtgaaanaaagtagagagaaaaagaanatcaaggccgacgcgcttccgtaacantttcgtgaccaattccgtgaacgttcttcgtccattctttcgcattc

SEQ ID NO: 256743 - DNA, 404 bp, Glycine max
  unsure (1)..(404): unsure at all n locations
agcttgtaatcgattacacaagncttgnaatttattaccaaatgaaatntccataaagcattttcaaagagtcacatctattcaaatggatgttgaatggccatcaaaggtctatttatatgtgacttggaacacgaatttgcttagagtttttcataaaaaaaagtcttatcctctcaaaagaaaaattgtcttataaaattccttggccaatgcacttgcaattcaataaggaattatttgagtgctcaattgttcaatctatctctttcaagagagaattcttcttctcatcttatttctaaaaagggattaagagactaagggtctcttgttgtaaagaaatctgaacacaaaggaagggttgtccttgtgtggttcaaaacttgtaaagggcttttgca

SEQ ID NO: 256744 - DNA, 279 bp, Glycine max
  unsure (1)..(279): unsure at all n locations
acagctttggtgacctccttgtggagatagttagcggaagatgtcacacaaatacacgattaccaatacgagagcaatatcttttagaaacggtatgtctatggtatgttcctagttgattgccgtacctttcactgtaataaatacatagtatgaggggggaaataaagtagctccttgtgtcatctccctattaataagcaaaaatcttaacgtataatacattaaagtactgtcactgcagagatngcgataacatagcccatcctatgcttctag

SEQ ID NO: 256745 - DNA, 386 bp, Glycine max
ttattaagaacatcattcaccaatgaatatttttatcccttggtggcggagatggagtgcattcattcggagcattatgcaggaggtcttgtttaaaaacccattgaccatccagatccttcctatacctaaaggacgcaactgcagtggctccaatggcaaaggaacgtttaaccttgacaaaaagttcattaaccgggggaatattgaagtgctgcaaaatcagagtaataaggtggggataagggagaggtgcatttgcccgtaatgccttatgcataagggagcgaacaagatggatccaatcaatttgacggccagtttgcaaggcccataataagattaaatcttcctcaaaagcttgagcaagatttgtggaacgagga

SEQ ID NO: 256746 - DNA, 397 bp, Glycine max
  unsure (1)..(397): unsure at all n locations
actaagcttgccttagggcttgacctcatcactttcttccgaagctttattctctatcgccctcacagtctttagatttgggagccaatccaatccttgtgttcggactctcagccacttatgatagccgccgatgatcccattactgcttcccctaagctctctgtcctttcttcacgccgcatcccatgccttgcgaactccttggagtacnctcgcgttgtggcactaaaaccccgtgcgatgaaaggcgtgatgctntcgtctaatggcgctcctctcatggggtagccaagctgtcttatggcgagaacgggattataattaatacaaccccttggtcccatcaagggaacatttggacatncttcgcatgaagatagaatcttgattcttc

SEQ ID NO: 256747 - DNA, 386 bp, Glycine max
  unsure (1)..(386): unsure at all n locations
ctgcaagctntaaactttattaagaatgaagctctttttctttgttagacaagaggcctcaaatattttaagaagggggggttgaattaatatattacaaactatttccccaattaaaattctatcaagctataaatttccttaataacgaacttcttaaatattgattcaaataaaacaatctgaatatgaatataaaacactaataaataatggagtttaacggaagagaaagtgcaaactcagatttatactggttcggccacacccttgtgcctacgtccagtccccaaacaacccgcttgagagtccactatctttgaaattccttttacaagttctaaacacaccaggaaaatccctcctctttgtttagaattgtttac

SEQ ID NO: 256748 - DNA, 349 bp, Glycine max
aacacctcgcaacagaagaaggagagagagcgccaaaataatgcacaataaatcgctaaggagaaaagcaacaactcgtggggtataccaggacactaaacctgagccacgtctagttctcctttacacatcagtgaaggaggccactaagcaaaactcgactacaaaagaagtatgatgacctgtcactccaagctatacaagcatacgtaaacaaccctaggcgccgccttagactgcatctaagaaaccccagatcgtcaacaccaaccactctagggggaacaaatactcagttggacgaaaaacacatcaaagacactcaacgagtggaaagcaataaagctca

SEQ ID NO: 256749 - DNA, 416 bp, Glycine max
agcttgtgattgacagaaatcaagtttttattggaagccaacatttagccaagtcaattagtttagccatttcatgaaacaagtagttggcaagattgcatagcagcataaatcaaacaagctaatgtcagtaacaactcgaagttaaaaaacaaaaaagatgattcaagggacatcaaacaaatgtctaacagagaacaagctccttacacagtagttaaaccatgaaacttacacaagtaattaagatgaactactgaattgaatactttcttctattaagagtttggtgcccaattacaaactgagttcttcaagaagagaaaattacacaaattcctctcctcacaattcacttttgcccttttacagaaaactttctgaagaaccttccctcagtcgcaagaagaaaatcg

SEQ ID NO: 256750 - DNA, 474 bp, Glycine max
  unsure (1)..(474): unsure at all n locations
tggccgccacggagtttccgactatgctcttgtgtggtggttcaagctacaaaaggagagagcaagaaatgaagagccaatggttgatacatggacggagatgaaaaagatcatgaggaagcggtatgtgccggctagttactcaagggacttgaaattcaagctccaaaaactaacccaaggcaacaagggggttgaggagtatttcaaggaaatggatgtgctcatgattcaagcaaatattgaagaagatgaggaggtaactatggctcgatttcttaatggtttgactaatgatatccgtgatattgttgagctgcagaagtttgttgaaatggatgatttgcttcacaaagcaatccaagtggagcaacaattaaaaaggaagggagtggctaagaggaagtttaccaactntggttcttctagttggaaagacaaaggtaagaaagatggngctgctacttctagtag

SEQ ID NO: 256751 - DNA, 352 bp, Glycine max
attgaataacctaccactgcagttcccatatcaaatttaaagaatggacgaatcattgtcgagcacgatggaggtaagggaagatataatgggttcacctattggagacagcgaaccagctttgagaagtgcctattttctgaaacccattgcaaaatccctcgatggaccagactctaaggacctttcatcttctaagaccatgtcactgccacccgtgattgaaccaaaggactggcctttggcgatccatttcgactggcggcgccacacaaagaagaaatggggtgaatgggtggatgcccttcaactcaagcataaatcagcgaggaagaaaggtggcatctttgaa

SEQ ID NO: 256752 - DNA, 477 bp, Glycine max
  unsure (1)..(477): unsure at all n locations
ntaatgaataatagtaagtttaagcaaataggacaaattgtattttntntatcctagaaatcaatcaaaaataaatataagcaaaaagaatagattgtattttttttttaccataactcatactctttgttcaaccaattaaacaagacttcttgacaaagaatagactttaaattaacaaacaacattgtatatgtataccaatccacacattacataataattctttgttgatcaattaccaattaaattttgatagcattggtgagcaaatttaaatatagttgccagatgaacctttctaacaaacaattttgagttattcatcacacgtttttactcaccggagatgcaattctgacttggtatcttgaggtacctaatccaagtaccatatacaaagttacaacaagtctcttaactattaattaacgtagcacttcgcccaatcttctaatgcagtggcaaacttaaatg

SEQ ID NO: 256753 - DNA, 256 bp, Glycine max
cccggatttaacccgcgcgcactatgacctaaggcggtttttctgcaaaccagccgaattttccctgtcgaatcagtgaagttgaccttgaatttggggatttgtgtcattacgctcatattgggctgacgactcttaaacttacttaatttgaagatcgtgtaattcacgttcaaaggcccgacgactcagaactaaccttaattttctattcctgcatcacttacgtagctatcgcctcggtagttcattattc

SEQ ID NO: 256754 - DNA, 369 bp, Glycine max
  unsure (1)..(369): unsure at all n locations
tagaggatgcccgagtcattcatccctatgagatgttgtttatttattggcgatcancaatgccattccttggattatagggttgaaccaagctcatgcttttacaaaaagggtcatcaagtcaagttgaaatatggaagtaaccgtcttgcaaaattggggcaaaagatgaatcgagtcacatcactgcttcgtctactgccaaacatatttacgattattgatgtccttgttacttccagtttcaccttgacaaagatgtcatggaccatgttgaaaatctaaattgattcaaccgcatatcttgcgtaaaaattcgcaatacttcaattgtacatcattcgcatgcattcatgcttttcattggtt

SEQ ID NO: 256755 - DNA, 409 bp, Glycine max
agcttctaccttttaccttcctttctaccacttatgtggagttattccacatacataaaaggccaccagcagcctgcacagatggaacaaaatcccaatgaccagtggagtctccccaaatggcctggcaaatacttttattaaagttctccctcttggtttcttggaggcagacaagatccactttttgctgaacaatgagccttctaacagcagtccacttgactcccctccccaaacctctagagttataggatagaattatcataattgctgagatttaattcccttctctgctgccatcaaatcatctttattcttcatatccagcagcatccccataatcttgctatcttcttcctcataagacaagcccatttccttcaagatgtcacattgcagctatata

SEQ ID NO: 256756 - DNA, 456 bp, Glycine max
  unsure (1)..(456): unsure at all n locations
ggttggagantggctgaaaccgtgggagggttggtttgtgttctttcctacaagtgttgtcaaaaagaggattgctttggaaaggaaagagaaaagcttagctcgtttataagggcgagaaccgcaggtggagagagtccctatttgtcacatcaatgagagctttgtgagtgtagggtggatgcataaagatcaggtttctatgctggatgaagagaccaatcaagatcagccgaattgggtgcagccatgtcccctagactttgaattgagaaattggtagatcatagagcaacctgagatttatgtttctgatttgatgtaattaaacatttccagatcctactgctatgcctaaggctntaggattcacatattggcaagcgtacttctcttttcaattccagcgatcattaataaaatgcatttcaaagacatattggcttctgcatctct

SEQ ID NO: 256757 - DNA, 406 bp, Glycine max
agcttgtgtcaaaatttatcccagatagaatttctataacatctggatttgctgcatgaacagcttctgctcccttcaccatgtaccttcaattcagaataacaacttaattatcatctacacaggatttttctctctttcttgcctttttttttttttttactagatagtccattacataatacatacaaggaacttaaattgtatttactcaaacgcatctgttaaccatcaaataaaaaaaagtgaaatgtatatattagatatgaaatcaatattttttttcttctgattttgctatgcatatattgctcaacctatcaatgagtttggatatttagatattttttaagctaatatgagacgagtattataactaaacggttaaatttaattgttaaatatg

SEQ ID NO: 256758 - DNA, 463 bp, Glycine max
  unsure (1)..(463): unsure at all n locations
tatcaacaaagttttgatagcatcaataattgttatgtatattgatgagtaacaaaaataaagactattttcgggacttaaaaagttttggtgacatgtcacatgtaataattgtaggcattagacaagttttaaccacatctcatagtttaaaattatcttattatttttaatgaaaatctttgactttgttaaataaaacaataaataaattgaaataacatgtatgttattggttcacatgctaatatttaaacacgtaataattttactatacaataattntttacgattgttaatatgaaacatgcctttaaagtcatgccaaacttacataaaagattagtcccatatcaaaaaaatagactcttaacaaataccagactcaagtgtaaaaatataaaataggttagactaagtttaaatagaaccgctttaactcaactcattntcatctttaatc

SEQ ID NO: 256759 - DNA, 351 bp, Glycine max
gggacctcattccagaatttggatatattttccatcaagatgaatcccttggctaattcaaatagtgcgtccatgttatcgggtggttgtttgcacagaatgtctacaaacttgcacggtgtaaggcgaagaacatggaatgcaaccctacctcgaaattgagattttggatttggatggttgtccacccacatctttccatgaactttctaagggacttgtcatatgcttgtcataaactggctaaggcggccaaggtcatgccgggagacctgctattggcgtactctacactaaatcattcgacaagggtgtcgaactatcaatggactagggggagtctgtcatact

SEQ ID NO: 256760 - DNA, 473 bp, Glycine max
  unsure (1)..(473): unsure at all n locations
gggtatattcatgggcaggacaaagagcgctgatcattattttctacacacaatcgccaaccacaaagtccacagatcaatgctactgtcagcctataattaacttcgatttttcagtggaagctatcaattgagcatgagtttgttcgtgcccctggcgaagttatgagatgaactcctcaatggtggtataggaacacacttgactagggaaacttatcagtcaaagggggccacgagtaatcatgcaataaataacgtggaaaggactagccgtggactatgattatcgacattattgtgagaaaatatatcttgacagagtctaacatcccaagactttaaatgatcgcccaaccaaatgcatagcangtcaccaagggaacgactaagcacctcaatgtcactgctaactatgtgtattgtaagcactgctgaagtcgaagctggtgtaactaaacgcccatacttct

SEQ ID NO: 256761 - DNA, 240 bp, Glycine max
ctcctaaattctggagggatacaagaacaccctgtctggatcaaaggaccttcacaacctttgggggtgccctcgctggaaagagggattctttccttcctatcatcgccacccttgtgctttcaacccacaattccacaaaatccacctctgcccaaaagtatcgcgtgaccataactcccattccacacactcaaattaagtgattcttgagcctaacaggaattccagaacgagaac

SEQ ID NO: 256762 - DNA, 263 bp, Glycine max
acctccgagtgaacagatgttagcatttgaattgctcaatagcttccactgttcaatttcaagcatctagatatattatacgcctgaatcggacctccgagtgaaaagtaatgaccatttgaatttttcaagatcttccgttgttcaatttcgggcgtctcgatatattatgtgcctgaatcggacctctgagttacaacgtatgaccatctgaatatctcgagagctgtcgatgttcaatttcgagcgtctctatatgtgat

SEQ ID NO: 256763 - DNA, 416 bp, Glycine max
  unsure (1)..(416): unsure at all n locations
tgcaagcttattgggaaggacacatgtctcggctgttatgttgataanaacaccattgcagctagtgatgaatggtgggaacccaaaattcacgtatgtattattcaacgaaaatagagattttgtgcatgtcactcttttggtcttttgtgttttatatgtgaatcttgactttggggtcaaaattgcagttgcagactattttttagaaacttgcatttgaaattttagttgataattaggttggttattactttgttacatgttgcaattgaagtagtttacatgttgcaattggtcctcaagccatagcaccaatggaaatgaatttgagttagtttagatgcagagaaatgaatctgttgctaacttgtgatccttagtatgttgagttagtttagatgcagaacaaaatg

SEQ ID NO: 256764 - DNA, 347 bp, Glycine max
  unsure (1)..(347): unsure at all n locations
ccactattactaaataagatagaataaattataaattattgtaattgaaacatgttataattattggttataattcatattaaatggactctaattcctttaacacnaatctttttccacaacaaaatttattaaaataatactacttataatattaatgatagactataaaatctatatatgaattactaatgatataatattaattntataaaattattattctcttttattaatttattactttntattagtctgtgtaaaataactcagaaaacaatttctaggttaaaggatntaaatctaccaatgaagagtaaccaatgacttanatccaaataatccct

SEQ ID NO: 256765 - DNA, 409 bp, Glycine max
gcaagctttgggctctacggccccaaggacatctttttttctctatggaaaaggccaacgggcggacgttacattcacaggatgtggccgcacattgacattgtccgcgcttgcttgacatttatgacatttccttacatgggcccctcgatcactttttataaggacccctttataccggccctaaagatcttcctggccttaacatgcccattggcatgtgtcccaaatgaacaccccgggatttcctcaatcatgcagtttgcctcattggcatctacgcatcgaatgacggtcatgttgtggtttcgttcatacaggatggtaccccttacaaagaaaccaatatgcaatctccttaacgttcttttgtcattgctggaaatccctcttggatattctttgttct

SEQ ID NO: 256766 - DNA, 432 bp, Glycine max
cgcattactctccatggctgatatcaaaaccacgacgcgattttgtttcgctacgctactcacatacgtgctcgcgttatcataacctacacccttacaacatgagcgaacaacaacaagatcaatcactcaatgtacgcagtccttattactttcatccgggagaaaatccacggatagctttggttactccggatcttgattcatccaattataatccatggagtagatctatgctcattgcattaagcacgaagaacaaatatgagtttgtcgatggttctattcgaagacctgcatcagatcatgaacttcatgtagcttggaagaggtgcaataatatggaggctttatgagtggctcatttaatctctctttcaattagaccaaacatactgtggatgaacgatgcacaagatactctggaaagac

SEQ ID NO: 256767 - DNA, 412 bp, Glycine max
  unsure (1)..(412): unsure at all n locations
agctntggagtttccaagtgccaatacggctttttttttttttcagtcttgcttctggcttcaatacatagggggctttccttctgtgtccagcatcttgggatgttcccagcctttgatgacagctttccaggttctgctatccactgatttgaggaaggccaccatccttgctttccagaattcatagatggttccatccaagattggtggactgttcactggtcctccttctttctccatgttcattagaatttatctccctaaatctcactcagtgatttcgagtgcccgctctgataccaattgaaattctgatactggggacagatgtcgtacaggatgttacgacatcgcgcttcataacaagcaacttgtttatgaccgtctgaacacattatacaagtaaata

SEQ ID NO: 256768 - DNA, 419 bp, Glycine max
tcctgcttggacgaatgagagaactggggcaaatgaagagggtgagaaagagggagaaacccatgctgtgactgccattcctatacgaccaagtttcccaccaacccaacaatgtcattacagaggactgcatgtcctcaccttcgtagggctacacgccctcacctttagaggactgcatgtcaccttcagagggctacacgccctcgccatcagaggactgcatgtgctcaccttcagaggactacatgtgctcaccttcgtagggctacacgctctcacctttagaggaccacacgtcctcaccttcagagggctgcacgccctcacctttagaggaccacacgtcctcaccttcagagggctacacgcactcgccatcagaggactgcatgtgctcaccttcagacgagctacac

SEQ ID NO: 256769 - DNA, 414 bp, Glycine max
agcttgtaactcatcaattttagttgaaatttgtttttttacacatgcaatcttaattctcaacacactttttggatgaatcttccaaggattgcgttgccttctctaacttttcttccttttccagcaataaggtaaagctacaaaattgagtctcccaatgtttgatataagttttgtaagaccatctttaatttgaacaagtggcttaaaggtgtaaatgcacagtccttccaagcgagcaactcaaaggtgtaacaccatcttagaatttcgtatgagcatcttcattaaaaatggaagacttgaacgaaaatggttggcttgctcctcatttgtctgggaatagataaggatctatataatgagcacaatgtatgaaggatggaaaaactccaatatatgtaatcccag

SEQ ID NO: 256770 - DNA, 350 bp, Glycine max
tactaagctagcagagcgggaacagcggacattgtgctggcgatcttgttttatctatcatgagtaaagaacgtgtacccactcattaatacaactagcttattgctagcaaaatcgagtcatattcatagttctgatgctctcaatgataatttccttattgtggtaatgcttcttctgatgatgagatggcttttgatctgaggatgaatcatctccacctcgaaaaggatgctgcagcgcaagattgaccaaagttgaccacaaaaagtcatccgtgtccattttttgacaaaggagtacactctttcgaatggaaacgaccttctaaggagactgcattatctact

SEQ ID NO: 256771 - DNA, 311 bp, Glycine max
ttcctctagaagaccaataacgaatagtcttttcacatcctattgatgtaactcaaaggcaaaatgagctactaatgccatcattactcggaaagaatatttcttagatacaagagaaaaagcctccggggaatcaattccttttttttgagtgaaccctttggcaacaaggcctgccttatgtctcttaaaattaccttgtgagtctttcttggttttaacattcaacggcttttacaccactaagcacactgtacgagatcccagacttggttaaacgccctaaaatccatctcatcttttatgacatt

SEQ ID NO: 256772 - DNA, 414 bp, Glycine max
agcttcttaactctgagccaaaattttttttttttaatattagaacgatcaaacttgatccggataaatgcattatcaccatatgaaatatcataataaaaatttaatactcttaccacttccttttcatcttcaaaggaactctgcgctgaaattcccacctgacaataaggaagagatatgatcaaaaaaagacaagaaaaaacttaacgcatagctaaaaaagaataaaattcacaagcaaagaaaaaagaatggaacttaggtgctgtggcaaataactacaaaagttttctttacctgctcacagaaggaagcttttgacatgttggagagactcctggccatatcaacaatctgatttccagtactttgaagctttcgccaaacctatatatatcgacaatgtcatgt

SEQ ID NO: 256773 - DNA, 433 bp, Glycine max
  unsure (1)..(433): unsure at all n locations
tatgggttaaacgagcctcccatcttttgttcttaagattcatgggataatgtcttcatttggctttgatgaaaaccccatgaatcaatgcatataccacaaggtcagtggaagtaaaatatgttctcttattttattatatgttgatgatattttacttgcagccaatgatcggggttactacatgaggtgaaacaatttctctctaagaattttgacatgaaggatatgggtgatgcatttgatgtcatcggcattaagatctataaagatagacctcgaggtattttaggtctatcacaggaaaccatattaacanaatcttatagagatttcagatgacaatttttcaccaagtgtngctctgatgtaaggcggatacgttaatttgacaaatgctcaagaatgacttgagaggaacatatgacaacat

SEQ ID NO: 256774 - DNA, 405 bp, Glycine max
agctttcaccattatcctcatatgtggaatcttgttgtttttgcatccccttggtccttattgaggtattatgtcattgtgatacttatgtgctaattacatgttttttgatatatcagtattgttttatattaaagaaatgtgcattgtgagtgaactttatttttccggttgagattcaatacaatgattaatatagataatttggacagtttacgaagagtcattttttatacataattcatacttataggttaagtatgttgtgttaaatttgatgaaatttatgtttattgcatatcgctttgttcttcgggtgcacacttgatcatggtgaattcatctcaccgcttttatgtcgtgtacttggagaataaagcgaaatgcttcccaaatttctctaaa

SEQ ID NO: 256775 - DNA, 415 bp, Glycine max
gtatggtgatctgcagaagaacatagaccacagactcttgcaacaggtgcaaatttctgattcatggcacgctgagttactaggttgaccaaggcatcaagttttccctcaagctttttattttcagtaaatgaagatgaattcgtggccacctcatggactcctctaaggacaatagcatcatttcttgcactaaattgttgggagttggaatccatcttttcaatcaaattcctagcctcagtaggggtcatatcaccaagagctccaccactagcagcatcaatcatactcctctccatgttgctaagtctctcatagaaatattgaagaaggagttgctcagaaatctggtggaaggacagcttgacacaattcttgaatcttttagactatacagctcttcataagtgct

SEQ ID NO: 256776 - DNA, 410 bp, Glycine max
agctttgaacaaagcaaatgacatcatgctttttatgtgaaacaacaccacaaaatgcctgcattacctttcacttacccttgtctcaattttggtgtggtattgaccatcactcaaaatgatgctttattcaccctcgatccgcaagatgacaagatgcaaatgcatgcatgctttggatgtttaattgcaacaattaaacaagtgttattgtgttcaattttactttaacgcttacgacaccccgttgatcgggccaaatggcttcagatttagtgggcaaggtctatagtgtatgttcttaagaagtaaaagacataacacaggaagttaagatgcaaatcattaatccaatgtttattaatgttgcgaacatggtttacaaaagattttaagactttagaaaaccc

SEQ ID NO: 256777 - DNA, 462 bp, Glycine max
  unsure (1)..(462): unsure at all n locations
ntctgtggaaagatcggtacgtggtggattacataactgttttatcaactntagaaatagagagtgaaccagtataaaagattgtgtcttttatctcttgattcatatctttcactccttcaagggttaatcaactcattcaagttttattcaaggtttaaaaatattcaagttctatgatttttaaagaaaggaaattaatgaaagatcatgtgtaaggaatgactaattaaatattgattatattcgatacatattggttttgtgatacaatccgcatagaataagtttttgttgcaaactttgtttttaaaagaatagttctgttttgaaaaaacaattcaccccctcttggtttatttgagttccatcatctttntttcaattgcacaacaattatctaattaatttcccttatttattgcttagctgctctcaataagttagaaattaccatctttt

SEQ ID NO: 256778 - DNA, 408 bp, Glycine max
  unsure (1)..(408): unsure at all n locations
agcttctccttccttttcctataaataggggtttgagggaagaacaaaaaggttcaaccctcctagtatctgagactcacttaaaattagggagaaaaattgtttccgggaagaaaatccaagccgaggcgcttccgtgacgtttccgtgggttatttcgcgaagattttcaaccgggcttcatcgttctttgttcattcttcgtcgntcttcggtcttcaaccggtaagttcccgaaatcgaacttttcaattcattctatgtacccttagtggtcctcatttgtttcgcgcgcttttatttccatttcatttactttccgtaccccttttgacgtgctttagtcatttatttaagtcattntcttgcctaatcaaaaataaaataaattttcaccgatcgttcata

SEQ ID NO: 256779 - DNA, 362 bp, Glycine max
tgagatgaggaagcgttgaagggtgaaacttcctgtttttattgttgaccacagagtggtacctggagatatgtcgcgggggtcacgacaccttggggacgtcatgtggggtgctattgcccaaaaccaagcttgaccaatcccgacccaacccgggcatagtcggtcagtgagaacctgtgatgtacctaaacaggcgagctcctggcagtcaacagataaaaggaaaacaagaccacaaagcaaggaggcttgtggtggctggccagctgtgaattttgtgtaatatgtggatggtggcctctggtaatcgattaccaagggtgggtaatcgactacaaggcttaaaattgaggacagga

SEQ ID NO: 256780 - DNA, 411 bp, Glycine max
agcttacctcgggcttctttgagaagcttttttatgaggcttctttgagaaactagatacttatctacccacactcctctattaactaaattaacctctttgtaaataattatggataaaaataacgcaacaaataatcaaacatcaaacataattactaataatatatagatatatatatcagggtgttacaactctcccacccttttagaaatttcgtcctcaaaatttaccttactcaaacaaggatgggtgagcttctcgcatctgactatctaattcccaggtggcatcttttcctgatgcacctccccagatcaccttgaccaacaaaatctctttccctcttaggagttttgttcgcctatcctcgatcctcaaaggcaatgtctcatatgtcaaattctcctt

SEQ ID NO: 256781 - DNA, 475 bp, Glycine max
  unsure (1)..(475): unsure at all n locations
actcagcttctgtcctgagaactggtccagaagacacatggtgtgtatattgctgaaaaccctagccttgcaacaagttctagggaagtagacaaggagatggacaagaaaatccgcagtattgtgagtagcattttgaaagacgcttctgtgcctgatgctgagaaagatgttccaacatcttccaccccagatgtttctgtgcctgatgtcaataaagatgttccaacatcttccggcccaaatgctgaagtactctcttcccacagcaaggagagatcaacagaggaagatgatcaagccgaagagaagactcctacaccacgggcaccagaacctgctccaggtgacctcattgacctggaagaagtagaatctgatgaggaacccattgccaacaggttggcacctggcgttgcagaacgattacaaagccganaagggaatactcccatcaagaggtctggacgaatca

SEQ ID NO: 256782 - DNA, 392 bp, Glycine max
agcttctggaaggagatcaacttgatgttctttgctctctgaaagcggcagtccatgagggatctccttggaaaagacctcttctaattcctacaataagggttgaacactaggagaaacataaattgttaactgattagacatatcactctctctctcttggtatcactccatctctcagcgtatcactcttccttttttattcctctgtggggcctcactattgtctctctcttgtactctctttgctctccttctgctttggccatcacacactcctttgagggatagagggttatgaaataatatttacgtcatggggctggaaagaaatcttgttgtgaagccatcatgcactgctttggtgtcctcttctatgtcgggcctcacta

SEQ ID NO: 256783 - DNA, 320 bp, Glycine max
atattatgggcctgaatcagacgtcccaatctgatgttatggctgaccaaatatggcatgcgcttcaatggtcaattgtgagcatctagatatattatgcgcctgaatcgggcatctgagtgaaacgttatggcatatgagttagccgagagcttcgttggtcgatttcgagcgcctgcgcatattattggcctgaaagcgacatccgagtcacaagttatgggagatcaagatctccatgcgctgccgtgtgtaattgctagcctcctgagatattatgcgcctgagtgggacgtgcggactgagaagctatgccctat

SEQ ID NO: 256784 - DNA, 308 bp, Glycine max
ctgcaaccgcgcatgaatctcagctcttgtttgttttttagcctcaatagatcgctgataccgaaagatagcccttaaacgagccctatgtgcgaaaaagccttaactactatagcagaagcgcaacactttaaaaagggctttcttaacaaatattgacatggcggtcctgccccgacaaagtatttatgaataaaaaaccaactgcctgggatgctctcccccgaaatccacttatattggatagaaaaacaccttcagagaactgaaagacttttgcttcttgaaaactaagcacttaagagatc

SEQ ID NO: 256785 - DNA, 473 bp, Glycine max
  unsure (1)..(473): unsure at all n locations
ntgatacttggtcgaaatgaagattgcacataccacgatttagtctttctttgtnactatatctagcatgagctcatgttgtccattcaatggtccaatgccaaaaccaccaactttaacaggcttgcaaagcttatcccatgatattgttaccaatttcttctgagtaatgtccccattccatataaaattatgaattcctctctccaaagattgaagcaaatctatcggccatgagtaaatgtgaaaggaatataataacattacttgaataacagattgcacaagttgaactcaaaccattatggagaaaaatgcacctttccacgaaaccaagttcggcataattntatccactattggacgtagaaaacttcttttaggacgaccttgagagataggaacccccaaatacctaaaggggacagagcccatngggaaacccataacttcccttataataaatattttag

SEQ ID NO: 256786 - DNA, 256 bp, Glycine max
tcgatataattacgcggactctaatctggacgatcccacgataatatttattggcgggccgcaatcgctatgagcttctgtttcgaatttccagaatctcgatatattacgggattcattcagacatccgagtaaaaagtaattgtcgctttaatttcctcagagcttatgttttgaatctcgagcgcctcgatatattaccggacttaatcggacatccgagataatatttattgtggtttgccattgctatgag

SEQ ID NO: 256787 - DNA, 389 bp, Glycine max
  unsure (1)..(389): unsure at all n locations
tctagcacattcagaccataataactntgtactcggatgttttatttgtgttccgagnatatcgagacgctcgagagtgaaaacagaagctctgagcatattcaaacgacattaactcttttctcggatgtacgattgtcgcccttagcatatctagacgctcgcgattgaaaacggaagcttgtagcacgattcaacgacaataacttttaactcaaatgtctgactgagtcccgcactacatccggacgctcgaaagtgaaaacagaaggtctgagcaaattcaaacgacaataacgtgttactcggatgtccgattgagtcccgcaatatatcgagatgctctaaattgaagatatgagcctctaggaaatacaaacaataataac

SEQ ID NO: 256788 - DNA, 416 bp, Glycine max
agcttgaccaatcccgacccaacccgggcatattctgtcagtgagaacctgtgatgtacctaagcaggcgagctcctggcagtcaacagataaaaggaaaacaagaccacaaagcaaggaggcttgtggtggctggccacctgtgaatattgtgtaatatgtggatggtggcctctggtaatcgattaccaagggtgggtaatcgattacaaggcttaaaattgaggacaggaggctaaaatggtctctggtaatcgattaccaaggggtgtaatcgattaccaggcttgaaaacgaagtcaggaaacttatggagcctctggtaatcgattaccagcctgtgtaatcgattacacagaggaatgggtcactggtaatcgattaccaggcatgtgtaatcgattacacagtgtatt

SEQ ID NO: 256789 - DNA, 307 bp, Glycine max
gtgttgaacggtgaaacttcctgcttttatttttgaccacagagtggtacctggagatatgtcgcgggggtcaagagaccttggggacgtcaggtggggtgctattgcccaaaaccaagcttgaccaatcccgacccaacccgggcatagtcggtcagtgagaacctgtgatgtacctaagcaggcgagcttctggcagtcaacagataaaaggaacaaagaccacaaagcaaggaggcttgtggtggctggccagctgtgaaacttgattgatatgtgagatatggtctctggtaatccgatacca

SEQ ID NO: 256790 - DNA, 404 bp, Glycine max
  unsure (1)..(404): unsure at all n locations
agctngtagaggctcttaaaagctgtcctataatttttcttcatagactaagctgtagccttcatcatgaactcatttttgtactatctgtcaattctcatatagacacacacacacacatctctcagcaaactaaggctgaagatcctttttgtgtgcatattttcatactccaacatcttaagttggtatcagagcgggacgatcccgctctgcgcttttgtctctgtctatcactgatcaccatcaccaccaccactgaccaccgtcaccgatgccgccacacctatcttctacaatacccagatctggtgtgtcttcttcaacgcatcccaaccccggaggttgtgaagttagaaacattaacatgcactctcacgcaccacttcttcacgtgtcattct

SEQ ID NO: 256791 - DNA, 484 bp, Glycine max
  unsure (1)..(484): unsure at all n locations
tactaagcttgaactcttggcaatttatttaanaactaatcacttatattgttattacttnttgaaaaatcttcagaaacaagtcacttgaagaattgtgactcttggaaatgtattttttgaaaatagtcagtggtaatcgattacaattaaggtgcaatcaattacacatcagcagatgtgactcttcattntaaattttgaaaatcttaacgttctagaacaatggtaatcgattactacantttggtaatcgattaccagagagtaaaactctttggtaatgattttgtgaaaacttcttgtgctactcaatgttttgaaaaactttttaatacttatctngattgagtcttctcttgattcttgaatcttgagtctcgaatctcgattcttgattcttgaatcttgaatcttgaatctttgcttgaaactttgcttaactcttgattctntggcatcatcaaaataaccttggaagaca

SEQ ID NO: 256792 - DNA, 414 bp, Glycine max
  unsure (1)..(414): unsure at all n locations
agctngtaaagcaatgataagatatttcttttctctcaagcggctcacgaggtgtacaagttaatgatcctttgctaccctgcaatgagacacacacagatacacaaacacacacatatagagacaaacacacgcagacacaaacacaaacacaaactcacacacacacacataatgatactcacacacacacacacagagtcacgcacacataaagacacagacaaagacacaaacacactgagccacagacacacacagagatccacacacaaagacacacacactgagtcacaaacacacacatacacaaacacactcacacacatggacagacacacacacacataatgagacaaacccgcacacacacagataaagagacaaccacaaacacacacactcacacacacg

SEQ ID NO: 256793 - DNA, 412 bp, Glycine max
  unsure (1)..(412): unsure at all n locations
tctgtatggcgatctgcagaagaacatatatcataaaactctctcaacacgtgtagatttctgattcatggcaagctgagttactaggttgacaaaggcatcaagttttccttcaagctttttattttcaatatatgaagatgaatatgtggccacctcatggattcctctaagaacaatagcatcatttcttgcactgaattgttgggagttggaagccatcttctcaatcaaattcctagcctcagtaggggtcatatcaccaagagctccaccactggcagcatcaatcatacttctctccatgttactgagtctttcataaaaatatcggaggagaagttgtcanaaatctggtgggagggaaactggccatagttcttaaatctctctagtattatataagctctct

SEQ ID NO: 256794 - DNA, 339 bp, Glycine max
cagcagcttgaccaaacctgaccacctttctctgcccagggagaagtcaaccgaccctcgaagcaaaagaaagacggaaaatcccatcaagaaagggaagaaggagactcccctccatagaaagcccaaaagaaagaaggagccctcccacacaaagggggagacgccccacgaaagaagaaaattcccaccaaacaatgggagaaagataataaggagaagaaaaggaagaaactcccgacagggaccgaagaaacacaaaagtgcaaaaggctttggaccgacatactgacaaataaattgcactatgaaccaagaagaaggaacccgaccaaaagg

SEQ ID NO: 256795 - DNA, 416 bp, Glycine max
agcttgactttcgtctacaagtaaaaggatcatgcctactaaatgattttctctcaaaacaccttaatgtaactagcaaaggtgaaagtctctctactagtgatagaacaatgacatgatgcgtttaacaagcaatttaacgaggtgcaattggaagatagccgacccacaacaagattaacacttaactgattaggagacaataattttaaatcaagaatgatcacttattcagaatcaacaacaaatattccaaatgaattctagaaaccaaaacatgaccatagtgtacacacatatggagacgtcagacagtttgacataagcttataacacaaagaatgaattatactcgggcttgcaagtgtaatggagttacttgacttcaacatgcaacacaaaaaaatggattgtac

SEQ ID NO: 256796 - DNA, 468 bp, Glycine max
  unsure (1)..(468): unsure at all n locations
ttgaatgctctattcaatggagttgacaagaatatcttctgtcttatcaacacttgcacagnggccaaagatgcatgggagatcctgaaaaccactcatgaaggaacctccaaagttaagatgtccagattgcaactcttggctacaaaattcgaaaatctgaagatgaaggaggaagagtgtattcatgacttccacatgaacattcttgaaattgccaatgcttgcactgccttgggagagaggataacagatgaaaagctggtgagaaagatcctcagatccttgcctaagagatttgacatgaaagtcactgcaatagaggaggcccaagacatttgcaacatgagagtggatgaactcattggttctcttcaacctttgactaggactccggatgggctgaaaagaaagcaagacgtggcgtcatgtcaatgatgaggagaaaagatgagatgacctgatact

SEQ ID NO: 256797 - DNA, 410 bp, Glycine max
  unsure (1)..(410): unsure at all n locations
agcttcaagagatcatccctttgacaatattattgtgtgaatcccaaaaggggnaacaactagacattcttttaaagatttatgcaataatatggcttttgtgtctatgattgaacctataaatttaaatgaagtcataatagatgatcattggatagttgttatgcaagaagaactaaatcattctgagagaaacaatgtgtgggaactagtagagaaacctgaaaactacctcatcataggaacaaaatgggtatttaggaataagttagatgaacatggcataatcattatgaataaggctaggttagttacaaaaggatataatcaagaagagggaatagattacgaagaaacatatgcttcagttgcaagattagaagccattacaatgcttntagcttatgcat

SEQ ID NO: 256798 - DNA, 398 bp, Glycine max
agctttgacagatgactgtgaaggaagtttattacttttcataaagactcaaaactttaggatgccagttgtcaacccctacctgaaagaagctctgccactgcctatgaaaatatatgctgctttatgtttgtttaaatgtaaatatatgcaatcttttgtaatttattctaaattccccttctatagaatttgatccttacaatctgttggttttgattgcaacatgcttgatgatggtcttgtgcctatcggaggttccctcattagcacacaacaccaacatacttacataagttataaactacatattaagccattgtggtttccaagtttttcctgtgaaaatgtgatggcaggcatgatacatggcgtggcttacagtttggatgctaatc

SEQ ID NO: 256799 - DNA, 466 bp, Glycine max
tcatgtttcattcaagaaggagatgataaagaagaatttttgttttagaagaagatgatgattccagcttcttcgtaaagagattcaataaatttctaagaaacaaaggaaatcaaagaagatcaaacttcaaaccaaagaaaagaagagaagattcatcttctgttccaaagtcttatgaatgtaatcaaccaggacatttgagagttgattgcccgagtttcaaggaaagaatggaaagatctaaaaggaaaaccttcaatgataagaaaacaaagaaagcttacattatttgggaagataacgatatggattcatccgaatactcaaaaaacgaagtcatgaatctaagtcttatgaccaaaaattatgaaagcaatgaagaggtaacatcttctaacaataatttatttatttcctttgatgaacttcaagatgcattcactggattacataaagaatcagt

SEQ ID NO: 256800 - DNA, 401 bp, Glycine max
agcttataacactgctagggctatttattgtatttacattaagcatctaaagaagttccaacataacaacaatagtccaaacccaaacacagaacaccaaatttcttgaaaccaaaccaaatgaaatttcgaaaaccatacacacataaaaggattaattggaatttgtgtggtttagtaatggaatttgtgataaacatttgtagatcatggttaagactagaggattaggccatgcattaggtagggttgttgccaaaggtctggggagaggggagggagatgattctaatggtgttccccagcaacgaaggccgaccgcatcggcacgtaggcgacgggtacctatcattgttgacgatgttgtgcctgcggtacctacggactcgcctgtggtacca

SEQ ID NO: 256801 - DNA, 398 bp, Glycine max
atagaaactcacgctccgaggaagtcgagaagaaacacatgttcgctattatcttaatggggagaatgcgaatggatgtatacatgacttggcttatccaacatttccaaacctggtgggtgatcaacatatacttcttcttgaattaagccatttagaaaatcacttttaacatccatttgataaagcttaaaattcattatggatgcatatgctaagagcattctaatggcttctaatctagcaaccagagcatatgttgcttcataatctataccttcttctcgatgatatccttttgcaacaaatatagccttatttctaacaattattccatgttcatcgtacctatttctaaatacccattctgttcccatgatgggatagattttacgttt

SEQ ID NO: 256802 - DNA, 405 bp, Glycine max
  unsure (1)..(405): unsure at all n locations
agcttgtttcttgcaattccaagatacaagatatcttcctaagaaatggcatgtgccaggtctactcttcctatctagtttgcaccctacagaattagaatctgaaaagccaattagatttaaggaggtacctttgggataccacaaaccatcattggttgtgcccttaaggtaattaatgatccttttaacaactattaagtgagattccttaggattagcttgataccttgcacacaagcaaacactaagcacaatatctggtctacttgcagttaagtaaagaagtgaaccaatcatacctctataccttaacttatccactaatttacctttttcatctaagtcaagataagttgatgttgccattggagttgatgcttctttgcactttntcatgcttaa

SEQ ID NO: 256803 - DNA, 395 bp, Glycine max
  unsure (1)..(395): unsure at all n locations
tncttcccaactgagtacctaaacacaacacataccataaatctctgaatcaagaaacagtataacacaatctatgaaaaccccttggtgaaaaccccttgtcccttgggaaccccgttctcccattggccctcgtaacggttcctgctagccaaaatgagcgtcccacggcggcaaatgacgccactcttctactccccgtagtactcattctcattcttccacacgtagcgcccctccccctcctgcacgttccgcttccacgacctctcgtacaagtccccgttcgcataacgcttttgaccttacccgtgctttttgtcggagctccacaacccgcggtatgtgtcgcggtcagatttggtgaactttctgaagccatccattcgacctga

SEQ ID NO: 256804 - DNA, 409 bp, Glycine max
gcttgtcaaaatattataatttttttttctttttacttcacactcaagattacaaataagctctcattttataagaacttacagaacaaatgcttagttaacttgtttaccaaaacatgccaaagtctcaattaaaaaacctggaaaggaagctataaagaatttaaaaggtcagtcacctgtaatttagtaaaaagtcatataaagcatgtacattgttgttgccactaaaagccagcaaagattctgggctattatcaacatcagagaatgaccttaatcgccgagtctgtgttatttcaaatagcaagcaccaattaatgtaaattatacatagagaagaaaaaaatagcactggaattaattgatagacaaactcacagaacaccataatatgcacaaaaaggac

SEQ ID NO: 256805 - DNA, 449 bp, Glycine max
  unsure (1)..(449): unsure at all n locations
tatcgatatctgcatacattcaaaatctattattcttatttttagactggaaatggaccagcctatatacagtgatgcctatatggcatgagaaaaaagaaatcaggaaagagactcacacagagtaaaggagaaagctccccagaacctccagttagtgtgagtggaatgtttaaatcaaaatcattctgatcagttgaagatgcaaattcagcaatattcaataatgcggttccaattgcaggaaccttgtttttcggcctctgattcaatccctgcaatatagaatgaatccaaattctgttcagtgaaaaaaaaaatgacacaatgccatgcctattaacccatggaactggaaagaaaaaaaaaacatttcaaattggtccttaattaacctatgacaaactaaaataaaatacaaanatcatacggacaaaaaagtccaccac

SEQ ID NO: 256806 - DNA, 198 bp, Glycine max
gcctccatcctctacaaactattcgatgcatacatgtggatgggctaatacacagaatgtccgccagaggccaccctatagccttcttatgcttcttgagaactgacaacaacttctcctcttgctcattagcaagggaggcatatataatcactggagaactctcgctatcatccaagaaagcgcattttaaatttg

SEQ ID NO: 256807 - DNA, 374 bp, Glycine max
  unsure (1)..(374): unsure at all n locations
gtatcgannacgatcgggctatgggggatctaattatagagttcttaacacatcacagattttcttagattataaacctttcttcttactcctacatgatgatgcatgatgcacatatgaaatgatanagactaagatgcaacacacaatacaacaatcaatacacatgtcactccagagagttggacacactatatataaaatgacctattcctatggacgaaaatttgtactatatatacaatattcgtacgtacatatatgatagactntgtgcttccgaccgttcttccgtcacttttattgagcgtgaatgacggtaatcgtctatccctataggtttactactatgtatacatgtaggtaaagtatta

SEQ ID NO: 256808 - DNA, 403 bp, Glycine max
tctatgaatctacgatagtattctgctattctaatatagctcctaatctcaaacactgacttaggactctcccaactcatcaccgcctctaccttggaaggatctactgctatccctcccttagatataatgtgccctaagaagctcacctcctctagccaaaaatcacacttggacaacttatcatacagtctattgtctttgagggtttgcaacacaactctcagatgctcctcatgttcctctctagtcttagaatacaccaagatatcatctatgaagaccactacaaaactatctaggtaggggtgaaagatcctattcatataatccatgaacacaccacgggcgttggcacaccaaaaggataaccaagtctcataatgaccgtacgggtcctaaa

SEQ ID NO: 256809 - DNA, 500 bp, Glycine max
  unsure (1)..(500): unsure at all n locations
ctaagctgtgctgccgggacactnntgtaaaaaaaaaaacacacacctttttttggtcctaatatagggatgagagagccttgaactttntgtcatttcaagaatatccagcaaatctacacttgtgctactnttgnggtacttatatagtcattgaagggcaaagcaagtgcgcattctcatcatttaatatatttgcagcttcctgcaaagtccaataacataatatattccattattgtatcaatacaagtctgcagtacattctttcccnccattgttcctttctgggatcttgaanacagtaagaataaaaaaagataatngatgtttaatttgtgtattttctgaaggcagtatacaatttggctcgtaaactccatctccgatgggcttgctcatgtattggcatactntattctctatcattgcagaagattttcaattntaattattngaatcataacacttggttatgaaaatngatcctctgatcaatt

SEQ ID NO: 256810 - DNA, 363 bp, Glycine max
tgcagcttccaagttataagttcttcctagaactgttcttgtttatttctctagcctataacaacttcgtttgccatcgtttgtgggtgaacgtggttgataaaacaatttatagcccaacttgctcgacaaagtcctccaaacatggcataagaacttagagtccctatcgctaacaatgctccatggcagaccatggagtctcacaatctccttgaaaaacagatcagccacatgggaagcatcttcaactattgtacatggaataaaatgagcccttttagagaacctatcaacaaccacgaaaatggaatctctatcattgcttgtttctggagacccataacaaatccatggataaat

SEQ ID NO: 256811 - DNA, 437 bp, Glycine max
  unsure (1)..(437): unsure at all n locations
cgtgcgtctcgatatgttacgggactcaatttatcattcgataataaagntattatcgcttgaattggctcacagcttcaacattcaatcccgagcgtctcgatatgttacgggactcaatcacacatccgagtaaaaagttatggtcgcttgtatgggctcagagcttcacctttcaatttcaagcgtctcgatatgttacgggactcaatcagacatccgagaaaaaagctattgtcgttcggattggctcatagcttcaacattcaatttcgtgcgtctcgatatgttacgggactcaatcagacatccgagtaaaagttatggtcgtttgtattggctcagagcttcaacattcaatctcgagcgtctcgatatggtacgggactcaatcagacatgccgagtaaaagttatgggtcgttggattggctgaga

SEQ ID NO: 256812 - DNA, 293 bp, Glycine max
  unsure (1)..(293): unsure at all n locations
accgagcagcgctgtacaagcaaccaaaactaactcgatttcatgagncgaaatatgaggcgcgactgataagaactgaaacaatctacgacgatgaattaaccggaatccatgagcccgaataataagagtcgaaaggaacagagctagagaaatcaacacgataacttaactcgagtcaattggcctgaaaatcgagacctcaaataaaacgagctcggactatcaacgacaatcctgacttgattcgaagaggcccaaatatgaacgccgaaatgaaatgaactcgacaa

SEQ ID NO: 256813 - DNA, 529 bp, Glycine max
  unsure (1)..(529): unsure at all n locations
ctctgatactcagctctcatttcatttcaagcatcatgatatatgacgggactcaatcttgcatccgagtanaaactaattgtcgnttgaatttcctcagagtttctattttcaattatgtgagagcttctgtattaatttcgaccgtcataaactattaaataagtcaatcggacatccgagtcaaaagttattgtcatttgaatttgctcacagcgcctgttttctattttgagcgtctccatatattacgggaatcaatcggacatccgagtaacaatttattgtcgtttgaatttgctcagtgtttctatnttcaatttcgtgcgtctcgatatatgaagggactcaacttgacatccgagtcaaaagtcattgtcgttcgaatttgctccgagcatctgttttaaatttgagcgtgtagatatattactggactcaatcggacatccgagtacaatgtactattcgtttaaatgtggtgagagcctctgtatcaagtctgacccgcctacatattaaataaatc

SEQ ID NO: 256814 - DNA, 336 bp, Glycine max
tacgagggagtacgtgagctcagttggaggtgagtaacatgggattgggggcttatgcgcgctttgtggatgtggaaacttgatgagcaccatctcccgaccgtcacctagtaccacatgtgatggggaccccataatcctacaagcttgagatgaggaagtgtagatggtgaacttcctgcttatattcgttgaccacagagtggttcctggagatatgtcgcgggggtcaagagacctttgggacgttatgtggggtgctattgtccaaaaccaagcttgacctatcctcacccaacccgggcatagactgtcagtgagaacctgtgatgtacc

SEQ ID NO: 256815 - DNA, 477 bp, Glycine max
  unsure (1)..(477): unsure at all n locations
cttctggaggctntctctctagacgataagacctacttgttctttgtctattgagagccaaagaatatattctctctgacctttcgtcttgctgaagttcttgttcatgaactttgagagtaccaacaagttcttcaagggacataaaatcaagattctttatagcccttagtgttgttacccatggtctctattttttagacaaacttcctaagaatgtttccatatgatcatagttatcataagttctgcttagagatattaattcattaagaatggtttgaaagcatccaaacatactctgtatgtcttcgccttcttctatagagaagagttcatatctacgagtgacgagacctagcttgttcatctttacatgtgacgttcattcacgtgttatagctaaagtgtctcacatctggtttgcactcttgaactaagtactttggtgtattcttctctcataatgatatagca

SEQ ID NO: 256816 - DNA, 353 bp, Glycine max
  unsure (1)..(353): unsure at all n locations
cacaacaagntatgcacatgcacaatgcgcgcataaacncaccatcccctgttgcccacctccaactgagctcacgtactcccacgtagcccatatgctgcgtttctgtcaacaccgggatcccatcaatcctctcaagcttccacaacatccaagcacaacaacatttaaacagcataagctatcacatccaagcataagcagagcacaggcagaaaactctgctcatacaccaaccaatatcacagctgttctcacttaaagaccacagtaaccaattccttcgatccaattctgttaccgttggatcgactccaaaatatactggaagtctttttgcataaccctacatt

SEQ ID NO: 256817 - DNA, 404 bp, Glycine max
  unsure (1)..(404): unsure at all n locations
acttcctcngtgaccatctttgtcttgaatggaattgccatgacaggtttgttgttactgtctttgatatttggtagttgatattgtgttgtgggaggtaattccgactggattaactcaccatccttcacttgccaatttgttatgacatttgttgttggattacctatgatgtcttgtttccaagggtagtctatatcctttctgatggcataagcatgaaaccaatcaaagaaaaggacattaatnttgactctttcgacaaattcgtagaacttgtcttggatttgttttctgtttgtacccttgtaatgttggaaaaaccatctactttgaggttcattctccggagaatagaaatnttcctaagggttccttaataatactaaagttgtccataacat

SEQ ID NO: 256818 - DNA, 471 bp, Glycine max
  unsure (1)..(471): unsure at all n locations
tcctgtgcagtgtctaaatacatgcactatttatattgtgttcttctatctggtatcatatcggtgaaacataatggatttttagagagaagaccaacagtactaccanggataggatatggtatactccaaagcaaaaaattgtggatacaaaaggaacactaaaaagtcaagaatgtaataaggcaatcagcatgtcataaatatcgactcccttgaagaatccatgtgctgagtctagtacanacatgatactatcccacaacaaatttatgactcaagagatacgcctcttatagatgcaaaagcatttcactaatacacacacttatgcaaaaccataaaatgcacattgtacttgatttaagccatcattatgaatatatgtaacatgatcatgaaatgaacttaatccttgtgatgaaacaacaaataggttgacagatccctactttctttcacgtatcctgt

SEQ ID NO: 256819 - DNA, 446 bp, Glycine max
  unsure (1)..(446): unsure at all n locations
agacataatattctatttccatctttaagtttaagtaacaacacagagggtttaagagaaatcttgtttacttaaacgtgttgtatgtatctaacttgaagcaaaaaacggctaaagaatatttccctcttcacactaaaactaaaaatgaagaagatgattaacgttggattaatttttgaacttcctcaaaagtgtctccatcatgagcagatgcattcacctcttcacctagatccttatcttcgaaaacaatgcacacaccaaattgccacgatataaggctaataaatccgacttttaaaatggtgtggaaaggaatcacgagattaccccgcttttgccttgtgcttaagtgagagggttgagaacttgctatgagtttcttcgagcacgtggaaatcgnggtcttctttcgaatcgtcccagtcggaatccgagtcgga

SEQ ID NO: 256820 - DNA, 369 bp, Glycine max
  unsure (1)..(369): unsure at all n locations
atccttaagtcacctgcgggcatgcagctngaacccaactcctacagtgatgaataaaagtgttttaaaattcctggggagttatacatttgtgtattgataagaccgttcactatttcttgaagctcgatctctcccccggatgaaccatatagccaagagaaaccatgaaccagaatagaagagcttgccccacccatgagtaaatatttcgtaatatcctcattagaccgtacatctttcttggtatatccagatagtagataggaacataaactgaaacattctagagctacaaagatagttattaaatcgctagcgccgcataaaaacattcctcctagagtagctgttaatatgaataacaga

SEQ ID NO: 256821 - DNA, 534 bp, Glycine max
  unsure (1)..(534): unsure at all n locations
tactcagcttttacaagcatacgctntctggatgagatgatgatatctatatatatggatcttatatatctatatatctatagatagatatatagatatagatatatagatatagatcatacaatgaagtaccgcacgagtgggtatataggaatccaaatctgccgaatcactcatgttatgatcttctacatcctaggtcttcccgttccttcatctggcttatgttcttcatgtagcattcagactgaatgactctatgaaattacgtcgctacttccacatggtacgggtaacgtaggagacatctctatnntttcccgggggaatccttagaattaccacagcttagctntcaattcgcctctgaccatcaaatgaaatgtgaataacccgtccctccctctntgaaactttgaaacaaagggtgcttccgggtctgtcggtgcttgaaacaatattgtcttcttcatattactatatctcgagagtcaataatntatatgaggactactgaactcatcacttgctgcg

SEQ ID NO: 256822 - DNA, 387 bp, Glycine max
  unsure (1)..(387): unsure at all n locations
agcttgcatgtgtcaactcatgtattataaaattcaatggaatacctttcatttaaaaacaatcaagaaaataaactttcaataaatagacatacataatgggaacactaaaatgaggtaaagacggaaaaactaaaacaacacttacgacaagcttctaacagtgctttacaacaagacgcggcgactggagaagatggcaattcgcgaattacatgctgaaaatgtgtataaataagacataataataatgtatgaccaacataaaggaatcaatacttcagttntccatgaaaataccttaacacagtcaccaacaacatgtgcattctcgtctggagaaaactcaacttttcctgctaccatatggcaaacccaagagcataa

SEQ ID NO: 256823 - DNA, 387 bp, Glycine max
agaattacacatccataacacaccatgtaccaaggaggaaaatgggtgagcaaatacaataaaacatagagaatgtaggacattaggtaagtagaatgacaaactatcattacaaactacttgatattgtgttatgcattctaggataggaattactaatgagtttattgacccagcattgtttaatcattaacgtgtgcaaactcttatgtgtcttgacttctttccacacaatcaggtgtgtaaaattaacaacataatatcccaagagaaaagctgcaccaccatagccacagctgtcatgtctttcacgagacatgactatagccatgattgccaccatctccagagatctaataatgccaacagtggatattgtgtgtgtca

SEQ ID NO: 256824 - DNA, 370 bp, Glycine max
  unsure (1)..(370): unsure at all n locations
catgttcaagctatagacattatacacattgaatatatgtgggtgttgtttatttcatcgtcacattangcaaaaataatntatcaactttacttataactaatttttattaaaaaatctaatcacttttaattaatacgtctctcttcctgagtacttctagaatatattaaattaagtctctatgaattattttagaaaattattgattaaaaattataaaatcagaaaagacaattattaaataagacatgtcttataagtgtttgtgattttcaataaaacttaggtattcttaacatctctcattatcatcataagatctgggttcaccgcgagaccatgatcatgacacataacaaatcaagct

SEQ ID NO: 256825 - DNA, 509 bp, Glycine max
  unsure (1)..(509): unsure at all n locations
ctctgcgccgagatcacggctaactngacattccgatgtaatctgcatgcataaagaagagcagtccacacatcctcattaggtttcaatgtcatattctctataactgcataagcttcatctaagtaccctgctctgccaagtagatccactaaacatgaataatgagttggtctaggctccacactatagtctctagtcattctgtagaaaatctctttaccctcgtccactaatccagaatgactacaagccgataaaactgcagtgaaaatgccctcatctggtgtcacacctttacctagcatttcataaaaaatggagatggcctctctcccnctcccatgaattccanatccagtaaccataaccgtacaagcaggcaaatttttccaggcatctcatcagacacacgacaagcacanaccaaacttccacagttagcatacatgccaataagtgccgttcgcacaacaacattcacaaacataaccctcttaacaacatat

SEQ ID NO: 256826 - DNA, 404 bp, Glycine max
  unsure (1)..(404): unsure at all n locations
ctgctgaaatatgaggctgatgaaaagaaaaacttttggtttaataaaaagtttcctctttttctattattttattcaagctctgccacatgtccctatntgattggagcaaaaagggcccactctctctatttgactgtgacccatactccgtcacaaaagtgagaaaaatctgacctttgaaacgctaaaactctgcctcggtttgcgtgccgtttctctgattccagtttctcgcgtttctctgcgtccgccggggccagttttctatagcaagcaatatatatatcacaacgcacagaataaaaccncgagcgtggattagagggtggtgtcgttaacttttatgtcgcacgccaaaggatgattnttaaactaattaattaggaattaacccataacct

SEQ ID NO: 256827 - DNA, 421 bp, Glycine max
  unsure (1)..(421): unsure at all n locations
agcttctatcaccaacctctctctcagcaagacccatttttgtattctcacagagatagctgagggtcaattcttgcatcccagaagtggcaaactctgagggtgttgttgaccgaaactcatcaaaactcggttatttctcttgagggtgttccttgttagcatgagcaaaaccatgatgctgctgatgttgttgcaccttgttccttgagttctcactctcggagtcaacgccattgngaacaagatcttngcctccaatcatggcagatggaacaggaaacaagataaataaggacaaggaaaagctcttagtaccaatggccaagactcattgagaaagagaatgagagagagagagaactctcagacctaaacctatactgtgtntgagacactacacagggatatgtcataaaac

SEQ ID NO: 256828 - DNA, 471 bp, Glycine max
  unsure (1)..(471): unsure at all n locations
cagtcccacgaacacataaattaaatccacgtgtacattttcatgtntctcatattaccccagataagacagacatgttaactgcgttctgctctagaaaaacaatcgtaaagcttcctagatgtcattaatggggttctctacacaagctagtacccaaaatctcaaagctttgatgtttcctaaatcccccaattccaattccaaaaccaaagaccttgctttgagacacctacattgcttttgtctttataagctctatcattgctaacanaacactcttctactagtaaaggtgatgatgtggacattatccatcaacattgttgtgcatgactcattntctatgggtggacaaatgttggactggagcaaagtgcaacgaagcataagtgaagacgagtggagcgacaatatttgcctttgggcctgcccacttgttacctgttgttggttacaacgtggggggat

SEQ ID NO: 256829 - DNA, 496 bp, Glycine max
  unsure (1)..(496): unsure at all n locations
actagctatagacaacatgcttatcacttccacaatgcatgtgaattatgtatcatcatcaagaatcaagccanggctgttgtgcaacccatcaatggggccaaacacaccaaatgattataatgatggatggctcacattctcacaaaggcaaaatcatcactttcatattgagctttcaaaactatcatgacatgtagagaagaatcaaggacttcaagtcacaaaatgtcaagaacttttatttatcaaacaattacccatttctggaacatatcctgtaattcaaagaacaacatgcaaagtcgtacgtgcacatgaaattgacccatatattaaactgaaaatcgacgaactaacaccttaacaattagctcacttacaaatgaacaaaccacaaactagcaaaacaagaacactcccccatactacacaccattgcctcatgtaccaattaaagataaaacattaatatcaaagatcgacagtgtataac

SEQ ID NO: 256830 - DNA, 306 bp, Glycine max
attcacttgtgaaattcgaagttagtatcaggcttcttcacgtttgtcctataacccttctcgaagtcctttggcagtatgacatatctattcttgcgaacagcatgcattccagcttcttgacaaatatcggatatctgcgcgctccaacaatcatctgctgataaaactgtgtatatatatatatattacaaagacctgtagagatggcaatcttctatcaggcatatattcacatttgacttgattgtctttcttatatatcacagctacctcttgtagaaatataacctgtacttaattatg

SEQ ID NO: 256831 - DNA, 511 bp, Glycine max
  unsure (1)..(511): unsure at all n locations
actcagcttcagagagtntacactactctagagttctccaggacgttctatataattctacactcttctagaacactctagaattttctagaacctctccaattaaggaaggatcccaacacttacaaaccttaatcctactgtaacttttntccttaatggttcatattaatcttagagtatgtgagacagaaagtatgtacacgtattagtcttcataatgattagattatatgcctcatcatctggatttaatttggaacaagttgacattgaacaactcanagatntacccttataagttaagagcacacactaatggagagagcctacagataaagctagagaaattccagacagtgcatggacattngttcatttagactttaaatgtgatcataaaccacagcactcagttcttgtaaactctancacatttacaggtccttgaaaatatacatgattgcaaccatcattctgttgaaaactctactatttttgtaaaatgtat

SEQ ID NO: 256832 - DNA, 435 bp, Glycine max
  unsure (1)..(435): unsure at all n locations
gaatcaagccaaggctattgtgcgagcaatcaatggggcaaaacacaccacatgattataatgatggatggctcanattctcacaaaggtaagatcatcactttcaaatagagctctcacaactatcatgacatgtagagaagaatcaaggatttccagtcacaaaatgtcaagaactcttattttcaaaacaattacccatttcttgaacatatcctataattcaaagaaaaacaagcaaagtcgtatgtgcacacaaaatngacccaaaatattaaactaaaacatcgacgaaactaacaacattaacaaattaacacaactaacagattaacaaaaccaacagaactagcagaatcataagaacactcccnctcgcccccgcncatacttatacacacattgcctcattgggcgccttacaggattaaacat

SEQ ID NO: 256833 - DNA, 405 bp, Glycine max
acatgtgtattgatagtagcatcctagtgcctattttttcatgtatacctcacgcatcatcatgataagataagaagattgtttctagagttacaaactacttcagtgcatataactcttttgtttaatcgattacgacgctaatcgtaattgattacacaagtgtttgcagcttgcagagatatactagctttggctcaatcgatgacagttaactataattgattacacagttcagtttagaccatgtctgtttttcatgagtctctgctttaatcgattgccaggtataataatctaatacttcgttcataaaaacgctcccgagagggatcaagaacattttaatcgataacatcaagaatctaatggagtacttcttcaaatagatcgatgcattgacta

SEQ ID NO: 256834 - DNA, 424 bp, Glycine max
  unsure (1)..(424): unsure at all n locations
agaagatgaagaaatccacgacatgtactattcttttactcacttttttattggtatttctcttttgtgtgtgtctccatggaggtttggtcctgcgtttctagtattgtgtttggatagtattttggtacctttctcctatcctccaattttgccttcgttntgattaagaatgcgctggctggttatcacctaaatcggggtggtatttttcaagagatgaaggtgacgaccagcgtattcaagccactatatgggcatctttttctgcctatctggaatcatcataccttgccaactcgttggtggacccncatgagtcaaatttacatgtaagtaatcttatcaaggaaggggcatggcaaataggaattatgaggacatcagagggtctgatgacaaaagagtcatcttttacgttgat

SEQ ID NO: 256835 - DNA, 297 bp, Glycine max
cacagagcttccatgtgcaatttcgagtgtctcgacatattacaggactccattggacatccgtgttaaaagatatggtcgcttgaatttgctacgagcattcgttttcaattacgagcatttcgatatattacgggactcaatcagacatcttagtaacacgttattatcgttagaatattctcacagcttccattttcaaatgcgagtgtctcgatatatttccggattccttcttacatccgagtaagaagtaattgttgtttgattttgctcagagcttctgttctgaacttc

SEQ ID NO: 256836 - DNA, 506 bp, Glycine max
  unsure (1)..(506): unsure at all n locations
ctaagcttgtctagcgttatgcgagacggagaccaacatgctatctatttcgtctagtaccaagaagagttaggtctagccgcggcccacgagcatatgattgcggacgaatatgcccaagtatacgcggaanaagaggctagaggaagggtgatcgactctntacaccaagaggcaaccatgtggatggatcggttagctcttaccttgaacgggagtcaagaacttccccgattgttagccaaggccaaggcgatggcagacacctactccgcccccgaagagaatcatgggcttctcggctattgtcagcatatgatagacttaatggcccacataattagaaatcgttaggaaacttgtatggtctctcagaccttgactagatacgacttcctcttnttttgaaataaaatgagttggtcccatgtgtctactccaaaaagcttgtgcacatcaaatcacttctacattntatctctagcatgcattgtatgttggtctcg

SEQ ID NO: 256837 - DNA, 445 bp, Glycine max
  unsure (1)..(445): unsure at all n locations
agcttgatagntcccaattatagttatttgttatatatacttgtttgtgtgaatagctgtctttagagtatatcccatgtgatttaatgataaacattgcataatttcaagtttaaaagaggctaaaatcttgaaatgctaaaaggagcagtcgcgctaagcagaccctatgggctcagcgcgcatctaccgctaagtgcagcttcagcacgcttagcgtgacaagggaatctgttagagcacaagaattgaggccacacgctaagcacgagatcatctcgctaagcaagatgttngtctntggccaggctcagcatatgactggcgccaagcccaaatccacttactcgtgctaagcgcgagggtgacgctaagcgtgatgtctcgaattcagagcctatttaagcctgaattgtcagaattagggtacaaaacacacaacaac

SEQ ID NO: 256838 - DNA, 374 bp, Glycine max
  unsure (1)..(374): unsure at all n locations
gagtacgacagtcaccgctttatgagcgttgtacaccagcagcgtttcgaagccatcaagggatggtcgtttctccgagagcgacgcgtccagctcagggaggacgagtatactgatttccaggaggaaatatggcgccggcggtgggcaccactggttacacccatggccaagtttgatccagaaatagtccttgagttttacgccaatgcttngccaacggaggaaggcgtgcgtgacatgagatcctgtgttaggggtcagtggatcccgttcgatgccgacgctatcagccagctcctgggatatccgatggtattggaagagggccaggaatgccagtatggccagaggaagaaccggtctgatgggtt

SEQ ID NO: 256839 - DNA, 345 bp, Glycine max
ctctctgatgcaacagatgtaactgcattggagcttgtacgcctaggatcttcttcatcaatagagtcctttgcttcttgaggtctgattgcagcggaatggagaatgagaaacctgaatggagacgtcacctcaagtagaagatgagtctaaaagaagctcactaccatataaagccatggataatagcttggaggtaggagaagcacaatgaaggccgaaggaaagagacatgatgtagctccattggagcttgtaggcattggatcttcttcatcaatggagtcctttgcttcttgaattctaatggcagcggaatggagaagaggaagagttgagaggaga

SEQ ID NO: 256840 - DNA, 363 bp, Glycine max
  unsure (1)..(363): unsure at all n locations
acacacttgaaagttcaacttctctccctaatctgcttgcaattccatgcaccctnctctctctctcattctcttcctccattgaagtttcctctctaagcttcttatccaaggctctctcttggtggtgaagcttctccttccatggcttattccttagtggatggcgcctcctctcacctcttctcctttatcttccgctgcaactctatnggctgaaatcaccatagaatgaccttattgaagctcanagatccagcctccatagaagcttctcaagcaagcttccatcaagtggtatcagagcacaagagcttcaagtaggtgctccttaaacctcaattaatttcatctatatcttct

SEQ ID NO: 256841 - DNA, 453 bp, Glycine max
  unsure (1)..(453): unsure at all n locations
ccatcaatctagtgaattctcaaggttcgagaggtgacaatgatagatggttaatattggggtaatctctcatctcaatcaagtctataacattgatttagacttgctcaaactggttttaaggtgaaaaccccagccattcaaaatttgacctctcaacacccaatttaccctataaatggctctcctctttcatatatgtcactcatttttctcatttgctctgcccaagctgtcctacaagtcctaattgacattntaaactaggatcaacccactttaaactccatattccactaaccccaaatatggcttttcaaaaccctcaagatctcacacttttccactcacatcactaccattctcacatgtaaccctaagttaactctgcacatcatctttaccctgtttctaccaacagattcagcatacaaatatcacaaagcatcatca

SEQ ID NO: 256842 - DNA, 490 bp, Glycine max
  unsure (1)..(490): unsure at all n locations
tatgcatgtgtattatgacgcatcaacaagaatcaagccaaggctattgtgcaagcaatcaatggggcaaaacacaccaaatgattataatgatggatggctcaaattctcacaaaggtaaaatcatcactttcaaattgagccttcaaaactatcatgacatgtagagaagaatcaaggatttcaagtcacaaaatgtcaagaacttttattntcaaaacaattacccatttcttgaacatatcctataattcaaagaaaaacatgcaaagtcgtacgtgcacatgagattgacccanactattaaactgaaaatccaacgaaactaacaacattaacaaattaacacaactaacaaattaacaaaaccaacaaaactagcaaaaccaaagaacactccctcccatacttaaacaacacattgtcctcaatgtagcacaattaaaagattaaaaacaattaaatcatcanagagaatcggacaagtgta

SEQ ID NO: 256843 - DNA, 499 bp, Glycine max
  unsure (1)..(499): unsure at all n locations
ctgcagcttaataagtatngattgtattgagttatagcttgcttctaactcttaaccactntnggtcctaaaattctaacgtttaggtagagtgcaggttgttgcaattctgcgtaatcaagttatcttcatcaaccattaatcggagcacctcatcttccccttttccttttattcttatcctagctaggaatgggattagaatttcggacttctctggttctacaatgtccttttgctactcggatttgaaatgcaaaatccttgatcattcttttgctactcagtaggtcacaaattaagttgattacaactcatacaaaccttgttgactctcaaacttttgtttcagccttcaaatctcccnctatggtctattgggaacataaaagcaggtggaacaacaatttagttttgatagtaattaataacatgaaacttactatgtcttcatattttctagaataaaaatctggtacatatagcttagctacacatg

SEQ ID NO: 256844 - DNA, 408 bp, Glycine max
ctttcaactgtcagagacgacctttatggtatagactggaacagcttctggatgagagacatagccaccgcatttgagtcgcccaagccggagtaccactttctatattctattagctgacaaaccgcagctaccctcgtacaagagaaaagagcactggcccctatctttttacagccacatgctccatgacaccgaaaacactccaatgataaaaatgggcgctagcctcatacctcggatgatgactaggccctactttaagtatcaagggagaaagacaactaccatcagaagtttgaaagctgactccagaacaggagctatccgcaatgtatgttgcattctcgataccctaagaccaatatgtgactttgcgattgtgaacaccccacccaaccattatgt

SEQ ID NO: 256845 - DNA, 66 bp, Glycine max
tgcacgcctcacttgctaagaatgcaaatttgtttttttctcactagtattagtcctattctttct

SEQ ID NO: 256846 - DNA, 330 bp, Glycine max
atcactgttaaacatgtgggggcgtttgctttggtgaggcaaggttttattaatatacgcttggtcgcaggcttttcattcaattttggtgctatgtcacagattgttccgcatgtgtctggactatggacaccaaagtttacaactcatttttaataatatgtgatcaatatattacattagcttgttttggtttatatgatataggactctggtctttaaatttaatatggcagccaatgctcatcggggatgagaatatttacaatcaacaaattgccttgtttctcttaataaaataaaaaaatgcagtgaaaccttcatttcgtc

SEQ ID NO: 256847 - DNA, 418 bp, Glycine max
  unsure (1)..(418): unsure at all n locations
atacatcactggattctgtacaatactacaattgtcatacatactgaacccaaacagaaaatgtggcagtttatctgttacaaataacccatctagttgataacataaccatctaattgattcatgatcatctggacttgggatataacttctattcatatgtaaactctnttctctctatctgtgatttaatacacaataattcaaatcgtacaaagttttaataatatggctctacatcatgcacatgcatgaataattggtatcttagtatttgtttgccttatctaactgtgcaatctatgtcataaatctacgttatcgcccaacttattagctcaaataaataagcgatattatttggggtatcaatgtatgcttatcgacacaccttgcatgccatgtgagtagctacttc

SEQ ID NO: 256848 - DNA, 270 bp, Glycine max
gcttaccagggaggcagggacatatatttctactttagacatagtcactttctatttccttattaattggtaaagatatgagggaatcatgcttccctttctcttcactctctgtcatattccctgtcataccaaacaactaaacactcaatcattctggtatcactccctttctattttctttctcaaaccaatagagcataaaggaagtttcttatagcaaccaagcactctgggtactcactcttaatagctagttgttacgacgga

SEQ ID NO: 256849 - DNA, 300 bp, Glycine max
cttctctctctctcgagattgctgaggaaaattagtttcgtgaacagaatccaagccgaggcgcttccataacgtttgcgtgagtaatcacgcatagattctcgaccgctcttcaagattcatcgttcgctcttagattacgtcagtcttcaacgggtaagtacctcacaccaagcttttcaattcattctatgtacccgtggtggtccacattatgtttcatgcacttttatctcgctttcatatgctttttatatccccctttgacgtgcctgagccatctatttaagacatttctcg

SEQ ID NO: 256850 - DNA, 394 bp, Glycine max
  unsure (1)..(394): unsure at all n locations
cactccaagtatggcctcggatcattctttcctttaaatggaggaatgttgagtntaataccatcaattcggttttgtctaggaacaccatcattccctcttctcttcctttcttcttcattatgatctctattctccatttgatccaacctctcatagagcgcatcatcttgttggttcattaacctctccaaatgttgcatcaaagcttgcatttggaattgcgaaagccccactccatcattaggaatagtacctgacatctcaaacaaacaaatcaaacgtaacaagacaattatagttgctgtttgaatacctcacccactcaagtgtatcacacaattatggctgttctctaatgaaacactcttgccttttaccactctaattcccc

SEQ ID NO: 256851 - DNA, 477 bp, Glycine max
  unsure (1)..(477): unsure at all n locations
gagtgtaatttctattattgtaaaagttttattaataaataatatctaagtaatgttttttttagtattgcagtctactatcatattaatgaattcctagaattcaactcacttaaaatttttattttcttctgtagtataaaattaataaataatattaataattaaataatgcattaaatgataataaataaatataatattataactntatagcactaaaaataaaaataaaacattatttattaaattntaaacatttgaagtacacataaatcaaatatatcataatacttaagtttanattttaataaaatacaacaatggttattgacaataccaagtttacatttagaataagaaataataagacattaatataatatacaattatangaaatcatgataaacaattgatatctatctgtaattcttattagatgagtggttttatcactctctacaataaatacatta

SEQ ID NO: 256852 - DNA, 407 bp, Glycine max
  unsure (1)..(407): unsure at all n locations
ttttatgaatctgcngaataaattaagcgctagctacattctgcaggcaagactatttcaaccattcacaatattatatctgtgaaatatactaatgtgcaggagaagaatacgatgattcctctacattgttggaaaatgcaccctggagattatcatcaatgataatttcctcctctctaggttcattcatattcgaatactagaagtaccttctaagttcaagctgggacctttgagggaacttctctcacccaaaaggttttgaaagttatttatccatcatggcagaagcatctcaaaacaaaagataaatgagctgattatatttaatgaataggcacatgtatggcgacgtaggctcaaataaccacatatccaagaagactattatgttctttcattat

SEQ ID NO: 256853 - DNA, 471 bp, Glycine max
  unsure (1)..(471): unsure at all n locations
cttgaacttgttgactcaatcttgttattattttngngctctntgtaatcatctgtgtcatcatcaaaactacttgaatcaacttgattcatcatcatgaagcttgcttctacaaatagaccttcctaaaagaaggagtgcattcaaagatgatgttgttgaggtttggaggaaagggattgctttaaggaaatttccttaaatgacttgttcttccaaaatagttggaaagagcatggacctcttcttctggaaaggtctcaaaagatgaataagagaagggatcaatccttggcacacctttccacaacttgacaagatttaacttctgaagctcaacctttttgcatttctaggtccaatcgttgaatgccaaaatccatcttctcactctatgctttgttgctagtctactctctagacaatatgtatccctgaagccatgataaagtctaacattgtcatctaaag

SEQ ID NO: 256854 - DNA, 251 bp, Glycine max
gggagcttcacgaaatatggtcctcagctccacaagacacaagcccacgagctgaccggtgggagctatgagaagatgcctagagtgtgctcgaaacttccgtacccgagaacaaatcctattaaagcatatcagcctctacattcgggtagcttaagagaaacaatataaattctccgttcattcgtccaaagccatatctaacgtgccaagcactatctccctcacccacagacaccatgagccaccac

SEQ ID NO: 256855 - DNA, 480 bp, Glycine max
  unsure (1)..(480): unsure at all n locations
agcttgttgaatctataatcaaagattctaaaccattatccaaccgtccattttgcatcatacttctactactcaactatcatccccaccccttcccaagttacaatccctaaaccagccaccccctaacttcccatacctacaatgaaatcaacctaaatgcaagaccataaaacactaagtttattctacaactgcgatgaaaagtatgtgcttggccataggtgtagtgcgaagcattctctcctgttgttggtcgaggatgatgctgattctaaaaccattgacccagcaactcctaacccaccctccttgatgaccagtcagaacctatacatttccatttntccccataagcctttactgggatcccttcccctcanacactcaaattccaagggattgatggaaatttacctctcactgtgctagttgattcggggagctcacataacatactgcgacttagaatacccacca

SEQ ID NO: 256856 - DNA, 457 bp, Glycine max
  unsure (1)..(457): unsure at all n locations
ttctcaggacgtgagcttagttatgagaggggtgtgtgtatatattctctatcttctcaagggaagtttctcaaagaagcttctcaaggaagttttctcaagaaagcttcttaaggaagctacctagtctataaatagaagcatgtgtaacacttgttgtaactntgacgaatgagagtcttgtgagattgtcgcaacatgcccttttggcgggcgaggcgaaggcgaggctcatgggtgcgctctccaaaggaggaaagatgcacggagtcgccaccaacgtttatttgtggaaaacgtcgggaaaaccgaaggagactggtcacaatgaaaattctaagttcgggagttgtatttacgtttgatgaaggtattagcacctctcacgtctgtctcanaggacaacagcctatnntttagaattgtggaaattggtgtaccctaactcttatttctt

SEQ ID NO: 256857 - DNA, 387 bp, Glycine max
  unsure (1)..(387): unsure at all n locations
tgcaacttatctaccagatatacaaggtgttattatataacctaatgattcctaattatatgggccatcaaatctatcatgtgctgacagtcattgactagcccatgaatctcctcgggggcagnacacacttcggccatggcttttgctttggctaacagacgcgggaggtcttaacttccattcaaggtcaaggcgaacctatccatccacatagacacttcttgatgcaacgcatcaatcacactccctcttgcttatatttcggcatacacttgtgcaaaatcctccactatcttttgatatgggccatggactggatcaattctatcattgattgccctatgatagctagcatgctttgctccgtggcttccaagtgttgag

SEQ ID NO: 256858 - DNA, 474 bp, Glycine max
  unsure (1)..(474): unsure at all n locations
ctcagctaaaagatggagtatatggagtgcggaagcatacttttatttaattgaatccagcggctgacactctggtgcttcaagatattcagcaccttgggttaaattcttctacaaaatttcaacagcttggatcgattaggtgaccacgcaccaccccggactgcaagtatgcaacctgtgatttgtatttcagaatgtaatggagagtgcaggaagtaatagtggaagtgctggaagcaaaacaacctgatgattatttatttaactntaaatattctaaattctgattaacatttttgcccgactgctattgattgacttgattctgctgttnttttttttcagaaacttgattgtgccgcaattcaccaattntatgtaagttaattaatatgaagaatatctactgggcattttttttttgtcaatatcgatggaagagatatacaanataatttattaatataaaca

SEQ ID NO: 256859 - DNA, 493 bp, Glycine max
  unsure (1)..(493): unsure at all n locations
gcttctcccctcaatttctataaatagggggagaagtgaagttgaaaagggttcacccctcctggtaattcagaatcacttaaaattagtgagaaaaattggttccgtgaagaaaatccaagctgaggcgcttccgtaacatttccgtaacgtttccgtgggtgatttcgcgaaggttttcgaccgttcttcgacgttcttcattcgttcttcgtcgttcttcggtcttcaaccggtaagttccctagatcgaacttttcaattcattctatgcacccttagtggtcctcatttgtttttacgtgctttcatttacatttcatttactttctgtacccnctttntgacgtgctntagtcatttgcttaagttattttcttgcctaatcaaaaaataaaataaacttccaccgatcatttgaattgtatcatccgttaatttcggttaaaatgaatntcgaccgttcggtcgtgccgtaaccgcgttggaaatc

SEQ ID NO: 256860 - DNA, 430 bp, Glycine max
  unsure (1)..(430): unsure at all n locations
tatgcatgtgaattatgacgcatcttcaagaatcaagccaaggctattgtgcaagcaatcaatggggcaaaacacaccacatgattatgatgatggatggctcaaattctcacaaaggtaaactcatcactttcaaattgagctctcaaaactatcatgacatgtagagaagaatcaaggatttcaagtcacaaaatgtcaagaacttttattttcaaaacaattacccatttcttgaacatatcctataattcanagaaaaacatgcaaagtcgtacgtgcacaaaaaattgacccanaatattaaactaaaaatccgacgaaactgacaacattaacaaattaacaaattaacaaaactagcanaaccaaagaacactccccccccnccatacttaaacaacacattgtcctcaatgtagcacaatta

SEQ ID NO: 256861 - DNA, 516 bp, Glycine max
  unsure (1)..(516): unsure at all n locations
gctgaggataatggggtacccatcacatgtggttctatatggtggtcgggctatggtgcatatatcaatcgtgtatcaatcgtgtctaaaccaaagtcaagcttcaaaccacagcaacacaaaatctatgtgtccaaaacccctcaatttaatggatnttctaggcttgagaagtgaaattgagaatgggacaaattngaagcaaactctcacctcacacaagtctataacatcaatttaaacttgtttaaactggatttacgcttaanatctcaccgaatcaaaatatgactcttcaacacccaaatttaccctagaaatggctctgtgttcactttggtcatttgcttttctctctagcacagcctaacctttctcataagtcctaaatggcatttcaagctaagattaactcactctaacctctanatactaccaattcaagatttggccttccagccataaaaaattcactctgtgtccactcataacaccacattctcactttctaaccct

SEQ ID NO: 256862 - DNA, 445 bp, Glycine max
  unsure (1)..(445): unsure at all n locations
gatcttcttcatcaatggattcctttacttcttgaagattaatgacaacaaaatggagaaagagaaagataattggagacaccactntaaggagaagataagtcaagaagaagctcaccaccatagaaagctatggataagagcttgaaggtaggagaagaagaatggagggagaaggagagaagaagcacacaattttatgcctcanaagagatctgaactttgaagtgtaattctcanatgatcaaagttgnaaaaatgcatacacatgacctctatttatagcctaagtgtcacacanaattggagggaaattngaatntctattcaaatttcacttgaatttgaaattgaatttgtgtagcccaaatnttggagcannaaaattactaattatgaatagtgannattcagtatgggtcaacccactaaatccagaataagt

SEQ ID NO: 256863 - DNA, 431 bp, Glycine max
  unsure (1)..(431): unsure at all n locations
atctaagcaccgcggctgcagcttgattcctttttccgaaacctttcttatctcatgtgcacctcaacccaatctccgggttcgaagacaactttctttctccctttgttggctngtgtggcataacttttatttttcctctcaatttgatctttgactctctcatgaagcttcttcacatagtccgcctctgcttgaccttctttatgcttaaaaatagaaacattaggcatagccaaaagatcaagaggagttagtgggttaaaaccataaacaacttcaaaaggagaactattagtagtgctatgaacaactctattgtaagaaaactcaacatggggtaaacaagctttctcaagttttaagttcttcctcagaactgtcctaagcaaagttcccaatgtcctattaacaacatttgtttgcccatc

SEQ ID NO: 256864 - DNA, 432 bp, Glycine max
  unsure (1)..(432): unsure at all n locations
agtacgtgagctcagatggaggtgggcaacaggggatggtgggtttatgcgcgctctgtggatgtggaaaacttgttgtgcaccatcacccgaccgccacctagtaccacatgtgatgggtaccccataatcctacaagctagagatgaggaagtgtagaagggtgaaacttcctgcttttattcgttgaccacagagtggtacctggagatatgtncgcggggttaggagaccttgnggacgtcaggtggggtgctattgcccaaaaccaagcttgaccaatcctgacccaactcgggcatagtcagtcagtgagaacctgtgatgtacctaaacaggcgagctcctggcagtcaacagataaaaggaacaaagaaccacaaagcaggaggcttgtggtggctggccagctgtgaactctgtgtgatatat

SEQ ID NO: 256865 - DNA, 480 bp, Glycine max
  unsure (1)..(480): unsure at all n locations
gctttaatgaaactgatgacctcatatgtggattcttttccttgattcctttgtacaattgtctntgattacctgatgaccacaccccattgaagtttaacttaatctattcatgtatatagtggtttcttggtcatcagtatttgcagtttattttataactattctgttgtgatttgatgtgaatatgcctggggattgctaaggttactgcttgatgatggaaggaattatagtatcatgtgaaaatgattnttgttttttgttgaaaaagttacattttaagttgttgagagaggaatgagagaacaagagaacaaattcatgtctgactctgaattacacggctgagcatatatttatattaggcgtcataaatagaagaataattacaaataattataagaatatacatntatcctaattaacataatngcaagaatataatctgccctattgacaatagtactataattatat

SEQ ID NO: 256866 - DNA, 443 bp, Glycine max
  unsure (1)..(443): unsure at all n locations
tatagactcttcatgtctggttaagacaaccattagaagagttatgacttttagaanaacttaataaccaatttgaaaaagtcaaaaactatttgaagagttacatcttttgattntattcagaaacaatcactggtaatcgattaccaaattagtgtaatcgattacacaaagcttttatctgaaagggtgtgactcttcacttttgaatttgaatttcaatgttcaaaggtactggtaatcgattaccaaaacattgtaatcgattacaactttttgaaattaatggaacgttgtaattcaatttgaaactttttcaaacaattttgtattggaatcgattacacaatctggaatcntttacgtgagagtaaaacttntggtaacatgtttgagaaaaatatgtgctctcaatgttgaaaaacttttatcttatcttgact

SEQ ID NO: 256867 - DNA, 348 bp, Glycine max
tactctatagactattgtttcgcccccacatacttataaaaaaaaatattcttgattcattcacaatgtagagagtgatctatataatgaaaaatttgtattcgactctttttatgtgtgaaattgtcttaaacaaaaaagattagtttctgatccacccacccaataggttgagagacattcatggtctttaacttaagacaaataaatacaaacaaaacttagaatataactctataattaatatattatattgaattaataattaaacggtttataatatataattggctttatattatgaaaatcatagatataaacattaactaaaaataaaatattataatg

SEQ ID NO: 256868 - DNA, 318 bp, Glycine max
tacgcgccataataaacgtggaacagagcatacagactctacctcctgttaagccacactgttgccatcttctaggatgacacagtcaatacatctgtgaacctccatggcatacttctgtggcactaatcattgagacgtatatgccactgcccactcactccataatcatatgaaaacgtattctacatgtacacctatctgatattctctgcgagaatgcaccaaccgcatatcactggcgatgacggacacttcatgatactctattctagcattctctgtatggacttaaacgaacatcaccagcatggtgcc

SEQ ID NO: 256869 - DNA, 465 bp, Glycine max
  unsure (1)..(465): unsure at all n locations
actaagcttcgtcacagatccctcattaagactaggcgttgatcatctacattattgtaacaacataactgaaaccaagacttaattcgcagatccctcttgtaagactaagtttcgatcctgcatcaatcaagttctaaggcaacagtacatttcccaatgctacagtcacctaactatgcccacaaatggatgatcaaaccaaaaacatacgaacattaagcattaaaggaagcattgaacacagaaaacacaatcaattagatattaaatatttacatcggttgttcattagaaatccccaactagggtgtttagccagccattacaaagaaaccctaacaatanatgagattaaaagtagagaatgatagttccttacacaagaagggggattcctcctcctcttctcagcatctcacactcactcttcaactcactaatctctctcaaattgcaaaacct

SEQ ID NO: 256870 - DNA, 376 bp, Glycine max
cattctcgcgcttttgatgatgacaaccacctgtatgttaagagcaacaacaaagaaaatatctatttgcatatagtttactcccacttggtatacaatgatcgcttatatgtgacaaatgaagaattcatatctttcatatataaaaagtcgtctcataaaacaacagataattgttcttactatcttatctgttatctttctctaccgctttgtcaacatcataaacaaatcatgaatagagaggagaaagatgttaccacttgttgcaatgtatgagaataagcgataccataaggcatgtagacaatcattcaatattaatcaagcatgaactagtccatagcacatcagtcaaacacaatcaaacacaatc

SEQ ID NO: 256871 - DNA, 466 bp, Glycine max
  unsure (1)..(466): unsure at all n locations
taggttcctcaaccttacttccactccaacaactactttacgagttatggtggacaatgttaacattcttgaatgtgacacttcttgccaacaggtatccatttcgatacaaggctgctcattcactctcagtggtgccgatgatgttttcggtgttcaatggctaanattacttagcccaattactacagactattccgcactcaccgtgtcctttaattatttgggccaacccatttcgcttcatgtagacgttcccttttagctcacccaggcctcaacgcaacatttcagccttgttttatatttcccacacccctgatcaagccccacttgtttccttttcaccaccccctccagacacattcaacccacccttattgaccttcttcttcgttgtcggtgatatttttgggaacctactaactccacccactgcatatcactcaccatatcattacttcta

SEQ ID NO: 256872 - DNA, 475 bp, Glycine max
  unsure (1)..(475): unsure at all n locations
tctaaactntatacaagaatgaagctctgataccacttgttagacaagtggcctcagatatcttaagaagggggggttgaattaagatattccaaactacttccccaattaanaatctatttcactttttattcaagttatgaattcccttaatgacaatcttcttaaatattgattcacataaaacaatttgaatatgaatataaagcaataacaaataaaggagattaagggaagagaaagtgcaaactcagatttatactggttcggccacacccttgtgcctacgtccagtccccaagcaacccgcttgagagttccactatcttgtaaattccttttacaagttctaaacacacaaggacaatccttcccttgtgtttagagttcctntacaacaagagactcatggtctcttaatcccttagaanatgaggagaagaagaagaataaatctctctagaaagagatggat

SEQ ID NO: 256873 - DNA, 411 bp, Glycine max
ataccgcttcatacttgtacccaaattaatcgaggattagacatgtatattggacgacgatgactaggtgaaatgaaagacaacatttagattgattgctccaaataagcaccaaagaattacaaggtgactatgttatttgaacttttgcatccattaatagcaagattagaaaccatgaggattatgtgtacatgtgcttatatacaaaacaatatgaaagtatttttattgataccctcaatgtcgttttattcttatatgttctatcgaaactattctcttatctatctaaagtatgagacttaatcataccagtcttatgaaatatactattatatatttacgcaatgctggatgtagatacattttcaaaagttaaatatctaaatatatcacatggggactaca

SEQ ID NO: 256874 - DNA, 398 bp, Glycine max
tgaagtatgaaagatcacatattacttatttgtagatggaccaatcttagatgtatattactaaggcataactgcataagtgtctgaatctaatggcatcagtatctgcttaatagattactatggcaaggaaggatgagtaacagatcggatattcaatccattttactctgcttaagagaaataatatgtagagtagaggtatgcttcctattcctatggacaacagatcaacaacaaaaatgaaccaacagataaagaggttaaaatctgtcgagccatcttacaggtcaacctgacatattataaatataccactcatttgtcatatttatcaatgccaacacaaaattacccagaatatgatgatgagagacaagtggagaatgtgtaccttt

SEQ ID NO: 256875 - DNA, 437 bp, Glycine max
  unsure (1)..(437): unsure at all n locations
agcttntatgaagcagctataggaaactttattttatcttgtattatgtggagcctcgtttaccatgtgtggttgatgaattctattttctttcaacttgaataggttgtcaacctcagctatgcaagataagacatgggagactattggaagaatatgatgaatggccaacctatgcctgaagcaatcaaagacctccttgttcaagatccacaagtatcagatgcagggaaggatcattttattagggactttgatataaagcctaacaccatattatatcacacacatgttgtgcccaacaagcagacgcagaagcataatattcagcaggccatggccaagaaattagaaccaaagtntcaaggaactgaaagacatggttgaacaaactataaaaaaactaacgctaaatcatttgctcgcgagtagagatg

SEQ ID NO: 256876 - DNA, 457 bp, Glycine max
  unsure (1)..(457): unsure at all n locations
ggaatgatcatcatacagatggatgctatgggctctcttctcctatttaatgcacaaacatgctcaacgccttcaccaaacaatccctctctactcattaaaattgacttggtcttacttttttatcataaatatctgacaatgatacgaaccataattcaattntatataagaaaaaagttgtgaacgtaagattgtgtaagtaattcaaatctattagttaaagtgtntctagcttgacatctgaaatggttggacattgcgaccttgtaatanacaccaacaagtccttaaattatgagtgcgcttggtaaattcctttaagttttatttgaaaatttgtaatatataacttctatcataagcattaattaataagtatatagaatagttgatgtattttcataaatatcttaattttagttgaatattacattatagatgaattaaatgaatc

SEQ ID NO: 256877 - DNA, 397 bp, Glycine max
  unsure (1)..(397): unsure at all n locations
agctnttaactgaatatgcaatgttctaattgattttttaatggnngaanctattacaatatatgggtcatcgattaccagtgtatctaaacgttgaaattcacattcaagtgtgaagagtcacatcttttcataaaatgctatgtgtgatcgattacatggtttgggtaatcaattaccagtgacaagatttgaataaaaatcatgagatgtaactcttccaatgatcttcaggttattctcaaggttataactcttccaacggttttcttgaccaaacatgaagagtctataaaagcaagaccttgacttgcattttgtgtacttgatataancttttcttatattctcctacaagcttgtgatctctgtgaacatcttctggaacttcttcttc

SEQ ID NO: 256878 - DNA, 395 bp, Glycine max
  unsure (1)..(395): unsure at all n locations
gtttctctcctttcanaagaatcgaagaatcgtttaatggtccaatgccttaaatgaactttcattcaatcaaaatatatcttgccaaagaaggataaaaacaatttaaccaacgtttagttctcaaagaactacgtaggtctgatttccttatcacaatggagggatacgtangagcaagggaaacacccttgtctatcacaaaaagataaaaaaatacaaaaggcatgaaaagacataaaaagcgtaaaagagggaagataaaacaaattgaagtcatgtntgcgcacttgattaaaggttgtcgtcccttgtgatggacgcgatgggtgctaataccttccctgtgcgtaaatacaactcccgaacctttcacactcaaagctcgtagatca

SEQ ID NO: 256879 - DNA, 444 bp, Glycine max
  unsure (1)..(444): unsure at all n locations
caccagcactctccacccctgcaatagtactcacaagcaccacaaacccaacaaggcataacaacttcacacaataagtacaaccctccattatttctcaatattatgcttatgtctctctattagtgaaatgtttctctgttgatttcacaatgcaataacccctttggctctcatggggttttatagcctaacatgctccaaaaaagtgcttggccttgtcaccctctgattaatggagcttgcactaggacaaagggtgagttttattattgcaccacttaagaacataaagcaggtgtaaacacaantttgcttcacttatttgtccaatcaagggtaggtgtgtctttgccaacacaattctatttgtttctcttacttccaaatgtagcattatccacagtgtgtaaattaagacagcaatgttgngatgccacctca

SEQ ID NO: 256880 - DNA, 449 bp, Glycine max
  unsure (1)..(449): unsure at all n locations
atgatgntcttttccttgcagtgaatgccaacaatatccttgagttttttttggcatggagaaatgcaatcttgaaaccttcatggaaattctgagtttcactatttaattctttcttttagcattaggagcgaggctttgagtatgagccttgaaataggcaacaaattggtccttaagtaggcataacttctttgacacctgcatggttgcgaaagtcttggctccatctgaagagcttangaaatttctcacatgtgaacaattgcagcccatttatatcttgaattataggtatgaatacaacaacaatatccacataaccaaactcctctccacctaagagcttgcccttcaactcattcttatacgagataaagtacttagttagactgaggggacactngacacactcaaactaagtacccnctttgacaacatattcacat

SEQ ID NO: 256881 - DNA, 467 bp, Glycine max
aaagttttctggtttccaaaccttgataacaagagtgtgctatatcttttcattctcttctccctttgccaaaaagaattcaccaaggactaaccgcctgaattctttttgtgtctctcttctccgttttcccaaagaacaaaggactaaccgcctgaattcttttgtgtctcccttctcccttttcaaagaattcaaaacgacacagtctaagaattcttttgattcttccctttccttaaacaaaagatttgaatggactaaccgcctgagaattcttttgtttccccttcacaaagattcaaaggactaaccgcctgagaactctgtcttaacacattggagggtaaatcctttgtggtacaagtagagggtacatctacttgtgttgttgtaactgagaacaagagagggtacatctcttgtggatcagttcaagtggagggtacatccacttggtagtacaa

SEQ ID NO: 256882 - DNA, 206 bp, Glycine max
tttgagcactcggatcaaagatggacaggactattgctctagttagaatatctatagtatgtttccgtgtgtgttgttgatactgttgttcaggatctattataaaattattgttgagcttatggcgaaacttgtagaagatcttgggcacttcagacccggttagattttagaacggactgaggatttaacttgttcgggaaatt

SEQ ID NO: 256883 - DNA, 496 bp, Glycine max
  unsure (1)..(496): unsure at all n locations
gagtgaggagagagaacatttcttttatgagataaagctctccttctccattgatttattttttaaaagcacttgccacttgtcccattttgagtggaacaaaaagggcccacctctttctcttgatgtgactcctgcacagccacaagaagagaanaatctggccttttgaaatgttaaaatcccacctcggtttgcgtgtcagttctctggttccagtccctctcgtatctctgcacccgtcggggccagtttttgatagtaagcaatatgtatatcacaacgctcacaatgaaaccccgagcgtggttcagaggttggttntgttaaattttaagtcgacgcagaatgatgaattttagactaattaattgagaattaccctataaccatccagttatggatttctcttccttaattagcctaacgcgcgtatctttccncaaaaaatacctacgttaccaggagttatcatatatcatacactgatatacta

SEQ ID NO: 256884 - DNA, 541 bp, Glycine max
  unsure (1)..(541): unsure at all n locations
taagcttgtgaagattccttctagtttcctgaatacacacaaagtccatcttgtttttaaatngagctntntaatagcagcccagttgatcctcctgcccaaacctctgcaattatatgacaaaattattntcaatacctgtggtactgttctgtttaataatttatttttgaactgcaaagataatntatattgataattagaagtaccagtggtactacagattacaaagagacattacatcagaaaatagccatatatgcacccaacaaaatatagcatataaaaccagcccttcctaatagttntaaataaatactaaagacattgaggcccctgatccaatcctctccagccctgatatttagaaatcangatcctattccacagctgttctggttggtgaaacatgtaccatntccacttgattagtagagaattatntaaaattctaaaatctntgatccncaatccttctgcatctctataagcacaactttgtgtccaagatacccatgcaatcttctttcgttaatattaa

SEQ ID NO: 256885 - DNA, 449 bp, Glycine max
  unsure (1)..(449): unsure at all n locations
agctntcttgaganaacttccttgagaagcttctttgtagaaacttccttgagaagctagagcttagctacacacacccctctcataactaagctcacctccttgagaagcttctttaagaagattcctaaagaagctagagcttagctacacatacctctctaatagctaagctcacctccttgagatgagaagctagagcttagctacacaccccctataatagctaagctcacccgcatgacaaaaaaacatgaaaatacaaaaaaaaagtccttactacaaagactactcaaaatgccccgaaatacaaggctaaaaccctatactactagaatgaccacaaatacaggccgcaacgaagaaaaacctattctaattntacaaagataagcgggtcatgcttagcccatgggctcgaaatctaccctaaggctcatgagaacctt

SEQ ID NO: 256886 - DNA, 486 bp, Glycine max
  unsure (1)..(486): unsure at all n locations
tggatggtaaagtttatgtttgtatttataatcatgaatggcgaagtcattagttggacatccatatgttggacaattgactaaggatgaaaagataattattggtgatatgacaaagtcaatggtcaatctaagaaacactttgcttacgttgaaggagtataatgccaatagttgtacaacaatctaacaaatatacaatgcaagaagtacataatggtctttcattagaggaagtgatactgaaatgcaacatctaatgaaagtttttgaacgggatcaatatattcattgacatatattaaaggatgaagatatggtatgtgatatcttttggtgcaccctgatgcagtgaagttatgtaatgcatgtaatttggtgtttttgatagatggtacctacaaaacaaataggtacaaccctctactacttgactntgtnggtgtgacatccatggngatgacattctctgctggtttngcatat

SEQ ID NO: 256887 - DNA, 441 bp, Glycine max
  unsure (1)..(441): unsure at all n locations
agcntcttcttcaccacccacaaccaccagtagccatcacgatctatctgtgntcgtgggtgaaccccacaccgagaggaaccttccaatcagagcggaatcttccaagcttgtctcgcggtttctgtagagaatgaagcccaatctgaccttcacggttttctttgaggtaaccgcaattctacgcttgtaccttgttagtttcagcttatctttgcatcttttccgactntgaaaccaccattgtatgttttacgtgtcctttgaaaaaccttacagaaagagactttgtaaaccgtatctattttctgaaatgggtgttattttctggaccctcactgaaccccgatcacattggcatgatcggaatttaaaatgatgttcttttgagaattaaaacccctttcctttcatgtgtgatatattatttactcaaataca

SEQ ID NO: 256888 - DNA, 409 bp, Glycine max
ctgacgctgttgtgtaggcgacagatatagcactataactgggcaacatagatgtgtgcgaattgtctccaacagatattgcaattgaggtcttgcacaatttctgcctcatgccctctcttataatatcgtcagctctatgcgaactgaagagtgcctgggagctaaagtggaaactaacttttgttcattgatgcatctaatgaccccctttgtactctgcagcgctagaacaaatgacgacttttgaagagggaaggggccgtatgcaaatgcatatacagcttggtgcagcttttttgattgtatattttttttgccttgcattaagtctgcggaacttctttggagaaaaaaagggtatgacctgcctgtatcaaattggggcaaggcaatcacgcaatgacac

SEQ ID NO: 256889 - DNA, 408 bp, Glycine max
  unsure (1)..(408): unsure at all n locations
tgcagctactgangtatgaccggcactctggttgtgttctcaanaaanaatcattgaattaagggcgcctctttacaccaacatagccgatcctcgttttacgttctttctttcttccaaatattctggtagtaacttgtgagagtgaaaaaacttcaacatgttctacccccagaaaacttcaacgtgtacatttaaattctacgtatggcatgaatntgggcccactnttcctaaaatatctacgatgacgctcgtgatgacggaatcgcgcatgtttttcattttttttaagccatttacccgaccaacacaacatcccataaacaaatgggttgtacggatgattattctcacattattctagtattattccaaccaacgagataacaaagttttggatctggt

SEQ ID NO: 256890 - DNA, 367 bp, Glycine max
  unsure (1)..(367): unsure at all n locations
ctatggtngtagtaccgattcacattctcatactatggggaaaggtaactgttattgatgtcaaacacaacctcttggcataagcggttgaaaaggtctgcaacttcagcatcactaccaagccaatgctcaattatgccacgataatgaaggtaccccacatcctctggggagttaatcaagttgtccatgaagataacatangatgtaatgtcattgctgcaatcaagatgacactgctcanaggcaatcaggttgaggaacaaagacttggtaccgtcgtggatcaagagccgtggtattcgcagtttgccatccttaaatttgatgtcccagaagcgatcggtctttctcttcttgaacttga

SEQ ID NO: 256891 - DNA, 428 bp, Glycine max
  unsure (1)..(428): unsure at all n locations
ttcttataacggcgctcctcttcaataagtgccaagggcttcttccttagccttcaactcttccttcctcgttacctgtcgtaagatattatgcagaataatatttcttaacaagcatatgctccgatacacagatagntttattcataaagttcaggctggataaaggaataaccactgaacagaaatttaataaagcaccagacagaaactgttgtttgcatagctaagaggtcaaatgagaagaaattgtattgagttaattgatgattaaatcataagcatataatcaacctgaatgcaatcaatagaaaattcaggtataacaacgattcactttctggactatgaatcaganaacaccaataatgtatgtgtaagatcatattgactggagacatgagtcctccacatcactgatggtataa

SEQ ID NO: 256892 - DNA, 509 bp, Glycine max
  unsure (1)..(509): unsure at all n locations
cctgactcatagactcagtcacagctcaggctctcattttatactgtgccaatccactcaggatgcatcaataatattctaaaccatacaatatacccactgtttaatacccaacccgtttgcgtcattttgtgtctacctgtcagtgatcgcataataaaagagtatccattcccttgaaccctccccactccccagcttatgcgaagcacaacaacggccgtaacataaaaattaaaaagcagtactacatgatgaagaaagtgacttcataagaaaataaccctccccaccaatcctactgtacaaaaccattaaaaaatcagagcattaataccttcagttagaagaagaagaaaagccccaaccccagaagagagacagaaaaagaaagtcaatggataagctatcacaaccaagggaactaataagatgaaacacccaacagagcactctaaatactaagaaggtccggtggtggggattgaggangattttgatcttccttg

SEQ ID NO: 256893 - DNA, 496 bp, Glycine max
  unsure (1)..(496): unsure at all n locations
tgcggcatgccagcttcccacataaactaaacaacatttaacttcttttctatcacagccaagcagaacagggcgaaggcggaaaactctgtccaaaacaccaaccaaatcacagcttttctcacttaaagaccccagtaacaattccttcgttctggttcattaaccgtaggatcgactcgaaaatcttactggaagtctctagttcataagcctacattttgaccgttgggatctactagtaaacatccagaactcattctgtactactctttccacagccaatcacacacaagcatttatctgcacttgtgcaaaaatctgctgtacaatttcacagcanaaatttgcacacagtgcagatttcataaccacactttctctcatccaatctggcccaaatcanatcctacaagtcctatatcatgtatcaatcatgtctaaaccaagccaagcttcaaccacagcacacaaatttatgtgtcaaaaccctcat

SEQ ID NO: 256894 - DNA, 330 bp, Glycine max
  unsure (1)..(330): unsure at all n locations
accggagcatatatttcttgataatttatcccttcctcttgattatacccttttgctactaatctagccttatttctaacaattatgccattttcatctaacttatttctaaatacccattttgtcccaatgataggatagtgttcgggttgttcaactagttcccaaacattatttctttcaaattgatttaatttttcctgcatggctattatccaatgctcatctattatggcttctttcanattttaggttcaatcatagaaacaaaagtcatattattgcatatatctttgagagaatgtctagttgttaccccttttgggatat

SEQ ID NO: 256895 - DNA, 384 bp, Glycine max
  unsure (1)..(384): unsure at all n locations
ctaagtcacctgcggcatgcaagcttcatggtgtgttgaacctaagctgatttgtgcatctataatcaaaatgctattgtgttgcagctcctcccaaaagtcttcggcagcctgcacttataagcatgcacctcactctttccaaaatggtcttattcattctttctgccaaaccattctgttgtggagtgtgagggactgtttngcgcctattgatgcctattttcctgcagaactcgttgaactgattcgaaacacactccaggccatttcggtccttaaactttaattttgaccaagtgattccaacaagagatgtcttctctaatttcaaaagccccacttattttccaactacatcatactcttctgaaaacatcttgg

SEQ ID NO: 256896 - DNA, 459 bp, Glycine max
  unsure (1)..(459): unsure at all n locations
actcagcttaccttttgttctctcactagttntccagtatttgttagcttgttacaactgaacccggggccctntatatagagaaactggaaagaaaatgataaaggccccttcagtcaaaaatagtaaagttactattcatttactttgtcacatggctctttttacaataaaantttatagatagacttagtatcagagtccttgcnaaagtagagatatccgctttaatntacagttgtattttggcaggatgcttctgtcttcaggtctttgttgattntgaatagaacatttcttcttatcttgatattctcaagaggaaatgctgtgagtttccatgaagacagggagaaaagagatttgtgccatgacatcatgcttgtaatctctctctttctctcttttggagaatgacccattatatatgatcatcagaaggatgaagaatttcattta

SEQ ID NO: 256897 - DNA, 436 bp, Glycine max
  unsure (1)..(436): unsure at all n locations
tatattcaaccttatattgttatggtttnattcnnatatgaaggcgctcatcttanaaaatccgaatgcaattctccaataaaattggtttgatataaaagcagcctaaatttatgctctcctatataatgaatccacatcagattgtatggagagaaattagtgatagtgtaaataaaattaatctaattcaactagattccaaacacttcagaagttgaggcttggtaaaatacaattatgactatgatggtagtttcaggttcaaattattttgtgtcaaacagatgttcttcactatattatgatacctgctatnttgttagattactatattttcacttttgaagcatttcattgcagggtgctttccttttgtttctcggagccatccaaaattgggtgggtccagtgatatttatgtgcaattgtccct

SEQ ID NO: 256898 - DNA, 400 bp, Glycine max
attattatatataatatatacatatttctgctgataaaaaaaatcttcgacactgagatgattatgagaaactgtttattagttgtgtgacaattttgtattatttgtttgtccctgactggtttgttacaaggtcctgacattgatatttgctttaatatttttctagttgtatatttcttcacaaggaaccttggtattatgtggaatgaacaagtattccattgaagcaatgaactgccacattctgttttccttggtatctttgacaaagcaaaacaatgctctaccgtaaacattcacttcagaatattgtcatctctctagaacttcatgcttttagtaattctttgaattgaagataaatgttagacgtttttgtatgtgaatctgtgtgtat

SEQ ID NO: 256899 - DNA, 476 bp, Glycine max
  unsure (1)..(476): unsure at all n locations
taatggcgcatgataccacacattattaacaagggtgaatgggttttaaaacaagtttggacccaaaccaaagttgttttcgcaaaaccttttcctttaatccaatcaatccaagagagtaaggtatgttgtaaacacccttatgtttttctttaacatggattatgttttaaacaaagataccaagataatatattaaaaaaaaaccaggtgttaagaaccttaaccaataagcaataaanagttgaaaggatagagaanaagatgcacacacaatttataccggttcgagttctaggaaacccacatcgagttgatccaagtaacccactaggatctttccactataatctgtaagttataacaaaactcacaagcatgtgtaagtaacccactatagagaaaaagatgcacacacaatttatactggttcgagttctatgaaacctacgtctagttgatccaagtaacccatc

SEQ ID NO: 256900 - DNA, 460 bp, Glycine max
  unsure (1)..(460): unsure at all n locations
ttagtgagtgatacagtgttatgttttgtgagtgatacactatgagattntgtctannatttgtagtgatacacacagtttttctttaaatatggagaatgttatggaaggtctctctctggttgaagaggagaaagatggtttcgtttttaatttatatggaggaccgataaagtagtattaatattgatgttgatctatgcttagtggtccgatttcttaccgatagacttatttgaagtcaaataatgaaggatcacatgacgagtatctggaagccaacaaaggaagtagcgataaggaagtggaaggaggtctttacctgttctaatnnttccataaaatggatntacaacaaactatgggtgaaggaccctggtcattcgatataaattaattattgatccttangagattggtagctatgatattccaaccaggtttgataatgatcattctg

SEQ ID NO: 256901 - DNA, 363 bp, Glycine max
  unsure (1)..(363): unsure at all n locations
acagccttctagaggaatctcctggagggcccaagtgggcctggatgctatttgcacccccattgttactaagtacacccttctgtcttttattttctgtgattctttattcgtaaagttacggaaacttacatatttcgtaacgatacttgttttctttccgtaatgttacggaaccttgcggattacataatcatcccctctttgacttacggaatgttacggaacctcactaattgtgcaacgatgcttccatttgattccggtggtcacggaaccttacngattgngcataatattctctattgtgttcggattgtccgaatttacaaattgctatgatggggccaacacctcacaaga

SEQ ID NO: 256902 - DNA, 318 bp, Glycine max
  unsure (1)..(318): unsure at all n locations
gtcagattgattgtgaaggaatgcattaaccgtatcccggtgagatccttattatttgagagaaatgactatcatttagtactgatttttgcgtgaatctctgaagtatggactgaatgcatgaaattntggatgatgaaggccatgtttgattgtgatagccacttagccaaaaagctgacaatgtgcttgaataaattatcccttgtacccagtntgagctgaatgaattattgattgattgaaccctgagcccatacaatgttattctcctgctaccttgacttaggttggaggagagcatcatctataggaagc

SEQ ID NO: 256903 - DNA, 321 bp, Glycine max
  unsure (1)..(321): unsure at all n locations
atatcagagataaataaataaatatctctgggatatgagatatcaatatatnttacttctcaatgtaatcttattaaaacctcaaaattctctcatactataattgttgcccaagcttctacgacttaaaacaatacacacaatgtaattatattaatattgnttcgattattattaccctaaacctcttagcgagaactatatgggtgttactactcctcctcataccactaccatctacatagctcgtgcacctatacaaccattgatgatcccctactaaaacatcatagcgtattggtagttaccaccctaacaaac

SEQ ID NO: 256904 - DNA, 394 bp, Glycine max
  unsure (1)..(394): unsure at all n locations
gtaataataaccctctagctagcttactanggactagtgctactaataataatgtgtatctgtcacaatgaaatattatcctactgagatttgctccatcgaacttcatgccacatgtttatccaagtctctatttcgatggtgataatatactatatactaaaagaaagaaattgggtaatctaacttatattaatcatgacattatataataaaataatacagttaatgatatactacatatataattataattaaggaatatcttaatataaataatatcaatataaatatatcatcatgttaaacataacatcaattattatagagataaacgacggaagggatagttttcatacatacatatatcaagatcatactattaacacaatga

SEQ ID NO: 256905 - DNA, 380 bp, Glycine max
atcctcgatatcagattgtatcaccttggctcttgcttgttggctattgttattcacttcctttgtatgaatatttccgtcacgcatagtggacaactgaccaccacaataaaattttatttagactattagcttattcaaaagaaatcctcatgtgacacagagggcataagcaagtaataattattttcctctcgtttttgtttaccgctcatcacttgaattgaatacaaacttgggaccggctaacgctgcgaggttggcttttctctaatccaactggagttgatattgttgcatattaataacaaatatttatacataaatcaccaatgaggctatttacttttatatgttatgtcacttatatgctatgcgtc

SEQ ID NO: 256906 - DNA, 274 bp, Glycine max
cgctcacttgactaactaaagacattattttactggcagattaaaaaaaaattatcttcatctcttccacatatcatatctttcaactcttctacaaattctgatcatttttcacttctaaactttgtcaacacttctcttcagaaagactcattcaaaactggctgtgacttttcattcttataccttgcaaaaacaagacaccgccgaatctttggaccctttcctacaagatcaatgacaaccgctgaaattttgatctcccttccttaac

SEQ ID NO: 256907 - DNA, 440 bp, Glycine max
  unsure (1)..(440): unsure at all n locations
acagtatcgaacacatggaataaatatgagaacagcttgtacaagtctgcttttatgtactgaataatcaaataaatatctagttaattcataacactaaagcattaaggcttcactattataatctataaatgggtaattttcaacaagttcatggagtcaaacctttctaactagacgcccattgtagcgaggataattaggacaaacagttcctctcttagaatcacaaaccaaccgatgattgatacttcgcattggatgctgacatgtttcatcatcacactagatgcaaaatcagccaaggatgatgaaacctaattttacaggcaattaatagtataatatatctagagaggtgcttaccactagttaacctctgtagacattagaacanacctctatgctcgcctgttgatctgacatgaagtaaaagtata

SEQ ID NO: 256908 - DNA, 500 bp, Glycine max
  unsure (1)..(500): unsure at all n locations
ctaagcttctcgacttccccttccaacgaagtcgagtgtcatcattaatctttattgttattgttagctaagcgagcctggaacatgctctctcttcccagaaactcgcanagcgagcaagggggttcgatgagcaagccttaaaacatattctctatacaagtcctttctcagctagcatacaggatcactaagctaccacatatagcgaactaattttctgttgcaaattttgtcactaatctcctaacatcttaattcttccgattcttcatgttgaataagtgaattagtcctcaactntgtctctccagggtcttttattaaaatcctcacttgatgatcttcatgcccctccttggttatatccatcctagtcctctatcaaaaactatcttgtctgttctcactattaaaacctcaaatatgatttggttcatgaggttcatcgtcaggcaaaagctatctcgcaaaagtgagtatggtgctctaatgctagt

SEQ ID NO: 256909 - DNA, 368 bp, Glycine max
  unsure (1)..(368): unsure at all n locations
gtaactaattaccactaatatatactgtgactactnagaaggaagggataggtcatgattagtccaacctaatctgcctaattaaactaattacacaaagcagagcctaaattcgtaacccaattatacaagtgcagaagttctgacttccaatattaatttgaccctcaatatggaaggattggcccaagcttattgatgcaatcctcccaaggaggggacccatcaccatatccatgactaggagactccatgaagattgtgctagggatgcaagagaggccctatagttctatgagcctatgatagatttgggccatggctaatatgaacccctatcttgtcacttagatatgattcattatttt

SEQ ID NO: 256910 - DNA, 467 bp, Glycine max
  unsure (1)..(467): unsure at all n locations
cttgatttttttctaagtctttaacaagcgttgaactatattctctcccttcattnaactgtctttgcgcttggcggccccgctcaacaaagtactttcgacacctactgtacgttgatttaaccaatgctgttatgggaatgatgcgacaatccttcataaccttattgatacattctgagaggttggttgtcatgtggccatatcgacgtccttctctatcataagccatcgtccatttctcctttgaaattcgatcaatccatgtggctatggctggactcagttcacgaaatttttctaaattttgatcaacaatgtgcttgcaaggagtgtacgctgcataacataattatgaataacgtcgataagtatatatgaaaggtaaataaacgggaccatcatatatgaaatcttacgcaatttcttcaacatttctttttgttttgcttattgaatttccgatg

SEQ ID NO: 256911 - DNA, 457 bp, Glycine max
  unsure (1)..(457): unsure at all n locations
agcttataaccttcatctntcatgcatttttgggcattgtcaatggattggtattgtaaatatcanataagcatatgtaaactagttatttgtttcctcaagaaaattaaattgtccagatggggatcattttgtgggcctagaaagtattgaatggaaaatggtgaaacctgatgaataatatatgagaaattgatggattnttttttaatgatgtggaagtggcaatggtgtgtgtattaatgtatattctggaagtaaaanaagaaagtctggctagatgtaatagtgtagtacactttttctttttggaaggtcgaggggaagacgtattctgatcacacacatcttacatcaactctaggttttggtctcctgctgtgcctgtcaatagctactctttccagtcaagtcgtccttgacatgctacgngcangttatgataatgagaactact

SEQ ID NO: 256912 - DNA, 419 bp, Glycine max
  unsure (1)..(419): unsure at all n locations
tactcagcttattgcatcagtattgtgtaatgtgataanngttggtgttgtatcnttaatgttatgacttgtgaatcaaccttatgagaagaactcatcccataaaactggtttattgggtagcagtctcatgacttttaagtttagttattgtctttactcaatgtgggatataatgtctttgaatgttggtattggtaatagcccacttggaatggattgccatatacatatagtggatggtatggcggcctataacctcttggtccctattaaataacaatgccttggcccccactaacttgtcacatcatttaggagtctaatcaggcaattacgttacgtcgtaatttcttattaaatcgtgtttgaaatccctcattaaccagtttgatgtcaccaactgttttaaacaaatg

SEQ ID NO: 256913 - DNA, 430 bp, Glycine max
  unsure (1)..(430): unsure at all n locations
ttataataattattctaatcctattgttattggccattggtattatacattattggctctcatcgttctttggtaaaaatagagccaacaatgtcagacttttcaagtatgtatgtgttcctcaaatcacaatcatgatgatatcagaattcaaattttaactgtctcgcgtcaaacagaatggttgtgctccctttatacagacgngctccatataacatggttgtgctagttccaaaacacccatgctaaatccaagaagatcattatctgttattcacaaatggagccatcaacgttatacttttcgagaatggtcatgctcctcaaaacacaaccatgctaatctcagaaattaaaattcaattgtcttgcctcacatagcacgaatgttcttcctataacatgagcatggttcatatagcacact

SEQ ID NO: 256914 - DNA, 368 bp, Glycine max
atgaacgctcaattggatacatccaccgtgagaaaacaggaccacacagtcggatctcccttactagatgaacgattaaatggaccattatgtcgaacattgatggagggaaatacatttcaaattgacaaaggacaacggtagcctcgttctccaattcatctaattatgctgggtcaatgactttgctacatatagcattataaacaaagcacatacgtgttatggcaacccaaactttgtcaggcaagattccccgaattgtacaggtaatagttgttgcattagtacatgacaatcatgggatttcaagccaaccaatttcatatcctttacggacacaaggctcttgatatatgaagagtatc

SEQ ID NO: 256915 - DNA, 491 bp, Glycine max
  unsure (1)..(491): unsure at all n locations
tctggatacaaacgatcattcttcttccactgggagcaatcagccggatgacggaccattccataagagtttctcttatttgcatgccagataaggtcttttgcatcgtctccattagcaaaaagacgcttaaaccttggaatgataggaagataccacaacaccttcgctggagggcccttttttgagttttcatcagaactgtagtccttatcatccttcactttgtaccgtgatgccccacacctagggcatttggacatttcttcgaattcatgcttgtacaatatgcaattattagggtaagcatgaatcttctgatactccatgcccatcagacacagtatcttcttggcctgatagtaactnttaggcaatgtgttttcctctagaagtagatcatgcactacttgaagcagtgaactaaagctnttgtcactctacccatatctggccttgacattaaccagacttaacaccatcgacaacag

SEQ ID NO: 256916 - DNA, 403 bp, Glycine max
  unsure (1)..(403): unsure at all n locations
tgtacctgtcgcaagggtttgtggtttgtgctcctctgctgaccaccatacagacctttgcccttccatgcagcaacctggagcaattgaacagcctgaagcttatgcagcaaatatatacaatagacctcctcaacctcagcagcagaatcaaccacagcagagcaattatgacctttccagcaacagatacaaccctggatggaggaatcaccctaacctcagatggtgcagccctcagcaacaacaacagcagcctgctccttccttccaaaatgctgttggcccaagcagaccatacattcctncaccaatccaacaacagcaacaaccccagaaacaaccaacagttgaggccgctccacaaccttccctcgaagaacttgtgaggcaaatgactatg

SEQ ID NO: 256917 - DNA, 317 bp, Glycine max
  unsure (1)..(317): unsure at all n locations
gacatggctcccaatcggaatcagcttcagggtatgactaaacaagagcatgagtccattaaggaatatgcccagagatggagagatctcgcagcccaagtcgtaccgcccatgacagaaagggagatgatcacaattatggtagatacgttacccacgttctactatganaagctgataggctacatgccagctaactttgcggatctcgtcttcgccggagaaaggattgaatccgggctacgaaaaggcaagtttgaatatgcagccaatatggtccccacaacaacagaagagccccagtagtgggcgcaagg

SEQ ID NO: 256918 - DNA, 371 bp, Glycine max
  unsure (1)..(371): unsure at all n locations
ggttgacgttgtcctcaacaatcgacattaaaacttcaaacaaatggcgttggtaatctcaatcgagtaggcacaaaactacctgcaaccaanagataatactcaacaacaacaaacattgccatgagttttgagtggtcgagagtgagaagaattgtaaacgcaacccaaagtcagtgcggtgtgagaagagcaaccaatacacacttgtcaccgatgagtgttctattgatgtgcaagtgagagtgggagtctccagtgagagttctaagtgggagttccttcctttgcacgcttaaaaatnattgagtgtcctcccaattaacaactcatgctatacataacgtccatggcaaatattatttaacagt

SEQ ID NO: 256919 - DNA, 283 bp, Glycine max
gaactaatagcatttaactcgcataagcagaccgatctatactcaacctcacgaaacaagcaataatcaccatcgaacaataactattagacatgcccatcacgagtgcattaataatcgtcaccatgtacaccaacgatagaatctactccatggagattacactacatgagcgattaactcaagtacatcccttaacatagtcacatgcaccttgaccattcatagagactcaaatcaaccttattgagaaagtgtggttctatccaaaatggataagcat

SEQ ID NO: 256920 - DNA, 409 bp, Glycine max
gagagaacttgaactttgagttgtgtctcacaagactctcattcatcaaagttacaacaagtgttacacatgcttctatttatagactaagtagctatcttgagaagctttcttaagagaacttccttgagaagcttctgtgagagaactctcttgagaagctagagcttaactacacacacccatctaaaaactaagctcacctgtttgagaagcttgcttgagaagctagagcttaccttctcacacccatctaaaaactaagctcacctgcttgacgaaattcatgagaatacaaataaataagttcctactacaaagactactcataatgctctgaaatacaaggctaaaactctatactacttgaatgggcaaaatacaaggcccataagaaggaagaacctat

SEQ ID NO: 256921 - DNA, 383 bp, Glycine max
ctttggatccatatgacctctatcatataaagaatcaggtatcttcaaaccttctgcttcatccgagaaggaggcgaactcaatattcactatcctccttacatccacatcaagaaagagccctttgaagtattttaatctttcacgagtgagttccaagtctcgatatggaggaactcgattagaatcttcacttatccatgtatgactatagtctctataattaaaaagaagattatacatgattgacacttatgtgattctaacaacgacgtaagtacaaaagtatagacgtaactacctctggattaaggaatgagctagacaatggagaggagtgctactcttatttcaacggtcaattaatatgaagggcctacctc

SEQ ID NO: 256922 - DNA, 282 bp, Glycine max
  unsure (1)..(282): unsure at all n locations
cgacaacgatgccgactcaacatacaagaactngattctagaaaaagttcagcacctcgagacggagcaaatgttctgcgaagcaagggaaccctagcctgttgtcacacctgacgaggagctctcgcaaatagcatccactactcaagggcgtgccattttctctctttcaatttatgtgttcggcttgtgatatttaagcatgtgattaagctttcaaatacaagcgtccattccttaagcatgtgattaggagtttgagccataatgctctatgtatgg

SEQ ID NO: 256923 - DNA, 305 bp, Glycine max
tggacatccatatgttgcacaattgactaaagatgaaaagataatcattgttgatatgactaagtccatggtcaatctaataaacatttcgctaacgttgaatgagtgtaaagccaatatgtagtacaacaattaaacacatatacaatgcaagaagtacataatgttctctcattataggaagtgatactgaaatgcaacatctaatgaagctctttgaacgggatcaatatattcattgacatatattaaaggatgaagacattggatgtgatatcttttggtgtcaccctgatgcagtgaag

SEQ ID NO: 256924 - DNA, 440 bp, Glycine max
  unsure (1)..(440): unsure at all n locations
acctgcggcatgcangcttatctatatgtagaatatagctcaccattgactatattatttcgctcataagagggtgatcctttaactacaacccacaatatcctaagataatacaattctctagtacttggagacacccaggtaaaccttccaattgtatagcctcctttacgtggcttacaacatctnnttttggggatgtatgtaaggtcttgttatgaataacaaatatgtaagatcttttgtttgctggaaaatgttgttagcttgcacccaagaggtaaacatggactctttaatagttggcttggacacaaaacattaatgtcatcaccatcttcaatattacagaaatttcgtaggcaaatgaaagtacacctttcacaacaggtgatctttgtgaattggatgaaatatttccacaagattacaaaagaaat

SEQ ID NO: 256925 - DNA, 455 bp, Glycine max
  unsure (1)..(455): unsure at all n locations
atatgacatgcctatntgtanaatttaagttatgccatatttgtaaaattattttacaattttgtttgcatgctgctgaaattatatcacagatattctgattcttgatgtggatttggcagctatgcagaacagctgaagaacaccctganattttttcctctaagtaaatnttgatgagaataagccaatgtgtaaaaggctgaatgttaaagtacttccttacttccactcttatcgtggggctgaggggcagaatcattttcatgttcacatgccaaggtagatctttctatttagttctggttatgttagcatttctcgcttcattgtaagcgaaaataagtgaacttaataatnttgctccttataacttanatagtatttcccatgcataaatagcgctctagtacatcgagttcaacacatgcaccaattctatatttagtctcacg

SEQ ID NO: 256926 - DNA, 486 bp, Glycine max
  unsure (1)..(486): unsure at all n locations
tactcagcttcttgtttccgctctnggtgtcatatcccctacatgttatttacacactcgctggttataggaaaaagttgagatagatggcaggtaatagcagctcggaggggttggtcgatgatttcttctaacagatcttagcagtgcctgaagctgctgctntcagaggagctgctgggttaatgcctctgggcttgaatttggagcacgctggctttctaagacaccaacaccaaattaacgttgacgacgttgttcatgttaatgttgatgatgccaccattcaccaccatcaccttactctccacaataacaccacctcctcatcaccttcttccactgcaccaatcaccgtatgtacatatattatgccttcttctctttaatcatattaccatgcagatcagtgtgaggacaagagataccaccctatnntgttgngtgttttttgtctcattataaattaagcttcatgttatttaa

SEQ ID NO: 256927 - DNA, 411 bp, Glycine max
  unsure (1)..(411): unsure at all n locations
acaaaactctctgtccataactgttattaataaaaatacatgaacacccatgccagcagcaataaaaaaatcatgtaaaagtagggcaccttgtcaatattacatagtacaagatactgaaataaaacgtccactcactgcacgcttataaacaagatcaggctttaaatgcctgtcatcgttccacaaaacctcagtatccgaaccagcacgaatcacaaactggtccctggcctttgcatcagtgagccagggttgaagattttcctgtaagagaataccaacaccaggagcatcagaaatatcaataaggtacaaggttccagagcanaatctactacatcatatatcataactangatacanacatatattnttcaaactttaagctatacaacaagtaaagcaact

SEQ ID NO: 256928 - DNA, 408 bp, Glycine max
  unsure (1)..(408): unsure at all n locations
ttctgcgctttctggacaggcacctcatactaattgtgtacgcgttattgaaagccttgatcatgaagggtttattcttcctaatgaagaagcgctctcttttctcatgtctgtatataaacatgcctgctaggtataatatttgaactttacatatgctttttctggagcttaattgatctacgtgcanactctggcataaaattctgaatgtatgaaaatgatccttgcaggaaccatttcctctccatgccatatgtgggtccatctggaagaatactgagggtcagctgactttccttaatatgctgtatcagcaccaccggaaatattacctttgacactcggaaggcactggatgatatctgttgccattgctgttctgttccatctaaatttatgacaaaa

SEQ ID NO: 256929 - DNA, 510 bp, Glycine max
  unsure (1)..(510): unsure at all n locations
agcttcaaaacacagcaacgcacaatctatgtgtctcttacccctcaatttaatagaatttctaggtttgagaagtgaaatcgagaatgaggtaaatttgaagcaaactctcacctcacacaagtccataacatcagtctaaacttgctcaaactggatttacacctaaaattccaccgaatcataatttgactcctccacacccaattttgccctagaaatggctcttggttcactttggtcatttgtttttctctctagcacagtccaagctttctcataagtcctaaatgacatttcaaggtaggattaactcactgtaacctccatttaccacagaatccagatntaaccttccaactctcaaggcctcactctttttccactcataacaccacattctcactttctaaccctaggttaactctacccttcatctctaacagttntccataagcaatttcagcacataaacatcacaagcatcatcataagaaccctaaactgaat

SEQ ID NO: 256930 - DNA, 428 bp, Glycine max
  unsure (1)..(428): unsure at all n locations
tcgatgaccgtgatgcatgtttgtgccacatcattgacaatgttatctagtgcataatactgtattcttttgccgcattgcgattattcactcacactcgtatttggataggtaccaattaaagcaaaaattatgatatttgcttgatcaactaatatgttctttgacatatgtctctgtgtatataatattcatatatggatatctaatgtgtaatatttctattatttattgacattagattttcctaattatcatgcgatgtctcgcgttcaatctgtgatgtatttgttaatcatctaatcacatcggcgatgatgttaatatagctgtgattctatgtgtctgaccttgctatgaaatgaccttaaagatgtacttgcgacttgatcaatccaattgagtatataccctatattgngataata

SEQ ID NO: 256931 - DNA, 413 bp, Glycine max
  unsure (1)..(413): unsure at all n locations
tgtctataagaagagaatgccttattacattcttttacacaagactttacggtagtgcttagcttatcattcctaatgattgaccaaattagtaattgatctgaaattcacgaattatggatccctggatgttttggatgcatattgcatgatcagacatagatttcaatatttcggataagctatattattctatgggttcatgtgctcgcctggttatcattcaaaggcaaagtgaaagagctaancctatctatagcgcttgaagatttgaaatattatctgtgactttgacaaccatcagtgtcttgtcttgggatgttgttagagacataattattcgcngggagatcagatanggatttattttgctatacaggccacctctatacttgaatactactcacattcat

SEQ ID NO: 256932 - DNA, 359 bp, Glycine max
  unsure (1)..(359): unsure at all n locations
gaacaatctatcagacaatatntatgtcaaagtcgcaatatctgctaataaaatatcaaaggggcatggctgaagcttaacaagggaataatattgtagcccttccatatatatagtgtctcttgctcttcatatagctcatataaatgacagaattcatatatattataacttcgaattgcgaccgtcagatttcataattctgaactatctctaatataattaatcttgaagagatatgggataatctcaagtcaacacctactacaaagttatacccgtaagtcatatgcaagattacgtaaattcattaagttcatttgagagatgatctgaatatttatatatatatatatata

SEQ ID NO: 256933 - DNA, 518 bp, Glycine max
  unsure (1)..(518): unsure at all n locations
atcttaagcactgcggctgcaactgctatggaatcggccnatggcttgcagagtacctgcgtantaccgaaagttcttgtgccacagcacgcatcatgggtctggactctggagccgcacgcgtgcatgccaaagctatggtcactgtcaacactactgcttctgctaattggccagtctgaggtggaagccgttggtcaagcacatccttcagtagcatctgaggttcctccattgatgtcaaatactttgttcgaagacattgtagtcaagagttctccgggatgctttcccatgaatatctccaataccaccactccaaaactatacacgtcacacttgtcagtcaccctcattgtttgtgctagttctgcacattccaatttttgcagtgactcgccgcactctataatttatatgacaagtatatgaccagagttatatatgctgaaacttatacaacacaagagtatatntaagacatttgttaaagaaatgaaacaataataataataata

SEQ ID NO: 256934 - DNA, 407 bp, Glycine max
  unsure (1)..(407): unsure at all n locations
tcacttagtaagagattctatctcattctgaaagctctggcgatncactgctggaatgtcatcagagtctgatatgttgagccttttaactgcaacaacttgacctgtgagtaattgcgctctataaacactttcaaatcctacctttccaatgcagtacttgtcattgaagtcatccgtggctttaacaagatcagaaaatgttgaatttccatctcttgcccacaccatgctaatagatagatcacntctttcagtgattttggactcttcatcacggttatttttggtgtgccgccagcaaagtatgattccaacaccaataatcccaataagtaagacacacactggtatgagaatactaagaagaacattcttattaacctctccagacttgtgtgaggaaa

SEQ ID NO: 256935 - DNA, 392 bp, Glycine max
attgattatgctgcttcgatgaattctggtgatatgaggcctgcggaaaattgatagaataagaaggagggaggaacccatgatgtgactaccattcctacatggcaaattttccaccagctcaacaatatcaatactcagccaatatcaacccttctcattacccagcaccctattagccaagaccacccaatcatccacaaaggccacccctaaatcatccacaacacccgcctgctccacattcgaggccaagcaccacccctaataccaatcaaaacaccaaccagggaaggaactttctagaaaagaagcctgtagaattcaccacaattgcaacgccatatgctgacttactcccctatctgctcaataatgcaatggcgatcata

SEQ ID NO: 256936 - DNA, 398 bp, Glycine max
  unsure (1)..(398): unsure at all n locations
ctcctcacgttgggttgtttgggaagaacaccataactaaacgcgccgcgagggatccctatcgcaccagatccaaatctagaacgatgggtgatcaagaggagacacaggaacagatgaaagccgacatgtcggctctgaaagaacaaatggccttcatgatggaggccatgttaggtatgaagcagatcatggagaagaacgcgcgcaccgccgccgctgtcagttctgctggcgaagcagacccgactctcttggcgaatacgcaccagcctncctcaaacatagtatgacggggaagggacacactggggcacgatggcagtcctcacctgggatacaaccgagcggcttacccttatggattgccgcccaactattcaccacccatcttgcaa

SEQ ID NO: 256937 - DNA, 413 bp, Glycine max
  unsure (1)..(413): unsure at all n locations
cctgcngcatgcaagcttgatctggaagtnaanatgttaacatatagagatatggttgtcccacctcaatagtagagtctgtacttgaagaaattgctatagctatagcagaggtactctcacatgatgaggtgtggagggctacggtcactttcagacagtctgagttaaatcaacaacaacagtatctagctacagatccgaagatgttaagctccaccatacgcgcccataataatattgacacttgttctgttcctcttgaatatatattgagctatataataaccctctttgttatgttgctgctacctaagtactaattccacccttgcctatctgagataattaangacaaaaatagaatttcaaacccacttagcactaatgtctaatcaaagattgatgtacac

SEQ ID NO: 256938 - DNA, 468 bp, Glycine max
  unsure (1)..(468): unsure at all n locations
gagtgagtatgtctgtaatgtgcacaacggaatttctatccttaaaacctgtgacacggccttgtcctctgcaatatgcttagtattatgatcccaattccatggcaaatggcaacatgatcagagggataccattagatggcccanatctgcattggtgccttttgtgtctctgacattaaggaattgcctttcttgctcttaaagtaccgagacggctgttccctattagttatgaccaataatatgtcattggagtttgcaccatgtatccatgttatgttgccctcctactgtttattttgtcattcctcaatattggcgatatcaagatatttgtgctatacagaaaacctctaatctccagcttagattaaaactgaattaaatatgtacatacagcttctaccactgctgagagtaaactacacctacacactctattctgttggtctcggctctaaatct

SEQ ID NO: 256939 - DNA, 466 bp, Glycine max
  unsure (1)..(466): unsure at all n locations
tccagtctcacctgatacatgtcactgatgccaatanatagcataacccacctggtcacccgcattaatgtgtccttgcaggtggccaccaacgncacaacatccattagcagcctccccggaatataccacattcaactaatgactttaacaatgcatttccagcatctcattcataacatatagtataaaacatactgaaatatgcacataaattaattcaagagcacaaatngcacataccttctccattgacctctcaagcacactgctgcaattgttgttttggnttgaacggggctctattgtgaaatgaggcatagatgttgataaagttcctgacgggacactcacctacatgttcaatataataatccttttttattacatgggaagagaatgtgatgaatatatggcacatggaaaccccatcatgtatattgaaagagagacattcacctacatg

SEQ ID NO: 256940 - DNA, 514 bp, Glycine max
  unsure (1)..(514): unsure at all n locations
cattatgcatccctcattcagaacatatatatatagtctgattaatagtcttaaactttgctactcccttaatagttgatagtagtacagaaaaatgacattctccacaataatcccacttgagactataagttgttagctagtaactacttggacatgnaaaacatagatatagatccattggataaagaaaccattctaaatatgatttagcaattgactgtatttacaaaaaggtgaatattggaaagatttgctaatatgtcctatgttcaatcatcaacatcatataatagaatctattataggaaacaagaaaaaaaccccatgtatgtttttgatcttatagtttcggaatgtgattagatcttataaaaattgagttctacttntacatattgactaaatgagctatcaacctgacaagcaagtagtatatggttctttgttaaggcattggccctcaagagctaaaccacaagattccaccatgcattgtgagctctagtatcat

SEQ ID NO: 256941 - DNA, 179 bp, Glycine max
ataccacacaacatcatggaggtaattatatataccagacatatgaaactgcctggtaattataaaaatctatggagaattcttcgtggttgtctaccttagcaaagggtgtctcttgcccgacatattcgcctaaatgtgagatcacgactgacatgctctctttggatgccccaata

SEQ ID NO: 256942 - DNA, 511 bp, Glycine max
ctcagctggtctcttcgaatataaataacataatgtaatattctgttataattatctctaatagaaaataattgttatactaggcaattgtatgggcatggcacacgaatagtacaaaaacaaaatcttatggagaagaaattcgaacatgaagattagattaagagacaaaatctaataacatcttttaatatatacttttaaaattctgctcaaacttacatggccctcacttgataacaacattatgtaattgcaccagatagcaattcagtgcaatacatatcgagtaattagtctatctgtctatgcgtgaagagtataaaagagttaaagacatctaataacaaattgttatatatggtaattctttgtacaataattactggaaaatttatatgtattataaattttcatttgttgatgatatgatatgtattcctacattaacgcattgatttgcccaaatctgataaggtataatgagcgtccgattattaaatcatatttg

SEQ ID NO: 256943 - DNA, 352 bp, Glycine max
  unsure (1)..(352): unsure at all n locations
tgatcaacatanccgagacgaggtattccctcttgtactcacaaggtcctttgagtcacttgaatatggccgctaatggcatcatgcaaacaccgaaagtggctcgatattgtgcgcaaggcaatcgcagtgtatggttcatcatgctccacatccacaaaccatatctaaagatgacacaacaatctgcatttggtggcagtactgtctgtatcttatatccacctgccacaagagccaagaaaggattaagagttgctaagtcactagctaacactctcataacatcaccatcatcactagcactatctgtgatgtagtatttagtatacaccgctcattcaacactaat

SEQ ID NO: 256944 - DNA, 403 bp, Glycine max
  unsure (1)..(403): unsure at all n locations
gcgaccaagatctcagcttcttggaataattgatctgaaacgatttgactttatattatnnttcacaactacattgaatagctgctagaacagtatctacaaaaactcacattcttcataatcttaaaatcactttnttaaagcttctgactaacaatagttataaagactctaagcacagacaatggaaccaaatcaagggagtaccttcttaatcttctaagaccttttctggttcctttgttatcaccacctacatacatcaagaacctaaaaaaaaaatgtcaaagttcactcgatcattataacataaacaaggacatccaactacataataataataataataatactgataataataataataatactgtaatcacaataataataatagtaatag

SEQ ID NO: 256945 - DNA, 522 bp, Glycine max
  unsure (1)..(522): unsure at all n locations
gtcacctgcggcatgcaagcnttctgagaatggaatcttgatctgtcaaatattatctaagaggatgaagaggcaagggactntcttttcttagatgccatttgcaaaaaatataagatcaaacataagagattagcacaggttagtttcaacaaaaacagaagagtaaaactcattatttgtctgggcacttagcacagagggctgggcttagcatgccttataaaattttactcataggctaagcgcaacagactcgcgcttagcctatagacacaaaaaatatttttctacaaattaggcttagtgtagcaagctgggcttagcctaagtctacaattttcaaaacgaaagaaagtctgggcttagcgcagcatggcgcgcttagctcancctcaccagaataacactcaagcttagcgcacagggcgcgcttagcctaactaaaacaactcanaaatagtgagagagtngagcttagcgcaacagggtgcacttagctcaacctcctcgacacacaac

SEQ ID NO: 256946 - DNA, 518 bp, Glycine max
  unsure (1)..(518): unsure at all n locations
tagaacaatatacttgcccttcatttaattgtctatggactnggttgccatgatcaacaaagtactttggacacctactatatgttgattcgaccaacgttgttatcagtatgttgcgacaatccttcaaaaccttatttatacattctgagaggttggttgtcatgtggccatatcaacgtccttctctatcataagtcatcgtccatttttcctttgaaatgcgatcaatccatgttgctatggctggactcagttgacaaaattcttctaaatattgatcaaaaatgtgcttgcaaagagtgtagcctgcataatattagttagcaacaacaattctaagtatgtatgaaacttatattaacgtgaccatcaaanatgagatcttacccaatttcttcaacatttctttttgtttgcattattgaatctgcgaatgaaattgcttgctatgtgtcggacgcagtaaacatgataaccgtggggagggttccaaccaagtgcttcgtagccacaac

SEQ ID NO: 256947 - DNA, 373 bp, Glycine max
  unsure (1)..(373): unsure at all n locations
catattaactaagccattgaagtctatcaaattcaaggaattgagagacaagttangagtgacatccttgacaaatctgaattaagaagggatgttgatgtatgctgtaattcagttagtcagttagttagttaggagttagttagtttgacagctgtgaaggtagttatagttacatgtgtagtgtataaaaataatagtgatcatgaatgagatgatgagaatgcagaagttttattcagagttctaagttccttctattttctcaatcaagtctttcatcttctcttattctctaacatagagtgagtgagtgcataatgtgtgtgtgaagagcttctttgttccaacatatggaagccatgaatctttc

SEQ ID NO: 256948 - DNA, 518 bp, Glycine max
  unsure (1)..(518): unsure at all n locations
gcttctaagaaaacttccttgagaagcttctttgagaatacttccttgagaagctagagtntanctacacacacccatctaaatactaagctcaccttcttgagaagcttccttgagaagctagagcttagctacacacccctataatagctaagctcacccccatgacaaaaaaacatgaaaatacaaaaaaaaatcctactacaaagtctactcaaaatgccctgaaatacaaggctaaaaccctatactactagaatggccaaaatacaaggcccaaaagaagaaaacaacctattctactatttacaaagaagagtggacccaaccttggcccatgggctcaaaaatctaccctaaggttcatgagaaccctaaggccttctttatcaactctagcccaatcctcttggagcctcttgctcatggctctggtaactggcctttcctagggaggaatgcatcatcccctcccncttgagaggattgacctanatctggttgttctctccttatat

SEQ ID NO: 256949 - DNA, 239 bp, Glycine max
ttcaaacttatcaattgctacctacagttcattagtgcctcccacaacccttatggtgtagaagtagcaccaaaaaccaaaattgtcaaacccccaacaactaccaaattttttgccttatgtggaaaggctcatatattccacaagtccagccatcttgatcaatgggggaaaaagggttagcacaattttccacaattacaattacccctttgtgatgcatgcatactgatttttat

SEQ ID NO: 256950 - DNA, 302 bp, Glycine max
gccatgttcataagctcatcctttcaaaataagtctattgaatataagagcttaattatgccccttatatcaagcttggatgacccacataaataaagtcagtattgaacatgacaattacactgaaaaggttataactgaaactatatattagtaacatttaaaaaaaatatttcaagtgctaagttgtaaaggaaagcactggtattatcttaaatgaggctacagaaaaagagtttatttcaatttaataagctgaagacagttagcttctgcaaattaagctagcgacctccacatgc

SEQ ID NO: 256951 - DNA, 409 bp, Glycine max
cttataatcaattcttatttcataattataatttaattaaggaatatcttatgcttctatttgaaggaaatacttcatatatcattttatataagataatattgattttaagtcaatttcaaattaaaattaagatttgatcatttttatgggattcaatctacaatatttcttatattaaataattttttttaacaaaaatatcattcattaaaattaatcatatatgatgacatgatagtcagagaaatataatccattaacatttgttaatattggtaacacttcacagggatgagtttcaccacaaaaaaaaatacttaatgcatattaatttcggacgaatttaatgttatctactcaaaaaaaataaaaattcttaaccctaatgaggtactcatttatactc

SEQ ID NO: 256952 - DNA, 375 bp, Glycine max
  unsure (1)..(375): unsure at all n locations
gagagtgtcatgtggacacgcttaggctattntccgataaatggtaccacattgcattttagagttgagtcaggtacatgcatcattttgagcatatatgatttgaattatggaaaagtcgatgactagtttgttaagtgtatggtgaaccaatgggttattaagaatgattggggtcattgttattgttttcttgataattattgtcttttggtgtttgttgatcttttataataaactcacctttgcaatctttgtaccatgtgattggtgtctgtgatgatctccaacttttattcgtggaagcagatgagcagtactaggtgacttggagggaagtcttttgttggagctaccacaccaacgtgataacat

SEQ ID NO: 256953 - DNA, 473 bp, Glycine max
  unsure (1)..(473): unsure at all n locations
acgaatcaagttgattcaagtagtcttgattatatcttagatgatgacgaaaagcttttgagaatgatttccaagatggagtcgacaagattcaagaatcaagagaagtttaatttcaagattcaagagaagatgaattcaagatccaagagaagaaatcaagaagacttcacaagggaagtatttaaaagatnttttanaaaacaaacatagcacatntttgtttttcaagagttctttctcaaaattttctaagttaccagagttcttactctctgataatcgattaccaattatctgtaatcgattaccagtagcacagttcgatttcaaaagcttttaattgaatttggaacggtccaattgaattcaaaatggtggtatcgattacaagatattggtgatcgattactagtggatctgaacgttgaaattcacaattcattgtggagagtcatattcttttcataaaa

SEQ ID NO: 256954 - DNA, 303 bp, Glycine max
  unsure (1)..(303): unsure at all n locations
ctgcagcaccggcttcccttccctaactgtactggaggcggntagtcgggctttatcctctatagntttctggagttttaacatgacctccgagatggaagccatttgatcttttaaagccgataaatcggccttcatctgttcctgcacgccctctttattatccattnttctggatcgagtgttataggggtgccttggtgttttcttagttatgatgaaattcctaaagaaataaacaacggtgagtatgccaccaaaacatgaatatgcaaatgaatgatcggagcacttggatccacc

SEQ ID NO: 256955 - DNA, 474 bp, Glycine max
  unsure (1)..(474): unsure at all n locations
ctttcagatgggctganttgtgtaacaacatctatatattggtagtagtttatgctcacgcattcacaagctgcaataatgtgtgaacatggatagtgaagcgcanaataccttccgcattgacaataatgaccattcaagttaactgcccacttttgtccgccacgttgcataataggattgaaggtctcctctacttcaaaccttgtggagtggatatcatacatgcgaacgatgtgcgaacaagcttcttctggattttttctaagttctttaacaagcttagaacaatatacttgtccttcatttaactatctttaggcttggcggccacgatcaacaaagtacttttggcacctactatatgttgatttgaccaacgctgttatcggtattgtgcggcaatccctcaataccttatttatacattctgagagggtcgttgtcatgtgggcatatcgacggccttcttta

SEQ ID NO: 256956 - DNA, 396 bp, Glycine max
  unsure (1)..(396): unsure at all n locations
gcttggtaagaactaattcacgaaccgctgttgctgtanactcgttactatcctttgcagcacgaggccacacacatggcaactcctaaaaagatagaaacatttgaatagtctctttcagaagttatagcatataccttaaatagagaagatcaggaattaaaggaaaatcaagcataacttgtgtggtataatttgagaaacatgcactagaccaagattgacaccacgtttaaacatcttgatcagtgatagttactacttactatctctaacacatttaattactcttataataaccatttaaatgaagtttttttatcttcattgattattcctaatactaattaagttgaattattgggtcatgttggactctaaatcttttaacaacat

SEQ ID NO: 256957 - DNA, 446 bp, Glycine max
  unsure (1)..(446): unsure at all n locations
tacgatgtggttttgtgactaaattcaatttatacacatgtcttgcactntccacattggtacaactccctccatcaatgatcatcatgcaaactctgccaatgatcaaacatctagtgtggaaaatgttttctctctgactttcctcaatagacttcaattgatggccaagtaaccgcctaatcatcaacaattctccctccggtgttttctccacttcctcctcatcatcctcactctcttctcccttttcaacttcggactcactaatgtactctccatctctaacaatcatggctttcttgttagggcactcatatgcatagtgtcccaagccttggcaccgaaaacacttcacatcccgactcttttttgaggattgttcttgaaattttggaggagttnttgatggtataggtgtttcatttgatgtggcaaccccttta

SEQ ID NO: 256958 - DNA, 414 bp, Glycine max
  unsure (1)..(414): unsure at all n locations
atattgaaagatctttatgtgagcacggcaaatatgtcagacatatccctagtagacaaatatatgtgtcttaccttcatatagacatctatatctgggttaggcgtaatatttgcttctttctctgttggggacacctctactagcaaaattgcataatgtaaaataattttggttaacctccactttattgaccaaaaataatattctcttctatctctgtactgggatgcaggctctgttctggacacctctggtaggaaatctgctagcacaggttggtattgacacacttacctncactttattaaccatgtagttagggaaagtggaaaaacaaatgatatatccaatacgaacatgtttagtcatgatcttgcatacatcaaactagttaaacataccaaatgatat

SEQ ID NO: 256959 - DNA, 186 bp, Glycine max
acttaagcaatttttgacccttctccttagtgaaccgcaatgctaagcgcacagaagcggcacttagcaaattctgcaagtcataaaacctggcactttcactaagcatggctctgggtcggcttcactaaaatgatgcatcttgaatacataagggcatgcgcttaacggatgatggatcgctta

SEQ ID NO: 256960 - DNA, 371 bp, Glycine max
tggccagagaaggaatccacggaggaaatgcttaccacctctaatgactggaaagcggtttctaatgactcctctgcggcctccacataaggcatagaggatgggcagctcaccaagatgtcttcctcgcctgatacgatgaccagatgcccttccactacgaatttcaacttttggtggagtgtagagggaacaactcccactgagtggatccacggacgccccaacagacaggtgtagggggggttaatgtccattatttggaaggtaacttggcatgtgtgagggcctatctgtactgggaggtcgatctctcccctaacctctcggcgggtgccgtcgaaggcacgaaccaccattgaactcggctt

SEQ ID NO: 256961 - DNA, 371 bp, Glycine max
gttacacggagtttatattcatgcgcataatatatcgttattctcgaaattgaacaagggaagctctcgagcaattcatatgggcataacttttcactcggaggtccgattcaagcccataatatatcgagacgatcgaaattgaacaatggaaactcatgagcaattcaaatggtcataacttttcacttagaggtccgattctggagcataatatatcgagatgctcgaaattgaacaatgcaagctctcgagaaattcaaatggtcaaaacttttcactcggaggtccgattctggcgcctaatatatcgagatgctcgaaattgaacaatgggagcttttgagcgatttacatgggcaatactttac

SEQ ID NO: 256962 - DNA, 365 bp, Glycine max
  unsure (1)..(365): unsure at all n locations
agctcgaacaacaagcaacaaaatgtgcttttatacaaatagaagnaactaactaactaactaacttccactaatatatagagcgactactcagaaggaagggaggagccctgattacgtccatctattctacctaattaaactaattacacaaaacaaagcccanactcatagtctaatgatgcaagtgcaaaggttatgatttccaagctgaatttgaccctcaaaatggcataaatgccccaagcttatttgagacacaaatgaactctttttcttatctttctacggactactcacatgcttcatttggagttttggacaggtcttaaaggcctgcacaacgcagataggtcaagtaagca

SEQ ID NO: 256963 - DNA, 317 bp, Glycine max
gtggttcgaggtacttatccgttgaagatcgaagaacgattatcatttaatgaagaacgtcgaagaacggttcaaacctttgcgagattcctcacggaaaacgttacgaaaacgtttcggaagcgcctcggcttagattttcttcacggaaacatattttccaagcaaattccaaagagagagaagtgcctaaggggctggacccctttcttcttcacttcctcccctatttatagcaaaataagggaggtggttgccgcccagctcgcccaggcgagctcagctcgcccaggcgagcagggttgcttcctccagaa

SEQ ID NO: 256964 - DNA, 402 bp, Glycine max
agcttggcatgtattcatactatctcaagacaaatgagttgacctgcacctacgcaatagacatttacttgggattttgatttttggttactctcttttctcccaaacaaggtctttcttttttttgatttttttagaaaggccgtacaagattatattaaaaaaaaaaagagtaaaagatataattgtaaatttggtttacgcttgacactatttttcattttagttcctacatgaaaaaacttgcacatgtttgtgttaccttcaacagcctctaacttgcgttttcaaaagatcttctttcgtaatttatgcattgaacctacattggaatgactgctacagtgccactgcggtttcaatggcaacacaaacatgtgattacgttttgttcctttttat

SEQ ID NO: 256965 - DNA, 366 bp, Glycine max
taagccctcaccttatcaataattccttgatcgagcctcatatattagaaaaaaaaataatttaagctaattatataagaaaattagtgaatcacatttaattgtattaattttaatcaaaaattaattttttctctaaattattttttattaaaatttgatatataaataaaaaagaaatcattaaaactaattaaaacatcaatagaatattttagaaataataacattaaataaaataaattgaatacattttttttttacatttaagactaagaaaagaatgttttttccttcttctaatatttgagactcagatcattaaactgaaacattattaacaatgcatgtacatgtttgacactc

SEQ ID NO: 256966 - DNA, 424 bp, Glycine max
  unsure (1)..(424): unsure at all n locations
tctagcctaatggacttaccttgaattaatacctttgatagccctttngagcctatgttcccctttctttgttttgaagctcatcacaagccttaagtgaaaaaccatgatctcaccttaaccttaaggaattttggagctttggaattgttttgggaataagtgtggggcggggggttgttggataacatgttttgttggctatgcttcatgatgtatttctgggccataatgatgtacatcgtatatgggttaaatgttggacatgttgctgaatgatatgctagttctcaaatgctactgtgcaaaaaanaaacaaaatcaagttaaatcaatcagaaaagaaaaagaaagccattaagttggtgatacgtctcacaaaaaaaaagatgatagaccttggtctctctttgttaaatttatt

SEQ ID NO: 256967 - DNA, 430 bp, Glycine max
accttaattaactttttttttatatgagattaaatttgaaatgagtatcaaaatactttataataaaaatattaaaaaatactttatgaatgaatcttaatcaagtaattcacatattatatcatgtaaaacattaaaacatatagatattcacttatatcaaagcaatcaaacacaagtattgaagaataatgattatagatattattaaaatatttgaatgaaaatttcatgctaataagataaactcaatcaagaacacatactcaaaatttcaaacaatcaaaacaaacaaatgaaaaatttgtagttatcataatcaaattgattgaagaaattttttaataagagaatagttttgatattacctttctcatgagtaaggtgtctaaatcttcaaagatgaagatcttactttttctcttctgtt

SEQ ID NO: 256968 - DNA, 358 bp, Glycine max
  unsure (1)..(358): unsure at all n locations
tctgggttctgntagtcgatgaatacgactaactttngtttaganatttgngcaaattgtatctaactcctcccatttatgggtattctttagtgctgtaattactttttgttaaatataggtaataagtacttagtacttccattttgtgtatttaataatcatttcctttcaatttcaggttaataaagcaagtttgtgaagtgctgatttttagcttctcgctaagccaatctgccggaattttaaaatgatgttctttttgtagaatctgaaacttccttagccttttcatgtagtgacatgagtatttgactcaagaatattgttgttaaccttatttctaaatccataaaaa

SEQ ID NO: 256969 - DNA, 324 bp, Glycine max
  unsure (1)..(324): unsure at all n locations
aatcatacaatggctcatgcaaatcattctcaaacactcatntcatgcaaaacaatccactgcatatcattttcaagcaatccactgctcaaacaagctttatagtacaagcaaacaacttaaagtgctaaaatttaaagaactgaaatataaaaattgaaattaaaatgaccgaacaacaatcataaaataatggaaaataaactaaaatgtccaagatgcacaaatttaaatggcccgctcttgtggttgctcttgtgcacgctcattaaggtccaatacttgagcatctagagaatcctgagagataggctgctctaactc

SEQ ID NO: 256970 - DNA, 378 bp, Glycine max
  unsure (1)..(378): unsure at all n locations
ttttaatattactagtattttgttttctagccgtgtatttggctatactattatgacatttgaacaatttagtatttcctttatttgcatggtatgattaaacaattatgaattatgttatatgactatgtgatttttatatatttgatctactcatgtttcttgcttcatgattnggttatattcttcaatgaatgtcttgtgaatgattaatagtgtatgtatgttttatacttgttacacactttggccttttgttgatgccaaagggggagagaaatagggattaaatcaagaactcatantagtaattaatttaatttcaagtaaagcataaactcaaaaacaaaggggagaaaaatggaaataagtgagtga

SEQ ID NO: 256971 - DNA, 284 bp, Glycine max
cacatgattgatctgatggcccacataattaggagccgcttaaacaattgttttgtcgctttgattttggctagaaaaccctttttggtctctaataaaatgatggtgatttaatcctatgtgttcccttaaaaattttggggaatccaatgcttcgacaacttatctttagcatgcattcatgtttaaattctttgttgcattactcaccatattttgttccttaagggagtaacaccataactaagcgcaccacaaagcacccctatcgaacccgttctaaa

SEQ ID NO: 256972 - DNA, 432 bp, Glycine max
  unsure (1)..(432): unsure at all n locations
ggattggtgtaccttgcacaatcttggacaatttttgagaatgagcttttcaagacttgtcagtttagaaaagtcaggggtttctgtcaagttcttggagtgactaagattgaggaattttagccacggcaaaacctacaacaaatagtttttgataaaagaataatagaagaaaataaaaagggaaatagtggtaagtggaaactaatactactttaaataacctatgagttttaaatgaacatggcatgtaacatatacctgnggtgttttccagagtagtctaagtttactgtatttaaaatcaatcgcaattacacctttcagatgaaagntgttaggtatgtattttaaaggaaaccctcgccaacagatccatttcagttgcttagaaagatacccataatttccagagagttgtacatgatcaag

SEQ ID NO: 256973 - DNA, 443 bp, Glycine max
  unsure (1)..(443): unsure at all n locations
tgcaagctgaaaaaaagggaaagaacaattcctgtttacattcctacgaaccaactgttaatatgttaaacaaacacactcttaagaatcatatatcatgggaatcatgatttctaagaataactaaaaaatgttggaatcattattaatattcctcgaaatatttaagggacatttgtttcatagaatctttttacattttaaagaatataatatgagaatatcattcttgggtatttgtaaaaaaaaaaactatgtgtggttacattttaatatttctaaaaatattttctaagaatttaaatgatctaaatgaatggtactaatatttttagttgcaatttttcttatatctaatgttgacttattttttattttttcatcctccaaatttcgattattcatctttnggtacttatggngattatagcgacatggaatat

SEQ ID NO: 256974 - DNA, 442 bp, Glycine max
  unsure (1)..(442): unsure at all n locations
agaaatgaacacatttgtatcgtgtttagngncactattcttgcttggaacctaagtaaaacatacaatatggacaaattgatttgaatctaacaaatagaataaaattgataaagaaggataaaaattatattatctaaaaaaattattcttttcttaatttagaaaatataggatcgaattgatttgtttgagtgagcatttataaaattgatatttattataattattttgaattaaagtgatttatctttgaatatttttataataaaaataaattataagagaacttaatataaaattttatatcaacattaaagctactcaaattatttcaactcaaaattaattttaaatccaaattaattctataaacatggcatcaaacatgtaaacatttactccacaacaacgtcacaaacttaattaatgcatataaaat

SEQ ID NO: 256975 - DNA, 442 bp, Glycine max
agcttgaactctggagaggcagactttggtattaaatggttttcttttaagagtcagatagagtatatgcactccaattttaacaagttacagaggatctcatcttatatataaaattgagagatgtcatatcacaagtttctaattttaaagatctagaatcaatcatacaagatgatggttaaattaatgagaatgtcccccataggatacaagccggatgacttaaatggagaaaagtattaaatttttgtgatcacaaagtgcctaccaaaactcaaaagcaagtgttatgtaccactatatgtccaattatactatattacagggaatgtcgggcttctaagggacatgggagacaaattgaattatgaaaatgttaacatggatgtcttcctaccacaaaagatagaatatgaaatgaaatttttcacagattggt

SEQ ID NO: 256976 - DNA, 416 bp, Glycine max
  unsure (1)..(416): unsure at all n locations
gaaccccatacattntcgaatccttaaatctcacattatcatgcagagctgttgtatttgctaatcagtaaaaatatccataacttgatcgaaaatgatccatcaacttcggtgctagccatgataaaacacatcaaaaacactaaaggatacaccaccacgtaccacaaagcatggttggcaaagcaaaaggctattgaaaacatctacaacaattgggaaagatcgcaccacgatctaccgagattgttgcaagctatgtagtaatttttgtgaaggaaacactgtcaatgtcaccacaaggaggtcaatcagtaaagggtttcgtcatattccatcattttttttggagtttcagtatgtttatcgatgagttctaatattgcaaactcgtagttcaatcgatggaacatggt

SEQ ID NO: 256977 - DNA, 337 bp, Glycine max
ggaaaaccatctatatatatgacacacgccaacattttaaaagatcacacattctctcccgacccaatatttagaacaaagttcgacatttttgagagatactatgagtcagacgaatgtgaactccatgtagggtttattttcaaattgattgattattcacaacgatagggtgtttatttcaaacttcactctagacccatttggtacctaatgctgtgatttgaaacgatataaccacaataccaataccttcgctgactgacgaacatattggataaatttatatcggtgtattcaagaaccggtaacaattcgtttcaagttgcattgaaag

SEQ ID NO: 256978 - DNA, 391 bp, Glycine max
  unsure (1)..(391): unsure at all n locations
ttacatgccaaacctcataattattacacatttaacatcacatgtgtgtatgtaacttaattaaatggtaactttcctttgagtcaattaccattcatataaataattacacacgttaacatttaacatttttcatgaacattctacacaatagaggtcactttggtgatatcttgattcaattagctcatttaaatgctaaataattaaaatgatataccataactaaattttgaacattgatgcaccaaatccaaaattaaaatgtttcttgangtaaatattttaagtttatttatttaaattatagaggcccgtgattattattgtaatataccgtagtggcctctanagtaagaacaaacacataaatgatgcattntaaattata

SEQ ID NO: 256979 - DNA, 440 bp, Glycine max
tgaccaattagaaatttatatcaatattactaacaaagttaaacatcttttatacaattattatgactccgcacatgttgattctctgacaaataatgtcaccatgtttagttgtttgtcattctgtttataatctcacatggtacactagtcatgatgcagggattatttttcctgaacacgatcctacatctctacttttactttttacttaccaactcgttgaaccctttaagtcaaaataaatttcactaagtcaaaacactagtaaaaatttgcaacatgaaatacataaatacctgataaactcagatgcatattgaagaacatgctaaataagttctaggattagcaaaatcaaccattacgaaattgtatgtgtggatcaagttaatgaagattcaaattttaagtaatatattaaaaatcaactcttattt

SEQ ID NO: 256980 - DNA, 334 bp, Glycine max
  unsure (1)..(334): unsure at all n locations
ccctactatcactntgtatagcggaagaatctccatattggagaattataatcgtgtgtttccattactacctttaattactaagtgcctatcttaacttcacgaaacgagaaagtctgagttntcccaacacttttaatgttgtgtttctattggaatcgaagctcccttttgcaaagcaataactgtggtgatggtgtccgcgtgtcacaacgtagtaagaagaaccagagaatactggcgcgtgggagttctaaatttggtgccacttttttnttatattaattaaaataaattaaaaataccaacccctgcctgtgaaataatgggtaac

SEQ ID NO: 256981 - DNA, 374 bp, Glycine max
tgtcatttgagagttaagaccaatgtgattgttaactgctatttaatcattaaattgattgtgttttctataagcatttaatgtacttctttcatcattgataattgatagtggcttccctcttaattagcaaaactgcaaaagcttaaattagttgatatgtttagttatttaagatttatatgaatgccattatgtctatcttatgaacatgtaattatgtacttgtatgcaacttcaaaggatctactaatctcttaatgcaagaattgataattaagtctctttatttaatgcatatataaatatgcaacttttataataatattaccatcatggaaacttacagtaggatattcactgtccattttcat

SEQ ID NO: 256982 - DNA, 312 bp, Glycine max
aaactcgaggaccaacaacgggtgcttataagaatcttatacggatcccaccatcaataatatatgtaacacgtatttaagaggcattaccaccacaaggataatcactgaaagcgcagccttacacaataacaacatttgaaccattaaatagaaataaaacatggtcttgaaaataataaaactcgaacacataacgggcattcacttttagcattcctaatgaaagccaacaaaagcctatttttttttctttcattcacttaccaaaaatatatttcaacaactattcctacctacttctttgatata

SEQ ID NO: 256983 - DNA, 451 bp, Glycine max
  unsure (1)..(451): unsure at all n locations
ggaaggcatgttatccaccatcttctcatagnataacacttgttatgngnctactattattgctatcattatcctttccatcattgggggcactacttgagataccagatcccttcacctttgggcatattctttgaaagattcatgctctctcttacacatgttctatagcttcattctatccaaaaccatatcagaattgtactaatattgcctattgaaggcaaccataaggtccttccaggaatggacccgggaagattccagattagtataccatgtgatggctgcccaataagactttcctagaagaaatgcatcaacaattcttcatcttttgtgtatgcccccattttcctacaatacatctttatgcgattcttggggcaagtagtccctttgtacttataaaattcgacaccttgacatcagaggaatgaccacgtcgggc

SEQ ID NO: 256984 - DNA, 350 bp, Glycine max
gaccttaagcaccgcagctgcagctcggggctttatattataatttaataaccagcgaaacatggcgcacgagaggaaacaaagacgctttcttttcaaaacttctcatttgtttcccgctgttctcgacacaatcaaaatggcccgattaggggccttctatctgaaccccgaagggcaacgataccacacctcacctatataataaaccacctgcggttcctttcttgttcaatactttcctaattgatattatgcccaaacatcctgaatgcctaaagaaaataaaagtttgaatttgatcatctaagatgatatatgcgcctcatcatattaatccttaaaaaaat

SEQ ID NO: 256985 - DNA, 369 bp, Glycine max
  unsure (1)..(369): unsure at all n locations
cacaataaattgttattgttttagaactattaatacataagcttctatgctacagttgcacaaagattgaaatcacatgtatccattttttttgtctcattcatgttcttccaactgaaaaatgacacactcttaaatagtaacattttccctcttgatcatttttattgaggtgttattttttagcacatagacattnttggtatttcttttatctgtaagaataaaaaataagtatcagaatatttacaataataattcaggtaagttagactcttaattaggtagacatttngggtattgctctctaaccaaaaattatatttcacatcaataatttttaatgaactctaattgaaaaaacaagta

SEQ ID NO: 256986 - DNA, 427 bp, Glycine max
  unsure (1)..(427): unsure at all n locations
agctngcacgttaagcaacgataattaaatttattaatataatggttgttacgttattgaagccttgcacctgaaaaaggaaagcgaggagagaaagatgaaaaatcgcattgaagagaaagaagagctctttttctgtttctgggtgattccaaatttccaattgtgtggatcatttcttcaattttccagttttgttattggggttgaacggagggtcaacgcatggttgatttggaaaggaagggggggtaccacaggaataaatttatgaatgaaaattaaagtaaagaaatgctattggtgatgtaataaaaaaattaaaaacactaacacctgaaaatgctctagttgaatacaaacaaaccaatgaaaataatatactatgagaattggaatgaatgatgctaactctttacatcatttt

SEQ ID NO: 256987 - DNA, 407 bp, Glycine max
  unsure (1)..(407): unsure at all n locations
aagtgcttactactgtgtcaagattgtgactngncaggcagngaagctgagtaggatggtctcactcacagtcacagtaacctttctcaagtcgcttattttcatgacacttctcaccgagtttaatcattgttcttaccctgcttgtctattttgagcttttatcttgtctaggtaacattccacctttctcatcttgcatcagtaccacccttttgatcaattcgtgtcattgtttttatatattttaaaaagttcaaagatcccgatctctcacccccaatataacaataggtctaaattctttaattgtttctctcaacttttaatctaacaaacttgattaattaacattcagatacacataatactatagtacatattatactgatattatagatacttaa

SEQ ID NO: 256988 - DNA, 470 bp, Glycine max
  unsure (1)..(470): unsure at all n locations
tatacaagaatgaagctctgataccacttgttatacaagtggtctcagatatctattatatggggggggggggtgaattaagagattccaaactacttccncaattaaaaatctatttcactttttattcaagatataaattcccttaataatgaacttcttaaatattgattcaaataaaacaatttgaatatgaatataaagcaatactaaacaaaggagattaacggaagagaaagtgcaaactcatatttatgctggttcggccacacccttgtgcctacgtccagtccccaagcaacccgcttgagagttccactatcttggaaattccttttacaagtcttaaacacacaaggacaattcttcctttgtgtgtagaatttctttacaacaagagacctacggtctcttaatctcttatagaatgaggagaacaagaatagtgaatctctctagagagagataga

SEQ ID NO: 256989 - DNA, 399 bp, Glycine max
atcaattctaatgctttcgcgcattctttaattgaagtatcatattttccctgtggtatatttgacatgttaaagaaaagcaagcaaacataacagacggagcgcaaaaatgatggcgcctagacccataatagcttatatgggataaaaatgataaaaaaaatgtccacatatattattaaaaaaattgaaacaaaggttaaaatacaagaacaagtctctagctttaatccttattgtcttttgcagtttgctttaacagaaccgtttttttattgaacagattgggatcaggttttgctcaaatttattgcattaaagactaataaatatgtaaatacccaagctaattttggcaaattaatatctatcctctaaattgaacactgcaagaaacat

SEQ ID NO: 256990 - DNA, 466 bp, Glycine max
  unsure (1)..(466): unsure at all n locations
gacgcctctgacatntaatggtggtggcaacttctcatatgacatttatctntgcctgatcgaccttaatccctcgggctgaaatcttatggcccaagactatgccttctcgaaccatgaagtgacacttctcccaattcagcaccaagttagtctctatacacctctgtagtaccatctccaagtagctttcaaatgagggcccgaaatctgaaaagtcgtccatgaatacttcaatgttcttctccaccatatctgaaaaaatggccagcatgcacctctggaatgtggctggtgcattacataacccaaatgacattcgtctataggcaaagacaccaaaggggcatgtgaaggttgtcttctcctgatccttggggtccatcatgatctgtttataccctgagtatccatccaagaagcagtagtatgcctgacccgcangcctctccagcatctgatctat

SEQ ID NO: 256991 - DNA, 455 bp, Glycine max
gcaagcttctttagaattgctgccagtaccatttttttatctttcagagaagatatcaccatattcaactattcatatttattttaactttcttttgatgtcttggatgttgaagcttccacctatgtccaacaagtctgatgttacgggatgaatttgtaaatcatccatcatcacgtaagttttttcaccatatttcttctttggaaagaaattacccctccacatttcgatagagaattttaactaaggaaagtaatttatcagaaaatttgaatttctgtaatctagaattcattgtttggattttttttgtgaagaatttaaaattttggaattttaaaacagaattttaaacaactaaaaatctggaatttcaatttccttctaaaatgtgagaaattgaaattttcttttacagtctttttcaagaaacaccgtatgagattgtggaa

SEQ ID NO: 256992 - DNA, 466 bp, Glycine max
  unsure (1)..(466): unsure at all n locations
cagattttagtaatgacccactaacctagaattaaaataacttaatgccattaacctatggaattaanaaaacttaatggctgagtgtaactgaaattgtggcaaccaaaagtcacccccaacagccaacaagtcagccaccatttggtctcccaaaaggctgatgcctaggttgccaattgggcccttattacaacttgaactaaacctaactaaagcccttttagttgattaacccaaaacatatttttggtcagccaactttacaaggattgggccattatttagacaaactaaacactctaaaattgaaacaaagtggtgtcatttagtcctcctccatttgggccatgatacaactcacaaccttggactnttctccttgaaacttgngcttgtattcaaacagtatggacagcacttgttgaagagcttccttggatttccttgctctagcccttgtcat

SEQ ID NO: 256993 - DNA, 436 bp, Glycine max
  unsure (1)..(436): unsure at all n locations
agcttgccaatgctctctggaagcctcttttgtntttaactattggctaccaatccaaataacgtgaattcttgggacccttcaccccatttgaggccaacacttactttgcctcaaatgccagtttttgcagcttggacagatgcataactcatagcccaataggccctttaattttttgtctctcaagagaaatttcaatcctttttattgtctttttttgcatgcatgaacaacacaaaaggaaggggttgtagctatccaaatggagggtctaaatattatatcatcacatcactgtcagcaagtttaatttaactttcaaatcattacattctaacattttactaactaagaattcctgaatattcattttcattctcaanatatcctctcggccagatttttgcaatccattcattgatagaaacggacg

SEQ ID NO: 256994 - DNA, 411 bp, Glycine max
  unsure (1)..(411): unsure at all n locations
gctaatgaacaattttgttaactatttgncctctcatactttgttgnttctttagggaaaacgnnaaccacaatagtataaggctatggcatacaaacatgggctatatttacctcttagaatgttagggcgcaaaacagaccttgtacatatagccaagccctttcctatttattttacatattagccgaagaaacaatccattctgaacgacaaatatttaacaaagctggtcattaactcgcaacatgtcttaatctcacgtgcgagcttcttgcgtaaccctcttgatgccataaaatacaaaacaaatcactcgtagactagctatttgaaattatacacctgaagtccaccatcaaatgagctcgttccctcttgtatctgcaaacaacaatcattgaacactta

SEQ ID NO: 256995 - DNA, 474 bp, Glycine max
  unsure (1)..(474): unsure at all n locations
gacctatagaaactcaagctctgaatactagtgtattggtccttcctctccttcctcttttaagaatgnngagacgagtgcagaaagctatggaggaaattgttgatagtggttttgcggctatgggcaccgaaatccaactaggtaatgatgttgcgatgcaacgttaaggccttttctccttgctttcttttntatgataaatatagacatttgaaacgttcgaggagtgagaaagaagttttctttggaacaattcatgaccttcttcaaattggtggggaataggcggataaagttatcaaacacattggattggatgtggtattttgtgtggaagcaactgaattttcgaggggactatggtgtttgtggaatacctcttccataaacatttcgattgaagcctcctctatatatcacatatatatcaaagtcaatcctagagcaaatacttcttgcgttttgactaat

SEQ ID NO: 256996 - DNA, 384 bp, Glycine max
  unsure (1)..(384): unsure at all n locations
cttcttaaagaattaaacactttactctttcttttgncatataaatccacggctttctagtgaaatcatctataaaggttataaagtacatgtgtcctccaagggactctacttgtatagggccacaaacatctgaatagatgattccagcttctgagttgattttattgagataaactctctgaagggcttctttgtctgcttgcattccaagaaatttctgcatttctcctggggctgttgtagttgaggaattcctcgtgcctgttggatcgagtggcctcggaataattaagaagggggggtgaatcaattattccctaacctctactaattaaaaaattactcttttaagactcttactaatttgtaacagaatgagga

SEQ ID NO: 256997 - DNA, 263 bp, Glycine max
aagtgatatgggggtttttgctggattttaatgaactgaatgaggcgtatattagtacaaaattggtgaaggctgtttgaatggagtagatgatggttgatggtttgttcaaaatggtgaaaaactgattgaattggatcgtgaattaactaaatcaataattttttttattagtcaaaagaaggaaacctattataaactaaccattattaaatgtgtaaaagcagtcggcataaataatttattaatatttattgaaaaac

SEQ ID NO: 256998 - DNA, 327 bp, Glycine max
gaatgcctctaacagcacctttgtcaatgatgttcttcatgccccttaagagcagacgtccaaatcttcgatgccatattctgacttcatcttccttggaggatagacatgtggaggagtaactggtttcttgaggggtccatagggaacagagggcctttgatctgctgcccttcattagaacttcactcttctcatttgtcaccaagcattctgactttgtgaagtttacattgaatcctccatcacacagctgactgaagctgatcaagtttgcagcccatcccttcaccagcagactgtgtcagactaggaagccaacatgaa

SEQ ID NO: 256999 - DNA, 387 bp, Glycine max
  unsure (1)..(387): unsure at all n locations
ttctcggggccatttctgctaatgcaaacatttggaaagttagtttacaagaaatataacaatcattacaaacaagggccaaacaacacttctcatggcacgagtgtcaacatgcactntataaaataatcatattggggtcgtgctattntatgacacatacgtatttgcacacataaaaattttgtgtgaagcattttacgacacctatccatgtacatattttttgacaaaccttttcatgctacatcctatatatatacacacacatttttttggaaggcttcttttgttacctactcacaaatacacatattttgaaaaacacttttacgctacccatccaacactttgttaggcacttcatgctatatnatatcacaatat

SEQ ID NO: 257000 - DNA, 430 bp, Glycine max
  unsure (1)..(430): unsure at all n locations
ggtgagagaatnttttgaattgcaggctcatctaatcgttgttattatcgatcaagctgagggcacagtccacgtttcttgggtgcagccaacagttctgggtattcaacagatcaaatccttacgggatcgactatacagttggaccggaaaagttcacactgcattgttgtccattgaggcagagacacctgatctaatgggatcgcgatctttccttaattttttttctgccctatgtaacaatttctcaaggcaaagggaacacatcctaacgcttcaaaagatgaagagaaattccaagtgacatgggcaatgtagccaacttgtcttggcttcattatatttacatgctccatttgctttttgaatgatgactggaaaaagcaaccccttggcttacgaatggttgttctatgcttttgcatac

SEQ ID NO: 257001 - DNA, 401 bp, Glycine max
  unsure (1)..(401): unsure at all n locations
tctcctcaccttccacgtagctttctcttcttccttcttctccaccattggtcttcattaaagctccaaaatttctcctcattcctactccaaattgcaaggagaagccattntcggagtcttggaacctccctcaacttcgtgaagcttcgaattttaggtatgggtggacttcttctcacatgaaattcgtgggtgttgggtttttgggagatatgatgggtagttctactaggttattgccttagggtagtcatttgtgaaggaatttgttgaaatcatgctaaacttgacatgtttgatgtgagtaaagctacccattctgttttagggttntatgatgatgctttgtgatatttgtatgctgaaattggtgatagaaaactagtagagataatggg

SEQ ID NO: 257002 - DNA, 387 bp, Glycine max
ccgacaaaatgggatagaaattatatcatcctccaactcatcgtttttaggtttctattgatgtcacctttcatgaagatgagtcatacttcattcatcctcagcttcaaggggataggattccagaagcctagtccttttctgaatccttttttgcttctaatggcattcctctatctttgcttcatgagcctgtaccaatgtgcaggtcaatcgaggctaccctctctaatgtgcatgtgatctagcacctcttcttggtgtaccacatgtaaaatagataaggtcaacctacctaaggccccgacaccaaagttggggtattaaaatgaaagtggacctatattgtgataattagtatgatggtatacgggcttgttattatgc

SEQ ID NO: 257003 - DNA, 431 bp, Glycine max
  unsure (1)..(431): unsure at all n locations
acctatgaaactcaagctgatttctatcggtgcagcaangaaccaccatgccttcatgaatacccaacactcttctgaagtccttcaatccatccgcaaaatagaatntgttaccgtctcttctaacctttataaaatgtttttcttcattgtaatcaaacgttacatacagtgggtaagtaagaccccagtgtctgtgatatgctaatggtatttgaatgaagttttggaattatacatcaattacatggttaaccccacaatagtagatataattcttgtgttcatttcatacaataaaatgaataagatagtcaatatgaaaacacatattctatcaacgtggaaaacaaattgaaatntgtatataactgggttgccgaagaaactgggtggtgcctaaatgacgaaatgtgtcatagtaaaacttt

SEQ ID NO: 257004 - DNA, 408 bp, Glycine max
  unsure (1)..(408): unsure at all n locations
agctaggtcttgattttttctattttctgtatctagcttacaacaataaacttggccttgtcttaattgtctttgggcttggcgaccaccatcaacaaagtactttcggcacctactatatgttgacttgaccaacgctgttattggaatgctgcgacaatctttcaacaccttattcacacattctgataggttggttttcatgtgaccatatcgtcatccacatgtattgtaagccatgctccattgttcctttgaaatgcaaccaatccatcttgctatggctggactcaattgacaaaatttctttaagtgttgatcanacacatgcttggtaagagngtacgctgcatcaaatttgttatcatcaaaagttgtacgtagacatccaacttaaattatattaat

SEQ ID NO: 257005 - DNA, 429 bp, Glycine max
  unsure (1)..(429): unsure at all n locations
ngtacaaacagaaggagtgatgataatcaggtgttacatttattagtaatagctcatggnctcttcatttaaactagcgtgcttggttctcttccgaggctagtggctaatggaccaaagacaagggagtaaggatttcacgactaagcttgttgaatttctatttcgcaggagatggtagnctatctttcttttctttattcctttggaaatatttactttcattggttggtctcaccatgcaaagtggaaccaacatttgaggaataactcaagtattgttaaaggatatcaaatcataaagaacaatatgatactataacgatggaacctacctacaaatataatacacctatggctactaaaccctatagcccaaaatctagcaaactttctctctctgtttgctctgacagagataccaccact

SEQ ID NO: 257006 - DNA, 289 bp, Glycine max
  unsure (1)..(289): unsure at all n locations
agcttgagccaacatccaacttaccatattatttttcccactgtgagaaagnccatgcttgcccacgagagaaagcaccatatgaaagaaaaatctccaattgaagagtgagagaacgcgcaaaatagaaagaaacattccgatcaaggatccaacgaaaacagattacatctgttgaagcgggctctgcgccagacaatatctgaaccaacccaactctgcacctcggtacacgaaaataaggaaaccaccaccgtaagtggtcgctctccctctgattgctggcgaa

SEQ ID NO: 257007 - DNA, 449 bp, Glycine max
agcttcaatggctcaatgagcaaggggaaatgattgtttatcaacaagtaaagatacccttttctatagaagactaccatgatgaagttttatgtgatataatccctatggaagcacgaaacattttgttggataggccatggaaatttgacaagaaagcaatccacaatggtctcaccaatgaaataaacttcacccatggaagcaaaaagttcaaacttgttcccttgacaccttcacaagtggctggggtgatcaagtacaaataaaactcaaatgggataaggaaaagaataaaaaaagaaaagaagaacatccttttatggttaaggagaagtgtaaggaggtaagtgtctcctccaagaggttagctaaaaaggagagtcattttgcaataaacacaaacattaaagaaacttcccttcttagacaaccttcacatctttttc

SEQ ID NO: 257008 - DNA, 463 bp, Glycine max
  unsure (1)..(463): unsure at all n locations
gcatctgtgaggtagcatggatgcttactagaatgccaatgtgcgaggatgctgactttgtttcanaatttttatacatgtaaatagatgatccatgatgttggtatctctcttgattcagggctacttataactaatttcacacttataactatctaaatgagccctatcacgacttatatatggaaatgatcgaattacttccttgatattatacgaagattgcgttgccttgtgtgttttctttgtttaaaggattgtgcataacgaacatatttcccttaggatgatctacaactgacataatttcttagctcaatcagccttgaggtccaacctctttcagcttggcctttccacaaattgaacattcataactcggcctttacaattggaaaatgactntgctcanagcatttggcttgacctttatcactttaaacatcgatctagagcttccctt

SEQ ID NO: 257009 - DNA, 312 bp, Glycine max
cgaattgtttgttatttctgagcttcaattctacgagttctgacaaactattgaaaccaagtggaattgaacctgagaattggttatgtgataagtccaagtcctcaagtttttgagtaccaaaagtgtttgggatttctcctgagaagttgttgttagccaaactcagcatttgaagcgaccgcatgtgccattttctgtcatcgattcttccagaaaggtggctacccgagatatccaagaagtatatctcacgcagtgtggacaactccgatggtaatttccccgagaatgtgttgttttggagtctca

SEQ ID NO: 257010 - DNA, 410 bp, Glycine max
gcttggagaggatgcttcaatggttgaatataaagagggagagaaagagagaggggggagcacgaaattgaaggaataaaaagggagagaagttaaactttgagttgtgtctcacaagactcttattcatcaaagttacaacaagtgttacacatgcttctattcatagactaagtagcttccttgagaagctttcttaaaaaaaattccttgagaagcttctttgaaaaaacttccttgagaagctagagcttagctacacacacccatctaaaaagtaagctcacctccttgagaagcttcccttaaaagctagagcttaactacacacacccatctaaaaactaagctcaccttctttgccaaacacatgaaaatacaaaaaaaaaagtccctacttcaaagactac

SEQ ID NO: 257011 - DNA, 333 bp, Glycine max
  unsure (1)..(333): unsure at all n locations
tgacctgtcaggctaagcgccactntgcttctgtntttcaaccttttgaaaaggctaagaacaccctgctgcactaagcccttgntatgtttcatggaggttgagctaagagcgctctgctgcgctaagctcaactctcttactgtctttaagcttttgtgattaggctaagcatgccttgtgcgctaagcctgagtgtcattctggtgaggctgtgctaagcgcacctgctgcgctaagctcaagtcctcttttgttttataaattgtaaatttaggctaagcctagcatgttgcactaagtcaaatatgcaaaacaacattttctgtgtct

SEQ ID NO: 257012 - DNA, 371 bp, Glycine max
tgcttttattcggcgaccacagaggggtacctaaagatatgttgcgggggtcaagaaaccttggggacgtcaggtggggtgctattgcccaaaaccaagcttgaccaatcccgacccaacccggacatagtcagtcagtgagaacctgtgatgtacctaaacaggcgagctcttggcaatcaacagataaaaggaacaaagaccacaaagcaaggaggcttgtgtggtgctggccagctgtgaactttgatttatatgtgagatatggcctctggtaatcgcataccaagggtgggtaatcgattacaaggcttaaaaatgaagacaggagactaagatgatctctggtaatcgattaccaaggggtgtaa

SEQ ID NO: 257013 - DNA, 433 bp, Glycine max
  unsure (1)..(433): unsure at all n locations
gtcataagtgaaatcatgtgcaaccatctctctatgagttctctcatgaggtggaggttgagccatgttctcagtatgaaaattaacagtcgaatgctcaaaatcagaatattcagaatcaccagcaacaaaatgctcaaaaagatcaggatgctcaaaatgcacagaatgactaggatgcacactatgcctaactaatctatgaaaggttctatctatttcaggatcaaagggttgtaaatcacctggattgcccctagtcatgcactatatgcagcaaataacgtgtttctcaacaagcacctaacaaggggttaaaactacagctatactcaaacgatatccaagtgagctgaaattntgtgagcaacaccctaagatcatgaaaagatagcacaaaaatattcagaccaaaattcagagtctaactatg

SEQ ID NO: 257014 - DNA, 427 bp, Glycine max
  unsure (1)..(427): unsure at all n locations
agcttgcagccaccaaccataggagaagatttatagttagcttcatccatagctgtctttgacaagagatcccgaatgtacttggactgagtgagcatgagagagccattagggcgatgattcacctcaataccaaggaagtaatccaaatctcccaaatccttgagtgcaaattcagaattgaggttggtaactaaagacttgatagctgttgggttatattacccgtgacaataatgtcatcaatgtagaccagcatgtagataacagtagcattatctgagtagacaaagagtgaaggatcaaatntgctggactgaaacttgtgagctaatagtgtggattttagtttgtcaaaccaagccctaagggcctgttttaacccataaattgccttgtgaacttgacacaaactgtttgttttatt

SEQ ID NO: 257015 - DNA, 459 bp, Glycine max
  unsure (1)..(459): unsure at all n locations
tcctaaataaaagtaacatgacttacttctacttgaaatttggcttataccatcaaattaatcaattgtccaacttgataattgagtgtcaaaacgttttagaagaaggaagaatctgcaacttaggataattgattgtcttcctagatgatcaattatcctacttgtagaaacatgcggagctctttgtgtaattctataattgattacccgaagtgataatcgattatcccaaaaaacatataagcatgagaagcattcaaattgaaacaaaataattgattgcccaatttcataattgattacccagtttctgaanatacaaaacaaaagagattttgacatattaattgattgtctactttcatagntgattagatatgttntacctatatatttgaaattataagtatcctttgtgttcttttcattagagactcttgtacattatatctttga

SEQ ID NO: 257016 - DNA, 434 bp, Glycine max
  unsure (1)..(434): unsure at all n locations
agctttcataagtgaaancaggtgcagccttttccctaatagtcctctcatgaggaggaggttgagccatgttctcagtgtgaaaattagtagtcgaatgcttaaaatcagaatattcagaatcattagcaatagaatactcagaatgctcaaaatgctcacaatgctcgaaatgcatagaatgatcaggatgcacactatgtctaactaatctatgaaaggttctatctatttcaggatcaaagggttgtaaatcacctggattgcccctagtcatgcactatatgcagcaaataacgcgttctcaaacaagcaccaggggagggttaaaactacaactatagtcaaatgatattcaaatgagctgaaaatttgtgagcaacaccctaaaatcatgaaaagatagcacaaaataatttcaaaaaaaaaaattc

SEQ ID NO: 257017 - DNA, 448 bp, Glycine max
  unsure (1)..(448): unsure at all n locations
gggtgtanaacttggtttgtagaggcaaaagtgacaatgactaatacttgtaactctgagaagttagtgaaacttaatggtttaccaagaactagacatagtcattatggttgagacaaaccagtataaatatgtgtgtcttatagttcttttctgctctctttgtgtttaaattgacctagagtttgaatctaattntgttttgataaatatgatctattcatgaaaattgtttctattgtttgattttgtttagtgcaaaaatctattatctaattttaaagttattttagacgataactttgtattagtttgtagggataatcattgatcctaaagcagttgaagcagattgttaaggtttcgaaaaggggttacctgcagatggttctgaccaataaggatattaagtgaagtgtcaccgtgtgaagtactgtagaatgtgagt

SEQ ID NO: 257018 - DNA, 352 bp, Glycine max
  unsure (1)..(352): unsure at all n locations
ctctcaactttccaaccattnttcttcttccttctttctaaagggggggttctttattctgctgaataacttgcttcatgttatgtttttttgcagaggtgctgtggataacatttcaagcaaaacaaacactgtgataaaggttccaaattcacctttcattggccttgtcttttctgcattggtaaagggtccttttctcttttgtgtgaccaattttccttgtgtgttgttgcaagttgatagcgccaacaagcgtgggagcttgttggaggtggttcaagctcttactgatatgaatctcagtgttagaagaacttatatttcctctgatggagaatggttcatggat

SEQ ID NO: 257019 - DNA, 400 bp, Glycine max
  unsure (1)..(400): unsure at all n locations
tttcccattcattataatcaactaagattaagtttctcttacaagttaaaattaactaatgtataagttaaaattaacaaatagaaaaattaaataagaaacttctataaattagttttatacatatgcaaattttaacttatattataaaaaaatctattttatatatccttctatttttgtctgttctaggttgttatattgagaaggtaaaactaccaatttgtatagatcaaagtagatctttgttgatttcttttttcttttagcttgagattttgactntgattggataaattnttcagtgaacacagttaataaagaaaactagaaggtaaaatagattaaacttcttccataatttaaaattaacttgattaagctttttccattaattaaa

SEQ ID NO: 257020 - DNA, 383 bp, Glycine max
agctctgattggttgttgacatataaagtttcataagaccatgggcttttactctttctaattaaacctttgtccagcagatctttaatttccttttgaaaatattgaagaagttcttcattcatttggattggtctagcttttgtgggaatttgtttttccctaaaaaatttctcataagggagatcgacaatatgtttcttacggttccagaatgcatgtggcaagtcgaacaaaattgttaattgaatgtgttgtaacaggttttgggttttctcttttaattgggggttttccaattgtgactgaatgttattaaaatacatttcttctttcaagaaattgagctgactacattcttttctatgaaattcatgtttctt

SEQ ID NO: 257021 - DNA, 437 bp, Glycine max
  unsure (1)..(437): unsure at all n locations
tggaagaaagatcagaagtttcaaggaaaacaaagaaattagaatttgatttgcttcttgaagcttcatcctgtgcatcctacttgtcgttntggtaagatctagctatgatattcaattaacttaaatcacatctttgttgacttgaaactttctttttatctccataatgtaacagtcctacaggtcttgcaatttaattagttntttttcaactgctgcttgaaaagttttgccttttggtcatctttttttcaagcaaattaactttgtttgaaatgattttggctccttagttntcatcatcctgttgatatgagaatggctgcttttatgataaatttgtccatgaccctccctcttgattnttcaactttttccgtcttcctcgcggatgttgcagaccctacacgatagtggagctattaagatagctg

SEQ ID NO: 257022 - DNA, 454 bp, Glycine max
  unsure (1)..(454): unsure at all n locations
ctgcagcttagtttattgaataatattattatttatattatatatatgattataacactcattaatactatattttaatttattttgataaagctttattattaacaaaaaattggatgcgtatattagaataatttatttttatatgttattcttatttgaataatttaatatctttgattgatttatatctaataaaatagaattaaaaaattactaataatgtaaaaaaacaatattacaataatttttagaatactatatatatctctaatagaatgatataatataatataatatatttgatgatattcatcttattcgataattaaacaatccaagctagcctactatatataaacaacaaaaatcaagcttantagatanataaatagcgccatttatttggattatattttttcattgatttgaatacccacattatataattttt

SEQ ID NO: 257023 - DNA, 421 bp, Glycine max
  unsure (1)..(421): unsure at all n locations
ctctcacaaagattgtttttgctaaaacacaaatttttcaatctgagatctagcacaaagtgttgcaattttgggatgcttcaacttcttcttcatagcccttgaaaatgccttattaagctcccaagaagagtgttattgtgagcttcatacaactagcacacttatggaggtagtagattcactttacatatgtcatgaagtgacagcaaacagaaccattatgaggttcccattttgaggaacctttgtgatatgcatnttgaagaaccatcaaaatagatattctgatgctctcttagaaagaatccatgcttgattaagttcatattaatattccattatgatgtagcgtgagttcatcccttttaacactttctcacaactcttagcattcttaagttgattacttgagaaaaac

SEQ ID NO: 257024 - DNA, 384 bp, Glycine max
ttaaacgaaacatcctaacatatttttatagtttcaccaaagacttgtttgccttatctgaaagaatcaatcttgtataaaaaatatactaaaaaaaagattttaattaacttcttatactagcgtaaatgctaaaaatatgtttatgatattattatttttataaatatgtggaaatatatagtagatttgtatacatgtatatgaatatcattttaatattatataaattaaaaaatgtgtaagtattttttgtaataatttaaatttgtaatttattgaataataataataataagagcacatcacttcaacaaatgacccattacatttagagtaaattaaagtcatgtgagagatgaaactattaccctattctttctt

SEQ ID NO: 257025 - DNA, 384 bp, Glycine max
  unsure (1)..(384): unsure at all n locations
atccatgagnatacgtacacagatgattttcttttacattcangcacgacaattttgaacagtttcttatagtaatttcataatacaggatgtgcgatgattgttggtggtgctgctattggtgtatcttggggcataaagccaagaaccgaaaattgaagctgatagtcgaggaaggctacctgtgtttctttagtgtaatatatttttgtagaattgatatatattgacttccatgtttattcttcttattagttntcagcgtaacatagtatttatacattagataaaaattggtttgcacaacgatggaagtcagtattattggtttggtctcacctggctgtgtcaagaggaatcaatcatctgatggtagaatctcac

SEQ ID NO: 257026 - DNA, 449 bp, Glycine max
ctataaccaaattgtattagatcctacagaccattagatttctactttcacttggcctttcgatgattttacatacataaggatatcctttggattgtgaaatgcaccaaccactttccaaaggtgtatgttagctatcttcttggatttagaggaaaaatgcattgaggtatttatgaatgatttctttgctttggaagcttgtttggtgtgtgcttgtccaatcttgaaattgtgttgaaaaggtgtgctgagacaaatctcattctcaattggaagaaatagccatttatggtgactgaagggattgttcttggtaacaaaatatcatcaaggggcattgaggtggataaagctaaaccggatgttattgaaaagatacctccaccactgaatgtcaaaggagatagaatctttcttggcatgcaggctcctatagatgcttcatc

SEQ ID NO: 257027 - DNA, 324 bp, Glycine max
gaccttgaggaccgcaagtggcgtgctattgcccaaaaccaagcttgaccaatcccgacccaatccgggcattgtcagtcagtgagaacctgtgatgtacctaagcgggcgagctcctggcagtcaacagatataaggaactaataccacaaagcttggaggcttgtgtggtggctggccaactgtgaactttgattgatatatgggatatggcctctggtaatcgattaccacaggtgggtaatcgattacaacgcttaataatgaagacaggagactaatatggtctctcggtatcgattaccaagggagtgttttcgatta

SEQ ID NO: 257028 - DNA, 374 bp, Glycine max
  unsure (1)..(374): unsure at all n locations
agctntcatactctcggctttctaataggatattgctatatgaccactacttggcttattttggagaacacttgttacaacttaacatttaacagaaactgcatagtggccgaaataaagcttggcatttccattggtggaaggaccttacaagactttataatcagtctgatttccacagtatccactataatatggtatggaaggttggttgcggggacaaaatcaaattttggccacattcttgactgagtgagggctgtcagcatttccaaaaaagattcttggcaatatggaaagaaggttactttattaataatattcaaagaaagattctcagagtacaacccgtgcgcaccaaccctggatgggat

SEQ ID NO: 257029 - DNA, 319 bp, Glycine max
ttccgctcctgagtatgattgtcaccgttttaagagcgcggtacaccaccagcgctttgaggccatcaaggtgatggtcgttcttcgggagcgacgcgtttagcttaaggacgacgagtatactgatttccatgaggaaatatggcgccggcggtggacatcattggttactcccatggccaagttcgatccaaaaatagaccttgagttttatgccaatgcttggccaacaaatgagggcgtgcgtgacatgaagtcctgcgtaacgggtcagtggatcccgttcgatgcagatgctatcggtcagcttctgagatat

SEQ ID NO: 257030 - DNA, 399 bp, Glycine max
agcagaaaactaacaaaaccacccatcatatgtcccaaaaccccatacccacgaaatttaagagagaaagaagtccacccaaacctggattttcgaagtcccactcgtagccacgcacttcacgaccccgaaaatgctctcctttcacgaattggggcagaaatgagcaccaaaggttgaagctttgtgtggagcttcaatggagaatgaagaagaagaaaggcaacgtgagggagagggagagagagagagctgctctgaaattgggctgagtgaagagagagagggttgctttctgggttttaataaaaggggcttctctctttctattaatttatagaagcaatgccacatgtctccatttgagtggagcaagaagggcccacctttctcttttga

SEQ ID NO: 257031 - DNA, 319 bp, Glycine max
  unsure (1)..(319): unsure at all n locations
accatgaaaacttgttctattcattcttttcatctcttctccttttgccaaagagaattcgccaaggactaaccgcctgaattctttntgcgtctctcttctcccttttccaaaagaacaaaggactaaccgcctgaattcttttgcgtctctcttctcccttgtcaaagaattcaaaatgacacagtatgagaattcttttgattcttccctttcccatatacaaaagatttcaaaggactaaccgcctgagaattcttttgtatcctcattcacaaaagttcaaacggttaaccgcttgagaactttgtcttaacac

SEQ ID NO: 257032 - DNA, 403 bp, Glycine max
aacagcagccgactttgcacattgccacacaattcctttaagctccttgcttttctattgcttaataaaatttttccaaagatgcaaggcataaaatctatgaggtgcaccaggcatgacttcttgcaaagctggaataagtccctgaaaaaataaagtagtccataacttatgtcattaactgcaattaaatccctaacttatgataataattgcaaatcatttcatgtcataccttttgcatgtctgacatgaaattccacccattctgtacataatccccaagatctttatgcaacaaagttaaaaaacatttccaattttcttttgtctccacgtctaccacaacataagcaataacaacgatgtggtattagcatcaaccccaacagtaaagagcaag

SEQ ID NO: 257033 - DNA, 412 bp, Glycine max
  unsure (1)..(412): unsure at all n locations
ctgatgcttgacttggactctcggaagccgtcgaagttgttctaatatttctcgaagnttttattttgaccaatgtattttcgacatgtttcgctatatttcatgttttcaatttttttctatttttttctctttcttctttaatgttgatgtattgtattctccaagctagaagtgttttcaacacattccagcttgcggnggggtattagacataaagttaatttagttagttactataagttatttgagaaagttagttggctactcaagttatagttactacaagctatttgagtaaattaaatgtggctactcaacgtaagtattttctatcttttgataaatacatcacctttgtatactttgatccatgaatgaactggatgaattccgaaaatattattcattt

SEQ ID NO: 257034 - DNA, 340 bp, Glycine max
  unsure (1)..(340): unsure at all n locations
caacctcaaaaaaaccccatggccttctgagaatgttttagcctgcgcgcctaaaatagctctgtagggtcatacgactccctgctcgaatgagatntcgtcttcagtagctacaacatccctttctttagagaaagtaattcctctaacaacaaaaatttggacacactaagtacatgggaggcaatacaaggaggcaatatgccatacaacggtncacataaggacatacccatggctgaatgataggaggaattgcacccaaattcagccaatgggaggaaacggatccaccattgtggttcatcactcacaaagcaacacaagtacggctttaaac

SEQ ID NO: 257035 - DNA, 449 bp, Glycine max
cgtgattgcggacagtatcttctggattgaataatattattttgagaaaattgatcttgtttcctgaagaaagcaaatcatgtgtgtttctgtttgacaggatcaaaactttctatatctgtcattcataactcaatagtggcattagacatataaaaggaaataaatgatggattcgcagatatgttacttttaaacaaaatcatataaactggaataaactaataagttcaaatgaaatccatatttcaattgttgtttggatggactagacgagtacttcttgcttccaatatacaggttatccactaacggataaatctcacctggtgttgcatccagtcatcaaacaatgtcacttacatgtaatataatgggtaatacgaatttatactcttgtttcattcaaaccttaagagatgtttcgatcgtccactgatggaacgtct

SEQ ID NO: 257036 - DNA, 414 bp, Glycine max
  unsure (1)..(414): unsure at all n locations
agcttcatgatgatgaaccaaacaatntttatgatgtctaaagcccaagtgattgattcaagaatgattcaagacttcaagatcaagcatcaagaatccaattcaatattcaaaattcaagagaagaaatcaagaagcaacaagtcaagacttcatataggataagtattaaaagatttttttcaaaaaccaaatagcacagttttgttttacaaaagaattttctcaaattttctaagttagcagagtgattactctttggtaatcgattaccagctggcagtaatcgattaccaatgaccagattggttttcacaatgttcaaatgatttgtaacgttccaaaatgattttcaaatagtggaattgagtacactatattagtaatcgattacaagtgaatctgaatgttgga

SEQ ID NO: 257037 - DNA, 477 bp, Glycine max
ggacctatgaaactcagcttgtgcacagcctcgtcactatccacatactgatgctgttttaagtcttctgtaacatattcaacttgacttaaatcaggatcatattgagttacaatactaggcgaataatggtgggaaagtgtgtaatcatctaggagatgaagaccccagcaaacaacatcgggatccagttcatatattgccatgtgcctgcaaaacacatgtaactctaactactctagaaaccaacttgctttacgtgtattatgcccctaaagagtacaatttctgaaaatggacaaaaatattaatatgattaaatgatgctctttttatctaactaatgaaacacaattcatcatggaaatattgaaaactaaaagtataaatccatcatttattagattcaccctaaaaatatcttattagatcagaggcttcacatcaacccaattgtgcacttactccattaaacac

SEQ ID NO: 257038 - DNA, 373 bp, Glycine max
  unsure (1)..(373): unsure at all n locations
agctttactaaaagnttaatcaaaattatttaacaagcaattaatataatgagtattaactattctctccacatatcctttgctagtttaggtggtctccctttttacatttagatagggtatttttcttctcttctccttaaaaggagaaatttgacttaataaaaaatttaaaaaagctaaaataagttgtttaaaaaaacattaaagaacctttaaaaaaaataaaaaacttttgacttttactctttttcctttatttcaaatttgaagatacataaattcagtacttaaggaaattatntttaaacttataatcttaaagaatgattaagcacatttaaatttaaatctttaatataatttttaactt

SEQ ID NO: 257039 - DNA, 434 bp, Glycine max
tactttgtaatttgtgattcaatatgatgtatgctagcttatatatatatagaggctgttatttatattaataatttatgtaaataatattgtagagtgttatagtatgattccaaaaattattaagtgttggagtttgagaatattatggttaaatttgatgaacatgtgtatgttgtaccttatgaatatcattacgaatgttatgagatggttgatgtgatgttatgagatgttaaagtgtggacatgatattcgattgtaaataagtgaatgtgtttaacacttgatgttacattaattatattgtgagctatgaattatacaataatccgaccagtgtttatgcgcagtgttaaagagaaagtgtaggtttctagttatgaaccagttgtaaattgtagcgcatctgtgtaaaacatgtttaaacatga

SEQ ID NO: 257040 - DNA, 429 bp, Glycine max
ctgcagctaccatggagagtttgctctgtttgttactgctagaaactggcgccttctcctattagatgttaataatgcttttttgaatggagatttgtttgaagaagtttatatggaacttcccaacttccttggtatgcaaattgaacaaatcattgtatggacttaaacaagcttctagacaatggctttgtaagttctccactacccttcttagtcatgagttccttagtcattctactagcgtatgtagatgacatcatcttatcatgaccaaattatgcctttgtgcaagctattcagatccaattgcaatctatgttccaattaaagatccttggcactttgaaatattttcttgacttagaaatagctaaatccagtagaggtatctcactctcccagagaaaatacactctatctcttttg

SEQ ID NO: 257041 - DNA, 371 bp, Glycine max
  unsure (1)..(371): unsure at all n locations
nttcctttggttgctctgntagggcttctaagcgttagttataaagagaagggattggagcctccaattcattgtctgtgtgcgatgaaaatttctccctccaaagacaatactttgcaaatctcaatggtgtggatgtgtggaaatacatttctaacatggtgttctaatttcacaatgatccaacggttaacacaatcaggatcatagttttaccaagataggtttgggtgtacgtgggaaaaaaatagctacgtgcgagggacatttccctcactgcagaaattatttccaaaatcccaaaggtgggtatgtgcacaaataagtttccaaaatggtcttccgatttcatgatgatccaacgagtaacg

SEQ ID NO: 257042 - DNA, 393 bp, Glycine max
agcttgaaccaaatgagtctttatcttttatctaagaacaacatagatccataaatgttatattctatttattagacaattctatttgcattaaatatactacctgtaatttaactacacctccaaacagattcctcagtgggtgacccccagatatgtcaaccctacatgatggaacagacaatcaattatatctaagtttctgggctaatggtgtgggccagtagaagccatataaaacaaaacttacgcatctaggaaaaaccctgcatcactcaaacatttcactttggtagatgtaggaaacaagctccggaactcatcacaatgtattataaatgccagaccacccgcagagcatccggaaaaagggcctatataaatttttttaat

SEQ ID NO: 257043 - DNA, 385 bp, Glycine max
  unsure (1)..(385): unsure at all n locations
tggtgttggacatctgtaatgataaataatagtgagaagtttattgttagtctgcggggntggttcggattttcttgactattaacatttaacaccatgtgctttggtatcttgatcagatcaggagacgcaacaagttaatctggatgcttggcacgatcttgcctttggtcaagaatagaagtttcatcattaaccagtgttgtgttttgtacttagtgagtagatggtccctgttatttggacttggcatcttcctttctatttccccgatagattgtaacttatcaactactagtacctgttaaggttatattaaggaattgtggtgtcattgctgaatgttaatgtttgctgtgcctgtcangaaagcacttttgtattt

SEQ ID NO: 257044 - DNA, 429 bp, Glycine max
ctttcgcatagtgtatttattctatagctaagggctaaaattgacttgtgatcaaatttggtttataagattcttaatttgttcaattgaactactgtaccaactactagctagaatgattctatatgaatgtgacataactagttaactagtatgcactggctttaaggattaatgttcgtaccataaaatgaccttaactttccaatttgccttttggtaattaatataggtagcattctccgtatgtagtgcaattatgtcggggttcatgtgctagttgtgaaacatgcgtgagttaattaattgatcagctgaaaagggtacaaagttatgggatactttgttgcttgtttgttgttttggacaactgactctatttcgcggtcaaacttaaaaatgctttttaccatgttattaaaagtatga

SEQ ID NO: 257045 - DNA, 470 bp, Glycine max
ttttcttcaaaggtttatctacttcaccatttctgaaaagatgtaaacaacacatgtcatttctatggtagcaagaagaaagggagacttttgcaatcaataaactaagacagtcttgcagcaaaaaataccaagagttactcctatatatattgcttgaattttttaagttatcaattatgtatttatgttatcaaatcttatacgatttcttaattctgaatatgatataaaatataattagaatacatattaattcacactatcgtttattttgaatcagaatctactgtattattaatataaatatttaaatcataaatatcattgataatagttttctctaatatgaacaaaatatatatatatatatatggatatcaatatattaattacgactatcaattaaatatgaatgcagtaataatttgaaacttcctattaacatctatacaatcaaaattccttta

SEQ ID NO: 257046 - DNA, 289 bp, Glycine max
gaacagcaacatgatgccattatctttttgtgaggagataaggctttgtgcctcctccaaatccaaaccacttagcaaaaccaaagacccctctataaaggggagatggatcatcccactatctaccattactcttgctttggcgactttattgaacatagaaaaggccttcaagttaccgacaagactagagtacacagccacttccccctctcaacaagcggggctatatccaactcactccgctcaccataaatcctgtcataggcccctttctttgcacctaaga

SEQ ID NO: 257047 - DNA, 455 bp, Glycine max
  unsure (1)..(455): unsure at all n locations
tgtgactctccacatcttgaatttgtatttctacgctcaaaggcactggttttttagtaccaaaacattgtaatcgagtacaactttttgaaattaattggaacgttgctaattcaatttgaaaactctttcaaaacaactgtactactggtaatcgattaaacaatctggtaatcgattaccagagagtaaaaactctttgctaaacatgttctgagaaaaatcatgtgctattcaatttttgagaaaaacttttcatacttatcttgattaaaccttctcttgattcttgaatcttgagtcttgaatcttgatcttgattcttgagatcatgaaccctgactcttgagtcttgagatcttgaaccttgaattggcttgattacctgagtcgcctttgaatgatcattgactctntgacccaccctcgcataatcttttgttcataatgtataa

SEQ ID NO: 257048 - DNA, 324 bp, Glycine max
  unsure (1)..(324): unsure at all n locations
ctacagcatgctactatcacacacccaagaattaggttctctatcaacaaaggttgtcaatttatatgtcaaaacaacattgggttgctgtcaaaagaatcctcaggcatctaaagggcacacntcattttgggctggaactggaacccattttttctacaaagcactactctgttcatgccttttgtgaagcggaccgggcttcacaacctgaagatcgaagggctacctcaggtgctgctgcgttcttaagcccaaatcttgtctcttggggagccaaaaaacaacctattgtggctaggtccagtaccgaggcagagtata

SEQ ID NO: 257049 - DNA, 440 bp, Glycine max
  unsure (1)..(440): unsure at all n locations
agagatgcgtaagcttctttatcagcttcataataggagctctgaagttattcgtagnaatgcacacctagatttgcatgaggaaaatggatccaggaagcaagatcgtgatataactactgagtcaataggcccatttgatgggaaccaatttctactgagtgaaaaatcaaaaagtccattggtaccacaataccggaagtatccaaaggattctttgcatgaaattgtggagttaaaggaaagaactaaaaataatgatgttttggatttagaaataagaaatcgttataaacttccagccaggaaaaatgctttaatntcagctatacatttcatagggaatggagtatatcaagtgcagtcgcttggaaatatggcacgtaataatctaatgaactatctgaagatagaacatggagaactagagtcaactgaag

SEQ ID NO: 257050 - DNA, 445 bp, Glycine max
  unsure (1)..(445): unsure at all n locations
tgcggcatgcaagctagctctaaatanacatagaggtttgtatttattttatgaggctgcatgtcacttttgctttaagagtagtgtcccactggtaaaactaactttccaaatgtttgccttcgcaagaaatggccccgaggaagcttgcctcaaagaggtccaggaaggacaaggcatccgaaggaactatttctgctccggagtatgatagtcaccgctttaggagtgctgtacaccaccagcgcttcaaggccatcaagggatggtcgtttctccgggagcgacgcgtccagctcagggacgacgagtatactgatttccaggaggaaatagggcgccggcggtgggcatcactggttactcccatggccaagtttgatccacaaataatccttgagttttatgccaatgcttggccaacagaggagggcgtgcgtgacat

SEQ ID NO: 257051 - DNA, 425 bp, Glycine max
  unsure (1)..(425): unsure at all n locations
tcagagcttggtcaacatcctctcatgtcaagaacctagnggagttgattctaccttggcactcccatgcgaggctcatttcgaatttgctaggttttgagaattgaaatgtttctgctttttttccaaactcgtctgggggtatgcaccacaaaattggctgttgagagttttgaaccctccgccgatgactacgtagaatatcattaggaaatatcgtatgaggtaccaataaatttgtgcacatgcatggcaagactttgatagaggctaggcttgcgggtttgttattatatttacgtgtatcggcttgagattctctaccttgcataacataagattttttctctcggngggtcatatagaagagttaatacgtggctgattttatattccttgtggccatgcacgttntattcttctat

SEQ ID NO: 257052 - DNA, 445 bp, Glycine max
agcttagttgtttttatcatttcttgaacatttttatttaaaatatttctaaattctgaaggttaaataaacatgatagaactcaaattataggacattaagaagatttactaatacaaaaatcatttttcatactggtaacatacattggtttgatgcagtatgtgagatgaaataacctatttataatgttaagatggacattctaaatcaatgttgacaaagaatcaatctaaaaaatattttcaacatcaattataaagaaccaatattaaaaaaaatattttttaatcatttccttaacaaccgatttaaaatattgatgtcttttcacatttgcaagagaagtggtaagtttgttgtcaaaattcgaaattattgcctttttatcaattacagaagttaaatatatggccactactcattaagtggtaagcgatttgaa

SEQ ID NO: 257053 - DNA, 472 bp, Glycine max
  unsure (1)..(472): unsure at all n locations
ctatcaagagaaaggctgtatgatggtcttggatggattgctcagcgagtaactttctaagccccaacatgatngtgtgttgctgaaaacctgcgatgagattcatttttcatgtattgaatttatatgacgagggacaaaaactctatgtatcatttatacttctaagagtcaagcaaagataatgtgtttgatttgctatgaggaaaaagattattcaataatctgattaagacacattttttttatcctcagatctagtttattattcaggttagatgaaagcatgagaggagtgaatttaatcatataatttcaatttatggttaagattagaattatttaaaacaattttggtcattcatatatagcttggatgggtaactttcttattttcataagatatgctctcgcgtgggtgtgcgggtgtgtttgatggaagttattttaatatcacaattatttgttattg

SEQ ID NO: 257054 - DNA, 199 bp, Glycine max
acaaagaagggcaagcaaaggcggacaatgtgaagaacggcacgagagagacagcaccaaggaaagaaaaaaaactatgctaacagccaacaaaggaaaaaaggtcgccccaacccgggattgggtcgggcgccatgagaaaagaaaggtttccggaacaaaggaaatcaaagcttcaaccaaggggagacggaccatc

SEQ ID NO: 257055 - DNA, 242 bp, Glycine max
acagagaatcacagggctgacattctgatcaaggcactttcaaaagtcaaatatgaatacttgagacaaaagcttggagtttgcagttccaaagtcaatgaggagtgttaagatgtgactgttggaactgtctaacacactatagtacataagatttttatgctattctttaggaaaaataaaagtcatgttgactaatacgataaagcactcttgatcctattctctaagcatgatatgtt

SEQ ID NO: 257056 - DNA, 313 bp, Glycine max
tcatcatcgcatattatattattatgtgtccaagggtccatttatcgccgacgggccatatatattaattcgcctctttctttttatccaaacttttcaaaaaactaagggggggttgaactttgaaaagctggacattatatagggaatatgggattgggaatcgtgcaatccttctgtctggtgatacgggcacggcagctttaacttttaatttgcagaccttattatgacaataattgagaagggccggttgaacatatgcagatctcaccctatagaaaaactacatgacctccctgcttagaaattg

SEQ ID NO: 257057 - DNA, 295 bp, Glycine max
tcctttattacaaatttcagttgcaggggaaggaaaacattatttgatacagaaagcgagggattttccaccaaaaagctcaagtttaacacaaatcgaagaaaccaggttggaagggagtcgggtgacgaaattgaacaatcagaaacgaaaacccccaaaatttggggcgaaattgggagtaaaccctaattccgtcgcaaacatgaaggaccccagatccaatacacagggttgaccacaattgtaaggagaacccatggtggaattaactagaatagaaaggaagctgtga

SEQ ID NO: 257058 - DNA, 372 bp, Glycine max
gagcgaacgggtagtgtttttagactattgaaatggtaaaaaatgagatgttagcactttaagagtacacatattccaagggagattagcactttaatctatgaaggtagcacactaatatagaagattatgataagatttaccaattttagcataagcaagttttaccatttttggaaaaactctactttatccttttatagttagccttggaaaactgcaagaagctatataatgcatggctgagctcctggagagcacatcaagggaagtccaagctggaaattagtcatattaatggttattccaagtgtttacattaagaagatacgaacaagccttggaatttcactgggtccaagcatttaccta

SEQ ID NO: 257059 - DNA, 139 bp, Glycine max
aagacgccgaaacacataaagaccccacaaagaacctgccacccgacaaaagcacccccccagaaccagaccgctacccatccacgacagaccctaacccaaccccgagaccggaaacacgccccacagacagccccaa

SEQ ID NO: 257060 - DNA, 275 bp, Glycine max
cgagcaacggaactgagccatatacaatgccacaccacgccatcctcatcagaaggagcctacatcaaaataaggcctttctcaacaacatcagaatgcacggctgacatacctccagaagcttatcaggattctctttagaatggagaacttcataatgaactcacacctgtcaagacaagcacaactggcacactttcaacttctgcaagaagtagatgcagagctaagtgcctcacttccaacaacaattatcttggggagtatagacccga

SEQ ID NO: 257061 - DNA, 390 bp, Glycine max
agcttgtttcagaaaatcttgtccaccatttttataataaggaccatcgaccggagcttggacatgtcttctgcaactctcaagccctggaaattttttcagtagctcatcttctgaaccatcacgaaagatagcattctcgtctacgcacgtgaagaatccaaaagaggtatctatagccttggaacaattgtagaatatggtgatgttgtacacgaatgaaccatacttgaacaaactggggtctaaataagtattgttaagttgcggagaacaaacatttccggcaaggtctgttcgcgccaatctcatggtttgagtggagatgctgatctccatcacagtgaaattttgagagtcaatttgaattgaagtagtatcatcgttatc

SEQ ID NO: 257062 - DNA, 428 bp, Glycine max
  unsure (1)..(428): unsure at all n locations
nggcaaaagctncattgagtgtattccctggctngggcatgtgtatgagaagcaagaatgttgtggctgttgcctttgaaatgtgaggagcacttggtttgatggaaaccacgtacagagaggggggtgtagctgggagaatcctccttcgatgatcatagggtgtgtattttattggatattattgngaaaataaaataaaaaggaaagtgtattantatgaagggagtggtaatagaaataacccacataaaatcataaaatccacccattcatatattgacctggtcgaggtagtggttcagtggtccaactgatagatcaataattgatctggtttaatccgatatatattaaaaaattcaaaatacatatatatctattaatataagctaacattatctgagttagacatggtcatttatact

SEQ ID NO: 257063 - DNA, 369 bp, Glycine max
gcaagcttcaagagagagagagagagaaaggctcttgtttgtgagctaaagtatgatgatagtataaaaaatgagtatgaaattaaattaaagtataatgtagtatttgagaactatataatgtagtataaaaagttttggttttgacttgttgcagtcagaagttgctattaaacatgctggataaccactgcagacactgcaacgagcagattgcagacggcgatgagcagcagcctctatcctcctacgacttcgtgtaccttcccattgatttcaagtattttttccatttccatgcgtgcaatcccacttatttaactaattaattgatttacccaccaagcaaaatgtatcaattattattat

SEQ ID NO: 257064 - DNA, 403 bp, Glycine max
  unsure (1)..(403): unsure at all n locations
ttgaaaggtactacatcattntgttctttttcttttgtggatgcttgtaagatgttattcttttttcanatgctaagcattnttttactcacaaacctacatggctgctacgaaatattttcttttgaagaattttgttgattttttgcaagtctatttgtcagtcttgttgaacaatcattcttttaattgctcaagtcttaactaagtaatggactaacagttgccattattctgtcctaaacattgattggattttatgaatgggccatccatgtttgttggtagcctctatttatattgtgtgagataactttaattgcacaacttctaaagtcttattataattgacagctgacaatcattggtcttcttggtaacggcttgaatgcaacctggacag

SEQ ID NO: 257065 - DNA, 444 bp, Glycine max
  unsure (1)..(444): unsure at all n locations
agcttattactnttttaaattttataaattgagtcataatacattaatcaaggctccaataaactaattgcaaatgtcgaacagaatattgcaggcaatatggccaggtctcagaattttggtaatttatgtaggcaaagaaactaaaagtgtaaccataacctgtattttgactgaagcaccttgcattcctccaagtgaatttctttttggtaacaactaaatatttttgtagatataataatagactcacccttccagtgagtatcttttcggtttatctggtttgctgcttcttggctgcttctagtaagggtaacaacgtctggatcatcataaattaatctaggttggcaaactatattacaacacaaaataatatagtgcatccaataacaagttcaaatcagcagatgccatctatattgaacagaagtaccttga

SEQ ID NO: 257066 - DNA, 426 bp, Glycine max
  unsure (1)..(426): unsure at all n locations
taaatccatattcaattatgatcaatcataagagtattggttagggacctcatccaatgaaagtattcaacttttggattgatgaaacgagctttcttgactttgtaaggaaggcatacaaatcctacaatgttcaaggatgaggtgcttatgtggtcaaagagaaactcaagctcctaaaaaaaatcatcaataagtggagtgtggacaaggttgggagtcatcaaacacaagtcgacaagttggtggccaatataacttctttggatgttggaagaatttcatacgagaaggtgtgtgaaagggaagacatgctcaatgagttntggaagaatgcaagaatccaacaattaattaatctgcgaaagttaagcttaagtggccacataactttcttggatgaggaagaattcttctacatgtgtt

SEQ ID NO: 257067 - DNA, 403 bp, Glycine max
ctgcagcttatacgtaatgatagtaggggtttgtattttatattatccatatgaatcgcatatgctgagagagaattcctgaagtccactaacaactcataatatgtgaacataaagaaccctggcaggttttcattccctcttaccattccttttcattgacggtcttctctttctgctttcctactattcttttgaagaaaaacataaatcataagttgggtgcacctcattatatggaggcctgtgtcccatgtaatactctttatcccaatttcatgagatgagctgccataccttcaatttatagtttgccaaatatgtaaattatttccatgcttgagtttacattcataagctgttaagtgtattgatgcacaactgatgataaaatatccaatat

SEQ ID NO: 257068 - DNA, 447 bp, Glycine max
  unsure (1)..(447): unsure at all n locations
ttaatncataacatgatgagacttattatagccgcattattggngtttgtctattgtgctatataactaagagagcactcatctgtcccactcttttgactattttcgtacccatccactatagttagcactaattttatattctcctacgcttgaaacttaactttaaatcatgaagtcagccatccattgtatgatttcttttatactaaaaacattttttgagtcatataaaattattataagtaacaatccttttaattaaattaaaataattttgtcaaataaatcatatgcttgatgtgattattataattaatgcccttgttccaacaaagattatgacaaagcactttaataagccaggttatactcagatcccaagcatgacccaaatagttgcccactatagactaaatgtaggaacaggaattaacgaattggatt

SEQ ID NO: 257069 - DNA, 454 bp, Glycine max
agcttgcatggattaatagcaacaaatactgtagtttttttgaagaggataaattgatcgtaataataaaacctcaaagagagttgtgcttgatcctcaagagaaaacaacgttggatacttagccttccattaatcagtagaaaacgaaattgcagattgaagccgaaaacgaaattttattgctaggtgaatagtaaaaactggaattgcaaaacctaaaattattctttctccccaaaacgaaaagagagctctaaaactaaaaccttggtgctgttatataggttctcagccccaaagcttacaaatctattttaagtccaagcccataaataaaataaaatctgggcaagataagataagatttgataaaataaaatctagatgaaataaaatctagataagataagataagataaaatctagatgaaataatatctagatgagataaa

SEQ ID NO: 257070 - DNA, 415 bp, Glycine max
actagctcaaaattattcacttttggtaaaagcaaatttaccagttttgcttactcatacaaaaatctttttaagatttgctaagagtcaataggcattttggcccctgtctttgtacccattttgcaaattagtccctatctttttgaaatgtaaaaaatagtctctatctttgcataagtgttgcaaaatagtcattgccgttaaatttgaaagtaacgtcgttagtgaggtgcattgttggcaattttaatgccacgtagactatccaacgtggcactaaagtgtgtgtttataaagcttcttccatggacgcacctcgtaaacaacacggagctactcactctctcttcttacctttaaacaatgaatcaattaatctcgttccttaatttcgcatgaatgcaactccata

SEQ ID NO: 257071 - DNA, 401 bp, Glycine max
  unsure (1)..(401): unsure at all n locations
agctngatggagtttctatttcaaaaatattctttctattatatgatttggtactagatgagtatgaggttaaaagggcaatttgggattgtgaaagttctaatagaaccacacccgatggtttcaatttcctattcatcaaggaattttgggagatatcttgcgcttcttgaaggaattccataagcatggagtgcttccttgaggcactaactcttcttttatagctttaattgccaaatgtgacaacccttaagacctgggtcaatttagactcatttctttggggctcgctttataaacatttgggaaaattattggcttataaaatgaaaaatgtgttacggaaggtgattgatcattgccaaagagctttccatggagggaggatactccttcat

SEQ ID NO: 257072 - DNA, 339 bp, Glycine max
  unsure (1)..(339): unsure at all n locations
gaggagtcaaattttgattccgtagagttttcgtcataaaaccagtttgagcgagtttagattgatgttatagacttgtttgagatgagagtttgttccaaaattaccccattctcattttcacttctcanaccttgaaaatccactaaatggaggggttntagatacctanattttgagttgctttggtctgaagcttgcctttggtttagatatgatttatacatgatttaggacttgtaggatccaatttgggcaaaattggatgagggcaagagtgatttcgaaaatctgcactattatgcnagaatttgctgttgaaatgtgcagcagaatttt

SEQ ID NO: 257073 - DNA, 360 bp, Glycine max
tttctagtgaaaatcatctataaaggttataaagtacatgtttcctccaagggactctacttgtatagggccacaaacatctgaatagatgattccaagcttctgagttgattttattgggataaactttcttgaaaggcttctttgtctgcttgcattccaagaaatttctgcatttctcctgtggttgctgtgagtgaggaattcctcgtgcctgttggatcgagtggcctccgaataattaagaaagggggttgaattaattattcctaaacctttactaattaaaaaattactttggttaagactttactaatttgttaacagaatgaggagtataagagatacttatcagaaagt

SEQ ID NO: 257074 - DNA, 403 bp, Glycine max
actcagctgtagtcgtgtaatttctggactaattaataattaactgttacattgtctattggagtgtggaacttgtacatgccaaatgtgtatattgtggcggatattttgcttgttatttttctagttgaagctcgaaattgatggcagttattattaggttacaaaatttgggtgaatggtctgttttgagatggatgttagaatgatttgttggatgtgtttgtttcaaaaatgggtgaaaaaactgatttgaattggatcgttggaattaacttcaatcgaataatatttttttaatagttcacaagaaaggaaacactattttataaacttaccaattattaattggtgtacaaagcattctgtccataaataaatttaattaaaattttatttgaaa

SEQ ID NO: 257075 - DNA, 398 bp, Glycine max
  unsure (1)..(398): unsure at all n locations
accacttccgaaancaagaaacacacacacacactgtttcctatgtcatcacctttataaatgctccccctttggttttgaacttatgcttatcttaaaattaaattatctactcatgtgagttcttgatgtaatccctatttctctcaccctttggcatcaacaaaaagccaaagtgcgtatcaaacttaaattatgcaaatatatcttaaacattcatacagcattcataaaaaatattatccacaacatgaagtaaaaaccatgaagtacaatcataaacagataacttataaatccacatagttactaacatacttgttcaccaaacctgcaaataagaaataataaatggtcaataccatagtaatttaccacgatcaatgtaaaaataaagt

SEQ ID NO: 257076 - DNA, 451 bp, Glycine max
  unsure (1)..(451): unsure at all n locations
cgagaactaatcatgcataatccttgaacctttntcatatgtttgcgataactctttcttagagtaacatgatattatttgcagtaaacgaggaaaggtcccaattggttccatcagcacgacacaaaaaatcatggcattaaaaaatagttgtgacatcagcacaacactttctctgtactccattcaatatcaggtgtgtttgacaacaataaacagcagatgccaatagacagatatgattgctgtatttcatctttcgaagaagaaaatccatgatacaataacttcacattaaaaacaatggtcataatcaaactaaagatgcattcctcttttanaaatttccacccagtgagctcaagtatttcagcaatagaaacttgtttaaccaggataatggacagatgagagaanaacaaatatgtacacctaccacaattgatgatca

SEQ ID NO: 257077 - DNA, 444 bp, Glycine max
  unsure (1)..(444): unsure at all n locations
agcttaggaacacgaaatggaacttatgttactatatcaacatgaagaaaatgaaaagaaaaagaaaggaatagcncttaaagccttatcttctattcaagaagaaagtgatagagaagacttgaatgaaatagaagaagatgatgattttagtttcttcataaagagattcaacaagtttctaaggaacaaaggaaatcaaagaagaacaaatttcaatacaaagaaaaaaaggagaagactctccttctgttccaaagtgctatgactgtaatcaacctaaacatctaagagttgattgccctagttttaagaaaagaatggagaagtttgacaagaaaaatttcaaagacaacaaagcaaaaaaagcttacatcacttggaaagataaagatatagattcatcaggagattcagactatgaagtcgtgaatctgagtctca

SEQ ID NO: 257078 - DNA, 380 bp, Glycine max
cgtatccgagaaaggttccctaagaagaggatgtatatctgtcactgctgctctacaacatccttattttcttctgggtggtgatgaaataactgcaatcctttcaaaattaagcttgaacaaaaactgagttgctaagcaaagtgagtatatcgttacattttctgatcgttttatttttttttactcattgggtatctgtcaaatttttgtagtcacgcttgagcagattttttttttgttccctcccttgacaagaaactaagaaaataatttacaatgaatatgaaactgtcgtttctatttgactttgttaaactggatgaaacaaaatcagtaggggaaccacttgcaatctctgcactcatatttgcatcata

SEQ ID NO: 257079 - DNA, 431 bp, Glycine max
  unsure (1)..(431): unsure at all n locations
agctntacataaatgttacatatcaagtatatatttagcgaaacaattaaattatttgctgttgccttgctttcttgagcaatataattttttaaaaggcaatataatttttttattggctgataaaaaaacttaattaaattatttactcaacgcatcccaagtctcaatcaagttttaagtcagatgtttggatagaaattaaaaaagagcatatgtctaattcatttacggtccatttgatgcatgccatggaataggaattataatttaaattttgtcacaattganattggtttaaaattatataattcttatgattaggctacataanaatggcaacatactagttagtaagaaacaagttcatatgttacatgaatgtgaatttgactctggctataaaataaagatttgttggggataaattg

SEQ ID NO: 257080 - DNA, 416 bp, Glycine max
tgtcattactatatgcatgtcatgctgtaagcatgactttgttggaaatttatcatggtaataaatcccgatcatatattcacaatgagaagttaactactttgtttagtgtaatgatattgtgggtcataattggcagaacatgtataggtgttacttttatgtcataatcacaatcttctttgtaattttttttttttttattacatcttctacattctttgtctgctagtaataatgtgtttaatgtacatagaaccaagtagagagtgcctctttaaaaaaaaagggggtttcaatgcatcttgtgatcaaatgagaaacaaccagctggttattaaattgaacaaagtatctattcaaatgatatgtctaacaaattgttttgtagggcacatgtttaatctcattttatc

SEQ ID NO: 257081 - DNA, 407 bp, Glycine max
acttttaactcggatgtccgattctggcgcataatatatcgagacgctcgaaattgaacaacggaagcattagagaaattcaaatggtcataacttttcacacggaggtcagattcaggcgcataatatatagagacgctaaaaattgaacaacggaagccttcgtgaaattcaaatggtcataacttttcactcggatgtcagattcaggcgcataatatatcgagacgctcgaaattgaacaacggaagctctcgagaaattcaaatggtcataacttttaactcggaggtctgattcaggcgcataatctatcgagacgcctcaaatttaacaatggaagctcttgagcaattcaaatgggcataacttattactcggatggccatttcaggcacacaatatat

SEQ ID NO: 257082 - DNA, 365 bp, Glycine max
  unsure (1)..(365): unsure at all n locations
ttcgantacaacttcgagcgtctcgatatattattcgctaatttagacatccgagttaaaagttatgaccatttgaatttcttgagagctctccgtgttgaatttcgagcgtctcgatatattatgtgcctgaatcggacatccgagttaaaagttatgaccatttgaatttcttataagcttccggtgctcaatttcgagcgtctcgatatattatgcgcctgaatctgacatccgagttaaaagttatgaccatntcaatttcacgagggcttccggtgttcaaatttgagcggctctatatattatgcacttgaatctgacatccgaggtaaaatgtatgaccatttgaatttctcgagagc

SEQ ID NO: 257083 - DNA, 404 bp, Glycine max
agcttttcgaacgtgatcaatatattcatttgcatacatagaaagatgaagttgtggtgcgtgatctgttttggtgtcacccacatgcagttaagttatgcaatgcatgtcatctggtgttttttatagacaatacctacaaaacaaacaggtacagactcccactacttgactttgttggagtgacaccaacggcgatgacattctctgctgggtttgcatatctggaggctgagcgtgttaataatattgtatgggctttggaacgatttcgaggcctatttttaagacacgatcgcctccctcttgttattgtcactgacagagacctatcactgatgaatgcagtgaaaactgtgttttccgagtctactaatttggtgtgcaggtctcatattcataag

SEQ ID NO: 257084 - DNA, 394 bp, Glycine max
tataaagataaatgatggcatgggtgttacttaatcttattatgttgaacagctattgaagaagtttaattattttgatgtgaaacatgtttctactccttataactcatccatcaagttaaaaaaaaccgagtaaagaaatttcttcacataaatattctcaaattattggttctttgttgcatttgacaaacttctctaggcctgacattgcatatgcagttggtagattaggaaggtatactaataatcctgatcattctcattggattgcaacagaaagagtttttagatacttaaaatgaaccattaattatgacattcattatacatatttttctaccggaattaacgggtttagtgatgcacattgaatttctgattctgatgaaac

SEQ ID NO: 257085 - DNA, 280 bp, Glycine max
tgcaagcttgtgcccttctttattatgtaactatgtatacttgaatttttcatcaacgcttttgaagcctatgttacttaattattgatgcgcgctacgggcaaattacaaagtagtccaagttgctcaaactgaaacagttttactacaaccatacctatttaaaaagacacctttttattgatgtgtcacacatgcatcgcatgatagtttaaaaactatgaaagcaaaactaagttcaactccactaagttcatttgacttttcgaagcgatttttt

SEQ ID NO: 257086 - DNA, 270 bp, Glycine max
ctaacacctctcttcccctatttttctctttctctacacaatggactttgttctttgtgtatagctaacttatggcaatgaatgtctggtgtaatttcgggcatgtttgtcgcggaccatgcggataagtcaatgtgttccccgatagtttcttttatacgactttggctgtcattgaaaagctggctccccaacttagtgacctgccttttcttacgaccaagatggaaggttgatggtttttcacttctaccaattaatgaatccaca

SEQ ID NO: 257087 - DNA, 448 bp, Glycine max
  unsure (1)..(448): unsure at all n locations
gtcacctgcggcatgcaagcttgttgataaactgcttgagtttcagtttcatatttttatgtacaaaaattgctcaacaaaggcatgattttattgcttaatcttttattctattttctttacagagtttgaggagcaaagagaagtaaagaaaaatggcgggtttttggagcgtgttttgtggggaatctggttgctcagaggctggaaaaatgcctggcagctatgattntaggcttctcattgatccttccacttgtgtcaaccatttgctaatctcttgctttgatgtgttgctgcttatcatgcttgtattcattatgatccagaagtcaacattaaaaccatctcggggtctaatacaggtgcaaagatatccatatttccagctatgttctgccatagtcaatggtgctcttgggttgcacatttgtgctttggaatttgg

SEQ ID NO: 257088 - DNA, 461 bp, Glycine max
  unsure (1)..(461): unsure at all n locations
ggacatgcataatatattgaagacaaagaattacttacaaaactcatttatgcacttttatcttcggattgtttctcatttgatctttaaaaaaatttcttatcgcattttattccttaaattttntttctttcatattaatctgttattattttgttgacctacagtagagacaaaaaaataaaaaaacaaagaacaaattgtgggtagcagcaataattttgggcttntgtatgccatcgaatactttgggctcaaacgatccaagtttcatactaaccaagggaaattntgaattgagatttttttaagaatgtctggtgacccaaataagaagaaatattgtgggcattctctatctgattagtaatacttatgttggataaaaacttcttataaacacctaggtaattatagcttgcaacggtctggtggagcgaatataaatttcttatcaaaac

SEQ ID NO: 257089 - DNA, 349 bp, Glycine max
tgttcaaatatactccaatttcttttataacccgaagcactacaagtttggcttaaaacacaaatagccaaattttgcaattgtagagcactacatccataacaatcccatcattgatctagaataaaacatataaagaaattaatcaaatgtaatgcatatattatgactcactaaaataaatcacaaattaataatgttatcagagtatcaaacactctgttatgaaagccgattgcctttcatcaataaggtcaaccatcactttgctaagtctggttgccaataatttggctattactttgtacatacagccaatgaaggagatgggtctatagtcataaacatc

SEQ ID NO: 257090 - DNA, 357 bp, Glycine max
  unsure (1)..(357): unsure at all n locations
tctcgctaagcgcatggttcaggcttagcgagataacaacttttgcaccttcataattntctccttttacctgaaattgaggtgaaatttacattaaattcataaggaaggcttctattgagcacatataaaaactaaactagaaatatttacaatcctaccaaaaataaccataaattgggagaattatatacatcttataaaagttttctatacaaaatttagtcttatgagatgactaacagtaatcaagccacaagcatgtgaaataagcatagatagaaggcatgaacacagagaaatagcattaaatagatagtaagagtattacatctagagggtcagtagtaacttccc

SEQ ID NO: 257091 - DNA, 375 bp, Glycine max
cattttctaccatttcaagggtctaaaaacactacttaatcatacatcacagcaataacattgtctaccacacacacatgaaaaattgggattttataaccagttgggtcatccccgtgttgtcatgatgcgaaaatatttgaacattcatgtggacacccattgaaaagttaagatattctccggttgataattagaccatcaccaagaaaaaatgggattaaatccatttcatctttagattggatataggatgatatttgtggactaatacacccaccatgtgaatcattttagatatgtcatgattttatttgacgcatcacctagatggtcacatgttttccttattatcaacttgcaaccaaacattta

SEQ ID NO: 257092 - DNA, 244 bp, Glycine max
  unsure (1)..(244): unsure at all n locations
gggtgaacttttctctgcaatggggcttttttgatgntcgcctaccttgggccccagatagaagtcagagacatcgcatgcactagacaaaaagccgcctcgactaactaattcttgctatcaaccaaaacttgtggggtggtgcgagtttcttacctttgaaagggctaggcggcagaagcattctcataataacctcccaatgattactatatcctagcctatcaaatcgcatgcatttcta

SEQ ID NO: 257093 - DNA, 438 bp, Glycine max
  unsure (1)..(438): unsure at all n locations
agctttcttaccaaactacntntgatgctatatgatnnggttttccctatataacattactccagttaccacctccacctattcatttactctaattgtgatctctcacatgaaagagtctaatttcactaatttctttcttaataccttaagaactaaattagttaaatcgcattactaatggagatgcatacacatgctaaataacctcatgctatccctagcgatgaagcatttagatgttcttttcggttctaaggactgcaaacattttccattgtctaaaccctacacatggcatatatgtgggtgatcaagccaactacatgaaaataagcatagaaagatacaatgaatctagaaataacattaaatagatattaagagtcattacatcaagagagttttgtggaaagctcccaacaatgaggtgattta

SEQ ID NO: 257094 - DNA, 334 bp, Glycine max
  unsure (1)..(334): unsure at all n locations
atatatttaattggncggctcaacaaagataatgcataggctaactataccttgcgaaaattgaaatttatccggaaattgaaggaggtaaggatcaaattcttaaacgtccaaaaatcaattctctcaaaagcttaaattgtcaggtaaagacaccagattggttttataaatcttaacaatattaaacagttccccaatcacaaatatgttattatctctcttttatatcttttattctaccaaaaaaactaatgtgtagattctaatgctttggtgaccttctagatctccatacaacttggataattcattctgcatatatntatatgtc

SEQ ID NO: 257095 - DNA, 313 bp, Glycine max
ccaaaacatatctttattaccttaaaaacacaaccgtgccagagaaacagaagaaatcctagcttaagaacaccataataaactctactactagtcgcactcttctcatagttatcactaaaagtatttacatggcccccgcatgcaagcctttactcgtctcaaagcacatcaaacacattacctccattaatgcatcacacggcactctatttgaaaatggatcttttactttgtgcctgcaaagacagctgacccttccacatgatagtgcatcgcatcaaacagacaaaatatatcataagatataaag

SEQ ID NO: 257096 - DNA, 402 bp, Glycine max
gtaacctccctttatatgataggcttagaatgcagatataattgatgaagaagaaacactcactttgacaatgttcttttaaatgcgtaagataaaattgattgtaataaaataaatgagataagggaaaagagaaatacaaactcgatttatactggttcaaccacttctcgtgcctatgtccagtcctctagcaacccacttgagattttcactaactttgtaaaaaacctttttacaacttctgaacacccaaggaatcccttttccttatgttcaggaaactcataattcaagagacaaccagtctcttgattacaacttactttctgaaatgaacagaaagatttctctcctttagagtagataatacaatttgatgttcctggatgaactctcaat

SEQ ID NO: 257097 - DNA, 373 bp, Glycine max
aaccctataacgcaaccgtggggacaaaagtgggcagctaacatgaatggtcatcattgtcaatgcggaaggtattctgcgcttcactatccatgttcacacattattgcagcttgtggttacctgagcatgaactactaccaatatatagatggtgtttacacaaatgagcacatcttaaaagcttactccgcacaatggcggcctcttgggaatgaaaccgctattcctccttctaaagacgcatggacacttatccctgacctaactacaattcccgcgaaaggtcggcccacatcattacgataatgaatgagatggattggatcaaaccatttgagcacccacaaatatgtagtatatgtggagccca

SEQ ID NO: 257098 - DNA, 348 bp, Glycine max
  unsure (1)..(348): unsure at all n locations
tgtaaacaaagcactattatggataagatacccactacctattatttctgatctaatacaaagggtgcatgatgcaactatattctctaaattcgacatgaagtcaagctattatcacatttaatggtagaggaggacaaatacaaaactgctnttgtagtcccttttggacattatgaatggaatggactataatgccccacggcttaaatgcatcaagtgaatttcaaaatattatgaatgatattttctaccaatatatggaattttcagtagtataattagacgatgtactaagtttttcaaaaggaataaaccaatatatctcgcattttaataaacttatag

SEQ ID NO: 257099 - DNA, 405 bp, Glycine max
  unsure (1)..(405): unsure at all n locations
agcttggaactcttggcaatttctttaatactagtcacttacaaaggtgtgacttttgaaaaaatctttataaacaagtcacttgaagaattgtgacttttggaaatgtatttttcgaaatcagtcactggtaatcgattaaatgtgactcttcattttgaattttgaaaattaaaacgtttagaatgtctggtaatcgattacaagtgttgtgtaatcgattacacaagtttataatgatttaaaactgttaaacacaagttgtaacttttgaaatttgaaatctgaacattttaaactctttggtaatgattttgtgaaaacttcttgtggtattcaatgttttgaaaagctttnttagtacttatcttgattgagtcttctcttgattcttgaatcttgagt

SEQ ID NO: 257100 - DNA, 405 bp, Glycine max
  unsure (1)..(405): unsure at all n locations
gaccttaaaactcacgcttaaccccctttaatgataggcttagaagatgaagttgaagaagaagaagaagaaatcaatttaacaatattcttttaaatgcataagataaaattgattgcaataaaataaatgagataagggaagagagaaatgcaaactcaatttatactggttcggccactttccgtgcctacatccagtcctcaagcaacccacttgagattttcattaacttgtaaaatctttttacaatgtctgaaccacacagggatgcccttcccttgtgttcaaaaatctttacaactcaagagactcacagtctcttgaacaacaatcgtttgctttagagtaagaagattatttctctcttgaagagaccaatgntacaagatgaagatcatataa

SEQ ID NO: 257101 - DNA, 412 bp, Glycine max
  unsure (1)..(412): unsure at all n locations
taagctagagcttanctacacacacccctctcacaactaagctcacctccttgagaagcttccttaagaagattcctaaagaagctagagcttagctacacatacctctctaatagctaagctcacctcacctccttatgatgagaagctagagcttagctacacaccccctataataactaagctcacccccatggaaaaatacatgaaaatacaaaacaaatccctactacaaagactactcaaaatacaaggctaaaaccccatactactagaatggccaaaatacaagcccaaacgaaggaaaaaacctattctaatatttacaaagataagcgggctcatacttagcccatgggctcaaaatctaccctaaggctcatgagaaccctagggccttcccttggatctc

SEQ ID NO: 257102 - DNA, 248 bp, Glycine max
  unsure (1)..(248): unsure at all n locations
ttcacacagcanaatctctcaatctctctggattcagacccttctctctctagagtctctcacatgcagaagctncttgagaaaatggctaacatcccagaacttgaacctctctttgtagaatctctcacatgcagaagctccttgagaaaatggctaaaatcccagaacttggacctctctctctctagaaatctctaaaaaatacataagctcaaggaaaagcccaaactcctctccaaaatctg

SEQ ID NO: 257103 - DNA, 222 bp, Glycine max
tccattttctaacagcagtggtgaccgccacgagatcaccaacataagtggaagaggggagtaaactcggacaaaactggttgctaaaaaacagctatcaaaagtcttccttgggacaacccgcacccttacgcgaacccaaagcttttgtctcgaccatgaaaggttctgtgaagcacgaactgctaaaatggaaatgtggctagcacgctccatcttttg

SEQ ID NO: 257104 - DNA, 372 bp, Glycine max
  unsure (1)..(372): unsure at all n locations
tataagaacaataatgccttaatcatttccaaatatgcatgtgaattangacgcatcaacaagaatcaagccaaggctattgtgcaagcaatcaatggggcaaaacacaccaaataattataatgatggatggctcaaattctcacaaaggtaaaatcatcactttcaaattgagctttcaaaactatcatgacatgtagagaagaatcaaggatttcaagtcacaaaatgtcaaaaacttttattctcaaaacaattacccatttcttgaacatatcctataattcaaagaanaacatgcaaagntgtacgtgcacacgaaattcggcccaaatattaaactgaaaatccggcgaaactaacaacattaac

SEQ ID NO: 257105 - DNA, 277 bp, Glycine max
ctaatatggatttttttttttctcacgatagaggggggaaagagcgacgtcccccccactagagaacgcaagcgtataggagaacccactctagggaacctcactcggtagaattcatgctcttcaggtactctgcttaccaagtctacttatcaaactttaagtgatcaaagcgaatatctgacctccaacgccctggtttcgtacggacacatcgaacttgatgtccggtttgaacgaacctatcttcaggcataccctatcataatttatacgt

SEQ ID NO: 257106 - DNA, 375 bp, Glycine max
  unsure (1)..(375): unsure at all n locations
gcttacactttgctcctgacctttattttttaaannctacaaaaatgcgttatatgcatatgtaacccatcacatcgatactcaaggaaaacttcctattctcaaatataacctcccgaaggcataaacaaagtcctaataagagaaaagatggaatatggcctaaattcacatattctaatcaaatattttttgacaattatcaaatcattcaagtaagctttacttaattcttccaacatagtttttttctattcacttgattagaaatcaaatttctgacaacatgtatgttctaacaaactccattaccttttttttatcagcaaaatttcatgtattactaaatataagaaacacaagaatatttttttt

SEQ ID NO: 257107 - DNA, 408 bp, Glycine max
  unsure (1)..(408): unsure at all n locations
cataaaccacagagtctggcgataggtgcataattttgattcatggccaattgggttaccaggttaaccaaggcatctagttcaccttcaagcttcttagtctcacctgatgaattcatggctacttcatgcactcctctaatgacaatagcatcacttctgacactaaattgctgggagtttgaagccatcttctcaattaaatttctggcttcagcaggggtcatgtctccaagggctccaccactggcagcatctatcatacctctcttcatgttgctaagtccttcataaaaatattggagaagaagctgctctgaaatctggtggtaagggaaactagcacataatttctttaatctctcccagtattcatacangctctctncacagagttgtctaatacct

SEQ ID NO: 257108 - DNA, 318 bp, Glycine max
  unsure (1)..(318): unsure at all n locations
taaatattggaattgttaatacatatatgtttcaaacaatccaaaccttctctatgcatcaagcacacaataggtagaaaatagccactgaccctnttgcagccaagccaacaatgtaacactggttggttacaatgaacttgttcattaccagcgccttccctgcaacgaccattaccatacatcagcactaaaccaagcttagatggtacccgcgacatgtcttcaacactacaccaagcttaacctaagtaagtaagtaagtgatcaacgtaccgtgggcaaagccctgatcttcacgaagtgccactccttgat

SEQ ID NO: 257109 - DNA, 479 bp, Glycine max
  unsure (1)..(479): unsure at all n locations
tcatgtgtgcaattccagctgcacgggcaccctctcctgtatgtttgtgcattacaagtgagactagtgtgtttctgcacccatcttacaagcagaaatgctctgaagttctgttaccgctgctgtcaccaatcaggcctgcaattgtccgccggcaagtgtatttccctgacaggcgtcttatacaatttgactgtgggaaactgcaagaactagcaattttgttgaggagattaaaatcagaaggtcaccgagctttgatattcacccagatgacaaagatgcttgacatattagaggcattcattaatttgtatgggtatacatacatgcgcttagatggatcaacccaaccggaggagagacagaccttaatgcagcgctttaacaccaaccccatatattntcttttcatcttgtcaactcgtagtgggggtggttggtatcaattagttggagctgacacagttattttttat

SEQ ID NO: 257110 - DNA, 384 bp, Glycine max
gtggaagcgcctacattgacaagaaatgccacacatggggcaatttcaataagctggttgttatgatggtctctaaatgtctcgtcaggatttttaagtttataccattattgttaaccacagtacactgcttaataaaatggataaatttgatatctttgtcctcatcctctcacaaacgcatcttttcttattcaactttcaccgaaatgtgggcgcaagccattggtctgtttgttcaagcgacctgcgcttctgagtttggactctcaagactgttcaatcacaaattactcgtgctacacatttggggagggtcgcgtaaacaacgagtagttcaaacaattagttcttataaaaagaaaacacatttgttactgtatt

SEQ ID NO: 257111 - DNA, 397 bp, Glycine max
  unsure (1)..(397): unsure at all n locations
aaaactaagctggggtttggaaggattgctaaagtgatgtgattttctccgattcgattttatggggattgagttttacatggagttctaacaagcaacgcattgtgacactttctacttgtcaagccgagtatgtagctgcaactntttgcacatgtcatgtcatttgactaagaaaaatgctggaggaacttcagttgttgccaaaggaaagcacaaagatctatgttgataatagatctgcacaagagtttgccaagaattcggtgtttcatgaacgaagtaagcatatagatacaaggtatcatttcattagagagcgcattaccaagaaagaaggagaattgactcatgtgaaaactcaagatcaagttgcggatatttcaccaagcctctc

SEQ ID NO: 257112 - DNA, 385 bp, Glycine max
ctaaaataaaccatgtgtctcccttttaagaaataggaaggacattatgagcgaaagaataactttaatcctatgattttgattcttggaattacgagacaacatcagtcctaggtttgaaaattgcttatgagttgctctgtttgagttaagagaaatccttttacaataatttaatttcggatgtgctctagtcaattgaattagtcccttgattttagagttaactagaatatttggtgaatattttggtgggacatgttgaatctatattagcggtggcgatagtttgatctaattattgtttgtattaatttaaaagacttgaccctaagaattaaggttcatagcaagtgcaaatttggatagaagcattttattgaga

SEQ ID NO: 257113 - DNA, 476 bp, Glycine max
  unsure (1)..(476): unsure at all n locations
tcgagaattgcccaaactcttctccacaatctgatttcttgtctttataggtggctntgtttgtgctagcgcgactatggaccgctcaacgtgcattattggatttcggcttaacacgtgcttttcttgctcagcggatgtgactaaagcggtgcgcttagcaagatgacccttcgctctgtgaacatgcacaactcatccttcttccagattcttcctcgcgctcagccgaagagtgttgcgttcagcggttagctcactaagccagcagattggcttagcgagaagatgaaaatcaacacttcacaaacttgcctaattaatctgacattgagaggaaatgattattacacacacaaaatggaaatactaattatttattacttataacaaaaagtaattacaatactacaaaataaccataaattagaggagtttgatataatgtacacatgttctatacataatagttagtc

SEQ ID NO: 257114 - DNA, 474 bp, Glycine max
  unsure (1)..(474): unsure at all n locations
ntacgaatgcatgaagngcatgtntcaccctgcgcggtactattatatgtctttacaagggcaatcacccgcctagactctntgaattaccttgcatttacattaaaaaaaattatctgccccctccccccacaactaatattgatcttaagtattaaagaccattgcatcccatgaaaacatacatacaactcattattgcatctgtttttaaaattctgcatgacaaatttttattttgtggttcctctctactctacagaatattaaatattacaattgttgtgaaaatattttgctcccattgtttgtttttttggttatgtccccagtctcacccaaaactaccttcatactattaaatatttaacatcggctattgtttactttcaacatcattctttaaccgatgttgaagtcaccgatgttaacattatcaattctaacatcgcgtatcaaaacatcgatgtaaca

SEQ ID NO: 257115 - DNA, 400 bp, Glycine max
catatcttcccgaatactcatcacctctatcatatctaatagatttcacatttatgtctaattgcccttttatttcatttgagtaaatttctaaggcatccattgcctatgaaatctcgggcagtaagtagacataaccgtaacgtgaataatcatcaataatggtgataaagtatctttcctttccgaaagaactaacatcaaaaggtccacaaatatcagtatgcacaatttcaagaagctgagtgcttcttggagctcctttatatgtatgttttgcttgttttcccttaatacaacccacacaaatatttagatccgctaaatctagataaggaagaatttcattctttattaatctttccatcctttctctagaaatgtgacctaaacgtttatg

SEQ ID NO: 257116 - DNA, 466 bp, Glycine max
  unsure (1)..(466): unsure at all n locations
gggtactgctgcattctactaatatatggagttggtcactgtttatcctgagaataacaattggttgaccacaacaacactagaggcggtaaaggacaacagtctttcaaataaacctgttgtgcgtgaacaaacattattaactcaaatgaatcacggaagtgattgcataattcttagactaactaccttcaatgtacctaaacaaaattatttccaaacacgtgaccgacacatatcatgactaacttgaaaaattgattgcattgcgtangtgggaagggcttggatgactaacctggcaagagtaatcctccccgcaaaggagagttgttgacgtgccttctaagtgaataggcgatgatccactctagaaataatatatcggatggtactagtggatactctattataaagaataagaatgtcgaggtactttccaagattttctgtatgtcagaaccct

SEQ ID NO: 257117 - DNA, 237 bp, Glycine max
ttttttattattctgggaagggtgccttttgactgacaatataaaacaatttcagagtgccttcaggaacttgctcactaacacttagtgtccttcccgcttaacgagtgaactcacttttcttcttatcattttctaaaagatttaggcgcctatggtaaacaacccttagatttgtttataccccgttatatgtcctttgaacccattctacccattattcttccaggtcgatgt

SEQ ID NO: 257118 - DNA, 444 bp, Glycine max
tgggtgagaagcttctatgaagactggatctctgaacttttattttgtcttccatgatgattctcagtcatggagttgcagtacaagataaaggagaacaggagacaggaggcgctatctattaaggaataagccatgaaagaagaagttccaccaccaagagaatgtcttgaataagaagcttagagagaaagcttctatggaggaagagaatgaaagagagaacaaagtggcgtgggaatgaaggaaagagaaagaagttaaactctgaagcgtgtctcacaagactcgtatacccctccaatagctaagctcaccccctcccccccacaaaaaatacatgataatacaaacaaaatctctactacaaagactactcataatgtacacaaatacaaggttaatactctatactactagagtacccttaacttgtagggcatg

SEQ ID NO: 257119 - DNA, 422 bp, Glycine max
acattgcaagtgttttatttttttcattttgtggacaaatcatgaaaaataaaagggaacctagtacaacatgagacatacatatgatacaacatggatatggggataaaacacattttaaaatcatagggcacaacttggccataatacaacataaaataaatctaacaacaacaaaagccttatcccattagatgaataaaatagatctaaaattaatgtaaaaaatcttacatcatgatagaattcatggtttaaaattaaccatgagttattctagatataataaaatgctaagatttatctagtttttttggtatttaaattcgtattagtataaaagttaaaacaaagtaaattaaaataattataagactagaactaagtattttttttttttgtactatgttatgggtatggga

SEQ ID NO: 257120 - DNA, 428 bp, Glycine max
  unsure (1)..(428): unsure at all n locations
gaaattataatttactatgtgagagaaaggtggcattattttcgtaaggagttggttgggaatgagacaattcatttcccgggcgtgagtgcgtgagcttgtgagagaaagaacatatgaatgactatctccaactggggaacttttttttaggaaatatcaattttcttaaaaaaataacccataaatttgaaaaataaaaaacaaagaggtgaatccaatgaatcttgtgacacaccgctaatgaaaacttatatattatgcattttctattattcttaattttttatcactgaaaaattgaataacaattcatcaatctgtaatanttaatattcttatatataattataaaacaaaattaaaattttcatttanatcataattaagtaaaacatacaaagtgtgagattcttacagtttattaa

SEQ ID NO: 257121 - DNA, 420 bp, Glycine max
  unsure (1)..(420): unsure at all n locations
cttaaaggaaatgggtagtagagatccaaccgaccttcaagaagattacgcttccactattagttnggggtaaaagcaattccaatgatgacattttgatatttctctggtaaactaagggattggtcacagatattagggatgcttttactttgcacctagccagcaagaaaaaatgccctcatatggagtggtccctgagtatagagatcatccagatggcacacccatcaccacagaaatcagtagaattaggcatggttctcttagaccagaatcaaatgaagtgagccattcattaccagcctcttagcatgtccacaaaagcatggtagaagacagaaggcacctgtntgtacccatacttttatagnttgaacccacaatttacttttctttatgatcaaaacgccaggattt

SEQ ID NO: 257122 - DNA, 303 bp, Glycine max
  unsure (1)..(303): unsure at all n locations
actaagctntcagagagggattgtctcccacagcccctcttagtgatgtcttgttttcggacgagctnttacagagttccatctcttttagatttgatggcaaacctccttcagggaacgactcaactcttggacaatcttctattcgtagctccttcaaagatggaagcagtatatgcatgcttccaggcagtgattctaattgagggcaccacctgattctcagagcttcaagatgattatgggtgtgatcctgtgtaatcatttgtagattacgagagccactgagataaagggtcctga

SEQ ID NO: 257123 - DNA, 189 bp, Glycine max
tctttttaaaaaacaggagcccagctcttagggacaaagggccctttcttgaggccaactacccagaaaaaaatcgaccttgaacgcaaaacctgcctcgcgttgcgtgccattagtctggttcccatccctcgcgttcctctgcacccgtcggggccagatttcaaaggtaagcaatatatatatcaa

SEQ ID NO: 257124 - DNA, 397 bp, Glycine max
  unsure (1)..(397): unsure at all n locations
ttttataatcatacatatcatccacacccatcggagcaacacgcctagagggcacctccacatcagaatgcaaatattgcaataactctctaaacctcctatggtcaacaaaagagaacggaagatcatgctcaataatcatcatagatatcatctcatgtaccacactttgacctattcttttatttcttaacctcccaccatgatcaagaataatatctccaagatcactattagaacgtgtcttcaaatatacatcacatttccccatatgacattgcaaggcggaagacccattcttattgcaccgcccacataatctctcaaacaacattcgcatatactcctcacattnccatcactacgtataacaggtctctcaaacaaatccacacac

SEQ ID NO: 257125 - DNA, 376 bp, Glycine max
tgcggcatgcaagctttatagaatgcctgacgagagcgtctcactgttaaccctcgcgacaagcttctgcggtgtgtgaagacactcgcgccgcgcgtggtgactctggtggaacaggatgccaacgccaacacggcgccgttcgaggctcgagtaaccgagttgtgcgcgtattacggcgcgctgtttgactcgctcgagtctacgatggcacgggagaacttgaagcgagtcatgatcgaggagggactgagtcggaaggtggtgaactctgtggcgtgcgaaggaagggaccgcttggaacggtgcgaggagtttgggaagaggcgcgcgcgtatgagcataggttggttcatgctgaagccactgagtcaac

SEQ ID NO: 257126 - DNA, 391 bp, Glycine max
  unsure (1)..(391): unsure at all n locations
tgatgctcttagatcatgcttttacccatcaagagtantttctggttctttcttttccaagtcttcctcatgttatgcctaatgcttcttacacattgtaggattctgaaaaaaatagggatcttttaggggcatattgcgataaggtaacctttcatcattgagaatntcagttatatttagaatatatattgctttaatgtgtgctaatattcaataatttgtgtagctctccatagaagagtcaaaggaagttgtgtcattcaagaatgtgatgctggaggtaatatctttttgctccttatgtgactagtttatttctatatagaagtatgttaatgtgatntgccttacttgaatactggggatatgtcaatggtgtattaattat

SEQ ID NO: 257127 - DNA, 446 bp, Glycine max
  unsure (1)..(446): unsure at all n locations
agctngtagaatggctagacatgatacattttagtgtttggtttggttcaagggtaaaagggatgccccacattatttccatgacacaaatgcaaaaatgatgatttggaaactttatgcaaaactggtcatgcatgcatctatgcggacactcaaatgtcaaatttttatggtcatgtgatgctagggctcaggattcatttcctctatttttaatcaacccaatgtttccaaaatatgttcttttatcaatttgtgcattcatccgagtccatttcgggcgtccgggaaatttcacagcattcacccttcaggcgtagacacatttttcaaaaattggttatgatcaatgatatttttcacagaaaagttggaagtcatttcttttcaaaagcatgttggtttttcagctagacaacttattattcttttttctccttcttttc

SEQ ID NO: 257128 - DNA, 347 bp, Glycine max
  unsure (1)..(347): unsure at all n locations
tctcccctatnttcctataaatagggggagaagtgacagaaaaaattttcttccttctggcatctgagattcacttaaaattagtgagaaaaattgttttcgtgaagaaaatccaagccgaagcgcatacgtaacgtttccgtgggtgattctccgaagactcttcaccattattccgacgtcttaggtcattaaccggtaagtttccgaaatcgaacttttcaattcattctatgtaccctaggtcggccccatttgtgtcgcgacttttattctcgtaccattgactttgcgaccgtcctgtcatggctttagacatttacttcaagtattgttctcgctatcaa

SEQ ID NO: 257129 - DNA, 191 bp, Glycine max
aaccggaaaccccaaccaaacaaacaaaggaagccgcacagcagacgcgcagaacgcggaagacaaccggaaaagcaagaacggaaggaccctacaaaagtgactaacgaacaagcccaaaaaacgcccagaaacaacaagaacaaaccgaacaccccaaaccatacaaggacacacagccaaagaaggaa

SEQ ID NO: 257130 - DNA, 316 bp, Glycine max
  unsure (1)..(316): unsure at all n locations
aaagccgcatccctggcatgctcaagacggagcctacgaacctcaagcgcgggcgctgcgggagcacgcacctagacgactgcaactccaccagacaggtgagctatactctcagccagtggctcagcatcatatactgagaccgaccgcgacagctccataattaacagagcaaccgtggctcgcagcgcatcctttgttgcacgatcagcaaagatagtggtagaatcctcggagacggtaatcttncgagccaagccaagcagctacactgaggcgctccaacaagcagacccagatcactagcttggaactc

SEQ ID NO: 257131 - DNA, 473 bp, Glycine max
  unsure (1)..(473): unsure at all n locations
ctatatgacaataacagctattaaaagctggaagcggtgatttgtttctcgacttttatttgatattagaaaaatcaaaatagagtcaataataaggagagttaacaagtgaaaattagagtgaatgagtattttattctaccatcgcaggtcaggtttggctgatgagcctagttcaaaacaacaacattttaggattaactagcatgatatgagatccttgccactacacgggtcactcgactgtttttgtaagatttataggtaataaatataaataatataatatatttccaattaattaaggttattgctagaatcaatattaaggttaatgctagaatgaatatttatgtgatgagtatattgattataaaaatctaaactatattntttggtggtaacaagaataaaacaataagatgaaaacctttgggatacanatttgtatattaaaaacacgtcttttttta

SEQ ID NO: 257132 - DNA, 422 bp, Glycine max
  unsure (1)..(422): unsure at all n locations
aagacgcgaaatagaatattattaatacttaatgtaagcgaaatagcacatgatataaaaccaaaattntgatacagaacatgctacatatgcaatgccttcccaagttaattgcatatctccacccaatagcaaccatgcaacccaaatgtattgctaggataaggactaccctgtgcaactaaggaagactcaacagttacactttcacgtcatattttcgccaaaatcgcatgcccagctactgttgttcatgccaatattntgcagtttctgcccaaaatctgcacttttcataaaaattgcgttatctttgtttacatgaattacagcttgataacctctcgccattatctcctcatcagcgtatgccagttaaacacgctctatatgccagattttgtgccactgtctgaacacat

SEQ ID NO: 257133 - DNA, 324 bp, Glycine max
ctccaaccagatttagggctcgcatgcccttaatcccttcatctccttcatatgcatccttgaggaaactccagacttcacacgctgattcgacggcactattctagcgaaaacttcttgagacagcagcgaacaaagaaaccctctcccttaactatcctgccttcctctcccttcgaatttctatctgagccatcgctggattggctgataaaggaagaacttcgtagtcttcctcaacaacttcccagagatcatttgcctccagatgtgcctccattcttgctgcccagatttgataattatcaccatcaaacacaggtg

SEQ ID NO: 257134 - DNA, 422 bp, Glycine max
catatatctcacaatacatgacactgttatttgagacaatgactaatttagtcaagagtctctgctttaatcgattaccaagtggattaatcgattattatttctctctcattaagttgtttagatgttaacaagaacacattactacaaaagtcatttactacgacgtaccaacaaggacggtccacagaaaaatggcatagaatctttagattgtaagttcaaggacggttattttaaaaacccgtctttgaattggtatgtttttttctctctcttatcttatcttctcgggacactactgacccttcattttcccctaacctttcattttcctctctcattgttgccttgtatctccctttctctttgtacgtttctctctctggcaaaggacggcatgggtggatgtggaccaccag

SEQ ID NO: 257135 - DNA, 458 bp, Glycine max
tattgtgtaaatacctcttggacaaacccaatattactttttgtatattgagtaaacgttaaaaaactagaagtaccttcattgcacaaagatagtcatttcagaacgtgaggctcatcgtggaccggcttgtccaagccctacgcatgtgcaccaagatgagcaaaacgacgatgcagacattattggaagagccttcgtgcctcatcgattactggatgcaagaaacgctcagggaaatcaaggaggccaagctcgccggagacatgtcgcagctgttctccaccgacatcgagatcagtggctacctctttgacttcctcttcgcggcgcaggacgcatccacttcgtcacttctgtgggcggtggcgctgctcgaattgcacgcgagctgctcgcataggtgagggacatgacaatcacgccggggcacctgatgtggtgaggtcattggagtg

SEQ ID NO: 257136 - DNA, 466 bp, Glycine max
  unsure (1)..(466): unsure at all n locations
agcttgacaggaataccaactgatttaattgctgacaactttggttagncttccaagcacttggtgacattgcctttgcttatccatactccattctccttcttcaaatccaggtaccttagcatttcatgcatttccaaattgggtgggtagagggtgacataagacaaacagaaaagaatttatagctaaaacaaggtactgaattttgttgaacaaaggacactatagagtctcctccacgaaaatcaaaccatgaaaaaggcctccatgattgcaatcttcattagaacattcttctacctgtgttgtagatgctctggatatgcatcttttggaaatgatacactaggaaacctcttgacagggtttgggctttttgagcctttctggctcattgaccttgctaatgctttcatcattcttcactttgggggaggatatcaggtactactaatggtacata

SEQ ID NO: 257137 - DNA, 393 bp, Glycine max
catcaattagcgagaggaagggaattacttgctgtatctgacgaaaacactgaggcattatcccttatcattgacgggaagtctctcacttatgcactagaagatgatgtgaacgacctatttcttgaacttgctggtggctgcgcatgtgtcatatgctgccgttcatcttccaagcagacagcacttggaagtttttcatgtactatatagtctttgcggatgctcttcatttatttacttgagaagaaacaacagatacttttttttttcttgatgtgaagatgatcattggccaatgtggcaaagagacaggtactcttacttgaagtttactatgctaataaggggcaaagcttgtctcctcttatggtcagtcagttaaagtacttc

SEQ ID NO: 257138 - DNA, 411 bp, Glycine max
gacacataaaactcaagctgtataggatccttatatgccgaacacagaaactcttctttctttctctctagcaacttccaaacattagtcaaagcagcactttccctaatgacacagcaaacaaggtttaaaaaaaaatcactaacctttcatttcatgactaaaactaatacacacatacttcaatcaatcatcaattcacataattgaagaaataaagcacacaaactaatacacacatacttcaatcactcatcaaaaactaataactaacacacgttgataaaaaaaaacacagacacacatgtctttgtaagtaacatacgggtcgggtatccaagcgggtgggtcgggaccgtaatccttgtagcaaccatagtacagcatctgatgaaaggagaacggaagttc

SEQ ID NO: 257139 - DNA, 446 bp, Glycine max
  unsure (1)..(446): unsure at all n locations
tgcagacaaggtagtcatgatttggaataagtatcactcttcttaattcaagaattagcattttgacacaccatctctttcagtgtccccgtccaaaaaaaaaaaccgtataaaaaatgaaaatataccacagaaaattgccacctatctaaaaaaagatttgttttctatttagaggacaggaaaggaaagcactctgaatctaataactaagatacaaaanagtgtgatagaaagtacgttcgtagcatctcttgtttcacctaattgatacatttaaggatgaacttaggcaaattttttgtatggggttacttttataaacatattcccgaaatgagtatgtttataaagtaattcctacatggcgcgctctttttacgtggaacacatgcaagtcgcaagaggcattggtgcggttcgtgacgacgtgacacctgacacta

SEQ ID NO: 257140 - DNA, 378 bp, Glycine max
tttcatggaaatagaaaatgggtaattaagtcacaagagtttaaaatggagggcattttgtaaatactatacaactagtttaaaaatagacatttagtttaattagttggtgacaaattaaagtgcctgattatacaatgtagaataattaaaataagttagagttgtacaccctgaaaaattacaattcagattgacagagaaaactctgtgttgtgtcatctgtgcatgtatgaatttaatttaagtatttatatgcttttaatcatagaatattgtgttatgtatatatgtgcgtgtgtgtgtatgtgcgcggctagttggtttaataaacttgacagagaaatagacatatttgagctagattttatttgtgaa

SEQ ID NO: 257141 - DNA, 397 bp, Glycine max
ccaccgctctctgcatacaaaaaaaaccttgattgtttcctatcggataacatacaacagaaagaagataaaaatttgttataaatgataaatgaaaaaacgaaaccaatttctgggagttttgacgttgtcctctaactaaaaattataattttacctccataacccgcataataagcgtctactttaaaggttaccataggtccatgagggattggagatagaacaacaccaacagcacataaagaattacatggtaagtcttgacctcagattaattactagcaatgcacattggcttattattcattcttttgcactttcaacagaccaagactactacaatagaactctactatagacttactaagacatcatgtacgaacactgtaaacac

SEQ ID NO: 257142 - DNA, 221 bp, Glycine max
aaccaacagaggggaattcaaggggcaaagaaaaaggaccatcacagacacttgacccggaagggaaaccataaaaagggcaatggccaaccaaaaaatacaaacaaccaaccaaagaaaaaacaaaaaagaaaccacactaaaaacagtaaaaacaagatcaaaaaaaagtaacacactctgacaacgaaaaaagaaaagtaataaaacgagaaacagac

SEQ ID NO: 257143 - DNA, 119 bp, Glycine max
accaccaaccggcccgagacagaggaaacctggcactccaacaatgccaagaggcgaaaaaaaatacgaacattaagaaaaactgacacttgggcccaaagatgcccaacctcacaaaa

SEQ ID NO: 257144 - DNA, 303 bp, Glycine max
gcgtggtgacgcttgtggagcaggatgcccaccccaacaccgtgccgttcgtggctcgagtaacccaattgtgcgcgtattacggcgcgctgttcgactcgctcgagtcgaccatggcacgggaaaacttgaagcgagtcatgatcgaggagggactgagtcggaaggtggtgaacttggtggcgtgccaaggaagggaccgcgtggaacggtgctaggtgtttgggaagtggcgcgcgcgtaagagcatggctgtggtcaagttgaagcccctgagtcagcgagtcgctgattcgatcaaag

SEQ ID NO: 257145 - DNA, 470 bp, Glycine max
  unsure (1)..(470): unsure at all n locations
ggataagggttatctttatatctttaagtagaagtgattatctacctcattgatgctcttagttcatgcttttacccatcaagagtattttctggttttttcttttccaagtcttcctcatgttttgcctaatgcttcttacacattgtaggattctgaaaaaaatagggatcttttaggggcatattgggataaggtaacctttcatcattgtgaatctcagttatatttagaatatatattgttttaatgtgtgctaatattcaataatttgtgtagctctccatagaagagtcaaaggaagttgtgtcattcaagaatgtgatgctggaggtaatatctttntgctccttatgtgactagtttatttctatatgaaggtatgttaatgtgattngccttacttgaatactggtgatatgtcaatgtgttattacatatgtgttttttaaatcgatagttgattttca

SEQ ID NO: 257146 - DNA, 139 bp, Glycine max
acacgcgcgcgcgaggcaccacaaaaatttgtgcagaccaaccgggagagaggccaaaaccacaacaaagcggaggacaaaccggaagcgcagggaaaaaccccacaaacaaaaagatgcagacagaaccggagcagag

SEQ ID NO: 257147 - DNA, 158 bp, Glycine max
ttttttgttccattttaacagaaggggggtgtggggccacctagctcgccaggcgagctaggttgcttcaaccttaagcaagaaatttcctagagggcacagattcgaaaaatactatttgcaccacccattttactaaatacaccccgcctgttcta

SEQ ID NO: 257148 - DNA, 341 bp, Glycine max
ggagcgtgctcaaagatatggagcaatattgggttgtgttcttgcttgattacgtagaattacgggtgtgtatgggatggccctacgcctataatgcattctggaacaatgggacatgcgacattgtccccgttctcctgctatcgacgcctaaacgcgcgcccaccaagggttcggagaaatgcctcaatggcattagcgcgtgactcttgtaaggaaacaacccatggggcattttggtttgtacacattttctattattggaatatgtattcattcccggaaaaggctagagtaattgccctccatatatcctagacctacgaactaaaatcttatgc

SEQ ID NO: 257149 - DNA, 428 bp, Glycine max
cttgagcaaaggcaaataatgagaagacactcgaggtatatatgttgtatatgatggagaatcatgaccaccaaagtcaagagatgcgacaacagatgcaacaacaaaatgagcaaatgcgtcaacaaaatgagcaaaagcagcggatactacaacacttgaatattcaggctatcataccagctcctagtctatcacctatcatagcagatggaatagagcaccatgttaatgatgctcaagttgatcgcgctcatgacatgggaaatgatcattgactcttggttattgcgtacattactttgattaggccacgttagttatgaatgcgaactttattaacttttacgttgcattggattaaactttgaaaactctgaatttgcactttatcaatctttaaaagagaactttgatattagacatat

SEQ ID NO: 257150 - DNA, 418 bp, Glycine max
  unsure (1)..(418): unsure at all n locations
tcactcttaaagtgcggatgctgtatgacctgtttgccttctggtggtccaactactttttttaatctttttaagctgtgcgatctatttattcatcaacgtacgtaccatgaatacagacactattcatcttccagcttccagtttgcatatttcatagctgagtttaattttaattttatttatttatcaattaacattcaaatatattcaattaaaattaatacacataataaatattaaagaataagataaatggtgaacttaaactaaaaactttaatgcgtttntagtcggagaataaaatgatttgctaanaactagaaatatgatatgtgatatggaagaactatgagatattattaaaaattatagtgtagaatagaatcacatacaattttggttgagacatctaagt

SEQ ID NO: 257151 - DNA, 380 bp, Glycine max
attttccaccatgaagatgcacgcggaagacaaaggagaagaggtaagaggcggtgccatccactagggaataagccatggaagaaggagcttcaccaccaagatgagccttggataagaagcttggagaggatgcttcaatggaggaaaagaatgagggagagaaagagagaggggggagcacgaaattgaaggaagaaaaagggagagaagttgaactttgagttgtgtctcacaagactctcattcatcaaagttacaacaagtgttacacatgcttctatttatagactaggtagcttccttgagaagctttctagagaaaacttccttgagaagcttctttgagaaaacttccttgagaggctagagattatcta

SEQ ID NO: 257152 - DNA, 397 bp, Glycine max
  unsure (1)..(397): unsure at all n locations
gctacgcgggagtacgtgagctcaactggaggtgggcaacaggggatggtgggtttatgcgcgctttgtggatgtggaaaactagttgtgcaccatcgtccgaccgccacctagtaccacatgtgatgggtaccccataatcctacaagcttgaaatgaggaagtgtagaagggtgaaacttcctgcttttattcgttgaccacagagtggtacctagagatatgtcgcgggggtcacgagaccttggggacgtcaggtggggtgctattgcccaaaaccaagcttgaccaatcccgacccaacccgggcatagtcagtcagtgagaacctgtgatgtacctaaacaggcgagctcctggcngtcaacagataaaaggaacaaagaccacacagcaa

SEQ ID NO: 257153 - DNA, 433 bp, Glycine max
  unsure (1)..(433): unsure at all n locations
agaaactcagcttaatattttcattctggctgataactattttctctgagatctgaattccacgcacggcagatccccgtgtggtgcaagtcgaaacatggatgccagggtggccaacgcatcggccatttgattctcttcccgacgtatgtggtggaaagaaatgtcgccaaagaattcggctaacttcaagatgtgagcttgatagggtatcaacttcggatccctagtttcccattctcctttcaactggcgcatcaccaaagccgagtctccatatactttgagtagttttacatcaaaatcaatggccgcttgaaccccgagggcgcacgcttcatactcggncatattgttggacaatcgaaacctagcctggccgtgaaaggaatacactgatcatttagggatacaaggacgtgccctactccat

SEQ ID NO: 257154 - DNA, 370 bp, Glycine max
  unsure (1)..(370): unsure at all n locations
gcatgcagcttaaaatcttgagtcttgattcctttttcttncatgctttaaaaggagggaacttgtgtctttctcacatataggacatgcgtggtggcctttgacgctatatccactcaaattcccatatgccggaaagtcgttaatggtgcaaaaaatcattacacgcaacctgaatgtttcctgagcaattctgtcatacacataaaccccttctacccacaatttcctgaggtcttcaatcaacggagcaagatacacatcaatgtcatttcctggctgtcttggaccggctatcatcatacacatcattatgtacttccgttggatgcacaaccaacgaggaaggttgtaaattattaccaaaaca

SEQ ID NO: 257155 - DNA, 78 bp, Glycine max
agttaacttagaccaatgtgtgcaaagtttaagaagcatatgtgactcatacaccgagggggatagctaaaaaaaaag

SEQ ID NO: 257156 - DNA, 222 bp, Glycine max
gccaagaggaggaaaaaacaggagcagacagcaaagccccggaacgaacaaaacaccccggaacgacaaacgacccagcagaaagcaaaaaacgaccgggaaagacgaaaaaacctacaccacaactacacgcacgaccgacacaagacacgaacgagaccaagcaagcaaacagacgagaggaagagaacaaacaaccaaacaacaggcggccacccaaac

SEQ ID NO: 257157 - DNA, 300 bp, Glycine max
  unsure (1)..(300): unsure at all n locations
agcagcggctccgcttacctaactatactggagacggntggcgcggctttatcccctatagatttctggaactttaacacgacctccgagatggaagccatttgatcttcgaaagccgatagatcggccttcatctgtacctgcacgccctcttcattatccatctttctggatcgagcgtcataagggcgcctcggagctttcctagctatgatgaaactcctaaagaacaaaacaacggtgagtatgccaccaaaacatgaatatgcacatggatgatcggagcccctggatccaccc

SEQ ID NO: 257158 - DNA, 279 bp, Glycine max
cgataaccagcccatgacactcctagaaaacactttgaaaagttatgaccttccaaaacaaaattgcgcaatcgattactagcaacctgcaatcgattactagtgaagaatttcagagaaaactcttcgagaagacacatctcttcaaaccactttgaaaaggcacgaagggcctatatatgtgagtgttgacttccaaaaaaaagacagaagaactctaagagaactccatgtccaaatgctctctcaacaactcttgggcaaacactcacaaatcta

SEQ ID NO: 257159 - DNA, 386 bp, Glycine max
atgtatcttataaacataaaatagaaacttcgaataagcgtgacgagaatggtcagtttaattagtcttaatacgaaataaaagatataaaaagattattagcattttctaaaataacccacaaaagggaaaccttagaagctaaaaataaaagataaatatcctaagtactattaaataaaatcaacaaatgatacatatgttgttcagtaaaattttaaaaaaattatataagagatatatctaaaaattaaaatgattattatatatagatttatttaaagaataggtgacactttaataaggagaaacatatcgaaaaataacagatatatttatgtttaatctttttcttcgaatctgatcactagaagatacatacatca

SEQ ID NO: 257160 - DNA, 394 bp, Glycine max
  unsure (1)..(394): unsure at all n locations
agctggaatcggatatccgggtgaataagtttgttncatntgaaanttcagaagagcttcgcgagttcaatttccgagcttctccgacatattaatacgccccgaatcggacattcgggtgaaaagttatgaccatttgaatatctcgagagcttcctatgtttaaattcgagcgtatcgatatattataagcctgaatcggacattcgtgtgaaaagttcttaccatttgaatgtgcgagagttttttatggttaatttcgagcgtatcgatatattatacgcctgcatcgcgacatccgtgtgaaaaggtatgaccatatgaaattcttaagagcttcagttgctcaatttttagactcttgacatattatgcgcccgaatcggacatccgg

SEQ ID NO: 257161 - DNA, 467 bp, Glycine max
  unsure (1)..(467): unsure at all n locations
agcttacatcaatactttgtagggtgtaagttcattgaaagaatgaggcaaattcttaccacagaaaagatacaaaaataatcaaagcagcttcaggaaattgcatatgcatataagcttcctgttgagaagggaaaattttacatggtgaataagcagaagatatatacatatatatatatatatgtatgtatgtatgtatatagtcaggaaccacccaagagaagcaataaaagtagatcatatgtaataactaacttatagaatggaactagaagctgaactaaaataaaatggtaaggcttccactccaccattttgggatcctgctgccttgggaaaggatagatgtaagcaaattaggcccatganagcaatgaggaaatacatgccaaacagtcctatcacaatttgaagctgtaaaagcccaaattaaaaaatttaaattcctattattacaacagatg

SEQ ID NO: 257162 - DNA, 299 bp, Glycine max
  unsure (1)..(299): unsure at all n locations
cattatagttcgtctatatgatgtatttgaacgaatttttcattgtcacttacatttactaacatggtttttcattatctatatgatatatttttcgctgtccatacaaaaattcaaagttaacttggagatttacaatttgtcaatttgataatcttgcttaaaagtgntagaattgactaacctctctctagtttcggtgtgtgtatatatacacctcaaactctctattcattaagaaacatgctgcactctcttataaatctaattctattacgatgcgaggagttatacattat

SEQ ID NO: 257163 - DNA, 399 bp, Glycine max
  unsure (1)..(399): unsure at all n locations
agcttcctcggggccattcctgctaatgttatacatttggaaagntagttttaccagtgggacgttactcttaaagcaaaaatggcatataacctcctcccataaatacaaacatcaatgtaaatttagagcaagcttatgcgcatatttccttacaaacgttctcttgcacaagacattctattaaccgaaaaaaaatgcacccatatacaatcaaggcagcttcgttacctagattatttacacgtacttctaaggtgtatttgttacttacatcacacacatctccttggctaaattcacatacatgcatactcaaagcattttggggtaccaaaaattgcacatgtgcacatcttggtatttctaatacctatacatacacaaacttcatgatga

SEQ ID NO: 257164 - DNA, 442 bp, Glycine max
cttatcattctcttatatatgggcaacctgagaggacggtacaaagtttggaagatcatttaacggattgtgtgttaaatcatttggattgctaggatgaagttctgcctttagtggaattcacctacaacaatagttactatgccagtattagtatggccccttttgaggctttgtatggaataagctgtcagacgtcattgtgtcggtatcaggtggaccagagttagtataatggactatagaaaaggttaaaaggattcaagagaatataaggatttcttagaggagaaaaaagtcttatactgatcgacatagacaaccccttgagtttgaagaacgtgatcatgttttattgagagtcacacctatgactatggtaggcagaataataaaatcaagagaacttagtcctaaattcttggaccttatcagaatctat

SEQ ID NO: 257165 - DNA, 330 bp, Glycine max
tgcatcatttcttgcttgaactccttaactagccttgtattatcttcaattactaaaagatcatcaacatagagagaaactatgagaaagttatctcccttatttttcacataaagagtggactcaaataagctttttgcaaagcttatgctcaataagtgatcatttatcttgctatactatgcccttgccgcttgatttaagccataaatggcctttgttataacataaactttatcttcttcactttgcttcatgaatacttctggttgctctacatatatttcttcttgtagatctctgtttaaaaaagctgacttaacatttgtg

SEQ ID NO: 257166 - DNA, 472 bp, Glycine max
tctcacttgataatggagaacacattatcttgttctaggcaatgacattcatggggctccgaacacaaggtggaagtatggaggaattgccttgagggtccgcacttatgcaatcatgaaactcagctccaaactcgaaagtgaaggacacatgaacagccctaagcaataacattcacgtggctccggaacaggatgcgaatggaggattgccttgagggtcctctcttatgcaatcatggaacacagctccaaactcgaaagtggaggatacatgaacagccctaagcaataacattcatgtggctccggaaaaggatgagaatggaggattgccttgagggtcctctcttaagcaatcatgtgacccagcttcaaactcgaaagtggaggacacactgaatgaaacgcaattcatccatgtggcttcggaaaaggatgagaatggaggaattccttgagggtcctctct

SEQ ID NO: 257167 - DNA, 391 bp, Glycine max
attgtagagatgcacagtcctattatacgccaggaaagtcataagctgaatggaagactagcatccttgtgagactaaacctgcgaacaacctttcttagccttcaagaagaccatggtcacattgccagtcctaagtcaacctaggccaggagtacccttactcctatatctctcagtagttgatgaagcagttagcccatcccttttacaagaggaagggaagcaccagctccctatctacttcaccagcagcatactctatgatgccgagatgcgctaccaaatgatagaaaaggtgggactaacactcattacctcagcccagtgtctcagaccctacctttagagtcatcgagtggtagtcaagacgcactataccctatcaaaca

SEQ ID NO: 257168 - DNA, 374 bp, Glycine max
agcttctttgagaaaacttccttgagaagttagtatttatctacacacatccctctaataactaaggtcacctctttaagaagattccttgagaagattccttaagaagttagagcttagctacacacaccccctataatagctaagctcagccccattccaaaatacatgaaattataaaaaaagtccctactacaaaagactactcaaaatgccctaaaatacaaggctaaaaacctatactactagaatggccaaaatacaaggcccaaaagaaggaaaaacctattctaatatttataaagaagagaggacctaaccttggtccatgggcttagaaatctaccctggggttcatgataaccccaaggcct

SEQ ID NO: 257169 - DNA, 271 bp, Glycine max
gaagtacaggagaccttcaatccaataacgcaacgaggcggacaaaaatgggcagctaactcgaatggccaccattcgcaacgcggaagggattctgggcttcactatccatgttcacacattattgcaacttggggtacgtgagcatgaacgaccaccaatatatagaggctgctcacaccaatgaacacatcctaaaagcatactccgcacagtggaggcctctcgagaatgaagccgcattccctcttcagatgaggcatggacacta

SEQ ID NO: 257170 - DNA, 295 bp, Glycine max
agacactgggaatcgattaccaacatcctcgaaccgacaacaccatctcgaaatcaattggaacagtgcaaatacagtcaaaagcctctgaaattaaaccccgccactgagaaacgactacaagaaaccggcaaacgattaccggagagtaaaaactccggcaacctacaaaacgtagagaaaaattcttttgtaaaacaaaaccgtgccatggtaggaattgaaaaccttataacacttcccttgagaagacatctcgattccttctctcgaatcatgaaatcaaacttctctg

SEQ ID NO: 257171 - DNA, 242 bp, Glycine max
aacacaagcaggactccaagaacctctaggcggacaaacatctaagttgacaaaccacataagcagcatcaataagaacacacgatccaagcatcctacaagctggcaacctcaggcaccgaacttcatggggcaacttcaatcaaagaaaaaaggacaaaaattctagtagacaaacgcgccataccggggcagcagacaacgggaaaaaaacacccaatcacacgggagttaattcgcac

SEQ ID NO: 257172 - DNA, 467 bp, Glycine max
  unsure (1)..(467): unsure at all n locations
agcttctgcttctgaagtccagattgtggttgatctcacaacatacagattccacttcacaggctgcttggtttcccactctcacgcaggttgtcaacgagtctcaagggaggaagaagaatgaagaaataattgccaaggtgacaaactggagcaccagtaaggagcacactcctctgaagagcctcttaggtgaggctgcccatagtagcaagccaagatctccaaaaatggaaaactctgtgaatcagaagagtggtaaagttctggagaagaatggttctggattgacaactgttaactccattctgggtcctgaatcccctgtggctcaagtggttaaaggagaggctgcaaaagaatggaactctccacgcagatattctgcagacatcaagagagaanaaaggaaagtcaagagcagaccatactggatacaattggtatgctgcacgtcagtcggtcct

SEQ ID NO: 257173 - DNA, 388 bp, Glycine max
  unsure (1)..(388): unsure at all n locations
aattgctttataccaccaccactaccacaagaatttcatatagacttcaacaaagttaagaataaattttaaagttcttcagggactacgttaaggtataagcaccaatagttatgaatcaaaagaacgagcactttcattgttcacaagacaccggttatgcaaagagtaataaatcattgcatagggcatgcaaggaattgggctttaaatgcacaaaccttggtagtctcggtggcataaccccattctggggagatagtcttaatagtaaatctctggttttgtgcaacagtcaagcttgaatttgcatctggtggtgctccaatttggctttggtcaaacaatgtntcatagtagtcagaaataattacttgtgtctcaacat

SEQ ID NO: 257174 - DNA, 131 bp, Glycine max
accaccccacaagaatgaaacagcaccaagaccacccaaagccgacaaaactgatcggaacgcacgcaaccaacgccgggacaaacgaaacacaggcacagaggctagacccagaaagcccgggagaaaaa

SEQ ID NO: 257175 - DNA, 412 bp, Glycine max
  unsure (1)..(412): unsure at all n locations
agcttgaagagaatggagcagnngtatgttttnttctgttcgggggaaatggcttacgatatcttatgtagaatatgttctttcttgcatgtttggtacttagctgcatatttttatattaaaaattgtcctaaatgtcgtcaaataattccaaagttcattttcctttgttatcccttatttgctgntcatgttcacatgtttctatcattgcttgctccttctaanatttataatatatttgcttgaatattatggtttggttatgaagcaggagtggtttactgactaatgacaaatgactaaaataataacccccttgtattgtagtttgcttgccaatatgattcttataaaataattttatgcagttattttaaattgcttatcataggtgcaagtgttaccccac

SEQ ID NO: 257176 - DNA, 352 bp, Glycine max
  unsure (1)..(352): unsure at all n locations
agctcaaaagatcaagaacaactcacgtgaatcaagaacaagtcaagagctcaagaatcaagaagaattctagactcacagaagaaagtctacaatcaagaatcaagattcaagatctcacgaatcaagatcaagattcaagactcacgactcnagaatgaagacaagactcaatcaagataagtattaaaaaagtctttcaaaactgtgaatagcacatgagtggttgcaaaacccttaccaaagaagttttactctctggtaatcgagtaccatattggtgtaatcgattactagtagcacaatgagtgtgaaaagcttcaaactgaattagaacgtccanatatttcaa

SEQ ID NO: 257177 - DNA, 376 bp, Glycine max
tagcattattgaattagtaggggtagtaatgaatgtttattgaatcgtttcgggctcggggtcggtgtcactaccatcacctgaatctgatgaataagcactcttagcttgattagccgtactgtgatgcgatctggatgcctcgattttacatgacatcagacgcgcgagaaacgtacgagcattttgcattctttggttaagatgtacaaatttcagtttggcgcatgcgacagacttgcgaagagctgagtatgttcctctgagatactcgacaacctcttccatggacgcatgatcgttaaaggattgagttgtttacttgaattatacaccagcgagctcttgtagctgccagagtgggttctatggatac

SEQ ID NO: 257178 - DNA, 444 bp, Glycine max
atccttaagcaccgcggctgcagctttgtttaatttcagtgttcgtatattcaggactcaatcagacatccgagttaaaagttattgccgttgaaattgctacaagcttccgttttcaattgcgagcgtctagatatactaagggacacaatcgtacatccgagaaaaaagataatgtcgtttgaatttgctcagagcttctgtttatatttcgagcgtctcgatatactacgggactcaatcggacatccgagtaaaatgttattatggttcgaattctctaggagcttctattttcaatttggagcatatcgatatattacgggactcaatcggacatccgagtaataagttattgtcgtttgaattgatcaaaccttatgtttaaatttcagcgtacgatatactacgacacaatcgcatcgagtaaagtattgctttgat

SEQ ID NO: 257179 - DNA, 467 bp, Glycine max
  unsure (1)..(467): unsure at all n locations
aaaactcagcttgagcacatcaaacgacaaaactntactccgtgttttatgtgtcccgtagtatatcgagactctcgtcattgaaaacagaagctcgcaccatatgcaaacgacaataactttgtactcacatgtccgattatgtcccgtagtatatccatacgctcgtaattgaaaacagaagctcgtagcaaattcaaacgacaataactttntactcagatgtccgatcgagtacgctaatatatcgagacgcgggaaattgaaaacagaagctctgagccaattcaaaggacaataacttatatcttggatgtccgattaagtcccgcaatatattcagacactcgaaagtgaaaacataagctctttgcaaactctaacgaccataaactttttactccggatgcacgactgtgtctccgtatatatcaagacgctctgagcaaatgcaaacacaaaaaact

SEQ ID NO: 257180 - DNA, 365 bp, Glycine max
cagcaaccaaacaaacggccgcaacgatatatacatagaaaggtatggacatgaaaactgaggacgatctgcgggcaaatgtcacgccggctatctattacatgagtaaggacaaacccgctacaacaggccggggggttgcccgatcagaaaacgcttaaaatcattatggggaaaaataaaaggaatccatggagggttgaacaatatccctgctttccaaccatcctaaaaaagcatgaatggcccgctccgccctaaggggctgcgctatctcagaaaaacctaatcctgaggtaaccaaaaaaacataatcaaagaaaatatgtacgccaaaaacactcgagaagcgaatatatcatgga

SEQ ID NO: 257181 - DNA, 233 bp, Glycine max
cccaacccaacaaacagccccttaccaaccccgccctgaggaggcaaaggggcatgaaacagcaaaacacacccaagaaagcacaccactacgcacccaaagggaagaaggggaaagccagccaaagccaccgtggcccgggggcaaccggcaaccatcgaccaagaaacgaagacaagtgcactgagtccggaaaaaaggccaatgagacgagggcccgcccaaagaaaacg

SEQ ID NO: 257182 - DNA, 323 bp, Glycine max
cggtctatcaccaatagtgcacgtcttcttatggcgtgtgacaactcccacatttcgaatttcattcattcttcataggatttgatatatactaggagaatgtctctacaaaatgaatctcacaaccaggcatttatgaattcttaacggaatcatttaatggtgaatcaaccatgggtggctattctatcatttgtaaaccaacaagatgttgaggcaggactgtattccaaagaccaacttttaccttgttttattgcgtaaaacaaatatttacggtgctattcttctaaaaacacattctttgactaactttcttgtga

SEQ ID NO: 257183 - DNA, 213 bp, Glycine max
ctcctaaaaaaacaaagaggacagaaaacaacaagaacaacaaaaacaaaaaaaaggaaaaaaaagcgcccaaagcaccaaccattggacaccaaccgaacccgaaaagagacccaggccagagaaggaggaccaaccctggatgacggacaccaaaatcacatcaacaaggaaaccggcaaaagaagagcccaccccaacagaccagtacaa

SEQ ID NO: 257184 - DNA, 446 bp, Glycine max
  unsure (1)..(446): unsure at all n locations
tcatgacgcanaggaatcttattattattattatttcgtttatttgtctcctgcacttcgtgaagactatggtatcagctatgtttgactactactacctcatagttttgatatcatcaatgcactgtaaggaaagaaaaatatgcacattttatgcattgcgcatggtggaggaagttcttgttttggcaagttgaatccaacgtgaaatttggtctattctaaggtctttttctagttttaacttttaagcagtagtttaaaatatccacatcaaaagatcttgcttcttagtgaaaaataggaaagaaaacatccatcatgaaaatatatgatatatcattgcggcttaattctattaatcttttagaatctctttacttttttataataaacactcattctaagacggctattttagaaatcatcttagaatcctcaagata

SEQ ID NO: 257185 - DNA, 233 bp, Glycine max
cgtagaaaaggttttgtggctagctaatgcagggaagggagaatgccgcattgcatcagccaaaggccacaagcgggaaagcaagaaaggcaggtgaactggatgggatgttaagaggcgcgaaaaaaagagcaagcacaggcagacccactaatcaacagacagacaccaaacaattggtaagaaagaaaaagacggaagttaaaacaatgcgcagagaacgccagactgaa

SEQ ID NO: 257186 - DNA, 420 bp, Glycine max
  unsure (1)..(420): unsure at all n locations
gtagaacactatagaggataataccacggcgaccgcttccatcatattcttggangtgaaaccggcgctacaactcacaataaacttgtgccgagatagaaacacgacggtgttcagtcaaaggtatagtcctcaagcttacccttatggcttgcctccggacttcactccccataccactccgaaagatttgagccaagcccctaccttcgaggggcaactccctccttatgccgactatccnctgcaagaagatgatgaaggagatgcccatctaggccctctacttcccctcaaagatccggccccccatgaattacctcaaccaaacatagtccgccatgttccgtctccacccgcacccgtagatgaatccgttccctttgcaaaagatancggaaagactgattcacttgaaga

SEQ ID NO: 257187 - DNA, 133 bp, Glycine max
acctaaagccacaatgctcatagaattactttaagaagtaaggttttaaggtaataaaaaaattggacacccagttgaaccggataacacagtatatgcaagttaggtgaaaaacccagggggataacgtaaa

SEQ ID NO: 257188 - DNA, 203 bp, Glycine max
cgagacaaccaccccagaggcaagaaaccggcaggtcgaccgccgccccaacgaaaaaggaagcaaggcagggaacccccgcgaagaccagacaatatcaccagagagcaagcccgaaagcccaacgccaaagcgccaaacaaacaggtgtcccaaccaacccctcggcgggagggcgacacgagacccacgggcgcgccccc

SEQ ID NO: 257189 - DNA, 262 bp, Glycine max
gacaataagaggtgggcactacactctgttggagttccttactcattctccaaaaagataactttattcttgcaatccaacttaagaagtccgagatttcctctaaggggaagtcttttattaggcctattaacacatatatataggacggatttttttaatattctgggggaaaactataattgttcagtcatttggaataatttcaaataaaccaatttagaggctctgggaggagtagaattggcaacattctttcata

SEQ ID NO: 257190 - DNA, 311 bp, Glycine max
ccccacaacaagggggaaaaaagaacgccccgcccgcaaaactatccgtgataatcccaacagacctcggcagatgttgggacacgccgacgccgctatctatgagaaaccaagctgcgaccttacccgacgccagggccatacacaaaacgcccgctcccgacagatgcacccgcaccaataacatgagccaacatgcacactaccctgggaccaccacaagcgaggcgaacaactacaatcgaccaaccaaggccccgaaaaaaccagcgacggggacgcgcgggggaaaaaaggacaacgcaacccca

SEQ ID NO: 257191 - DNA, 378 bp, Glycine max
agcttgaagagaggatttccatgccatttttctcccaacgagtatgttactcgcttagcgagatggttgtctcttctgcgctacacgcgagattgccgctaagccaaatctcacttactcgcacttagcgcgagaatggcattaaacgcgccttcatggacaggaagccctttcttaagcctgacttacagaaaatgaaggggagggctggaagagagcgccgaataaccgtcagagtttgaagagtgaaatacacaaaggcaaataacagagcacaggagccaagttttgatcttttaggaagaattgtgagtttctgagtgactgtgagattcctagagggggaggagacattctcacttccttggaagcaagcat

SEQ ID NO: 257192 - DNA, 429 bp, Glycine max
  unsure (1)..(429): unsure at all n locations
ntggactntatgcttgagggccacacactgnttgattgaatgctcttgggtacctcttgatacgcgcaagttgcgttggggttgtaccaccaagggaaaggagattgataaatccttccaggggtcacaactgccatttggttggcgatcaaagatggcaaaaagtccccgtatgatatcggaatatgggcaaactctggaagcttcttcactggaaggttcctccctggattggcactcatgctanggttggaactgtcatggaagagcgaggttgcatgggagccgagctttgagttggatccctttgtggctgagcagctgtcctttgctagatgggcgccgagtangaggggtttccagcatagaccgaanagcatggatgatgctgngcatactggtaagtatcatgaggggtgtgctggggtc

SEQ ID NO: 257193 - DNA, 466 bp, Glycine max
  unsure (1)..(466): unsure at all n locations
agcttcacttgagagggctaattaaacactanatatggcaannggcagtagaactatggatacataagcttctatgctacagttgcacaaagattgaaatcacatgtatccattttttttgtctcattcatgttcttccaactgaaaaatgacacactnttaaatagtaacattttccctcttgatcanttttattgaggtgttattttttagcacatanacatttttggtatttcttttatctgtaagaataaaaaataagtatcagaatatttacaataataattcaggtaagttagactctcacttaagtagacattttgggtattgtgctctaacccaaatctaatattcacatcaataattcttactgaactttaattgtaaaaacaagtatcagagtatttgctaatgctttcacccttgacaccgttcttggtaccattaattatgcaagttgaaatat

SEQ ID NO: 257194 - DNA, 409 bp, Glycine max
  unsure (1)..(409): unsure at all n locations
ataagctccgagaacactgcacntgntggagggacaccctcttttatccatatctanaagacaacggagactgttctcttacagatcttggccttgacacccttcgcggaggggttttttgttggagaccctgctctctttgttggcgaacgaagctgtgcattggggccgtccttactgctttgcttaaggagcctaacatgaaagggagcaacggatgtgcaagagacagacccatcaactacatgtctttctaaagatacatcttcgctgcttacctgaaaaatgacagaacccacatcatagattgaaattacgatccatgcgtaatccaaataattggactcttcaacgtcaaacatcataatgaagcaaagggctaagaagtgcactggatattgctaacaaa

SEQ ID NO: 257195 - DNA, 444 bp, Glycine max
  unsure (1)..(444): unsure at all n locations
ctcttttccctctttttctctcaactgatcttcattcttcatcctcttttcacttctgatttttcctttctcttgcacaaatatcatggcttttccattggtgttgatcatgaaaggctaaacacttaatcaatccaaggatccactccaagcaagactaaattagagttttagtttagaatttctaatctttgtgaatgttcatctttttattcaatcctactttcaattttcatgattatgattatgtttaggattgaaaacggattaagttatggattcatttcctaatttcgaaacttaataacaaattgtttggatgatcttccaacctaatttacgatctcaaccaatttaaggattgattcgattgaactatctctaatgcattngactgaacctcctcactctanacatcattcgtagtaactgtgataattcaat

SEQ ID NO: 257196 - DNA, 393 bp, Glycine max
  unsure (1)..(393): unsure at all n locations
ccagcttgggtattggcttaagaacaatatcacaacattggcattgatgtttgtatttatcatcttgcatccccttnaaacaagcaaaaaaattttctttgtgagcaagctctgttattatcttaagatcaacatcatccctagactaaacaacaacctctagaataaaaataatttggccttcaaactttcacctttttgaagaatgtttattgacagttggagagccatgaacaaccaagccttataaacatctcagatgtagctctataagctactcctgcattgctagccatctgcttctacacagtcttcaccatttgagtgtcatctcttttagaaccactaacactggaatctttcaaaatattagcagcattagggacaaccttt

SEQ ID NO: 257197 - DNA, 258 bp, Glycine max
tgattgggccacaaactctattcatcaaagtacaaccagtgttacacatgctcccattcatagaccaagtacttccttggaagtttattgaaaaaacttccttgacaagcttctttgagaaaacttcattgcgaagctagagcttagctacacacacccctctcataactaaacccaccttcttgagaagcttccttaagaagattccttaagaagctagagcctagctacacatacctctctaatagctaagctcac

SEQ ID NO: 257198 - DNA, 401 bp, Glycine max
actttgtttattcaatctgggcacaattggatgagggaaagagtggtttccaaatccgcactttatgcacaattctgctgttgaaatgtgcagcagaattatgtataagcgcagaaaaatgcctgtgtatggctggatgtgaaaagggtagcacatatggggttctggacatttgctagcagaccccaacggtaaaaatgtagacttatgtactagagacttccagtaaaattctcgagtcgatccaacgtttaacgaattggaacgaacgatatgttactgcggcatttgcatgtgaaaagctgtgatcttgagttgtgttctgggcacagttgtctgcctttgccctattatgcttggctctgctaggccatgatgattggatgcggaattacctgcat

SEQ ID NO: 257199 - DNA, 268 bp, Glycine max
gcgaccaccaacaacaacagactttcggcacctactatatgtagacttgaccaccctgttatggaatgctggacaactttcaacccctatcacacattctgataagatggttgtcatgtgaccatatcgtcgtccaaatgtatcgcaagccacgctccacttttcctttgagattcgatcaatccattttgctatggctggactccattgacgaaaattttttatagtttgatcacacacatgcttgcaaagagtgtaccctgcaaca

SEQ ID NO: 257200 - DNA, 310 bp, Glycine max
gatgaaacttcccggagcatgtctttacaacctcttgtccaactattccaccaaacacgggagccataggattcaatacagccctagaaccagaggccaagaatcgcacaagcttcggatttatgtcttctaatttcccactccctaagctgtcattaatataactagcaaaagatataaactccagagcatcattctctgaaccacccaaagggaagcgacctaactcaaaaatgaatgtatccatagcctgtaaaactttagtgaggagatgtgggcgaacaacttcgaaaattactcataagaaatc

SEQ ID NO: 257201 - DNA, 470 bp, Glycine max
  unsure (1)..(470): unsure at all n locations
accttaagtcacctgcggcatgcaagctntctntaagaataataaagctaattttttcatactctattctatactccaggtcaggtttggtactntggttctgtacagtgtatacagtctgcatacattttttgcccttaatataggtagtccttttggtcatcgcatcctataatgctgccctagaattattatatttggttgaaaagacaacatttatattctggatatttaaatgcatgctaaacttttgtaagtaaaggaaagttaaaattcatgcgtagtggatgagcgctgctttctcatatatctatatgttccccactgaagctagatttgggtagtgatctgattaaaacaggaaaattgaaatctcttacataaacattaatttcaaaggattgtttaatacacctctgtgaggatcttgtccatgtataacttatgtaaaaattgtttaaccattgact

SEQ ID NO: 257202 - DNA, 430 bp, Glycine max
taacacatggagggatttcaatcttggggaagcatgctactgtttgctcgcctgcattggtatttaagtcttttgagtttcctttaactgagactgaatgagtgaatgtacatgtttaatagatttgaaaaagaaaaaatgaaaatttcctaaattttaaatactttctattagtatattgtaggacatgactcaagcaacctctactcaagacagcaaaggatcttcatggatttgagtggaagtttaagcgtgcatacacatacatatatgggtaaattggctttgatatgagcagcaaattttagttgcttgttcaaattctgaatgaatgaatgaatattgcgatttgcatcatatgaagaatgctagagacatagtactcatatctgctctattactgcgaactcttcttatccctttcattaat

SEQ ID NO: 257203 - DNA, 349 bp, Glycine max
  unsure (1)..(349): unsure at all n locations
agcttangacaaggtctagtatactttatttgtttccaaacaaaacggtgagtctgatggatagaaacattcttgactctctgcttttaaatatccactntcatggccttgacatgaaagaaggaaagaaggatcaattccaacagctttgatctatatgattcagtacaaagtaatgaatacttgtgcatctagagtcctgttaaaacctcaaagaggagaaacaactttgtttatcactgatatgacaaaggttaacgtttctctcccgagaaaaataaaatgggatgaagtaactcttcccgagacatgggttatggataaggccacactgtctgttccccgacct

SEQ ID NO: 257204 - DNA, 470 bp, Glycine max
  unsure (1)..(470): unsure at all n locations
tgcagaatggctagacatgatacatgtcacggtttgttttgttttcactgataaacagggatcgccccacattatattccatgacacnaaatgccacaaatgatgaatttggaatactttacgccaaaacctggtgcatgcactgccacctatgcgcgaccactcaacgtgtcaaaatttttatgtgtcatcgtgatgctaggcgctcacgaattcgtttcctctattttaatcaacccaatgtctccaaaatatgttcttttatcaatttgtgcattcatccgagtccatttcgggcgtccggcgaaatttcacagcattcacccttcaagtgtagacacattntccaaaaatcggttatgatcaatgaattttttcatagaaaagttggaagtgatctctntcaaaagcatgttggtttttcagcttgacaacttacttcttctttactctccttcttttntctatca

SEQ ID NO: 257205 - DNA, 383 bp, Glycine max
  unsure (1)..(383): unsure at all n locations
cttaagtcacctgcgggcatgcagcttgtgttctcaattgtgagcgttttaatttattacggtacccaatcggacatccgagtaacaattattgtcattngaatttgctaccaaattccgctttcaacttggagcaatttaatatattaggggactcaattggacatccgagtaaaaagttattgtcgtttgaatttggtacgagcttctattttcaanttggaatgtatcgatatattacgggactcaatcggacatccgtgtataaagttattgtcatttgaaaatgctcagagcttctgatctcaattttgagcgtgtcgatatattatgggactcaatccaacatccgagtaaaaagttactgtcgtttgaatttgcta

SEQ ID NO: 257206 - DNA, 465 bp, Glycine max
  unsure (1)..(465): unsure at all n locations
ttgtgcagtttcgaatgacaataactctatacactgttgttcgtttgagtcccgtaatataacgacacgctcaaaattaagaacagaagctctgagaaatttcaaacgacaataactttatactcggatgtcctattgatgtgcaatcattttcttctattntctaaaccctttttgcaccattttaattactgattggtcttaattgtcaattaatcaggcagttttattatttgggctcatttagctaattcgatgtttttaatctaatttcacgaattaatgaaacattgggcttaatccgaattttggttatggacttgaagagggcaaataaagcagcgcttaccttagttaatttccaattaggaaatttcgcaattntattttatgttgttcagtgtttatttcgttttgggccacagtattggaatacggcccagcgactttgagtgactcttttaa

SEQ ID NO: 257207 - DNA, 473 bp, Glycine max
agcttgcttgtggggctatgatggaggctggatctttgagcttcaatgagggcctttaatggtgattgtccaccatggagatgcagcgaaagacaaaggagaaaaggtgaaaggaggtgccatccactaagtaataagccatggaagaaggtgcttcaccaccatgatgagccttggaaaagaagcttggaaggatgcttcaatggagaaaaagaaagagggagagaaagtgagaggggggagcacgaaattgaaggaataaaagagggagagaagtggaactttgaagtatgtctcacaagactctcattcatcaaagttacaataaatgttacacatgctcctatttatagactacgtagcttccttgagaagctctatttagaaaacttccttgagaagcttctttgagaaaacttccttgggaagctagagcttagctacacacacctctctcataactaagctcacct

SEQ ID NO: 257208 - DNA, 337 bp, Glycine max
  unsure (1)..(337): unsure at all n locations
atcctactaggacgactgaganaactggcgcacacgaatacggtgagaaacaggcagaaacccacgctgcgaatgccattcctatacggtcaagcttcccacccacccaacaatgccattactcagccaataacaaacctcctccttacccaccacccagttattcacaaaggccatccctaaaacaaccacaaagcctgtgtaccgcacctccaatgaccaagaccacccttagcacaaaccacaaaaacaccaacacaaaggaatttcgcagcacaaagcccgtacgggtcaccccaaattccgctgtcatatgctaaacatgaccccatatcca

SEQ ID NO: 257209 - DNA, 359 bp, Glycine max
agcttagtcccacgtagcgaatatatggtttccgccatacgccgcgttaattctatgcaatatgatgtctatacccagacggaggtcagtaatggcaaaccatcgaggcggttccggcaattttgcagaagaccgcgaaagagcatcagaagcaggtaaaaaaggtggacagcacagcgggggtaatttcaagaatgacccgcagcgcgcatctgaagcaggtaaaataggtggtaagagcagtcacggcaaaagcgacaactagccgggctaatcaatgacgaatgcatttttgtctgtagctcgtcaaaaagccatcaccgccggttacccggtggttgatactgatgacaaatgta

SEQ ID NO: 257210 - DNA, 339 bp, Glycine max
  unsure (1)..(339): unsure at all n locations
ccaccgcgtaaccttgtgttatggtcttttgaccagctacagacacaaatgcattcgccattgcttagccccgctcgttgtctcttttgccgcgactgctcttaccacctattttacctgcttcacatgcgcgctgcgggtcattcttganattacccccgctgtgctgtccacctcttttacctgcttctgatgctctatctcggtcttctgcaaaattgccggaaccgcctcgatggtttgccattactgacctccgtctggtatagacatcatattgcatataattaacgcggcgtatggcggctgccatattttcgctacgcgcgactaagcttg

SEQ ID NO: 257211 - DNA, 445 bp, Glycine max
  unsure (1)..(445): unsure at all n locations
gatccttacagccacctgcggctgcaagctgtgagcttacttagctgctgtttacagtggcttcactttcagcagcctgctcaaaccaatcctattgattaccaccatccagaaccctatttgcaaataaggtaattaatgaaaatttcttttaagcatatgatcgatagctaattacaccaaaagttaaatagacaaacatactagctagtgttaataaattcttagcaaaggtaatgtgaaataaaattaagatttcaagaacaggcgtggttatttgtccaacaactaacttgatcacactncanacccttaaacaaacttttgcaattaaaaccttgattaaatgaaatatgaagatgtaaacacagttagaaatgtataagatacctttatttcatgactaagtttgggtcaactttatgccatatgtcaaaattcaatt

SEQ ID NO: 257212 - DNA, 367 bp, Glycine max
gctggagatggtgatctaagggtgggagagcccaacgtgtctatatatgagcccgagaccgaggagggggccgccatacgtgtgatgccggcggcggcgcacgtgccggcggggatgtctatgtccatgtccaaggctctggcccaggcccaagcccaggcccaaccacaaaagcgggccttcaccaaagaccgccacaccaaagtagaggggcgaggcagaaggatccgaatgcccgccacgtgtgcggcgaggatcttccagctgacccgagagctcggtcataaatccgacggcgaaaccatccggtggctcctcgagcacgccgagcccgacatcatcgccgccaccggtaccggcacagtcc

SEQ ID NO: 257213 - DNA, 280 bp, Glycine max
  unsure (1)..(280): unsure at all n locations
ggaacaataatagagtgtgncaaaaagatagtgaccaanaatgtgttttatcactgctacaaaaactaaacgacagtcatctttaaaaaaactaaaaacaaatcgaattgttaattgtttgaaacctacaactaaaaaccagtgcaaataactcacattaaattcaagctaatatgaataatgaatatacaaatacatgatgcaatacattcctgtgcctgtctcatcatctcatatcactattatacttcctgcatctcaattgtacggtcgttcacaa

SEQ ID NO: 257214 - DNA, 396 bp, Glycine max
gcagctgcttaattaacctgaaattgagattatatgtttattaaacacacaaaatgaaagagctaagtatttattacctatacttaatagaaaatacttatactacaaaataatacaatttaccataaattgggagagtttaatacaatttatacaagttttatacacaaaagttagtcattgtcaccgactaacaacaaatatcatggagaggagcttaaaccacagtctcacgacttgtggtttattcaagcacaagtgtttaagctattcatcaataacaactagcaagaggtccaatttttgaacttcatctcaagccataaagtcagaaatgcataaatagaaatagaaggacttttacaggcttgtagtgaggctcggctacaaatataa

SEQ ID NO: 257215 - DNA, 460 bp, Glycine max
  unsure (1)..(460): unsure at all n locations
aagcttattaccttgacatatntctaattgtacagntatatgagatatatatgttccttcacaaaatagctacattcttgaggtcatctttcttcaactatgtcataagatgaactggcattgagttctgttatttgcatggttcattaattctctctgcacgatttttggttcaaatttaacataaactattatatgctattaccttatgattgtatccgttattggcatgcagagctaaatatgacccaaacagtgatttattggatcacgagttcatgctaaaagggaaatggtttcaacagaaggacatggaggtatnagtaataattctgttggaaaatcattgaatccagatgattgattntatcttatntcatagccaataactaaatttccagccacatgctactaaaggatgctacttttgaagccataacctttaccctgagagaaattc

SEQ ID NO: 257216 - DNA, 385 bp, Glycine max
tgcaagcttgttacgttactttcatagggatcttttatttttacaatgttctccatagtctgtgatgatgatcattacagatttgcgtgcacatcatcaacgtagtgtgagtcattgattgaagacatttttgtccaaaaaggtggtgtctcacaaatgtcaagcgtggaaccatcatgttcgtcatttaaaccactttggcttccttgtagaaccactgaatatcttgaatcgtaaggatcttggacgtaaaacacctatcttgcttgttgggccataattaaaggtttgtccatgtaagccacccttatttaggtccattaatgtaaatcccaattcatttcgatggacacctggatgtcattgaccccctacacttaacacc

SEQ ID NO: 257217 - DNA, 427 bp, Glycine max
  unsure (1)..(427): unsure at all n locations
ntaagtgcgatncctttctttttcttgacattctctttatgttgatttattcacatgagttccatntcgtgttcctaaagctttccaaacaaagttgcaagagacatgctagtaagatctcttgattctgtaatctccgttacctttggttgccattccttgcttaaacatcttagaactttgttaataagatcttcattgggaaatatctttcctaatgatgcaagatgatttactatatgtgtgaatctcttttgcatatcttggatacgttcattctgatttattctaaacaattcatattcatgggttacggtatctattctagatctttctacatcagctgttccttcatgggttacttgtaaggtatgcctcatttcttttgattcttgagtgtgtactctaaatattcatcatgctaatg

SEQ ID NO: 257218 - DNA, 422 bp, Glycine max
  unsure (1)..(422): unsure at all n locations
cagaaaatgactactggtgtgagatttcttctgacactgcattatatgtttcaccataccaaaagttgtgatttaaatctcaaattattgtgcacgccttgcgacatgctagacaaattgtacaggaatcaagtggagatgttcattatggtgggggtcgtcaacctattgtcttgaggacatttagtcaaagggcttcgcaagtaaggccctttcatggattgataaatgaattgataacttgatgattcatggattctgctccattcctgaaattgtaattctctttactactcatgggcatcttaatctaattcatatgactcctgcaatattataacagnggtagaattacttaaattaactcttggcctacatctttctgtaatgatatttatgaacttaaaatgagtcatacaatt

SEQ ID NO: 257219 - DNA, 408 bp, Glycine max
  unsure (1)..(408): unsure at all n locations
tgtgaatgaatgagttgntggattgtattggtgntaaactcttttaatgaatgagatgaccctaatgaatgttattttgtcacaatgaatcattcattgagattggttgttgttgatggaacttaagaccttaaggcatgtaaattggaagattaaacaggaactgaggcttagatggatctctagtctagtgttggaaatattgatatggatgtgttgcacatgcatttatgcatgaattgattccgtagttgtagttgtagttgtgttataagtgcgcacgcaaactaatagattaaccagagtctacccttatatagatcctcaaccatttcgtgaatatggcggggccgcgacactctcttccgctcctgtcctcttcatgcatcttctccttctcactacccc

SEQ ID NO: 257220 - DNA, 487 bp, Glycine max
  unsure (1)..(487): unsure at all n locations
ctcaagcttatnctcatgcgctaagccactgttggcncgcttagcggttttgtcttcctaaacgcacggatcacgctcagcgagacaacacttcttgaaccttcataatctccttctctttacctcaaaatgaagcgaactctacattaaactcaataggaaggcttccactgagcacaaatgaaaactaaactagaaatatttacaatcctaccaaaaaataaccatcaagttgggagatctatttacatctctggaaacctcttctatacaaaaattagttgtaaaagacaactaacacaagcaatccccttcgctctctaggggtgctcaaaacttttaaaccaatctctttccctctacagggatatccaacaagtcactgcactcccatgtacatacacaacatacatccatcatgatgacatcatccacatcaacatcatctcatgtcaatgacactctcatttcactggcatcaacaaca

SEQ ID NO: 257221 - DNA, 430 bp, Glycine max
  unsure (1)..(430): unsure at all n locations
catgcaagctttattatgtggcagggctttctttcttactctcttgnctcaaccgcgagttttgaccaccgctctttcttcccgcgatgcttctctttatatccgtctgagtgggtttatagcctataccatacttcccacgatttcctttggcatttatcaagctagttatgccgccgttgactttgcctaaacccattccgggttcgtaaccgtttcctaacataacacaggccatcattactgctgcatcgaacagggaagcttgcccagagaaggagtccacggaggaaatgcttaccacctcaaaagactgganagcggtttctaatgcctcctctgcggctttcacataaggcatagaggatgggcagttcacccagatgtcttcctcgcctgatacgatgaccagatgcccttcactacgaat

SEQ ID NO: 257222 - DNA, 472 bp, Glycine max
tttcgattcattctatgtacccgtagtggcccacattgttttcttgcatttaattctcgctgtgtgactttttataccccctcttgacgtgcttaagccattctacttaagtcatttctcgcttaacttaaaaataaaataaatttccactgaacgtttgaattgtattatccgctaacttcggctaaaatgaattctgaccgttcggtcgtgccgtaaccacgttggaaatcaaaaagaggtaaaaaataagataataatcaaaaaacatcttttagtaaaataaagcggaaaatcaatcggacgtcttctctttgggattcctcattcttaatcgaattgattaataactaaagtgaaactaaaggctaaaatcaattcgcctagtcaagctcgtccataaaaataggcttttgaagttcgtcatttcaatctctcactaagtaagatggatcatttataagggccaacg

SEQ ID NO: 257223 - DNA, 424 bp, Glycine max
  unsure (1)..(424): unsure at all n locations
agctttcacatctggctgagttatatattttatagagcncgctcttattattctttatgaattggcccaatgtcgaatggggtttccatcctttatagggcatgttcccgtctcttcgggccttatacggaaccaccgtgcttgtgcattagtatcaggctggagttataagagtcagctctatccattgtactcttgtaaggtgctctattcggttgtgtgcatatgaatctggattgattagcgatgacattgatggggaggagccattatcggcgggtatgtggtatgagcttttgactatggaaggcattctaaggacgcgcggaataatctgcaacggtgacatataatctgtgtgttatccggattttttttttgggaaaaaggaatattctggatttatctcctcgcctgctgatga

SEQ ID NO: 257224 - DNA, 408 bp, Glycine max
  unsure (1)..(408): unsure at all n locations
gttaagtcatatctacagataatagaagcgcgtatcttttctttttagctctgaanatagtggtgaaacccaagtccaatagtggaggatggggagcgggaacaatgaacacattataatctgaagttaagctatgtacatacctcctgaagacaggcaagacattttctatataccaatcaacagttgcttgaacaggtgcggctttgattctcgtagctcttatgcccgcgccatagtactctcttgtactccaagagtagtcactatgaagctccttcactatggacacttcatcacggaggtcatcaataaagtgatccacgtcaaatatatctgccaatgaactgcgggaacacaacaacttcacataaatggcaactttccagctggcaaattaacatataa

SEQ ID NO: 257225 - DNA, 444 bp, Glycine max
tgtgaagaaaaaccattttgtagcagagaatataatgtttcctcatacaatacggaaagataaacatgttattgagggctcttgtgcaaatacaacgaaaaatgcaattaccatgttgctcctcttagcctcttcatcgctgtcattaccatcatcaccaatagctttcctggaaaagtacatggcatttttaaatgtcagtacatcaataacaatatgcatatcaggagagtgaaacaacaaaacaaacagatactggacttcaaaccttctttttgtaatgacccgatcatcaggaccagcctcagcatggccatggccatggccgtagtcaggaaccctgctaacaacgtccctcagaaagtcaaagacattatagctctgtacacaatgttttctgcaatttacattctccacttgttagacttgactccatagttcata

SEQ ID NO: 257226 - DNA, 415 bp, Glycine max
  unsure (1)..(415): unsure at all n locations
tgataccgacatgaagntggtatgtctattgaattaagagacaactttagtcatgaaaatgaatcaataactcatggacaagaagaacattgctcttaaaagaacaattatgagaaattatgaagaagcaacatgtgcaaaaataaaccagattgaatagtcatctttaaattcaaagaaacattacatgaaggaataatatgaggatctgtacaatgaatatgacacgaagaacaacatagttgcaacacacttagaatggaatatcatcaccaagatgagttcattcttgaaatttgatctacagctacatatatgcatttgagttggcttgagggagggaaagcttgaagaaagatattgaactttcatgaataactatggagtttatacaacttggatcatagaagaatct

SEQ ID NO: 257227 - DNA, 338 bp, Glycine max
  unsure (1)..(338): unsure at all n locations
gaagagatggcgcttatcgcaaggtttgtgcttatcgaataancaatctgaaaatttttctaaggcattttttgcttatctcttcacacatacttagaaaaaccctttttgttcattactaaagaagctgaaataaatcacaatcacaagtaagatgtcctaactacatgcaagaaataaaaaatgaagatagagaagggaaagaaaggttgggttgcctcccagtaagcgcttctttaacgtcactagcttgacacatcatcctgttatccaggatccaataaagttcccacttcaaggaccttcttctcaggtcctctttccttcatcgcatgaac

SEQ ID NO: 257228 - DNA, 440 bp, Glycine max
  unsure (1)..(440): unsure at all n locations
agcttatccctcttaagattatcgaggcctctttgtttaacatttaccattgtcttttaaaaaaaaataaaaatctatggctggtttcaggcttgtgaccaaccacatccactgcatgtgaagaatatggtgcataacatgattgaagggaatnttgatgaagcttgttcaggtgcaatcgtatgacttgcgatattccctcacatatatcatcatgacacttttttgtataataaaaaattatgatatgaccaactacctgaaattggaattcatgaacgtagttaattatttgttgatttacacacatacatggataaagtatctgactggcataatcttcatattggaggaaactgggtttgctcatgacaattttcatggagttggtgttgaattctangggatcttaaaaataccacaaccataggaaccctaac

SEQ ID NO: 257229 - DNA, 456 bp, Glycine max
  unsure (1)..(456): unsure at all n locations
tagtaaagctaggcactaacactnttttcggagccccatgaatgtcattgcctagtgctgttcatgtgtcctccacccttttttcgaagccccatgaatgtcattgcctagcgctgttcatgtgtcctccacccttttcggagacccatgaatgtcattgcctagcgctgttcatgtgtcagttgttcatgtgtcctccacccttttttcagagccccatgaatgtcattgcctaacgctgttcatgtgtcctccacccttttcggagccccatgaatgtcattgccttgcgctgttcatgtgtcttccaccaacgagtctggagccctgcgaagttatgcgtagcgctgttggccattcttattctccattttttcggagccccatgaaggtattgcctagcgctgntatgtgtcttcattatcagcgcggagcctcgtgactgggaagatgttt

SEQ ID NO: 257230 - DNA, 384 bp, Glycine max
  unsure (1)..(384): unsure at all n locations
agaacgaaatgcacttcttgcgttgcatatctgttaatgcgctccaactattgacattgtgttccttaagagttaacagaatgtttcttggcttcaccatggactttgncatatcaacaataagtgttgtttcagctttagtcaatcaccccgcatatggatgtccaactaatgacttggccaattcgtgattatgcacaccacaaatcaacttgaccatccagccttctcctccaaccactggcttgcaaccaagcttgaagggacacccacatttcctagtcccagtgtctcttctgataaattctttattcctacacttatacttgccacgtccttcacagccaattaacacacacgtactccttcctctactacctgtgt

SEQ ID NO: 257231 - DNA, 439 bp, Glycine max
taggcctagtgtctcttcttacatattctttcttcctacacctatactcggcactcctttcacaaccaattaacacaaacgaagttcttcctctactaccagtgtttgtgtcaaaccttataatcaccgccacaaatcggttttcataagcaatggattgatcccaccgcaaaacatcctctcggctatcaaacatgtacaaagcaatccacattatttcagttttctacaacatattcattttattaaatcactcacaatcatcaacattattacctgagaagtattgaacgcttccgaacaatcgacatgtggttcattcacaccacattcttctttattttcataatccatattcactacctcagacattatacttttatacatccactgatcttcgtctccgtccatcttaacaataaatgaaaaatttcaacac

SEQ ID NO: 257232 - DNA, 459 bp, Glycine max
  unsure (1)..(459): unsure at all n locations
ntatgcagacactatttaaacatacttctatagaacgtgaatgtacttgtatagaacgcataaatattataaattgattccaataacacaatcaaatctttttctttcttaaaaaaatctatttatctcaatttaacttcttaataagaaaaagaaaatcattgaataattatgtaagtttttttatagataaaattatgtaagatttattttagtcctttcatctaattaatagataaattaagaactaagagtgtcttatataatttttctaaaaccaaatagatataatttaaactttaaagaatatagaatgtcttgaaaaaatatataaaatgtagtgatagttcacttaagttctttttcttagaatttggtttaagttaataattgaatttttaacaacttgcataattattattcatgtgtatgcatgtattctatctaaatctcatctat

SEQ ID NO: 257233 - DNA, 301 bp, Glycine max
  unsure (1)..(301): unsure at all n locations
tcctaatggaagaagaccaatcacacaaacaacacaatgaggagagtgtgagtgacaggtcnacaactagggtgagacagacaaagggtttgggctccaaacctttttttataaaagaccctacaacattgatttttaaatcacaccaatgttattcaccaaaaactcaacatctcattttttaaaaattgatgttaacatgagtccattaacctcagcttttcaaaaattaatattaacattgcttttttcaacaaacgatgttaacaacaaataacctatgttcacggattcatattcc

SEQ ID NO: 257234 - DNA, 375 bp, Glycine max
tggggcttgcgtgcctaatgcagctctggcttccttaacgtgcatgaatgaatttcaacttagcacccaactttttcggtagcaaatgcatgcaaaccgtgtgcttaacaagatgagctcttacttagcgcatgtgttcagctcatccttcttccaaatttcttctcgcgctcagtctcaagagtggtgtgctcaatggatggctcgctaagcccacagattggcttagtggagagctaaaaatcagcacttcacaaacttgcctaattaacctgaaattgaaggaaatgattattaatacacaaatgggagtctaatgattttcctatatttacaaaagtattcaacctagaaataccataatggagtagtaga

SEQ ID NO: 257235 - DNA, 159 bp, Glycine max
taaacacgcagagcagctcagaaagggaaacctttttttggagacagcccagcggacacaagcgataagccaccgacaaggccctggaaggagactaaaaatactcccaaaatctaatgggactacccaatttctgggacggaaagaccccaaaccaaa

SEQ ID NO: 257236 - DNA, 343 bp, Glycine max
caactgggccttatcaacgcgtgccgtatagatcccatcaatcttcacaaatgaatcagatcacagacgagcaacaaaatttgaattctgggaggagtgcaaatccctctgagcctgagggaatgtgaccctaaccaaaaggctattgctcagcacgactctttcttttttgttatttttcagaatgtgaacgaaatgctatccatccctgaagatttgagtcattttgatgctgataaaacatcacataagaaagaaaaaaacgctgaaatgactaagttttgctattgaaattggtgacataatgaagtatctgcaagatggtttgatggtggctaaaggg

SEQ ID NO: 257237 - DNA, 448 bp, Glycine max
  unsure (1)..(448): unsure at all n locations
gcaagcttacgaaaataaagtgtaaacactctatcttttttttccgctaattgtctaattntattggaataagttacaaacaacttatacaaaagttatgtgccaattttataaacataaataagttttttgaaagctcttctgcatgcttgcttaatccaacattgtacacatagataaatgacaaactgcaaaccaccgggtgcatggcagatggttgctttagcttcatctgtgggcttgaattcaactaataggtatgtaattatgttaaatatttgtagcatgagtttttttacatataataataataatcttatttaactcgagcaaaattaactcctgttgaggataactatggtctcgtaccaaaaataaaggacaaaccgagatgctgtaatacttcattaacatattgtacatgatatttcatcaatctatgcttaaa

SEQ ID NO: 257238 - DNA, 446 bp, Glycine max
aatattatatattattgtatcttcttcttctcatactattattttcatggggtgtaacatagggaaaatttagcttggtttcttaaatatgtcctcaagtaagcaactacatatattctaccatatattaacatatttaatgacaatttcataaactaaaagtagaatcaatattatattttaaatattcatttcccattttttttatataggttgacattcaaacaacacataggagtttgtttcctgaagatttttctactagagtattgtccaagcaaattgatcaaaaccctccagcatcatcttcatcttctatgagattaatctccacatgaagccctgaatactaatactttgttatcattgtctatgtatcctgccaactacaaattaatcttactcttcaactaggttatcaagtcaaacaaactctccctaaaaca

SEQ ID NO: 257239 - DNA, 332 bp, Glycine max
  unsure (1)..(332): unsure at all n locations
tctaccgtagaacataaatgttttcttcttctccatccgcatcgcgaaacaacacaccttgaatatttaatgcttaaaagactgtgacaatattttttattatcaatgcgcctattatttctaacgcattcaagctatttattttcaattctaacttattttatcctctgacttaaattctaccattttgaattaatcaaactctgatttatagattaatacgacttgaaatctacgtccaaatcttagaattatcacgttccatctatctaaaatctattaactacaaagctgaatactatncgtacataacaagtacattcaaatttatt

SEQ ID NO: 257240 - DNA, 468 bp, Glycine max
actataaaactcagcttatagtttgagcaatccttcaagataactgttgtatatattttaagagtatcaaactgtttggcaatattttgagattgcgacagttgtctaatttcaatatctgtaaattccacaatttacatagtgattctggaagagtttcaaactcacccccagaaagattcaagtaccttagatgttttaaatcgccaattgaagatgacaattcttccctttgtcctaagtgaagcatccgcaaagaagaacatttcaatacatcaggagaaagtgcaccaccatgttgatgtggcaatagataagtcctcaaagattccacttgatgcaagtggattgaatcagaccttgacctatgatttgaaagatggtgaattttttcgatcaaaacagttccaccattgtcatctgtgatgcaactaacatcttctgtgacagattgtgcaagatcatgaa

SEQ ID NO: 257241 - DNA, 243 bp, Glycine max
tggagatatgtcgccggggtcacgagaccttggggaccttaagtggggtgctatttgccaaaaccatgcttgaccaattccgacccaaccccggcatagtcagtcagtgagaacttgtgatgtacctaagcaggcgagctcctggcagtcaacagatataacgaacaaagaccacacagcaaggaggcttgtgtggtggctggccaactgtgaatcttgtgtgatatatggggtatggtcttt

SEQ ID NO: 257242 - DNA, 389 bp, Glycine max
  unsure (1)..(389): unsure at all n locations
gatgacgaagtntagaggggtgaaacttcctgcttctattcgttgaccacagagcggtacctggagatatgtggcggtggtcatgagaccttggggacctcaagtggggtgctattgcccaaaaccaagcttgaccaatcccgacccaacccgggcatagtcggacagtgagaacctgtgatgtacctaaacaggcgagctcctggcagtcaacagataaaaggaataaagatcacaaagcaaggaggcttgtggtggctggccagctgtgaaacgtgattgatatatgggatatggactctggtaatcgattaccaagggtgggtaatcgattacaaggcttaataatgaagacatgaagctaagatggtctttggtaatcgattacc

SEQ ID NO: 257243 - DNA, 347 bp, Glycine max
aaaaagcgtgagaagctagcaattataataacggaacggtcaaaagctttacaatgttgaaaaaaggagaaagggaagaaaacaaccttgaggaaagtgggtgatttgaatgccgcttgaagccagtgtgtccaggtggtgctcggggagggagctaacattcccgaaagcgttgatggcaattggacctttgatcccgttggccctcacggcctgcctgattgccggcgcaaccttcaaagggttcacgtcatcaggcaccgggcagctcctcaaatcccaccacaccgaaaccctaacgtatcgggagtcacgaggaggagaagaatatgacgatgacagctcgc

SEQ ID NO: 257244 - DNA, 445 bp, Glycine max
ctgcatctgcagatgcatacatacagcatatgtatttttttattattatcgcaaattcaacccttcttagagataacagtggcataatgatatttggtaagacagacgaaacagctggcaactatgggagaactacagccatgttgctgttgacactggcaatatcagtcaagtatctgctgtgtcttggtttctcttcatttgctggtcaaattaaatctatgatacatatgccctctatatgacttgaagtaatacaatgattttgttttttagtattattccctatcctgcatgctatatgtcttgtatggcatcttccttacgctctgtctatattgatggaaaggaatgaataggtgttggaaacaattggcatgtggaggtcactagcttaagttgctgaaactagacttctctaacgtattcaatctgaataaactca

SEQ ID NO: 257245 - DNA, 292 bp, Glycine max
  unsure (1)..(292): unsure at all n locations
catactttgaatcacattgttttgaaatgatgttntaagggttgatcaactcgcgctcttcttccgtttccttgttctaagaaccttctattgatgacagggcttcgaatgcaactccacttgctgaagttggaatctgatgaatatgtggaggggcccatggtagtaagtgatgaagatggtggggaagcatctactggaatgctataagacaaaggattacctacgactgaagatagctgggagtgctctacattattgatgccttgtctgaatctggcatcgatggagc

SEQ ID NO: 257246 - DNA, 438 bp, Glycine max
  unsure (1)..(438): unsure at all n locations
tgcacgcctgcaagctngctctaaanttacattgatgttatgggtttatgttgtntgccatctttgttttaagagtagtgtcccactggtaaaactaactttccaaatgtttgccttctcaggaaatggccccaaggaagcttgcctcaaagaggtccaggaaggacaaggcatccgaaggaactagttccgctccggagtatgacagtcaccgctttaggagcgctgtacaccagcatcgcttcgaggccatcaagggatggtcgtttctccgggagcgacgcgttcagctcagggacgatgaatatactgatttccaggaggaaatagggcgccggcggtgggcatcactggttactcccatggccaagtttgatccacaaatagtccttgagtttatgccaatgcttggccaacagaggagggtgtgcgtgacat

SEQ ID NO: 257247 - DNA, 352 bp, Glycine max
aggaaaaggaaaaggaaaaaaggggacaccgaatttatgcctcaaatgaggtctgaacctttgaagtgttaatttctcaaatgatcaaagttgaaaaaatgcacacacaaggcttctatttatagcctaagtgtcacacaaaattggaagggaaattgaatttctattcaaatttcactcgaatttgtggagccaaatttggagcccaaaatttacttattatgattagtgaattttagctatggttcagcccactagtctaagatcaagtccatgattcttcactaagtatgcttaggtgtcatgaggcatgttaagcatgaatgacattgcacacatgtgactatatgat

SEQ ID NO: 257248 - DNA, 340 bp, Glycine max
gaaggacagccatgagggtgggctcatgggccaccttgggatagacaacaccctcgtcttactcgaagataaccctatgggccccatatgaagaaagatgtccatcctcattgcactacgagagtggcttgtccacaaaccaaggctagggtgatgcctcatgggctatacacacccttacctattcaatctgcgccttgggtagacattacaatggactccgtccttgggctccctaaaaccaaaggacgtgtagactctatctttgcggctggggacagcgctactaatatggcacactatataccatgccacaaggtggacgatgctttcacatccc

SEQ ID NO: 257249 - DNA, 423 bp, Glycine max
  unsure (1)..(423): unsure at all n locations
ttagcgagcccaacaacttgagatgcctgggttttagcgcttancacaagctaaccttgcttagcgaaagaaagagatgccactctccgtatgatatgggcttaacgagtggactattttcatgaaaatggtttaaattattttcaatccacttttgtataaacattataatcccaccccaaatatctatgactcattataagttgatatccccctttctcaatgattataaagcaaatttcaacgtatgcaatgcatgaaaaacaaaatgaaaggaatcaaaactgggttgcctcccaggaagcgctcctttaacgtcattagcttgacgcatatacctcaatgggtgataaatatatggtgtgtgagccttttaaaatctccacatgggacaattcacctctgtcatttaccaccatgttt

SEQ ID NO: 257250 - DNA, 338 bp, Glycine max
  unsure (1)..(338): unsure at all n locations
agtttcctaacgatttctaattatgtgggccattaagtctatcatatgctgacaatagccgagaagcccatgaatctcttcgggggtggagtaggtgtctgccatcgccttggcctttgctaacaatcggggaagttcttgactcccattcaaggtaagagcaaaccgatccatccacatggttgcctcttggtgtaaagagtcgatcacccttcctctagcctctttttccgcatatacttgagcatactcatccgngattntatgctcgtgggccgtggctagacctaactcttcttcgtacttggcgatgatagctaacatgttggtctctgtct

SEQ ID NO: 257251 - DNA, 434 bp, Glycine max
  unsure (1)..(434): unsure at all n locations
tcataccctaatttcgtttgttatgattcattttcaaaatttggattcttgctagacgaagtaagctgcttaacaccaattgtcgcacattccataaggtttttcgacgtttcgggagaaaatgtgcaaaatactcaaaaggagggcagaaaggtcacttttggggcatttttcaacccctgagcaacctagataacttcatgatgaagtaaccagctcgcctgngtgagcacaggtcaaggcgagtagggttgcttcagattgaagttatcagctcgcctgggtgctaccttcatcccaaatggcttgttttgctataaataagcgtgggaaggctgaagtatgttggacaagtggcctcaataacttataaggggaggcgtgaattaagttttatgattcccactaacaaacttttaacccctccccccctt

SEQ ID NO: 257252 - DNA, 395 bp, Glycine max
ccatgtgtcaagggagagtatctgatgcccgaggtcctcacctcgacatgtggaggtgacgagtttgtcgaaccccatgtgtggatgagtgtttattcgatgtcgagtgttgtaacctcgacaggtgaaagaattgtaggttgatgtggcttgtcaagcccccgagcctggacaagtgttgttcgagctgcttctgtcaagttgtctgggatggacatgcatttgacgtgtcatgggaaggaagtctatagatttgaaacctctgcccttttctaaccattggagagtacattgaagacagttgttacattttgtctgctacttgaagtgtgtgcaacgcacatgcaatactctcgcatacgtgttactcactgagtgaacacgtactagagacg

SEQ ID NO: 257253 - DNA, 371 bp, Glycine max
acaagtgccaatgccgaattctgattcatggcaagctgaattactagggtgaccaaagcatcaaagtttccctcaagctttttatttttagtagatgaaaatgaattggtggccacctcatggactcctctaaggacaatagcatcatttcttgcactgaattgttgggagttggaagccatcttctcaatcaaattcctagcctcagcaggagtcatatcaccaagagctccaccactggcagcatcaatcatactcctctccatgttgctaagtccctcatagaaatattgaagaaagagtttctcagaaatctggtggtgatgggagcttgcacacaatttcttgaaatctttccaatactcatacaa

SEQ ID NO: 257254 - DNA, 460 bp, Glycine max
  unsure (1)..(460): unsure at all n locations
taagcttntttcggaccttgaacaggcaattaactcctctttcaaaaccatgctatgtgctcgcgactggtccctttcttcccttcgcaacttgagttcactattgctaccccatagagctccgcgaaatttattccggccatactcttccttgcgagccctcttggtctcttgttcaagggctcttgcggtaattgcattctctttccgtaacccggcacactccttccgaacgtgtgtagcggccaacttgaacttctccttggcaagtttcgccttttctaactcgcttttgagagcttggacttcttcgtcctcttccggtgcttcaaaattctcttcgctgacgacttttaacttggcgagccaatctaaacctcgtatatgaactttcagccattcgtggtacccaccaatgatgccattacgaatgcctctaagctcttgatctattccttac

SEQ ID NO: 257255 - DNA, 443 bp, Glycine max
gcttaccgcaacaaccgcgttaagcgcctattcaagcatttcaaaaatagtaagggattggagcttatcgcatcctaccgccaagcccaactcgtgaaagttcaattccagaatgggtttgaggcttatctcaaaacatcgcgcttagtgctgccctaaaagattttccagagaaaaaatggcgcttagtgcatcacctccagctaagaccactacttgaagttcaattctggtgaagatgtggggcttagcgcaatgatgtgtgcttagctgaactatttagccaatctatccaggggtctaagcacttagcgcgagcaaggctcacttagcgcgtgaagacatggcgcttaacacaagatgatgcgcttagcgtgtgaacaactgacaaatcttctaagttctttttctgttcacctcttcaccaagctaatgataccttt

SEQ ID NO: 257256 - DNA, 441 bp, Glycine max
  unsure (1)..(441): unsure at all n locations
tcacaaaaggcatgcaaagagggtggaattcctatatctattcccttatgttatcaaacataataagggaaaaggtgatattgtagccgatgctctttctcggcgtcatgcattactttctatgcttgaaacaaaattgattggtcttgaatgtttgaaaagcatgtatgaaaatgatgaaacttttggagaaatttttaaaaattgtgaaaaattttcagaaaatattttctttatacatgaaggctttcttttcaaagaaaacaaattgtgtgtgcctaaatgttctactagaaatttgcttgtttgtgaagcacatgaaggaggtttaatggggcattttgtggtccaaaagactctanaaacattacacgaacatttttattatcctcataagaaaaaggatgtgcacaaattttgtgaacattgcattgtatgtaa

SEQ ID NO: 257257 - DNA, 272 bp, Glycine max
aatttaattgcgctgatgccttatttataacatattaactagtctgttgtgttaacatgccttatgattgatgatgatttcctagtttgcattacatcaccacctcaaaatataatagtttatatgattcatcctatagaaaatgggggagaacaagaatgatattaagataataagcggcgtaccgaaccaattgttgcaggtgctaatacaacctttagattgaccttttgcactaatgtttttaatggattcgtactctgcttatgttt

SEQ ID NO: 257258 - DNA, 450 bp, Glycine max
cgaactcggcttgagttaaatacgcaaggcttgagttaaatactcaaagcttgagcttggctcattacctgtcatttctttcaaaggcttggctcggcttacataaaagactgacttggcgtacccgcctatttaaaaacttggttgaagacgctcttgatcaattaattattttaaaacctataaaaataataaacttataaaattctgtataagtaatgtacaaatccaaaaataattgataaacaaaatcctattaaattcaagtccttaaaacacaaagtatatcaaaagataatgataaaaaagaacataatatttaaagatgtatggattagaaatgatttatactaatatagccaaacaaaaatatttaaaattgctgaaaatgtctctataaaacattctcttccttgaaagtattaatctggttgcattatccttttaact

SEQ ID NO: 257259 - DNA, 403 bp, Glycine max
acctacatcaaaatagctcttttgtcaacaacatcataatgcagttttgatataccttcagaagcttatcataatggttcttcaaaatggaaaacttcataatgaacttagacctatcaagtcaagtatagctgacacacttttaacttctacaagaagtttttgtaaagctaagggccctacttctaacaactctttacttagggcatttcaaacttgaaggaagcttttgaagagagaaaagaagagactcagttgtaataacaactagtttctatgggtctacaaaattgttagaggacaactatagaagttgtgagagaacgtaagagaccacctacacagtgaagaaacataaatcacatgctctgcaccctccataatccttctatgtgctaaaagg

SEQ ID NO: 257260 - DNA, 221 bp, Glycine max
  unsure (1)..(221): unsure at all n locations
tgttgatacctccatataacctgtgtagagactgacaaacaagggttattaaagctcctgtcagattgggttatgctgatcttatagcttatgctttgagtataaaaattgatgattaaggattacaactcacttcttacaaagatgccatttcctgaaccgacaatgatccgtggagatcaccnatgcaagatgattttgactctttaatgaagaatgat

SEQ ID NO: 257261 - DNA, 374 bp, Glycine max
ttcagaaatttcctggtacgcacatgaggctgggaagaccttcttaatacacgagcttaaatataaggctctgggggggcaacttgttgctcattgttattttcaattgattcctctaacatagtagtctcattcataggggtttcttggacatcattcacctctgtgtacactagcccactcttgtttgaagtgctagtgtttttgttgtccctatccttgtacgttactctttcatttaagatgacatctctactatggatcatctatttaattccattatctcatatgcggtagccaaactcatcttcaccacaatcgatgaaagtgcacttctttgagttaggatcaagcttattcctaccttgatcact

SEQ ID NO: 257262 - DNA, 427 bp, Glycine max
  unsure (1)..(427): unsure at all n locations
tgtacaggaaataatgaaaatttcgactttatgtaagcatggttgtcccgctgtcttattttattagaattaatatagaaattttgttattaacctcatctattattttattagaattttctttttttgtattattttattagaatttttaattnttttaaaaaaacaaagacattctaagatggttctttgaaaaaccatcttagaaagtatacattctaaaatatattttgaaaaaattatcttagaattcttaatatttttaatttaaaaaaaaacgttctagccatcttaaaaaatataccttttaagaaggttctttgaaaaattgtcttagaatccttaaatttttttgtttttttaaaaaaagaacaaggattctaagacagttttgcagagaactgtcttataaagtttattttctaag

SEQ ID NO: 257263 - DNA, 450 bp, Glycine max
  unsure (1)..(450): unsure at all n locations
ctgcaagctttatttagttaattagcccaatgaatattttatttntaatggtgatggacatcactgtattntattaaatcaaatcaaatgttgagacttgagacatggaaaaaaaaggggaccagcacatggaatccaagacagagcttccaaagtgctatccagcactttgtctactgaaatttccctgacaaaagatataagcagtacctatcgttgagattttggttgttaccatccacttggggttacaggtgtagaatttttctatttattttttttagaataaaaattatttttagttcctatatttttgttaaatctaatttttagtctttgaattcgtacaatttagttactaaattttataataaaaaaaaaaatatttatagtctctccttaaagcttggagttaaaaaagtgcacaacttcataaactttatattttcc

SEQ ID NO: 257264 - DNA, 387 bp, Glycine max
cagcttgtcaggaaataatgaaaatttcgactgtatgttatcatggttgtccgtttgtcttattttattagaagtaatatagaaactctgtattaacctcatctattattttattagaattctctttctttgtattattttattagaatttttaatttttttaaataaacaaagacattctaagatggttctttgaaaaaccatcttagaaagtatacattctaaaactaattttgaaaaaattatcttagaattcttaatatttttaatttaaaaaataacgttctagccatcttaaaaaatataccttgtaagaacgttctttgaaaaattgtcttaaaatccttaaattcttttgcttatttaaaaaaagaaccaggattctaa

SEQ ID NO: 257265 - DNA, 293 bp, Glycine max
  unsure (1)..(293): unsure at all n locations
tttatctacaaactctcgctccacgctagggtcttggtttatgaaacactaccctacgcacaacaatacctattatgtgtatgcaattgaagctgataagacttcttaccaatggtactggttgaaaacagggatcactctggttccttactccgcatgggngaagaatgaaaccttgatgtttgagattcatcgcaatcccagggagcatgtttatgttaagggcacggggatgggtaggatttagcctttgcattcatcgttggggaagggggactttgatgtgcaagtgg

SEQ ID NO: 257266 - DNA, 245 bp, Glycine max
gcaacactatagggttaaacaaggaataaggagttgactagaaaactattgacataacaaatattaagctataaaaggaaactacaattaaagcgtgggcgtctatgaattctctaagttaaaaggatttccctataatgtatcaaggtcttatgctgaaacactcaatcagatctcacataatgagccaacttttaacttgcttgacctcacaactatttaaagagtgctaagcacacatatag

SEQ ID NO: 257267 - DNA, 439 bp, Glycine max
  unsure (1)..(439): unsure at all n locations
agctntntgctatctgtaagacgaaaagcctgatatcactaagagactaacgtcgtctacagcgcccttcgtcaatcgcggccgacaagcccgttaacacgcggagatttacgtcatcttccgcgctcacaagatctgtcatactgacttttgagtcacgctgacgggcggagatacccgagtggttatccgtataaaactttttgctatctgtaagacgaaaagcctgattgcacgaagagactaacgtcgtctactacgcccttcgtcaatcgcggccgacaagcccgttgacacgcggagatttacgtcatcttccacgcttacaagatctgtcatactgacttttgagtcacgctgacgggcggagatacccgagtggttatccgtataaacctttttgctatctgtaagacgaanagcctgatagcacgcagag

SEQ ID NO: 257268 - DNA, 466 bp, Glycine max
ctcagcttgtatcaggaaatcatgggtattgccttccatatacaatttcatagaggccatgggggagggaggaatgaagatgatgggtaattctaacccacttcggagactcgagttagttgggtagggtcaagaaagaaattctgagagagaaagaatgaagatgataacgaggaatgaagacgaagatgattggtttcggaacatgcatatttatactgaaacagaaacaaatttcttgtgattcagcatccaatccattcttttcttttctgggagttggaagatgcagtcacacatgccggaaatggaattactatcactattcttaaaccagtagtgtaccatttcattacaatttctggcatctatatacacacgcctaacccacctttgcccatacccttttcatgtttgaagaggtaacataccaagctatgctgagttgggtttactttctttagtt

SEQ ID NO: 257269 - DNA, 444 bp, Glycine max
  unsure (1)..(444): unsure at all n locations
gcttnttgctatctgtaagacgaaaagcctgattgttcgaagagactaacgtcgtctacagcgcccttcgtcaatcgcggccgacaagcccgttaacacgcggagatttacgtcatcttccgcgctcacaagatctgtcatactgacttttgagtcacgctgacgggcggagatacccgagtggttatccgtataaaactttttgctatctgtaagacgaaaagcctgattgcacgaagagactaacgtcgtctactacgcccttcgtcaatcgcggccgacaagcccgttgacacgcggagatttacgtcatcttccacgcttacaagatctgtcatactgactttagagtcacgctgacgggcggagatacccgagtggttatccgtataaacctctttgctatctgtaagacgaanagcctgatagcacgcagagactaac

SEQ ID NO: 257270 - DNA, 386 bp, Glycine max
  unsure (1)..(386): unsure at all n locations
ctgggggagggaggaatgaanatgatgggtaattctaacccacttcggagactcgagttaattgggtagggtcaaaaaagaaattctgagagagaaagaatgaagatgataaccaggaatgaagacgaagatgattggtttcggaacatgcatatttatactgaaacagaaacaaatttcttgtgattcagcatccaatccattcttttcttttctgggagttggaagatgcagtcacacatgccggaaatggaattactatcactattcttaaaccagtagtgtaccatttcattacaatttctggcatctatatacacacgcctaacccacctttgcccatacccttttcattgttgaagaggaacataccaagctatgctgag

SEQ ID NO: 257271 - DNA, 399 bp, Glycine max
gcagctttgcttctgaagacgaagagcctgttttctatgagactaacgtcgtctacagcgcccttcgtcaatcgcggccgacaagcccgttaacacgcggagatttacgtcatcttccgcgctcacaagatctgtcatactgacttttgagtcacgctgacgggcggagatacccgagtggttatccgtataaaactttttgctatctgtaagacgaaaagcctgattgcacgaagagactaacgtcgtctactacgcccttcgtcaatcgcggccgacaagcccgttgacacgcggagatttacgtcatcttccacgcttacaagatctgtcatactgacttttgagtcacgctgacgggcggagatacccgagtggttatccgtataaacacttttg

SEQ ID NO: 257272 - DNA, 468 bp, Glycine max
  unsure (1)..(468): unsure at all n locations
cttaaaactcagcttgtatcaggaaatcatggttattgcctcccatatacaattccagagaggccatgggggagggaggaatgaagatgatgggtaattctagcccacttcggagactcgagttagttgggtagggtcaagaaagaaattctgagagagaaagaatgaagatgataacgaggaatgaagacgaagatgattggtttcggaacatgcatatttatactgaaacagaaacaaatttcttgtgattcagcatccaatccattcttttcttttctgggagttggaagatgcagtcacacatgccggaaatggaattactatcactattcttaaaccagtagtgtaccatttcattacaatttctggcatctatatacacacgcctaacccacctttgcccatacccttttcatgtntgaagaggtaacataccaagctatgctgagttgggttactttcttt

SEQ ID NO: 257273 - DNA, 392 bp, Glycine max
gcttggaagccattgaccaatatctagctgatatattatttgacaacaaatatggaacagtagagctttaccataatgaacccatgtcgcaatgtcacataatctgattttgtcacagatccataaaactgctttaaaaaggatagctgaaagaaacaaaaaatgattaggtgaaaacactataaagatactcgcttagcttttgactttctaaatgtaagtgttaggaatccaaaaatgaaaagacgcacaggggttttttatgataatgataaagagtatatattctattcattcaaacttacagaccatgacaaaacttaccaaccaaccgacaatagcagagtctttgtcaaaaccggcaaaacgacccctgataaaatcatgctggt

SEQ ID NO: 257274 - DNA, 330 bp, Glycine max
tttttatgtttctaagattaaaataccatttatttttctatttaatgctttctttataaatataaataaaattgtaacctctcacagtatattttttttattaatcaccctaacatttttaaaaaatgttaaatgtaaaaatatatacttaatgtcttaaaagaataaaaaatttaaaactttcttcatttaataagtgagaaagttaataactaaaaatatacaaaattaaaaatgactttaaatttttatgaaacccaaagtattaaataatttttgtgtttctaagaattaaaaacatttatatttttcatttaatactttctttat

SEQ ID NO: 257275 - DNA, 451 bp, Glycine max
tggtagccgcatgaaccttctcatcacactcccaacacagttcattctcatcagcacaacaaagaaccttggcctccgcagcctcacacacgttacactgaatcttcatcctctctaccccaaccaaaccgaattccgggttccaccctcccacacaaaaaaattcctcctttccctcaaaaaacactttcttttccaaaagggtgtctaaatctactgtctactttgcataaaacaatcaaattaacgcaaaacagagttaaaattctaacacttttggagaaagaaacaagaagaatattacaccccctggaattgagagagggacaatacagagaagaagaggtttggggccccaccaaacatatgaacaaggtctcataagtgtgtgagaacagaaataagagcaatatgaacgatattttttgcggccacgacgttcatgtacacg

SEQ ID NO: 257276 - DNA, 441 bp, Glycine max
gataaaggtaaaacttcaaaactttgtcattttttctttcatcttggtattcctttaacaagtttcattatgagtcttgatttaggcatgttcacattggctttttgttacttggtgatatatgatttctatcaatacttttttgcatatcattataactattatatttagctgactttttcattacagaggcaatgtaattttgggacatcaattttaatggttcctcttgttgttgtcctatgttgtgtcatgttttaattcatatttttactatgtttagcagatgtcttctcccttggaaattagtgaaccaatagcatccactcatacaaatgataatgaggtgaatgtacaagttcctgcagattcaactcaagtagaagctaacaatcaagagaatgaacatcaagaagcagttgtcgggagaaagaggaaaaa

SEQ ID NO: 257277 - DNA, 462 bp, Glycine max
  unsure (1)..(462): unsure at all n locations
tctcccccaattntctataaatagggggagaagtgtttttttattatggttcagccccttaggcacttctctctctttcgaatttgcttacaaaaattgtttctgtgaagaaaatccaaggcgaggcacttccgtaacgtttccgtgagtgatttcgcgaaggttttcgaccgttcttcgacgttcttcattcgttcttcatcgttcttcggtcttcaacaggtaagtacctcgaaccaagcttttcgattcattctatgtacccatggtggtccacattgtgtttcgtgtattttccttctcgttttcatttactttccgtaccccttttgacgtgcttaagccactttatttaagtcatttctcgcttaaccctaaaataaaataaatttccaccgatcgtctgaattgtattatccgttaacttccgctgaaatgaattcccaccgttcggtctagctg

SEQ ID NO: 257278 - DNA, 384 bp, Glycine max
  unsure (1)..(384): unsure at all n locations
agcttcatgatgatgaatcaagtatgagtcttgttgttntgatgatgaccaaaagcccccaagaacccaaaagaatgattttcagaatgagtcaacaagttcaagatcaagattgatttcaagattcacgaaaagacatcaagaagaatctagattctcgagaagaaatcaagaagcaacaagtcaagacttcacagggggaagtattgaaaattatttttcaaaaaccaaacatagcacaattttgttttacaaaagagttttctcaaaattttctaagttaccagagtattttctctctggtgatcgattaccacattcctggaatcaattaccagtgttaaaatttgatttcaaaaagcgtttaactgaatttgcaacgtc

SEQ ID NO: 257279 - DNA, 449 bp, Glycine max
ctattgcctcttctagtgtcttggtcttgattattcttcttccagttgcagcatcaaacatcacctttgttttcccctttacacccccaatgaagatgtataattgatcaatctcatcaataacgtgattgggacaattcatcaagaaagtttttacctctcctaagcctcacataatggttcatcgtcgttcctctggtgaaaacttagtatatcgggttggctttgcttctttttgactttgggaagaaatgggctaataacttgctttcaacatttccccaagtatagtgaagctttgagatggatgagtattgagccatttcaaggcatctcccatgagagaaaagtgaaaaactattagacaaaggttttcctcttcattctgggccatctctgttaattgtaccccatatatcatagaaaatggcaaagtggttgtatggatc

SEQ ID NO: 257280 - DNA, 269 bp, Glycine max
aatgaggcttattcacatcaaactccaaccccttaccccagttaacaaaaagtaggaatcttcataaattcacgctggaggtgtgcgctcacccagacaactcacttaaacctaagttgtcctccggtcgaaattggactaaaccagatagcgcgcgctaaggccaggcgtgttgctcaaaaatattaaacgtgctccaattttgctgcttgtgatattctccctactattctttgacgagcagccgattcttgatcatcttggccatc

SEQ ID NO: 257281 - DNA, 381 bp, Glycine max
  unsure (1)..(381): unsure at all n locations
ccacatactttgaaaagtgctcctctacgagtntcaccttactccgatagcggccatatgggggtcgagaaaacccttcatcgcatccagcagcatttttattggcccaagatgcgtcaagacattctccattatatcgctgaatgtgtcacatgtcaacaaatcaagtcggaaactcgcaaacccattggtctcctgcaactgctaccaatttcgtcctccgtatgggttgacctggccatggattttattaccggactttcgacttcacagggctacaacaccatcatggtggttgttgactgttaatctaacggtgtccacctcggtccattaccaccacactacactgctcacaaggatgccgttctgttcatggat

SEQ ID NO: 257282 - DNA, 280 bp, Glycine max
  unsure (1)..(280): unsure at all n locations
atgaaacacatgcgctttcttttttctagtcgatcgctcactgaattctccatattcttccgctntgattctgagtattagcttcacttggaattcagtcatttaattatgtgagttctggatgaacactctatatatgctccccctttggcttcaacaaaaaagcgcaagtgcgtaagacatacatattgtaaaacatcccgcgatatattctgtgtaaaacaatcaaaaaattttaaaccaatcatgacacatgaataaaccaaattgaaatgcccac

SEQ ID NO: 257283 - DNA, 412 bp, Glycine max
  unsure (1)..(412): unsure at all n locations
ttcagtcactatcatagcatactaaactagctgaagaactactattatgacatgtgacaggaagagcatcaaaccatactgaagttacgatatttgccctttaaccatgctaggaatcaactctcacacaaccctttctcctttgtcaatagatttctactgttcacggacaatgacttctcagtcaaatgctcccaaaatcgaagcaagaaagagatgggtgtaatgaaactgtacatttctttccaattgttntagcacgaaggggaagctagagtctaatgatgggtggatggttgcactataaagtattaaaaaaggaacaaaacaacaatcattcttatgctaagattaagaatcaatgaaacagtaatcattatcctaaaaattttctcagcacactttgtaccac

SEQ ID NO: 257284 - DNA, 376 bp, Glycine max
  unsure (1)..(376): unsure at all n locations
catgcaanctcgctgtgaactttatagggtanaatgtctctctttatattctcactattattatgtgttggttgatacaagaaaaagaaataaccaattctcttaattaagggtattaacatttctagtaacatgacttagatttattctttatatttatatgctctgatttatagtatctaaaatttatccgcgagatcctgatccttaaattataatattgcgaggtaattggtgaaaaaatgtacgaatgggttcatctataaaaaataattgagttcataaattaaatcataattttattcccgtgactatgctacccaattgaatatatacatacttttaaggtaaaaccctgagggctacataactctta

SEQ ID NO: 257285 - DNA, 398 bp, Glycine max
  unsure (1)..(398): unsure at all n locations
nggctatggcttcctccatgtgttccatatatgttttggatcgagttgcttcaaccatggtggtagtgctcaatgaaagcaccaagttattatgataagtgaaattccctaaagttcgaggcttatgggtcctccaaaaaacaagataaaagaaggatttgttttcctgcttgcatttctattacaatgattgtccatttataggcaccgattgcttatctagttccttctataggtcctacgagggaggctagtaataacggattttagaaatatcctaacagaaagatatattccagcaaacagaatattctaattgcccaatactaaggtgccagctcagcatttctggtctcagtttgttatgaagtccctcatgtattaaggacaagtgctct

SEQ ID NO: 257286 - DNA, 451 bp, Glycine max
  unsure (1)..(451): unsure at all n locations
catgcaagcttgttaaagaacttagggagaaatctatattctttcttgttcgcacatcattcgcgtgtatgatatccactcgacaaggtctgaagtacaggagaccttcaatcctataacgcaatgtggcgaacaaaagtgggcagttaacttgaatgaccattattgtcaatgaggaaagtattttgcgcttcactatccatgttcacacattattgtagcttgtggttacatgagcatgaactactaccaatatataaatgttgtttacactaatgagcacatcttaaaagcatactccgcaaagtggtggcctcttaggactgaagcggcaattcctccttctgatgaggcatggacactatatcctgacccaactacaatttgngcgaaaggtcggccaaaatcaacaaggataacgaatgagatggattgcgtctaaccatctgac

SEQ ID NO: 257287 - DNA, 438 bp, Glycine max
cccaagctttgagttcctttggtccggagaccattctttttctatgtgtttccaaacccaatctccgggttcgaagagaaccttacttctccctttgttggcttggttagcataacttatatatttactctcaatgtgatctttgactctatcatgaagcttcttcacatagtccgcctttgcttgaccttctttatgattaaaaacagaaacattaggcataggcaaaagatcaagaggagtttgtggattaaaaccataaacaacttctaaaggagaacaattagtggtgccatgaacagctctattgtaagcaaattcaacatggggtaaacaagcttcccaaggtttaagtattcctcaaactgcctaagcaagttccaagtctattacaactccgttgccattcggtgggggaccaggggaaatacaattatg

SEQ ID NO: 257288 - DNA, 203 bp, Glycine max
gttgggacgggaaatttaaccccggtcatatatgtgccaataaacaatatcaagtccttatttgggacaaggactcgatgaacaacacgaaaataaagaggagggcagggctgagaaatagctacagagcatttagttgcccctatatagcatgttaggaatgacttcaaaaaaatccatcagactttgggaaaaaattgatg

SEQ ID NO: 257289 - DNA, 444 bp, Glycine max
actcaacctgcgtgcgcagatcgccgagtatgagattctgattattcttcaatgtctttgaaaagtataaataatcataatttgacccttatttcttggtttctaattcgaatttttagccccttgtaacacaaaaaataaaacccttatcaataggtcaaacttacaagcattacatgacaatttaaattttgaaacaaatcaataaataatttatctgtttatcctcatttctaattattttttcgctatatttttgctcgctctggctatgtcttttttatcactgtgagggttcattctactttccatctcacatgctcaagtctagtgtgctatataaactttaagaagatagattagatatcgaattgcattaaatgtttgtcataaatttggcacaacataacacttttcttcttctaagcaattatcattttaatg

SEQ ID NO: 257290 - DNA, 445 bp, Glycine max
  unsure (1)..(445): unsure at all n locations
gcaagcttccaaaggttactctgtttttgcttcttcttctcctattnattgccctgctgttctgctgactcacttctgaagagggtgtctttggaaattggtgtggagatgggagtggctttggcactgattctgcagctggtgaagctctgcatcattggctttgttgtggaattccaaggatctgaaggtacgtactttattcttcaaaaatttttgtcacaggttgtgataaaattcacaagaatatgatctggatcagcatacatggtttttaagctatattagtaataatgatcactgngctcgtaacactaatatcatagagaacctttacatcatagctgatgttgcaatcaaactatcggtttaaatcctttataattggagctaggatagccaaacgtggcatctgatgtcctctctctgttgtcctcttgcattg

SEQ ID NO: 257291 - DNA, 464 bp, Glycine max
ctacgtgttgtcgtgaattatgtcaacaattccaacgagtgactttctctattctccaacttttgcgtggctctcacggatcaatgtctacttaccaaaccacatacattttacccttcctcttggatgctagactgattctcatatgagttaattactgtcactaattccaactcttcaaaccttaatatacgtctaggttgcgtttcacagttttagtagtattttgtttaattttacatgtgaacactacttgtgaaattctaaccacgtgaagacattgaatggtagctagaataagtttccttaattaattacttgatataattaatatgatgttgaaaaagttaatcctgctcgaggtaaccttgatatcaacctttatgattaacattaattgaacgactctttctttcatatatcatcgcgcgcgtatatatatatatatatatatatatatatat

SEQ ID NO: 257292 - DNA, 374 bp, Glycine max
  unsure (1)..(374): unsure at all n locations
gcagcttcagaanactatagaagataatgctactgttatccgcttccaatacagctagggcagcagaaccggtgctacagcctgcaataaacttgggccgagacagaaacacgacggtttttggtcggaggtatagtcctcaagcctacccttatggtttggctccggacttcacttcccgtaccgctccagacgatatgagcgaaacccctacccttcaggggaaactccctccttatgccgactatcctttgcaagaagatgatgaaggagatgcccatctaggccctctattttccctcaaagatgcggcgccccatgaattgccccacccaaacatagtncactatgtcctgtctccacccgcacccgtt

SEQ ID NO: 257293 - DNA, 160 bp, Glycine max
ttccttggattataggggttgaccaacctcatgcgttttcaaaaagggttcatcaagtaagttgaaatcttgaagacaccgccttgcaaaattggtgcaaaacatcaattgagtcacatcactgcttcgtctactggcagacatatttaaggattattga

SEQ ID NO: 257294 - DNA, 248 bp, Glycine max
cctatgaaaccagcttgtatcaagaaatatggtattgctcccatatacaattcatagagccatggggaggaggaagaaatgagggtattctacccattcagaactcgaatagctggtagggcaacaagaaatcttgaataaaagatgaacagatacctcgactactcacaaatgatgggttcggacatgctatctttctgaacataatttattcctttgataaacctttcatctttcttttctttctc

SEQ ID NO: 257295 - DNA, 425 bp, Glycine max
  unsure (1)..(425): unsure at all n locations
gcttctcttttatgagtgagaaataatgtccatgttaatcttgaataatcatcaactataaaaagagcatagtaatttcctccaaaaactcatagttctagagggaccaaaaagatccatatgcaaaagttgtaagggttgagctgtacaaacaatattctttgatttgaaagaaacccttgttttcctttttgaaatgcatcacacaatctatttttttaaaatttaagttttggtaaaccaattactacatccttagaaattagtttatttaaatgtttcatgtttatatgagcaattattctatgccataaccaagaatcatcatctttactatgaaaacattgatcatgattngatgtntnatcctacattatcatgtatacatcattagttctatagcccatacgttntatatttttatc

SEQ ID NO: 257296 - DNA, 418 bp, Glycine max
  unsure (1)..(418): unsure at all n locations
ttttaatctcaacctcatcatgggaaaaaacattagtaataacaaaaaggctatctcatttacatcaaaagttaccaaaaataaacttgaggcgaaagttaaacacgtgcactttttggcccatatggaactccttcctaaaaatcctagagtcatgaaatctcttcactttctccttgtaaatcttggagttctcataggcttctaagctgatctcctcaagttcttgcaattaaagcttcctttccataattgcttcatcaagtgccatgttacaacctttcaccgccctataagcatggtgcttaatctccaccaaaaggtggcatgccttactataaaccatcctatatggagacattcccaaaggtgttcgataaatggtcctgtngggttgcatgaccttctgcaacacttg

SEQ ID NO: 257297 - DNA, 448 bp, Glycine max
  unsure (1)..(448): unsure at all n locations
agcttattaagtttcattgctattaaaaaacacaatttctttctcaacttattaagctttatgataaagcttcatccttattaaatgatttcaattttctttctctttttaaaatttccacaaatatcatcatcatcatcactttgatgattattatggtttgtaaatcttttatccacttaactttcaaaataatttaaaaatccatttcttaagaatttggtttctgcaaaaaattagtaatctcttctcacataacacggctgttaattatctattaacattntgacgttatctcatttatttaatatatgttctagcataaccttctaacggtgatgctcttttgagagttcttccgaatgatggtgaaaggaactagtgaaatgtaccttcanaagtactttgacagcatataagactacaggttgaattaatagttggttta

SEQ ID NO: 257298 - DNA, 463 bp, Glycine max
  unsure (1)..(463): unsure at all n locations
tcacgattaaaaacactatgacaaattacattgacaccccttatagtttcttgaaattntacacgatattcattgtcccctaccttttttaagcttatagtaactccccttaattgtttgaaaaacattaaaccctgtacccttattacctaagaaacacattacaccatatatccctgacactcctgtggtttcttgaaattttcacacgatactcctagtccactacctttttaaggtaactcctttgaattgtttgaagcacattggacaatgtatccttattatccaagaaacacattgcatcatgcatccctataatggctggagtattgtgtgaaatttcaagaagccacatgaaccatgagcataatttgcccganaacattaatatatatgcttaacacaaaacaatgggttgtgaaaaaggaaaatactnggtcctgcagtctgcacattccct

SEQ ID NO: 257299 - DNA, 448 bp, Glycine max
  unsure (1)..(448): unsure at all n locations
cagctncttatttattacgtagggtcttgattttgtgtatnccattattcaatcttacaaagaacaaagaacattgtgctgttagtaggttatcacaatccactttaggatacacatgcgtaaataagaaaatgaaaaaaaatatactgttagatatctgaaaattctgcaaggattttctttaatataataaattgctaaacaaatgctgttcttttttttcttttttcttttctgcttggtacttattggatttagcagttcttacacaaaggcaggcaaaatcctcctcaatcatgttgtgggtggttctcaaaattccaagacatctttgtagctttgttatgtaggtttcataatacctgattcacaatgtttgagctaaacctttattgatctcacaagcaaacattataactttgtttgtactaaacctttattgaatata

SEQ ID NO: 257300 - DNA, 452 bp, Glycine max
  unsure (1)..(452): unsure at all n locations
ttaagaaagacttccccattttcagaatggctatgatgttctgatcgctcattcgntgcagatgtgtccgtcggtacatcagcaaaaggagacattagatccttctgagcttcattttcacatgtcatagaagaacttacccttgaggggtcatcattatccaatacaagtgaagaatctttggcaccagacagatgtgattctttatttgtttccttaacctggttagaatgtaatctagatttaatagccgtccttttcccacattttatcttntttctttgaactggaactttgacaaggtcagcatctgctttcaccactttaagttcatctgggttctccctttcagacatagtatcagctttggcattagttgatacagacattgctttaccttcttcatgtacactgactaccatgtcattctgtcattatctaagttcctgaac

SEQ ID NO: 257301 - DNA, 454 bp, Glycine max
  unsure (1)..(454): unsure at all n locations
gcaagctttgaatccaaagtagaaatggttacttgacttatataacactttgttgngctcactcacaaccttcaaaagcaacaatcgcctaattgttcttctaaggttcccaatcctaaatgggttctatttgaggacaagtacctaatacacctttcagggaaaactcatcaataagcttcccttgagaaaatgtttgtaggaactcaatggctaagtggatttggctctaaagtcctagaaagtctaggctaagaaaaactagtatcaaaagcaaatgatatacatgtgtgtgtaatgtggcttcttaatctataccttctctatcccaatnttgttcctaaaaaagaacttcaacatcactttttcgtccttaaattgngcttgaagatgactatntctccttttcttgagacgcttggaggtctaagagattcattgtgagtnttctcta

SEQ ID NO: 257302 - DNA, 442 bp, Glycine max
  unsure (1)..(442): unsure at all n locations
ntntacagaaatgggtcactctcaacagagatggttgaaacaaatatgtagatttctcacacagggatntagcacgagttgctctcactaaaatgcttcagcttgtcttcatgatgctcttgaataacctattaaagctacaaaaagatcattcatgtggagctcacaaagctgacaagcttttggagcaagtagatagacttaacagttatcatgaaatgacaactagcaggatcattttgaggttcccattctaagtaactttctaatgagcattctgaagtaacatcagaatggtaattctaatgatagttgagaaaggatccatacttgaagtagattattttgatgaagacaaattgatatgtctttctgatgtgggacaacttcatcaaacacacatcttaacaacatanaccattattaagtatattgcttcata

SEQ ID NO: 257303 - DNA, 413 bp, Glycine max
  unsure (1)..(413): unsure at all n locations
acccgcaggcatgcaagcttntcaacatagtgttaatggcgatatcttttttgtttgttgcatcaccaaagaaaatagtatcatctgcatactggaggatactgatctccactttgtttcttcccaccaagaaacctttgtacagatttttttttntgcgcctccctcatcagacctgttaaaccctaaactaaaatattaaaaaggaaaggggctaatgggtcccccctgttggagtcccctttggggtgagaactaatcagtaggactcccatttacaaggactgagactgaggaagtttgaggcacctctcaatccagctaacccacttagcatagaaacccatacgtctcatcatgtacagaaggaactcccaacatacagaatcgtacgccttcttataatctacttt

SEQ ID NO: 257304 - DNA, 453 bp, Glycine max
  unsure (1)..(453): unsure at all n locations
tatcaatcttttgagcaaggacaacccccaatgcgttattggatgcatcgcacattaactcaaatggggctgtccaatcaggtgcctgaatgataggggtggtagtcaccacacgcttgaggcaatcaaaagcctctttgcattggtcatcaaaatcaaactccacctccttttgcagcagattggatagtggaagggctactttgctaaaatccttgataaagcgcctataaaaccctgcatgaccaataaaagaacgaacctctcgcacgcaagagaggtaaggcaattgtgaaataacatctatatttgcagggtctacctctatgcccctactggaaatgatatgacctaaaactataccttgtcctttgaatattaaacttcagatttcagagctcttttagagcacanaatttcgtgctcttctctttcccttcattcatctacttc

SEQ ID NO: 257305 - DNA, 364 bp, Glycine max
gcaagcttgaaccataaccagagaaagtgtgatctttaactgtgagtgaacgactacctttgagtagatagtctttgcatcaatctctgaaatttaaaatgaaatgtgtgaatgaagacatgatgaaggccatgattgggtatacaagccaattgaccaaaaaccttaccttgaaatataattgtatcctttgcaccctttgtgagctgaattacacttttaaaattgaaccctgaacttgaatgaatatctccaaataccttgtttagattctaggagagaagatagttcaagggaaattaccccaaatctgggggagctgattgggatgttaagtataaggtaaagcatcagcacccataac

SEQ ID NO: 257306 - DNA, 459 bp, Glycine max
tatataatctccagctctgtacttatgggtgtagcggcacacattggtttggtttgatcaaatgacctaatccaatcaaattttaatggattggtttgagttgattttctaagaaaaacaatgaaactcacttaaaccaacctcggtgtaaatgatttggattgcgttgggtgaatgatccaaaaattaattttgtctattcttatttaaaacacaatattttttataagttaaagtctttattaaatgaatcaggcacaactgcttcttgttagattttttattaaaaagaaaattatgtgatactgtcacaccttactacattccacactactagaaataatcgtttaacatcactagcttaacatcgattttagaaaaaatcgatgttaacaaaaacacagtgacctactcgtaaattacatgagttcgttaacaaccgttgttacagaaatgatg

SEQ ID NO: 257307 - DNA, 444 bp, Glycine max
  unsure (1)..(444): unsure at all n locations
tgcggcatgcaagcttgtagagctatctcttgtattggtnttatcttttacaaccttatcataatcgattacatagttatttttgagacaatgactgatttatttaggattctttgctttaattgattactgatgtaattgattacttctctttatataagtgtttcagaagttaacaagaacacttaaatcgattactttgagtatctaatcaattacattgttcttgatttgtttcaagtttttggaagaacactttaatcgattaaaaagataattcaatcgattacttcatttaattaattgattaccttgtagatttaatcgatcacaggcagttataattgttttctcgataaatagccaccttgtgttctcctaacaacacaacatattgagcttctgaatgagctangatcgcgtgctgatcttatttaaaaaaaa

SEQ ID NO: 257308 - DNA, 384 bp, Glycine max
  unsure (1)..(384): unsure at all n locations
gagatcaggaaggataaagcggccgaaagaactagttccgctcccgagtatgatagtcaccgctttatgagcgctgaacaccaccacgcttctaggccatcaagggatggtcatttctccgggagcgacgcgttcagctcagggacgacgagtataccgatttccacgaagagatagttcgccggcggtgggcatcactggtcacccccatggccaagttcgatccagacataatcctcaaattatatgccaatgcttggcctacagaggagggcgtgcgagatatgaggtcttgggtgaggggtcagtggatcccgtttgatgcagatgctatcggccagctcctgcgatatactttaatgctggaggagggtcangagtgcg

SEQ ID NO: 257309 - DNA, 404 bp, Glycine max
gcttcttaaaacgataccatcattcattttgtttggatccttcctcgagaaacttgtctttttttcaaaaaaaattatttctttaaaaataataataaagacagtttcaatgcaattatcactcttctaaagcaccaaaccaaggtgttatatggatgtacacccggcaagaggaattagatgaaaaataaagggatgggaaatgaggtgagtacaattttatttttttttgttggaagtgagtattattattctttttttaaccttcggttaattagaagaaaaagacttgactaattcagagctgggagtcattaaagtctggttaaggattattttcatcaataatcaaactaaaatactaaaataatacttgaacaatttaatttaatttcacacattaa

SEQ ID NO: 257310 - DNA, 378 bp, Glycine max
aacttcagctctacatttcttaagggcttaacatggagaaacttctttattttgtgaatctacacaggcgattgaggaggatatgctcacacacatcatctgccgaagagttccaacactgtcaaaaggagacataatggtttcatttatatcttttacaagctctcacacacaagccatttgggttttgaaatgtaataaaagcacaacacatagaaattgaatgcaaactgcgttcattttgtgctaaaatttactttattaatgcgaactgggcttataatatgaggatcgattaaaggggtgcaagaaagaaattaaatatgattacctacacagttcttaaaagtaacggtgaatctaacatataatgaacct

SEQ ID NO: 257311 - DNA, 382 bp, Glycine max
ttctttgatagcccttttgagccttgtggccctttccttgatttgaagctcactacaagccttaagtgaaaaaccatgatattaccatattcttaaggaattctggagctttggaattgttttgggaataagtgtgggggggtttttgtttcattggacaacttgttttgctggctatgcttcatgatgtattctgggccatacttgatgtacattgcctattggttaaatgttggacatgctgaatgaaatgttgtttctcacagggctaagagtcattaaaaaaaaaatttctaaaaagagaaaaagaaaagcccttaagttgagtgaattacaacctaaatggcacaagaatgatgaaactcttgggtctactcttcat

SEQ ID NO: 257312 - DNA, 326 bp, Glycine max
aattgaccgcctgcgaataataaaaaatcaattgacctaatactacgatatcgtgttcaattcgaataaaaaaaatcaattgccatattatgaacaatgtccacttctaagaatttacattcttttgattatctaaaccgattgtagaatattataggatttgtgccgtacacggcctagctctccgccgaatattatctaaacgtactgatttatattgtcgaatatattattattgtatacctagtcgttataggtgcgtgatatttattctttcaaattttgcagattgtctaggagatatgtgttaaagttatgtgacgcag

SEQ ID NO: 257313 - DNA, 343 bp, Glycine max
  unsure (1)..(343): unsure at all n locations
gagcctgcaagtnttgtcatatgcttcctcaccgtgtttatattcttttaattngacatcaatggttgagcccctgtcaaagtttcgcgttgcaaatgtctaacttcactttccattgcaagggctgtcttctcaacaccatattttccaacaagcttgtccctcttgactttatcatgttcacaaaccatacaattgtctaaatattccaatggaattgaacattcgggactattacgacaatcttcctttaaagccaagatgctcgactcatcattattgtgaagtatagtaccaagcttagcctcattaatattactccttattaacccaattcaaataa

SEQ ID NO: 257314 - DNA, 461 bp, Glycine max
  unsure (1)..(461): unsure at all n locations
tgttcttggattttcctcagttctttaacaagctttgaacaatatacttgtccttcatttaactgtctgtgggctgggcggccacgctcaacaaagtacttttgacacctactgtacgttgattagaccaatgctgntatgggaatgttgtgacaatcctttaaaaccttattgatacattctgagaggttggttgtcatgtggccatatcgatgtccttctctatcataagccatcatccattttttctttgaaatgcgatcaatccatgttgctatggctggactcagttgacgaaatttttctaaattttgatcaaaaatgtgcttgcaaggagtgtacgctgcataaaattatgtatgaataacaatcttaagtatatatcgaaagtaaataaacgtgaccatcaaatacgaaatcttacccaatttcttcaacatttctttttgtttggattattg

SEQ ID NO: 257315 - DNA, 413 bp, Glycine max
gtcacctagagactcgcggaaactttattttaatctaacctcagccggggaaaacattagcttaacaaacgtctatctcatttacatcaaagtttaccaataataagctcgtggcgagagttaaacacgcgcacttcttggccactatggaactccttcctaagaattctagagacgacatatctcttcactttctccttgtaaatcttggacaacacataagcttataaactgacctcctcaagatcttgccataaagctatcatccgaaaagcgtcataaagccctgcacaacctttaccggccaacaacatggggctaatctccaccaaatggggcagccctactaaaaccatctataggaaacattccacacagtccataaaaggtccgacggcgcatgacatctcact

SEQ ID NO: 257316 - DNA, 417 bp, Glycine max
  unsure (1)..(417): unsure at all n locations
gcttgatgatatggtcttcaccgacgaaaggatcaaagtgagtctaaaaagaggcaaatctgatcatcatactttgataaatgccaaaaaaaactagggcaaatgaagagggtgaggatgaaggagaagcctgtgctgtgactgtcattcctatacagccaagttttccaccaacccaacaatgtcattactcagccaataacanaccttctccttacccaccgcccagttattcacaaaggccatccctaaatcaaccacaaagcctacctaccgcacttccaatgacaaacaccacctttagcataaaccaaaacaccaaccaagaatatgaatttgcagcgagaaagcctgtagaattcaccccaattctagtgtcctatgctgacttgctcctatatctacttgataattcaa

SEQ ID NO: 257317 - DNA, 463 bp, Glycine max
cgaaccataactggtgagagtgtgatcttaaactgtgagtgaacgtctagctttgagtaataatctttgcatcaatctctgaatttcagaatgaaatgtatgaatgaggacatgatgaaggccatgattgtatatacaagccaattgaccaaaaaccttaccttgaattataattgtatcctttgcaccctttgtgcgctaaattacattttcaaaattgaaccctaaacttgaatgaatatctccagataccttgtttagattctaggagagcaaatagctcaaggaaaattaccacaaatttatgggagttgattgggatgtaaagtaaaaggtaaagcatcaacacacacaagaaataagttgtgttaaaaaaaaagagcaatcaaagaaaatgtgtgttgttgtaataaggtcaaatgcaaattaaaatgaaaggctagtgagtaagccaattgtattg

SEQ ID NO: 257318 - DNA, 440 bp, Glycine max
  unsure (1)..(440): unsure at all n locations
tcgcccaggcgagcaaggtggcttcctccataagctaccgccttctggaggaatcttctggagggcccaagtgggcgtggttgctatttgcacccccgtttttactaaatacacccccattgcccttttttggtgattctttttccgtaaagttacggaaacttacgaatttcgtaacgatacttgttttctttccgtaatgttacggaaccttacagattacataatcatcccctttttgacttacggaatgcttcggaacctcacgaattgtgcaacgatgcttccttttgagttccggcatgtcacggaacttcacgaattgcctaacaatgggtgccaagtacctcanaatggtcaaacgaaagttacacgccaccaagcaaaggtccccggacgaaattaaggtatgacagttgcccctctttacttgtctttta

SEQ ID NO: 257319 - DNA, 391 bp, Glycine max
gtgggacaaccatttgggtattcctttttgcattgcaattgtaagcctttcgagtcttgggtctggaactctgtaattccgccctctgtggcgacaaggaattatcatggtaaaaagcaaatgtgaaaaatacaagaaaaaagaactgcgattaggtaaagttgcattaaacttactgaagagccacgaagcagctaatgtgaaagcatcatataaaaaagtaaatgtgagtcgacaacaagaagagagaaccgagtctatgtatggttgaacttaacttactaaataaagggcacatgaagcatctaaacaacctatcacacattagcaaccatccactgccctatatcaaactctcggctgtctccggtcgtgctcgctttaaaaaaaa

SEQ ID NO: 257320 - DNA, 406 bp, Glycine max
  unsure (1)..(406): unsure at all n locations
ccaggaaaaaaagaattttttctcttcaaaatgaatcgaggggcgtatctaaaagtctgatatcgcacgtcaaatttactatctttccttttaagaagatggctcactaaacactagtagctattattaaccaacaaatctatttggatatgccgaaaggatttgactaaaaaaaaaataaggaattgtaacattctgttagacggtatttcaaatgacaatttaaaaaactctcaccttaatctattttggaatgatagatgacatgttggctttcntaattgttatactacattaattgctctgaccaatacgttattnttaagggctaaaaataaatatactttacattcttacctacaaagactatataaaatcgacctcctttgggccctcatacatagaa

SEQ ID NO: 257321 - DNA, 448 bp, Glycine max
agcttgcatataataatcacagtatttgcatatttcaattcagtatatggacatgtgttcttccttaagagaggttgttatccctgttgaagatcctgcatactacctgcaccaaaaggaacataacacagtcattaagaatcagtgttctgagtatatcaatgaattttgtgtccacaagcctgtggcagaaccagtggctgttgtcaagggaccaagggattataattcttcaggtatccagtcgtgcttaaaagttgtctcaaatgtagatgaagaggctgatgttgaacctacatctcctgaaaaggaagggatagaatgtgataatccacaatctgaaagtaaggtgagaatctgcacatcaagttgctgtttatggtttgtgataactgattatataatcgacatgaggttcttatagcatgcagaatctgatagtggaaac

SEQ ID NO: 257322 - DNA, 352 bp, Glycine max
gcagctgcaacttggatagtagaaccctcctaggtttgttaaggataaccaagcgcagctctgcgtgagtaaatccgtataaactaagtgtttctacttatctcaacctatatgagtagcattctcttaaccttatcttgacatgctgtgtcactcaagcgttgcattgaaaaacctttgtgaaaataccattttatcaaccattggacgcatatgtcttgttttaatcacaacttattttaatcgttggacgacattgttagtaacttagttcttgcatatttgttagggaaaaacaaacttttctgaaaaacatatcatttttattcacaacacttattaacttcccttc

SEQ ID NO: 257323 - DNA, 452 bp, Glycine max
tgtatatgcatttcatgccaccactggacagacaattattatgcagaccctacagtatcagcagaacatacatattaaccgttgatattaccaatcatatcatctctactcctacacctctggtaagagtatcactttttatatcataaaccactatcgacaaaattcatgtccttccgattctaattaactaccgtggtttaaatataagtgttgccacctaatgctgtggatatcattgggcacagatatcaatatcttactgttgaagcacctcgtggtcatcagatttggaggatgtctatccaagatgggctgcaaactctcactacaccttggtactaattcctgagagacaataacttgatggctcgagatgaggatgtcttatattaccggccaaaccaaggtgtatcggagatcatcttgaagaatgagatcggatggaatga

SEQ ID NO: 257324 - DNA, 232 bp, Glycine max
agcactacctagaacacaatgtagcaagtgactcaaacagctgaggcgaccctacaagctcgggaatagagcttatcacaatacaaggcttgaaatcacccttgtacgtgccaaacaaggcctctaatatgtaagcaacggagagaaaaaaagactaaaaacttgccaacaatcaccttttttattaaagtacggctataaacaaaaaaataactatataccgctactatat

SEQ ID NO: 257325 - DNA, 456 bp, Glycine max
  unsure (1)..(456): unsure at all n locations
gcatgcaagcttcacagtccatgatggaccacccacctatttaattattaaganaaatgcataactcattatatagcttctgcatgttaattattaagttgaaattaacgtatatatatagctagttagtttgttactgtgacttacggcaaatgatgcatcacgtgctgctactgctacaatgtcagcgcatgacacaaccccgggacatactttctccacctcagattttgcttggtcgatgatgttatatccccttattgagttagcattctgaagtgcactcttttcgctctcgatagtggagctatcatcaagcaatattgatgcatcacaaccctgcaatgcattgcacatatatatggttcacattaagatggattaatcaagttaagtacatgcatcatgcatgcatgccaaaaatgaaattaatatatcaacacatatgtacctgaa

SEQ ID NO: 257326 - DNA, 398 bp, Glycine max
ttccaaaatcagtgtctggtttgacacaagtaccatcacttgatctttctcattatatgctttatggaggaatcaaagttctggggtctctaactaacctcacttttttcaatatcttctacaacaactttttaggtgctatcccaataacttcattcttcagaactctatcttgatttcatattttcagaacccccagctttgtcattaatggatgggacatcatgttcttcaagcctgattcaaaaaatggttgaaatccgcaaaaacatagcttggtcacaggcattctagcctcagttactataattctcattcattctggattctagtaactcgcaatcacggataccaggttgaaaaaacactgggagcatcaactttcacatcaagagctg

SEQ ID NO: 257327 - DNA, 400 bp, Glycine max
  unsure (1)..(400): unsure at all n locations
gcttcctctaaagttaagatatgccacaaacattgccatgaaggtacaagttgatgattcatggctatggcatcnatgatttggccacttcaacacacttgccttgaagttgttacgtgagaagaacatgatgagagatcctccaagcataaaggagaacaatgaagtgtgtgaaggatgttcccttggtaagcaacaccgatttcctttctcaacaagcggagcatggagagcgaaagatctattggagctgatacatacggacgtctgtggaccaataaggacgccatcacatgagaacaactggtacttcatactcttcaataatgacttctttagaatgacatgggtatattttctaaaagaaaaatcagaagtctttggagtattcaaaaagttg

SEQ ID NO: 257328 - DNA, 244 bp, Glycine max
tcaataaacttacggtcaataacggaacgacatgagaaaagactggactaccgatcctgctgatcatctgaacaaaacactgcggaagaagacaacgacggcggaattggcgctagggacgcgctaatggctacagaacgatgagctcttgaaaccgaagacgacgcggaagaaccctatcgttactttgacgatactgccatatgagggagcctttgtagatcttaatcggggaaatcaaaag

SEQ ID NO: 257329 - DNA, 422 bp, Glycine max
gcttgtacttatctcttttagaacggccttcttaatcacatgacctatcatgtctggatcgagtgttaaatttaaacaagttagtataaataatgactaatattaaattaaaattaaatatattaaaatcataccaaccaaataaaaaaatcaaaatcttctctagccaatatctttggaaatgattagaaatcaaagtatactttgggcatacttttagtttgaaacttaatacgctttgcatacttaaggaaaaaaaaaaaaacagcctaaatttgtgttttattggtgtacttaccaaaatctggagttgtcccatgttagggtggacttgcctaaggtaggctccacgatcttgcacgtcagactgagagtaccctttaggggggacctacaaaacaaaagagcctctgatgttcaag

SEQ ID NO: 257330 - DNA, 468 bp, Glycine max
ttgcgggatttgtcttcactggggaaaggatcaaagtggatctggaaagaggcaaatctaatcatcctgctttgatgaatgcgaaaactggggcaaatgaagagggtgagaatgatggtgaaacccatgctgcgactgccattcctacatggaaaatcccccaccagctcaacaacatcattactcagccaatatcagcccttctcattacccaccacctagtcatccataaaggccatccctaaatcaaccacaaagtctgtctaccgcactcccaatgcccaaacaccacctttagtgaaaaccaaaaaggaattttgcaacaaaaagcctgtaggattcaccccaaattccagtgtcatatgctaacttgctcccatatctacttgataatgcaatggtagcagtaacccttgccagggttcctcaacctccatttttccgaggatacgactcgaatgcaacatg

SEQ ID NO: 257331 - DNA, 288 bp, Glycine max
  unsure (1)..(288): unsure at all n locations
ggattattactcaaaaattacattgtgtgcttgtgcttatatcaatttaagattcttcattaatatttagagagataataattaagttaaggtatgtaagaaaaaaataattaattatttagaaataaaaaaaaaaaatcttatagaaagtggacaaataaatntatgaaaaaattctcttgcaagagggaactgagcaccagagagagagggttgcatttctttgagagaaacttgttgaatgggagaaagagagatgtgaagaggagaaagtttaaaaaatatgta

SEQ ID NO: 257332 - DNA, 474 bp, Glycine max
  unsure (1)..(474): unsure at all n locations
atactcagcttcaacagagcactatggacaaaatcttgcaagacaagccttatgcatcttgcatgcccaatgatggctgcanagtgaagagcttgcctaccgctgagataatctgctctcacaacctgttatcaaattagttatagtctagttattcttgtaaagaaactttaaccatgtgaataggataatacacttgaagacaacaattcctttcccacccatccgacacagtttcaactttcaacaaccaaccctgtaaggctgtaacctatggtctccatccaacagttcaaatataactaatagaccaaaagagggagagaaaaaagaacagtgaagagaatgaattccttccataaatggagaactcatactcacattgcatctgaagagcagaagggtctgcacaactttccaatgaccatatctacaagcttgcatcaaagcagtcttcatatcaagaaatcaaac

SEQ ID NO: 257333 - DNA, 225 bp, Glycine max
agccgcaagcttgagtcggaggcgctgtaagagaaatcttattatgattggggctgcggatacaccgacgggtgggttgagattgactcaaacgtgtctgaacagaggctttgtaaacccaactaaacctaacgccatctcatgagttcccttattgagatggctagagaacacataggaaagcgttggcctgacatgctaactcatgtgcataaaaaagtcaat

SEQ ID NO: 257334 - DNA, 420 bp, Glycine max
tataaaagtctcttcaagaggtgtgctttttatatattattagaggttcaaccctccactaggccacctaaaatcattgccaaactaaaataatgataaaagaccaagataatagccagtaggattcatgaggggtttccgtaattgatacagctatatataagaaaaatattcaagttcagatacttttcaaatcttaaaatcatcttctaattacaatattaaaattaaaaaaatccaatacatattattgtcttaattttaaaaattagggaaaaaaataatataggaaacatcctttatctatgacaaagaaatcttataacaagcaaggagacaatttataacaaactcacccctgttggaaggaaaataatatagctaacgtcctttatgacagcgggagcgatgaagtattga

SEQ ID NO: 257335 - DNA, 350 bp, Glycine max
  unsure (1)..(350): unsure at all n locations
ctatgactagtaatgatgtgatgatgatcattttatccttcgaacgagtacaactcaattgaaaactcttaaaaatagtcttgaatcctaaatcttataaataaaaaaagtataattaagacatgagaaaacactaaagatgcattcaagtacaacagaggattggaatagaaaactagtgttccttaatattagttgtgtaataagtgaagggtactcctttgacccatatcttttttcttaattaatgaaaattgagagtttgtttgatgataaaaaaaaatgccttcaacggtcttaaataaatattaattctcttcaaagtggcggatantttgcatccatcattt

SEQ ID NO: 257336 - DNA, 254 bp, Glycine max
ttcatcccttaaaagaatcctctctttctaaaaggcccaaaaaaacaggtaagtaatttagaaagattagaaatcacactaagcagtcattcaaatataaaaatatccttcaaactcgtctctcaacttgattgaagtacatcaattaagggactgaagtaatgaacattccacattcgggtatacttgcaaataaagtcaaaccaccattgctacattgaaacacagaccaagagagatgagagaagaaaaag

SEQ ID NO: 257337 - DNA, 289 bp, Glycine max
aattttacctgaatagacaaggctttcttggttgaatccaactggcttccttgccacataccaaacgattatttaaatcaataactccatcacaatctacacatattacccacgctaggtatttctaatgagagagaaagatagagagagagagaaagagataaatttccccttatcgcaagcctcttgttctcgagggtcttctcgcgagccatctgtgacttctgggcatagcctcctcccatgtgtgagtccgtctgacccgaaatgcaaaccctaattttatttc

SEQ ID NO: 257338 - DNA, 303 bp, Glycine max
tatatattttcatgtttccccccaaaaagcaagtatttttctcacatataggacatgtatgatgtcctttgaaactataaccacttaaattgtcgtatgtgggatagttattaatagatcaaaaaaccattacacgcaaactaaaggtttcttgcagattctcgtaccacacatcaaccctgtgtgcccacagtatttgcaagtcttcaatcaacagaatgagatagacgccaatatcattccctgactgccttggagcagatatcatcatacaaggcattatgtacttttactttgatgcac

SEQ ID NO: 257339 - DNA, 328 bp, Glycine max
aaaccaaaataggcactgaataagaatgccagaatggcgctgacatactgacatcgactgaaacgcctaccttgcaataacacgactcgctccaatctagcagatctaacagaatctctcgcgttaaaaccctctccaccatgaatcattaactggatatgaaagtgcaacaataataaccggaagacatcttagcagagaatgataaaatgaaaatgtgaattcccatatgaagattgccaaatatatccgaaggataacactccaaaacgagctgaagaggttaaagaaaacactatacatcagtcaaagcaccaccaactggaca

SEQ ID NO: 257340 - DNA, 379 bp, Glycine max
  unsure (1)..(379): unsure at all n locations
ataacatgccattgcgagagggaggaacttanaacaannncttcagacgctgtttgcgctgttctcccattagaacaagagttttaccctgagaatccatnnnaggcctttaatgcaaactttattttgtagattaccaaaaatgaaactctaattctaattgaataacaacatcaacagccaacagtaccaaacaaaccttatttaagttttattcttgaaaatatcacccgtgatcacaagttcacagctatgatattgccataattgataaactgacctgcgataagaaatcgctgggatttatctcatgcgatgttaatgaaccagacaagttttattgcttaatccacctagcaagaacggcccactagtttga

SEQ ID NO: 257341 - DNA, 259 bp, Glycine max
tatacgagcacagaggttggatcgcgtggcctgaacaaaattaaaaaaggggttgaattaattattcctaaacccttacaaattaaaaattactcctctaaagcttttactaagtttttaagagaataaggattacaagagaaacttaacagaaagtaaaagtgaaaatctaaatgcacaccggaaagtacaagagtagggaagaacgaaacaacaccacatgagttgttatactggtgtggaacaacccgtgctacat

SEQ ID NO: 257342 - DNA, 444 bp, Glycine max
  unsure (1)..(444): unsure at all n locations
tggttcgaggtacttacccgttgaagatcgaagaacgaaataatatcgtcgaagaacggncgaaaccttcgcgaaattccttacggaaacgtttcgaaagcgcctcggcttagattttcttcacggaaacaatttttccaagcaaattcgaaagagagagaagtgcctaaggggatgaacccttttccttctcacttcctcccctatttatagcaaactaggggagatgtttgccgcccagctcgcccaggcgagcagggttgcttcctccagaagcaacaaccttctggaggaatcttctggagggcccaagtgggcctggttgctatttgcacccccaattttactaagtacaccccctctgccttttttttggtgattcttttttcgtaaagttacggaaacttacgaatttcgtaatgatacttgttttctttccgtaat

SEQ ID NO: 257343 - DNA, 331 bp, Glycine max
  unsure (1)..(331): unsure at all n locations
atgccagctntgacatgagtcatgaagagattatatatatgtgtccatggaacgagactcaataatgaattatcaatcatcaatcatcaatcatctttgaatagtctatcattcaatcttttttcaacagtgacctctcaaacatctctcaatcaatcattcaatatctttctacccagacttctaattcatttctcttcatctgtctaaaagtgtatgatcaacactgtctcttccaagaaaagttctttgcacaaaaacccgcgcgatgaatctttactattaacttctccctttaccaaaagaacgaaggactaatcgcctgaaatct

SEQ ID NO: 257344 - DNA, 431 bp, Glycine max
aactacaaagctgcaagggggaatctaacatttttttgcatcaacataaagggaaaggtaaattgtaaccgatgctctctctcggcatcaagcattactttctatgcttgaaacacaaatgattggtcttgaatgttcgaaaagcatgtatgaaaatgatgaaacttttggagaaattttcaaaaattgtgaaaaattttcagaaaatggtttctttacacataaaggctttcttttcaaagaaaacaaattgtgtgtgcctaaatgatctactaaaaatctgcttgcttgtgaagcacatgaaggaggttcaatggggcatattggggtccaaaagactctataaacattacaagaacatctttattcgcctcatatgaaaaggatgtgcagaaatatcggaactcgcattgatgtaaaaggccaagcta

SEQ ID NO: 257345 - DNA, 245 bp, Glycine max
aaaaatctgagggctaaactcctccacacttctattaacattaccgcgcttcggtactagaaaacccttggctctttttctccaagcttttaaatcaaaactttcatccccagcctttcccccaacctttgtttcatgaatcacaccgagaaccctttatcaacggatctcattgctgcggttcgtaaaaaacctattgacttattttttgagacctgtcacccgcctgtaatcatctgcttcct

SEQ ID NO: 257346 - DNA, 401 bp, Glycine max
actaacttctcatttgtcttgtaggcccaacaggctttatttatttaggcattatcgtgagggtacctataagttttgtgtttgtccaaccctgtgctaagaaggggtatatggggcacctgtattggtatctctacattgaagacttcttcaagaatggtggcttgatttgttattaaaggtgtgtaacgttcatactttggtcttattggaatgggctgatgtttatctggtttgtgccgcttgtcccacttgtgtgtgtcggaccttgcactaacttactccttcttgtgttcatcttggtagatctcacttcgaaacctcaacattaatttaatttgaatgtaccttttggctcgctcgcgtacttattcatttgctagggattcttgctcaactat

SEQ ID NO: 257347 - DNA, 412 bp, Glycine max
  unsure (1)..(412): unsure at all n locations
gcttgttatagagccagaagtggttgtctttattacttggaactttgtgaagttagtagaacttgatagttaaccaagaattagaagtaatttcagtggtagagatagatcgatataaactttgggtcttatatttattttgtataccttgtactttaaattcacctagggtttgaatttgattttttttaaaacaaaaactattttgaaaaatctattaccatcatttgaacttgttatttcaaaaatatgttatttgttttacaaagttattttttcagacgataactttttttcacgaaaaaggtttagaaaatntataaaatcacaattcaattcttcttcttgtgatactttacaatttctttaatctaaatgacgtatgtgatctacccttagcatatctcttatg

SEQ ID NO: 257348 - DNA, 395 bp, Glycine max
  unsure (1)..(395): unsure at all n locations
gaacatgttgattcccatgttattaaatgggctggtcttaaaatgtggcccaaaagccatgtgaaagtttttaatggacctactacaaaaaaagatctggtggataagggggttgacaagcttgaagataaaaataggagcatgaaaaatatgtcaaacacgattattaaaagtaaaaggggtggtgttgttggaattttaagggatccttataaaataccaataaccacaaggaacacattacgttagattagcaagaagagctttaggaatacctggatccataatgattgatcaaacaaatgcagcggaatctgaatctgtaagtgatttctgatctatgtacttttcttagtatctgntatggaatgttgtagagacaacggataaccggc

SEQ ID NO: 257349 - DNA, 245 bp, Glycine max
taaccaccaacacaccaaaagctgatgagatcaaaacatcacaacgacctgaaagaacgctgctaacaatctaacgtccacgctcatctagtaaacctaggcaaaaacaccaaccaatcatacataaactcttcccaccacatggggagtaaaacccctcccacaatttcacatactcacatcaaaatcataggtgcaaacacacgaaaaccccaagaccactcaattttagacaccaattcgca

SEQ ID NO: 257350 - DNA, 403 bp, Glycine max
  unsure (1)..(403): unsure at all n locations
actcagccttattgacagagcctgagaggtctatccatgacttgngtttaaactctctgtcctgaagcataaaattattgcatctttgataatcttctatgcatttgactcacttcacctttttagtctcatttgatgatatctgaattcaagatccatgacttagctgattgtgattcgtgaggaaacttggtgatttgactaaataagccattgagatttgttacttcattgcttgaacttgttgtgcatccttgcttcaatttgttatttcttttattagggatttggttcgctaaagtgcacggatatttattgattgaaaaatcagtggttgaagttatcattaattttacagttcgtcacatatgtattcaattttagggtaaacatgtcttttaag

SEQ ID NO: 257351 - DNA, 465 bp, Glycine max
  unsure (1)..(465): unsure at all n locations
ctaagcttatgganagatagggaaaatggaaggttgctagatttgcttttataatgcctccctacaaagtttataatggtatgaaactgagttacaaaaatggcctctacagaagtttataatgtaatgaaactgagttacgaagatctagatcacaaagggaaagaaattcttctaaatctggcatgtttctttcttgagagaaaatgaaagtgataattcagtggtttctgacttgggaagtttgaaagataaaactcttataactctatctgaggataatattgtatctatgcataataatttacaagattagaagcatacaaattcacctgccagcaattaaggagcaaaaattaatgcctcgtatatttgctaatatgagcagactaaaatttctgggaaattcacggaattatagttatgattgctactgtcaactaattcttctggcattaaacttgt

SEQ ID NO: 257352 - DNA, 272 bp, Glycine max
  unsure (1)..(272): unsure at all n locations
acaacacaatggctcatagaatgggngacggccgggagtaaaaaacccccttaagctattatgctatacaaagacggtcttaggataaaaaccggcattgccttaaattatagtaaataccacattgcccccagcacccattctaagacggttatttataaccgccttacaatgtacatgtaaaaacaaactttgtgtttcctatttacaaaatagccaccacatcatattctaaaccagatcttggagatcgccctaaatacaagcctttg

SEQ ID NO: 257353 - DNA, 445 bp, Glycine max
  unsure (1)..(445): unsure at all n locations
aattgcacttatgtagtaggtacgtctttatgtttatattatcatacctttgcattttctattatatttaattatttattgtatcaacaagcatgggtagagaagatccatcaataaaagtttctttgattcaataaaagataaacaatgaatttggctataaagtttcgtacaaaaaagcatggatggcgaagcaaaaagctatttcaattgaatatggcgattgggaagagtcatatgccaaaatttcatcgtggctaanacacatgcaaaataattctccaggatcatattttcaaatactacacgacgattttattggtgggaataagataagtcgagaacactgtcagtttcacagagtattttggactttcggtcaatgtaaagatgcttctaattattgtaagccaatcatacaagttgacgacacacatttatatgg

SEQ ID NO: 257354 - DNA, 422 bp, Glycine max
  unsure (1)..(422): unsure at all n locations
aagctgctttgcctatgcgtatgtctaaggattnataggtatatttttagttcgtcatttcgacgataatttagggtacagtaggagcctagatgatcacttatgacatctcatgccagttctttcagtccttatgaaaaacactctctattgcaatatagagaagtgtaccttttgtgtagataatatagtatttcttagggtttgttagtggtagaaatggggtccaagtggaccctgagaaaatcaaggccatccaagaatgtcccaccccaaaaagtgtgggagatattangagctttcatgggttagcaagcttctatagaaggttcgttcctaatttctctacaattgcatcacctctcaatgagctggtgaagaagaatgtggcatttacctgcggtaaaaacaagagcaagcct

SEQ ID NO: 257355 - DNA, 444 bp, Glycine max
ctgcagcttgaaccggcccctatgttaaatttttttgataataggagccttcgtacgggaagttgtgataacttaatgtgaacctaattaacattttttataggtaattatttaaattccaaaataagacatgatagtttatataggacataggttaaccccatttatatcaatcttaatattatatatttatagctaaattggaaaaaatatatatacgattacatatattttaaaatatatattgagggaaaaaatacccctagccaactttaaacctttaatgtgagtttagtttttacgctttactaaataaacacatttaacattgattttggaagacatctagagaactgatgtatttaacacagcgataaatataagacacattctacgttaatgttacaatcaatgaagaattactgtgttttacattggtcctct

SEQ ID NO: 257356 - DNA, 380 bp, Glycine max
tttcttaccaagtaaatggaacatttttaaagggcaatgccttaaaatgatcaccttccaagtacaaggaatcgcttgattcacccttaagaaataactacgtaggtctgatttcctcttctatggagggtacatatgagcaagagccccgcttttgtcgaacctcaaaataaaaagacataaaagtttacatacaacatttcacacaattctaatttaaggctgttgtcctttgggacaaacgtgaaaggtgctaataccttcctcaaatgtaaatacaactcccgaatctggaatattctttatgaccggtttccttccgttatttcgacgcttttcacacataaatggtggtggcactccgcacattttcctccttg

SEQ ID NO: 257357 - DNA, 441 bp, Glycine max
  unsure (1)..(441): unsure at all n locations
agctntatgataataaaaatagtaacttttctttattatgacacgttaggaaaattaaagcattcacttagtttttaaatttcaactttntagaatttcacttgcaaaataatgatttggaatggaaacaataaatggcatcaattcccataatgggaaaggcttttcttattgttctagtctgccaacccatagctttacagatcttaattacattccatttaattacgttacttcacctctatgatttagacttgtataaatctataatttcctttttcttcttggatccaaaggagatctaaaacctgttgcggggaggctatagggagagagcaagccaaagtggtgcaaggtgatctatgcacaaactactcacattntgagagcttggcatanagttcacgagggaaatgaccaatggattgacgatttaaagat

SEQ ID NO: 257358 - DNA, 453 bp, Glycine max
ctaagctttaatgctctattcatggagttgacaagaatatcttatttctgatcaacacatgcacagtggccaaggatgcttgggagatcctgaaaaccactcatgaaggaacctccaaagtgaagatgtccagattgcaactattggccacaaaattcgaaaatctgaagatgaaggaggaagagtgtattcatgacttccacatgaacattcttgaaattgccaatgcttgcactgccttgggagaaagaatgacagatgaaaagctggtgagaaagatcctcagatccttgcttaagagatttgacatgaaagtcactgcaatagaggaggcccaagacatttgcaacatgagagtagatgaactcattggttcctttcaaacctttgagctaggactctcggataggactgaaaagaagagcaagaatctggcgttcgtgtccaatgatg

SEQ ID NO: 257359 - DNA, 272 bp, Glycine max
acttaagtaagaaacttcatttaaccccactttctttatcgccaaatcttacttattactcactttatcaaacttttggcatgcagaactcttcaacttgagtacttggacttatatctcatccactggcccctcagttctcagccagggaagttctcctttcctatagaggtagatgatctcttgcctttcgatgagaaaggtgtgtgggaatccatggaagagtgccagaaacttggcctcaccaaagccattggagtaagaactctttt

SEQ ID NO: 257360 - DNA, 232 bp, Glycine max
ttgaactatcattacaatttgggcttattctacggggaggtcgacaactatcactccactgtaagccaaaaggatgatccacacgataagactgatgagacaatctgattgttctcgatatatgctgaatcaagtattttttgtgaatgtaaatgtgccatagagtaccttctgcaaatttactccttagattcatgaatgagtctctgacacatttgttttaccgaaaaag

SEQ ID NO: 257361 - DNA, 361 bp, Glycine max
  unsure (1)..(361): unsure at all n locations
ttaaagtgccacttagaaccggcagagtctccaactttgggtgattcctttaaagaattgtgccccccttttgcacatgttctgttattgcattctatccgaagacattatactgacactgcctaacgaaagccaccactangtccttccaagaatggacctccggaaggttccaagttagtgtaccacgtaacagctacccagtaagactttcttggaatgaatgtatccaagaattccttatcttttgcgcatgcccccatctttcgataatcatctttagatggttcttgggcaagaagtcccttgacttgtcaaagtccacacccttaacttgggaggggtgatgacattgggttct

SEQ ID NO: 257362 - DNA, 169 bp, Glycine max
  unsure (1)..(169): unsure at all n locations
ccgctcaactgnaaccgcctagccgcgatttttctttaccagggggcccttacgcccttaaacccaactcacttaaacttaataaggtcgtccaagaaaaaacacccacaaacccttctagggttattactcctttttttttaccttcttcttgtaaaccctaaggcat

SEQ ID NO: 257363 - DNA, 456 bp, Glycine max
  unsure (1)..(456): unsure at all n locations
tncatcatcaagttaccaatgatcttctagtaatattatgtgcatatatgctttanatgcgagaacttatatgcccaataaagtttctacaaaattagtatctacaactccatatgtgatatgaaaaggactagaatgaatctcaaacacaacaagggttggaattgacccacttacattaagagatcgcaaatagacaaagttgaggcaatgtctaggaaatgtaaattcattgggtatcccaaattcataatctctatcgtgataacaagcctctaatattaatcaaggacttgtcaaattaacaatttaataaaacaatatatatgatagtaaaataaagaacaattctttactaacattgataacctgatgaattggatcttaggcatacatatttatccctaatatgttcaactatcttatttctacacgatgtgaaactttactccacac

SEQ ID NO: 257364 - DNA, 446 bp, Glycine max
  unsure (1)..(446): unsure at all n locations
ttttactcaggcatnttatattcacacgtactcgggatgtaagagatttctgcaatttgcggtatcttatgtgcagaatgtgtcttggatgacaatgaaatcatgtgtctggatacccaacactgtctatcttagtgccttatctatatagcatattggggaaccctagatgcctacatgaagctaatggggtttcaaatcaccactatttaccctttttccataagtatccttgactatgatctttcttagccttccttttgtccccaaactatatatcgcacataaatcccaaagccatctttaatcttcacataactgtaactcttgccttgaagactggatntcttggtgtcaccctagtctgtcaacctattacgattgaaggtgaatgcttcatccattgttagctattcccagctgactcttgtaacgatggatgatgg

SEQ ID NO: 257365 - DNA, 270 bp, Glycine max
tcactaagcacaccggttcatgtcactaagtgcaccactttagcacatctgctaagcgagaaaggcacgcgctaagccaaaattcactaatgtgcgctaagcggtccataagtgcgctaagcgcgcgagcacgaataaggccacctatttaggcctgaaattagattttagaggggagtttggactgggattcagagctctgtatgtctagggtttctagagaaagaaaggtccaagttccaaagagttttgagagattttgctgtctga

SEQ ID NO: 257366 - DNA, 259 bp, Glycine max
gtattgaaaagaatttttcacaatcacacatagcatattttgttttcaaagaagttttctcaaatttttaagtaccagagtttcactctctggtaatctattaccagtttcctgtaatcgattactagtggcaaagtttgatttcaaaagctcttaacataaattgcaacgttccatttgattctcacatggtgtgatcgattacaatatattggtaatcgattaccagtgtatctgaacgttgaaatttcaaattcat

SEQ ID NO: 257367 - DNA, 426 bp, Glycine max
  unsure (1)..(426): unsure at all n locations
ctgcaactagacaggggcgagtctcctttcctcttctgcatcaagtttgaaggtctccgaggccaactcaatgtgaagagtgtctcttctgaaaactcttccccttaagtttgaggggttattgaagaatgttattgtacaaccgtgaaaacattctgtaatctaattcgaacggctcgtagcttttgctaataccacccatctagtgataaacagctgcacatgatggtcacggcagtcagctctcatagtgttagttagaatctatcagtgctagttacaatctgttttctgtaaggctaacagaacatacgtctatatatacctcctgttgtaactaactgcaactaactgtccaaatcaataaanatcattttcacttctcttcagttttctctctctctatcaggcttgccaacaacgttt

SEQ ID NO: 257368 - DNA, 392 bp, Glycine max
atacttgagctttggctcatttttattgtcatataatttcgttgtattagggtgtatattgttttggactgaaaacaaatgttggctcattttgatctttgctttggactaaaaataaatgtaacctttgtctcattgtcattctcattttgattagtactgtttgacttcttctatatccagcccggaagctgtcatttgattcttctttttctacgtttgtgtatgggtattgcgtttctgtccattttcattgttgcgttaaaattttctattacttttgtattcgactcttttctattaactctgtttttggccatttttttccctgttaccctttacctttatgttgggctttactgacgtgagttgctattatcttctgttatatg

SEQ ID NO: 257369 - DNA, 451 bp, Glycine max
  unsure (1)..(451): unsure at all n locations
tgcaagcttcttgcgtagccgctgttggagctcatattatcccanaaacaaagtcctcttattactagctattttgaattctttagttcctgaatgtacaactttcaaattgttggtcgttcccctctttgttntatgcaaaaaatgaaatcaatatcaaacaaaacatgcatacaattgtcatcgttattgctacttgaaccataaggaataacatctaaagaagtacttcaaaacgtttatttattttttttggtattttttgaattacaatttgacttcaatatctaattttttaatgtacttacgtggaggatgttgaccaacagaacgagaatgaagaaaataatntaaagaagattantgaagtgtcacatctattttttcctccacaaggaagtgtcacatgaatgctcgttggtgaacaagcataatgccatttggatgacaa

SEQ ID NO: 257370 - DNA, 461 bp, Glycine max
  unsure (1)..(461): unsure at all n locations
ttgcaaatttagagtttgctggcgagaggatcgaagtgggtctgataaaaggaaaatttgattatgctgctttgaagaaacccatgttgtgactaccgttcctacatagccaaatttcccactagctcaacaatatcaatacttagacaatattagtccttctcattacccaccaccctaccagccaagaacacccaatcatccataaaggtcgcccctaaatcgaccataaaaccctccttctgcacatcctaggccaagcaccacccttaatacaaaccaaaacaccaatcagggaaggaattttccagaaaatgagcctgtagaattcaccccaattttggtgtcgtatgctaacttccatatttactcaataatgcaatggtagccataatcccggcagagattcctcaacctccattntcctgaggatacaactcatgcaacatgtgcttatcatg

SEQ ID NO: 257371 - DNA, 388 bp, Glycine max
  unsure (1)..(388): unsure at all n locations
agcttcttttggaccttgaacaggcaactaactcctctttcaaaaccatgctatgtgctcgcgactggtccctttcttcctttcgcaacttgagttcactattgctaccccatagagctccgcgaaatttgttccggccatactcttccttgcgagccctcttggactcttgttcaagggctcttgcggtaattgcattctctttccgtaacccggcgcactccttccgaacgtgtgtagcagccaacttgaacttctccttggcgagttttgcctttcctaactcgctgttgagagtttggacttcttcgtcctcttccgatgcttcaaaactctctctgctgacgactnttaagtgggcgagccaatctaaacctcgtatatgaac

SEQ ID NO: 257372 - DNA, 466 bp, Glycine max
  unsure (1)..(466): unsure at all n locations
ctataaatactcagcttgaagatatggggtatccatcacatgtggtactatgttgatgtcgggcaatggagcaaaacaattctccacatccacaaatcacatataaacccaccatcccctgttgcccaccttcaactgagcacacgtactcccacgtagcccttatcctcgtttctctcaacaccgggtccccatcaatccttccaagcttccacaacatccaagtaattcaacatccactcatcacaaactaacaaaaccaagcaaaacagggaaaaggcagaanactctgcccaaaactcagaccaaaaatcacagctttgtctcacttaaagaccccagtaacatttacttcgttcaccgttggatcgacttgaaaattttactggaaggtcctagtacataagtctacattttgaccgttgggatctgctagacaatgtacataaccacatatgtacctacc

SEQ ID NO: 257373 - DNA, 408 bp, Glycine max
catttgtatttatttgagggtaaatgtagttcagacctacacctttatttacatgacaaggcaactagttgtgcatgctgaatgtagtgtatgactagaggcaatccatctgacttacaaacctttgatcctgagatagataggacatttcatagattatttaggcatcattctataccttttgatcatcctgagcattccattactggtgaatctgtgcattctgttattggtgattttgaacatcctgattttgagcattataatattgagcattctgattctaaatattctgagtttgaacattctaagaacatggcacaacctccaccctgtaagaagactctaagggaaatggctgcacctgaattcacctacaaaagcttgtgcatccaataccctgatgag

SEQ ID NO: 257374 - DNA, 446 bp, Glycine max
tgattctggtctagacatgattgatacatgatttgggactcgtaagatttgatctgggcaagattggatgaggggaagtgtgattttcgaaatctgcacttatgcagaattttgctgtcgaaataggggcagcaagattttggctttgtgcagaaaaatgcttgtgtgtggttggctgtggaaagagtagtacaaaatgagttctggatgtttgctagtagatcccaacggtcacaatgtaggttcatgtactttagacttccaataaaattttggagtcgatccaacggttaacgatatggatcgaaggaattgttactggggtctttaagtgagaaaagctgtgatttggttggtgttttggcgagttttctgcctttgctctgtttagcttggctgtgatagcttgtgctggttgaatgttggcttgctcggatgtaatggaa

SEQ ID NO: 257375 - DNA, 217 bp, Glycine max
actgcctggtgaatcattagaagttcctctttcctgaatcgataaaattcttgttctctttcgtattcccttacacattgaatcacattgagaaaaatcacgttatcttctgttgtgtgcgattcagccatttgtattgggtgagttctgagaaaaaatcacagttatctttgattggtggcgataccgaatccttgttgccaattagggattttgt

SEQ ID NO: 257376 - DNA, 443 bp, Glycine max
agaagtatcacactctgcaactccttcatagtcttcactcttcaatctgcttatcaaagcttaataaaatatttgttgaaaataagctttttcccattctggtgtacattaaatgcatcagatatcaaaccacaaaaagttgaaaagagcaatagtttgacgatgccaaaaataatgatagtttataccaaaaagtttttctctttcctgacatgtgtaagacacattctatctttttccttttgtttagctacttccgtagcttgtatctggatctgaactaatattagaactactcatgtttcatagtaaaagcaacacaacatttgaaaagacaagacaaaatatgaatgttttagtacttagtcacttttcaaaaaaccgtgttaaagtcttaggtcataagacacatttcgtccaaaatataacagaaataatatata

SEQ ID NO: 257377 - DNA, 371 bp, Glycine max
tatggctttgatgatgccaaacttgaatagccattcgagtgcatttggagagccttgagagtagagacttttcttataaaacctaaaagtttatgagcactaagagaagtgtcaattcatatcatcatcatcattagatagagttgtctataaatgtatgtatgcagcgcactaatctttcctaatgcgatgctaatgcaactctctcccctttttggcataacaaggacaaaaagtcacaactattcatagaataaatagacaaacacattttgtgaactgggaaaataacatagcatttcattcattcaataacaattacgacttagtcaaacatcatagtaatttattccagatgtacagacctgatt

SEQ ID NO: 257378 - DNA, 346 bp, Glycine max
  unsure (1)..(346): unsure at all n locations
attaccatctgcttggacaatgagaaaactggggcaaatgaaaagggtgaggatgaaaaaaaagcccatgctgtgactgccattcctatatggccaagtttcccaccaacccgacattgtcttactccgcccataacaacccaatctccttacccaccacccagttatccaccaaggcccatccctaaatcaaccacaaagcctgtctaccacacaaccaatgctaaacaccacctctagcacaaaccccaaacacccaccaagaaaagaattttgcagcaaaaagccttagaattcacccaaattccggtgtcatatgctaaactngctctcatatctactccat

SEQ ID NO: 257379 - DNA, 435 bp, Glycine max
taaatgcattgacttcttgaaaacacgcattatcttggcagttgtcacccaaacaactaatctttcaattacaagtatctttatgtaatcagattgaaattggcattcctcacgagagttgaatttcatagggtggggatagaggtattggtagaaattcattccattcactacgtattattagccatcgaatgatactgccacaaaggctaatttttccaagagtttgacaactccatgattccttatgatcttgggtggtttatattgactagctgatgttccatttttaatggctaattctgataactgatcaaaagctccaggccttatgatgaatatcccgtagctccttagttgacctttatccttctgcaccttgtatatagctctcaacccactctcaagagaggagatacaacttctcaaaactct

SEQ ID NO: 257380 - DNA, 435 bp, Glycine max
actcagctaggcaataccaaaattttcacgccaattactataacaaaagaggataaatcaaagcttatactcctaaggtactggacttcaatgatattgctttacacaatgagaccccaaactttcttctctacactattatgctctaccaaccattagatcctccaccaacttttggagcttaataagcttcaaattgatggtgttgatataaattgccccaccaaacccctctccaaggaggaggtcttagaagctctaaataatgttatgaaaaaactcgattcaactatctgtgctatatatgatcacggtgtctattatccctgtcctgtgtgtggaaaaactttgccttctcccttcaaattggactgccaaatgtttgaagacacttacgctactacattcgaatgaacatacacaattatatatata

SEQ ID NO: 257381 - DNA, 241 bp, Glycine max
tctgtgggatgggaactcatcgaacatatctttttgaattcgatagcttttgaaccacctacctcttggcttaacaaaacccaatttctcctacaacctattctactatatttcatttactccttttcgcttttaaatcgatttcgtttgctgccagatcacttcagattatctgcttctgataaagtccaaactcgaataatctttaaccttcacatttaaaaatgaaaatttctatgaa

SEQ ID NO: 257382 - DNA, 224 bp, Glycine max
cttgtattggtcatgaattcttcatttatttgagtgtacaactcattcaacatagaatggtacgactgacctgattttcgagctctccacagcttggtgtgctcttataattggttattggagcggctaccatcggcatacctcttgatcttatcatcgtcatttaaaccactctatcttacctgacaaactatgataaagttgatatattcaattaaatattc

SEQ ID NO: 257383 - DNA, 333 bp, Glycine max
  unsure (1)..(333): unsure at all n locations
caggacacagnatacttcagatataatcaacaactatcaataacacgtgtgaatgtggcacagccgttagctaagcgaacatttttcatctaacccgtactatctttcctccttaaattcttcatcatttaagatctgtttgggtatattatccagaagttttctaggataagaaattagaggaaaaatgacatgaactctccataactcaaatacttatagacagctaattatgaagtctttaagatttctacaataacttatgctaagcgattcagctataaaagcattcattttttttatttctttccagaagtctctgataactaccac

SEQ ID NO: 257384 - DNA, 404 bp, Glycine max
  unsure (1)..(404): unsure at all n locations
cctaagtgacgccgctgcaagctgcagagttatgagcattcaataattttctttttgttgacattaaatatcaaagactatcaacgtaccaatgaggaaagaggaattgtgaagacatgctcaattcaagcaaagaaatgatatttattccctatctgtaatagaaaacagattttgttgtggtcatattttgatggtttagatgtggaatgttatacaacttctaattagttctcaacttttgtggtatctattattagtatcttgtgtgaacaaactattgtttattattgataatattataaatgttcaactatttgcattttgttaattntctatgaaagattgaatgtgatatgcagcagaacccatatgggtagcatgcccaatataatgcaacaaat

SEQ ID NO: 257385 - DNA, 199 bp, Glycine max
tgaaattgctgtgggaataagtgtgggggggtatgtttattggaagatatgattttggccatgcttaatgtttttattatggccacgcttgatgtatatatatatttgctaattcatgctttaatcttcaaattcgtactgtctataaataaaaagaggaaaaaaatgaaagaaattcaattgctgcaaattatgcaaa

SEQ ID NO: 257386 - DNA, 315 bp, Glycine max
atgtttctcgaaagagcatgttttaaaacgttagcatcatggttctaactttgtatactttcttccatttttatcctcaatatatttatccaatttcttagttcccctttataaataaacatgattttatggatttttttttatcattttacacttttcagttacttcaatagctacttgtatcaaacactttaattaataagctaacttttcaactctaagttttcggtaccagctaactttgtagctttcagttaacttttcaactaggtttgccgaacatagccgtcagatacttgctagtttccagctttc

SEQ ID NO: 257387 - DNA, 287 bp, Glycine max
  unsure (1)..(287): unsure at all n locations
aagatcttanagacgcgagttcttagccgaagccattatgagagcttgagatgagtttgtgaatgattgcgaaattctatatgtgaaagagacatcttcaccacttgtgttgtttaatctttcatcttgttctcctctttgatgtaaaggatgtttccagactatggaaagcttaaatccttgttggatcttccctgtatgtacctgatgtaaatattatttcatcatctgtatgatagttagtgtgttctctgcgccatctgctttcattccaatgggattttacc

SEQ ID NO: 257388 - DNA, 476 bp, Glycine max
  unsure (1)..(476): unsure at all n locations
gctttatataagctgaaccattntaacaataatattctttttgaggnnnatncacaacattagagtgtatctcttcttatcttaagtgagagtagacttctcactcaaattccttgatgagattacaagaatatccttgtgctgtatcaataggacttctcacaatcctattgtggtgttcgccctcagctggaagagagtagattctatcccttactttcatcattcaccacttgttccttttcaaacgcacaattccaagaaaatccacctctgcccagaattatcatcgggccataaatcccattttacccactcaaattaagtgattctagagcctaaattgaatgtcaaaacgagacctttcacctcggtttggaatcacctcatttggagccctgtagcttcagtgattggcattctatatgtctgccagccacacttaacctacgtttacctcccattcttcatttatg

SEQ ID NO: 257389 - DNA, 429 bp, Glycine max
  unsure (1)..(429): unsure at all n locations
tgaaanataatgaagataaatggcttcctctacctcttgttttctcttgtaaatgatgaacaatggccccataatttgcttgtaaagaattatgaagataagatcaatgactcttgcctgaaagaaatttgattaaaccttattgacaagcttaattatcaccaatattgaatacttggaagccaagtttaatgtgccaagacatgcctcttatatgtgttattgcttttgaaattttatccaaaaatggaagttgacataagaaaaaatggtaaaaactacttttgctaaaactggtatatcttatcttaaatgtaagattaatgtgctaacttcctatagtattttgctagtctccctatgaaaacatgtactcatagtaaacttcacacattatctactcatacatagacaaattacattgtgact

SEQ ID NO: 257390 - DNA, 403 bp, Glycine max
  unsure (1)..(403): unsure at all n locations
actaacccactcgncagtcatggaggttcggctgttaatgcaatggaggaatgggagcgtcggaggttgaaacagatgggagacgtgtcaacctctagaatgttcattttggaagcaccgcatgaagcgggtatggttcgccttaagggtgacaaggtggagaacctgttaatgcatcagggggcagagcatgatgtggagacgtgcctaatggcggaagtattgttacaaggaatgatggataagggccaaattgaagtctgcagtgtgagcgaaggggatagggatgtgtgcatgcagtcgaatgatgaaagcccgagcaagcccaagcccttggtgatccacttcactaaggatgtcgccactcaatagccccagggttccagcccgttacagttaaaag

SEQ ID NO: 257391 - DNA, 322 bp, Glycine max
  unsure (1)..(322): unsure at all n locations
atctgcaactgtgatttctttctcaatgnnaagacaagntattgagctcatgtgactgccattgcgtctgcatcaactgcatttgcccacaatttcccagaatgtcaaggatcacgctgaaattgcatccgcaaccacaatttataatatggcttgaagcttaatagcacaataaccttcaaccattccatctcttcatgctgttttacgctctatttaattgacctaaattatctgtcattctggtgattaatagagaatggcctgctgaaaagatgaaagatattaagcttgctgatgcattatagcatcccatatggag

SEQ ID NO: 257392 - DNA, 439 bp, Glycine max
tagctttatacatctcccaaccggggacaggctcatgtagtctttcatccttgatgaggtccatgatctacttgcaatccaaggcatctacttccagttctctttctaaagcaagccttcgttgatattacaaatttccacactttcatacattgacagatgtgagtggaaaagaaatgttgtccaatggagcatctaggacattttcatgcacctttttccctgatttcttggcccgcttgatgtcgagaacatctggttcgacatcatcatcagaatcagatgaggaaatttctttcctcttcttggacgggattgcaactttgctccatctggatgtggtaagagtgatctgagtgctcttcttctgtgccattaatttgattcgttcagacctatcaatgcggggttccacttttctgctctggtaactttctgc

SEQ ID NO: 257393 - DNA, 429 bp, Glycine max
  unsure (1)..(429): unsure at all n locations
agcttgttgatagagatgatatactagtagatcttgtcataatcgatttggagacttatttgagtactttatcaccgacactcaacataatcgcactgtaagctttctcaagcattgatttcttatccttgtcagccatcggtttttcaaccttagcctctccttcatctgtcatagactaaagtcattttgaccactgcatttctcaacatcgtactcggctgaacccatgactcaagttccaggttcactgtgcanccagtttgaaaaaaaaatataatttgattaaaacccnctcccaaccttagccgcaaaatccacttattcggattcgttcaagccacacaagcaacaaaaatacaagtatccctcgtggcattgcaatnggaatcagcaagtaatcacaatcacanaaaggataactatatg

SEQ ID NO: 257394 - DNA, 447 bp, Glycine max
tgttgatatatccatattctctgatattactaattgcatgcattatgagtgaaccttagtttcccgtttgagattcaatacactgattaatacggatagtttggattaatcgatatattgagtcttgaattatctgtttggacagtttgggaggacatttttttatagttgattcatacgtagaggtaaattctcttttgcatgatttgaagaaatttatgtatactgcatttcacattattcttcatgtgcatactgactgcggtgattgtgcaccatgtcaccgctttcatcttgtgtacctgaagaccaatgcgaaatgctaccgaaatgtcgttaaatctaacaaaagagattgtacctatacgttcgaatcaactataaaaatgttttcctggatgggataatgccacacctttaatgaataaagtgagtgtagcatgcatg

SEQ ID NO: 257395 - DNA, 312 bp, Glycine max
actgcttgtggagcttctatggaggctggatctttgagcttattgatgtccttcaatggtgatttttcaccatggagatgcagcggaaggcacaggagaataggagaaaggaggcgccatccactatggaataagccatggaagaaggagcttcaccaccaagatgagccttggataataagcttggaaggatgcttcaatggaggaaaagaaagatggagagaaagagagaggggggagcacgatatcgaaggaataaaagaaggggagaagtagaactctgaagtgcgtctcataagactttcattcatc

SEQ ID NO: 257396 - DNA, 395 bp, Glycine max
  unsure (1)..(395): unsure at all n locations
atcccccactccttcaagnaagagccacgcagnnctgggggcagctntctcgtttgtgggctggttttgtacaccactgtggaaaaagagaaagatgatgataaatatatgatatgataagaattatcaataaatggctccatttatttcaggtcatgttccgctttcaaagttatattcagagaatagtaacaaaaatatggaaaagggagtccaaaagagaaactgattgtcaatgttaattgaaaggagaaaaaaaatgatattaaagaccaaagaagaaaaagaagacncatctctttccttttgttagtctaatcaacgaaaggaagtcacactataatgactgacgtgtgttgctcgtttcagtgctttacactttaaccaaagttctt

SEQ ID NO: 257397 - DNA, 301 bp, Glycine max
tactaagctaataatcttattggtataaaaagcttcccgtagtgttacctttgtttatgggataattctcatttggttctgagaaaccccatggatcatgcatattcactggtcagtgggagaaaaatgctccttgtttatatgtaatgatatttacttgcaccatgatcgggtttgtacataggtgaacaatttctctctaaaattctgacatgaatgaatggggatgcatcttatgtcatcgacatagattatagagatgactcatgtttttggtctatccatgaacctattaacaaat

SEQ ID NO: 257398 - DNA, 476 bp, Glycine max
  unsure (1)..(476): unsure at all n locations
ttaagcacctgggctgcagcttgatttctttttccggaaacctttcttttctcatgtgcacccaaacccaatctccgggttcgaagacaaccttctttctccctttgttggcttgtttagcatagctnttatttttcctctcaatttgatctttgactctctcatgaagcttcttcacataatccgcctttgcttgaccttctttatgcttaaaaacagaaacattaggcataggcaaaagatcaagaggagttagtgggttaaaaccataaacaacttcaaaaggagaacaattagtggtgctatgaacagctctattgtaagcaaattcaacatggggtaaacaagcttcccaagtttttaagttcttcctcaaaactgtcctaagcaaagttcccaaagtcctattaacaacttcccgttgcccatcggtttgtgggtgacaagtggttgaaaataacaatttagtgcccaac

SEQ ID NO: 257399 - DNA, 377 bp, Glycine max
  unsure (1)..(377): unsure at all n locations
ctggcattggaattgcgaaagccccactccatcattaggattattacctgacatctcaaacaaacaaatcaaacgtaacaagacaattatagttgctgtttgaatacctcacccactcaagtgtatcacacaattatggcttttctctaatgaaacactcttgccttttaccactctaattccccttgagttcttatgcaattcaagagattatggccacaacaaagaacaattcaccaatatgtgtaaggtaaggctagacaaggaaaaggttaaccaagaataaggctaacaatgtttntaggcacaaatgaagganataaaattaagaatttaggaattcaagtaacaatccttcatgcaaccaatatattacc

SEQ ID NO: 257400 - DNA, 373 bp, Glycine max
cctttatacccttgagagtagccaaggaacacagctgtttcagttctatgtgagaatttgcgtctgctggatatcaaagtggaggcataacataatgttccaaatgtcctgaagtcaacatagttaggaagttttgcatataaaatctcaaatggtgacttggctttcaaaataagactaggggtcttgttcatcaagaaaactgcagttgtgatacattcaccccaaaattttaatggtacattggattgaaacatcaaggcatgagcaatatttaaaatatgaaggtgtttcctttctacaacacatatttgctgtggacattctacacaggataattggtgtatgacacctttctttgaaaagaaaattg

SEQ ID NO: 257401 - DNA, 415 bp, Glycine max
  unsure (1)..(415): unsure at all n locations
tgtccaacataganaattgttagcttttgacctcaagtggttcattcttctataatttctatgggacaacaaaagtgaagatatctataacattcttaggttcatacttgtatggttcattcagtgtgtgaagatatctatagcatgggtcacttgattaatcaaatttcacaggttaatgttcatgtgaatttaaaattcgtgcatacgtatgggtcacttgattaagggaacttcataggttgatgtttatgcaaatttaaaacctgtgcatacgctgaatcacttgattaaggaaacttcaaaggttgatgttcatgtaaacaattatttcaaatcataaaattaacaaactatattaagatgaatctcatgagactcaaatataataatgaaaataaattgtgtaaactaa

SEQ ID NO: 257402 - DNA, 368 bp, Glycine max
  unsure (1)..(368): unsure at all n locations
agctcgaatactatgaaactcgctaacccaccttttctctttattncactcaaacgctcaaggttccttctcctagtggattgacagcgtcaccacacatgtttngtttgtcttaaaatattctcttgtttttcgacaactttaacacgaacatctttatgctttatatggatttcatagctttgatccattgagagatcccaactagtcattgtctaatagctttggcacttgacatgaggtcgctactatgtagagagagtggggaccacagacgctttctgcagcatatctttagagaagtttgatcgtgttgttagtgctcagagctgaatttcagcatacaaataatataacattaacagcat

SEQ ID NO: 257403 - DNA, 398 bp, Glycine max
cgattcattctatgtacccgtagtggtccacattgtgtttcgtgtcattttattctcgttttgtttactgtttatgccccctgttgacgtgcttaagccattttacttaagtcgtttctcgcttaacttaaaaataaaataattttccaccgaacgtttgaattgtattatccattaacttcggttaaaataaattccgaccgttcggtcatgccgtaaccacgttggaaatcaaaaagaggtaaaaaaaataatataataatcaaaaagacatcttttagtaaaataaagcggaaaatcaatcggacgttttctctttgggatttctcattcttaatcgaattgattaataactaaagtgaaattaatgctaaaatcaactcgcctagtcaagctcg

SEQ ID NO: 257404 - DNA, 340 bp, Glycine max
tagcttgtgcattcaatatcctgatgatggtgtgctacatgttctcaagactggactaatacatttgctgcccaagtttcatggtcttgcaagtgaagatccttataagcatcttaaggagttccatattgtttgtttcaccatgaagccccccgatgtccaagaagatcatatctttctcaaggcttttcctcattcactggagggagtggcaaaagattggctatactaccttgctcccaggtctattttcagctaggataaccttaagagggtgttcttggagaaattcttccctgcatctaggaccactgccattagaaaagacatttcacgcatc

SEQ ID NO: 257405 - DNA, 320 bp, Glycine max
gtacctggagatattgcgcgggggtcaagaaaacctggggacgtcatgtggggtgctattgcccaaaaccaatcttgaccaatccctacccaacccgggcatattctgtcagtgagaacctgtgatgtacctaagcaggcgagctcctggcagtcaacagattaaacgaatacaagaccacaaagcactgatgcttgtggtggctggccggctgtgaattatgtgtaatatgtggattgtggactctggtaatcgattaccaacggggggtaatccgatacaatgcttaaaaatgaacacagggggctaaaatggactct

SEQ ID NO: 257406 - DNA, 467 bp, Glycine max
  unsure (1)..(467): unsure at all n locations
agcttgaagaggatgctntaatggaggataagttttatagtaagggggagcacgaaattgaaggaataaaagagggagagaagtggaactttaaagtgtatctcataagactttcattcatcaaagttacaataagtgttacacatgcttctacttatagaataggtagcttccttgagaagctttcttgagaaaacttccttgagaagcttctttgagaaaaacttccttgagaagctagagcttagctacacacacccctctaataactaagctcacctccttgagaagcttccctgagaagattcctaaaaaagctagagcttagctacacacacctctctaatagctaagctcacctgtggcgtccctaaataatgattgggttaatagtaataaatcaaatagcatanaccatggggaaatnttttcttttctctttntttgcactgttatcatttcacgta

SEQ ID NO: 257407 - DNA, 361 bp, Glycine max
tccttgctttgcaactcacttcgatgccttaatgactcaccctctcatgagcatatcactataaaagctttgagcttttgaaacgctttgtgaataaacgagtgtggaggggggtgggtgcttaagcaattaaagacaatatggccgcaaccaagaacaattcaaccatatgtgttaggtaaggctatacaacgatcatgataacgcttaataagataactatgaatgtagctcaacagaacgagaataaactagatttacgaaacatgtatccacctcatgctacactatgttacctataccaatttgttgttacaatttcccgaccccgaaccgttcgtacaagttttttttgttttta

SEQ ID NO: 257408 - DNA, 412 bp, Glycine max
  unsure (1)..(412): unsure at all n locations
aaatacactggcaacctctgacttagacttgagaaaataaatccagcacattctggtgaaatcatctataaagatgatgtaatatttactctctttaagcgaagcagtcctttgaggttcgaccaaatctgtgtgaatcaaatgtagcttctctgttgctcttcaagttgatagtttgaaagagaatcttgctcgcttaccatattgacatgcttcacaacttgttaatctagaatctaagtgaggtaagccatgaaccaactcctttcgttgcatgttcagcacaattgcatgatgaanatgacctaaccttttgtgtcaagcctctgtactgtttacagtagctggataggctgcttgctcctcctttagtgggtcacatgagatactcttgcctctcattctgatactg

SEQ ID NO: 257409 - DNA, 330 bp, Glycine max
catgtgaatcaacttgatccgtatgaagcacgttgatcatctttctcttcttgcggatcaacgtgatccgcaagttcaacacatcataaacacaacctacggatcatctgccctatttgcggatcacctataacacaacataaacacaacctacggatcatctaccctatttgcagatcacctatgtcctaacttgtctctactgcggatgacctaaatacttaagcaatcaccaatggaagcaataacaaacaacaaaagtcacatagaccttacctcgatgaagaacaaaagagcaacacctcgcgggagaatggaagaagaagcgca

SEQ ID NO: 257410 - DNA, 317 bp, Glycine max
aaaaaaataattgttctatcctgcattcggactttaactcgcttcctctttcttaatagggagagttttttttgtcccctcggtttgggatccttaatatgaaaaacgttcggaaaaatcaccatgcgcttcgtactcacgaaattcatggggatctgaaatttcccatcttgtgtttctgtcttcgctcccggtgtccaatgactttattcttttgtccctggggcccttgttggacttattcttcttactttctcccttgacgctttcttttaatttttcctatcaaaattcccacttgatgtctttaattgtta

SEQ ID NO: 257411 - DNA, 336 bp, Glycine max
gagaggggggagcacgaaattgattgaataaaagagggagagaagtgcaactctgaagagcggccacaagacatctcactcatcatagttacaacgagtgtcacacatgctactatgtatagactagggaacttccttgagacactatcttgagataacttacttgagaaactactttgataatactcacttgagaagctatagcttacctacacaccctctataataactaagctcacctctaagccgagaaaatacatgagaatacaacataagcccttactacaaagactactcaaaatgccccgacatacaaagctcataccctatactact

SEQ ID NO: 257412 - DNA, 398 bp, Glycine max
  unsure (1)..(398): unsure at all n locations
tgatggagaatccaggcgaancgaggtgttccgatgatttctgtgatganaacaaaagatgatgacgaaggtgacgaatganagctcaaagatcattcattctacaactccagtgtctcatgaacattgtccgatttcaggatctgaatcatgatgaattcgcgactcttgaagaatgtttggagaccttaatcatgattctgggtccatatctcaagagtcgatatctggattcatgactcaagattcaagaatcatgataaggcttaatcaagataagcatgaaaagtttttctcataaatcgagtgacacatgatttttctcacaacatgtctaccacagagctattactctctggctatcgattaccatattgttgtggtcgattaccatcggc

SEQ ID NO: 257413 - DNA, 242 bp, Glycine max
agagcagcgaaggggaccgcactttctgtactccggcgcgaaacgagaccacaagccccccacaaaagggccaacccaaaccacagaccagcatacacatgcacagcactctgcaacggaagcagaacagacaccgccctcgacaccgcccgctgcaaatacacccagccaaaccaccagcaacacgcaccgccacacggacgcaccctaaccccgcaaaacacgcaactacaaccgccaca

SEQ ID NO: 257414 - DNA, 416 bp, Glycine max
  unsure (1)..(416): unsure at all n locations
ggatggtgatgttgatgtgtattattataatcataaatttgtcaagtcattagttggacatccatatgttgggcaattgactaaagctgaaaagacacttattgctgatatgaccaagtcaatagtgaaaccaagaaacattctgctaactctaaaggagcacaatgccaataattgtacaaccatcaaacaaatatactatgcaagaagtgcatattgttcttccattagaggaagtgatactgaaatgcaacatctaatgaagcttcttgaatgggatcaatatattcattggcaaagattaaggatgaagacgtggtacgtgatatgttttggtgtcaccctgatgcagngaagttaatcaatgcatgtaatttggtgtgtttgatatacaatacctacaaaactaacgggta

SEQ ID NO: 257415 - DNA, 231 bp, Glycine max
gacactacagaaactaagctgagtggaagtactgactagtgaagaaaattaatttttcttttgtgttacgaaaacatgcctgtattattgtataaatatataaacaactcttttaaggtaataagcataaaattaaactctctattaatcacgtgaatattaacccattaaggttggaagtcggacaagacctacttaacttgtactaccagggaaaaaaatggaaatttt

SEQ ID NO: 257416 - DNA, 327 bp, Glycine max
  unsure (1)..(327): unsure at all n locations
agcttatagaatactaaacaaatgttnttaacatctttatagggagcatgaagattgtgagaaaactcatcaagctcatttagttgatttcgtccaggaaactacttcacctggtggtgtacaagacacctttgtttgtgaggaggtcaaggcattgctgaatgaatagggtgaaatccttaaccatagttcttgaagattcataagaagagcgaaaggaaacgcgtaaacaaaatcttttaatgcatatagaatgcacccttgtaataatgaggttgataagttgaaaaagaacaactcaaatctttggacagaatgtccacatta

SEQ ID NO: 257417 - DNA, 343 bp, Glycine max
tccgcaacatccaagtaactcaacattcaaacaacacagactttcacagccaagatatcatggcaaaggcagaaaactctgcccaaagcaccaaccaaaatcacagctgttcacatacaaataccccagaaacatttccttcgttcccattcgttaaccgttggatcgaatcacaatttttactggaagtctctagtacataactctacattgtgaccgttgggatctactagaaaacatccagaactcattctgcagtactctttccacaaccagcataacatagcatttttctgcacaatgctgaaattctgctgcatctatctgacagcaaaattctgca

SEQ ID NO: 257418 - DNA, 445 bp, Glycine max
  unsure (1)..(445): unsure at all n locations
gacactatgaaactaagcttatctcacatgtcgcatcacaataacttggagactatattttcccttctcttaaagaatataccaaggttagaagttccaatataatatctaaaactgcgtttaacaacaaataaatgaacttcccttgattctctttggaaccttgaacataagcaaacactgaacattatatcaggtatggatgttgtaagttgtagcagtgatccaatcattgctttgtattgagtcctatccaccttttaatattcttcatccagtccaaggtatgttggtggatacatgggcatcttcattctttttgcatcgnacatgttgaacttctntagaaattctttacatacttggtttgaaggatgtaaattacatctcttgttggtttatctgcagtcaaatgaaaaacttcttatctctccatcatgctcat

SEQ ID NO: 257419 - DNA, 258 bp, Glycine max
cacgaaacaagaaggagttttaaaaaaaaaagagggtttagctgcgaacacaccagacacgagcgcagcaaaccaaacaaagactttccaccaacaacagggagggaaagaaaccacgaccccccgggaccaaaaacgaaaggggccagcccgaaaaacaaaaacgcgaaacagaccccaaaaaacggaccacacaaaccagacccccaggaaaaacaaaacctggaaaacccgcgcaacacggaaagccaagccaaa

SEQ ID NO: 257420 - DNA, 341 bp, Glycine max
tcagattggccagctccttgcaaacagatttttttttttttttcttgaagaggcaagcgcttacgcgatctgatccttaaccgcatagtggattttggtatcggcttgttccttacggataactgacgggtgctgcacctgagcgggcctttcgactttcactatgttttttaaaaatctcttctatccctaatgtggcgtacgataccgtaattacagtggctatcgaaaggaaatatgcctttgcatataggattactgattgtaaaatgtgtgtcgccaagaaatttattcactacttattacatatacttttgtaaacacattattgaacttgataa

SEQ ID NO: 257421 - DNA, 435 bp, Glycine max
gacacttaaatactcactgtaggtatgatggcggaaagaaagagtttattttttgtctggtaagtgaccttattctaatagccgcgtgacatgagccttcgcattcgcccacaatacatgtacaaactttttattggcaccatgcgcaaccaattctgttcaaacattcctattacaggtgtacaaagagcacccagatatttattctggggcacaccaaaacataatgggaaaataaaatatctttcaaacaatgagtaaataacggttttataataatattgcatattataaacaaaccctgtttataaagcctaataatttcagcgacccacccgcaaagttgtggatttgactcaaaaaatgggggcaatctaatattggatgaatgataaatagaccaactctatcattaatgatgaacagatggttaat

SEQ ID NO: 257422 - DNA, 394 bp, Glycine max
  unsure (1)..(394): unsure at all n locations
agcttcgcgaacaatatgagtggcccagaancttattctctttgacttcaattaactataattgtgcaaaatcaaagccattctctcaaatttttgaaacctgagtaaatttctttcgaaatttcttcatcgtagagaagttatcttgtcacttgatacgaaaaaaaattccagttgatgttanttatttaaaatcattaatgaaagagtgtatataagtcgaagatacacaattagatacagtaactaatatgtaaagggtgtattctgtaaataataataataataataataataataataataataaatatttattctggttcctgaaagtataaaatagtgataaatttgtgtctaanagaatcaaaaaattcaaatattagtactaaat

SEQ ID NO: 257423 - DNA, 459 bp, Glycine max
  unsure (1)..(459): unsure at all n locations
atatattatattgtatataattttatgtatttntatcacactattcaaaacctattttatgaaataaatatacaatatgaattntatctttaaggtatattttttacctaaattataatttcataaaatgttagtattttattatttataaatatgtatatatgtcaatgaatatcttatacctatattaagaatattttattatttattataatagttgtttatatttaaatgtatttaatcactactttgtaaaagaattaaattttataataaagatatatacataattaaataaaatgacaatatgttctatttcttaaaatatttatgtatgtaatttattgatattattatttttatttatattataataaataacatgagtaccttaacatagataaaaaaatattatcactaaatcacaagtattgttttaatagataaatataatatata

SEQ ID NO: 257424 - DNA, 458 bp, Glycine max
  unsure (1)..(458): unsure at all n locations
agctttcattgctttattatatttattttttgttggtatcataattaaggtatttggctttataatggatttttgaggtattctcacaagtttcagcccattgagctgattatcttactaattctagtctgaagattaatcatacttaaagctgtttgtctatcttcaagaatgtattgtatgatcttaaaatggttaattatatgttggtctctctagttatggataacatataattttaattgcttaatcttttatgcaaattaagtttttatgttctaaaattaagcaaatttagtttctttattattctttctgttcaaaaatgttaattttttattctctagctaaatattcgaagatttgtaataaatttgatatgtataatatttaaaattgttagaatgtacaagttcagtggaaatatgacaatanctgaataattttatataaagtga

SEQ ID NO: 257425 - DNA, 339 bp, Glycine max
aacacatatacatactttttcctagttgatcactcacttaattctccatattctcccctctgttttgagtttatgcttcacttgaaatcaagttaattacttatgtgagttcttgatttaatctctatttctctccccctttggcatcaacaaaaagccaaagtgcgttacaaatataaaacatacatacattactaatcattcacaagacattcattgaaatatctaaccaatcatgaagcatgaaacatgaatagatcatatatataataaccacatagtcatataacataattcatagttattcaatcatactatgcaaataagagaaatactaaa

SEQ ID NO: 257426 - DNA, 458 bp, Glycine max
agcttagtctaaattaagctaaactttcgttttctacttgagctgagtctagtcttaaatgagggatctgtggacgataatcagtttaagttagtctaaacctaagagggttgtctaaatctggcctattccaacaagatggatctgaggatgaagcttggattaattccgcctgatgagggatcgatggtttagtaatttatgctacaacatataacacaagagtttgattgattaaagaaatatatttcaatgcatcagcttgtttgttagaaagacccaacatttctacctactgttgtcattttatttaccttgcgttgtataggttttagcatataagtttagtttaaattctgtttgaaattatcactcatgcatgttctctcaacaatgcttcgattctgaacttatattaagctaacattaattccctgtgctcgatactcggattcatc

SEQ ID NO: 257427 - DNA, 429 bp, Glycine max
  unsure (1)..(429): unsure at all n locations
tacatattgtgtgtgctgtttactgttttaactccatgtgcctagtagtaacaacaatggtatccttaattgatttataaaaaccaacaactttacatgcacgaataattcaaactgttcttaaaatataataaaaacaatgtacaatttttataatataaaacatgactacacaaatntattacacattatagcaatgatctcattagtagatcttggttttcttggtttgcgcaacatgataatgatttcatctggagatcaatcacaagttgaattcaactcaattggatctttgctactaaatttcgaaaagatgaaaaacaattttgccatatcatattcacatttaagctcaacacacttctattctacataaccatcgtctacgtaatttggtgacagtaataagataaataaattctgaac

SEQ ID NO: 257428 - DNA, 400 bp, Glycine max
  unsure (1)..(400): unsure at all n locations
actaacttgctcgggaaggcccctgatacgcatgtgatgtgcgttttgggaaggatagaaagaacccctacaacgattatactctcgtattaactaagtcgtgcatatataaatgtggacttcgtaaaaattaattccaatggtgttcgtgatggggtgcaaaggcacatgcagtgcacatgtagtagggtttatagagtagactcctaatttgtctcaaaattgtatgggttggatattgtagttcctaattcttaaaaatcttccattaatctccaaccttacaaaaagtcactcattngcatttaatttaattcttcttgatgcgtttacacagaaaaagacgtatatgtcattctgtaaaatcataaccaatttgtgattattttgacgttgagac

SEQ ID NO: 257429 - DNA, 455 bp, Glycine max
  unsure (1)..(455): unsure at all n locations
agcttctcaagctcaaatatctagccattctctatatcttagcatacttggagtacctaattctgccgattcaagaaagccgcctcaaactggttctcaacagattgctgtgcatcctggacaggtataaataaataaatacatgtgtgtgaatggtttgaggttatatggttctctacatatttttccattattttctgtgggtgttaagggaagaatgtgggaagcaatgcaagaattagatgttctggattgaacttgcatcaaaatataacaaacaggaatgcatcctttntttatgaacaatttgtggatgctagagaagaaattaggacgacaatttgcctgagaaaagatcctgacatagatagtgtacttatgaacaagatatgtttatttcttctgttaatgacaactangaaaatggcttttacttaacctgctgngcatatata

SEQ ID NO: 257430 - DNA, 307 bp, Glycine max
  unsure (1)..(307): unsure at all n locations
cagcttggagntccaatgccaatacagcttcttcttttgtcctgtcttcttccggcctcaattcactagtgggctgtcctcttgtggacagcatcttgggatgttcccagaccttgatgacagctatccaggttctgctatccagtgatttgaggaatgccaccatccttgctttccagtattcatagttggttccatccacaactgggggtctgatcactggtcctgcttctttctccatgttcatcagaatttatctccctagatctcactcactgatttcgagtgcccgctctgatccaattga

SEQ ID NO: 257431 - DNA, 462 bp, Glycine max
caagcttgcaaattaggtcttcgccagtgttttgatctatgtgggtccgaatagaggcaaatttgatcatcctactaggacgaccgagaaaactggggcacataaagagggtgaggatgagggagaaacccatgctgagactgccattcctatacggccaagttccccaccaacccaacaatatctttactcagccaataacaaacttcctccttacccaccacccagttatccacataggccatccctaaatcaaccacacagcctgtctatcgcacttccaatgacgaacaccacctttagcacaaaccaaaaaaacaccaaccaacaaaaaggaattttgcagcaaatagcctgtatggttcaccccaaattctgtagcatatgctgacttgctcccatatctacttgataattcaatggtagccataaccctagccaaggttcattaacctccatttc

SEQ ID NO: 257432 - DNA, 266 bp, Glycine max
gagaaacatatgcattcttatgtcccagaattgcaacattgggttgtattcgtgccatgcttcaaatggagtctttttctgcatagcttttgttggtaacctattcagcaaaaaaactgctatgtgcgcatcctctacccaaaattcctttggtatccctttgtcatgaattaagcaccttgtcatctccataattgttgcggttttcctctcgacaaccccattactgtgcggagtgtatgaggctatcaattgatgatcaatgc

SEQ ID NO: 257433 - DNA, 462 bp, Glycine max
  unsure (1)..(462): unsure at all n locations
agcttgtaggattatggggtacccatcacatgtggttctatgtggcggtcgggcgatggtgcacaacaagttntccacatccacaatgcgctcataaacccaccatcccctgttgcccacctccatctgagctcacgtactcccacgtagcccatattctcgtttctctcaacaccgggtccccatcaatcctcccaagcttccacaacatccaagcaaaacaacattcaaacagcacaagctatcacagccaagcaaaacagggcaaaggcagaaaactctgctcaacacaccaaccaaaatcatagcttttctcacttaaagaccccaagaacaattccctcgatccaattcgttaaccggtggatcgactctaanattttactggaagtctataatacataagactacattngtgaccgtgggatctactagcanacatncagaactcattctgcacta

SEQ ID NO: 257434 - DNA, 298 bp, Glycine max
  unsure (1)..(298): unsure at all n locations
acttgcctntatgacttgtacctcatcactttcttccgaagctttaacctcattgtctctcacagtctttagatttgggagccaatccaatccttgtgtccggactctcagccacttatgatagccgccgatgatcccattactgcttcccctaagctctctgtcctttcttcacgccgcatcccatgccttgcgaactccttggagtaccctcgcgttgtggtcactgataccccgtgcgatgaaaagcgcgatgctttcgtctgaggcacatctctcatgggacaatcttcgcatg

SEQ ID NO: 257435 - DNA, 429 bp, Glycine max
  unsure (1)..(429): unsure at all n locations
agcttgccacgcccncgagcctggacaagtgttgttcttgatgcctctcgtcaagtgttcgaagtggacatgcttctaattttgcaggcaaagtctgacatgttaggtgagggaaacctctgtatttgacaactattcccttttctgaccgttggagagtacattaacgatagacattacgttttgtccgtttccacgggtgtgtgtgctgcacgtgcaatactcttgcatacgtgtcactcgtggagtgggcacgtactggagatgtgatgcatgggtaagtggggttgcgtcgtantgcaaaanaatagggtactacttcagctcctgccaattatctaagtgtctgtctcctatttaaatggagtggacatttgattcgtaaccacagtcactntgaatttctgtcttctttctcaaaatttcttt

SEQ ID NO: 257436 - DNA, 458 bp, Glycine max
  unsure (1)..(458): unsure at all n locations
ctttaactgaattngcaacgttccaaatgttatttaaatggtgtgtttctattatcagtgtatctgaacgttgaaattcaaattcaattgtgaagagtcacatcttttcataaaatgatttgtgtaatcgattacatggttatggtaatcgattaccagtgacaagttctgaataaaaagtcaagagatgtaactcttccaatggttttctcaaggttataactcttctaatggttttcttgaccagacatgaagaatctataatagcaagaccttgacttgcatttcaatatactttacaaattttgaacttcttcgaacaacttttgagatatcttgaaaccttcgcttctcatctttcttcttcttactttgccaaaagctttctaaattttctgtttccaaaccttgtgttttgcagaaaacaaagtgtgcatatcttcattctctctctcttg

SEQ ID NO: 257437 - DNA, 321 bp, Glycine max
  unsure (1)..(321): unsure at all n locations
aggtgaacgcgatatatcgtaccttaggtacattcacgtatttgaatgatccatttgagggatccctatattataccatttggatcctttctaccggtagaaagcacattctagagaggcgttttatttcactcatagagaacatgtggtatgcacacacgtcncttccttacatgtgtcacttcgtgagaagacacatctcatagaccccttatgtggtttggtgggggttacatcatggcacaaacttataaggtgtcctttcaacttctgccagcttttgaaatgtcatggccgtctctgcttatttaaaaagactac

SEQ ID NO: 257438 - DNA, 364 bp, Glycine max
  unsure (1)..(364): unsure at all n locations
tctatntggtttttcatatgtattattaggagaaaagcttgttcttctttatacttttatagaaataataatctaattaaagttcttccaagtaaaacacgaaatactgcttcaaaagatactttaaaaagtttaaattcgtgttattatatgatttcaatttatgtcttttctagagaaccatagacgttgcttctgatctttaaaatatttagtaaaatcattaagaaatatatcaaagatatgctgttgtaaaacatgtttttccaatacttaaaacatgtatctaacatgtaaaagtctatgagaagcactatagaatggccttacacccacaataattatatccagttacccacaacct

SEQ ID NO: 257439 - DNA, 327 bp, Glycine max
gatcataacgaagaacaaaggaggagacaaaggaatgatggtgttcctaaacaaaacacgattgatggtattaaactcaacatttccccctttaaaagaaagaatgatccggaagcctacttggagtgggaaatgaaaatagagcatgttttctcatgcaacaactatgaagaggacaaaaaggtgaagctcgccgccacagaatatttcgactatgcccttgtgtggtggaacaagcttcaaaaggagagagcaagaaatgaagagcccatggttgatacatggaccgagatgaaaaagatcatgaggaagcgatatgtgccggct

SEQ ID NO: 257440 - DNA, 393 bp, Glycine max
  unsure (1)..(393): unsure at all n locations
agcttctttntttctctttttgctatgtaaagacaacttatatcaattacaaaagntaactagtaatgagctaaaaaaaaaacaaaactcttcccaacgttgtattttgtanacgaagaanataaattaatatatgccatgataaagaaaaagttgctgtcaataatataatagaagataggatatcatcatcgtaattattggaaagtagaggnatttctaatggtatttcttagtatataaagctcatccattcatgaaaccatttatgtatttcaagtaatattttcaaattcagataaacaattaactaaactttcttcaacttactcaccaaatagattcatgtgattgtaaattatatacacataattttatctatcaaataatttt

SEQ ID NO: 257441 - DNA, 441 bp, Glycine max
  unsure (1)..(441): unsure at all n locations
gtatatcatatgccactctactccaagttgttaaaggatatgttatctatgaaacacaagtatattcaccaggaaaacattgntgtggaaggaaattgtagtgctgtgattcaaaaaatccttccacccaagcataatgaccctgngagtgtaaccattccttgtttaattggagaagtcattgtgggaaaggttcttattgatttgggagccaatattaacttaatgccactctccatgtgcaaaaagttgggagagttggagatcatgcccactatgatgactttacaactcgctgaccgctccattaccagaccatatggagtaattgaagatgtgctggtcagagtaaaacattgtatcttcatgacagactttatggtaatggatatctgtgaagataatgacattcctattatattagaaaggcgattcatgtta

SEQ ID NO: 257442 - DNA, 440 bp, Glycine max
  unsure (1)..(440): unsure at all n locations
agctngagcaacacccaatcgccgacttggtttttgacctctcggcgtntgctgtcagcaaattgtttcatagctacctgagccttgaggagtnttttgcgaatcacctagaaggtttcttcacggtccttgagcatgtcatctactgcatccaagtttgaagagcccgcgatgtagtcaggaaaattaaacggtttacatccaaaggtgatctcatacggggtggatctagtggccacattccacgaagtgttatggcaccattctacctaaggaaggagcttgccccacgtgtgtggtctgtgatggacaaaggcgcgaagatattgttcaacaactctattcatgacttcgcgttgtccatcactttgaggatggtaagccgaactcattctcagctgttgtccactcaattgatacaattccctccataagtgact

SEQ ID NO: 257443 - DNA, 468 bp, Glycine max
  unsure (1)..(468): unsure at all n locations
agcttgcacacattntacattatatatatattctgccagaaacacgtacgtgctggcatgtactggctattcatggaatctatgttgaataaaaaaaacatgtatttattttgtaatatatatcagccatctaattaatttcatccttcgggaatttcttgttactaaagtttaaggttttatacttttatgagatgaaatgtagagccaggactagacttaacaaacttccacttcaaaattatatccaaaatcattgttgataggcttcctatgattgtgccctgcctcatctcctttgagcaacgtggatttgtaaaagatggaaatattttgagattatcaccatcatcttggaagttgtcaatatgttggaccatanaacttttggaagtaatattgcgcttaagttggatataaaaaaagcttttgacactgtggatngngacttcatggttcttcagacat

SEQ ID NO: 257444 - DNA, 402 bp, Glycine max
gctaatgtctagaaagaataaagataatttattgtatatcatctggttaaataatgggcaactcactaatgacctagatgttaataattggattttggtctaaaaatagaaattagaagcttcaaagaacaaaaatagtaattaatgtaagtaaagttagaaattaagtggggataattaagattgattaaagatgatatagatttcatagaattagaaaaggggtaattaagtcataagagttaaagtggagggtattttcataaatgactatacaactagtttaaaaatagaatttttgctaattagttggtgactgattaaagtgtctaattatatgatgtagaataattaaaataaagtatagttgtgacaccctgaaaactctgtgtaatgttattt

SEQ ID NO: 257445 - DNA, 426 bp, Glycine max
agcttgtcaagtgagctcatcaatagtattattcatctctcttcaccatttctcaccatttcctctacataaaccaaaacttgagccttcattttctttagcttacacgagaccatcaaggaggaagagaccaccattttcatcttcttacaagttccatagtagtgtcttcagaatccttctctcaaagctttgataagaagctcttcaatctcttcttttctactcatttcatcatcattttcgtgcaaagcccttatgtttggttccaaaatatatttttcatcctttgaagcttgggacttcaagatctgaacctttgttccttgaccatctcatggaaggttcatctaaggtaaagggaattattttcatttcttaaaccttaaccttgttgtctttggaagctagactacattacatgtt

SEQ ID NO: 257446 - DNA, 355 bp, Glycine max
cgaatacgcattggacgagtgtgcttctcttgatgcgtaagcgcatgactacttaactcccttcttttgtgtgtagtcatgaatgtagttgttgaagatttcgcttccttaatacatccttattgactatttaattcttacttcttatatgtgcgctatatactctgtataggaaccctataattctatgtatgcttgcagtatagtgttttgccttaattgcatagatattatggttggttgtgatctacttgtttctacaatgctaatgccattaatttgatgactgtatcaagatatatttataaggatacttctttgaccgacctttcaattttatacaaaccattttctt

SEQ ID NO: 257447 - DNA, 430 bp, Glycine max
  unsure (1)..(430): unsure at all n locations
agcttcctccttacgcagcaagtatagcaacttctttacaaaattaacgaatatgccatcaagtcattacatgcttctccagatgctgaaaaaacacaaaactgaaaacatagtaacagaacctcaataatgcttaaagtgtttcaaaccaaccagattgaaggtaaacattataagtaacgattttttttttgcaacaaagagaacccttagcattaacttgtaagttgtggataaatactgtgggtaaaaatattcaagatataacactctgcttcagatagaatgccagtcgtaatagaagataatangattaaatgacaccagatcacagaaattacagcaatttcttggctgtcctaaagttcagaaactcanagtttctctcannaaaccaagtctaacattacatttattaaaattaagtcct

SEQ ID NO: 257448 - DNA, 436 bp, Glycine max
gttacactttcccatttgagtacaaaactggaatgctaatgtgtctcttgctactactgactgaacaaccatgaaactcctccctccttaagttgggaaatatatcttcgatcaaagcaagcaagtttctccaaccccttcacatttgaatagaacacctgtcataaacataagaatgtattcacaagaaccgaattaaatatttagtgatttttagatcattgtaatttaaattattgtagcttaaatatttagtgtttttagctaatatattatatttgctccttgttataacatgtccaatttgacaattaattactttgtgttcaatatataaatatgaaaaattgtgagaaatccaattaacaccaacacacaaggaatggaaattcataatctaaaaatgcgactaaaaaataagcttataattatatta

SEQ ID NO: 257449 - DNA, 420 bp, Glycine max
  unsure (1)..(420): unsure at all n locations
agcttgaagttcatgccaccaatctggatatcttatcaacttgaagcaattgtatcaagtatgctttgtagacatgcaatgagaacattacattttcttttattaaccttgcaagatttagagccaatagtggattttggagaaccagtggaaggctcaccaaagaatgggttagttggatgatatgtaacactatttgttggctatgatagcttcaaagacatgctttatgtcattggtggtcatgacaacttgtcgaagtgcctcacaatcaacatgggcatatgcctattcgatggaagggaaatgttgcatttggagcacataactgcagatgttgtcaagacgatcatcaagtccatccaagatagtatacacacgatcatctttgaatcattgattgaattgntgaatatcaat

SEQ ID NO: 257450 - DNA, 300 bp, Glycine max
  unsure (1)..(300): unsure at all n locations
atgcctctagagagggagttggagttggagctgtattgctacaatgtggacaccttatgcttatttaggtgaataacttcatggtgccaccctcaattaccccacctatgatgaagaagtttatgacttaataagagccctccaaacttgggaacattaccttgtttccaaggaatttgaattcatagtgatcatcaatcacttaatacattataaggcaatgcaagttanacagaagacatgcataatgggcggagtacctatagcaatttccatatgttatcaaattacaaaaaggaa

SEQ ID NO: 257451 - DNA, 403 bp, Glycine max
  unsure (1)..(403): unsure at all n locations
tgtcaagcatacagtggtntggagcattgttcctcttcaagtgtttcntcaaccctctcgcctgtaatacacgagataagctacaaattataatttgaggtcacaacttatgataccatatattcctaacaaatacaccacacaacgaatcattgttagccagtgttttaaaactagactgaactggccagtctgacaaattcaaccattaatcatatcattagccaacctattcagtggtcaagtcatataaactgttaatccaaaaaatccttaagatgacaatgctgcagtcgacacgacccctagatttcacacacactcacacacacacaccagtttaaacacagtgagtatttgaaactggaacagttctaaagtatttaattgaggagtggaaaaa

SEQ ID NO: 257452 - DNA, 448 bp, Glycine max
  unsure (1)..(448): unsure at all n locations
agcttgtaagttgaagaggtgagatctaaatttggttatggtgaatgagntntgagagatttataacttaatacaattatagagagtaagcttgaatatgagagctctacaacttaagataattacaaagagtaagaagtgccctaagtgcaattctaacctgagagaaattgcggtaagcgtgaaaagttgtgcttaatgccaaaagtggactccatcttaacgagacacgctcgtcaagcgagatctgcagattataaatatgtttttcagcctgaaaaatacaatttcacgcctctctctctcataactctgtccaaccaccctagaaactcctcctccaccacccacgaccaccggtggccaccacgagctgccattgtttgccgctataccaccacactgagaggaacatnttaatcggagcggaatcctcataatccacctc

SEQ ID NO: 257453 - DNA, 421 bp, Glycine max
  unsure (1)..(421): unsure at all n locations
ctaagcttacatgtccatctaacttcaaatgtctggcanaaacaagattgttccctcaattttgcttttatccgggccatagaactttgtattgcaaatgcaatgcatttttgaacacatttggtgcatactaaaggaaatacacaattgtataaatttattgtcaaataaatctcaatatttgtacatttgtgtttgtaatgttcacaataaccatcaaattcatcatagtgcaatgtcttatatcatctacggctttctacatcgaatgttatgaacttttacaaaatatgctgctcatttcttgcaaattgttgttattgtttccatgtctaatgacgtgccatcatcataccactacaaaatatcaaatatagaaataatatgtcacatacatgtacaatgattgaatattatagtg

SEQ ID NO: 257454 - DNA, 202 bp, Glycine max
gaaacccagggcctaggggtaacgaacctgacagacggagacgagaagactcagtaagtggccaaagaaaagccgcaagaaaaaacaataccaccaaacgaggaacgacaaaaaagaccaccagtacgcacaaccagaaaagaaatcgcaacgggagtaacaaagataaatcacagagaagcaacaaagaaaagacacaagc

SEQ ID NO: 257455 - DNA, 364 bp, Glycine max
aaacacactatttgtatatactaagtatttattacctatacttaacagaaaatacttataacactatataataaccataaattgtgagagtttgatacaatttatacaagttttatacaccaaagttagtcattttcaccgactaacaactcccccaaatttacagttttgcttgtcctcaagcaatcaataacaactcacttgtcctcaagtgataacaacatgcagtgattatgtacagaagtgtatgcataaaaaattactgattgcatgatgagaaagatgaagaatgtgtacctatcacttgtcttcacaaaatatgcaggtattcacagagaagaataaaatgtgaactgaacaaata

SEQ ID NO: 257456 - DNA, 381 bp, Glycine max
  unsure (1)..(381): unsure at all n locations
tacttgtcatgacntgcagaaccgcttgcaactttttacacattgtaatgcagccaatgagaaacaatgtgataagaggtattgaacttgcgctcaaactataacaaatttttaagcacacttaatgtaccgttttctttaattatccttattgaaaatacggtgtacatttcaatactttaatataacctacattgtttaaattactccgaatcactcatctctgttttgtttgtgcctaatgtttcattaactccataccatacattaatttgtaacactcaaattatctgtggaatgaaaacatatagaaatacatataatctattttgaggacatttcatacaataattcatgatatcatattgtatgaaggcacca

SEQ ID NO: 257457 - DNA, 412 bp, Glycine max
ttaagtgacgcagctgcagcttaaattaaatcaaattctaatttttttcttcttgttaacttctggtaatcgatatagcgttttatcttagatataacactctatataagaagcatgctctattatcacgaacatatacaacactgttgtatcaagtgggctcagaataatcaacaaggggaggctgaattaattatgaatgggtcttgactaattaaaaaatttatccttcttaatgttactagattcaatttggctttactactaagttatgagatagtgaagaacagaaacaataacttagacaaaagtaaagcggatataaaaagtacatagcggaaatataaagagtgtagggaagaagaagacaaacacaagatttatactggttcggcgacaacccgtgcctaca

SEQ ID NO: 257458 - DNA, 406 bp, Glycine max
tcttgattttaaagatacaatatcaaataaggaaaacatgtggtgttgttttttaatatttatggttacactctcaattattttatccaacttttaatttaaagaatttataaagtaaaaaaataataaataatatacaacttctacttattttttattttaacttaagtaacttttaagaaagaaaaaaaaaataaagctgggccaaacggtatcttagtattaaatatggaatgagctataaatgcatgttggtatttaacaaggatgaatccaattccataaagataagaaccgggtgaaaacaactataatatatgttctgtctaaggaagagaatgacattctctttgtcaattgatgcaatcctaccccgcaagggcattggatagagaactcaaataga

SEQ ID NO: 257459 - DNA, 257 bp, Glycine max
  unsure (1)..(257): unsure at all n locations
tcgctctattaaagacaaactcatttttcctctgtcattgttgccccanattagagtcaagattttgaacttatgtgtaatgttagagattatgttgtgggagcagtgctaggacaacaaagaaataagatattttattccatgtactatgatagcaaggtcttgaataatgcacaactaaattatgctaccactaagaaagaattgctaaccattgtttatgcctctagaaagttcatatcatatttgattgacta

SEQ ID NO: 257460 - DNA, 399 bp, Glycine max
  unsure (1)..(399): unsure at all n locations
actaagcttctcttttgaacaatacccctcagccaaatataatccatcttggtctcttttcccacaactcccataaatgggagagaaatgttcatctaaagcatacaagtccctaatattatcaaatcctaaaatttgagctcttatggagcaaaacaatgtgtgtctcctatagagggcatcagctaccacatttgtctttccctttttgtatgtgataacatatggaaattgctctatgtactctacccattttgcatgcctctttgttaacttgctttgccctctaatgtacttaagtgattgatgatcactatgaatgacaaattccttggaaacagggaatgttcctaaatntggaacgctcttattaatgcatatagctctttatcatatgtg

SEQ ID NO: 257461 - DNA, 446 bp, Glycine max
  unsure (1)..(446): unsure at all n locations
gcagcttaacattcaatttgagcgcctttttttctctgatctaacaaacaccgagaagaacgattgtcgggggataggcccacagatncaacatccaatttcgagcgtctccatatattacaggcctcaatcagacatccgcgtaaaaagttatatgccgttgaattggttcacagcttcatcattcaatttcgagcgtctcgatatatgaccggactcaatcagacatccgagtaaaaagatactgacgtttgaattggctcatagcttcaacattcgattctgagcgtctcgtaatatcacaggactcaatcagacatccgagtaacaagttattgtctgttggattggctcagagatccaacattcgatttcgagcgtctcatatatgacgggactcaatcagacatccgagtacatagttattgtcgcctgaattagctcag

SEQ ID NO: 257462 - DNA, 446 bp, Glycine max
cggaacttataaactaagcttgagccattcaacgacataaccgttactgtagtgtttttgactctcgtcacatatcgagacactcgaaattgaatgttgaagctctgagccaattcaaacgactataactctttacttggatgtttgattgaggcccgtaatatatcgaaatgctcgatattgaatgtggaagctcctagcaaattcatacgccaatatctttttactcggatgtctgatgaagcccgttatatatcgagacgctcgaaattgaatgttgaacctctgagtgaatgcaaacgacaataactctttactcagatgtctgatatagtctcgtaatatatcgagatgctccaaattgaatgtcgaagctctgagctattcatacaacaacaactttaccggatgctgatgaatccgtatatttgaacgctcacatgatg

SEQ ID NO: 257463 - DNA, 381 bp, Glycine max
agcttacatggagctacatcaagttttttttatcttttccacacatcaacaaagctccgttctactttagacccactctgtcgagttcttgaatgtctaaaaagtgttctacatgaatggaaggctcattatcatatgtgatgagaccgattttcatggttgagattgctctaatggcgagggtgtctgtagaggccatttgacatggaaaaaagctatggtttgagaaactcaaagagaggtagaagtgcttgctatgagagtgtaatcctaaaagtcttatcataagtgtatttatatagtaagcctgtaggctctctcaaacacatacatttagcttacttcccagaactgactcagcatgaaacgttacaacatttt

SEQ ID NO: 257464 - DNA, 384 bp, Glycine max
cgccagcatatatgatgctgttggtaggcaaaggattattctttcttctggttgtggtaatgcgttcaagagggtgatgcaatttttttctttctattttttgacagatacaaagctgatggaaagggtgcatccctgcatccttcttacaaggagacattgttaattaagtgggtgggggtggaatgagcttgtgttatacaacaaaatttatatacacaaatatattttgcctttataaaataagcaatcatattcattaaaatggaaacacaaaacacgaactcgttacattctgagctataaaataaactaacatcaatgaccaatgtacagtgcaatgaaaccacaacactcaatgcataacatttgtcttgttgaaaa

SEQ ID NO: 257465 - DNA, 347 bp, Glycine max
acaagcggccccagatatcttatgagaggtggttgaactaagatatcacaatcttgtctaaattaaaattctattctgattttaacccaaatcccaagatttctttcaaaaattgaactcctaaataattatgcaaattaatcttactgaatagacataataagctataagcacttaacaataaaagagtctatgggaaaaaagattgcacactcagatttatactggttcggccacacctttgtgtctatgttcagtccccaagcaacccccttgagagttccactattttgcaaaatctctttacaagttctgaagcacacaaagacaaccctttctttgtgttc

SEQ ID NO: 257466 - DNA, 339 bp, Glycine max
  unsure (1)..(339): unsure at all n locations
acttaatactaacttagctgtcaaagcccagngctgttggaagactttgtcagacgggcgcaccatagacataaacacaactcttgcgacaggatgattttgatacaagaccactggtttccaagataacaaggctcaaattgacttcaaactctttctatacatgaagacgagatgtcgttgatacccatgcactcctttaaaaacatggagtatatctggcgctaactgttgggagtgaaaccatttcttacaaatttcatcttcacaagatcatgttccaaggctcaccctgcagatctatatattttcacatattctgttccttataaaaattgg

SEQ ID NO: 257467 - DNA, 424 bp, Glycine max
agcttcaacattcaaattcgagcgtctcgtttattataggactcaattagacatccgagtaaaaagttattgtcgcttgaatttgcttagagcttcaacattcaatttcgagcgtctccatatattacgggactaaattagacatccgagtaaaaagatattgtcgtcttaattggctcagagcttctacattcaatttcgagcgtctcgatatatgacgggactcaatcaggcatccgtataaaaagttattgtcgtttgaattggctgagagcttcaacattcaattttgagcgtctcgatatgttacgggactcaatcagacatccgagtaaaaagttattggtcgttgagttggctcagagcttcaacattcaatttcaagcgtctcgatatatgacgggactcaatcagacatccgagt

SEQ ID NO: 257468 - DNA, 414 bp, Glycine max
  unsure (1)..(414): unsure at all n locations
gtgagcaaattcaaacgaaaataactntgtactctgaagtctgattgagtcctataatataataagacgctcgaagttgaatgttgaagctttgagcaaatttaaacgacaataactttctagtcggatgtcttattgagtcctgtaatatatagagacgctcaaaattgaatgacgaagctatgagcaaattccaacgacaataactttttactcggacgtctgattgagtcccgtaatatatcgagacactcgtaattgaatattgaagctctgagccaattccaacgacaataactgtttactctgatgtctaattgagtcccgtaatatatcgagacgctcgatagtgaatgttgagctttgaacaattcaaacaaaatacgtttactcggattctgtatgatcctgatt

SEQ ID NO: 257469 - DNA, 458 bp, Glycine max
  unsure (1)..(458): unsure at all n locations
agcttgagcctaatctactaccatattttttctcaagtgagaatgtcaatccttaccctcggaagcgaaaagaatagaagggaaatttccaatcaaagaaagggaaagaaggaagatntccaatcaaagagaaagccaaaaaggaaaagaaggaaaattccccaatcaaagagtgggagaaagcataaagaaagaaaggaaattctccatcaaagaatgggagaaagttaaaaaggaagaagaagaaggaaagatagctcctgatcagggatcgaaagataaacagaagaaatgtgcagagaggtctttataccggacaatatctgaacaatacagaattgtcaccaaatgaacaaaaagaaggaaaggataccacgacctataatggtcttctccctttgattaccaaccaanatcccgtgcgctagcgactntntcgccccgcactaaacaataac

SEQ ID NO: 257470 - DNA, 409 bp, Glycine max
tactatgataatatataataattattattattataaagtctactattttattatatgtaataatgataatgtcttagaaaattttgatatatattattttgtggcatataatatgttaaatatttttatttcttttgtcaaaaattatttaatctattattaatgtgaaaattattatttaaaatagtatcaaaattatataattagggttaatacatttaaatgactatggatgaatttaattggaaattgtctcacaaataagttaacttcgagttcaaatttatctattttacataaaattcaatcttaaaactcattcatgtatatacatgattcctattaatattgtttaatatgattcaatagtattttaatacatgtcatcattacatgttattggtattca

SEQ ID NO: 257471 - DNA, 483 bp, Glycine max
  unsure (1)..(483): unsure at all n locations
taagtcacctgctgctgcagcttctcatgtctagagagttctagagagtatttgttcttttccagagatttgatagatttgttggtgaagatctgcaagactacagttgaagaggaagccgtcctaagagcttgagatgatgttgtgagtgatagtgaggtcttagaggtggaggagacatccccactacttgtatttctgcaatctttcatctttctcttctcttttgtgtanaggaagaggtatggaaagctaaatcctctggtggatcttccttgtaagtacttgatgtaaatatctttatatctatctaatgatgttttgtgtattctctgtgctataagtatttcattctagtatgcttttacctcgatcacgtatatgcatgctttgttaaagtcattcaacagtggaaactggtctgattctagaacttatagggtagggctagtttttcgtactatcacgatggatcatggttcg

SEQ ID NO: 257472 - DNA, 398 bp, Glycine max
gacctctagatactcagcttcagaataagtctcaaagatcaagattcagaacaatcttgtttcttgattcttgattcaagaacaatcaagcttcaagaatcaagattcaggaacaatcaagatcaagagtcatgaatcaagagaagactcgatcacgataagattgaaaaagctcttcaaaatatcgagtagcacaagaattggcacaaaatctttaccaaagagtttactctctggaatcgttaccagtagccacattgttttaaaactgattacaaagaggatcgataccatggcatgaatcgtgaccatgttgaaagttaagattcgaatgtaaaggacaactggataaaactttaatcattcatactggtaacgatacacatactggaccgata

SEQ ID NO: 257473 - DNA, 462 bp, Glycine max
  unsure (1)..(462): unsure at all n locations
agcttgaaggtgtgtaacccatcattntccatattatttcacagtaatatgtctactatcattgttattatttctttcttcgncattgagggaaacacttgggctgccaagtccctccacctttgggcatattctttgaaagattcgtgccccctctttgcacatgttctgtagttgcatcctatccgaagacattatactgacactgcctaacgaaggcaaccattatgtccttccaagaatggacttgggaaggttccaagttagtgtaccaagtaacagctaccccagtaagactttcttggaagaaatgtatcagcagttcctcatcttttgtgtatgcccccatcttccaacaatacatctttagatggttcttggggcaaataggtcctttgtacttgtcaaagtccagcaccttgaacttaagaggggtgatgatattgggtactatgaacaact

SEQ ID NO: 257474 - DNA, 465 bp, Glycine max
tcaccactaagagagtgccttggataaaaagcttagagaggtttcttcttggatgaaaagaaagagagagagaggggaggggagcataaaattgaatgaggaaaagagagagagaagttgaactttgaaatgtgtctcacaagactctcattcatcaaagttacaacaagtgttacacatgcttctatttatagcctatgtagcttccttgagaagcttccttgagaagttagagcttatctacacacacccctctaataactaagctcacctccttgagaagcttccttgagaagcttacttaagaaacttccttgagaagataactagagaagcttgagcttggctacacacacaccctttaatagctatactcacctccttgagatgagaagctagagattagctatacacacaccctataatagcttagctcacccgcatgtcataatacatgaaaataca

SEQ ID NO: 257475 - DNA, 192 bp, Glycine max
acaccatattgcctatttctggaaaagagctcttggagcaccacaagaaacaacttttgcagagatacctatggtttgttagcctattattgttaagggttcttctataatggctggctaaacaccccaccttggatttcaatgaacaatgatgtaataccattatcaaatgattatgtttatatgtcaatg

SEQ ID NO: 257476 - DNA, 460 bp, Glycine max
  unsure (1)..(460): unsure at all n locations
agcttagcagcttctgcagctgcagctgccnctccgttatcatcnncagnagntnggagaggagcatatgatacagaagattgaacagaagtcggctgagatggatctgtggcttctgctgcttgagtaagctgcttcctgataccaacaactttttcgatctggcctcgtgcaaccttcacaacattaaaaccatcaatttgtataaatcanatacatgtggaatcagttgaaacagatgcaaaactttacgcatttaatcatccaatatacgcaaaatctggggagatatcacatataaactcataaactaaaatacacccttttgagaggaatataatctcctagtgtgctctatcttagagaatgacatgntcgtattaacttctcttaaattttagatacagattcttacgaattaataatggcttanataacaatttggtctctatagaaaata

SEQ ID NO: 257477 - DNA, 247 bp, Glycine max
tctagatgcattctatctaaccctaacatgagtctttacatctttcttatagcatccatgccatccacaccttgatcgtgctcgcgattccttctagaagcttcacgtgttcctccattctgcatggcttctatcgtacccttctagatatgctggggtgagtcgttcccttcgtggcctctcattccttgcttcctgcacctaccttgctagtgacaccccttcccttacttctcccgtaacactc

SEQ ID NO: 257478 - DNA, 237 bp, Glycine max
cgacaggcacaccaccctgatccaaggccagctggattaccaagttgaccaacgcatccagttttccttcaagctttttagtttcagatgatgcagatgggtgtgtagctacctcatgcactcctctaatgactatggcatcatttctggcgctaaactactgggagttggaggccatcttctcattaaatttctggcttcagcaagatcatgtttccaagggctccaccatggcag

SEQ ID NO: 257479 - DNA, 339 bp, Glycine max
  unsure (1)..(339): unsure at all n locations
ctaagctgcttganggcttcttggtgctggaacctgagctttttgatgtctcttaatggcgattttccaccatggagaagcagcggaagacaaaggataagatgtgagaggaggcgccatccactaaggaataagccatggaaaaaagagctttaccaccaaaatgagccttggataataagcttggagaggatgcttcaatggaggagaagaaagaaggagagaaagagagaggggggagcacgaaattgaaggaagaatataggagagaagttgaactttgagttgtgtctcacaagaatctcattcatcatagttacaacaagtgttacacatgct

SEQ ID NO: 257480 - DNA, 487 bp, Glycine max
  unsure (1)..(487): unsure at all n locations
acggatcttaagcactgngctgcagcttcataattatataatccgtatttcttattggttctataaggctacatctatatttgtggtttgctgactcgctgcgctgctatgcaatatggaatcccaattagttgatggttatgatgagatggaagtctctggggatgtgggtttgagaacgtgtgaagttcatatgcatcaagaaacatatgaaggtgttctattctaatcatttaattttgatatggaattctgaatgaatcaaaaattatgcatgtcttatgtataaagccttgcatcctgtatatgactctatcctggtctctgcataaagtcacaattgatgtagaaggtttgtggcttttaaggatataaaccttatntcttgcaccctttcccttggagtgagaaagaggctccggcttaattaaagagtaggttacctagtgtccactcctcaatatctattctactagctcaaataata

SEQ ID NO: 257481 - DNA, 424 bp, Glycine max
gtacgaattgcacaaccatcatccaagaaagtgtgttgtgtttaatcaaccaactgcaaccaccccctataaacaataactgcaaataataatcacaacaattaattaacgagaccaagaaaataacaagcgataaacattacctgacacagccccacaagcccagaaagcgcggcgtgaaggagaattgaatgaccccaaatacacgaacatacgccaagcgactcaccgagaacgagcacgatagatcgacaaggctaccgctagggctagaggattgaacttgaaagagacagacactgagagagaaggaacagcaaaccgggtgagtgagagtgacgaaaaacaacacagcaaaggccgacacgattatcacgagaaggacgatagagcagtgagtgccacacacagtcgctctctctct

SEQ ID NO: 257482 - DNA, 436 bp, Glycine max
  unsure (1)..(436): unsure at all n locations
ttaggcaacgatagggaaacaagtctgttatcatctttacttataagaanacagaaaggagtcatagcactcctgtatgtgaacattatggccgcaactatatgcgtcggagacatcttgtaacatgtaacaaccaactctgaccggttaccaccatagtatcatgctatgagacataatatagggatcctttgctctcaccaatgagctgaaatatgaatatctaacaagccttcgactgacgattgagtcaatataactctgtacaccacttatctataacggtgaaaatagcatagcccttcttacttatatcactttacatatggaatacctgccctaatatcttgctagattataaaaaacctcaatggttataagttataccgatccaatgtccgttgaataaactttaaacgctaaatagtgggaaaaa

SEQ ID NO: 257483 - DNA, 409 bp, Glycine max
gaagcatgggccctaacccacatcgcactttttgtcgatttattcatcgtccttcttcatcagcagctaatgcatcacatccatctatttatatcgaaagaccaaaagatatcaagagaaaaattggggaagcgacaaagagagaaaatgaaaggtagagtgagggagatggagtgtttgggttaagtctactggattgtgatgttggatcgaatggttgggttcgaaaaaagaatggttcgtggtggccaatgtcaaatacttggctgtgatcacctttctacttctcatcttacttctccttgttcaagaactcccgttaagcgtctcacaaatgaagattccaacaagtgattggctctttttcctttattcatttattatgctattcaataattcatatacactt

SEQ ID NO: 257484 - DNA, 436 bp, Glycine max
  unsure (1)..(436): unsure at all n locations
gtgattgtgaaaatggaatccgcactatgggcttctacttgntcctcttctggggcttggcgccatcaaaattgtggtttctgatgtcgtcattgttacggatataagtgtatttgttggggtggaaagtggagggggttctctccgaaatgattaatcgccgtaaaataaagatgcattaacactcgtggtcttatgtttcggtgcattacaaaatcactcgttgaaaaatgatggaaagggatgaaaaggtttcaatttgggggaggggttattgagagtccttcggggaagaaaaaaggtttaaaatataatatttattctttaattattattttattgcttgaatctaatgtaattattgttcatccggtatcggagtcactaatggagggtgatgggtccacaaaaatttttaatgcgggtatgcgttatc

SEQ ID NO: 257485 - DNA, 414 bp, Glycine max
actgcttctacactcttccactttttgatgatgacaacttctgttttctataaacactctcacacattttttcctagtcgatcactcacataaatttccattctccccctttgtttttgagtttatgcttctcttgaaattaagttaattacttatgtgagttcttgatttattccctatttctctccccctttggcatcaacaaaaagccaaagtgcgtaacaagtataagacaaacatatactattaatcattcacaaggcatacattgaaggatataaaccaatcatgaagcaagaaacatgaatagatcaaatatataaaaaacacagtcatatagcataattcataattattcagtcatactaagcaaatattaaaaagaaataataagtgctcaaatgtcataaaaac

SEQ ID NO: 257486 - DNA, 453 bp, Glycine max
ctgcacaagatctatagatatacagtatcacatcaaaacattcttctcttgatctacaacagatttaacgcgggtcagcaatgtgcctacatccacgagaaatggcagctcatcatcatcacattgatcgtgaaaaattacaagttcaattcaagcagcatctatctatatctctctcggattctcttgtgcaaaacctctctcaatctcataactctcttttttgttaaactctctctctgtgtttctgcacaaaaactctctgtattacatgatcaagagtatgtatatactctagctgctagctctaggcacaaaggctatactttggtgccaagaccaattcagttatgacaacctgaatcagctatgacaacaccactagaatccttcccatttgtgcctttattgatttgagtacataccacaatctacccctgactccaatcacaa

SEQ ID NO: 257487 - DNA, 389 bp, Glycine max
  unsure (1)..(389): unsure at all n locations
ttttcggatctaacgacgagctgcacttatctaaacctgagagtattatttttgtacgcagctctgagtgttaatcgaccgacaagcagtttcgtggcataacagacctcaatctctgcatggaggtgacgttcttgcntcaatcacaaactattgggcataatccaaggagaccttaataatagcattgacatgctctcatgggaccgaactccaacccacaagctcatcgactacctttaatttggaagactatccattgtttcctagatgaacagccgcatgcgccgaattacgtgcctaacttggggaagtaaaactctgagttttccaccctgaagaggatcagcctacacgtggaaaaacaattaaacatggtgaccaaaaga

SEQ ID NO: 257488 - DNA, 357 bp, Glycine max
tctctcttcttgtgtaattattatattctggtcctaatccttgtatttgtgctatgttttatgacatttgagcacttattatttctttttaatatatttttaatatgactaaacatgatgattatatttacttgctcttggttgtttatggttatgaattgtaaacttaattattttgataatatatgatcagtggtatgtttgaacaaatattaattatgttatttgacaatgtggtttttatatatttgatctattcatgggtcttgcttcatgatttggtttatattattccatgaatgttgtgtggatgcttagttgtatttgtatgattcaaagatgttatgtacttcttct

SEQ ID NO: 257489 - DNA, 425 bp, Glycine max
agcttccatcaagtggtaattagagcacaagttctttatctaagtgctccttaaacctccattaattttcagctttaccttctcctccattattatttcttcatttttctccatgtatctcctcacatgtcttgtgctgaatgttgttaacatgattttttagaatttccaccgattaaacttgctatagaagctagatttgattctctatggttcaaatttcttgttcttgttcttaaaccatgaattgtgttgagtttaagttcctttgagttttgtattgctattttgtgtggctgaaacctgaaccataaaattcttacataaacattatagtagaagaatacctcaaaaatctagagtgacatgttcacctattgtagttttgtcatagaagtgttgtctagtcttgaaacttgtcacat

SEQ ID NO: 257490 - DNA, 196 bp, Glycine max
tgtacgcctcggatcttcttcatcaatggaatcctttgctttttgaattctgacggcagcggcacggagaacgagaaagatgatcggcgacaccacttcaaggagaagatgaagttagaacaagctcaccaccacgggaagccatggataagaacttgaaggtcggagaaaatgaatggcggaagagggagagaag

SEQ ID NO: 257491 - DNA, 435 bp, Glycine max
  unsure (1)..(435): unsure at all n locations
tggatgattatggcgtacccatcacatgtggtactatgtggtctgtctgcgatggtgcacaacaaggtttccacatcctcaaagcgcgcatataacccccatgccctgttggccaccttcatgtgagctcaagtactcccacgtagcccatatactcagttctctcaacaacgggtccgcatcgatccttccatgcttccacaatatccaagcatatcaacattcaatcagcacaagctgtgacagccaagctaaacatagctgatgcagataactctgtctatacaccaaccaatatcacagcttttctcactttaagaccgcagttacaattcctttgatccaatgggactaccaatggatcgactgcgaaatatttccggaagtgtatagtacataagccgacattgtgaccgtnggatctactaacaacat

SEQ ID NO: 257492 - DNA, 469 bp, Glycine max
  unsure (1)..(469): unsure at all n locations
agctaggactaaagagaaacttagaattgttctatattannagtaaaanaactataaaaaaaagactcaacanacctctagctctggcccttggttttcacactaattttcaattgaaatttaggaactaagattggtataaaataggaaccaattatagaataaatgttgagccaaaacaacaagcacacttccctttcacttcttttttcctggatactgatttttctgtcaaattgtgtgatttttagtattcttnttccttttatccaaatcacattcttctttttgtataacttttctccagatgtctataaaattcagtaaaaatttcagctcagaattcgaagttaccaattctcagtaatctttaacaagttgtatgtccaagctgccagcaccagcgatttttttttaagcatggtatattgattgccttgggcttactntcaaccttcctatgtatgct

SEQ ID NO: 257493 - DNA, 422 bp, Glycine max
  unsure (1)..(422): unsure at all n locations
tctgtgagaatacttagagcttagctacacacacctatctatttactaanctcacctccttgacaaaatacatgataatacaaaaaatagtccctactacatagactactcaaaatgcccaaaaatacatggctataaccctatactactagaatggccaaaatacaatgcctaaaagaatgaaaaacctattctaatatttacaaagaaaagtggatccaacctatacccatgggctcaaaaatctaccctaatgttcatgataaccctatgtgcctttttagtaactctatcccaagcctcttggagtcttctatccaatacacttagtgggtaagattacatcacatgtgtacgctgagaacgaaacaatatggagggtgattgatgcattgcatcaaaaagtgaccatgtggatggat

SEQ ID NO: 257494 - DNA, 456 bp, Glycine max
tcgtctcagctcctcctaccacccgcataccgatgggctgtctgttgttgtcaatcgcatcatataacagtacctacgggcctttgttcaccgtaaaccggtgtcgtgggggcagtttttgttatgggccgaatggtcttataacacctcgtgtcattccggtactggggtcacccccttcgagatcatctatggtcgaaaaccaccagccattccagagtatttggggggcgctgcagcaatgacggaggtcgacgaaatgcttcatcaacgagaagatatttgcagttgcttcgtcagaaactgcttaatgcacagcaaaagatgaaactcgccgccgatgctcgccgtagaccccaggaattcagtatcggtgattgggtattagtcaaatgagacacaccgccaagtctagcttcaaatacactactcgaactcactaacgctactatggac

SEQ ID NO: 257495 - DNA, 451 bp, Glycine max
  unsure (1)..(451): unsure at all n locations
actaagctttcttctcttacacaanataggatatgataaatcatacttgatataaagctatgcatgtaatcgacatccaaaccataatttatcccggttaccatcattattcactattttccgggggattcttttacatgaaaatatactagagcatatacctgtaatgctcaaagatgtaaaaaatcattatcaaatatctcagttcttggaagatcttcaaccacgtcatgatctaagctccaaactggtaacatctcacttgctcggactgttctactaatgcagaaagtatctgctggaatctttgcagctacactatgctgtacaagataacatatttgatatatcatggaatcacaaatgcaaggaataactgcttccagtttaaacttataaacaatactaaataataatttgatcatttaatgtaaattatttcgaatatttg

SEQ ID NO: 257496 - DNA, 385 bp, Glycine max
  unsure (1)..(385): unsure at all n locations
tggatgattcngtctgacagggatcgatgtttantaatttatgctacaacatagaacacaagagcatgattgattatagaaatatatttatatgcatcagcttgtttgtgagtaagacccaacatttctacctattgctgtcacttttacttactttgtattttacagatttagcataaaaagttattttgaattctgtttgaaattatgaatcatacatgttctctgaacaatgcttcatttctaaacttatattatgctaacgttaggtccttgtgttcgatactcggattcatacgctttaattattaatactngacgatccggggcgcttccggataaattggattcccttgatatatttgacgtacaaaaagtgaacaaa

SEQ ID NO: 257497 - DNA, 148 bp, Glycine max
ataattttgtatatatcactccgaattattcacgttatatggacattacgattacgttatgtgataattacgatcttgcttacataccctacgttattcattttatatggcagattacgaatatcttaaatttcgatatgatacaata

SEQ ID NO: 257498 - DNA, 291 bp, Glycine max
ggacctcatccaatgaaagtattcaacttttggattgatgaaacgagctttcttgactttgtaaggaaggcatacaaatcctacaatgttcaaggatgaggtgcttatgtggtcaaagagaaactcaagctcctaaaaaaaatcatcaataagtggagtgtggacaaggttgggagtcatcaaacacaagtcgacaagttggtggccaatataacttctttggatgttggaagaatttcataggagaaggtgtgtgaaaaggaagacatgctcaaagattttggaagaatg

SEQ ID NO: 257499 - DNA, 367 bp, Glycine max
tacctcgatggtagaagtggtggagacgtctcaacggaagctttctatgcgcgattaatgaaccaacaagtagcggatatgtcctccaatgctcacgctcaagaagagaatataccaatatgttgaaggcgcaaagataaaaaggaagcggtgcaaggaggagtactaatgcgatgaacaataacgcgaagggaggaaatttatattttaagtgaagggcatttttgtccatttacttcaaatgctgggtgcaccagcaataatgttgggtgtacctaataaactgtttctgttgtattgtattttattcttattcttaaaagaagtgatttctattgaattgtgcaaaccagtcaaattgacgatt

SEQ ID NO: 257500 - DNA, 423 bp, Glycine max
tataataaaaaaggaaatttagttagtattatatacgacatgttagtattctatatatatatatatatagatatatgaccttaatagccaaataagataaagcacattaaccacttattgttgggagcaagtgtgctacaaatccaagccgaaattgcttgcatcaatgccaaattaaccacttatttttcgtgttcttatcaagtagactttacatgctctattaagctggtaatagaatcacatataccaacaattctacatgtcaacacaaattcatccacttataataatcgaacacacataatcttgagaactatttgaaatttggaagtattgaagtggaaggcgcctacatatggtaaaataggatattgatataagcataacctcgtattatataattaaattgagcttacaaca

SEQ ID NO: 257501 - DNA, 306 bp, Glycine max
  unsure (1)..(306): unsure at all n locations
ttctcagggttcacttggaccccatctctaccaactatgaaacctaagaaaactatattatctacacaaaatgtacacttctctatattngcattagaggggtgttctttcctaaggattgaaagaacttgcctgagatgtcctaagtgatcatctangctcctactgtacactaaaatatcatcaaaataaacaactacagatctacctatgaaatcccttaagacatgatgcataagcctcataaaggtgcttggtgcattagtgagcccaaaaggcatcactaaccattcatacaaaccaaac

SEQ ID NO: 257502 - DNA, 448 bp, Glycine max
tctccgaatggcatggttatttccagtttcgtagaagtgaatgatacatcctcaccacttgtatttatgcaaatacaatttgttcttatctttattgataagaaagcttcctaatatggaaagctaaaacctctattggatcttccctgtaagtacctgattgaaatatatttctatctatataatgatgttttgtgtgttctctatgccatatgattttcattccattatgcctttaccttgatcacgttgatgcatgctttgttatggtcattcaacaatggaaactgatctgactctaaagtccttgattgtgcaaggactgatttgcgtgctcttatgatgaatcggggtgcattagataactgaatatgtgtgattaatgcggcctatttgagttagtcttacaaaagatctgcgatgagcttgacagattatgttaactata

SEQ ID NO: 257503 - DNA, 198 bp, Glycine max
  unsure (1)..(198): unsure at all n locations
cactatattagcgtggaagttcaacacctttactgcacaaccacctcacagttgcagaggagctcctacgtataaactggcttcagaattaataccaatcaatcctctcattttattatttctggataatagccacgggtgacccagatggacaaatgcangacatgatgcatctttattatctcattatgttagcta

SEQ ID NO: 257504 - DNA, 368 bp, Glycine max
gacactcaaaactcagctttggacagcttaagatgtcaaaagaggagcgtcttctcttgtttatccatctacaaacatatgtacggtctacgggatagaggcaggtctgttgacattctggcggcattgagagacacaatatctgatggggaaacattctttgacatcattcggctctgatacaacactttctactggtgtcgatgacgcactatccattggttccttccatgctgatacccatcgattctctgtggtacgcacatgtggcacttaccgcgccatatgcgcaaatcgtcatatacacggatccttgactggaccccgtgctgacagaacaccttatacaaatttcatgagcatattgt

SEQ ID NO: 257505 - DNA, 387 bp, Glycine max
agctctaatattataatgtcacatctttcattctattgtcgaccatcgacataatggtgctaacaagactaagctgtaatattacagtgtctcaggtctagtgcagtgtcgaccaccaacatatgtattgcgcccaacaacatcgagctgtgatattataagcataatgtacataataatgaaattcaaatatcaccagaaaaggtccaaaatggaaaactagtcaacatatggaaatacaacacataactcacactgtcactagcgaaacatattataagattaatagaactcacattacccacagtattcatttggctcttaagaatcaaaagcctaatcctttggtatagatcaactagcaaggaatttggtctatatgtaaac

SEQ ID NO: 257506 - DNA, 364 bp, Glycine max
  unsure (1)..(364): unsure at all n locations
tgtccacacaaacctgaccgcancatgttgtttttttcatattaatcaaagcgcacgagagattgatcatcttatggtgtggctcgcaataattaaccattcaaaagttttaaaataaactaattatgcatgttcaatcaaaatcttgttaggctctcataaaaaaatatgttaatgggcaaacataacggtatacacaatgggacaaccatgtaaactcgatgtcaaccaaaacatcatggcttcaaccccactatgggtcatgggtgcaacccgctgtctcaagtctctacaaacatgtgcacagaagctgtcaatgtattgcattataattgngatacagatcttttttgttatggatcta

SEQ ID NO: 257507 - DNA, 318 bp, Glycine max
  unsure (1)..(318): unsure at all n locations
accacagaggggacctggagatatgtcgcggaggtcaagagaccttgnggacgtcaggtggggtgctattgcccaaaaccaagcttgaccaatcccgacccaacccgggcatagtcggtcagtgagaacctgtgatgtacctaagcaggcgagctcctggcagtcaacagataaaaggaacaaagaccacaaagcaaggaggcttgtggtggctggccagctgtgaaacttgattgatatgtgagatatggtctctggtaatcgattaccaagggtgggtaatcgattacaaggcttanaaatgaagacagggggcta

SEQ ID NO: 257508 - DNA, 443 bp, Glycine max
attacggaacttataatctcagcttatacaattctaactctttagcctggggaatgctatggcatgggtctggctagccttgggctgtagccttcttagagagagaacaaaaccaaccatttctccatttgaactgcaagttcagtttaaccaagataagaacttatatatgtagtgaatccaatatttattccactaaccctatcatttacctccttaactgtcatgggaaagtgggctacagctcgaaaatatgcacataagcgctcttccatggcgtcttcaaatgataaccgcatttcacttgttgctgctgatgccaattatgttataaagctggacaactgaaagtgcaaacatcagtcagttctcattgcagtgtcaacattgtagtgtgaatacgttataattatactctaacgtttggtcaaaatatctacact

SEQ ID NO: 257509 - DNA, 321 bp, Glycine max
  unsure (1)..(321): unsure at all n locations
agctntgatgcattatttggagaagtaatgttttctctttatgangcgcgccatgagaggggggatcaaatggagaatagagatcataatgacgacaaaacgaggagaacagggaatgattgtgttcctagacaaaaccaaattgatggtattaaactcaacattcctccatttaaaggaaagaatgatccggaggcctacttggagtgggagatgacaatagagcatgttttctcatgcaacaactatgaggaggaccagaatgtgaagcttgccgccacggaattttccgactatgctcttgtgtggtggaacaagcta

SEQ ID NO: 257510 - DNA, 336 bp, Glycine max
tgtaggattatggcgtacccatcacatgtggtactaggcggtcggtgttcttatgcgcaagtcaactttccacatacacagatcacacattaacccaccatgcccagttgaccaccttcactgagctcacgtactcccacgtagcccttatactcgtgcctctcaacaccgggtccccataaatctctccaagactccacataatccaagcaatttaacatgccaaccatcatgaactatcaaaaccaatgaaaacagggcggatgcagaaaactctggccatcacaaaccaatatcacagcttgtctcacttaataaccacagttacattctcct

SEQ ID NO: 257511 - DNA, 364 bp, Glycine max
gtggacgagacgtgtgaacagacgatacacgaggccatggcttgtgtgtcaaccgattaactcgctagaaatggatgtttacatcttctctcagcagaatgaatagtactcgtcactcgttatacacaacgtgcggagtgattaaccttacaacgttcataatgggaagtgttgagacatgctctttgaataaacttgttggataaaaagatatgctatgtatcgtttacattcgcatctgtcgttgccaagaaatgaacgacgaagcacctgaactctatggagtgactcttctgcccctccatgagaattcgaatgaccacgctcgagaattctttggattattgccttccgcttatacaaa

SEQ ID NO: 257512 - DNA, 410 bp, Glycine max
  unsure (1)..(410): unsure at all n locations
gctcatgatgatgatgaatcaagattgtttcttgttgtnttgatgataacaaagatgatgatccgaagcccaagaaaatgatctcaagattgagtctagaacaattcaagaatcaagagaaatgtgatttcaagaatcaagaatcaagaataatcatgatcaagattcaagaatcaagagaagactcaatcaagataagtactataaagtttttcaaaacaatgagtagcacatgaagttttcacaaaatcttttaccatagagtttttactctctggtgacgattaccagtttccttgtatcgattaccagtggcttagttggttttcataagctctcanactgaatttacaacgttccaattattttcaaaatggtgtaatcgattacaagattttggcatcgattac

SEQ ID NO: 257513 - DNA, 431 bp, Glycine max
taatcgttacacagatcaatttgacaacctcatgtcatctttcatgatttcctgaacaacttatgattagagtttgaatgcgaatgttataacacaccacgcctaccgctcttgccataaactctcttattccttattacaaattctcttatttttactcacctgtcttggtcgatagggtctactgaatgcatatccaacctgttggacgaatatatttcataatatttgagggatctattttcatcttattaataataattaaaatacacattatgattatgattacgattattacaatttacaatgttatgtctaaatatcgttttctaatagtactaattgatcagaataaaagaattctattggttatacatcgtgtacacacatttctgtttaccatttgtcattcattcatattttttataaac

SEQ ID NO: 257514 - DNA, 307 bp, Glycine max
  unsure (1)..(307): unsure at all n locations
attcttcagaaagtgtaaattctgaatccacacaaggtactgcaaaaagaatgtttcatgctcttttttgctatggttcaagctctaattttttaggctctaattttttaactgcctatgaagattgtcaatctccaactaatcaacctgtaattaacactgaagggaataactataattctgatttataatttcatatatcagtgcacatgctcttaaattaatattcacaatngttatcatcatattgtactatgggattaaacaatttcacgatattctgatcttggtgatcaacttatgcaat

SEQ ID NO: 257515 - DNA, 433 bp, Glycine max
  unsure (1)..(433): unsure at all n locations
tctataatttataagttggaattgcaataggtattattgagctcatcacctcacgaacgaattctattaattattttaatacggntaattctttggacataaaacataataacttgcattttacatgcatttgaaggatcaaatcagtataaagtaaaataaaggaggtaaataaggagaaattgtttatctttgaaggacataatgagaaattgttaagaaaataatcaaatactactgcccagttagatactntgacttggtgcccaacagcaattatagtgcatcaacaatttctattttgacttagtgtgcatgtgcaacagcaattatagctttcaacggcaaggttctcactgcacattaactattgtttgccaagtgcacttattatctacatatattacacaatataatgataacgatgacatct

SEQ ID NO: 257516 - DNA, 174 bp, Glycine max
  unsure (1)..(174): unsure at all n locations
ttctcttgatgaagaggtggaccatatgcttaataggaaagccttatggtgaagaccagtgaaatacactatacttagaanacagattcaagaaccactaacccgcaacattgccatcagcatggtcaggagggcataatacccaanctcaccagaatatacctgcatatgtta

SEQ ID NO: 257517 - DNA, 259 bp, Glycine max
  unsure (1)..(259): unsure at all n locations
tctaatgtattntaatatttatataaaagctttcaactaaagagaagattttccttaaactacattgatttattatgcatgaataaacactaaattaagaacgtctctataacatttggggtgccacaaaatgtangtcaagagaggctttcttggaacgaataggaatcatgtaattatccaattggttagagatatatgtgtcattaattcataagcatcaacacaatgcgcaaagttaatacttaccccctaagac

SEQ ID NO: 257518 - DNA, 449 bp, Glycine max
  unsure (1)..(449): unsure at all n locations
tttggaaggatcaagaagtgccttatgtatcctcccgtgcttatgccaccaatacctggaatgcctctcatcttgtacatgacaatcttatacgagtcaatggggtgtatgttgnggcaacatgacgaatccggaaagaaagagcgcgttcgttactacctaagtaagaagttcacgacctgtgaaatgaactactccttgctcgaaagaacgtgttgtgctttattatgggcatcccatcgcctaatgcagtacatgcggagccatactacctggttgatatccaagatggacccggttaagtacatctttgaanagccagctctcacgggacgaatcgcccggtggcatgtnctgctatccgagtttgacatagtctacgtcacccaataggcgataaaatgaagcgccttatcatattatttggctcaacagcctcttaacgacta

SEQ ID NO: 257519 - DNA, 177 bp, Glycine max
tactactttctggactgtttgtttctcaggttgattttggtgatcaatcttatcaccgtcctactgttcagcttaacactacctcattactagctctaaagttgttgctcacatgtaataccctccttctggttaacttcactcttcgacagctactaacgttagcagcgactctgt

SEQ ID NO: 257520 - DNA, 204 bp, Glycine max
acacggctactgctgtaaatagctatgctggatattgcatgtagaaaggatcaacgcttgcattgtgcaaggcacaattgcttgcaaatctggttgtgtggagggatcatatggttgcattgtgctatccacgcaatgaactatgcaaactcgtaattcagtatcacgtacatgacgagaagtctggttgtgaactgattatgg

SEQ ID NO: 257521 - DNA, 218 bp, Glycine max
  unsure (1)..(218): unsure at all n locations
ttccattttataggaaggagnaaggtacctctgtataacctaatggaaaatggtcggaaatcatcaggctcgatgtcgtcttccgggattcaagttcacgtctactctttctctgcgtctgctaccgagtctaacaacttatatttccctatgctatgtttctcttatactcatattcgcccttgcgctagatgtagttttccacaaaaaaaatcccg

SEQ ID NO: 257522 - DNA, 312 bp, Glycine max
  unsure (1)..(312): unsure at all n locations
ctgcacttgacatatctggcttattactatttggcttgtggcacctctattatactttgaccctctgacgtgattgacaagctgtatggaatgtgcgatatcctccaacctattgaacattctaaatggggttgtatgtgtcatatatacgcctttatatcataagccttggacattttcctttgaatgcaacaatccatgatgctatggctggactattcacgaaattntctaacattgataacaatgtgctacacagatgacgctgcataaatattatgactacatcttaagtttatggaagtaataacg

SEQ ID NO: 257523 - DNA, 227 bp, Glycine max
ctgcagctgtgtgaatattataagactgctatcattggaacttttttctttacgcctactacgctgactttaagatgatttatctggaccacgtttaacttacctcttatttctaataaaattgcccgttttactttctcgtgaccatataagtcagtcctggacatttaaaaaatattataaccctcactaccgaaacctattgatctagcccacacaaacagatc

SEQ ID NO: 257524 - DNA, 325 bp, Glycine max
ttctcatccaatggttaattctcgcaagcgtctcacatgaaagtcgaagataataagatctgtgaacaaagtgatcacacctgtaaaaatctattgctgctgggagtggtgtaaatagggaaggtatttggcgccaattacaactgctaggtcttcctccactatcctacagggctagtgaatgtactctgtgtcttgatacataagctcatgcagacacacttgtgtacatatgtcagctcctgctaaagagtctcaaatgttagccatacttctctgtcaacttgcactacatatgataacaatgctcctcgagatctgttct

SEQ ID NO: 257525 - DNA, 274 bp, Glycine max
ttttttttttcaaacgagaatatcggaaaacactagcctccacgtcgacgttgggaataccaatctgacgctaagatgtcgctggtatatcttacggagactaacagctgattatctgctcggggccatggtggtttatacgtctcgttttccctgcgctagctattagctttgtacaaaaatatcccgatgagtctctattgaagacacgcggccacctgaaaaagaataatatcgaatctttagacaacatcggtttgatttcatatgtaca

SEQ ID NO: 257526 - DNA, 192 bp, Glycine max
atgtgacttgtgatgaagtataaaactcgaggccttttccttttttcttattggtccctttttctttcatagatcttcagttacagaattgggggagcttctgtatcaggtggcccatcttctgcttgtgttcgggaaactgagcttgataaacactcaatccacactcataagtaactcggtatcggtcag

SEQ ID NO: 257527 - DNA, 187 bp, Glycine max
tgacaattctgtgactaaacttgtggctaaagtttcttttcctgcaaagagttactcactgtcagaaatcttgacacatccaatacttgtgagatttacatgaagacttggatatcctgtactaacctccacattgctgattcttacgaatctctacacacccattgaccttttcttgcatataaac

SEQ ID NO: 257528 - DNA, 265 bp, Glycine max
gcagctctatgacgatgtgcgataaatgacaacttctgtggagcattttgttactattctgttaactgatatcagaattgttatgacgatttactttcctgttcactgagctcttttgtgaaattcctttgttaataaacttcaaataaccctcaaatttgaatcaactcatttactgaatgatcttggggactcgttaggtaaatgctcatcactcttgaatcccatctacctccctcttattctgttgtgctctattcgatat

SEQ ID NO: 257529 - DNA, 164 bp, Glycine max
atcagcttagagggatgctcaagctcaccctggagactatatactttctcatgtactgagcctgaaaaaatggaaaaactgccaaatcgggggaggcactgcacaaatttaatctcccagatcaatagccctcactgaatctgagccaaatcctcaaggcgggc

SEQ ID NO: 257530 - DNA, 340 bp, Glycine max
cccacccacctacccgcacccccaccccccccccccagtgaacgcgtggcccaacacggagcacgaaaaaaacaaacccgacaacgtaataaaggcccgctacagacaaccgggacagagacaaacccgggccctcaaagcgaacccaaccccacaccgcacgagaaaaaagactccagaaaaaaagcacataaccaaagagccaggcgcacaggcaacaccggcagaaaaggcccggacgacggagaaaaagaggggcgggaaaaaagcaaaacaccgcggaagcacaacgaacagccgaaggccccaaacaaccaacacaggaaaaaagcaaaagcaa

SEQ ID NO: 257531 - DNA, 441 bp, Glycine max
  unsure (1)..(441): unsure at all n locations
tgcagcttgaccantaatgacataactttactcgatgctattggcctgtatattctaacactcgaattgatgttgacattgacaattcaacgacataacttttctcgatgttgattggactcgaatattcgagacgctcgaagtgaatgttaactttgactaattcaacacaatacttttacttgatgttgatgagtccgtgattaacgagcgctcgaattgaagtggactctagcaattcaacgacatactttactcgatgctgatgagtctgtattattagacctcaaatgatgcagatctgacatctacacatactttactcgtgttatgattctataatgaacctgaatgatgtgacttgccattaacactaactttctgatgcatggccgattataacctaaatatggacttacataacacatacttactgagtgt

SEQ ID NO: 257532 - DNA, 83 bp, Glycine max
attttttaaaaagtgaatattttcaaacatgcgttactaaactattcctttcactctttttttacatacattgtattctttct

SEQ ID NO: 257533 - DNA, 97 bp, Glycine max
aacagcacaaacccacacgcacaacggcaaatttgagaccccgcgcgaagcgataccaacagacccaacctcaaaaacccagggcgcgcggaaaccc

SEQ ID NO: 257534 - DNA, 174 bp, Glycine max
aacaaaattatgaacattcccaatgactcccccctatcttataattacaacgaaactttaaaatgaaaaaggataaagccccgctttaaggcatatgaacaaacaccgctggtgctgggatcctagagggtgtccttgacgcacaaaaaaaactcaacgacaccttgaaagaaa

SEQ ID NO: 257535 - DNA, 265 bp, Glycine max
gtgaataaaaatggcaaaaaaatgtgttttagcaccatactatcgacaccatgttattctgataataacaatacagtgccagatacgtatatgcatagtatagaaagggcaagtaaaaaaaattgccttggtagtctgaagactttgagatggtgagttattaattttaaattgttgcattagttggctgactgtttacactagcttgtcttattttttaaatagagtgttactggaatgacttgtttctcagaccaagtggatg

SEQ ID NO: 257536 - DNA, 246 bp, Glycine max
aaacaatttttccataaggctaagtttttttgtctaataatcttaggaatcaatccctgcaacaaatactttatgtagcatacattatgtagcacactcaattactaaccggatttcttaacttacgaaatgtcatttattgactcactttcacacactattgttattttgggaccgaccattgatcttgccgggttttcccagtatacagaccagctatataattcagtactgtatctacagtac

SEQ ID NO: 257537 - DNA, 274 bp, Glycine max
tgcagctgaagaaactgatgcttggtactggtacccacgcctgattatttgtctacgaggttgggttggctcttgtgacacctcaaccttgccttcatgagacctgagcaatgagctcctgaactatgctgcaatatttacaatagaccttctcaccctcgcagcaaagtcaccacagcagagcaattatgacctttcagcaacagatacaacctctgatggatgaatcaccctactctcagatgtgccaggccctcacaacaacaacagcagc

SEQ ID NO: 257538 - DNA, 168 bp, Glycine max
  unsure (1)..(168): unsure at all n locations
gcagctgttgccttcctactgcactgagcttttagatgtgcagttttttctgagacttgaggctgcgacattaatanataacgacataactaaagacttgcaagtgtaatataaatcttcatctattntatgtataagttgttgacaatgtgcatgccacaataaaca

SEQ ID NO: 257539 - DNA, 235 bp, Glycine max
ggaccaagacggctcgctctgctactaccagtgtacgtgtggtgtccttttacagtggatggggggggccttttggacactgtaacagcgtgggactcatatataactggattgtacatgacaatcatttctcattgcatattttctttttccataacaagagaacttctttccagagagcataggacaatcacaaatgtggagagaacacgatgcatcataggactcaacaaca

SEQ ID NO: 257540 - DNA, 254 bp, Glycine max
aagcacgcgctcactggctgactactattcttccgatccttgtttttattccaccatcctcctctttcaaactatacatcaaatctcatagagtggagtaaaaccctcgaaagattgtaaaatggtatgggctaagatctagatgtggactactggtcattgacctcactacccaaggctttacaatacaaattcctttttacccatttaaatgataatactttgtatcgtatgaacataagcgatttgcatat

SEQ ID NO: 257541 - DNA, 227 bp, Glycine max
ggagcatgaagaatagataacctttaaactgtaccctgaactctaatattcacctttgggggcatttgatgctgattcaggtcatgacccatttacacacaaactataactttattaccaagtcacttttttgtaagggtttctagataaactgctaatgcaatacttagtcatgcataaatataatacaccaatacttaacctaactactactaaagctgtctata

SEQ ID NO: 257542 - DNA, 344 bp, Glycine max
ttaacttgcttagagggatttcatctgctgttaaagtaactgccattttgtagagactttttgatagacttttcataagtctttctctgggctgtgcaatgtggtctctctgaagatatccctgttttttctagaaaaaatcaactttctacaaattcaatcttattcttatataaacatcctctcaactaaatcgccttatatatacaaatgtctttttggttggctgcattttacatcttaactaatctacttcttacaaattactactccgattataagacacttcctactcttgactcatatatacctaatggcgtgactaacgacaaaaacatgtctta

SEQ ID NO: 257543 - DNA, 343 bp, Glycine max
cctgtacattatgacgcttctagtacaatttttttatgaacaaaatatccttattttggaacagaaatcctatgttgctcattcttttgggaaattctttctctgcacccaagtagggcaactggtctctgtcaataaaggcttgacgctactgactgtacaactgagttaactctccagatcgtaaaatctaatgttacttcttagtcaatctttccccttgtgggcctctgtttccatccactcagactcaggctgagtcctttattctaatcctttataattccttgatgttcccttaattagcctgtgattgtaacacctcgattatataagtttttaa

SEQ ID NO: 257544 - DNA, 292 bp, Glycine max
gcactcaaacctatttcaactcaatttttttttgtaccaagtccgcctagcacctctttgttttacgctttcctgggtaaccaggctaatctcactaaatgcagtaaggcctgtttctgtcattcctataatataccaaccaacgtctgaacagcattatgccttccattcttcatcctggacccgtgagacggtcgggttcaacaaccggtccacttcgaaggacaagggccctatagcaataagtatcttagttggtactagttgtactggcaggtctcttcttgaagat

SEQ ID NO: 257545 - DNA, 177 bp, Glycine max
  unsure (1)..(177): unsure at all n locations
ctgatttattggtgatatattggcattgtatacttacaggggcactaatggtgacacntttgatacnccggttccaccactaccagatattgctcgatagaatttatcctncaatctgaaaattagtgtaccttgtcatacanatgaacataatcttgaatatgacatttagtatgt

SEQ ID NO: 257546 - DNA, 329 bp, Glycine max
ctctataaattgactttttctttgccatacagtctatcattaaacttggtcatccatactctcttgaacattcttattttgctatttgctttcaactattatgatgaacagaggcttgaactatcatctacgacatctttgcgagtgttcattttggattcaaacatggtaggcacatccattggataccgcactgactttattctgatgggcgtacaatagttccataaaaataaagactcatgtttatgtaattgttactgaagaactgacgcttcctatgtggtaaaagtcaaatatatctaattatctgaagggtcaccggcccg

SEQ ID NO: 257547 - DNA, 297 bp, Glycine max
  unsure (1)..(297): unsure at all n locations
gcttcctactatggagagctnatgctcagtgggtcttctatggggacttgatgtttatatctgatatctatccaaggatgncttatgggctcactgtgctatcaatacttaattctagcgtgtcttgccttgatcatcaactgatgctaattanggcactcaacatggaatggntgatcttatacctgatggacaggctgctatctagttcatgagacattgggatgttttgtatgtatgcttaagggtctggtaagttagtcaacttaattctcatttgcagtacggtgtccattg

SEQ ID NO: 257548 - DNA, 384 bp, Glycine max
  unsure (1)..(384): unsure at all n locations
ggacttagcacgcgctgcacttaacccaccaaattaggtcacacctcatcatggttttttttcaaggaattaaatgagtaattgagcaactctacctacaccatctaacatcactaactgctaaatgattacccanatcacgataaattactttccaccattgctaaaaggtttgtacttggattgtttccttaccagcacttttaatgcaagacttacagatatattactctacacaataactactcacttaagctattttcatatacaccttcttcactgtattactccttacgtctagattacttacttcaactaacaggtgtattcactgatacattacatctcatactccgcaataaacccttttcaaccatccaataa

SEQ ID NO: 257549 - DNA, 281 bp, Glycine max
  unsure (1)..(281): unsure at all n locations
taagcacctgggctgcagcttctaagatatcaaaaagtgagacgagtattgtttcttttatangctaatagataacagtgcatgtttagaaggcttgtagtattttgacccttttgcgcttctctcgtggaactggttctattattttttttcagaggtgacactgtagataattacgataactggtcacatagatctaatatgataatgcacaaccttcactaatgggatagaagattaagtcatttgaactgttctactaccttgtttgtttccctttc

SEQ ID NO: 257550 - DNA, 326 bp, Glycine max
  unsure (1)..(326): unsure at all n locations
cacactaattntcaattgaaatntangaactaagatnggtataatataggaaccaattatagaataaattttgagccataacaacaagcacacttccctttcactatctttattctggatactgatatttctgtcaaaagtgtgtgatatctagtatctattttccttttatccaaatcacttatttctatttgataacttctctccacatgtctatcaaattcagtaaatattcacgctcaaattgaagtaaccattctcagaattttacaagttgatgtcaactgcagcacacgattttttttccatggatatgatgcctggct

SEQ ID NO: 257551 - DNA, 146 bp, Glycine max
  unsure (1)..(146): unsure at all n locations
aagcaccgcggctgcagctctgattcattcagcgctcgttatacgggctcaacgtcttcttttaaatatcgcgntgaaacgccagagctcacattcatttcagcgtccgatatattacggactcaatcgacatcgagtaaaaggta

SEQ ID NO: 257552 - DNA, 129 bp, Glycine max
ctgagattgccgcgatagaatcagtagttccaaccacctctgacaaaactgatattaaatttaataattttaacgggtaaagatacattacagtcttctctactcaatgaccctacctaaagtcttttc

SEQ ID NO: 257553 - DNA, 132 bp, Glycine max
ctattaactaggagacgtaatgctgttcgaataattaaactttgatcggtatatttctctgagttactgctgttagctgtgccaaagaaactagcaaacaactgtattacatgtgtcatctaattatctcct

SEQ ID NO: 257554 - DNA, 122 bp, Glycine max
tgttcgacaatcgatatcagacaatcgattagaactctcgaagctaagtttaacaggtccagagttcaaatttccaagttcttggacatccgttcgatcatcgggagtgtttaactcacgat

SEQ ID NO: 257555 - DNA, 388 bp, Glycine max
  unsure (1)..(388): unsure at all n locations
agcacgcgctgcactgtacacatttttgtccccattttagcttgcttgttttaaaaggaatctgaatcacacagactgaaaagatgttatgctttttgtatgtcagcttattttagcttaattttactgctatagatgcatctcactaacactgtatacactgagtaaacatatttgatatatcaattcggccgcctaaaaatccatgatatcttgacatgataacattacaatctatctggacactatgcagaaatgtatccaagtgttataagaatcaaataaatatgagtcagtactatgtnggatgcaataactctatcaatccccaattcacctctttgtaatcttgttaaattactactcactcactagtgctcttgtgtac

SEQ ID NO: 257556 - DNA, 181 bp, Glycine max
tcaactactttgtggagataacccttgatgcggtctataacccttgggtatacctacacatgaacttttcgtgaacgatggggattgtggctatctactgaccttatattaaaccacgctgctattttgacattaggttattcttactgtcaggcaggatccactacgtgcagggaactct

SEQ ID NO: 257557 - DNA, 84 bp, Glycine max
gttatatactaaacatgatctgagtaccttacacgagagttcaaaccttaattctttataaaactaaatagagtcgctcactat

SEQ ID NO: 257558 - DNA, 480 bp, Glycine max
ctcaatataccttcttgaaactaagctagctcacacaacatcataaaatttctctcctgcctgaaacatgcatgaaaatatcaaatcaagtgcctactacaaagactactcaaaaagccttgcaatacaaggctaaatccctatactaattcaatgaccaataccgatgcccaaataaacgaaaaacctatttctattatttacaaagaagagcggatacaacacttgacccatgggcttaatagtctacgctaaaggtcatgagaacactagggcctactttatatagctttagcccaaaccttttggagtttattatgcatcataagcatacatacatgcttattattggctgcatcggtcaaaggattcgttacttgatagaaaatgaacttaatcattgtgatcaataagcgaaaagccggtataattcacccgcactatggtgatctatgctaactagctccattactaattgat

SEQ ID NO: 257559 - DNA, 147 bp, Glycine max
taatcacctgagctgcagcttgcataacgatcacttatgaacttttttttttttgactccacgcatctctatcgctggcagtctgcaaagcatagttgtgccactgcacccctttatcacgaaaccagacttggtaaaaaattgtct

SEQ ID NO: 257560 - DNA, 410 bp, Glycine max
catgcagctttgaatctttagccttatatagcttggtttcttttgaaacaggagaaataatgaggaggggacactaaatggagagaaaatggcatgggaagacaagaaacccttaagaacacacggaaaataggtctcatctccccccccccccaccaccaccacacgctttaagttcgactaaagctgtcataatgggttaacctgacccgttgggctcgacccaccctataagagggtcaatacaacccaactcacttaagggtgactcttgaaaaaatggattaggtctggctcaccagccgaactaaactaaataaatgataaaccaacaatagatcaattgtcttagaaaaataaatgttcaataaattagaaaaatattacgtaagataaatcttccactatct

SEQ ID NO: 257561 - DNA, 243 bp, Glycine max
taccgcgctatttcttttagcggataaactgagccgggttctgatgaacagaacgatgcctcaataacctgactactatctcttgtggatttcctcgactatccctgatgtaccctatcgatgctgatagccgctattgctaccgaaagtgaacacactttgcatttgctaataaccgaatgaaaattgatataaccacatcaaatctagactttcttatcgaaaatcgttttactaacactt

SEQ ID NO: 257562 - DNA, 405 bp, Glycine max
agctttaaaaaagattatatgaagcaggcattatattttgtatgcatagtatactacattaactcactactatttactattgtataatttttctaatcataacattggtgaaaaaatatattaattctatttatgattagttattatcgaaaaatttaattgattattcttagtagaatctttcctttttaatcatgtttaatttattcataaaatttaaattaaactttatttaaaaggattgaatccaattttatttgaaccaaggaataattgatagaatgtttacattttgaaaaattgaaaactatgcaaattctattttacaattttcttatttcaaccgacatgtatataataaacctaacatatttgtccgtgtttagtttttaatccgtaaattga

SEQ ID NO: 257563 - DNA, 383 bp, Glycine max
  unsure (1)..(383): unsure at all n locations
ttgtgtactcctncctacttacatcgactgctgtaatgtgttcatgaataaccttatatcggaacgatttggatgctantaaatatcctttaagacaaaacttcgttgaaaaaaatagactgtgcaaaaactctttattgtagcccactcataaattgttatgcacttgaaaattgcaacttttggaataaactcatctctaaggtgattttctattggttgatgcgaaaaaaaaaattatattgacattgtttcagaattattatccccaagaatagaccattatgtatagtcccacccctttaatgacatgcccaaatatgactcacctggtaattttacacttgaagtagatcaaattttaatcgtcttgcgccctacac

SEQ ID NO: 257564 - DNA, 67 bp, Glycine max
aacgcagccgcaactaatatataccttgggggaatcttttatgaagcctatgaagaaaagagcactt

SEQ ID NO: 257565 - DNA, 267 bp, Glycine max
gtgtgggggagacacacaaatagataacgcacgcattctgtggggtgttgggatagattgggtaaagagctcattcgagttttacccacaaacctgcctaatgtggtgatgcatcatgctttgctcatattggtgtattttccacacgggtgggacaaacacagaggagagacgtttggacaacacgggtatgggcgtgtaacgtattaactcataatgttatctgtgttacgacctgaatgaatgaagttataggaaccacggtat

SEQ ID NO: 257566 - DNA, 412 bp, Glycine max
tctcgtacccgggatactctgagtcacctgaagctgcaagcttttatttgatccacagaggattatcttactacctatttcactcaagtcccacccacagaattcaagcacaacagactcggtcattgccatctagaaagaatgctaaacctcgaaaaaaatggaatattcccacagaaaattagaagaaagtttcacatggaggaactccaaatcttgttagcacaccactgaatcaatacggagaagctcatccgaagaagaaaagtgttggcaacactcatgaaagatattatgggagctcgatcgaatgcctaatgttactcactacaacaaggcccatcatttattttctcaaagaacaaacctggaattttgttgacttaagaccacttgctatgcaacattcccg

SEQ ID NO: 257567 - DNA, 378 bp, Glycine max
ggaagcttattggtctggaaagaaatatggctgagccatgttggttctatggtttacgaagcgtcaaatgatatttgctagcatgtctctggactaagaccaattggaaaccttacaacaacttctatactttgaaaaataatcacatgattcaatgtcctatttcttctctttctcttataatcacatgaccacatgttttttattaccgcaacaagacaaatgctgatgaactaggcaccacatatattttattacaacaacaaggaaaatgttgataaatgtgtgttattacatgattgaccggcctatatctttctctttctcttatacgcactgcattttctgctgtactaataaaaactttatctaattgaa

SEQ ID NO: 257568 - DNA, 417 bp, Glycine max
agtcacctgaggctgcagcttaaagacggaatctgcaaatcatctttcctcttccaccttcttccaggaaaaccgcaatcgccaacctcaaccgctcactcgcggaagccggctccacattcaccacgcgccaacagcagatcgggttctgcccccgcaggcccaggccagtccagcgtcccgtctggcagagcggcgatcgctacaccttcagcgagttcgagtccaaggccaagtccttcgagaagacatacctcaaacgccactccaagaagggctcgggctccggctcgggcctgggcccgttggagacggaaacactgttctggaaagccacgctggacaaacccttctccgtggaatacgctaatgacatgcctggctcggcgttttctccgaaatgccggcgcacagggg

SEQ ID NO: 257569 - DNA, 413 bp, Glycine max
ccatcatatctcccataaccccatacccacgagagttaagagagaaagaagtccacccaaacctgaaatatcaaagtcccactcgtagccacgcacttcacgtctccaaaaacgctctcctttcacgatctggggcaaaaatgatggccataggttgaagctttgtttggagcttcaatggagaatgaagaagaagagaatggcaacgcgagggagagagagagggctgtctgaaaagtgtggggctgagtgaagagagagagaattgctttttaattctaaaaaggctctttcctcatttcttataatttattataactatgccacatgtgcctatttgagtggagcgaaaagggcccactttccctttttgattggacccatactcagcccaaaagtgagaatatctgacc

SEQ ID NO: 257570 - DNA, 437 bp, Glycine max
ccacccggatctataatcgcctgctgcatgcaagcttgtttagtcactacaatgatttgtttttttgcataccaatgacaaatcttctgacttgtaacccttgggaagttccatataaacttcttcaaacaaatctccattctaaaaagcattattaacatctaattggaggaggcaccactttctagcattcagcaacaccagagccataacctttcacaagtggtaaccttggctattggagagaatgtatcaaagaaatcgatcccagcttgttgagtatatcctttggcaaccaaacgagctttgtatctatctacatagccatctattttatatttaaccttatacacccatctacatcctatacaatgcttatcaggtggtaagggaacaagtgtccaagtggaatttgccctcatagcttgtatttcctt

SEQ ID NO: 257571 - DNA, 216 bp, Glycine max
tttttttgccaaggggcgcgacggggacttgcgtcgtaggcatgttgagaagcaatatatctgaatgagacacggcagcactactatcttgtgaatcagtgacacctaccaaaagacgagtatggacaaatgtccgataatgcgtagacctagaacctactatgaagcggaatgggcaataaatcgcaatccagatgaggagagcaaattcatctg

SEQ ID NO: 257572 - DNA, 98 bp, Glycine max
  unsure (1)..(98): unsure at all n locations
cggataaaacgagagaataaagaaagggtaataagcnagaaaaaagaaagagaaaaaaaaaaaaggtaaaaaaaaaggagtagaaagaatggtgaaaa

SEQ ID NO: 257573 - DNA, 315 bp, Glycine max
  unsure (1)..(315): unsure at all n locations
gagcattgatgatatggtcgtctccgactatattgttcaaagaggagnctaaatagaggctagagggatcataactgcggccatgccaaagaatactagggcgagtgaagagggtgaaaatgagggagaaaccgtgctgtagaagccatacctatacagacgattgtggcaccataccggacagtgtcatgccttagcgaacatactatccttattcttactcaccaggcatttatcgatcaaggccactcatataataaccacaaagtatgaatactgcactctcaatgacgaacattgcctttagcactacca

SEQ ID NO: 257574 - DNA, 472 bp, Glycine max
  unsure (1)..(472): unsure at all n locations
tgcgccgncagcaccacattccctgaagtcggtgcgagattaatctccgcncgggaggcacaaatggcagcagctgcgccacgactgataccaacgtttaccatcaccggaaatatggttgccatctacaaaacacccagaccggttgctgaagagacggccatagacatcagacaggcgacaaaataggcggcaatcatcagcaggtaacgggagttaatatactgcaatggttttgacgccagcttgaccaccatatcattcgcgccgatatgggtcatgtaagcggctaatccacacagcatcataatcatcatgccgaggtcgtcgccgcggctcattactaatattttaacgtattcaacgatatccgtggcgctgtatcctgttgaaacctggctggaccgtaacactttgtgccccataatggcactgataatcaacaataacaggccatcgacaataaacacac

SEQ ID NO: 257575 - DNA, 397 bp, Glycine max
cttaagcgactgcgctgctgctcttaaacaccgaaatcttatttttttttcttctaaacggaggcgcatgaacactttagtcccctctcgcattgctctgtttttttagctattacacgattactttgcccattttcattattataatagatacatggtgccatttcaaaacctgtgtacaaaacatactccctcgattatgaagtctcattttggcccaaaaagaaaactctttctttttaacgctcatttaatggttaagcttggctcatctatgacaagaaactgctgcccgctcttgctaaaaaaaccgtacggggcttggtacaatctacaatacgagtttccgttattaagcattttcactcctacatatttaattagataacatcatcat

SEQ ID NO: 257576 - DNA, 385 bp, Glycine max
  unsure (1)..(385): unsure at all n locations
agacgctctagaggcgtgctggctgaattgactcattgagataacgtcgtctatacgatttgtcaaaagggaacanatagcagctaatcgattctttatctgcgtgccttgcctaagaattcttggtgatgtgctgatggaggatttaggcagcaaactgtgttttataaaccataccgatgctaacgcttgggcacaacacggtgcttcatgcactaggcaacataacctcctaattcttacttggtgggcttccatcaatcacgccccctcataagacgatcacagaatatgaatacattaactctcaatgacgagcgttgcctttggtcctaccaaatagaggcgccttctattgaatgttgtatcgatatactgcgagcat

SEQ ID NO: 257577 - DNA, 431 bp, Glycine max
cttgaagcttatggttagcaaagaaagaaatgaagttttcttaatcaaggcagcaaaggactttggggaagttatgcttagcttcttaacatttcctttaggaaacattgctatacaaatggaaaaggagccaattgaggttggatcactgagctcactttatcaaagtgtggcaaatattgaataagtgtgtatgtccaaggaaatgttactgcaactgaagaactcattggaagcttatatggataatctgaaggtgaagattgacgacattttgctcacacagtattttatatgtaatgacttggtcaagtgtcgacacaaaagccaggtcttgttaagcacctacaaaaatgaaagatgcagatgtgagaatatgttggctaaaccaatttctcccaagagtgaaagctctaatgtctgtgatggtg

SEQ ID NO: 257578 - DNA, 430 bp, Glycine max
  unsure (1)..(430): unsure at all n locations
ccttagagngacctgaggcatgcaagcttatcttattatttactgtcgcaagttatacgtttaatcttacatattcggaacttgatgggggtaaagcactcattgtttttttaatataaaaaatttaagtgaattagccacaaagtttcattagagccagagcatcttttaaaacttaacaattctttaacaagatttttacattattagagaaaatcaaattaaatcacttgtcaattaaataaacttttatttacttttagtactcaaattatgttgagataatcgtttaagccgatgtcaacaaaatcaaacgttgtacgcattaagaaatttaggataagattaatcgaagagaatatggtgagacacatccaaccagctcctcttaaatcctaatccttgaatcaatgtgaacccattcgttttt

SEQ ID NO: 257579 - DNA, 478 bp, Glycine max
  unsure (1)..(478): unsure at all n locations
ttgtaccctgcattcatattcatcttgcaacagcgaaatctttatgtttccatctggtacataccggaggttgcacaagagtctaaaatcaacaacaaataattcattgtttggcgaaaatttcatttgttccttgcagcatatcttaatgtattcaaagtatgtcggcatgaacccgaacttattgtctggtgatatgcatgatatcattacagtgagcgaatcaccaacaaatgaatccctcaaaacttcagtcaatttactgcctctgaatgagatgtgtccttggtcattatctaaaggtcttatgcatctcttcagtcaattcattattctcagccccctctattctgcatttcatttaaattggaacacccgacctaacaaacaanttcattaagaaggcttagaaaaggaaatctgatataccggacactattaatgatattctgtgataagaaaagatcaaggatgtcca

SEQ ID NO: 257580 - DNA, 207 bp, Glycine max
ttcggattggtacacgaaatgatgaatcacaagaaaaactttccttcttttacaatagaataattaccttaatcttcaccacaaccatgctaaagaaaagatctatacaacttttaaaatgaaaagcatttgtgaaattacactgatggcgtacgataaaaaaatatattcattccaagtccatatatttataggagaaaagaaagc

SEQ ID NO: 257581 - DNA, 351 bp, Glycine max
accaagtgcagatgctttacattatccttccagcccgattattggtaaatttattgccaagttgggaatgattaacatctattcgccaacttgagggggggtattatgagtaagcgaatgaagttagtgactacgagttattataatgttaggcgaatatgtactctaccatgttactaaaagatattgaggttagatactaggagttactaatagtggggtacacaaagtggctattctctatattcgtataaacaaatcaccttcgtaatactttgatgaatgaatgccgaaacctatactcatttctttcattcctgaaatcttttgctaaataaaactatcgtcatc

SEQ ID NO: 257582 - DNA, 151 bp, Glycine max
gaaaaatctaaagaaaaaatagaagacaaaaaaaaaaattaaaaaataataaacaaaaaaagaaaggaattaaaacaaaaaaaagaaaaagaaagggaaaacaaaaatgaaaaaaattaaaagcaaaaacaaaaaaaacaagaaaaaaaaa

SEQ ID NO: 257583 - DNA, 420 bp, Glycine max
ggatcttaagtcacctgaggctgcagcttatgttgcacatcatggatttttatgttagtattccacaatgaagaaatgacacacgttttttatgcgtattctaaccaatatttttaataaattagattgcgcattgaactaatgaaagtttggttatctttgtattggctcattcatctataatcaaaccagtgataactaaatcattaattttactatcgtataaaatatttaacaatgaattaacataaaataataagaaatccaaatacataaactttaacattagcatgatacgaccatattggtaacccacgtagatattagtttatccagaataagatgtcgccattcgtttgtgggcagagggccttatacatgctctgttatctgactcaaacatattcttggttgaataaa

SEQ ID NO: 257584 - DNA, 444 bp, Glycine max
cagaacaatacaatgctgagagaggagaatttctttgctcgcacaacatgcatactggcacatattgtgtgggttagctaactagcacatgataattattgttggcaccattacaacccatgctacgtccatcaaggagatatcactatgaacaaatcgcgtggtacccgaccattcaaggcctgaatggaacttgggcctcctcatccgaagggaatgcaaagagccaaatactctggatctaccaggttcacgatccataactatcctagctacaaagagcgtgacattcatgagacactatcactgcatacacaattaattaacatacaatatggcaacagaatctgattgactccgccgcagcaacatcttgttatatgcaacaatatgtataagatagataagacagacaatctgactacttaccatcaacaacttaca

SEQ ID NO: 257585 - DNA, 407 bp, Glycine max
  unsure (1)..(407): unsure at all n locations
agctttcaagantgttattagctccttgcatttatttatcaagtagctcaccactaagcgcggtatgcaacaactgtacaatccacaaaagcaagcatcgaataacaaattaatacaagaatcaaacgtaagtcattgtccaagtgtgaatcacatgctaacattgaaaattgctaacgtcagataccccattggagatagattaagaccacacaacatacttaaaatacgtcagtaaaacatgtaacccagatgctgcaaggagaaataaaaacatcaaggccccaaaaactatcacaagttaaaaaaatcccttccctatggcaggaattcgcacccttgtgacaaagtccattcttctaaatcaacaataacaaagatcaaaatttgacagtgaatttagagat

SEQ ID NO: 257586 - DNA, 403 bp, Glycine max
aatactgcatgtattagaagtggtgccaatctagaaggtgaactctcataaaagttatttggcaattatttcaagtgatgtctattatcatcattctactttataaacatattttcatatatggtgtatagcaactataattaggattactgtacgttgggaaaaatgaaaatatacattctacttgcttggtaatggcttaagtgaggctacaaagatttttccctttctttttattcccctattttttcttgcttgagtctatggaacttggattctggatattcctttatgaatcttctaaaatatgtcttacacaatcatgggtgatgttctacccttcatgtcttcatgagttacaatggagattaagttgccacaaaccatattgcagtggaacctt

SEQ ID NO: 257587 - DNA, 174 bp, Glycine max
ttaagtgactgagctgcaactttaaggattgcacggtccatgttttaaggggaacgaacaagagggtacgttacaaggattgaacgtgaaataaaaaatggaaaacaactttataaagttggtacgaaaaggttggatcatacagcagtgaaaaacaaagaacttcaggtagtt

SEQ ID NO: 257588 - DNA, 474 bp, Glycine max
ctatataagctctgaatccatgaagatgcactgagcgccacccttgcgcttagcgcgagtaagtggatttgagcttatcgccagacatgcgcttattctggtagaagacaaccgctgcgcttagcgcactgatctcgcgcttagtgcgcggccttgaaattgatgctcttccaaattcttctgtcgcgctaagcgtgatgaagctgcacttagcgatggatgtgcactgagcccaaatggtgagctatgcacaactaccacttatagcacttcaagatttagccttatttaacctgacatcgaacagatttcatcattaaatccaatggaaaatattctagagacaactatcataataaaacaagagttatttacaaatccctacagaataaatataaattgcgggaaactatacaagttttggaaaatgttttctgtacaaaagttagtcgtgttagacgactaacaatatgc

SEQ ID NO: 257589 - DNA, 388 bp, Glycine max
  unsure (1)..(388): unsure at all n locations
agctagacatgagnccaatatgagcgggatttgtttattttctcatcacacttccacctatgatggtggctccacgtatagctccacatgtctttttatttcatcctttatcccgagccttgtgacatatcattttatctttccatttttctttctaccgtgcttgctagagctagtgctttgagaggagtttcgattcaacggttgaagttattaatccattatttatttttccaatcgtgagagaagagaacaagacgacgaacaagaagaatccaaaagccatcccatctgtgtgttcgcctatcagaagggagggctatcaaaccaaggttcttttgacctccttccttaatatgcatactatctctctctctctctctctcta

SEQ ID NO: 257590 - DNA, 290 bp, Glycine max
ataatccacatactctggcgacatgtgcatattctcaatacatggttcgctgcgtcaccatggtatccaaggcatctaattagaccttaagctgcttagttctcacctgtcgaagatgaacccgcggctacttcatgcactctttaatgacataacatcattctggcactaattgctgggagtggaaaccagcttccaataaaattgcggcttcagcagggtcatgtctccaaggctccaccactgcagcactaacatactcatgtcatgtgctgagccctcataaaata

SEQ ID NO: 257591 - DNA, 401 bp, Glycine max
  unsure (1)..(401): unsure at all n locations
agcttgatgacatganttgcaagctgaggttggcttgttatgttcccaacacgaattgtcaggttctgtttggttgttccaatggcgatgattgcatggaagcatttgaggaggtagaacaagtgttgttcactcatagtgagaagctagcactttgttttggcctaatgagcacaccatccagttctcccctatgcattttcaagaacttgaggatatgccaggattgtcattctgctattaagattgcttctgatatatacaaacgtgaaattgttgtccgagatcgttatcgttttcatagtttcaagcaaggttcttgttcttgctctgactattggtgaattaccctttcacctgacagaccctttttggaccagcagattgaagtttcattaatc

SEQ ID NO: 257592 - DNA, 461 bp, Glycine max
  unsure (1)..(461): unsure at all n locations
tacaatgagaatgctgcccctttagttgtgctaacantatgagtatgttcatattcacattctatgaaaccttccttaacaaaatatgcttcaatgcggttgtaccaagcatgtggagcctatttaagcccatatagagctttctttgaattggacaccttttgttcattccccttctacacataaccacaaggttgctcaacaaagacatcctcagctaattctccatgtaaaaaggcaaacttcacatctatttaatgtatagcccaccctctttgtgctgcgaacgcaattaccaaccgtacaagtctccatacgagctaccagagcaaaaacttatgtgtaatctagaccatactactgagcatatcctttcactaccaaccttgctttagccttgtcaacttctcccttgtcattgagattagtcttgtaacccactttactccaactactttagc

SEQ ID NO: 257593 - DNA, 354 bp, Glycine max
  unsure (1)..(354): unsure at all n locations
aagcttctgtccctgagaaactggttcccagaagacaacagggttttgttatngctgacaaccctagccttgcagcaagtcctagggaagtagataccgagatggacaagacaatccgcagtatcgtgagtagcattttgaaagacgcctctgtgcctgaagctgatgaagatgtcccaacatcgtccaacccatatgtttctgtgcctgatgtcaagaaagatgttccaacatcttccgctccaaatgctgaagcactcccttcacccagtgaagagggatcaactgatgaagatgatcaagccgcagaggagactcctgcgccaaaggcaccagaacctgctccaaggtacc

SEQ ID NO: 257594 - DNA, 476 bp, Glycine max
  unsure (1)..(476): unsure at all n locations
cctataatactaactagctccaacacctcatcttgagatggcaaatatatttcctntacgaaacgaatatacctttctttgaccgagaaacctccatgcccaaaagatacttcaagacacccaaatatttaatcctaaattgattatgcaaaaactttttaagaacaattatggcatcgggatcattaccagttatgaggatgtcatcatcatagatcaataaggcaataaatgatttgcctttcttacatgtaaataatgaataatctgcttttgattgaataaatccaacaccttgaatagctgtagagaacttggaaaaccattggcgagaggcttgtaatgatcccatataaagagttttttgaggtgatacacaaggctctccccctgtcgttgaaactaggaggatgagaatacaaatttcttcataaagatctctgtgaataaatgcattgtggacattaagtgatgaa

SEQ ID NO: 257595 - DNA, 428 bp, Glycine max
  unsure (1)..(428): unsure at all n locations
ttagagngacctgctgcatgcaagcctgatatgatgaagtgatgaatgtgtttattctttctgcttctattgctgaccacagagtggtacccggagatatgtcgcgggggtcaggaaaccttggcgacgtcaggtggggtgctatttcccaaaacctagcttgaccaatcacgacccaacccgggcataatctgtcacggagaaattgagatgttcctaagcaggcgagcttctgtcagtcaacagataaaatgtacaaagaccacaaagcaatgatgcttgctgtggctggccagctgtgaactttgattgatatgtgggtaatggcctctggtaatcgatcacccatggtgggttatcagattacaaggctaaaaaatgaagataggaagctaatatgtgctctggtaatctattaccacagggtg

SEQ ID NO: 257596 - DNA, 462 bp, Glycine max
tgtatgccatgatgaaagggtcattgtgagaaccaagtttctttatatctaccagcgtatatcctatatcatcggtgtgcacaccggtgttgctgtcaacccatttacatttgaaaacacatactgtatatttcacataattaagcttccgaatttcatcaatgaacccacagtaatggatggaagctacatagggattggcatcattgacacttgcaaagtgttgagattcatcccttagggtgaccccgctgttctgcattgtacttttgtcatctagtgcttatgggtaaaatgaatacctgtttatgtcgcatccttgccagattataacatttcttctaggcccatctgctagctttcttaatcttgttgaagcattctcatctgcatagattgtatctttacaccaatcacagaaggtgttggtatgccttttcaacactcaatactttgacattt

SEQ ID NO: 257597 - DNA, 381 bp, Glycine max
ttaggacgtgctgcactaatctgccagctatttttttttttggcctcccacttaagcgcgaggcaaccctctcttatagtatggctcaatctatgccttaacctagctctccctacatttaagcttgaaaacctggagtgcattttcccctgcggggtatcatacgcaaaatgagccattcctaagattaaaacctaatttacccttgtttgtacaagaaaagactaagactcacagtagtgatttaaagaaatctcaacccttatatacacatttcaaagctctcaaggaatcttcaatagatctttcttcttttggaacaagtaccatcacctctttagggatcatcatagctatgacatccaatctttaatattggga

SEQ ID NO: 257598 - DNA, 92 bp, Glycine max
caaaaaaccgagcgacaaacggcaaaaaaggaacgttttacccaacacacaaaaggggggagagggcggcaacacaacaaaacaggcgcgcg

SEQ ID NO: 257599 - DNA, 398 bp, Glycine max
agcttgaaatatacaatcaactttggttctttttttcattctgagggcgttggctcttaagcatgtattctaatcgacttaaatccttatgtcctcaagcacagcgggactacttcctagaggacttgcggacgccctgggggtcatgcatataaagagcggatagatcttgcttttctgccgaaataaaaacaaagtttggacccattaaataatataaaacagctgctacttggttcttatcgctctaattgacacaaatgaacattttaaaaatcataccacgttattcaacttgcactctaatgtatacaaccttttttatggaggagaattaagcgcaaaacacccgttacatagatcgtacaatttccctatagagctaaatgatctataac

SEQ ID NO: 257600 - DNA, 407 bp, Glycine max
  unsure (1)..(407): unsure at all n locations
agctttacgtatgcgtaaagtggaattttattatttacattcaaagntaataaaatcgatttattaaatttattatatgattttatttaaaagttatctttcaaattatgtgaaatataaatctcttttattgaatttttgtaattaatctcgcttaatattttctattcgttaataaaattaatttagttaatttttcttcaaacgtcatttatttataatataagattttattaattttggttttgaaaatcttcttccagatatattgtaattagatgttgagggcaatttcaattcctatcaagaagacattgacgctcaggagaaccctgatgccttggaaataatagaataagtaattatacttgaatgcgtagtaattctcttggtagggctttggtgcc

SEQ ID NO: 257601 - DNA, 373 bp, Glycine max
agcttgtgtttgaagaagtgcgcgacggggcatactttgtttgcatcacaagcatgaccggttcatgctggaaaatcactctctttaccttccttgaaggatactttagcaaaaaatcacttattttttgttagaccatgtctatcacaacacagcacgagttttgatactatgtgaacttccaggctcttaaaggttcttttattcctcttaaggaattgacagatcctatgaaaatgccttttacaaccaaatatgccaaatgaatctcaagcacaaagtgttaaattaaagccttaaacgagatattaaatgttgcattagatcaatacatttatctactttcctcttgaaactctagatgccaatgcaa

SEQ ID NO: 257602 - DNA, 442 bp, Glycine max
agatcgaaagcaaaacaacactcgatatatctttctcacaagataacacccgtcattatagctctcgctttaaagcatgaacggtgtaatacccttacttgaacaataatctaggcattattgcactatatactcttaatgcttattacacccgatatccctctcatacgggaaagtagtgcccctgactttatggaatgatctcgcacacatacaccctgggctgcatatagaaattacaaatacctcccctactttctgttcacaccttacacatagtggcctggtagatattatgaaacatgcaatttccctaacaaataaggtgatagtgaacatgccatgacattaaatgaggtggatgatatttacgcttgaagctctagacatacgtacctatgccgcgatgctacttaatgtaatacagtaaaaccgtgacacg

SEQ ID NO: 257603 - DNA, 405 bp, Glycine max
agcttactgaagaaacagaaacaaaagttattcttcttatttatatcacctaactctacagatttagcccagtctcatgaatcaaatcatgaagctggttctttcgcttctttaaggaatgaaactaacaaatgttatgataataatgacacaaatgacgaatcaaacggaaaagctgttcctgatgttggtcacaacaataacggattggaaacaggatctaaaccatagactcttggccatcctgatggatcaagtggctttgaatcaccacgcgtatgtgagtacaaaggccctaatggcggatatctcatacatacccacaggaagaaaacactatcctgaaggatgaacagaaaagattggatttctttggcgattacagtaaaaatacctcaaccgatc

SEQ ID NO: 257604 - DNA, 83 bp, Glycine max
ggtatgggctactattgcgattgagaacttttttttatgctaggatctgtcctaacaatcctacctgctctgagctgaaagaa

SEQ ID NO: 257605 - DNA, 458 bp, Glycine max
gccttcaaatagcttaccatggggatggggtctggagaatttatttccaacattttgtatcagagataagcggtgtcttatgtgaaccatgagatttcaaaggagttggcaatataccagtcctcccagactcaaaagtcctgcaattgatatccctaaagcccattgaaggagaacccccaaatcgagcatggccctgtgactaggacctgctgcagtattggttcttatgctgctcaacaacaaaaagggtctccataaccacaatcactgagtcagatagcgagttacagaggctcaatccactagatccatgtgctacaactcagtacaagctatcagaaacaagcacaaaaccaaaactttgtcgtgctatacatgtaacagaaaatttctctcaccaccaatacaccacacaaccgattcaaatcaaccacagaaactttctcagacactga

SEQ ID NO: 257606 - DNA, 408 bp, Glycine max
agcttctatagaaaggttgatcctaaaatctctactattgctttacctctcaaagagctggctgaagaagaatgcggcatttacctggggtgaaaaacaagagcaagcctttgctttgctcaaagaaaagcttactaaggcacctgttctagctcttcctgacttttctaaaacttttgagctaaaatgtgatgcccctggagtgggagtaggagctgtattgttacaaggtgggcaccctattgcttattttagtgaaaaacttcatagcgccaccctcaactaccccacctatgataaagagctttatgccttaataagagccctccaaacttgggaacattaccttgttttcaaggaattagtcattcatagtgatcatcaatcacttatgtgcattagagggca

SEQ ID NO: 257607 - DNA, 466 bp, Glycine max
ctacaagaagtcgctaaagcaatctgatgagagtatcatatctctataaagccgcgggcattaaccgagcctaatgtatgtctatgatcttaactgacttcactatctgaataagacttctaatgaagttgtctcttttataacatcacatacttatcctacttagtagcacaagaagattcaaattttatgaataatggtatgcatgaaacactatgaatcagttaagctcacttatcaccctggaaatcattgtgtgaggttcaagtgaccaacaggtgctgattgtccattatgcaagaacatgaatcaagtgcaaagtgtccgttatagaaggcacatcctttacgttatactccacagtaatcatatatttgcaatcagtgatacatttaaccacttgttcgatcttctgcaccaaattgttgaagttagctaagtgctatacagttcccatgatgctttg

SEQ ID NO: 257608 - DNA, 378 bp, Glycine max
gagcttaatggattttgtttctttacttcacgaggtccctaaaggtgattctccaccatggagatgcactggaagacaaaagagaagaggtgagaggaggcgccatccactaaagaataagccatggaagaacgagcttcaccaccacgatgagctcttgttaaaaagcttggataggatgcttctacggaggaaaagaaagatggatacacagagagaggggggagcacagaaattgaaggaagaaaaaaggagaaaagtcgaactttgagttgtgtctcacaagactctcattcatcaaagttaccataagtgttacacatgcttctatatatagactaggaagcttccttgagaaactcttttgagaaaacttct

SEQ ID NO: 257609 - DNA, 394 bp, Glycine max
aaaactagcgggttgtctctcacgattatcacagatagccccagtcacctcttttgggggacaagtccctccggattgttgagggacaaactgctgctccacgatcaaaacaggtagtgttgatcgctgaaaatactagattactcttcattcggggccacgcattcctccatatatcatgcatgtgtggagaggttggagttatgtgcgacggatctaccatatgatatggtggtgtctacttcgactaacgatcctgtaccaccgttcgggagtgtatgaagctgtcctttattgatgagggtcgaacttgtagagcggaactgacacgcctacctcttactcatctggaagtgatcttcggggatgggatcgtctatctacgtaaccagta

SEQ ID NO: 257610 - DNA, 404 bp, Glycine max
  unsure (1)..(404): unsure at all n locations
agcttncttgagaagctagagcctagctactctcattcctctaataactaagctcaccttcttgagaagagaagctagagctaagctccacacccctataatagctaagctcacccccatgacaaaatacatgaacatacaaaaaaaatgcctactaccaagactactcaaaatgccgtcgaaatacaaggctaaaaccctatacaactagagaggccaaaatacacggcccaaacgaaggaaaaacctattctaatatttacaaagataagcgggctcatacatatcccatgggctcgaaatctaccctaaggctcatgagaaccctacggccttcccttggatctctggcccaatctacttggagacctctatccaatgcccttgcggggtaggattgcatc

SEQ ID NO: 257611 - DNA, 373 bp, Glycine max
gcggcagcaactttactattaaaagagccagatattatcttatctgaaatgcatcaagctggcccacagtggccttcccattatttaacaaaaagcatctacattcaaaaatatgaagatgggaaagatttggctttcctccattgtataagccaaatgggggtctctctaaaataggcctcaccaaaagctctattcattatgatagcaggcaatattaaccgcctcagcccaaaaaatatttaagaaacttgtatcattaagcatggttccggctaattcttctaatgaactattatttctctcaactacttcattttgttgaaggggtctaagcccacaaaaattacttccatttctatcacaaaataat

SEQ ID NO: 257612 - DNA, 458 bp, Glycine max
  unsure (1)..(458): unsure at all n locations
ctgtgtaatcgattacactaatatgagaatcgattacttgtgattgattctgaataaaatcaaaagatgtaactcttcaaataggtattgactttttcaaattggattttaagtctttctaaaagtcataactcttctcatggttgtcttgatcagacatgaagagtctataaaagcaaggctttgctttgaatatcgacaatcttgaatacttttccaatcaatttcttacaatcctttacaagccttaaatctctctagacttctttttcttctttgaaacaaaagctttctgaaaattttctggttatccaaaccttgaaaacctaggctatttatcttttcattctcttctcccattggncaaaataattcgccaaagactaatcgcccgaattctttgtgggctctctttacattttccaaaaaacaaaaggccaaccgcctgaattctttgt

SEQ ID NO: 257613 - DNA, 365 bp, Glycine max
caactggcctaactctttcaactgacgactcgtgagcccttgaccttgacttgatagaacctctttttaagtgaaggcgcccggctcaatcccatgttcttactaaagtggaataaaaaccaatctagactcccacatctatcatatgtgaaatggacgaatgcatgaaaaaatgtgtatggcactgatgcatattacggataccaaaacccgagagatcatctctttcttacaaacaacattcgggcagcataacgcccgatgcctgcatttaagaaagcgacaccaacctttcgtcttctcgtgacaacagaggtcggatcaagacacaacaccgtgcactgaggccataatgctaatgcgaa

SEQ ID NO: 257614 - DNA, 475 bp, Glycine max
  unsure (1)..(475): unsure at all n locations
cagcttgccaacatccaagcagaacaacatttatacattacatgctatcacagccaagcagaacagagcaaggcagaatactctgcgcaaacaccaaccaaaaatcacagcttttcccactcaaagaccccagtaacaattccttcgatccaattcgttaaccggtggatcgactccaaaattttactggaagtctatagtgcataagcctacattttgaccggtgggatctactaacaaacatccaaaactcattctacattactctttccacaaccagcaaatacatggatttttctgtacttgtgcagaattctgctgcacaattttacagcaaaatctgcacaaagagcatatttcggaaaccacacttcccctcatccaatcttgcccanatcaatncctacaaggtccaattcatggatcaatcatgtctaacccaagatcaagcttcaaaacacagcaacacagaatc

SEQ ID NO: 257615 - DNA, 401 bp, Glycine max
  unsure (1)..(401): unsure at all n locations
agctttactgctgaagctaaatacatggtatttcccaagcatgtaaagaaattatttggattgaaggacaatggaagaacttggccacaaacataaaaagatttttgtgtattgtgatactcaatatacctcgaacattacaagggatctaacctttcatttcgagaaaaatgcttangtgtttgttagagaagtgatgaaggaaggaagtatggatatgcaaaagattcacgtcaaagataacctaacaaatgtaaagaaaaaagtccatcaatcttgataagtttatatggtattgatcattttgtggcctatcagaaacataaaacacaagaaattagcaagatagaggaattttgaaagctcacaaaagtaggtttaagtgaaagattatgaattca

SEQ ID NO: 257616 - DNA, 464 bp, Glycine max
  unsure (1)..(464): unsure at all n locations
ttgattngtttcattcgaaccacccctacaatggaagaattaatacatataaataatacattgaacttagcattattaaaattatgtaattgaatacaacaaaactgtactctttgaacttctttttgaagtcttatatctctagtagagatcttcattgattagcaacttggaaccatgctacgagtttgataccaatacgaccacattactatcacaaaacacgaatgtgacttaatgacaagacataagtgggatacaaaaaacatagtacttcttaacctatagtatccttaattcttgcttgtgtcaacataattattgtcaagttagaatttagtttctcgttacaataattaaagaatttcatcgtttggttatcacaaagagtacaactaaacacctcagcactacattgtcattacagtaagagcaatcataagagcaataacatgggaaatcat

SEQ ID NO: 257617 - DNA, 275 bp, Glycine max
ctctaagcacctgaagatgcagcttgctataacgcttacattatatatatattattcgttcgcggatagggacaagtgtttgttattcggagatcttggtcctgagattcttatcattattttagggttgtgcccgcccaagaaaatttgtgattttttgggaaaacaatttgactccgaattagatttcactttcgtttaagaaaattttgtgaaaactgtatagaaaacattttccgaaaatattatttgacaggaaatttatttctttagaa

SEQ ID NO: 257618 - DNA, 480 bp, Glycine max
acctatagatactcagcttacattgtgaaaaatattattagtagagagaagtgtgtatttataatacataatatactatttgttttactgcaatatactatgtattatatataagattcttttcatcaatagataatattaataatatactacaattaaatatattctaccatatgaataacaatgaattaatattaattattaatattttatttatatataagaaacttatatatatgatagttaataaataatattatattatatttttaaattctttgaagtagtcattattatacctaatatattatttatatatcagattttcttctttaatagttataattaatattaaataatattaagaaatataatgtactgcataaattatattgaaaaaatattaattatcgatattttattaataagtatgaaaattaatatttaatagtaaataagtaataaaatgttatactatta

SEQ ID NO: 257619 - DNA, 107 bp, Glycine max
ctatttaaattatatttttttaaaatgtccgcaatttcttaacatctgtaatatacggaatatgggcactctccaaaacaatctaattattgggttcattactgcca

SEQ ID NO: 257620 - DNA, 478 bp, Glycine max
  unsure (1)..(478): unsure at all n locations
ntagctgtagttagacattatggtaattatgggtatgctttatatttattcagctaaaaaacagaactagattcatttcaaattgttttaacggttagatattatatccaagtcatcaaattgattcaaaatcgaattatttttaaaaaacaaaactggtttagagataaactagattatgtattggaggtgattccagtatttgtggcaaagcagggagaaacatgtccttccaatacattattagtgattatgttgctcataatatgttgcgctagctaaatttgagggatatataacaacctttgcttcaaccattttgaacaagccacggaaacgatgtccaagtccttggagagtttaaagttgaacgttgagtgattctgcaaccactgctaacttttaataatgcacagaagacagctttagctctagttagacattatgaccattaggagtgtgtaatattcattcgata

SEQ ID NO: 257621 - DNA, 402 bp, Glycine max
agcttctacttatgtggcagggcgggcttttttctttttcttgtccccaatgcgagctctgaccactgttcttccttcccgcgatgcttcttttcatgtccgcctgagtgggcttatatcctaaaccatactttccacgatacccttgggtggttatcaggctagttatgccgccattgcctttgcctaaacccatcccgggttcataaccggtacccaacataactcgggccatcattaccgccgcatctgacagacaaggttgcccaaagagggagtccacggtggaaatgctgaccacctcacaagactggaaagccgttactaacgattcttccgcggcttccacgtaaggcatggatgatgggcaccttaccaaaatatttttctcgactgacacaa

SEQ ID NO: 257622 - DNA, 381 bp, Glycine max
accacacaatgtgcaatggggaactaacattttctttttaaacataagagaaaggtatttgtaccatctttttcgcactgctactttttgcagacaaataatcgggcttgatgctgatagctgctgataagacaactttggagatatataaaaatgcatacagttagaaatgggcgtttgacatgaagcttttcttcaagaaacaattggtgtgcctactgtgctactaaaaattccttgttgtgaacacatgaaagagataatggggcatattgcggtcaaaagactcttagacaaacaaaacattctaataggtctcatataaaaagattgcgaacttgacacatgcttgatctaaaagaaataataggtaacctatga

SEQ ID NO: 257623 - DNA, 405 bp, Glycine max
  unsure (1)..(405): unsure at all n locations
agcttcctcccttcatcaaaccatttatatatcatttgaccacanattctataaaaaaaaaatggagatttatacaccggactcatgctactaataacatcaatcataggttgataatatgtcgagttaattgcattaaatggcactatagcatctatcatccattttgcaatggctatgtcacacttttctacaattttcttattttgcaagacactcttcaagctaggttgagctttaggagttgttctaggcatgaaatagtcatctacatgaatagtgttctttcctttttgagacttggaagaaacaggtgattttggagttcttcttaattcctcaactattctcacagggtcttcatccatttcaaatgtattattttcctcaaattgttcctacact

SEQ ID NO: 257624 - DNA, 325 bp, Glycine max
agcttaaacattatactttgagcgtcgagatatatttctttactcaatcaacacatccgaggtgaaagttattgccgtttgaattggctcaaatgttcaaaattcaatttcgagcgtgtcgatatattttaggactctatcatacatccgagctaagagttattgtcgtttgacttaggtcagaggtttaacactcaatctctagcgtcctgatatattacgtcactgaatcggacatccgcattaaaagttttaggtggttgaatttgctctgagcttcaacattcagtttccagcgtcttgatatatttacggactcaactca

SEQ ID NO: 257625 - DNA, 224 bp, Glycine max
gtgagccaatgctaacgataagaactgtggacgcggatgttcgattgagtcacgaaagaagacgacacgctcgaaatagaatgttgaagcgctaagcctattcaaacaacaatgacggggtactcggatgtccgagccacggacagaatatatcgggacgctcgaaagagaagtgagactcggaccaactaaacgaaataactggactcggagctgagggcccg

SEQ ID NO: 257626 - DNA, 464 bp, Glycine max
  unsure (1)..(464): unsure at all n locations
tcatgatgaatcaaaatgattcaaagaagttgtgatgattactttggtgacgacaaacagctgcaaggtcaagaacacttcatgataacaaagatgatgatctcaagaatcacagaatgacttctaggttcaagaggaaatttgatttcaagaaacacgaatcaagtttcaagattcaagttcccacaatcaagatcaagattcaagactcaagatttcagaatcatgagaagacttaatcaagataagtatgaaattttttttttaaaaaccgagtatcacatggattattctcaaaacttgtttaccaaagagtttttactctctggtaatcgattaccagattgttgtaatcgattaccaatagcataaatggttttgagaaagatttcaactgaatntacaacgctccaaatgattcaaaatgttgtatcaatacaatgttaggcatcgatatccagtgc

SEQ ID NO: 257627 - DNA, 420 bp, Glycine max
  unsure (1)..(420): unsure at all n locations
ttanagcgacctgaggcatgcaatctttaacactagccggggactaattgtttttctacacgcctccaatacaactcggagggtccactttagtccttgaaggttttgatttccaagttcgtgtctgcgtggtcgtgagcagaaataagagagttggaaaaatcatcattgctcgctcatttttgcataaatggatcaatgggtttctatctgtctgagttatgaatcctttcttcttcttcttctcattcccagatccattttcttttctttattattctttctcctcaatcctcaagctacttgctttgcctggtgacggcattcataaattacttcggagttatactacttgatatcggtaaattaaatttaattattttctctcactctcaaggggttctatggaggtgttgaatg

SEQ ID NO: 257628 - DNA, 194 bp, Glycine max
agggaaaaaacatgttttttcaaagtatccccatcaccagtcactgattcgaagccaactggcaaaaaattgccctaaactacaatgactagcccacgacaaggaaagtcacagacaaagagaccagagctagatacacaaaccagaggctaaaagaaacctctagagtgagggctcccggacacgccccatag

SEQ ID NO: 257629 - DNA, 393 bp, Glycine max
gtcttcttcgatcatggctcgacttggcatgtttctgtgtctcgatgctgttcgcttgagccttgctattgcgggttcaggcccagttctggtatccacgaagtgattgctatcatactgccatccactcccccgctgtcttaggaagatattcttgcgaagtggcggaacaaggatgaaattccaagcgtgtgaaaaggctacaagcggattaagcgttgcttgctttggaaagacgctcgctcctccctgtctgaactccaacagagatatctcactccgatcaacttttccggaggtaataaccttctttttcactcttaggcgatcaaaatgcatttcttgctattttttactatcaatcatatgattggaaccggaatgtgactttgc

SEQ ID NO: 257630 - DNA, 400 bp, Glycine max
agctttatgaaccatatcattctatatgtcatttaattacgagaagatggtcactaacacacaatcaactaataatcaaagtgatcaattccaatatagaagtgaaagtgatagaaagatacaattaactgaataacatcgaagaactttattaaacttgagtacatgggtacaactacatcaaaaactaagttctaaggggtttaaccaaccatgttcatagaataattaaaaagcatacaatattgcatttagaaataaaagagattgaaaacccttacaaattcggaccctgattggtctcgctgcaaatctcctcacaaaaagtatatgtgctcggaaaacgtataatgaattttgaataccccaaatacagactccaacttcttatgtatagact

SEQ ID NO: 257631 - DNA, 463 bp, Glycine max
  unsure (1)..(463): unsure at all n locations
gtcatgggttaccgcgaagtctgagatctgaacgtgatcttatcttcancagcaaactctggaaggaacttttccggctttgcggcgcacaactacgaatgagcaccggccatcatccacagaccgatggtcagacagaggtgctcaatcgcgtgttggagcaatatttacgcaacttcggtcatcagataccaaaacaatagagttagtttctcagtctcgctgaatggtgctacaacaccattagtcactcatcaactaacctctcttcctgtgaggtcacatatggcaagccatcatcggcaattacagactatcttcctggatcatcttcagaggaagcagtggattttctcctttcctctcaccaacatttggttgagacccttcgcgcgaaactcgaacatactcaggcgaagatgaaacatctttacaatactcatcggcatgaaaccactttcat

SEQ ID NO: 257632 - DNA, 395 bp, Glycine max
  unsure (1)..(395): unsure at all n locations
agcttgagatgaggaagagttgaagggtgtttcttcctgcttttattngntgaccacagagtggtacctggagatatgtcgcgggggtcaggagaccttggggacgtcaggtggggtgctattgcccaaaaccaagcttgaccaatcccgacccaacccgggcatagtcggtcagtgagaacctgtgatgtacctaagcaggcgagctcctgacagtcaacagataaaaggaacaaagaccacaaagcaaggaggcttgtggtggctggctagctgtgaactttgattgatatgtgggttatggcctctggtaatcgattaccaagggtgggtaatcgattacaaggcttaaaaatgaagacaggaggctaagatggtctctagtaatcgattac

SEQ ID NO: 257633 - DNA, 469 bp, Glycine max
  unsure (1)..(469): unsure at all n locations
tcagaccatnagcattcagattctaggtatctaaaacctctcaatctacgggatcttcaaggtttgagaagtgaaaatgagaatggggtaaatttggagcatactctcacctcacacaagtctatatcatcaatctaaacttgctcaaactggtttttacgacgaaaattgtaccgaatcaaaatttgactccttaacacccaattttaccctataaatggctcttgccttcactttggtcatttgtttttctctcttgcacaacccaagatttctcataagtcctaaatgacatttcaaactaggattaactccctttaacctccaaataccactaaatccagatttggcctttcaactctcaaagcctcactctttgtccactcataacactacattctcactttctaaccctaggntaactctacccttcatcctagcagttgttcattattaatttcaacacata

SEQ ID NO: 257634 - DNA, 411 bp, Glycine max
agcttatgctgcaaacatctacaatagactttttttattctcagcagcaaaatcagccacaacagaacaattatgacctctccagcaataggtacaatcccgggtggaggaatcatcccaacctttgatggtcgagtccttcacaacagcaaccacaacaacaacaaccttatttttagaatgctgctggccaaagcagaccatatgttcctccaccaatccaacaacaacaacaacaacaacagcagcaacaacaacaacaaccccagaaaaaacaaacaattgaggctcctccgcaaccttctcttgaagaacttgtgaggcaaatgactatgcaaaacatgcagtttcaacaagagaccagagcctccattcagagcttaactaatcagatgggacaattggctacac

SEQ ID NO: 257635 - DNA, 471 bp, Glycine max
ggcttgcctctagttgacaaaggtgcggataactattatgtatcttcgcatgccacctgactcacggggtgaggtgacagaactgtggggtggttgacaaaagcgggacttttgctcctacatatcttcaattgcgagactacatagttcttcaatttttgtgtgagactacaaatagtctcaatgttattttactagaatgcgaacatgctaacatgctttagcaaagaaacaaaccttcaactgatcaaggcaacatatatttttttgaataaaaacaatgcgtctattggagaaggaaagtatgctaataaaattttctcataaccacaaatgagattttggatgttagcatttccgttctaaatgaccatttagaggaaacactgggtccaactaacatagaagaaaaccactcaaagtgtatcaatcttacacaagccagagtgttttcctagatccgaaccatag

SEQ ID NO: 257636 - DNA, 410 bp, Glycine max
ctgaagctgcagcttaacgagaaaagatgccgcattcttttactcttggcacccctggtccccgttggtgccttaccaaaaaggaagctgcttaaaacctatcacaaaaaacaacacagaactacatatggagcgagttgggaaacgtgtatcttggtagtatcaatctttgcaagttacatttaatacaagggttattgatttatgtctattaagaaatgattcacgattcaaatttaggtggcgattaaatatcatataaattatgtttgaaataaaatatttatcttatgtatgtttgatgttcttgataaacattaatcaccaattttgacagaattatttggtattaatatcatggtcacttttaggttaattaaaagcttttacatttaaaaaaagagttattt

SEQ ID NO: 257637 - DNA, 460 bp, Glycine max
cttactgctatatagctgagaagacaataaccatactcttactatatcaatcgatcggaacttgagattctatggacattcaaagatgcgttagtggatatgtatggagggcttttaagatcgtgaactctaatgagttccatcaaagcatcattcagacttttctgcatgagaataaattaagaaaatgaaatctatgtttggcacttggtaggacaactatctattctttgcaattgtccattcacagacacagttagtaacttgaatttaaaggttcataatgatcacctttacttgctaaaatatcagtacccaaaatcttatggaaatctactggctgaagcgtaagagaattctaactaaccgtttttaaggagccaactccaaaagccgagagaccttgaatttacctctcaactttcgtgctattacaattcttggatcatcaagatgatca

SEQ ID NO: 257638 - DNA, 179 bp, Glycine max
gaaaggggggggtggagagacgaggaagagaaggtggggaggaggcgaggggaaaggaagagggggaaggaggagaggaggagaggggaagaagaacaggggagggggggagagtaaagagggagggggggggaaagaaaaggtagagaagaagagggagaaaagggaaagggagtaag

SEQ ID NO: 257639 - DNA, 356 bp, Glycine max
gtctcaatatattattggcctgaatcagacatccgaatattatgtttggctgcttaacttagccatgtgcttccatgtttaattttgaacatctcgatatattatgcacctgaatcgggcatctgagtgaaaagttatgccatatgagttagccgagagcttcgttgttcaatttccagcgtctcgacatattattggcctgaatcggacatccgagtcaaaagttatggcaggttaaactttccatgggcttccatgtttaaatttgagcatctcgagatattatgcacctgaatcggacatctgagggaaaagttatgccatatgagatagccgagagctttcgctgtgtattt

SEQ ID NO: 257640 - DNA, 384 bp, Glycine max
cacctgaggctgcagctatcaattggatgtgccttttttcttgttatgaggaaaacaccttaccaggttctgaaacctagatgcatactctgccaccgccacgctcccctgttttagctcgaggaactatatcttcttcctattcttcacgtcatctaaaagatacttcgtcctaaaagtctgtgtgaaagtctcccatgggacaacaacaccctgctccctccagacttgggtgagtgttcttccaccagtactatgcctcatctgccagcatgggagtagcaaacaacaccttctgttggacctgacacttcctcactccaaagatctgcttaatctccctcaaccagcctcagcgccttcaagatcataaccggccttgaa

SEQ ID NO: 257641 - DNA, 347 bp, Glycine max
ttcatggtgatttccaccatggagatgcacccgaatgcatacgataagtgtagaggggaggcaccatcctctagggaataagccatggaagaaggagcttcaccacaaagaatgtgccttggataaaaagcttgatgaggatgctttattggaggaaaagaacgatagaaggggggagcacgaaattgaaggaatataagagggagagaagtggaactttgagcttagctaaagaagcttaagcttagctacacacacctctctattagcttagttcaccttcttgagatgagaagctatagtttaactaccccctcccttatataggtaagctcacccacattcca

SEQ ID NO: 257642 - DNA, 412 bp, Glycine max
accttaagcaccagcagctgcacttatgaaaaggccgcgattttttttttcgaagaacatcatcaagagaccttcaatctttaatggaaacggtctccacttccggaaaacccaaatgccaatgtttattggagcaatccacttaaatattagggaagccatagaaaacggccttatattcccaccacatgtagaaagaatagccatagatggaagcacatcaagtgaatacctaacaatagataaacctaaagatacatggtctgaagaggatagaacacgagttcaatacaattggatagccaaaatcatattaacctctgctcctgggaatggatgaatatttcagggtttcaaatagtaatagtgctaaagaaatgggtgacactccacaattaacacatgaacgaac

SEQ ID NO: 257643 - DNA, 181 bp, Glycine max
cagggtcaacctaacccaggattcacccatctggttattcctctgtgatacaatctaacggggaaagcggcaactgaaagcatatgaaatagaaagcaacagttcggcaataaatgtatacatcattatagcacggccgataaaaaaatatgatccaatgaaacatacccccccccccgcc

SEQ ID NO: 257644 - DNA, 299 bp, Glycine max
ttggaaaaacatttctagcttaatacatgctttgctgacgtgatggtgctcaatatgggaggaagtaatgtttgtcacaaatcacaccattataaaaatcttttcacaacttagcatagctcactggctcattatcatagaaaaaaattaatagagatggaactactcaatacctcatgggttcccccatcctcatgaatggaggcataacttcatctatattacacctatcacagattgtactccacttggtgattgaaatgttcagcattggcgtcaactgcatgtgttcctcaaca

SEQ ID NO: 257645 - DNA, 316 bp, Glycine max
tttttttttgaaaaacacaatctggccatgtcttgcctaatacctcgtccaaacccggttcgacatctgcccatgcaaaacatttcaacttaaacatctaacatatgcgtctccacacacgaatgactagatggttggtggactccaaaatggctcgaagtaacagttatcacacccctggtaacaaccaatacatcttgtgataaaatgaaaaccaagtccatggtcttgtgaccggcccaacctaattaatagctattgaattagagggaaaacactcttttgctatatacagaagctcggtaacaatctttct

SEQ ID NO: 257646 - DNA, 394 bp, Glycine max
  unsure (1)..(394): unsure at all n locations
cgagctgcactaacaaagcaatttttttttctgttgaaaanagcagcttagattgtggaagccaatgataggtataaatacctatacgatgaaaaggaagaattgaattaggattttgttaactatagtactctaaaattattagttaaaaatcaataaatggaaatatttttctttaaaaaaacaaaaattgagttggaattataaagagtgtatctcattagaaaagaaacttctcaacttttattttctaaagtaaggtgttgctaacaagtaatttcttaacatggaaacagaagaaaaaaaaagtgctaaaagataagagcactattgctgccaaccagagataatttcctatggcctaaactaaacgctcaaaaaatgaacaccggac

SEQ ID NO: 257647 - DNA, 408 bp, Glycine max
cttttcaaggacgtataataccatgtagagggacatatactttctggtcaatgagcctataaaagtgaggctataacatggttgaatacttgaatatctactctagaacatctactaatgaagcagtctatagttgttcttattttattttataaaagtctataggtgctcttaaagtacagattaaacactttatcaaaatctggttaacaaatgcattgaattcacatactcagaacatcaaccaacgaagcagtctatagttcttaatatacagattaaacaacaagtcaaattcaccaaaggtgggaaacataatcccatcaatcaatttggccagcatgaaggtatagatatccgttgtctacgcattttaaaagtaaatggtgaaattaatccttgatattg

SEQ ID NO: 257648 - DNA, 406 bp, Glycine max
agctttaagcaaaatcaatcaacaataacatttttctctcctgtccgtatgtctccctttgtatattgagacgttcgatattcagaatagaatctctgagcaaaatctaatgacaataactttgtactcggatatccgattgtgtccatagtatatcgagacgctcgaaattcacaatggaagatttgagaaaaatcaaacgacaataactttttactctgatgtccgattgtctcccgttgtatatcgagacgttcgatattcagaatagaagctctgagtaaaatctaacgacaataactttttactcggatgtccgattgtgtcccgtagtatatcgagacgctcgaaattcagaaaagaagctctgaacaaaatcaaatgacaataactttttacacggata

SEQ ID NO: 257649 - DNA, 473 bp, Glycine max
  unsure (1)..(473): unsure at all n locations
tgcatntganantgcgaaagccncactccatcattaggattagtacctgacatctcaaacaaacaaatcaaacataacaagacaattatagttgctgtttgaatacctcacccactcaagtgtatcacacaattatggcttttctctaatgaaacactcttgccttttaccactctaattccccttgagttcttaggcaattcaagagattatggccacaacaaagaacaattcaccaatatgtgtaaggtaaggctaaagagacaaggaaaaggttaaccaagaaaaaggctaacaatgtttttaggcacaaatgaaggatataaaattcagaatttaagaattcaagtaacaatccttcatgccaccaatatattaccttaaagagattttctttaaagttcttcaagcatgaaccattcagcccaatttttgttttttaaattttgcttatacgaaattctgcttcttct

SEQ ID NO: 257650 - DNA, 411 bp, Glycine max
agcacctgagctgcagctttctacaataccttgacgaattttggatgttgtttcaagcatccgagtgtctcaatcgtaccgagcaggcgagtttcttggccataaagcagagcctcaatctctgcaatggatggtgtacgtttcttgctttcaatcacagaaactattggcgcataatccagaggtagaccttcaataatagcattgacatgctcctcatggcgtaccgaaacttctacaccagcaagctcatcgacgtatcctttaattttgtgaaggtactcatgcattgttttccctacgagtgagacggcacgcatcgcggaccgtaattgacgtgccctacacttggtgtgaacgctgaaatactcgtgagtcttctcccacgcctgataggagtgattcaagcct

SEQ ID NO: 257651 - DNA, 467 bp, Glycine max
gtatgactcctgattctgtggaactagctcaactcttgattctttggcatcatcaaaataatcttggaggacattgcttccacatatgcttctgcaacgggaaagataaaactgaagacccctgaagaagcaactgagctaattaataacatgtcagccagtgatcatgccattcttcgagacagaacccaccaacccacgaagaaaagcttgattgagctatcatcacatgacgctttattggcacaaaacaagttgctttctaagcaacttgagattttaacagaaacacttggtaagctgccaactaagttctctatgggtcaacctacacactcttctgttttgcacgttacaggttgtaccatgtgtggtgaagctcatgaatcaggccaatgtattcccactgaagaaagcactcaagatattcattatatgggaaattaacagcgataacggtatactct

SEQ ID NO: 257652 - DNA, 361 bp, Glycine max
agcttatcaagtgacatacgagaaagacattgttttttttatggcatacatcattgatgcgaggcgctctaaaatcctaaaacggtttgtggtttccatacaccacctttctctttaattgaacatatacaatctgtggtgcaaaccacctgtcgggatccttatgcactcatgagctagatggtgggagcattagctcatttagcgactaccgttcaggtgaacaatcggtccaacctttcagatattgctagccaagccccataggacgacgtcaacaatgagaaatgtatactcttaatgcacgactgatataatgagtaacattgacactcgataatatattgtcacacagtgtgtg

SEQ ID NO: 257653 - DNA, 356 bp, Glycine max
  unsure (1)..(356): unsure at all n locations
ntacgtactgctctctaagaatggtgtgctccttacacttattattcatctcgtagagcgtctctttgctccacggaattcatatcttcgtacggcgaagataaatgaatgatcatcaagctcccgacatgatagactcactaaatttgtcgggttccctttctcataggcgccacatggccagcatccctatcatggtgaattcctgcttgcgcaggacctgtcctgtggtaaccgtgttggtgtcaccgtcgttcaatgccactattattgtcacgagatcagggaaagtttctttttgatcccgaagtggattgcccctgcgtccaacccgaaaatcgcataaactcttctca

SEQ ID NO: 257654 - DNA, 447 bp, Glycine max
  unsure (1)..(447): unsure at all n locations
acctataaatactcaacttcggnagacctggacctagcctggcagaattcttctctaggccattgcctccctcgcccaataatatgaccagccgttgaggtgcttcacctttgtggactttcagttatcacccacggtggaagagtttgaagaaatcctgngatgccctcactgggggaaggaaaccatacctcttctcgggattcttatccctctttggctagaattcccaagatagtccacatctcgacacatgaatgaaaccacacaaagcaagtcgaatatggggtggttggactatctaggaaatgtttggaagcaaaagcaagaagtcttggcaggtaaagcgaatgggacctgctcattgacatactttcactcttgatctttcaaagggtgctgcttacaaatgtggatgggttgtggaccaggtatagatccacgctt

SEQ ID NO: 257655 - DNA, 404 bp, Glycine max
agcttgtaatgtattacttgacaaggtttttattgctatgttgggggattttgtgcttgcaaggttgcatcaccataaaaatgtggctgacacaagagtgatagggaccctggggtacatggctccggaactattccgaatcgggcgaccgtcaactgcgtgtgatgtgtatagttttggagtatagattatagaaatggtgtgtgggagaagacccatcataccatatcagccaccactgattgattggttgctttcccatatggagaatggggaattgagtagtgctattgatgaacgtttgaagggtcaaagtggatacaatgctgaggaaactgaaaagctgcttcatttgagtatgatatgcgtgagtacacaccctgttgtcatgccaacattgacgc

SEQ ID NO: 257656 - DNA, 98 bp, Glycine max
ataaaacggagactaagtgaaaatggagaaagaatttttttttacatcggaaacaaagtgggggtggtatatggggcggaaaaatgtctgggaaatac

SEQ ID NO: 257657 - DNA, 263 bp, Glycine max
tctaatgacagacaagaacagaaaagaaccatcaacaaaatgcgctctgatccaagagaggacaacagtgaattgccacaagggacgaacaaaaagctcgggtggcgaaacaaaaagccaccgcaaatgaatatgacgaatgggaagagtcatacgcgaaactctcgttgtggctaacacacatgcaaatccattctcctagatcatatttgcaaagactacatgacgatgttattattggaaaaatgggtaggcgcgaacac

SEQ ID NO: 257658 - DNA, 431 bp, Glycine max
  unsure (1)..(431): unsure at all n locations
tcgacccgcgatctctnagtcacctgaggcatgcaagcttgagatgatgaagtgtttatgtggattcttcctgcttttattcgctgaccacagagtggtacctggtgatatgttgcgggggtcaagagaccttggggacgtcaggtggggtgctattgcccaaaaccaagcttgaccaatcccgacccaacccgggcatagtccgtcagtgagaacctgtgatgtacctaaacaggcgagctcttggcagtcaacagataaaaggaacaaagaccacaaaccaaggaggcttgtggtggctggccagctgtgaaacttgattgatatgtgagatatggcctctggtaatcgattaccaagggtgggtaatcgattacaaggcttaaaaatgaacacacgaggctaagatggtctctggtaatcgattacca

SEQ ID NO: 257659 - DNA, 371 bp, Glycine max
gtgatggtgtcgagaagaactcacatgtttgtcatcatctttattgtggagaatgtgaatgtatgtatacatgattctgatgatgtcaaacaagaatctaacaatgctgtttcaaatgataagcatctgcttcaagaataattcaagattgcttcaacaaacaaagccttgtttcaagattcactaaatacctatccttgtcttaatacaagtgctttcaaacatgcaaggctctggtaatcgattaccagtaagtgtcatccattaccagaatacagggttgataaataactcgttaaaaatgttttgaactccaatttttaacatgtaattcgattaccatatttctgtaatcgaataccaacatctaa

SEQ ID NO: 257660 - DNA, 402 bp, Glycine max
agctttgataaatgacgtatttcaccttctctttattttaatctgctggcttagcgagcgtccgctaagcgcaacacttatgggctaagcgccacgaagactctataagaagatgaactatacaggttcactaagcgcaccgcttcagttcatctgctaagcgagaaggcacacgctaagccgaaattcactaatgtgcgctaagtgcacaagcatgaacaaggccacctatttaagcctgaaatcagatttcagaaagggagtttggactatgattcagagctttgcatgtctagggtttctagagagataaaggtccaagttctagagagttttgagagattttgctgtgtgaagatctgcagagacaagagcttgaagttagagtcggtttgagagctt

SEQ ID NO: 257661 - DNA, 254 bp, Glycine max
  unsure (1)..(254): unsure at all n locations
cctatanaatctcaactcaagacattctatactaacaaaaaagagatccgaacctttcttgagtctgaagcaatacaccaagccgtatctgaatcttacttgaactttaaagcgctctccaaaggtgagtctgacctactaagcctttcaaaactctcaagaatatacaattacttgacctttaagaactttaaagcgatcaacctgacatttcaccgctcaagtggtcatcataaataacaactattatttaa

SEQ ID NO: 257662 - DNA, 407 bp, Glycine max
agcttgcttgttgagcttctacggaggttgtttctttgatcttcaatgaggtccttcaatggtgattttccaccatggagatgtaacacaagaaaaaggagaagaggtgagaggaggcgccatccactagggaataagccatggaagaaggagcttcacctccaagaatgtgccttggataagaaacttgcagaggatgcttcaatggaggaaaagaaagaaagagaaagacaaaggaggaaaagggagagagaagttgaactttgagttgtgtctcacaagactctttgtggaagcaatgcctttcaaggttattttgatgatgccaaagaatcaagagttaagcaaattccaaagattcaagaatcaagtttcaagaatcaagattcaagattcaagaatcaagt

SEQ ID NO: 257663 - DNA, 426 bp, Glycine max
aagctgttaatggatttctatagcatgatactgcgccgatactgttaactggtcaataggttcttgagcgggttgagggcatcaatattgtatttggaaagacccataagaaggaaaaaagtataacttccatatggaagaagaggtcgatattgtttgatcttccatgctggttcgaactagatatcaaacattgtattaatgttatgcatatggagaaaaatgtgtgtgatagtgtcatcgacatgcttcataacattcaaggaaagacaaatgatggtttgaatactcaccaagatctagttgagatgggtatacgagaccaattgcattcaaagtttgatggtaacacaatatacttgccttcaacttgtcatacttttggcagagagggaaagaatagtctttgttaatgtttgcgacatg

SEQ ID NO: 257664 - DNA, 414 bp, Glycine max
  unsure (1)..(414): unsure at all n locations
ttaagtaactgccgctgcagctangctagttatcctatcgccttttcatatgttcatactaaacaaaccattgagtcgttgaagcacctttttagagcatgtgtattataataaaaaggggggcgggagaattctctgccgttgatagagttcacccataataatagttttcattctaccattagttgtagagtggtgcgaattatccttgtgcaactgtatggtgtggatgttacgttatgttgattttgattgatctacattggaacaattcgcttagcgacaccggctcactaagcgcaattccacccagatgaaaaaatttactcagctaatccgggtcgctaagcacaatttcatccagagggaataattcgcttagcgagttggctcgctaaacacaattctagccag

SEQ ID NO: 257665 - DNA, 463 bp, Glycine max
tgatatcacacagagactaacgtcgactgctgcatacttctgttatcgcgggcgacaagcccgtggacacgcggagatttacgtcatcttccgcgctcacaagatctgtcatactgacatttgagtcacgctgaccggcggaaatacccgagaggttatccgtataaactatcttttgctgtctgtaacaccaaaagcatgatagcacgcacagacttaacggatctattgtatgcttcgtcaatcgcggccgacaagcccggtgacacgcaaagagttacggcatcttccgtgctctcaaaatctgtcatactgacatttgagtgacgctgacgggctgaaatacccgagtggttatccgtataaacattctttttgctgtctgaaagacgaatagcctgatagcatgcaaagactgacatcgtgtgttgcaccctttgttccccggggacaacatgtcagt

SEQ ID NO: 257666 - DNA, 279 bp, Glycine max
tttttgtttgaaacctggcggggtcctatgaaggttgactggacatttccccttgttcaaacaaaaatgttccgtacctctggtctaccttgctctaacccttagaacttctttttccaacaaatcccctccttagggaattggggagcctttaagtgcattcctaaacaagatcatggtttcaaattacattcccatgtttaggtgaacttgaccaatgggtggatttggattacaaatgggaaaaccagccctctccatcgatcttcgccatatgga

SEQ ID NO: 257667 - DNA, 374 bp, Glycine max
agatgaccagcggcatgtctcattattgactcttgcgttgtgaacttggcgaatttacgatcgtagtaaaacaagatagctggcagattcaaacatgacttgttgtattagagtaaacttgccttaacccatcggtcatactcgctaccatagtatccaacaatcgacaacctgtaatgctcttgcgattagatgcagatcataaatcatgggggttaatcttgatcgattccacgagttttgcctaaaaccgaccacaccgatcaaatgctcatccctacttagaggctgtattctgcgctttgacaccaccttaagtatgatggtagaacaggacgcacctatgaaaactactccttctagaaagccgttac

SEQ ID NO: 257668 - DNA, 408 bp, Glycine max
tgctcttcagatggtagggccgctatgttttattttttctcacccaccatacggacgggtcgtcaggctgagcactatactgctatgcatccattacacatgtgaggtgttactggtgtagtcggcggcctctctattcagtgccactgcctgggtgcctggtaactcctaacttgcacacgggaaaccacagaaataggatcctgctaatgaacgttacagatttggtccagaagcaaaaacctatcatatgtagctgcgcatggatattttggccgactgatctttcgatacgcatgtgtcaacaggtctcggtcttaacctttcctcctagctgcttggcctgtagtaggtatatggtttaccgctttacgtataagcactttggctctcaacctaaatggggtc

SEQ ID NO: 257669 - DNA, 403 bp, Glycine max
agcttgtgtgttgttgctttgggtcaaacttcattttgagcatttgaaacatgaaaacaaacacacctatagaagtcaataatgtttagatgggatatggagttttgaacttataatgttttatgttgttttgaagtagacattggagaactttacttttatgcttttccttttcttagttgttcacaatattttcttcagcgcttatcctatggtgtttttatgtatttaacagagggatcatgccaaaaagagattggatagtcatcactttgaacctaatggaagtagcggtaaactgccctgttatctgataatatatttagaaaacttttctgtagtcagtattatatttttttcatgcttgatgtttttaactgtcgtgttttgaaggtttgtatgg

SEQ ID NO: 257670 - DNA, 426 bp, Glycine max
  unsure (1)..(426): unsure at all n locations
ttactgtcacacatgccagtggccaggatgcttgggagatcctgataaccactcatgaaggaacctccaaagtgaagatgtccagattgcaactattggccacaaaatttgaaaatctgaagatgaaggaggaagagtgtattcatgacttccacatgaacattcttgaaattgccaatgcttgcactgccttgggagaaagaatgacagatgaaaagctggtgagaaagatcctcaaatccttacctaagagatttgacatgaaagtcactgcaatagaggaggcccaagacatttgcaacatgagagtagatgaactcattggttcctttcaaaccttngagctatgactctcngataggactgaaaagaagagcaagaatctggcgttcgtgtccaatgatgaaggagaagaagatgagtatg

SEQ ID NO: 257671 - DNA, 114 bp, Glycine max
tgttaaaaatttgtaaattgcgctttaccactaacaggagaaactttaaactatcactgactgttagaataatgggggaaagttagctatcgaaaaaacattcagagtgatcat

SEQ ID NO: 257672 - DNA, 421 bp, Glycine max
tctgaagctgtgatggatagcattgtcgactcttgagggatgtattgttactgattctcattccatatggccgaataattgtatggaattggacatctgataaacgatgatagataaacgatgttgttcacgtccgttaagtgactaaatgactgcatgttgtttattatagttacgtgaaatatttatacacttgaaggagagagaaagcaccgttaaactagcttgttataccagaaaacaaaatgctaaccatttgtaacagctgagcctaactaacttaagatacagactcactaactagtgctactcactcactaatattcgcttagagcccacctctagctgggaatggatattcatcattactagcttggaacagaaaccttgtaatagaaattacgagagtggctttatgaga

SEQ ID NO: 257673 - DNA, 405 bp, Glycine max
agcttgcttctacacacccatcttggcacttatatttgtgatgcatccccaaacaccttcgcaggttgccaaagatctactaactatgaaagataatagggatgaggaagaaaaactataaaaacaaaatataaagaaggatagttaggccttgtcttccaaggccaaggggaaggaaaaagatgaaaaggtttcctccaataagattgttaagaaggaaaataattttgcaatataaggtaatatcaaaagagcactccttcttaaacaatctttctaccttctcctatcaagggaaatatcccttatcactgccatacctcttgagcttgaggttattccttaagtaaaggagttgttggatgatggtctgatttcgaagagcttaaatccttgtgctttgtt

SEQ ID NO: 257674 - DNA, 288 bp, Glycine max
cactactgagactgaaacaaaggggatcaggtatctctacgtgactatgccatatagcgcattgccatattcgcgcttcattgcctaataccactacttctatggccacctgcataactcacaagtagcgaattccgatgcttaaatatgcacatgatctttgatcgagtaaattattttccactatgcatcattctatatggtatacacatcttcattgggctatgaacgctagctaaagaatgggacgaaatgacagacaaactccgcttcttaatatctgcattt

SEQ ID NO: 257675 - DNA, 396 bp, Glycine max
agcttcctcatcgaagtgatagtttccatctttgaaagcagccgaaaacgtagtggtgaggtgaagctgaaaaacaagggaagtgacgttgtggcaaatgacaccataccactgggcactagtggtgtgattatgattcccagacccaagcctatttgaaggatcattgagattaatcttaaatctttaaaaagggccgacgctcacttgggatacacacactttctttgtatggcgagctggacaaccaaagctggtccaagaccagaatattaacaaaggaggaatttctgatcactccacaacatttgaaacagcttaattgtataagtgcttcttgcttcttgcatattaaacctacttctttctattatttaaactgatgcaagcgccttt

SEQ ID NO: 257676 - DNA, 341 bp, Glycine max
atgcagctcttgataatagatatttttatttttgcataatcattatttcgggagcaccattttaagaataatacatctggatccacattgctatacacatagtgaaagtttcgagagatgaggcaagtaatcgtaaaagggacttcctaaaaatttcattgagaatatataattaagggctgtgataagttataagacttgcttctggatgagacgacttatgatatttgaaaatgagagccatgataagaaaaaagttaaacagaggatacacgagagaccaagagaaaaaaattaccaagaatttacagatttatggattagtaagggagaaaaggttg

SEQ ID NO: 257677 - DNA, 396 bp, Glycine max
agcttatcataatcgattacatagttgtttttgttacaacaactaatttattcaggagtgtctactttaatcaatatcgattgctcctctttctataagtgtttaagaagtatacaagaagactttaatcgattactttgaggatctaattgattacattgttcttgagttgtttccaatttttgggaagaatactttaatcaattgaaaagataatctaattgattagttcattgaaataatcaattacattgtagatttaatcgattacaggcagttataattattttctttataaatagttaccttttgttctcttcaaaatacaatgaaatgaacttctgagtgagcttgagtcacgtgttgatattatttaaagaaataagagaagaaaaa

SEQ ID NO: 257678 - DNA, 432 bp, Glycine max
agctttgactgagccctctgtctctaaagctctgtttttctcaccggagcagctcatctgcgaagtttctgtcaaaagtgtctgttgttggaacaagtggctcttggaataattaagaaggggggagttgaattaattatgaacgtgtcttgactaattaaaaatttatcctttttaatgttacttgattcaattaggctttactactaagttatgagaaagttaagaatataaataataacttatacaaaagtaaagcggaaataaaaagtacatagcggaaaagtaaagatcgtacgaaagaagaaagcatacacaagttttatactggttcagcaacgacctgtgcctacatccagtcctcaagcaacctctggagatttcctttccttgtaaaaatcctttaccagcaaagagccacataggatatac

SEQ ID NO: 257679 - DNA, 267 bp, Glycine max
caaaagtgggaagttcacttgaatgaccattattggccatgccgaaagtattctgcactttgctatccctgttcacacattaatggaacttggtggtacgtgagcctgaactactaccaatttatagatgttgttacacaaatgagcacatcttagaagcttactccgcacaaaggtggcctcttgggaatgaaaccataattcctccttctgaagacgctagacactatccctgacccactactattctgccaaaggtcggccaaa

SEQ ID NO: 257680 - DNA, 438 bp, Glycine max
atgcaagcttgtaagattatggggtacccatcacatgtgtgttttcgtggcggtcgggccatggtgcacaacatagtttttccacatccacaaatcgcgcataaacccaccattccttgttgcccaccttcaactgagctcacgtactcccacgtgacccatattctcatttctctcaacaacggggccccatcaatccttccaagcttgcccaacatctaagtaatacaacatttcaacagaacaagctatcacagccaagaaaacagggcaaaggcagaaaactctgcccaaaacaccaaccaaaatcacagctttttctcacttaaagacctcagtaacatttcctttcgtcccattcgttaaccgttggatcgactcaaaatcttactgaaagtctctagtacataaatctacatcttgaccggtgggatctac

SEQ ID NO: 257681 - DNA, 368 bp, Glycine max
gaagctagagcttagctacacacacatctctaatagtttatctcacctccttgagatgagaagctagagcttagctacaccccccctattatagctaagttcacccccatgacaaaatacatgaaaataccaccaattccctactacaaagactactgaaaatacctcgaaatacaaggcaaaaaccctatactactaaaatggttaaaatacaaggcctaaatgaaggaaaaacctattctaatatttacaaagataagcgggctcatacttagcccatcggctcaaaatctaccctaaggctcatgagaaccctagggccttcccttggatctctggctcaatctgcttggagtcttctattcaat

SEQ ID NO: 257682 - DNA, 326 bp, Glycine max
  unsure (1)..(326): unsure at all n locations
agctntnttggagtagaaacatgggaccaactcattttatttcaaaaatctggatctagtcaaggactgagagaccatacaagtttcctagcgatttctaattatgtgggccattaagtctatcatatgctgacaatagccgagaagcccatgaatttcttcggcggcggagtaagtgtctgccatcgccttggccttggctaacaatcggagaagtttctgactcccgttcaaggtaagagcacaccgatccatccacatggttgcctcttggtgtaagagtcatcacccttcctcatcctctttttccgcgatactgggcatac

SEQ ID NO: 257683 - DNA, 344 bp, Glycine max
  unsure (1)..(344): unsure at all n locations
gtccgtacatccctcatgtaagactatgcttaaactaaactacattattgatacttcataattaaaaccaaaacttaacccgcagatccctcatgtaaagctaaagttcaatcctgcttcaatcaagttctaaggcaacaatacatttttcaatgctaaagtcacctaactatgcacacaaatggttgatcagaccaaaagcatacaaacattaagcattgaaggaagcattgaacacaaaaaacataatcaattacatattatggatttacatcagttattcattataaatccncaactagggtagttagccagccattacaaagaaaccctaacaatgaatg

SEQ ID NO: 257684 - DNA, 268 bp, Glycine max
  unsure (1)..(268): unsure at all n locations
ccaagaaccacttaccaagcaaaagaagttnnggttttttatccgaagcccttagccaaactagcaccttcttctcttaagctcgccacctgtgaacaaatgtcctctgttctctaaccaagcatttccctgaaactccataccacttgtcgtcctcttctgactgatctgcccacaacaaccatgaggtctttggctcttagcgaaaccacctcaccagaaaaaaaaaaccgaaccactacccagcaaactccctattatggtcgca

SEQ ID NO: 257685 - DNA, 364 bp, Glycine max
agctgtctcttggtgcgacaaccagtggagatattgtgaatgtccacctttaagcttatcttgtatgtgatagtagacggctagtgtgtccataacttcttaatacggccaagaatatggtcacaccaaagctagaagcgctattattaattcagctagatctacaaccttcttgtacctggttttgcagctcacgtgtcattgacctgctagcattcgccgccaagaagtcttttgaaagtggtgtacttgccacgtagttgtctacacatcatgtgcttgactacacgcgatttagcgtcttgctcgtgcaccaaatgagaggtgtgaatagatccgttactggaaccagaggatctacctt

SEQ ID NO: 257686 - DNA, 449 bp, Glycine max
  unsure (1)..(449): unsure at all n locations
agcttaatatatcgagacgatcaaaattgaacaacggaagctctcgtgaaattaaaatggtcataagttttaactcggatgtccgattcaagagcttcacatatcgagatgcacgaaattgaacaatggaagctctagagaaattctaatggtcataaattttcacacggaggtcctattcaggcgcttaatatatccagacgctcgaaattgaacaatggaagctctcgagatattcaaatggtcataacttttcactcggatgtccgattcaggtgtatcacatatccagacgcttggaattgattagcggaagctctagagaaattcaaatggtcataacttttcacacggaggtcctattcaagcgcttaatatatcgagacgctcgaaatngaacaacggaagctctcgggaaataaaaatggtcataacgtttaactcggatg

SEQ ID NO: 257687 - DNA, 373 bp, Glycine max
  unsure (1)..(373): unsure at all n locations
nggactgtgctagagagaagaacaaatgatcaaagtgaacttatagccatttctagggcaanaatgggtgttgaggagtcaaattttgattcggtggaattntaggtgtaaattcagtttgagcaagcttcgattgaggttatggacttgtgtgaggtgagagtttgcttcaaacttacctcattctcaatttcacttttcaaacctagaaaacccattgaattgaggggtgttggacacctagattctgtgttgctgtgctgtaaagcttgattttgggttagacatgattgatacatgatttgggacttgtaggaattgatttgggcaagattggatgagaggaagtgtgattntcgaaatctgcacttat

SEQ ID NO: 257688 - DNA, 444 bp, Glycine max
  unsure (1)..(444): unsure at all n locations
agcttctagccaaatggacttaccttgaattaatttctttgatagcccttttgagccttgtttccctttccttgttttgaagctcactacaagccttaagtaaaaaaccatgatattaccatatccttaaggaattttggagctttggaattgttttgggaataagtgtggggggtttttgtttcattggacaacttgttttgttgactatgcttcatgatgtattttgggccatacttgatgtacattgtatattggctaaatgttggacatgctgaatgaaatgttgttgctcaaaaaaaaaaaaaaaaaaaagcaataaagttgagtgaataagatctttaatggcacaagaatgatgaaactcttggctctactcttcatgtgtaattcttatctttactttcttgttntttctttaatatgcacttattcccctttgct

SEQ ID NO: 257689 - DNA, 342 bp, Glycine max
  unsure (1)..(342): unsure at all n locations
ntcctttctgggttgatgacccactctgggtaggtgacctattttatgatgcttttgccttcttggttattggctctggtagagccaatataacatcttttcctttaatactggatcttcctcctttgctggaggagctagacaccttatgaggcatcgggaattttctgtaaaaattcacgagtgaggtactcaggtagagagtctgaagagccctcgatatattctaatgtaaaatcaaaggcgcttaagattgcttgccatcttgcacaaatttgttctgaggcacagttctttacatccttttgaaaatgtctttggctgatatgcatcaacccttac

SEQ ID NO: 257690 - DNA, 418 bp, Glycine max
  unsure (1)..(418): unsure at all n locations
agcttttagatggtgatggatgtatagnnttgttttcttttataatgaaacaacaagacaaagaanaagaaagaaaaactccgaaggttgacatgttatggtcgtacgaagcataaatcattcgtagagagcaaacatatcttttggaaacaagagactgacgctaagagtttattttccagaataaccgagatgagaatggatggattcattgaaccgatgaaagaacataatttggaaatattgggtctacttgtgtaaatcccaagccttagtatcacaatgccataaactggatgctcgagtacccacctagctgtagccatgactaattttgcacgttgtttccaaatcatcatagttacgcgtgccttgtggaataatatggaaattcaacctgagaccgacaccttgacac

SEQ ID NO: 257691 - DNA, 347 bp, Glycine max
agcttgcctcataaggtccaggattgtctttctttcgaaagaactacttccgctcctgagtatgacagtcaccgctttatgagcgccgtacaccatcagcgcttcgaggccatcaaaggatggtcatttctccgggagcgacgcgtccagctcaaggacgacgagtatgcggatttccacgaggagataggtcgccggcggtgggcatcactagttacccccatggccaagttagatccagaaatagtcctcgaattatatgcaaatgctcggccaacagaggagggcgtgcgtgacatgacgtcttgggtaaagggtcagtggatcccgttagatgccgatgctat

SEQ ID NO: 257692 - DNA, 438 bp, Glycine max
  unsure (1)..(438): unsure at all n locations
agcttgaaaggcaaatagatgcattggtttacttgtttacccagctggccnagaatcaganatctgtacctgtcgcaagagtttgtggtttatgctcctctgctgaccaccatacagacctttgccctttcatgcagcaacctggagcaattgagcaagctggagcaattgagcaacctgaagcttatgctgcaaacatttacaatagacctcctcaacctcagcaacaaaatcaaccacaacagaacaattatgacctctccagcaacagatacaaccctggatggaggaatcaccctaacctcagatggtctagccctcaacaacaacagcaaaaacaacctgctccttccttccaaaatgctgctggcccaagcagaccatatattcctccaccaatccaacaacagcaacaaccctagaaaacaacaaacagtg

SEQ ID NO: 257693 - DNA, 456 bp, Glycine max
  unsure (1)..(456): unsure at all n locations
agcttctcctccaattntctataaatagggggttaagtgaagtagaaaagggttcagcctctntggcacttctctctctttcgaatttgcttaggaaaattgtttccgtgaagaaaatccaagccgaggcgcttccgtaacgtttccgtgagtgatttcgcgaaggttttcgaccgttcttcgacgttcttcattcgttcttcatcgttcttcagtcttcaaccggtaagtacctcaaaccaagcttttcaattcattctatgtacccgtggtggtccacagttggtttcatgtattttttttctcgtttcattcactttttatacccccttttgacgtgcttaagccattttatttaagtcatttctcgcttaacctaaaaataaaataaatttccaccgatcgtttgaatagtattatccgttaactttggttgaaatgaattccgaccgatcg

SEQ ID NO: 257694 - DNA, 390 bp, Glycine max
  unsure (1)..(390): unsure at all n locations
ntccattgatgacannatttgcattggttatagatggcnggtgtgtttccctttatcaatgtaacgcttcgtacttgtgggagtataaatacgtcatcatgtggattagtgtggaatctctgacgatgcacgaaaccagaaccttgccatgtattaggatgaacatgggggctttgtaaaaagtagatgacaaaaaatcatctcaggttgatttcacctgtcatgggtggtacgcactgtagactaagtggtgtgctcttgcatacatgtcactcactatgggtggcatgcactggagacataatggcgagcttttccgaacattgtactcaactgtgggtggcatgtactggacaataaatgcatactcatgcatacatctcactcatt

SEQ ID NO: 257695 - DNA, 405 bp, Glycine max
  unsure (1)..(405): unsure at all n locations
agcttctccctcattntcttataaataggggcagtagtgtttagaaatttcgttcagccctcctggtatttcagaatcacttaaaattagtgagaaaaattggttccgtgaagaaaatccaagccgaggcgcttccgtaacgtttccgtgggtgatttcgcgaaggttttcgaccgttcttcgacgttcttcattcggtcttcaaccggtaagttccctagatcgaacttttcaattcattctatgcacccttagtggtcctcatttgtttttacgtgctttcatttacatttcatttactttccatatccccttttgacgtgctttagtcatttgcttaagctattttctcgcctaataaaaaaataaaataaatttccaccgatcggttgaattgtatcaacc

SEQ ID NO: 257696 - DNA, 277 bp, Glycine max
acacataatgataactcataatcataacactcccccttaagctggagcatataaatcgtagctccaagcttggaacatataacctgaatcctaagcccccttaagggtttagtcaaaatatctgctggctgatcacatgagttaatgaactcagtgacaatttctttagacagtaatttctcccgaatgaagtgacaatcaatctcaatgtgcttagtcctctcatggaagacggggtttgaagcaatgtgaagagcagcttgatatcacaatatag

SEQ ID NO: 257697 - DNA, 312 bp, Glycine max
  unsure (1)..(312): unsure at all n locations
acaaacnncaaaaacgnggagggggaaaaagggaaaaaccaannaaacataaaaaggnccaannaaagcgaaaanngagaanccaacnccatgnnagaaagncngagaaaatntaaaataaagacacagaaataaaatcaagaagcaataagattaaaaaggaagagaatcttagccacagtcttccaagcatgttaggtaaaatagtcaccaaactaaaccataagatgctttcattgtaaaagttagtaactgagaaccgaanattcacagagaaaataccctgcccacttttttatttttttttactat

SEQ ID NO: 257698 - DNA, 339 bp, Glycine max
  unsure (1)..(339): unsure at all n locations
ggagggagnggctttgcgaaacaatgatacggcccgtgtcggcttgaagaatgtaagggggcgccagtgagtgagagagacatgctttttcaagtagtgagatgcagaaactgagagtgaataggcaatttagtccctgagattgtaaccagtttgcatattagtccctgacttaaattttaattcaaaatagtccctaactntacataagttttgcaaaatagtccctgtcgttaaattctcaggtgacggcgttagtgaggtgcatangtggcaattcaatgccacgtagactgtccaatgtggcactgaggtctgcatctataaattctctctcac

SEQ ID NO: 257699 - DNA, 366 bp, Glycine max
agcttaaagtatgcccgagtcattcatccctatgagatgttgttgaagtataggcaatcagaactgccattccttggattatagggttgaaccgagcctcatgcttttacaaaaaggttcatcaagtcaggttgaaatatggaagtaaccatcctgaaacttggtgcaaagataatcgagtcacatcactgcttctttactgcaaacatattatgatattgatgtcttgtacttcagttcacctgacaaagtcatggaccagtgaaatctaaatgatcacccatacctgctaaaatcgcaatattctacatatccatgcatcagcttcatggtgcttgccatgatttttctgaaaaaaataatgac

SEQ ID NO: 257700 - DNA, 241 bp, Glycine max
aattaggtgtgaacatatcatcacaagaattgaggtagattgcaagaaagcccacctcattgtagatctccaagtatgaaactcataagagaaactctctgcttggagtctagtatgcagaagaatcagactatgtaatctctataatacaaagttcacatagagagtggcatttgacatacctcttgattacgcttaaagcatccttcacgggaaggggtttgattccaagagatccttg

SEQ ID NO: 257701 - DNA, 395 bp, Glycine max
  unsure (1)..(395): unsure at all n locations
agctctgagccanaatcctgactcaccataaatttttattanggtgagaatgtcaatccttaccctcggaagccaagaaaaaaggagagaaggaaaatttccaatcaaaggaaaaaaggagaggaaaggaaattcccaatcaaagagtgggagaaagcaaaaagaaaagaaagaaaattcccaatcaaagaatgggagaaagaaaaagagaaggagaagaaggaaggaaagctcctgatcaaggatcgaaagaaaacagaagatatgtgcagaggggatctctggaccagacaatatctaaacaaatacagaattgtcaccaaatgaacaaaagaaagaaaaggaaaccataacctanaagtggtcttctccctttgattaccaaccaaaatcct

SEQ ID NO: 257702 - DNA, 234 bp, Glycine max
ctcccttggctgaactcgagaaaatgaagaagaaagtcccaaaaattcgcttttaaagaatagtgaatatgacgtctaaggcttctgtacaacataaattgtgaataatcctacatgactatcttaattgacaccatgattgacttatggccaaccatgtttgaccgtctaaatcatgcttgcgatgggtattatcgcttttgaaatttaaaccatatatggctcaagtataca

SEQ ID NO: 257703 - DNA, 374 bp, Glycine max
atacatctttcaagagtttttttatattgtcatggattagtcactcatcccacacaagcatgtggtatgacaatttcaccaaaaaagacaaccttgaatattttgaacctttataaaagggttatgttgcatcttttgctaaatcataaaactatttggcttcattcctttcttgtgtgtccgttggaactacttcatccctatcaacctctacatttggagcaatgggcacttcatttgtatgctgcctatcaacttcaagagcatcatcaatcataatctggataggatcttcaataaagctgtcttaaactacatttgtatgaaacatattacaaagttcttctatctcagaactcccatggtacaaccat

SEQ ID NO: 257704 - DNA, 448 bp, Glycine max
  unsure (1)..(448): unsure at all n locations
ttaagncacctgcaggctgcaagcttatgcaagtaattgtaagaggcatcttttataagatctttttcggacatatttgcgcaaaatctcttgaactaagaagatgttgtccatcatctttttgttcttaatgaaagcagcttgagtgtccctaataatagtctcaagcactggggctatgtggttagccagaattttagatacaatcttgtataacaaattacagcaagatattggtctaaaatggttaacctgggaggcctgatcatgcttaagaataagcgcaataatatgcatggtgagctgctttagaatttttccagttgtaaagaattcattaaccgctgcagagatataatcaccaatgatattccaagccttcttgaagaataaaacattgaaaccatctggcctanngagcttattggtatccatcacagaaataacg

SEQ ID NO: 257705 - DNA, 435 bp, Glycine max
  unsure (1)..(435): unsure at all n locations
agctagttccagtgtggaatcacagtgatatattatgatcttttcattttgtagaacatccaacccctgatgttgatatggtttccaaaatagaatgtataaagagttttgtttcaatttttttgggtattttattattatttcccccttctgtttcagttttatgtcatttaaagtttgggaaaatagtgggtatgaagcatatttatgctaaagggtgttgtttgtttgtgttattttttgtatggcttctcctttattttgaactccaccctaagaagtatttgaagcaaatgagtgattttaaatttaacaatttttttcataattattntagccaagtctggatagtttttaattttttttaaactatactaatttactaatttggttttatcttgctcttttattaattctatgtgtctcatctcttgt

SEQ ID NO: 257706 - DNA, 213 bp, Glycine max
ttacgcactgcgctctctttcgaatatgcttacgaaaattgcttccgtgaagaatatccaagccgaggcgcttgcgtaacgtttccgtaacgttgtcgtgagtgatctcacgtaaggtttcgaccgttcatcgacgatcttcattcggtcttgaccgttcttcagacttcaacgggtaagtacctcaaaccaagcttagcgattcattctatg

SEQ ID NO: 257707 - DNA, 421 bp, Glycine max
agcttatattattatgctagataacaattgtttatatacaagattccattgtcaaaactttgcgggcagaaagttggttgttacaaagttcaatgcaagtgaaaaggttaatcccccaaattatggaatttgaaagtactttggtgaaacttaatgttgtgaagttagtaagaaagtgggggaaaatagacaccatacgtaaacaacggtcaaagctgcacctcataaagcatacaatatacaacataattaaaagttttaactcatttttatgatccataatacctaaagttggatcttcaattatatatgtttgaatagctctaaataaagtgcattatttggtcttataaatagtagcatttgcagcaaggatgctcggtcacatgaacatcattcgttagatgattcactacgctat

SEQ ID NO: 257708 - DNA, 442 bp, Glycine max
  unsure (1)..(442): unsure at all n locations
agctctgtaatatttaaattattgaggttgacctagtttcttacccgtagatacgccacaactgagtacggtgagtcttttaatgtaaggattgaggtcaccatcgccatcaacgcgaatcttgacaacgcatgctgaatccactaccgtgtactctgtgaaagttgaagtgttcaagaaatgcaagaatggttttccatcagttgtagaaaaccttgtggcaccatcaccttcctcataggatccaccccaaatctctcacacatgttggtcttctcgcacttgcaatatttgcaatccccgcattccccattgaaaattggcaccaccanattcccttctttcatgtcatttgcaccttctctcacactntccacaatcctaaaaattcatagcacacacaaatagccacaagtggtctcactttcaattcaatntcatg

SEQ ID NO: 257709 - DNA, 453 bp, Glycine max
agctttatgatgcctaagaaaaataccgctttatgatatcttcctatgttcagtgcgcatattattatgatcacatggcttcaaccctagtaagaacaatgacatgcaaagcatagccagaccctattttttttcccacacaaaacatgttatttcgcgaacctaattaaatctccaatgcacaacatgtgataggtaacatctaataaaagtgtgaggcgatcaaaataagtaatgaacagtgaagttcaatttcaggattaagaactgaaataacgagattaaaaaagttagaaactaaattggtgaaataaattatatggagaccaaaattaaattatgaaacaaacaagggaatcaaatttgtaattgttcctttccagaacgttctataacttcatctctaaagccgctgagattttgtaagttctacgtttcatgctttataatata

SEQ ID NO: 257710 - DNA, 434 bp, Glycine max
  unsure (1)..(434): unsure at all n locations
gactcttcatgtctggtgaagagaaccattttgtgtgtagtcgactctaaaagaactgtgaaccaaggcgaaaaagtcaaaaactatttgtagagttacatcttttgaattggtcacaaactatcactagaaatcgattaccaaatcagtgtaatcgattacacaaagctttgtagtgaaagaatgtgactcttcatatttgaatttgaatntcaacgttcacgcacactgggaatcgattaccagaacattgtaatcgattacagcattttgaaatcaattggaacgttgtanattctaccgaaagctttctgaaaccattttgtactagtagtcgattacaaaatctggaatcaataccagagagtaaaactctttggaaacatgtnttgagaaaatccatgtgctctcagttttgaaaaactgttatacta

SEQ ID NO: 257711 - DNA, 347 bp, Glycine max
  unsure (1)..(347): unsure at all n locations
agcttcattctacactgagaaaagatgatgttctctttacacanaagagaaaactccctgatgatgatagagctcacaaaaattctcatgcagagtggaccttcttctagatagattgacttgcggcagcctactatccatattccattcccactagagcaatttctaactaaaagatggaagaaatggagtaggagatcttggataccttgatgaaagtagaagagaacatacctctactagatgccatcaagcacaatcaagatatgccaagtgtctaaacgagctgcgctcccgcgtgaggaggctcacatgcaatgaaaggatcatcatacgcagaaatgtgt

SEQ ID NO: 257712 - DNA, 450 bp, Glycine max
  unsure (1)..(450): unsure at all n locations
agcttcttgatgttggagatattcttcaattctcttttatntgctcaacactttgtaccccaaaaaaatgctttaacccttgaaccacagcatgttttactcaaaattgctttaagcgtggcccaatgtgtttagagttatttactcttcagatttttactctagaggtacgttgttacaaattatatgacgttttaaattttgactcaagtattagaggatataattaatttattgaatttcattagaaatattagataattttttaatatataatttatttatctaattaatgacttattcatttcttatatattactctcactaaatattgattaaagataatttatataatgtaacgaaagaaatactccaaattcattagttaaagctaccaactaaataaatagtatttctttacttatatntatataatatacaatgaaagat

SEQ ID NO: 257713 - DNA, 274 bp, Glycine max
agcttatccctagaggggatggacctttttatgttttggagaagatcaataacaatgcctatagggtggacctcccagaagagtatggagtcagcaccacttttaacatttctgatttaactccttttgtaggtggagctgatattgaggaggaggaactaacagatttgaagtcaatcctcttcaaagggaaagggatgatgccattctccctaggaagggacccatcactataaccatgaaccagaggcttcaagaagaatgggctagaact

SEQ ID NO: 257714 - DNA, 315 bp, Glycine max
  unsure (1)..(315): unsure at all n locations
cgagcgtctcaatatattatgggcctgaatcagacattcgaatcanaagttatgtctggttgtctatgccatgggcttcaatgttcaattctgaacatctcgatatattatgcacctgaatcgggcatctgagtgaaaagttatgtcatatgagttagccgagagcttcgttgttcgatttcaagcgtctcgacatattattggcctgaatcggacattcgagtcaaaagttatgggagtttaaactgtccatgcgcttccatgtttaattttgagcatctcgatatattatgcacctgaatcggacatctgagt

SEQ ID NO: 257715 - DNA, 400 bp, Glycine max
ttaagtcacctgcagcatgcaactatgggagagtggtcacgacatgttttttcttttaaccaactattcattgccttcacctaacaacttaagctttagagagagttggtttaaactttcattttatctccaattttgagtaacaatttagtagtattccttagttgattttatttggcagttttagtgtgataaacaattaattgcaattatacttggagaattttagcgcatgttttgattagcatatttttcttttttttaaaaagattatcatacaaatgtggagttctaaattgcaagatcttttttaacatgtaaaataagctaattctgacatttactaatggcaaggttatgcaagtttgctaggttctctgaccataattgttgaatggct

SEQ ID NO: 257716 - DNA, 425 bp, Glycine max
  unsure (1)..(425): unsure at all n locations
agctngagaagatctaggggatttatgtttttacctgggaatgatgtggcgatgacctgtcaatgaataagcttgatgacatggcactccgtctaccgcgtcatcacttaacagaatggcactaatggcaagtactccggtgaaacaaaaaaaaaattcaagtatttagttgacaaaaaatgaatttgaaatagtaatttgaaaaccgtctattttccaggtgtgaaaaacatatttgagccataattaaaatatactgatcagaaaccataaaattacttgccaacagaaatggcaaacatacattcaaaatgtgcaaataataatcatgtgaatataagaaaatgcaaaagccatctgctgtttcaatcaaaagtaatattgagaagaataccgactggtccagaccagccacacatccaaaa

SEQ ID NO: 257717 - DNA, 286 bp, Glycine max
  unsure (1)..(286): unsure at all n locations
ntacatctaaagcgaacacacnattggcatgcttctgagattcactagtcgatctcgcaagccactcgattagactagcgattggttaccacatgtcagcgtanacacaaccttaattagaaacaaatattactagtttggtactactatctaaagcactaaaatatatcctttctttatgttaaacctcatattcctcattttcattaaattagcaaaattagacaagcttcataatccatacaaagctattcacgagaacaaagttaccttaaaacagattccc

SEQ ID NO: 257718 - DNA, 433 bp, Glycine max
agcaagctgtaagattatggagtacccatcacatgtggtactaggtggcggtcgggcgatggtgcacaacaagtttttcacatccacaaagcgcgcataaacccaccatcccctgttgcccaccttcattcgagctcacgtactcccacgtagcccatattctcgtttctctcaacaccaggtccccatcaatcctcccaagcttccacaacatccaagaaaaacaacattcaaacagcacaaactaccacagccaagaaaacagggcaaaggcagaaaactctgctcaaacaccaaccaaaatcacagcttttctcactcaaagaccccagtaacaattccttcgatccaattcgttaaccggtggatcgactccaaaatattactggaagtctatggacataagcctacattgtgacgcgtgagatctact

SEQ ID NO: 257719 - DNA, 384 bp, Glycine max
agctttaacaaatatttctttatgagaaatctattctgtttgtttcacatagtccacaaacattgaccgacgattatcactccataagttttataaggattataaatccgtacaaaactagatcaatgctacagaagaaaatcaacaaacctattgctgttaacagccacaacaaccaccacttgccaactagctaacgtaaccaatgcgccttgaccaaaatggacacaacaatgaacaatcacctctcatgagaatggatgcaaagaacaatacaatagagtgaatggtgcgtgaattagaaaaaagaacaagtttacaagggatatttttatgaatttgaacaattgccagatgcacaataaaaataatgggtgcacaaaa

SEQ ID NO: 257720 - DNA, 284 bp, Glycine max
attatgatgtaccaagagggcattcatgcacaacaaaattgaggattcattttaagcaacttataaggaatactttccatagcaagaatttgtcaacaaacatagacctgagtcgccatggaacatagcagaacaaacgggcataagcatatataaagaaatagcaatactggaatttcattacaattactatatagaataattaaaataaaagagggcacaagtgcttatgatggtgatggtgaacaccccaatatttatcttcattatattatggaacaagt

SEQ ID NO: 257721 - DNA, 318 bp, Glycine max
ctcccatctcccctttgagagacactttttattaaaaacatttttacactttttctagtcgaacactcatatcaacgctctccctatttctcttcaaataaactgtatactcatgtagattcatgattcatcccctatttctcttcccctttgccttcacaaaaagccaaagtgcgtatcaaacttaaagtatgcacatgtatcttaaacattcataaacatatattaccactacattaactctataccctgaagtcacaatcataaacaaatcaacttattaaattcacatacccaaataacttacgtgttaaccta

SEQ ID NO: 257722 - DNA, 372 bp, Glycine max
agcttacattactgatctttctttgtgtagcatacattcttgctcaaactcatgataaaacacaagcttcattccaatcatgcactcaatccataatcaccattttcaaactataccaaaactacaatttcaaggagtcaagttaaactgttctatacgcatcaagacttgcatactactatccataatcaaaagtataaacccatattacaacataaagtgtactaaaggcataattataataatcataattgtcatcaaaacaaaagcaggaatttaaaattcctgtgacaagtcttgtgactgagtatcctcatcttgagtgtcctcctcatctgttaaatgtatcacacgagtggccgaaagaatggt

SEQ ID NO: 257723 - DNA, 441 bp, Glycine max
tcacatgtatttccatgtaacttcaaatttcctgcacaaattatattagtcccacttttttctaatttgcctgtccatagaactttggattgcacacacaatgctattgtgtaacacatttggtgcagagaaatacaaagacagaatttaataaatatattggtcaataaatacaagccaatatttatacattggactttgtaatgttcacaataaccaacaaattcataaaaatgcaatgtcctatatcaactatgactttctacattgaattctctgaacttttagaaaatatgtcgcccatttcttgcgaatcgacgttattgtattcatgtctaacgaacgttccacagcaaaccactacaatatatgaagaatacaaataatatgtcacgtacattgtaaatcaatggaaaatatattgaagtactaattaaaagt

SEQ ID NO: 257724 - DNA, 447 bp, Glycine max
  unsure (1)..(447): unsure at all n locations
aggctgcaactnttaacctgttctgggatgttatttattacgggacatattntatgaggctagtgaagatctttctggcactgtatctgctgatgatggcgatgataatatctgcagaatttcgactggtgaagatagtttgggtaccaatgttggagtatatactgatgatacagaagaaacaacagacatgctacatgcaccttctgcttctggaccgaataagagaagaaaattaatgaattcctttagtgctggagttgaagttgatagctactcgacagctgaaattgataactcattggattattctcagacctctagctgtgtgtctgatgatacagttgaaaccactcaagatgatacacttgaaaccactcaagatgatatagttgaaactactcaagatgatacagttgaagcaacacaatatagtgatgttctact

SEQ ID NO: 257725 - DNA, 232 bp, Glycine max
ccatgtggcgtatgcaatactcaaacccttttgtggatgagcacatgtgaactctagaggtggtggtggtgtgtctattgcccgctaccgaccattccaatgctgctgtggagattcgccctgcgcctgcctaaggacgcaatacttcttgaagaaagcttcatcaataagtggcctgatgcccttgctggaagttacaggaactctgttaaactgacatagacccgttatt

SEQ ID NO: 257726 - DNA, 458 bp, Glycine max
  unsure (1)..(458): unsure at all n locations
agctntctaaagntttctgggtttctttatcttgttaacaaaagagtgctattcatttttttcattcccttctccctttgccaaaaagaattcgccaaggactaaccgcctgaattctttttgtgtctctcttctcccttttccaaaagaacgaaggactaaccgcatgaattcttttgtgtctcccttctcccttgtcaaataattcaaaatgacacagtctgagaattcttttgattcttcccttgccaataaacaaaagatttcaaaggactaaccgcttgagaattcttttgtttcccccttcacaaagtttagaaggactaaccgcctaagaactctgtcttaacacattggagggtacatcctttgtggtacaagtagagggtacatctacttgggttgttgtgactgagaacaagagagggtacatctcttgtggatcagttctagtggag

SEQ ID NO: 257727 - DNA, 419 bp, Glycine max
  unsure (1)..(419): unsure at all n locations
tcaattggagtcttgtctnttacagacttagttggacatctgttgagtatgtaaacagcagtgtagactgcttcagcctagaatgtgttaggtagtctcttctccttgagcatcgatctagccatctccataactatgcgattctttctctcggacactccattntgttgaggagaatatgcgactgtaagttgtcgctcaatgccttcatcctcacaaaatctttcaaactcgcgagaggtgtactctttgtcgcaatcacttcttagtacttttatccatgttccactttgattttcagcaagggccttgaactttttgaatactccaaagacttctgatttttcttttagaacatatacccatgtcattctagagaagtcatcaatgaagagtatgaagtacctggtagtctcatg

SEQ ID NO: 257728 - DNA, 426 bp, Glycine max
  unsure (1)..(426): unsure at all n locations
agctntctattaagattagaagatttctttgtcatttgtatttcttttattatctctttagtcttttagttaataactaattctattagttggttattgacttaccttcttagttagttaggtagttatctttctaaccatagctttgcttgtatatatagcaactcttgtaatcttttttgatcaatgcataaagagaatttttcaaaaactatttttttttccaaattcaattcatgttctttcatggtatcactcctacacacgaaaccttcttctttcatcatccttccacgttagttcatctgaaatttagggtcattgtttattcttcttgcttttcttgatcgatcatggctgttaacaatcagcatacaacttctaatcaccgagtcaatccatattttcttcatccgagagaaaatc

SEQ ID NO: 257729 - DNA, 397 bp, Glycine max
  unsure (1)..(397): unsure at all n locations
tgcaatgcctttcagcaatggtaattgtgtgcctcattgatatccatcgtgcttatgatgctttgcatttatgttcatcgcgttctgattgctttccaatgtttattttcacgtaaaatttcatggttgcagtgagttttactgttgtttcagagtcttttaagagtcacggcanttgttatttgacttctttttctcttggcaagtntggtttatggccgaatnttcacatatttctgtagattttgatgaggtatgctataaaattaaagatgctccccattgaaatcatttgagcctttattgaacttcctacatatccaatgtaatggttccccacttgatcattatgttgacttgcattctttgttatctgagtgaaattaatgaatacttt

SEQ ID NO: 257730 - DNA, 410 bp, Glycine max
  unsure (1)..(410): unsure at all n locations
agcttcaaggttcatgactggagtctttttttattctaagaccatgctaagagcaagttaatgctcaactatgtggagttcaggcttaaaattttttatttgagtaacatttggaaaagtaggggaaatcccattttgatcactgtatattcctcgcgttttctttcttggtccataagtactcttttattnttggcatttggtcatatttcatctagttattaacttactacgattgtcagtgacttgagaataatgtgtttggaaatgtcagtgacttttttccttctacaaagtgctggatttgctgttttaataataagtcacttttgatgttgctgtatacccagcaatctggaacagaaacaacgtgctttctgtaagctctgtgattacttgcagcatgaaat

SEQ ID NO: 257731 - DNA, 317 bp, Glycine max
agcacaagggccatcacttccttctcatagacagattttgccagattcccattagataaagctttactgaagaaagcaatagggttgtctcttgctgcattagaacaacacctatacctctaccagccgcatcacactcaacttcaaaagggtaatcaaaatttggaagaattagcacagggggagaagtcatgatcctcttcatctcctcaaaggccttgacagcttctattccccaagaaaaattgtctttcttagtcaattcggtgagagggttttgctatttaccataatcctcgataaactttctataatac

SEQ ID NO: 257732 - DNA, 382 bp, Glycine max
  unsure (1)..(382): unsure at all n locations
aacttctcccccaatagactatatatttgttatatgtgaccgggaanagggttcagcctcttaagcacttctctctctttcgaatatgcttagaaaaatagcttccgtgaagaagatccaagccgaagcgcttccgtaacgtttccataacgtttccgtgagtgatnttcccaaaggtttccaccgttcttcggagatcttcattcgttctacatcgttcttcaatcctcaactggtaagtacctcaaaccaagcttatcaattcattctaagcacccgtagaggtccacacttgctttcatgtatttttattctcggcttcatttactttttatacccccttttgacgtgcctagaccattttatttaagtcatttctcgc

SEQ ID NO: 257733 - DNA, 438 bp, Glycine max
tatcatgaccttatttctaactccagcattatctcacatgtttatcagaactcacgaagaggtgctcagagatcatagagagctcgacaatgcccctgacgctaaagaacatatttctttggaagaatccactcaattgcgtggtgcttttaaaactctgaagataaaagaagctataccctaccttgagaaagaggatatatccaaattagaaatttgtgtgaattggtaactgtttacagctatgaacaaaatttagggtttgcaagaataacttaaagaactcaatatagctcatgagcttgtgcacgggaaagatataattggggaggaagtgtgcttataccacaaaaattatgggtctttaaaaactgacctgctcttttgacattggatggttcaaaggtcggctaaccttaatgaaacttttaaaaaaaa

SEQ ID NO: 257734 - DNA, 446 bp, Glycine max
  unsure (1)..(446): unsure at all n locations
agcttgagatgaagaagtgtagaaaggtgaatctttctgcttttattcgttgaccacagagtggtacctggagatatgtcgcggaggtcaagagaccttggggacgtcaagtggggtgctattgcccaaaaccaagcttgaccaatcccgacccaacccgggcatagtcggtcagtgagaacctgtgatgtacctaaacaggcgagctcctggcagtcaacagataaaaggaacaaagaccacaaagcaaggaggcttgtggtggctggccagctgtgaatcttgtgtgatatatgggttatggcctctggtaatcgattaccaagggtgggtaatcgattacaaggcttanaaatgaagacaggaggctaagatggtctctggtaatcngataccaagggggtgtaatcgattaccaggcttgaaaacgaagtcagaaagccatg

SEQ ID NO: 257735 - DNA, 464 bp, Glycine max
  unsure (1)..(464): unsure at all n locations
ctagtctcagcatctatgcgagacagaaaccaacatgtnagctatcatcgccaagtacttataagagttgggtctagccacggcccacgagcatagaatcgcggatgagtatgcccaagtatatgcggaaaaagaggctagaggaagggtgatcgactctntacaccaagaggcaaccatgtggatggatcggtctgctcttaccttgaacgggagtcaagaacttccccgattgttagctaaggtcaatgcgatggcagacacctactcctgccccgaagagaatcatgggcttctcggctattggcagcatatgatagacttaatggctcacataagtagaaatcgtttagaaacttgtatgggctctcagaccatgactagatatgatttctttattgaaataaaatagaattgtcccatgtttctacttcaagagcttgtgcaatcagatcactctactt

SEQ ID NO: 257736 - DNA, 378 bp, Glycine max
agctctctctctatttgctgctcatagggggtgtattgttataaaatagagttcagcctctttgccacttctctctctctcgaaattgctgaagaaaattatttccgtgaagaaaatccaagccgagacgcttccgtaacgtttccgcgagtaaatacgcgaagattctcgaccgttcttcaagaatcattgttcgctcttcggtttcttcagtcttcaacgggttagtacctcaaaccaagcttttcaactcattctatgtacccgtggaggtccacattttggttcatgtatttttattctcttggccatttgctctttatacccctgtttgacatgcttacaccatatatttaagtcatttctcgcttaatctaa

SEQ ID NO: 257737 - DNA, 319 bp, Glycine max
  unsure (1)..(319): unsure at all n locations
agaacacttcatggagactacgatgatgatctcgagaagcaacgaatgcgctctggatngattcaaggactctttcacgctcaagagcatagttgagttcgaaaataaagaattaagtctccgatcctagcctccctgaatcaagatcaagattcaagactcaagactcacgaagcacgaaaatacttaatcaccataactactaaaaagtacactcaaatactgagtagcacatgacctattctgaataccttatagccaacagtnaccactctctggtaaacaattaccagagtatcgtgatcgatcaccagtagca

SEQ ID NO: 257738 - DNA, 233 bp, Glycine max
aaaggaggggccgacacattactgagtgcagacacatctcaggacatacagtcgtcgacactttactacttctgtgcgacctttgggtcattctctgggtttaaccgtgttattctacatgactcttaaggatatatgttgaacaggcaatttttaaaacaaatgacaccatattcttcttgagaaatcaactcattacgctctatcataaataaaaagagttaaaaatattt

SEQ ID NO: 257739 - DNA, 265 bp, Glycine max
gctattcatgagacctccaccttcgagtatggagctatgttgcatgattgcctaagtgcggaccctcatgaaatgctcattctcccctttgtggggccccatgaatgttattgcctaacgctggtcatgtgtcctccaccttcaagtttggagctatgattcatgattgcctaagagcggaccctcaatgcaagacttcatcctccccctttttccgagccccatgaatgttattgcctagcgctgtccatgtggccttcacctt

SEQ ID NO: 257740 - DNA, 406 bp, Glycine max
  unsure (1)..(406): unsure at all n locations
attaatttttcaanatgggagtgctaagtatttattacctatgcttagtagaaaatacttataacactacaaaataaccataaattggaagagtgtgagacaatttacacaagttttatacacaaaagttagtcgtattcatcgactaacaccagtccccatgaaaagttagcaacttccagtgttgaaaccaaacataattgtgcctcatcattcaacaccagtaccataaacataaaatgcttcaaatgcttatgcagaggacatattgctcttgattgtccaacctggaggaccgtgatcatgaacgcagatggagatatcaccagtgaatctaatatcaatgaataagacgtggaagaatagcttgacgatgaagctatgtacggtgatatgctaatggtga

SEQ ID NO: 257741 - DNA, 332 bp, Glycine max
  unsure (1)..(332): unsure at all n locations
agcttctcaggaagatttctcanataagctttttcttgaagtgttctcaacacagcttcttaaggaagctacctagtctatacatagaagcatgtgttacacttgttgtaactttgacgaatgacagtcttgtgagacatacttcaaaggtgagcgtcgctccctcttttattcctttaatttcgtgctcacccctctgtctttctcttcctctttcgtttactccattgaagcatcatgtccagcttcttatccaaagctcatcttggtggtgaagcttcttctttcatggcttattccctagtggatggcgcctcctctcacctcttctt

SEQ ID NO: 257742 - DNA, 150 bp, Glycine max
aataaatcattcctacattttatctctatcatgcattttctttctttacccactcctcacgtttgggtttttaaggaaaaacaccataacttaacgccccgcaaggtatccctattgcaccacatccaaatctataacgatgggtgatca

SEQ ID NO: 257743 - DNA, 342 bp, Glycine max
  unsure (1)..(342): unsure at all n locations
ggaccttgaatactcactgcattggaatgcanagcccactccatcttaggatattacctgacatctcaaacaaacaaatcagacgtaacaagacaattatagttgttgtttgaatacctcacccactcaagtgtatcacacaattatggctgttctctaatgaaacactcttgccttttaccactctaattccccttgagttcttaggcaattcaagagattatggccacaacaaagaacaattcaccaatatgtgtaaggtaaggctagagagacaaggaaaaggttaaccaagaaaaaggctaacaatgttnttaggcacaaatgaaggaaataaaattc

SEQ ID NO: 257744 - DNA, 350 bp, Glycine max
  unsure (1)..(350): unsure at all n locations
agcttctacttatgtggcaaggagggttttttttattttcttgtctcaaccgcgagctntgaccaccgctcttccttcccgcgaagcttctctttatatctgcctgagtgggcttatagcctaaaccatacttcccacgatttcctttggcatttatcaagctagttatgccgccgttgtctttgcctaaacccattccgggttcgtaaccgttccccaacataactcgggccatcattactgctgcatcggacaggcaaggctgcccagagaaagagtccaccgaggaaatgcttaccacctcaaaagactggaaagcagtttctaatgacttctttgcggctttcaca

SEQ ID NO: 257745 - DNA, 369 bp, Glycine max
  unsure (1)..(369): unsure at all n locations
aagcacggagccttttattagaagagagggagancaacacacgccanaagcagaaaacaagaacaagagnnacaccacaaccacaacgagaacccanaacaaaaacacccnncaaagaaagcacccncaaacncaaccncggagncnccaaacacaaggagacaccccncaaaacccnncaagagagaaaccngccccccnnncaccnncnncagccacaaaaaaaaaaannccaaagggactcactagccnggggtctcacttcctaagagggcaacaagggtacccactaaacagccacactaagcttaccctctttagtttattccctctttctaaaaactctcttttctctctctctctctctct

SEQ ID NO: 257746 - DNA, 450 bp, Glycine max
agcttaagcctaagtctacaatttcaaatttttatagagttggagcttagcgcagcatggcgcactttgctcagcctcaccaaaatgacactcaggcttaacgcataaggcgcgcttaacctaactacaaaaacttaaaagacagtgagggagttgagcttaaagcagcagggcgcttagatcaacacacaacaagggcttagcctcattcaaaggaaaacttatagaagcaaagtggcgcttagcctgacaggtcaggcttaacgctaaacaaaatttctcaaaatcttaatgtctgaacactagtcccgcttagttcacagacgcgcttagcgggatcatcacttgctttcatcagtaaggatgaacgcgcttagcgcaacatggtccgcttagcgcgttcatctggaaatccaaaattttaacaattgcgatgagcatgctaagtgc

SEQ ID NO: 257747 - DNA, 426 bp, Glycine max
  unsure (1)..(426): unsure at all n locations
acacttgaaactcagcttactgaattgcttgtgttaatgaagaataatcnttctgattacaacacattacctaagaatcattatgaggctaagaagaatttatgtcctatgggtatggaataccagaaaatacatgcatgccctaatggttgtattttgtatagaaatcagtttgccaaaatgcacaactaccctacatgtggggtatcatgctacaaagtgaagtatggagaatgcagtgatgattcaaccataaacaacgatcgtccaacaaaggtgtgctggtatattccagtaataccaaggtttaagcgattgttttctaatgcggatgaatgcaaaaacattacatggcatgcatatggcagaaaaaatgatggattgctctatctataacgacctgcctcgtcgctacgatatcaccac

SEQ ID NO: 257748 - DNA, 98 bp, Glycine max
  unsure (1)..(98): unsure at all n locations
gcccgagaggaacacccggcgngaagagaagaaaggatatgcaccgccgaaacacaaagacctgttagcgccgaaaagccaacaagaggttggcaaag

SEQ ID NO: 257749 - DNA, 339 bp, Glycine max
  unsure (1)..(339): unsure at all n locations
gatgaaccaagcaattttgatgatgccagaatnctaattgattgagncaatattgaancatgactncaagaacaagcatcaggaatccaatgcgagaggcaagattcagacagaagaagtcgagaagccacaagtcaagactctctaaaggataagtgttaaaatattatttcaaaaaaccatgtagcacagtcatgttttacaaaagaattttctcaaatgatctaagttaccagagtgattactctctgggaatcaatacccatatcagtaatcgattaccaataaccatctgggtttccaaaacattttcaattgtgtcgcaatgtccctaactga

SEQ ID NO: 257750 - DNA, 310 bp, Glycine max
ctcctctccatcgggtgctaaccacttccttttccgttccccttgagatggaaaacccatttctggatttgggtttgcccgtttctcattggtagtacctacagaataaaattaaggaatgtcaaagcattgaatttacaataatgtcatcagctaagtccttgacactgtgattggcaaaggagaagctttgaccctattcttctagtttatacctattataggaagctatagcctagctagagctcacaagttagggtaatagcataatgaaagcttgtgctaatacacagcttgccatttattattt

SEQ ID NO: 257751 - DNA, 408 bp, Glycine max
  unsure (1)..(408): unsure at all n locations
aacaatatactngtccttctattaattggctnngggttttttttttattctcaacaaagtactntcgacacgtattgtacgttgatttgaccaatgccgntatgggaatgttgcgacaatcccttcaaaaaccttatttgatacatttctgagagggttggttgtcatgtggccatatcgacgtccttctctatcataagtcatcgcccatttttcctttgaatacgatcaatccatgttgctatggctggacttagtagacgaaatttttctaaattttgataaaaaaaatgtgcttgcaaggagtgtacgctgcataaaattagttatgaataacaattttaagtatatatgaaatttaaataaacgtgaccatcaaatatgacatcttacccaatttcttcaaca

SEQ ID NO: 257752 - DNA, 203 bp, Glycine max
  unsure (1)..(203): unsure at all n locations
aagaagaagagagggggaacaaccaccaggtttcgaaaagtcggaaaagccaagtcaagtctggaaattgaaaaaaggcctcaaaaggcttgaaacaagcccctaaggcttagtacgagtgtnccaagaagttcctcctagaaaaggacttctccagaggaaaagcagatactactattcgcataaagagaaaatcacatgac

SEQ ID NO: 257753 - DNA, 274 bp, Glycine max
  unsure (1)..(274): unsure at all n locations
ctggatgccctgtggccatattgcatgacaccctcttaacaaaccatcgatcatactcccttataaataccaatttagatgcttcgcagtatgagaaacaaaaaaaattactcccccgaaagatctatttaatcagcatagtgtgactgctgaacctagtagtaatggatacactttgacaggatgaagnttgtggatactggacacacaatatcccaaatagccatacttacacaaagatgaagtcgtaattggaatagcatatgacagctgt

SEQ ID NO: 257754 - DNA, 428 bp, Glycine max
  unsure (1)..(428): unsure at all n locations
agcttctcaaggatgtgagcttagttatgatattttgtgtgtagctaagctctagcttctcaaagaagttntctcaaagaagcttctcaaggaagttttctcaagaaagcttctcaaggaagctacctagtctataaatagaagcatgtgtaacacttgttgtaactttgatgaatgaaagtcttatgagatacacttcaaagttccacttctttccctcttttattccttcaatttcgtgctccccccttctctctttcttttcctccattaaagcatcctctttaagcttcttatccaaggcaattcttggtggtgaagctccttcttccttggcttattccctaaaggatggtgcatctcctctcctcttctcctttgccttccgctgcatctcanatgtgaaaaatcaccattgaaagacctca

SEQ ID NO: 257755 - DNA, 343 bp, Glycine max
  unsure (1)..(343): unsure at all n locations
ctcagagacgacccgcgagcaagcaagcnnataanatatcgagaagnncgaaanagaataaaggaagctctcgagaatnncaaaggggcataaagggacacacacgggcccgactcacgcttataatatatcgagacgcttaaaattaaacatcggaaactctctagaaattcaaaaggtcacaacttttcacacggatggccgattcaggcttacaacatatcgagaggctcaaaattaaacaccggaaactctcgggaaattcaaatagtcataacttttcacacggaggcccgaaacgggcgcatnaaatgtcgagaagcgcgaaattgaacaacggaag

SEQ ID NO: 257756 - DNA, 401 bp, Glycine max
agcttgtagcaaattcgaacgagaataacatttcactcggtagtccgattgagtcccgtaatatatcgagatgctcgaaatttaaaaccgaagctcgtaccaaattcgaacgacattaacatttcactcggaagtccgatagagtcccgttatatatcgagacgatcgatatttaaaaccgaagctcgtagcaaattcgaacgacaataacatttcactcggaagtccgattgagtcccgtaatatatcgagacgctcgaaatttaaaaccgaagccagtagcaaattcgaacgacaataacaattcactcagaagtccgaatgagtcccgtaatatatcgagacgcttcgaaattaaaaccgaagctcgtagaaattcgaacacaaaacatttactcgga

SEQ ID NO: 257757 - DNA, 277 bp, Glycine max
  unsure (1)..(277): unsure at all n locations
ttggtntaaatatctagagtctcgatatatttccggactctatcggacttccgagtgaaaagttattgtcgttagaattagctgcgagcttcggttttaaatttcgagcgtctcgatatattacgggactcaatcggacttccgagtgaaatgttattgtcgttcgaatttgctacgagcttcggttttaaatttcgagcgtctcgatatgttacgggactcaatcggacttccgagtgaaatgttattgtcgttagcatttgctgcgagcttcggt

SEQ ID NO: 257758 - DNA, 452 bp, Glycine max
agcttgccgcccagctcacccaagtgagcatggttgctttctccaaaagcaacaaccttctggaagaatcatctatagggcccaagtgggcctggttgctatttacacccccctttttactaaacgcaccctcattttctatttttttgtaattctttttccgtaacgttacgaaactttacgaatttcgtaacgatgcttattttccttccgcaaaggtatgaatccttacggattatgtatttactcttttttggctttcaaagaagttacggaaactcacggattgcgcaaaaacacctcttttcgatttccgccacattatggaatttcacggattacgcaagcctgcttcctttcgaattctgagacgtctcgggactgcatttatagcatgtcatcaagtaataactctccgacgaaattagggtatgacacacaacaataataat

SEQ ID NO: 257759 - DNA, 416 bp, Glycine max
  unsure (1)..(416): unsure at all n locations
ctattacggacctatgaaactcagcttgaggagtatggtgtatccatcatatgtggtactaggtggtggtcgggcaatggtgcacaacaagttttccgcatttacaatgcgtgcataaacccaccatcccctgttgcccacctncaactgagctcacgtactcccacgtagcccatatcctcgtttctcttaacaccgggtccccatcaatccttccaagcttccacaacatccaagcaaaacaacattcaaacagcacaagctatcacagccaagcaaaacagagcaaaggcagaaaactctgctcaaacaccaaccaaaatcacagcttntctaacttaaagaccccagtaacaattctttgatccaattcgtaaccgttgatcgactcaaaatttactggaggctatatacat

SEQ ID NO: 257760 - DNA, 352 bp, Glycine max
  unsure (1)..(352): unsure at all n locations
gaccgcgagcggggactatcgatcttncttcccgcgacgcttctctttatatctgcctaagagggcttatagcctaacccatacttcccacgatttcctttggcatttatcaggttaatcatgccgccgttgtctttgcctaaacccattccgggttcgtaaccgtttctcaacataactcgggccatcattactgctgcatcggacaagcaagcttgcccagagaaagagtccacggaggaaatgcttaccacctcaaaagactggaaagcggtttctaatgactcctctgcggcttccacataaagcatagaggatgggcagctcaccaagatgtctttctcgcctgata

SEQ ID NO: 257761 - DNA, 304 bp, Glycine max
cttggattatagggttgaaccaagctcatgcttttacaaaaaggttcatcaaatcaagttgaaatatggaagtaaccgtcttgcaaaattggggcaaaagaccaatcgagtcacatcactgcttcgtctactgccaaacatatttaagattattgatgtccttgttactttcaagttcaccttgacaaagatgtcatggaccatgttgaaaatctaaattgattcaacctcatatcttgcgtaaaaattcgccatacttcaactgtacatcattcgcatgcatccatgcgtttcaataggtgca

SEQ ID NO: 257762 - DNA, 355 bp, Glycine max
  unsure (1)..(355): unsure at all n locations
tgtcattcaagcatttcaccgagctcttggtgggcgcatgntttggcatgaatagcaagagagtgggggcaatgtggcatgccccattactccaaaatgcaacatatgcctaaagccatcccttacaaccccttaatttagcgaaaacaagaatggattcacatgtgaattgcttcacgaatttcgcaaaagataagcaactaaagcaccaaaacacatcaatggagagccaaattaacaagggaaagtgcacttacttgtatggagtgaaataaaatgtgaaaagggaagcaaaaactcaacaatggaagcttggaggctgctgtcttcgtaantcccgtgagcttggtgtttt

SEQ ID NO: 257763 - DNA, 453 bp, Glycine max
agcttgcacatgacttccatttatgattcttgttcagagtgttaaaggtagcacatggtagcttcaaaagaagctacttaattggctaaaattaaagctttgtatgcttcaataacttgcacccgtgaagcttgcacatgcatgaatagtataaaagcaaagttttgtgtaagaaggatgcacaaatgctagtcacacttcatatctcgtgaagcatgcttatagggtctcttacatgaaatgatgtatcatacccatgaaatgttgccagaaataaagctagtcaataataacttatcttgccagaaatagagctagtcaataataactcgtatcacggaccactaaaacaattataagttgtgtatattggactccaggtggggtgcatgaatattatacaagttaagatatcagaaggtaatactatgggcaaaaaccaatacttgtgtc

SEQ ID NO: 257764 - DNA, 454 bp, Glycine max
  unsure (1)..(454): unsure at all n locations
agnagcagntacagaagtcaatatttctgtcnatgactatgtatatttctaccttacctattttccattatggccttggtttgtgtgtctagattgacaccagagtcctaaatagacaatatctttcattgcaagcttagcaacatgcccaaaacctcaattttcccgaaaccaagtgtcatgatttctatattaccatatttactagctgttaatgttgcatcatnagtttgctatgtcatctacctttggtctcatctctttaccttacagattagtcaattctatcattaccctttgtcaatatacagaattagcaacatgcaaacatatctaatccaggaaattccaccactaatagtcagcctataattcataaccaatgaaatgcctcatatccgaattattccatcttctaattgtattgtagcttctgtagatntaaaataagcgt

SEQ ID NO: 257765 - DNA, 422 bp, Glycine max
agcttctacttatgtggcaaggcgggctttctttattttttgtctccaatgcgagctttgaccactgttctttcttcccgcgatgcttcttttcatgtccgcctgagtgggcttatagcctaaaccatacttcccacgatttccttgggtatttatcaagctagttatgccgtcgctgtttttgcctaaacccatcccgggttcataaccgttccccaacataactcgggccatcattaccgctgcatcggacaaacaaggcttgccaaagagggagtccacggaggaaatgctgaccacctcaaaagactggaaagcagtttctaacgattcttctgcggcttccacataaagcatggaggatgggcagcttaccaagatatcttcctcgcctgacacgatgaccaagtgctccttcacta

SEQ ID NO: 257766 - DNA, 427 bp, Glycine max
  unsure (1)..(427): unsure at all n locations
tactcagcttttatccaggctcatcttggaggtgaagctccttattcttggcttattccttaacggatggtgcctcttctcacctctttatctttgacttccgctgcatctccatatggtggaaaatcaccattaatggaccccattgaagctcnaagatccagcctccatagaagccccacaagcaagtttctattactattggtgtcaacttttacttacttgcatttactgttgttaccatagaagtagtttatttatgttttaaaccatagtttatcaatgttggtccaacaatgccttacttctagataaaactctgtctaataagcaagtttcctgagttcgatactcggatcactccattttaattctatattcttgacgacccgatgcactttccagggtttcaatttccttgaatata

SEQ ID NO: 257767 - DNA, 410 bp, Glycine max
  unsure (1)..(410): unsure at all n locations
ttacggacctataacactcagcttagcgagacccactctacaccttcaatttgctctttttcctgagtttaattgaaatttatattaattccatgcggagagcctctactgagcaaagataaaactaaacaagaaaatatttacaatcctacaaaaagaaccataaattggagaaaatatatacattttggaaaatgtttctatacaaaagttaatcgtagatgatgactaacaagtagtaaacaagaacagtatgtaatactgactagtgaagtacataagtatgttgaaattcataccagtttgtctccaaaaccaggttttaaacttacaggcgctcaaaaatggctccacatcagctcgtcccattgacatttgtnaatttgacgccacatttagaagttaaaatt

SEQ ID NO: 257768 - DNA, 398 bp, Glycine max
agcttgaaagtaactaaaagcccgagtaaataggtttctcagctggccatgaataaaaaaggtgcacctgtcgcaagactctgtggtttatgctcctctgccgaccaccatacagacctttgcccttctatgcagcaatctggagcaactgaacagcttgaagcatatgctgcaaacatctacaatagacctccttaacctcagcaacacaatcagccacaacagaacaattatgacctctccagcatcatgtacaatcccgggtggaggaatcatcccaaacttagatggtcgagtcctccacaacagtagcaacaataatagcgctattttcagaatgctgttagcccaagcagaccatacgtgtcttcaccaatgcagtaacaacatcaacagca

SEQ ID NO: 257769 - DNA, 445 bp, Glycine max
  unsure (1)..(445): unsure at all n locations
agcttccgggtagggcacaaattattcattctttttggcaaacnanaacatgaaagatttagacactctgtggacaagaagataaaattaataaatcccgagcttttgagttgttatagaagtacttaactgtataaaaacttattttaatttataaaaaaactgaatttattttttcatctttgggataagtttgacaatatcttaattgtacataaaaaatatatcttctatcacatgaaattgaattgaaactgagaacatttgtgatcttttgtgggtgtgttattgtgaatttttaagattgtggagagtgtgggtgaaggagtaaatgacatgaaagaaggggacttggtggtgccaatcttcaatggggaatgtgggggatggtaatattgcaagtgtgagaaaaccaacatgtgtgagagaattggggtggatctat

SEQ ID NO: 257770 - DNA, 153 bp, Glycine max
  unsure (1)..(153): unsure at all n locations
aaacagctcancaccatccagccgggggcgcaacaactggggaagaacactaccaacctaggaagggggtcgatggtttgacctcacgacctcagcaaaggcgataatggtagtgccgcctaatgacactccattctctaaacactataagca

SEQ ID NO: 257771 - DNA, 364 bp, Glycine max
  unsure (1)..(364): unsure at all n locations
agctntgttcgcaaaaatcactgtaaatttcttgtttatgtccaacgccttaaataaccaccttccaagtaaaaagaatcgtttgatttgcctcttttgaaagaactacgtaggtctgatttcctcttcgatgaagggtacgtaagagcaagagccccacttttgtcgacctcaaaaataaaaaagaaataaaagtttagatacatgatttcacacaattctaatctaaggcttgtgtcctttgggacaaacgtgagaggtgctaataccttcctcaaacgtaaagataactcccgaatctgaaatattcttcatgaccggtttccttaggtttttctaacattttcctttcaataaacattgg

SEQ ID NO: 257772 - DNA, 234 bp, Glycine max
gagagagacctatcacgagcccattacatggtctgtaaagaggagttaactgcttgctcaaagtccaagagaagctagtctcagcgtttatgcgagacagagaccaacatgttagccaccgtctgcgagtaccaagaagaattaaatctagcctcggtccacgagcacaaagtggcggacgagtatgcccgagtgtacgtggaaaaagaggctagacgaagggtgatcgactcg

SEQ ID NO: 257773 - DNA, 389 bp, Glycine max
  unsure (1)..(389): unsure at all n locations
agctagntcttgtacaaatagaggattctttgacttgggtgagtatattaatgacaaggtgcaacggtttgtagaatggtttaaatttgaatttgatctctcaattttcaaattccctttgaatcacaagccaactcaaaatggattgcaattctcaagatggttgatgggatgtggatacaaaaataaaccttctagggatgaagatgaatgatattcgtatacttgggaataaatttaacatggttcattcaaattgtacttctatgagtccactagatcattttctactgacaaaagaactcatttgtttgttgcaggttaactcttaatgggtggcttcttaagacatctctgaccattgtccaattntgttgaagcaagatatg

SEQ ID NO: 257774 - DNA, 136 bp, Glycine max
tttttataacagattctctttgttaaccccctgttaaaattctacttgaacgatctgctgctattaataatttctcttaacagaaaatatttgtggtaaatctcttactccatagagaagagttatgtacctaccg

SEQ ID NO: 257775 - DNA, 380 bp, Glycine max
  unsure (1)..(380): unsure at all n locations
gctcactttgagagactggccctattattacaattgattagcagctggaacttcagttctacattctatttgtggcttagctataatctgcatagctaaaccatgaatttcgtggngagtatgttgctcgctggcttgctacatatgagttctatccgtcatgaaacaaccatcatccatgtgctctgggaaagcatccctcctctcctttttcggatctggctatgtcgtactattgaggccggtaccacctttggctgcatatacactgtgctcgctgatacctaaattctttgactgaccaatatacttcacctgttggtcgatgccttttcttactgttatttgtccctactctgaatatcggttcttctcacctt

SEQ ID NO: 257776 - DNA, 232 bp, Glycine max
cactttcgaaaaggggaaactatgttgtattttataattaggctgatagctcatgaattttttccccgaaagaatgtatcctatttatcacctgatataacggataaatacggttatccggaaggattatacggtataaattgatgtgctaacccgatataacctatatgtcctgataatgcgtaagtgggttcatacaatggctgttttgataattgtgaaccttttaaaa

SEQ ID NO: 257777 - DNA, 149 bp, Glycine max
taaatgcttcaaggaggtaaccctgatggacaagtgaaactttccgcacactccgaagcgagagaacaggaacacttctcccgaccagacagactttctcagtctcaacataatctgcgatttgacgcctgctctacgactagacttga

SEQ ID NO: 257778 - DNA, 77 bp, Glycine max
tgagttgacacatatgcttcaatactgtgtatgcgagctctttgctaacacatgtggtagccttatcgctgcaactg

SEQ ID NO: 257779 - DNA, 151 bp, Glycine max
ctttctccaagcaaatgtgttgaatcacacaatctggctgattaaccatccatgaactcacgtacactgactgttactatagtagaattgacttattactactataattctatactcctaaaatactttatccttctatctcagacttata

SEQ ID NO: 257780 - DNA, 216 bp, Glycine max
tgagtaccagccctaggctgatttttgaaggaagttggttcacattgtatctcctagaaacggcctgggaatatgtttcccttggcaggatcccgtcctttgggcccagacaaaacgtctgcataaatgagtcttctgcattcaccgcggtgtagagcgtcctaaggcgcttagcagtcatgcgagagttcccgcctagggtgtctttggcgaagg

SEQ ID NO: 257781 - DNA, 82 bp, Glycine max
ctgactaacggtactgcagttaactcaatagacggattttaatttttgacatttatttttctcacttacttagatttgtatg

SEQ ID NO: 257782 - DNA, 129 bp, Glycine max
catcataagctgccctgacgcttggctaactcctcgatcactcacttcttaatgaatcctttcgtttcacttctaaaactgggcatcgcgatttttgaaactcccagcccttctccccaggtgtgaata

SEQ ID NO: 257783 - DNA, 190 bp, Glycine max
  unsure (1)..(190): unsure at all n locations
ggaacaggcagaccttgtcccctgaaggaggccagaacgaagcaccaacgaacgagacaggaaagaaaaaggccagagaagaaganaggccacaccacacgcccaaacgccgaccgaccgaccgaccgaccaccccccaacccgaccaaacaaacccccacacccaaccccccacaaccaaaaacccaca

SEQ ID NO: 257784 - DNA, 101 bp, Glycine max
gcagaggcagatttttttttaatccttgaccacaagttagctagaggatttcgaacctatagaaaatcgttcaagaaggcgctgctcttcccgcataacaa

SEQ ID NO: 257785 - DNA, 202 bp, Glycine max
tgtactgaccctgctgactaattctgcgaagtggttgctgtacctcactgctctcgactggatgcagcgacaggcctacttggacttacatacctactcccaacaccacacattgcttcacacatcactgagagataccactaatgtacctcacacaaacactgtctctcaatggtgcagcactttctccatcaccaacact

SEQ ID NO: 257786 - DNA, 225 bp, Glycine max
cctgttgcatgagctctcgtactcggaagggtgcttagacctctggcaggtataaccgtttcatcacgagtcgccagcaaaagtagtcggctagctcactaatgagcccgagaaaccagctggcttactagctggactttggcggggtcctcgtttaccacactaaagaagaattcctctcgattttttttttcccttttgggctggacctctctcaaattttaa

SEQ ID NO: 257787 - DNA, 180 bp, Glycine max
ataatgatacactcaactatgtaaagtgaacattactaagtcattatgcaatgaatcattctgaaagctgatttaaaagaccataataaacttaataaagaaattacccgctcactgagtaatgacacaactaagctcatgaatgactgacaattcaaaatctccttttttttaatacca

SEQ ID NO: 257788 - DNA, 146 bp, Glycine max
atactgttcttctgcaactttagaatgttctgtctcattcctgcaagttggctggaattaatgtccccttctggaaatccaactttctatcctctctgttatgtgctgcatgtttctgaaaatatgatttaaaaaaaaaaaaaaag

SEQ ID NO: 257789 - DNA, 64 bp, Glycine max
gggaggaaaaaccccccccccaacgaagaagaagggaaaaagagaaaaagcacgaaaagaaaaa

SEQ ID NO: 257790 - DNA, 212 bp, Glycine max
caaaagagagaattcatcagaaagggagagaatcatccaatggaaccaaaaaaaaaatccatcagatggaaaaaaagagaaaagatgactctgcagatcaaaacaaaatgtcaggatttgaccacatttacatcgatgcccatgcaaaaaaagaactactaagtgctctcttatccaccaaacttcgtggatgtgctgcttccaacaaaaaa

SEQ ID NO: 257791 - DNA, 124 bp, Glycine max
caaactcttccattggatcgctgcaatcatgttaaaaagcttcacttcctgtcctgaaatcacagcccctctgaaacacatgctaactttgaactaatgagaatctaaaactcctatttgtcta

SEQ ID NO: 257792 - DNA, 187 bp, Glycine max
gctttcttatggaatgccaaacccatgtcgctttctgagctgttgtaagttggatgatttcgaccgcatctcacgggacctgactctcattgcttcacctttaagtgacttccttcgctaaatttcagacattactgagcacaactttgcactgctcggcccagagctcagctacctgttctacggt

SEQ ID NO: 257793 - DNA, 78 bp, Glycine max
  unsure (1)..(78): unsure at all n locations
acaacttttcaacctacatatcatttacgaaatccccatcgaacaaanatgacgtctctatccttacttgcttttggc

SEQ ID NO: 257794 - DNA, 289 bp, Glycine max
ttttttcccaactgtatgcgaactattattcatgcaatggagtactcaaaggtagcaaatatatgacggatcattagttaactgatacaataaaagtaaactactgtgataatatttggacaattaatataacaacaggaacaatgatttcttcaacgtatactatttacccggttgagttcgtctgctttataaaattggatccgttcttggtcttccaacttaaaccccctgctaaataatattttaatgaaaatttagtaattattcaattcattcactccgcttt

SEQ ID NO: 257795 - DNA, 102 bp, Glycine max
aatttcaatgttttaatttctaagtatacttctatggctttactaacttgaagcataaacaggctgattgctttaaattctttcatcttcttagacacaact

SEQ ID NO: 257796 - DNA, 198 bp, Glycine max
ctgactcggctaacggaactttgtaagggccccaagaacttttatacacatttgcggcttcaattatgagtctctttctcatacatcacaaagaaagtagatggacttgatagactctaatctacatcgatgcataggtgcccaggtagagagtctgcaggccttgacgtcatctaagaagcgctgtctattgactat

SEQ ID NO: 257797 - DNA, 254 bp, Glycine max
acccggcacaactaggagactttgttgaagtctttttttttttttccaagtagagcccttacatttttatcttgtgggcgttgagaagacacattagccacctcaggaggtatctctcctgaggctctaactactagtcaaatggtacttgaagccagttaacctagaattacctgcagtggcattttgcataatgatcttttcctgttgtcatgagggcctaatatttactgtttgctacattgtcggggtat

SEQ ID NO: 257798 - DNA, 173 bp, Glycine max
cactagcttgagaagtgttaacttcttcatctcaatcagaacattatagatcctagtgatttattgcggtagcggaaacataatgcatatcttggatttaggctgttgatacaatttctttttaaaaatatatcaatggagctaatgagatttttacagaaatactatttgct

SEQ ID NO: 257799 - DNA, 88 bp, Glycine max
  unsure (1)..(88): unsure at all n locations
aaaagccgagggagaacaaccaccgaacgaacaagaagaacgacgnaccagaacaaacccacagaaacacgcgacaaagaaaaacaac

SEQ ID NO: 257800 - DNA, 289 bp, Glycine max
ttttgccattttcgtagtcaattcgaaagttgagtacctttaccagccttgtgcgtgtttctacgagaactccagtctagcagcaggaccctcgccaaattgcttgttgccttatatatgcctataatctgactgtgctcactactatattttgataagatgctgttctcaacggcaaaatccttattctgtttttacactatgttagaacctacaccgagacttgcacaatacagtcagacgctaccttgtaaaacctaggttgtacctaaacgccctatgtaactct

SEQ ID NO: 257801 - DNA, 157 bp, Glycine max
aagcaccacagagcagcaaccattaagaaacctgtcaccacccacccactgagcacattaatacagtacaccacaagaattttataagtaaacagggtgacgacttattatttcgcatcagttatgcttttgaaatgatgattgctggtagaaagat

SEQ ID NO: 257802 - DNA, 195 bp, Glycine max
taccaactgaccatacgcttttaataatgacgtgaatctttaactttcaactttgtctggatcatcacattgtatcatccaaagaaactttgtactgttgaaaatctggcatatttgaaactttatctactgtagcttttattgattgattgctatctgactgtctgactaatgctgatattacttgaccttttt

SEQ ID NO: 257803 - DNA, 290 bp, Glycine max
  unsure (1)..(290): unsure at all n locations
tacactggtcacttgctgacctgctgccaagaanggatcccccatagcttacagacagagtccccacccactgacctacaaacacctaagatgccttaactcactcgagctcaacacagtgcaccctcaaccctcagaggaactgccctttacctctcgccaaaaaaatcatggctcttcttgttactcttgtgcacaagtccactacagccctaactactcttgttatcttttaaactttttttttttttttctcctcattttcatttttaataaccgtaatacaacgc

SEQ ID NO: 257804 - DNA, 123 bp, Glycine max
ctaacacaggctaatacccacaggtactataagaacttaacaatgcctactgcagcgtagtaaaatttaattagtaacaatcgtataaacctacgactattgtttatagataccctaccactg

SEQ ID NO: 257805 - DNA, 266 bp, Glycine max
gagctcgtccaatcgacgacatacattcactcggagtcgatgagcccgtattatcagacgacgaattaaaccgagctgacaatcgacacatacttcctcgagtcgatgagccgaatataacgtaattaaccaccgtcaatcacacatacatcctcgaagcatgatcgtttatagactgaataaacgactgacaatcacacatacttctcgagcatgagcgatttcaacctaattaacgactggaatttcaaacttacgagcgtggc

SEQ ID NO: 257806 - DNA, 95 bp, Glycine max
gggagacaagcaccaactaacacgacagcagggtagaccaagccatactcagctgacgcaaggtacacatgccaacccagggcgagaaaagagca

SEQ ID NO: 257807 - DNA, 285 bp, Glycine max
actttttctacactgacctaagagtgagtctatgcctatgttggccaccactgaatgcgcttcaaacaccatagaactcttgggctgagcgcttggcaaacatataccgacttatctctgtgctgcactctaattctgcccataaattgcaccagtgggggagggaaccggcaccgcttaacagtctgtttcaagggctgcaacagttgccactaacataccaacccactcttgttggtgccccttacttcgagagacacaacgagcgactccctacccacaggg

SEQ ID NO: 257808 - DNA, 132 bp, Glycine max
tctcaacaatagcagctctcacctattacaacaatgtccttatgctcattgcaatacactaccaacctatgagcatacggaggctctgtgggaaaattaaggacaccactgactggcgtctcatctactggt

SEQ ID NO: 257809 - DNA, 193 bp, Glycine max
  unsure (1)..(193): unsure at all n locations
caatgctgtactgtaccactgctgataattcgtcctgtcagaccgggnatcncctgcgacactcaacttgccttttgcaaattgacacgacattaacaatctgaacattacataactctaactcacaccatagccacaaacatttgacttcacactgtcatccggtgagaaatcaactaatgtgatctccaca

SEQ ID NO: 257810 - DNA, 470 bp, Glycine max
agcttctttgaaaagctctcttaagaagctatagcttatctactcacacccctctaataactaataccttgagaaacttccttgagaatattcctagagaagctaaagcttagctacacacacctctctaataactaagctcaccttcttgagatgaaaagctagagcttagctacacaccccctataataactaagctcatcctcatgccaaactacatgaaaatataaaaaaaaattccctactacaaagactactcaaaatgccctgaaatacaaggctaaaaccttatactactagaatggccaaaattcaaggcccaaaagaatgataaacctatcttaatatttaaaaagaagagtcgacccaaccttggtccatgggctcagaaatctaccctgagggtcatgagaacacccaggccttctttagcagctcctacccaatcctcttggagtcttttatccaat

SEQ ID NO: 257811 - DNA, 465 bp, Glycine max
  unsure (1)..(465): unsure at all n locations
agcttaagatacanaagaaaacttgaccattgcgaaacttttggcgaacacctggtgtgcagtgatgtgggtttctaaacagatctcaaattttcacctcaaatatgcactgaactcggtatcactcaaaccacgtccaaagcctgcaatttgagaggcattgggacaccaaaacggcattctctctgagacccagattcccaaataagctcaaaacccagaaaggttgaagctggggatgggagctgctgacacaacaggatcaagttgttgacccttttgagcaaagctagggtttaagcttagttgcactgtgtcagagttgagggtttggaaatgaggctgaaagagtctccaaatgttgaaattgcattctgcattatggagaaggaggttgctctcagcactgcaacctcgcttacacgcattcctcagctgaattcatgcttcttttattatctttcc

SEQ ID NO: 257812 - DNA, 479 bp, Glycine max
  unsure (1)..(479): unsure at all n locations
taagcttaatggcccaagggttccttcttttatagagcggatctcgttaatcaacggnggatcagatcgacacgtgtatggaccatcctcagcctccatcacggactcgtctttctctaatcgccgactgggttctgcacatgcaaccatgcccgttggattggatccatcctatctacacttatcggttcagtttgtcttctgtttatattctctcaacaagaaatgaaaataaattattcctttaatgatgatgaatcaatgtatctaaattaaattaataccttaattacatgcgacacaaatagtgtgtgtacagacataaatagaggcgaagttgagagattgtcttgatttgattttaaaaatatttatgtctgatgtctattattcaaatgtcaatctaattattaattctcctgatattaaagcatactccttaattgcatcacgcatgcgacaccaatgctcgtggggta

SEQ ID NO: 257813 - DNA, 462 bp, Glycine max
  unsure (1)..(462): unsure at all n locations
agcttaaagtatgcccgagtcattcatccttatgagattttgttgaagcattggcgaccagaattgccattccttggattatagggttgaaccaagctcatgcttttacaaaaaggttcatcaagtcaagttgaaatatggaagtaaccgtcttgcaaaattggggcaaaagatgaatcgagtcacatcactgcttcatatactgccaaacatatttaggattgttgatgtccttgttacttccagtttcactttggcaaagatgtcatggaccatgttgaaaatctaaattgattcaaccccatatcctgcgtaaaaattcgcaatcttcaactgtacatcattcgcatacatncatgcttttcattgagtgcattgctcattgcattctttccttgaanaataaaatacaataaaataagatgaacttaatcattgttataaaacaaatacaaaacatgc

SEQ ID NO: 257814 - DNA, 479 bp, Glycine max
cagcttcccaacatccaagcaaaacaacattcaaacagcacaagctatcacattctagcaaaacagggcaaaggcagaaaactctgctcaacacaccaaccaaaatcacagtttttctcacttaaaggccccagtaacaattccttcgatccaattcgttaaccggtggatcgactccaaaattttactggaagtctatagtacataagcctacattgtgaccgctgggatctactagcaaacatccagaactcattctgtactactcttcccacagccaaccacacacaagcatttttctgcacaagccaaaatcctgctgcacctattttgatagcaaaattctgcataagagcagatttcgaaaatcacactttccctcatccaatcttgcccaaatcaattcctacaagtcccaaatcatgtatcaatcatgtctaacccaaagtcaagcttctagacacaacaacacagaatct

SEQ ID NO: 257815 - DNA, 338 bp, Glycine max
ccgaagagagtgggatgatctatgggacgtcaatattcccatccgacgatgccttgtaatgagaaaccaacatcgcctgcttgtgaataacacgaccaacacaagttgtgatgagctttatagggcagcgatagtgagctcatcgtttcaagaggtgataggaaacattacgggtcataggcatgatctgtaacgaccagcttaaggcttgccttaggtcgaaaagaaacttgtcccacctgctcaagcgagactgaatggaatatatgggtcatcatccgttgagcgccaataccagctaaatctagcggtgactcctatcaacagctacatgatga

SEQ ID NO: 257816 - DNA, 474 bp, Glycine max
tactaagcttccttggccctcgcaaatcctaattatccttcattttttctatctactcatgatggtccctttcctcttgcggagcttaagctcattgttactgccccacagagcccctcggaatttgttctggccatgttcttccctacgggcccttttggtctcttgttccaaagccttggtggtggctatatttacgtctctcagtttggcattctcctttcggatccttagtagctgtgatttgaactattctttggctgtttgggctttcttgagttcttccctaatggcctgaacctcttctccctcctccgaagctataacttccacccccttagtggttctcaaattcaggagccaatccagaccttgcgtgtaggctgtcaaccacctatggtagccgccgatgggcccgttgctactgcctctgagatccttgtacttcttttgaccatctcccatgccttgtgg

SEQ ID NO: 257817 - DNA, 449 bp, Glycine max
  unsure (1)..(449): unsure at all n locations
cctgaggcactgcaaggcttttggagtagaaacatgggaccaactcattttatttctaaaatttggatctagtcaaggactgagagaccatacaagtttcctagcgatttctaattatgtgggccattaagtctatcatatgctgacaatagccgagaagcccatgaatttcttcgggggcggagtaagtgtctgccatcgccttggccttggctaacaatcggngaagttcctgactcccgttcaaggtaagagcaaaccgatccatccacatggttgcctcttggtgtaaagagtcgatcacccttcctctagcctctttttccgcgtatacttgggcatactcgtacgcgatcctatgctcgtgggccgtggctagacctaactcttcttggtacttggcgatgatagctagcatgttggtcttcgtctcgcatagacgctgagac

SEQ ID NO: 257818 - DNA, 429 bp, Glycine max
  unsure (1)..(429): unsure at all n locations
gtccgtagatccctcatgtgagactaggcttaaactatatatcattattgtaacaacataattaaaaccaggacttaacccgcagatccctcatgtaaggctaagtttcaatcctgcttcaatcaagttctaaggcaacaatacattttccaatgcttaagtcacctaactatgcacacaaatggttgatcagaccaaaagcatacaaacattaagcattgaaggaagcattgtacacaaaaaacataatcaattagatattaggtatttacatcagctattcattagaaatccccaacttgggtgtttagccagccattacaaagaaaccctaacaataaatgagattataagtcgagaatgatagttccttacacaagaaggnggaattcttcttcctcttcttagcatatcacaatcactctttac

SEQ ID NO: 257819 - DNA, 214 bp, Glycine max
gctcactacaagccttaagtgaagaaccatgatatcaccatatccttaaggaattttggagctttggaactgttttgggaataagtgcggcgggtttttggttcattggacaccttgcttgttggatacgctatatgaagtatctccgcccatacttgacgcacattgcatattgcctaaacgctgcacttgctgaacgaaacgctgattcttt

SEQ ID NO: 257820 - DNA, 459 bp, Glycine max
  unsure (1)..(459): unsure at all n locations
agcttgcacaacaagtaacaaatctatnntttataaaaagaagnaactaactaactaacttccactaatatatagagtgactactcagaaagaagggatgggcattgattaagcccatcaaatctacctaatcaaactaattacacaaaacaaagcccaaaatcgcatcccaattatttaagtgtagaggttttgaattccaatcccaatttgacccttgaaattgcagaattggcccaagcttatttttgacaaaatttaagatttttttcttagctntctagggactactcacatgctccatttggagttctttagtgacctacaggccctacacaagacagataggtcaagtaagcataaaaatacgaaaataagccacaattattaattaagctcaatcatttggctaagaccaaaactaaattaaagtgagagaataagggtcaaagagatgtc

SEQ ID NO: 257821 - DNA, 405 bp, Glycine max
  unsure (1)..(405): unsure at all n locations
agcttaatatatcgagacgatctaatgtgatctattgccgctctcgngaaattaaaaaggtcataagctgtaactcggatgtacgattcacgagcttgacatatcgagacgcacgaaattgagcaatgggagctctagagaaattctaatgggcataacttttcacacggaggctctattcaggcgcttaagatatacagacgctcgaaattgttcaacggaagctctggagatattcaaagggtcataactgtgcactcagatgtccgattaaggcgtatcacatagacagacgcttgtatttgtttataggcagctatagagaaatagacacgagcgtatcttgttgcgcaggggtcctattcacgcgcgaaagatagcgcgacggtcgcagtgcacgacgga

SEQ ID NO: 257822 - DNA, 455 bp, Glycine max
  unsure (1)..(455): unsure at all n locations
agcttcanatttgtatatgcgtataacaggttttatatactacattgttacttccttgaacagaaaagatgaaatttaggtatcacaattaagagaaaaataatccaataagagacagataatgagagtttttatgcatgcaagagtgcaagacagcatatgcactgtaatttggcggattgatcagagctcgtactctttgaacttcattaataaagtattattttcctttagaaaaaataacaaaaataatctaaaatgactctaaactattaagaacaacataaaaaaaacactagaatcttatcgtacattctaacatattacttaaaaatgatcaaataagtactaagtttgagagaattaaagtcttttanaaaatgatgtattttcacactatcatcaataatcaatattaacatgataactatttctttgtattngttacctcaata

SEQ ID NO: 257823 - DNA, 456 bp, Glycine max
  unsure (1)..(456): unsure at all n locations
agcttgagagggttatggaacgaactttataatgtcttatccaaaataaactgtatgtagatagctgaagtcttctttttggctcaaaacgatcaattgctgtgataagtcccttaactcctgcctgacaaagatcttgaaacctcgggccacttgcaaaatcttgaaaatatttgttgatcacgaacaatacaagccggagattgtgctgcaaacgatatcaccatgatttcttaatctcagtataactattactcattccaaagaatagcaacaaacacagcaacaattaatccattcatatccaaagagacagagaaagagtagtaaaaggaatggagatgtaacatatcactgatcttcgaaggcttcttataagcaaatctaanataagagntgaacattccatgatacctttatgagtttggttctcgcagctcgaccaacctctatagc

SEQ ID NO: 257824 - DNA, 439 bp, Glycine max
agctttctcggagccatttctgcgtatgttttatttggaaaggtaggtttagtgggacattactcttaaagcaaaaatggcatgtaacctcctcccatcaatacaaacatcaatgtaaatttagagcaagcttatgcgcatattttcctacgaacgttcacttgcacaagacatcctattaactaagaaaaatgcacccatatacaatcaaggtagccttcttacctagattatttacatgtacttccaaagtgtatttgttatttacatcatacacgccatcttgtcaaaatttacacacatgcatactcaaagcatttcggggtaccaaaaattgcacatgcgctcatcttggtatttctaatatctatacatatacaaacttcatgatgaatcttgactatctacacaatacagtgctacatttcatgcctttttc

SEQ ID NO: 257825 - DNA, 473 bp, Glycine max
  unsure (1)..(473): unsure at all n locations
attataaactaattttaatgtttaacagtaccattctctactccacanaagaaactttatttctatattatgtttaaacaaactttaatatttttttaaaaataattaattttaactttctaatataaattaattaaatttttaaatataagtgaattaaataaattatttaacattaatagcttttaaactttaattatataaataaaaaaatttacatcaacgtgctaagtgtgataactagcaaacgatacaggctaagttgggtcaataatttaccagcccaaaacatacttgcttgttactcttaggtgttaagtgtgtgtgctattttgattttactcttgagttntgttaagagatattctgtgggtgcaatttaaataacctatttagagtttttttttatcttgtggtaattgatctcttaacatgtcatattataattaaacaattcttatatagtttacttt

SEQ ID NO: 257826 - DNA, 406 bp, Glycine max
atcataccctgcataaaacctaggacgcctatcatatccataaaccctcacatacatgtccaatcttcacttcacctccactgcacaaatttctaaagcatccattgcctaagaacacccgggcaactagttcacataatccgtacgcgaataatcatccatgatggtgataaatatcattccttgtcgaaagaactaacatccaacggtccacaaatatcagtatgcacaatttcaagaagctgagtgcttcttggagcccctttcgttgtatgctatgctcgttatcccttaatacaacccacacaaatatttataaccgtcaaatctagataaagaataaatccattctctactaatcctttcatcctttctctagaaacgagacctaaacgttcataccaca

SEQ ID NO: 257827 - DNA, 414 bp, Glycine max
ctggacatgatatatgtcagggttcggtttggtttttgcataaaggggatgtcccacattattttcatgatacaaaagcaacaattatgatttggaaattgtgtgcaaaactagtcatgcatgcacctatgcggacactcaagtgtcaaaaaatttttggtcgtgtgatgctaaggctcataatttattttctctattctagtcaacccagtgcttccaaaatatgttctcttatcaatatgtgcattcatccgagtctttcttgggtgtttggaaaaactttcacagcatttacccttcaactgtgaacacacatttttcaaaactcagtttgatcagtgaattctttcaaagacaagttggaaattatctcttattacgagcatgttgtctctgactatacaacttcttatt

SEQ ID NO: 257828 - DNA, 460 bp, Glycine max
  unsure (1)..(460): unsure at all n locations
agctctgccatcatcacccttatgagtacccttacnaatcatttatatacgagatgaagttaagaaaagatataatcagtgttgacaaaatgtggaagctacatgaatatatgatgattgatatagctataagaacttactatttcaagattgatcttatggggaaaagggtcagctagaaatgcctcgatcacacgaacaatggggtccttcggcgctggccttacatggtcccaccaaccactggcactggcagaagaagtggataaaaatcttctggcaattcttccattgatgcacctccacataatttcagttacactctccacttatatacccacgaaaatggtgcttaattcgatttattggaacaagacaattgctcttgaacgttatatatatatgaagaagatggtgatattggggagtgaactttttccatgccgtggatgtggcattg

SEQ ID NO: 257829 - DNA, 475 bp, Glycine max
  unsure (1)..(475): unsure at all n locations
nttgtcactccacccatatctagccttgacattaaccagatcttacaccatcgacaacagcgtcaagttattcttgcaccccgtatacaaagacttctttgaatcactttgcaatccttcatacataagggcatgtgctcgctgaaaaaactcttgtccaaggtcacgaatcatatcctccaagcgatctcccatttctacctcaaatggttccgattgggacccactctgcatgtctgtcaattcaccatgccatatccacatcgtgtaattcttcttaatcccatcacacaatagatgctcccgtatgtcatccagtatttgtcgtcttccgttcaaacaattgatacaaggacaantaatatttccatcttcatccggttgacttatttctgaagcanattgtaagaactgctcgatgccttcctcatattntgggctgatgcgcctttcattcatccaacttcgatccatc

SEQ ID NO: 257830 - DNA, 425 bp, Glycine max
agcttgtactcgtgagacatgacaggctattatcactatatatgtgggtacgaaaaatccacccaatggatttacaaaaaactaagatcatacatctgacgcacataaggcatgctatcccccaacatatattgcattacgattccatcttgtggacattgagactatgaaaaccacaaaagccaaagcctattacggcatttcatcaaacatacaactcccacctgatctggcccaagaaatactgagtataaaacggaccttgctgaccaaagacggattacacagagatgatgctctctctattcttcgcacaggagaacaattgatgaaacacactgcgcacaaatccttagatgtccttatgagacactatactaactaatgaaaatctagcctgtcacttagagctaatagagatgcac

SEQ ID NO: 257831 - DNA, 108 bp, Glycine max
ttcttaacattgatacgatcggtgtatggagaggctcatatggcgggtaagctcgccatatttagggatcgacggcagctgtgctcagtgtctacgactgagtccgta

SEQ ID NO: 257832 - DNA, 488 bp, Glycine max
  unsure (1)..(488): unsure at all n locations
tacttaagcttgtggaagaaggtgtctctctccacactatctttaaaacttttattttctatgaaatgtatcgngtctaccaacttattttgaaaatattctgcatatccattattgaaaaactcaaattgttaaaatggatatgattgcagaaaattatatcaaaggcaaaaactatgagtctatgacaatcatcaaaacaagaaaggcaaatgtttagataaaatgagttacgtagaataataaagcaaactttcttgtttacaggtgatcatgaagcagacaaatccccatctatattataaatcaaggagcactcaccgctgttttctataagctctgatgtatttaatctacgagagggcatggaactcaatagtccgtggtaatctggaagcagagactagaanaanataagtaacatatagagatgagatataatttttttcacaagaataaaacataacagcaatcagtcaactaaaata

SEQ ID NO: 257833 - DNA, 473 bp, Glycine max
  unsure (1)..(473): unsure at all n locations
ggtgcgaatcattcctttttgttcgagcgagctccatgtgttttatanaantcattantcacggcaggggtgtttggttttgtctttatcgggtacccaaattgtcgtcgagcgagaagtgggttgtagctaattccgccacgcatacccaaaagaggtacgttgggatattcaccacaactcacaataatctctccaacgtcactatctgctaggtaccaaacgatgtcagatgggtcaagagtcatgattccgtgaggccaacaaagcttgtcatcattggtcttgaaggcacgggattgaggtaagtgggaggtaaaccacagattgagtaaaggtgcacaacaatatatggtttcacggccagactgtgtacggtcatggatagagtggtaggtattggcgatttgagtgggtaccgcgttctttgtatggaggatcttaatggcattgatatcgatgaagttgtcata

SEQ ID NO: 257834 - DNA, 461 bp, Glycine max
  unsure (1)..(461): unsure at all n locations
agcttgggacgttggaaatggtgttggaatatataaggagaaagaaaatggtgtttttttccaaggctacacaaatcacaaaggccgaaacactccattgcttcttctctcgggaaaggaagattgtctcacacgccagacatcaaatcaaagatcgcaacagtcagatcgtggacatcggtcctgtgaatctgcaaaccaaatttcgagaagatccaatggttaacaaaagtaggagggcactttgaacgagacagcttccttgagaagcttcattgagaggcttcctcgagaagcttcctcgtgaggcttctttgagaagctttcttgagaggcttctttgagaagctttcttgagaggcttctttgagaagttaatgctttaactaccaatatccttctaataactaaactcacctccttganaataaaacacggataanataacacaacaaatataa

SEQ ID NO: 257835 - DNA, 477 bp, Glycine max
  unsure (1)..(477): unsure at all n locations
tgtcaaagggttagtggtctcttctttaatagtacactataatactatatatntgaaatttcccttgaatatttttcttcttcataattaatacactactaatgagtttcttagccacaaatagtcatggtatggacatggggtgaatctatctagcaaccaaatgataacactgcagtaacaattgatgttaatccactgtgtttgaattgttggagtaaaagtaggataagttatcagaaatgcatgtagtaggcagtggaactagaatttatgatgctttcagtttggtatttgtacatgcgtagtagtataatactgcttttgatttgactgttgtttattgatcttactttgcatttgtttntaacttgctntcctctagtcagtactgacatcccatgactntaacatgtactatctatacaactagaatctcattttgataaagttctttagaataacggcttatattgg

SEQ ID NO: 257836 - DNA, 448 bp, Glycine max
  unsure (1)..(448): unsure at all n locations
agctntactacagtgaaaggatgttgtcgtaacctaccttatgacgggacgacaaaagataataaataaaagcacgttcgtcccctaaggagaaaatgagtgggagtcgccaccaatgtttattcaagaaaatgttagaaaaaaccaaaaagaggtctgcaaattttgaaaagaagggttcggcagttgtttatgcataggaaaggtattagcactccatgcgcccgtcacaagggacgatagcctttaatcgagtgtgcaaaatgtgacttcaaaattatttattttccttcttttatttatttattattatttttttcgaatcgacaagggttttgcccttgctcctacgtatccccgagtgcaatgaagaaatcaaacctatgtagttctttaataaaaatacttatgttccttttgaaagattcattctcaatggaaagaaaag

SEQ ID NO: 257837 - DNA, 444 bp, Glycine max
agcttctaatatggattgtatttatcaatgccatctgtttttgccgaggccaagatattctgaatatagaacatacattcttctaggtcaagagttcttttggcattgtgacataatcaatctattcctgatcacaaatgggcctcttttatagttgctctgctgcagtcattgccttctattaatcacgcaagttaacatttgaagctggcattgtgaagggaggcccactatggtggcatcataagccgcaatggcatgttcatacttcatacgtggaatttttgctttccaccacctgccatttataaccttgtcgttacttcatactgctaatgatatttgatacaagagaaagagaaagtaatttatgcatgcacgtgcatgcgtgtgcatgtagggatgagaatacaaattttcaatcgatggaactggatacaaaga

SEQ ID NO: 257838 - DNA, 475 bp, Glycine max
  unsure (1)..(475): unsure at all n locations
tctgatcatcatcactttcttcatctgatgttgacgaatttttttaattgcatcataaaactcatcctgcatttcatcctcatattcagcactagaaatagaagcatcagacaatttggaatgaacaattgtggtggcattttcatggtggagtgcaagattggctgcaatgtattccttcagacctgaaacattatttagcaaaatatattaaatgcctctggaatggtattcactccaaataagaacataattcgagcaagacttgagaacttcaccaaaaagtggtcaatttaaactacctagatgtagtacaatactaaaaatacttaacctgacacttggcacaatagtgcatatggaatgctcctctcannatttgagctcttngtcttcttccatcgacaccaggacgtagagtgtatctctaaagtgtgggtcactaaacatcttgggctatttgatgccatagatg

SEQ ID NO: 257839 - DNA, 440 bp, Glycine max
gacccggatcctctaagcacctgccgcatgcagcttctcatatattatgtggctgaatcttactctccgttggaaagctatgaccatttgaatttctctagagctttggttgttcaatttcgagcgtctcgatatgttatgcacctgaatcggacttccgtgtgacaagttatgaccatttgaatttctcgagagcattcgctgttcaatttcgagcatctcgatatattatgcgtctgaatgggacttccgtgtgacacgttatgaccatttgaatttcttgagagctttcggttttcaatttagagtatctcgatacgtgatgcgctagaatcggagctccttgtgaaaagttatgaccattggaatttgtcgagagctttcgatgttcaatttcagcgtcccataatttatgcgcctgaatcggacattcggtgata

SEQ ID NO: 257840 - DNA, 339 bp, Glycine max
ctcagctctcgatatattatgcgcctgaatcagacttccgctttattattttgaccatatgaatttctcgagatattatgcgccttaatcggactttcgtgtgacaagttatgtccatttgaatttctcgatagcattcgttggtcaatttcgagcgtctcgatatattatgcgcctgaatcggacttccgtgtgacaagttatgaccattagaagttgtcgagagcatccgttgttacatttcgagcatctcgatatattatgcgcctgaatatgacactcgtgtgacaagttatgggcatatgaattcctcggagcattcgttgctcaatttcgagc

SEQ ID NO: 257841 - DNA, 422 bp, Glycine max
agcttttagatggtgatggatgtatattttttgaaaacataaacaaatgaaacatagagacgaagaacaagaaagacaaaccacgaaggctgacatgttatggtcgtaggaagcataaatcattcgtagagagcaaacatatcttttggaaacaagagactgacgctaagagtttattttccagaataaccgagatgagaatggatggattcattgaaccgatgaaagaacataatttggaaatattgcgtctacttgtgtaaatcccaagccttagtatcacaatgccatagactggatgcttgagtacccacctagctgtagccatgactaattttgcacgttgtttccaaatcatcattgttacgcgtgccttgtggaaataatatggaaatttaacctgagaccgacaccttgacaca

SEQ ID NO: 257842 - DNA, 480 bp, Glycine max
actataaaaactcaagctgcttgtggggcttctatggaggctggatctattatcttctatgagggcctctaatgacgattctccaccatggaaatgcagcggaagacaaatgataagaggtgagaggaggcgccatccactatggaataaaccatggaagaaagagcttcaccaccaagatgagccttggataacaagcttggaaggatgcttcaatggaggaaaagaaagacggagagaaagagagaggggggagcacgaaattgaacgaataaaagacggagagaaatggaactttgaagtatgtctcacaagactctcattcatcaaagttacaacaagtgttacacatgcgtctatttatagactaagtagcttccttgagaaactctcttgagaacaacttcttgagaagctctttgagagaacttctttgaaagctaatcttaactacacacacccctctcataactaaactca

SEQ ID NO: 257843 - DNA, 406 bp, Glycine max
catgcaagctttatgcacgtcaatattcaagaggcttctctgatatgatctttttcggacatatctgcgcaaaatctcttgaactaggaagatgttgtccatcatcttcttgtacttaatgaaagcagtatgagtgtccctaataataatctcaagcactggggctatgtggttagccacaattttagatacaatctcgcataacacattacagtaagacattggtctaaaatggttaacctgggaggcctgatcatgcttacgaataatctcattaatagcatggttgagctgctctagaatttttccagttgtaaagaattcattaaccgctgcagagatatactcaccaatgatattcaagccttcttgaaaataaacattgaaccatctgggtacgagctta

SEQ ID NO: 257844 - DNA, 407 bp, Glycine max
ccaaaaactaagctacttaaacctaacataggctgagaagagcacttatttctgtctaaaactagcaagagacgatgggtcaagaagctacgatgctacactgactcgtagcttgtctaggggcaagttaccaaaagataccaaaccatggaattagtcttgatcaaatactaccacatcgtcaaaactctctgataactatgaattgcttgagctatactatatacccagggagagcaatactagagcatacctgttctccaagctggttagcaccaaaaagactgggcacctcaagactatcttcttggagatacttcaaactcccactatagacactaaggaggttatggatggagaagaggaggaaccacactacatgaccccctacaagaatttcctaattc

SEQ ID NO: 257845 - DNA, 442 bp, Glycine max
acctgctgcatcaagctacgccctttccttctaactgctttttgttttgtcatctccttacactgataagttaggcgtatggtgtggctaatagtgggggtaaacttgtggattctatggattgacggctgtttctgcttgtgttcacgcttgagtttgtccttgacgtttgtgtcttgtaacaaatcctcgaagaccaatgtttgagtttaggtgtattttactcttcatagagtttggccaacgatactgtactgacgagtgaggtatgtgattgcgctatgacctccattctgatgtttgttcttattcttccacaaaccacccaatatagcttcctgtgtcactgcttgtactcgatcagctaaagcccagaactgcacattatatgactgaactgaacctatttgagtgagtttacactctgagatctacgacattc

SEQ ID NO: 257846 - DNA, 481 bp, Glycine max
  unsure (1)..(481): unsure at all n locations
tntacatgcatgttcacaccatatgtactatacttcgatcttcttatgcaatctatctgattgaaaagagaatgtatattactcttctaatgtagtcgacaacaataaaaaaatataacaaaaaatattgttgttcttttaaagggaagtcaaatggcagatgcacaaaaaataataaatttaaatgtcttttatttaataattagttattttatagaaaaattatttcaaatcaaatatataatgtatggaattttaatacttagttggccttcagccaacagtgcctaattctaagagtcatttcaagcacaggttacaggtctttgctttcaaagtaacatggggatcaatgctctcaacaaaaacattattgcaaaataataacacatgaaaaaggatatagtaagcatggacattaactaaccttggctattcattaatcaaaacaaaattgacttcaagaaaataagctctccca

SEQ ID NO: 257847 - DNA, 435 bp, Glycine max
ccgagcatgcagctttgaaagcacacccggagattctataactttgccgcatcaacctggcgagcgaagatccagagaactccacacacctgcgagctacaagagaccttcatgtcttacaagatgacgacgaactagctcgatcccgaaaactcaaacatgacaatagctgaattactgtgtcatcacgcaaacacttacaatcaacaaccccctgcctttgagttgcacagcataacctcatcttgaacttcagggaaaccagactgcaccacataccctttgctttttctcgccagatacctcctcactctgcgagtcatggctaccaaaatcacagtcaaacccacaccaacaacctgatacttcgaacccctaatatcgaaccactgaaacaaagttccatacaccagcctcatagatataaatcccacc

SEQ ID NO: 257848 - DNA, 240 bp, Glycine max
attattcgacccgttcagttggagacactactatatgatctccaactggaagtggtttccacatccaacggtcgagaatatccgctcaaaccttcaagctcgaggtattaaaatactcttgactctcaaaaccgatatgaatttatgccttctttagtattctcactttcaggcaaaacaatcatgacgaagaaaagtgctgaaacgtctcgagctgatgtgagacccaagaaacccact

SEQ ID NO: 257849 - DNA, 481 bp, Glycine max
  unsure (1)..(481): unsure at all n locations
atcctcagagtcacctgcggcatcaagctttnttattaacctcgatctgtgatctttntttattcacgtcggcaagcatttttttcgatcagtatcggtgaatcaagtttttttccaaggtgggctaatgttttcgttgctgagaaaatgaaaacatgctggtgtcggtcgaaccacaacttcggttgagctcgaacgaaaaaacctagccgacgtacattgtaaatttttacggcaacaccgaacaaaaaagcatcctctaccgtaaaaaaatattatcggccagggtttgtaaaataaattgcgcaatgtcgggaggaaaatatgagtcggggctatacaacgaccgatgtcggttattgtattntctattcaatccctaaataatatttggatgatgtctaataagttatgtttgatcggcgtcatcccgcgatgctctctttttaaacctcgatctttgatctttccttgtcgacat

SEQ ID NO: 257850 - DNA, 466 bp, Glycine max
tcttttggaccttgaacaagcaatcaactcctctatcagaaccatgctatgtgctcgcgactggtccctttcttcccttcgcaacttgagttcactattgctaccccatagagctccgcgaaatttgttccggccatactcttccttgcgagccctcttggtctcttgatcaagggctcttgcggtaattgcattctcttcccgtaacccggcacactccttccgaacgtgtgtagcagccaacttgaacttctccttagcgagttttgcctttcctaactcgcttttgagagcttggacttcttcgtcctcttccggtgcttcaaaattctcttcgatgacgacttttaacttggcgagccaatctaaacctcgtatgcgaactttcagccattcgtggtacccaccaatgatgccattacgaatgcctctaagctcttgatttttccttaacggcgtttcccat

SEQ ID NO: 257851 - DNA, 449 bp, Glycine max
  unsure (1)..(449): unsure at all n locations
atatatttctatatcattgttcattataatcgccttaattatactaattactcactaatggaattngtcattttgtgcaatgaatatttgctacagatattgtctaacggattctatgtatgcttgtacccctaaggtgaaacaagtcctaatttgccaatcttctatttcaggtgagcctcttctttctctattggtgctataatacgtaatgattgaaataagagggctttgtgatggccctcttggatcttcattatgtctgcacccctgtattgtatggctggacctatgtttctgtctgcacccctatattgtatgcctgcagctctgcttcttgttttttcgttactgctcattgttccttatcctttatatcatgagttcttattagtcattagtttacctacgttgaataataacacaactgtattatacaaatgatattg

SEQ ID NO: 257852 - DNA, 456 bp, Glycine max
  unsure (1)..(456): unsure at all n locations
tgcttctgtttctgtaaagccaatataacataacaatatttatcatgatattcaatgaaagtgtcatcacatcgatagataagttatgtaaaaaacatagatatatagtttcttaggtaaagttntgatactattactaattggaacaattaagaaattattacaagttttatctaaaagccatatatatatatatatatatatatatatatatatcatgtatgtatgaaaataatttattttattttatttgatctgacaaacgttaatggttagtttttgttagcatatttgaaaatagtaataaagaaagagagattgtgattacaggattgagggtgctatgttgtttgaagctttcttctagcacagcagattgttctttggtgagcctaagtttctttctggtggcggcgccgtcttcttcttcttcggtggctcttattattccttcac

SEQ ID NO: 257853 - DNA, 387 bp, Glycine max
agcttgtctgactcacgcttacagctggttttattcttctctcacaactggagacttcaacttagcagtgtcccatataactgagttgtagatgacttgttatatccaactccaataacgtgattggtaatgcgctgaacaaccattataacataacagcttgctgtttatgctataattgataatccatttgcctgttggacagcatgagattatttaagctaacgacaccgatgtattatccatacgcttaggattaaaatggaagagaatctcatctcacagtctttcagcatgttatgcaaaattgtcaccaaatataccatattacgcgttccatgtaaaagttagttgctgacaaccgtatattcacagatagtgtgccct

SEQ ID NO: 257854 - DNA, 338 bp, Glycine max
tatcgcgctcggcattggcggcggtgacgtgctctttgtttgcttgtggcgccatttctatccaagcacctgctattgtcgccgtggcagggattatgcttgcgaaacaatgataaggcgtgtgttgcctttgacagatgaacgtggcgccactgcgtgacatagacatgcttcttctagtagtgagatgcagaaactgagagtgtcttctcgcctttttacctgatattgttgcaccacaagagagtatcacgtgactcatttttggatttaacatagttcctttctatacataagttctgcataatacaccctgtcgttatgatgacacccgacgg

SEQ ID NO: 257855 - DNA, 470 bp, Glycine max
tgaccaggaatcatctgcctggggtggatgatgaattctttttgttcctggcgccgagatgatggtgcagagggtgaactaagagctgaactctctttaggtgaggtagccatggaaaagcagagcgtttggaatgatctcccttatatctgacagctgttggggaatgcataaaacgagattaacacgataatctaacgtcgaatgacgaatgttcacggacgtgtgaagcaacggtcgaatttgctctggttcagtaacgaacgtgctattaatgttacgtgatctgtctgggcacgttcacatatcagtcgttgctacaatacctctagcagacaaatgcccagcttgcccctaagtgtttcaaactgatttgcatccactgcctttgtgaaaatatctgctatttgctcctcagtggccacatgctctactgtgataactctatcatcaacatgctctctaatata

SEQ ID NO: 257856 - DNA, 440 bp, Glycine max
  unsure (1)..(440): unsure at all n locations
agcttatcccatgcctttgtggccgtcntttcgtcggatatctctccaaatgtatcttcatccaccgattgataaatgagaaaaagagctttcttgtctctctttcttgactacttcaacggcttctttacaccttggcttaccgaggctacatcttgctcctcgaaaccattatctacgatataccacacatcttgagctcctagtagcgccttcatcttgatactcccattatcatagttgttctttgtgagcatcagcatttggaaaggaaaacctccattctccatcttttgaggatcttgaagctctgataccactttgttgaaactaaggcttactatgcttaggaatattggagactatgaatagatactcgctaggaacgagaattcttatggaggagaaactctgatttttgctgatacaatgtgaggata

SEQ ID NO: 257857 - DNA, 351 bp, Glycine max
acttaccatttatcttgacccacggggagaaaggccatccctaccctcggaagccaagaaaaaaggggagaaggaaaatttcccaccaaaggaaaaaaggggaggaaaggaaaatccccaactaagagggggagaaagccaaaagaaaagaaagaaaactcccaaccaaacgaagggagaaagaaaaaaataatgagaagaaagaaggaaagcccccgatccagggtcgcaagaaaacagaacaaatgggcagaggggaactccggacccgacaaaatctaaacaaataccgaaatggcacccaaagaaccaaagaaacaaaaggagaccacaacccaaaaaggggcctct

SEQ ID NO: 257858 - DNA, 478 bp, Glycine max
  unsure (1)..(478): unsure at all n locations
ctcacgctntgtggacacacctcaagaacactcgcatgaatcnttaattttatcgatatggattcctctctcccttggctgaactcgtgaaaatgacgaaaaaggtcccaacaatttgcttttaaagaattgtgaagataaggtctaaggcttttgtccaaaagaaattctgattaagcctaattgacaagcttaattgacaccatgattgactaatggccacccatgttgaacgtgctaagtcatgcttccgatgggtattattgcttctgaaatttaaaccaaaaatggttaaagtagacataggaaaaaatagtaaaaattgttttcttaccaaagctcgtaaatcttatcttaaatgtctagattaatgtgctaacttcctagattattgtgttaatttccctagggatacatgtactcaatataaacctcacacagaaacatattacaccgtgactcagtgcacagtgcaatt

SEQ ID NO: 257859 - DNA, 450 bp, Glycine max
  unsure (1)..(450): unsure at all n locations
agcttatacacatgtactttatttttatttttatcttgagactttattttattatgaaatctcattntgccactaggtccctgcgtaaataattgctaatactataactgatgaattttgctttgctggagctattatataattagcagaaatctaagtttctggcctttataaaacctatacagtattatttcctatacaacattatatttctgaacgtcactaaacttctataagagaatacaatgagaacaacaaaaaccttatcccactacgtgtatctttagcatatgatatcatatgcagagttacttggtatcttgtcgctacaattataatagcccttgctgttaattgtcattatgttgaaaggcttgttatgttccattctctaaagactaaggatgaaaatcatctaaacaccaggatcataatggcaaaatgcagtat

SEQ ID NO: 257860 - DNA, 473 bp, Glycine max
gcttgtctcaacgtatatgcgagacggagaccaacatgctatctatcatcgccaagtaccaagaagagttaggtctagccacggcgcacgagcatacaatcgcggacgagtatgctcaagtatacgcggaaaaagaggctagaggaagggtgatcgactctttacaccaagaggcaaccatgtggatggatcgcgttgctcttaccttgaacgggagtcaagaacttccccgcttgttagccaaagccaaggcgatggcagacgcctactccgcccccgaagagattcatgggcttctcggctattgtcagcatatgatagacttaatggcccacataactagaaatcggtaggaaacttgtatgggctctcagaccttgactagatacgacttcctttctgatataaaaagagatggacccatgattctacttcacaaagcttgggcaatcaaaacactcctacatttcatc

SEQ ID NO: 257861 - DNA, 442 bp, Glycine max
agctcggctctcattatatatatatatatatatacatacatacacacacacagttgctgtcatgtacctgggagaagttaacaataactgggagtatatatgcaacacaatcttgcggctccaacagcttgccaagagcagcacaaccctccatagccaacaatctgatgtaatcttgatctgttccaagattacaattgcatattaaaagagtaaagtacattcacgagactctacaacatgctcacacatgtaaatatttaacagacaaatgacaaacactttccatctacaaagaacaagaaatatgtattcaattaccatcttgagtaagaccataaaaaattgacatgacatgagtcttagaatgagaatattccagtaagagtttctaggcttacattaaccaacattaaggcattgtctatgattcgatttatat

SEQ ID NO: 257862 - DNA, 435 bp, Glycine max
  unsure (1)..(435): unsure at all n locations
tattgttaattntctcagcaaaaagcaatattattatattattatagccaagctccaattaaacttattgttgattccatacttgtactcaatttgattcagtcacatcaatagtagtgcttagttattacatctttatatggataaaagttgaacttacatttgaacttcatatatcatatatgcatgtagtggccaaaagtgtcnaaggtaattaagcttgcttggatattatatgtcttatggctcgacgggtaataacattaagatacttagattaatttgaattaatcataaataattccaaagaagcatttttctttaatggagggtgctaaatatgatgttntatcgttgaatgtagaaatataaatctcccatgctaaattccatttctccaatgttatctcaaagttcctgctatagtgaatggtt

SEQ ID NO: 257863 - DNA, 475 bp, Glycine max
ttcttcgtgggttgaatgggtttgtcttgtagaatggcatgatcactggctgacatgttctcaattagctcagttgcttcttccagggtcttcagttttatctttccccctgcagaagcatctaataattgcttggtttgtggtctcaacccatctataaacatattcaattggattggctcacaaaacccatgagtaggagttcttctcaacaagcctctgaatctctccaatgcttcactcagagattcatcatgaaactaatgaaatgaagagattgcagctttcccttctgcagtcttggactatgggaagtatttatttaggaacttttcaacaacttcttcacaggttttccaaatgtttcccttgaatgagtggagccacctcttggcttctcctgccaatgagattgagaaaagattgagcctaatagcttcatctggtacaccaacaatcttaacaatgttacaca

SEQ ID NO: 257864 - DNA, 466 bp, Glycine max
  unsure (1)..(466): unsure at all n locations
nagcttaatacccaatatgacatctatatgttttatgttttttatatcaaaattactagacaagaaagacttcacatcatttatgaaatgtatattactatcaaatatcattatgtcatctgcatacaaacataaaatgacacatccaatatcatcaaattgtttcacatacacacatttacaactattattgatttgaaaaccatatgaaagaacaacttgatcaaacttttcatgtcattgctttggagcttgtttcaaaccacataaaaatttaaaaagtttgtaaactttcttttctttacccgattctacaaaaccttcaggttagctcatataaatttcttcttttaaatcaccatttataatagcaatatttacatccatttaatgaaattccaaattataaaacacaaacaagtgcacttaaaactctaatagtaataactttagaaacaaaagaata

SEQ ID NO: 257865 - DNA, 480 bp, Glycine max
  unsure (1)..(480): unsure at all n locations
nggtgatgttaacgctaaggatgagatgggaattgaaaggattattcatatcacacaaacaaacaaatctttaattatataagagtaaaaaatcaagaatattttttagttgcttaagagggacaaatatagcaaactagaagcaacaagtaacacatcacatacctttgtctgacttgatcccggaggagtgcaaagcaatgtcggtgatgccggtgtcggaagagtggaggtggcatccatagttgatggttggagttagaatgttggaattaaaattggaaagaacccaagtgcaagtagaagaagagtctcaaaagtcaaaactcattaataaataaagcatcatcatttgatgatcattgcatttgatggcctatatattgtgataactcatgctcatttaaagcactttncagttttgaaagcttacattacatacatatgtgactgcatcacgacaccacccataataaataa

SEQ ID NO: 257866 - DNA, 414 bp, Glycine max
  unsure (1)..(414): unsure at all n locations
agcttgaatcggacatccgtgtgaaaagttatgaccatttttatttctcaagagcttccgttgttcaatttcgagcctctcgacatattatgcacccgaatcggacatccgtgtgaaaagtcatgatcatttgaatttctcgagagtttccgatgtttaatttcgagcgtatcaatattttataaccgtgaatccgacctcagtgtgaaaaggtatgaccatttgaatttgacgagagcttccgttgttcaatttcgaatatcactatatgtgatgcgcctaaatcggacattcgagttaaatgttatgaccatttggatttctcaagagatnttgttgttcaaattccagcctctcggtattttatgggatcgaatcggacattcgtgtgagaagttatgaccatttgaatat

SEQ ID NO: 257867 - DNA, 451 bp, Glycine max
  unsure (1)..(451): unsure at all n locations
agcttgtanaatggctagacatgatacatgtcatgtcttggtttggctcacgggtaaaagggatgccccacattatcttcatgacacaaatgcaaaaatgatgatttggaaactttatgcaaaactggtcatgcatgcatctatgcggacactcaaatgtcaaattcttatggtcatgtgatgctaaggcctaggattcatttcctctatttttaatcaacccaatgtttccaaaatatgttcttttatcaatttgtgcattcatccgagtccatttcgggcgttcgggaaatttcacaacattcacccttcaggcgtagacacatattccaaaaattggttatgatcaatgaatgttttaaagaacagatggaacgtatcttttttcaatagcatggcggctttcagctaacaacttattttctttttctcctcatttccttcttttttt

SEQ ID NO: 257868 - DNA, 472 bp, Glycine max
  unsure (1)..(472): unsure at all n locations
tgagaaagtccttctgattntggttatatatttctgactttattacatgagatgaaatgcacagattggaccttctgttagttgttatcaataagatgcttaaacacttgtgcttaagtgagacagtagccatgagactgtggtttgagctactttccttgaatatgtcttatgattaacctcatctaattgtattgttcacattttggtctcctctatgtctagctgcatattctgtgaaaacaagggataggtacacattgcttcatctttctcatcatgcaatcaatgaattttgatgcgtacacccctgtcgcaacctacccttcggcgggagggcgacgcgagactcgcgggatgcgggttccacgacaggaatactcgcggagtcgccaccaacgtttatttgaggaaaacgtcggaaaaaccggaaaagacgcgatctacaaacttttaagtgaaaggctcggga

SEQ ID NO: 257869 - DNA, 358 bp, Glycine max
gaagaagacgaagaagtccaaaggatttgtgatttacatggagagtactaccttgacttagaagtcgaaagagcagcgtgaaggcattcaatcgactggggaggcagaatacgtaacagctaattcatgcagttgtcatgcattctagcttaggaaattcttaacagagacatgccacaacaagaggcaaccaagatctttgtgaatagttagccaactgttactgtagcaaagaatccagtgttccatgatcgaagcaaacatattgatgcccaataccacaacataagagagtgcatagcaagataggatggtcatgcggaatatgtgaagactcaagaccaagtagctgacatct

SEQ ID NO: 257870 - DNA, 457 bp, Glycine max
gccagtgaaaggatcgatgtttgtcttataaaaaagggcatatttagtcatcctgcttggacggatgagaaaactgtggcaaatgaagagggcgaggatgaaggagaagctcatgctgtgactgccattccaatacaaccaagtttcccaccaacccaacaatgtcattactcagccaataacaaactgtcataccctaatttcgtccggggacatttgcttgatgacatgcgacttttgtttggtccttgtaaggtgcttggcacccatcattaggcaatttgtgaaattccgggacgtgccggaaaacaaaagagaatattgatgcacaatccataaagttccgtgacacactggaaatcaaatggaagcatcgttgcacaattagtgaggtttcgtaacattccgtacgttaaaaaggagatgattatgtaatccacaaagttctctaacatta

SEQ ID NO: 257871 - DNA, 450 bp, Glycine max
agcttgcttgtggagcttctatttatgctgtatttttgagctacaatgagatccttcaatggtgatttttcaccatggagatgcacccgaaggcaaaagagaagaggagaggggaggcaccatccactaaggaataagccaaggaagaaggagcttcaccaccaagaattgccttggataacaagctcgaagaggatgctttaatggaggaaaagaaagagagaagggggggagcacgaaattgaaggaataaaagagggaaagaagtggaactttgaagtgtatctcataagactttcattcatcaaagttacaacaagtgttacacatgcttctatttatagactaggtagcttccttgagaagatatcttgagaaaacttccttgagaaagcttcttgagaaaacttccttgagaagctagagcttagctacacacacctctctcat

SEQ ID NO: 257872 - DNA, 475 bp, Glycine max
  unsure (1)..(475): unsure at all n locations
tgcttctacatctctggcccaatcttcttggagtcttctatccaatgcccttgcggngtangactgtatcatcaatgtttggtttacatagtcaacaatcattggccatggtaagcaagcaatttcaaacttcttaaggcactcatcaaagtcttgctcagaaggacaatccaccaaactcccctaggctgtcatgcataatcccatgcatnttttttaccaaccagggttttacattttgccttgacattcttatcaatgtgaaaccaacacaacaaattggtagcctcagggaatacagttttcactgcattcatcaatgctagatctctgttagtaacaataactccagggagtgcatcacgtctgaggaaaaacctcgaaaccattgtagagcccaaacaacattatttatacgttctccctccaaataggcacaagcagcagagaatgtcatctctgttgatgtcacacc

SEQ ID NO: 257873 - DNA, 344 bp, Glycine max
tgcagcatgcaacttttcaacacaccatgttgtatatttgttgcacaacacgcactaccctaatgataatacatcacttcagacacctaaatgctgggagcttgaacccaccttctcaattaaactcatggcttcagcaagggtcatgtctccaacggctccaccactgtcaacatctatcatacatttctacatggtggagagtccctcatacaaatattggaggagaagctgctcaaaaatatggtggtgagggcaactaacaactaattgtttaaatccgtcccattattcatataggctatctccactgagctacctaatgcctgatatatcccttctga

SEQ ID NO: 257874 - DNA, 114 bp, Glycine max
atacctgccatgcgctccaaggatgagattttagaattgctaactaatttggacctttagtcgccatataatggcttagtgtcccataccacttatccgataacacacattctt

SEQ ID NO: 257875 - DNA, 464 bp, Glycine max
  unsure (1)..(464): unsure at all n locations
atccttaagtcacctgaagcatgcaagccttttcagagtctatttaagcactcatttatatgtgtnggattggagagattgaatgtttataaagtgattaaactgaaaacaataaaaaagaaatggacccattttaaagctacctaaaaagagttgttgggttggatgctctaagagtgaaataaacaacgacacaatttaaagagaaagattatataacaaactgttgtttttggatggataacaatatgaagaatatatagaaaaacaaattcttttcacttatttggatgaatgaaaaagagagtgaaaaataattatatgaaaatattatgttattaattaaaaacttattctctttttactctactattggcgtcctaaaataaaaatatttattatttttgaaaaaaactctacgttatagaccattattgattttatattttacgaatacaaaagat

SEQ ID NO: 257876 - DNA, 475 bp, Glycine max
  unsure (1)..(475): unsure at all n locations
tgtaaccttctaatttntattatattattgtattctcaatatatttgtcattgctncaatcaaacattaaattaattatttttcattgttttaattaaacagtaaattaattatttgcatttccaattatcctttttcaaaatgtataggggtgttatcgtgagtttgttggagtgcaaaaagaaatgcccgaaaaggcaaataaagttgcgaataaaaccatgctaaaggcgaaagaagatacgccattgagcccgagattgcacaagccatctatctatttatgggctaaatggtaattgtcctattcgctcaacattaaaccatttcttttattatatggattagtgtattggacttcttcggcaactctatttccctcagtccataccattaaaaaaaaaaaaaagctttttccattcttaatttattttccttaccttgtgtcagttatattctatcccaccttttccat

SEQ ID NO: 257877 - DNA, 418 bp, Glycine max
  unsure (1)..(418): unsure at all n locations
agctngcgcagcaagggtatccacttgcttttgttcatcacaacacgcaacattgggtgggagctgtgcttatttaatggatcattgactgtctttctgaatgaaatcaatagagacggcgtcataccttagccctttattttgccatcggagtcatatatctcaccttgggccatagactactgtcttttctagatgactctactgaagctgcttctgctgagcttaacaaaaacctaatgacatatgcatatcctttttatgctcttgtcatgggtcaatactgctttgtatttataactacaataccatatttacttttgggtactgatatgcaacattcgtaatggacaatcttatacctggtttagtgacacctcaacatcatctgatagttatctctgtgcttcctcacatt

SEQ ID NO: 257878 - DNA, 418 bp, Glycine max
  unsure (1)..(418): unsure at all n locations
cagcttggccctacacacttctgaggtgtcttggcttcagactctnttgactgaacttgcagttccacacaagctgccagtcatccattgtgacaacactagcactgtgtcacttgctcctaacccagtccttcatgctcgcaccaaacacatggacttataccctgttttttgttcgggaaaaggttctgaacaaactgctttagagatgacacagctcattgtaatgtggcttattctttcagatcaatgagtaaatctacttacatgttctctccaattctatcaagaataaacttctattgtctgtgttgctggcgctacatctacaaagcttcttcatgattgcgtgggtcatcaacaattgcaaaattaaagccaatggatgaataatgagcgctttgcacaactagatgtt

SEQ ID NO: 257879 - DNA, 76 bp, Glycine max
taccaccatagaaagccatggataagagggtgaagatatgataagatgagtggagggagacgatgagtggagggag

SEQ ID NO: 257880 - DNA, 464 bp, Glycine max
  unsure (1)..(464): unsure at all n locations
agcttatcagcaggctcttaaggttgattgttctaattntctttcctaaaacggntgcggaaagtaagttttctaaacagttaaaacacaaacagactgcttttttggtgtaaactaaaacatggattcatatatgcatcaaggattatttcatttgtgaccacaaagtaattaccaaagtttaaaatgaagctttattgtattgttgtacaaccaatcctctatggtagtgaacgctaaattttaacgggacaacaaaagaaaagatagactacgtaacgtgaatattaaaaataaccttacatcataatataaattatttattgtaaatctaaaatagaaaatactagttaggtttagtgtgctgtttatggaaacatcagaacaacactnttactacatccaataatctatactttaatgcattgaatgtattgtctttcaactaagaagatacaacatca

SEQ ID NO: 257881 - DNA, 466 bp, Glycine max
  unsure (1)..(466): unsure at all n locations
gaccttgaaactaagcttttcttttacacttgaaatcaaattttgttaattttataatgttaatctattcgttgttttttaaattgaagttatttttaattctaatatacaatgagatggacgaactaattctaaataaacttaaaaaatacttattgtgtagaagtgaataacataatcctattaacatgagtaatggtgtttttaatttatattattcattttatattaatgtattatatttttttaattttagtatgtatttttactaatagattttctaaattntaaataaacaaaaacatttaaatagaataatattaaaactatttaatatattttaaataataaagtattaaaataaattaccaacatataaaatgaaaacataaaaaatatactccctattaaataaaaattattaataagtaaaattaaaatatttatttgaccattaaatatataa

SEQ ID NO: 257882 - DNA, 464 bp, Glycine max
  unsure (1)..(464): unsure at all n locations
agctngntgccaggacatcaaccatatcatatttctatctatgcatggaagctgngaagaggaagatgattaggttgtgatggataagttgcaatttcctctattatttcaatttgaagaacaaattactttcttaacctgtctcttttttggaacttctgttgagacaatattatgtttcgtaacatcccaatcttctcaggttgtgaagtttgatgtacaaatcgtctatgtttgttgatatgcaatgtagcaccatcattcttagtgtaatcatacatataagacatagaaccatcatcattagataatcatgtgacctacatctaagtcttgagtctaaggagtagtggtctagatacatagagcccttagtcaaattgtaacgacttgcctcgtaccataatcttctctcatgaagaaccacaggtacttactaacacaattatactattttcacgcac

SEQ ID NO: 257883 - DNA, 472 bp, Glycine max
tctggaggaagcctcttaatgaaacttctagagaaagctacttgtatctgcctcagtaaaaatgcttcccagccttcgttaaccgttggatcttctctaaatttggtcttcaacttcacaagacacttttccatgatttgaccgttgggatctttgagaaaatgtctggagtgtgctagaagcttccgttcccgagagcatttcttatttaagcacttcagcctttgctttcgtgtagcttaggaaaaacgtcatttcttcttctttctttctttcttccaaagccatttctaaagtcccaatcactttctccatcacccatagccaccattagccaccacaaaccatcgttgttctccattgaaaccccacaccgagaggaacccttcaaccaaagcggaatcttccaacttggcttgcggtttcgatagagaatgaaaccctaatctgacctttcattatctttcgacgt

SEQ ID NO: 257884 - DNA, 424 bp, Glycine max
aactcaacttcctcgagccattcctgcaaaggcaaagagatagaaaagctttattttaccaccatatgctacgctcaaaacaaaaatggcatacaaccccctccaataaatacagacatcaatgtaaatttagagcaagcttatgcccgtacttcttcacgaacgttcactagcacaagacattcttataactaatagaaatgcacccatatacaatcaaggcagccttcattacgcaagattaatatacactgtactcgccaacgcgtatatcgttacctacatcacacaacatatgctttgctaaacacacatacatgcctactctaaacactatggctaacacaaagtgcatacctgcacacctcggtatttctaatacctatacatacaccaaacttatgatgaatcttgactatctaca

SEQ ID NO: 257885 - DNA, 430 bp, Glycine max
  unsure (1)..(430): unsure at all n locations
tagctcgtcccttcccttagatatgctactttctctctgtcttcctaattatttatcgtgtgcatgtgaataatagatactgaaattctaatcaaactataataaaacaacttatttcgattntaaacacctgccatctaaacgtggaataatgggttgtcaagtccatcagtaacacctgtcatcctaattacgttttatttggagaataattccttcctataaccatgctctattattttccacgagtgtacagtgtcccaacttcatcttgttacgaatctgagatctaccacacaggagcatcaattatacaaaatatattattcgtttttctacaattcaacccttcttatgctagtataattacaaaagcttctatgtgatgccttaggagttatatttctgcagcagtaagtcttgttgttta

SEQ ID NO: 257886 - DNA, 354 bp, Glycine max
cttttatgttcctagtctttgtcaaaactcaatttctgattctattcttgcacctttgggactctattctaattttacagactttggttttaatctactaaataaatatgaaactatcggttgcggtcaataggctgatggtctttattccattgaattgaaaagcgacactacttataattctatgcatcgttctgatgggctaaaacgaagtattgtgaatgaagattcctctatgttgtggcacccggagattaggacatgtctctattgagagaatcaagtgattatgttaatgaacgagtacttagtactttggatttcgctgatttcgagacttgtgtacattgcatt

SEQ ID NO: 257887 - DNA, 320 bp, Glycine max
acacaccctcggggtgattgctaggcgatcacttccctcaattaccattctctccctttgttgtagaacttatgcttcacttataagtaaggctattactcatctgagcacttgacgtaatccctatgtgtctccccctttgggatcaaccaaaagccacagtgcataacaagtatgaaacatacaaatacaactaatcattcgcacatcagtcatggaatagataaactcatcatgaagcaagaaacatgactagatcaaatatatagaacaatcacatagtcatataacataattcataattgtgcaaacaaaccatg

SEQ ID NO: 257888 - DNA, 477 bp, Glycine max
  unsure (1)..(477): unsure at all n locations
cgcttctacctatgacagtgctaagggatgtttccctagatatgttaaggtagagagattgttctacaaggagtgctcttttgatatcaccttttgttataaaatgattttccttcttaaaaatcttcttggaggaatccttttcctctttttccttccccttggcctttgaagagaaggccttactatccttctttttcttttgtttatctagtttttcttcctcatccctattatctttcatagttagttgatctttggccacctgtgaaggtgtttgaggatgcaacacacatttagtgcccagatgggtgaaggtaatctcattagttaggccattttaaatgatcttnctatcaaatttccatggccttcctaaaagaatatgcattgcctncatgggaactatatcacaattaacttcacccttttatgtcccnatggagagaggtacctttacttgctggctaattatca

SEQ ID NO: 257889 - DNA, 444 bp, Glycine max
  unsure (1)..(444): unsure at all n locations
agcttnaaccatgctcggtgtatgcattttaacaggggacatattntatgaggctagcgaagattattctggcactgcatctgctgatgaaggtgaagataatatctgcagaaatatgactgtggaagatagttcgggtaccaatgttggagtatatactgatgatacagaagaaacaacagacatgctccatgcacctcctccttctggaccgaataagagaagaaaattaatgaattcctttagtgctggagttgaaagtgatagctactcgacagctgaaattgataactcattggattattctcagacctctagctgtgtttctgatgatacagncgaaaccactcaagatgatacactctgaaaccactcaagatgatatacgtgaaactactcaagatgatacagttcgaagcacaacaatatagtgatgttctactg

SEQ ID NO: 257890 - DNA, 427 bp, Glycine max
tcctcgaggcccattcctttggctgaggacttggttgtctattggtcggccatgtggcgcaggcaatactcaaaccttcttgtggatgagcagaggtgaactctacaggcggtggtggcgtgtctattgtccgctaccgaccatcccaatgctgctgtggtgtttcgccctgcgcctgcctagggacgcagtacttcttgatgaaagctccatcacgaaggcgcctgatgcccttgctggaggttacaggtactcctgagaactgacagagacccgtaattagagcttgacaactccaagacccttgtggacttcttcgggtccactgggtgtcttgcaggtgcgatccctgctaactattgatgaaatcagaaaatcagtgagcgatgtgcatacttacctatgatgacataaccttgcccgaggg

SEQ ID NO: 257891 - DNA, 309 bp, Glycine max
gcccttaccttgataagaagctcactacaagccacaagcgaaaaaccatgataccaccatatccttaaggaattatggagctctggaaacggaaagggaataagtgcggggggtatatgtttcaacggataatatgagaaggtggctatgcttcatgacgtacttcgggtcatacttgacggacaccgataaagcgcaaaagacggacatgctgaatgagatgctggctctcaaatgccacagacgaaaataataataacaataataataaccagaacaataacaatcgaaaaagaagaacaaaagcaa

SEQ ID NO: 257892 - DNA, 370 bp, Glycine max
agcatcttgagatgttcccaccctttgatgaaagctttccaagttctgctatccagcgattcgagaaaggccaccattcttgctttccaatattcatagtaggttccatcaagaaaaggggggctgtacactggtcctccttcgttctgcatgtgcatcagaatatatctccctagatctcactcagtgatatcgagcgcctgctctgataccaactgaaatactgatactggagacagatgtcgcacaagatgacaccacatcacgcttcagaacacgcagatcatatttgacagtgcgtacagtctaaacaacaagacaacacacgagaattgtaacccaactcggtgcaacctcacccacatctggg

SEQ ID NO: 257893 - DNA, 451 bp, Glycine max
  unsure (1)..(451): unsure at all n locations
cgctctanattacattgatgtttgtatttatgggatgttgttcatgccatttttgctntaagagtaatgccccactaaagctaactttccaaatgtttgccttcgcaagaatggcaccgaggaagcttgcctcaaagaggtccaggaaagacaaggcggccgaaggaactagttccgccccggagtacgacagtcaccgctttaggagcgttgtacaccaccagtgtctctaagccatcaagggatgtgcgtttctccgagagcgacgcgtccagctcagggaggacgagtatactgatttccaggaggaaatatggcgccggcggtgggcaccactggttactttcatggccaagtttgattcaaaaatagtccttgagttttatcgccatgcttggccaacagaggaaggcgtgcgtgacatgagatcctgggtaggggtcagaggatc

SEQ ID NO: 257894 - DNA, 355 bp, Glycine max
ggctcggcagacataggttcgacccgcgccggtgcaagcttctaatgagcaaccttattggttctcccaatggaagttgagcttcaagccaggctactttctaaagaaaatattccaaaggtacaatttgtctgttctgagccaactctcccaggctgtgcatgataataagctgtcctctgaatatgctctgtatcatatggactaaaacttgctggtgttggacatctggctctatggcacccgactgaggagttgggacggctgaagaacggatgtcttcagctctagccctcattctcgatgacatctgccaaataaaggaaccaaacaactaatcacgatataagctgat

SEQ ID NO: 257895 - DNA, 319 bp, Glycine max
ttacacaagcaaagtgagcggagatcctctctggttttccgcccgccatcgtgactcgaaagacagtatgacacatcttgtgagcgcggacgatgacacatatctccgcatgtcaacgggcttgtcggacgccattgacgaaaggcgcagaacacgacgttagtctctgtgtgctatcaagcttttcgtcttacagacaacacaccaggtatacggataaccactcgggtatgttcccccgcacgcgactcaaacagcagataacagatcttgtgagcggcggaaatgacattaatcaccgcatgtcaacgggcttgtc

SEQ ID NO: 257896 - DNA, 451 bp, Glycine max
  unsure (1)..(451): unsure at all n locations
cgcttcanattgcgtggtccaatttcacatttatctaacggtnatcaaatttggaatcataggtttactaagacatgtttgagtgttcaagaaaaagagagggttttgaaaggggggaaggaaaaacgaatttgagagcatgatatagcgttaagacatatggtaaatgtaaaactgacctagtatatctctatttagaactattatactctcaacctattatttactctatctttctttattttattattctataaaaataaactatattttactcccaatcaaatgaataaattaaatattcattttattttataagaacatataattattgtatttaccttaaaatcattattttaattaataagattattctttcttatttatctcaatacgaagatctcattattttcctaaaactctatttatttttatatagaatctcttttaa

SEQ ID NO: 257897 - DNA, 482 bp, Glycine max
  unsure (1)..(482): unsure at all n locations
ctttatgatctgtgtgcacaataaattctctgcccaattttttatgtctccagcgctgaatacaaagcacaagggccatcaattccttctcatagacagattttgccagattcccattagataaagctntactgaagaaagcaataggttgtctctgctgcattagaacaacacctatacctctaccagccgcatcacactcaacttcaaaaggtaaatcaaaatttggaagaattagcacagggggagaagtcatgatcctcttcatctcctcaaaggccttgacagcttctattccccaagaaaaattgtctttcttagtcaattcggtgagaggttntgctattttaccataatcctggataaactttctataataccttgtgagacccacaaaaccacgtacccccttcacattctttggtgtgggccatgcaagaatacacttcaccttttcagggtccactggcacaccttctcca

SEQ ID NO: 257898 - DNA, 440 bp, Glycine max
agcttcttccccaattgtttatactttgtgtttgtagcgacgtggaaaagggctcaggcccttacgcacttatctctctatggaatttgcttagaagaattgcttccgcgaagaagattcaagccgaggcgctttcgtaacgtttgcgtaacgtttccgtgagagatttcgcgaaggttgtctaccgttcttcggtgttattcattcgttatacatcgttcttcactcctcaacgggtgagtacctcaaaccaagcttttcaattcattctaagtacccgtagtggtccacacttgctctcatgtattcttattctcggtttcatttactctttatacccgcttttgacgtgcttaagccagtttatatatggcgtttctcgctgaacctcagaataaactatagatccaccgagcggtcgtattgtgttatccgatcac

SEQ ID NO: 257899 - DNA, 444 bp, Glycine max
  unsure (1)..(444): unsure at all n locations
agcttgttggttatttccgcctttttttcttgataactntagaccagctgcacatgatcaactatcaagtgcttcagtggaaacaaatatatgtagctcaatatggccaattggcattttataatcagtagaatttacctttgccaactcacacatctctggaaattaaaatttagtttactaacaactgcagcaaacagatctgcaactcacatctctctttcccttgctcactttatataagagatgtaacgacaaaactaaattcaaatgtctaaaatgattcctaatctcttccaaaataattcttataaaggtcctgactctgctaatgagtgccgagcattggtcaagaaatcaatgaatagaatgtttctgcaagaaatcacggtgagaatgcattgaaatcatcatggcgggagagagtgtttggaacatgtttct

SEQ ID NO: 257900 - DNA, 478 bp, Glycine max
ttgttccacgcgcttaggaatgccgcggttgcgtccgtcttgccgtcgggtttggccccgaagtccaccacgttgtatgaggttgctttggctgaggatgtggagaaccaggtacataggaccaagaagtgcaatgtgtgaagagcgagaagagagagaggagatggtttttttgtcgttgttgttgggtttggcattttggaaaattgttaagtgaagtgaagggtgttttttgagtatatgaatgataatgtgttgaagaagctagaataagattgagaggtagtggtgaaggagagtccagggcaatggcaacggtttgtgagggtatttatgagctaaaagtaaattatatatattttctttaaattgcatctgaaactctctttttgttgtcttctaaaaaaatctcttaattatttaattcaaattacacttcttatccctcctaaatattataatattgttttttctctaa

SEQ ID NO: 257901 - DNA, 469 bp, Glycine max
  unsure (1)..(469): unsure at all n locations
ctccttgcgctaagcacttaagatcctgacatggtggctgtatattttatctaagcacagatcactgcgctaagcccagcatcattacaacaatataactttatcactcgggcttaacagcaggtgatgcgcaaagcgccactcctcctctggaacattttgtttatagaagcgctaagcgtgccatcctgagttaagccccagactcattcgggagttaaaccatcatggttaggctcagcgataggatgcgctaagcgccacatccttacaattcttgattaagtggaggagcgcttagcatgcttgattgttctaagactgaactactcacgatcagnggaagctcgattgtgttctaagactcatatcttaggctaagcgtatgttgctagtaatattgtgctgcaaaaagcgctaagcgccagcatgctgtgctaatccccaaatcattacgggaatattaaac

SEQ ID NO: 257902 - DNA, 447 bp, Glycine max
agcttgtggaaatcaaatcattcctacatttcatctctatcttgcatagcctttctttacccactcctcacgtttggttttttagggaaaaacaccataactaaacgcgccgcaaggtattcctatcgcaccagatccaaatctagaacgatgggtgatcaagaggagacgcaagaacagatgaaagctgacatgtccgctctgaaagaacaaatgggctccatcatggaggccatgtttagtatgaaacaactcatagagaagaacgcacccaccgccgccgctgtctgttcggctgtcgaagcagacccgactctcttggcaactacgcaccatccttcctcaaacatactaagacggtgaagggacacactggggcacgatggcacccctcacctgagatacaaccgagcggcttacccttatggattgccgcccactattcac

SEQ ID NO: 257903 - DNA, 422 bp, Glycine max
  unsure (1)..(422): unsure at all n locations
tgcatttggaattgcgaaagccccactccatcattaggattagtttctgacatctcaaacaaacaaatcaaacgtaacaagacaattatagttgttgtttgaatacctcacccactcaagtgtatcacacaattatggcttttctctaatgaaacactcttgccttttaccactctaattccccttgagttcttaggcaattcaagagattatggccacaacaaagaacaattcaccaatatgtgtaaggtaaggctagagagacaaggaaaaggttaaccaagaaaaaggctaacaatgttgttatgcacaaatgaacgagataaaattcataatttatgaattctagtaacaatccttcatgcaaccaatatattacctaaaagagattgtnttttaaaagatcttcaagcatgaaccat

SEQ ID NO: 257904 - DNA, 305 bp, Glycine max
gacgactgacaaactgggcaaatatatagggaggatatggaaaaccctgctgtgactgacttcctgaccgtcaattttcaccccccacatctctttactcagcaataacaaactttgtcttaccacactagtatcacaaggccatccctaatcaccacaatctgtctccgcacttcatgacgaacacccctttgcaccacccataaccaccagaatgatttgcacagaacctgaaattaccccatcatgtcttgtgcttgtcctattacttgatattatggagcctaccctaccagtctcccccc

SEQ ID NO: 257905 - DNA, 308 bp, Glycine max
  unsure (1)..(308): unsure at all n locations
actcagcttttatccagacactctcttggtggtgaagcttcttctttcctgtttattccttagnggatggcgcctcttctctcctcttctcctcttatcttctattgcaactccatgactggaaatcactattgaaggaccttggtgaagctcaaagatccaacctccatataagcttctcaagaaagcttccatcactacttacacccaatagcctatctattagaaggtagggagttaagtcccaagttttgtttttcagcacagcatcatactcttgttgcatggcaacaagccaatctgcattt

SEQ ID NO: 257906 - DNA, 460 bp, Glycine max
  unsure (1)..(460): unsure at all n locations
agcttctntgagaaaacttccttgagaagctacaacttatctacacacacccttctcataactaagctcacctccttgagaagcttccttaagaagattcctaaagaagctagagcttagctacacatacctctctaatagctaagctcacctccttgagacgagaagctagaacttagctacacaccccctataatagctaagctcacccccatgacaaaaaacatgaaaatacaaaaaaagtccttactacaaagactactcaaaatgcctcgaaatacaagcctaaaaccctatactactagaatggcaaaaatacaaggcccaaacgaaggaaaaacctattctaatatttacaaagataagcgggctcatacttagcccatgggctcgaaatctaccctaaggctcatgagaaccctagggccttcccttggatctctagcccaatctacttgga

SEQ ID NO: 257907 - DNA, 356 bp, Glycine max
tggcagcagttttaccgaggcagctcatgtagcttcctcataattcttattaagaggcttcctcaagaagcttcatcgtggcttctttgagaagctagatccttatctacccacacccctttattaactaaattaacctccttgaaaacaattaaggataaaaataacacaacaaatataatcaaacatcaaacataattactaataatatatagatatatatcacggtgttacgacatgtctggcgcggcaataaaagtggcccgtgtgatgttatggcacgaatatgaaccacaaaagggcttgggaaagaataatgatggcatggccaccttagtggacattaaggaaaactg

SEQ ID NO: 257908 - DNA, 449 bp, Glycine max
acctgcagcatgcaagcttacctaatctacaattgcaaattaaatagatgtggagctcaacgcagcatggcgcactgtgctcagcctcaccaaaatgacactcaagcttaacgcatagggcgcgcttagcctaactacaaaaacttaaaagacagtgagggagttgagcttagagcagcatggcgcttaaatcaacacacaacaagggcttagcctcattcaaaggaaaacttatagaagcaaagcggcgcttagcctgacaggtcaggcttaacgctaaacaaaatttctcaaaatcttaatgtctgaacactagtcccgcttagttcacaaacgcgcttagcgggatcataacttgctttcatcaatatggatgaacgcgcttatcacaacatggtcaccctatcgcgcctatcatggaattccacaatttaacaaatgccatgaaa

SEQ ID NO: 257909 - DNA, 406 bp, Glycine max
  unsure (1)..(406): unsure at all n locations
tcactgaattgcttgtgttattgaagaatatgcttcctgttttttctcattacctaagaatcattatgaggctaagaagagtttatgtcctatgggtatggaataccagaaaatacatgcatgccctaatggttgtattttgtatagaaatcagtttgccaaaatgcacaactaccctacatgtggggtatcatgctacaaagtgaagtatggagaatgcagtgatgaatcaaccatanacaacgatcgttcaacaaggtgtgctggtatattccagtaataccaaggtttaagcgatggtttctaatgcggatgatgcanaaacattacatggcatgcatatggcagaaaanatgatggattgctctatctataacgacctgcctcgtcgctacgatatcaccac

SEQ ID NO: 257910 - DNA, 422 bp, Glycine max
gacacaagaaactcagctttcacaagagtcttcacaataactaccatgaagcattttttcttcaaaactacccatcatatctcccagagccccatacccacgataatcacaggagatagaagtccacccaaacctgaaatttcgaagtcccactcgtagacacgcacttcacgaccccgaatatgccctcctttcgcgatttggagcagaaatgatggccataggttagagctttgttgggcaacataatgtgattatgaccaaagtaaccaatatcaccaggctgagcatcataacccgaagcgatcgcgtgttcgcaccctcttggctgccgatatagcttgcaaacactatagggacagcaaaggtaatcgaaggacaaaatgtcaaggtgatcccgacatccgacgaagatattccaa

SEQ ID NO: 257911 - DNA, 453 bp, Glycine max
  unsure (1)..(453): unsure at all n locations
agcttnttggagtagaaacatgggaccaactcattttatttcaaaaaaaaaggaagtcgtatctagtcaaggtctgagagaccatacaagtttcctaacgatttctaattatgtgggccattaagtctatcatatgctgacaatagccgagaagcccatgaatctcttcgggggtggagtaagtgtctgccattgccttggccttggctaacaagcggggaagttcttgactcccgttcaaggtaagagcaaaccggtccatccacatggttgcctcttggtgtaaagagtcgatcacccttcctctagcctctttttccgcatatacttgagcatactcatccgcgattctatgctcgtgggccatggctagacctaactcttcttggtacttggcgatgatagctagcatgttggtctccgtctcgcatanatgctgagacaagcttcttt

SEQ ID NO: 257912 - DNA, 480 bp, Glycine max
ttgatcttccaccaccgtcgccaccatcatcttagatctttatttttatattattagtactttgattttcagccttgtattttggctatatcattatggtatttgaacaatttactattccctatttgcatggtatgtttgaacaaatattaagtatgttatttgactatatgggttttatagataatcttttatgattgttgcttcatggtttggttgttagtttctcaatgaatgttgtatggatgtttagttatgtttgattatttcaaatttgttacgcactttggctttttgttgatgccaaagggggagagaaatgggattaaaatcaagaactcacatgagtaatcaatttaattttaagatatgcacaaattcaaaaacaaagggggagaatttatgtgagtgatcgactaggacaaagtgtgtgtgtttcttgatttcagaagttgtcatcattcaaaagggggagattgt

SEQ ID NO: 257913 - DNA, 451 bp, Glycine max
  unsure (1)..(451): unsure at all n locations
agctntagagcccttaattntgaagcaatttttgacattcccataatgcattccctgaaatttcctttgccttgatacttcatggaaatcaagttctaaaggacagtacttgtttccaccttatcgctttttttttttgcaaagcatttttctatttcaacaaggaaatctttggcacgcttaggaatgccacgcttaatgatcataagactcatgcgattngagtgatcccacttctcatgaagtttcctctattgagaggtactataatctgtaggagaagagggtttcttaatccttaatgcaaggtctagatccatgcaaccaagaataatttgcatgttctctttccagtccttataaattgcaccattaagaattggaaccgaatttagattatcagatatagaagcaaccactgataatacattagaggtgccaagcctactat

SEQ ID NO: 257914 - DNA, 475 bp, Glycine max
  unsure (1)..(475): unsure at all n locations
tgagaacaacctccaaaagttgcatgttatagccacttcttgttccaaccatgcaaatcttgcctgaatattctgaccaaaacccatcaagactaaacattattgaacttggaaaacgcttgcggttctttaatcttttgccacgtgtgaagtttcccacacggtaataggaactggcagttgttactaacaaggtagctccaactttgtgtatgccaaagacatcagtttcatacacactcttgattcgaagggtaacttgtttctgtctcagtttctggaaggtgtcagcaccaacaattntgtcaccaccaaggtagtaaccaacttggaatctaccatgtgggaagtctttgaacttggactcattgnggtttgagtttggaaccatggaagcacagtgatctgtgtaagtgagttgagaagcataagatgaaaaactgttaagggagattatggtgaatagaaacaatgt

SEQ ID NO: 257915 - DNA, 315 bp, Glycine max
ggccattcttggggacaagacttgcgaactagctttcttagccttcaagaagaccattaccactccgctagcctaaacaaccccgttgaaatccaggaattgtccgcaaggagactggtattttggtcacaaacccatgaagaagacatgacgggttgactctagaccagaaacgaagtctacgatatggctaggatcagagaagaagcttgtcgcaacctgcccttctgcaagagggcgatgcgtgactcactggtgcgtgttccaagaaaggaatacgcgcggactctccaccaacgtttatttgatgagagt

SEQ ID NO: 257916 - DNA, 229 bp, Glycine max
ctgcggagttggtcttcgccagtgaaaggatcgatgttgggttctattagaggcaaatctgatcatcctactaggacgactgagaaaactgctgcaaataaagagggtgaggactaccggagaaacccatgttgtgactgccattcctgtacgaccaagtatcccaccaacccaacaatatctttactcagtcaataacaaaccttgttccttatctaccacccaggta

SEQ ID NO: 257917 - DNA, 449 bp, Glycine max
  unsure (1)..(449): unsure at all n locations
tttagatttaaagctagtcatcatgtttatgagcgtattcctangtatatttatgctactattctcaatgatatgaaataagtttatttctcctaaaaaaaaaaccaaaatgtaacttcaattatatttagcataccaaattataaaaaaaagagaaataatgttgctagagtgtttcataaaacaaactaaaataatttaggaaagaatattggtgttaatagggacctaaaaatatagttggggggggggggatagtgtaaagtatttacaaaacatttgcactaaccttccgtgtcggttgttataaataatttacacatattatctttgttcttatctataagaaatatatgagaatactcttttgttcctaaagtataagagtatattacaacttgaatagttttctatcaataatctaaaataaacatatattaaaaaatata

SEQ ID NO: 257918 - DNA, 442 bp, Glycine max
  unsure (1)..(442): unsure at all n locations
agctttgcatgtacaaatacatctttcaatagtntcaaaatcattgtcgtggatgtgtcactcatccgacacaagcatttgttatgacaatntcaccaaagaagacaaccttgaatattttgaacctttataaaagggttatgtcgcatctttcgctaattcataaaactatttggcttcattcctttcttgtgtgtgggttggaactacttcatccctatcaacctctacatttggagcaatgggcacttcatttgtatgctgcctatcaactccaagagcatcatcaatcataatctggataggatcttcaataaagtagtcttagactacatttgtatgaaacatattacaagtgtcttctatctcagactccccatggtaccaccataaagtgtaccctaccagacatggtgtatagattaagtgatcatatgccaca

SEQ ID NO: 257919 - DNA, 277 bp, Glycine max
ggggctcgagaaaagttaaacttacaaacatattgaatatgatgataactctgaactgatattgatttcaatttagcatcctctgtctctttaatgttcaataatgtaattggaacttccattctgatttctggaacttcctggccgttactgaacagttataatgtggggcggtcataaactttatactcttaaattacttgcgggttgacatgatgatcaaccttacatccgctgatcgttttatatgcgtgctagtgatattataaaaaaaatc

SEQ ID NO: 257920 - DNA, 311 bp, Glycine max
gaagcttacctaggaagttatcccacgatagcttctcaaggaagctacctattccatatactaaagcgtgcgcaacactcgctgtacctccgatgaatgaaagacctacgagacacactccaaatgtcactcttttacctcttctattccttcaatgtcgcgcatcccccatctctctttcttttcctgccttaaagcatcgtccttacacatcttaacccatgcactttatggagaggaagctcctactctcttgacttattccctaatggatggtgcatctactctcttatactccgttgacttccgct

SEQ ID NO: 257921 - DNA, 423 bp, Glycine max
cctcgcagcatgcaagcttatatagaaggttcactactcaattttctacaatttcatcacctctcaacgagctggtgaagaagaatgtggcatttacctgcggtgaaaaacaatatcaagcctctgcattgctcaaagaaaagctcactaatgcacctgttctatctcttcctgacttttctaaaactttggagctataatgcgatgcctctggagtgggagttggagctgtactgctacaaggcgggcaccctattgcttattttagtgaacaacttcatagagccaccctcaactaccccacctatgataaagagctttatgccttaataagagccctccacacttgggaacattaccttgtttccaacgaattgtccattcattatgatcctccatcactcaagtacattagaatgcaaa

SEQ ID NO: 257922 - DNA, 202 bp, Glycine max
gaggatttgtctttatatatcgttgcacaatttccgctgtttcgacataagagtctcactatttctacacccggagagcaagctgcgagcgaaatgatgtgaccataggacacgctgaacaatttccagcgtgtgtgcacaagattacccatatacggacctccttattgggacatacgagcgataggttatgaccattgct

SEQ ID NO: 257923 - DNA, 469 bp, Glycine max
  unsure (1)..(469): unsure at all n locations
aagccttggtntaaatatcgagagtctcgatatattacgggacttaatcgtacttccgagtgaaaagttattgtcgctagaattagctgcgagcttcggttctaaatttcgagcgtctcgatatattacgggactcaatcggacttccgagtgaaatgttattgtcgttcgaatttgctacgagcttcggttttaaatttcgagcgtctcgatatgttacgggactcagtcggacttccgagtgaaatgttattgtcgttagcatttgctgcgagcttcggttttaaattttgagcgtctcgatatattacgggactcaatcggacttccgagcgaaatgttatggtcagacaaatttgctacgagcttcgattctaaatttcgagcgtcacgatatattacgggactctatcggacttgcgagtgaaatgttattgtccatagcatttgctgcgagcttcagttttaa

SEQ ID NO: 257924 - DNA, 432 bp, Glycine max
agcttcaatggaacttacaccatgcggcatttatagcatcttcatctaagcgaggttcttttgcttcctctatctttttgctcagagaattctctttaattccttgttcttcatcttattctccatgtatatcctccatttccttgcggtttggtgctcgctacagtcgattcaaaaaaaaaaaatccgataaatcttacatctacactcgttcttgtatttctatggttcaacatttcgagatctactcttgaatcatgtgttcgtgttgattttaagtactatcacttttcattcataatattcttgtgccgaaccttagatctaaagtctattccaaaatattgattacaacaaaaaaacaccaaaatctaagcgtcaatcacctaatccatggtggcttagagccacgcgtagtcataataatcgtca

SEQ ID NO: 257925 - DNA, 434 bp, Glycine max
  unsure (1)..(434): unsure at all n locations
tgcnaggaactccncanatgtgaagccatgttagacgatagattgtttcatcgccggcgtccacttctgaatggaggaaaaaggagtcgctcctgaaacaagttctctgtggttgatgttgttagctgttgaactctaacttaacactaaaataaagtgttcaatctgattggggtggtgaatatagacccttctctgctttattagcttcctatggcattccacataggttaatctgtccacacactcatcatcaaaatggtgttgttgaaaggaagcatagacatatagttgatctaggactcacattacttcatcatgccactctacctctacagttttgggattatgctngtcactgcagtctatttgattaatagggtacccactgcagcactcaactntgttattcctttggtcactctttttaacaa

SEQ ID NO: 257926 - DNA, 445 bp, Glycine max
agctgcagctttgaaaaatgaaatgttataacttttacacggatgttccgctgagtcctgtagtatatcgagacgctcctaatcgaaaacggaagctcgttcgaaattcaaacgacaataacatcttactcggatgtccgaatgaatcgagtaatatatcgagatgctcaaaattgagactagaagctatgagctaattgaaatgacaatcactttatacacagatgtcccggtgagtcccgtgacatatcgagacgctccaaattgaaaacggaaactcttagaaaattgaaacgactataactctttactcggatgtgcgagtgagtcccgcaatatatgcagacgctcaatattgccatccagagcgttgagaaaactcgattgacactatctctaatccccggagctcagtcgagtcctcgaatattatcgagacgctcca

SEQ ID NO: 257927 - DNA, 466 bp, Glycine max
  unsure (1)..(466): unsure at all n locations
tctagtctcaattntagcgtctcgatatatgacccaatncatgctgacatccgagtaaaaagntattggcggttgaattacctacgagcttccgttctcaattagcagcgtctcgatatattacaggactcaaccggaaatctgtgtataaagttattgtcaattcaattctctcagagctttggatctaaattntgagcgtattgatatattacgggactcaaccagacatctgtatataaagttattgtcatttcaatttgctcagagcttctagactcaattttgagcttctcgatatattacccgattcaatcggacatccgagtaaaaagttattgtcgcttgaatttcctatgagcttccgctctcaattatgagcgtctcgatatattgcatgactcaaccggacatccctgtataaagttattggcacattaattttctccgagctctcgatctaaat

SEQ ID NO: 257928 - DNA, 441 bp, Glycine max
  unsure (1)..(441): unsure at all n locations
agctctacattggccatattatgctgtcatatcccgggtaattngatgttttaaacttattgtgatgtatgcattaatcttcttccaattataggctgtagcaggattagcagctgatggcagacaaattgttgccagggctaagtctgaagctactaactatgacaggtttacttcattctcttgcaacgtatacatcttaagatgcctccttccccatcccttttatttatctaaatgtgtgactgaatactcttatctttnttatgggctactgccttggattaattgacaacttgtaaagtaatttagccttgttttttgattttgtagtcaatgtaattttaagttcttttcatttagctcttatttcttcatggagaacaaagtatagctagtttagatggaccaatcgaaaccctgcataattgacttgacctt

SEQ ID NO: 257929 - DNA, 428 bp, Glycine max
  unsure (1)..(428): unsure at all n locations
actcaagctttctttacaatcagtctgtgtattgactaaattctactgttatttcacactcttgnnctttctttgttcaacatacaaattcgttcgaattcatgaaaagaaacttgcattcaatttaaaacaaggcatacatccatttcacaaaataaataaactacttcactgccataccaacaaaagttaagttaaactgttccaaatgcttcaggatgagcaactacactactcatgcacaaaactaataaaaagtaaataatgtactaacaccataattatactaataaatcaaaaagcacaaaaaatcaacaggaatttaaaagtcctgtgattggttctgggtgtcttgtgtttgaacctcctnctcttccgacaaatgaagaacatgagtagctataggagaggcgttcagagactggact

SEQ ID NO: 257930 - DNA, 479 bp, Glycine max
  unsure (1)..(479): unsure at all n locations
acctctaagtcacctgaggcatgcaagcttgcttctcaacattagatatcaatnctttntcttgcttcaaaataaacaactgaaaatggagaacacacaatgtgagaatgataaaaaaaaatggctacaatgtgcacaattaagctcacttcaattttggatagtcatgcaatcacctggtgttcattttctttcttgaagctgtaaagtctatcgatagaattccttgctcgtgccccccattcgtcgcactctgaccgtaatgttatgttctcatctctaacaacatcaaatattattttntgacaactcttttttggatcagtaagaattgaagacaggtatccgagaatttacaacacatgctcctttttcaatcaactcaactagatcccgtcagttattattttgacaacttattgaaagtctgatagcaatgcacgctgcatgtgtaaaacaaacctacttatatttgtgtt

SEQ ID NO: 257931 - DNA, 410 bp, Glycine max
gacatatgtatatacgaatagtatcttggtaacatatcttttgtagcattttcatatgtttggaccattctagcatatttgactattaaactatgttatcctgtatgttctttttctcaagagaagtatgattatcttatgcacatgatatgtatccctatcagatattattttgtgtcattagagattttagatttcttacactgttgctgatatatggttgaaattgttgttttaatcttgatggttcatattattggttggtactatccaagttggagaatgttaaaatatttgttatggattaatatcaatcaataattaatacattattttttagtattataatttgatacttaaatatatgataataatcatatattgattacaacatattttacatgagatta

SEQ ID NO: 257932 - DNA, 393 bp, Glycine max
  unsure (1)..(393): unsure at all n locations
ctgcagcatgccagctaatgcgcataattccttacaaacgttctcttgcacaaaacattctattaaccgaaaaaaatgcacccatatacaatcaaggcagcttcgatacctagattatttacacgaacttcccaggtgtatttgttacttacatcacacacatttccttggcttaaatcacatacatgcatactcaaagcattttggggtacccaaaatagcacatgtgcacatnttgcgatctctaatacctatacatacaccaagcttatgatgaatcctgactatctacacaataaggtgctacatttcatgctctttccaaagttttgctacctaaagccgcctgctaattcaagtatatcttcctttgctgactaaaattggattcaa

SEQ ID NO: 257933 - DNA, 479 bp, Glycine max
tcctcggggccattcctgcgaaggcaaacattcggtttgtttatttatcagtgggacactactcttaaagcaaaaatggcatataacctcctcccataaatacaaacatcaatgtaaatttagagcaagctcatgcgcatacttccttacgaacgttctcttgcacaatacattctattaactaagaaaaaatgcacccatatacaatcaaggcagcttcgttacctagattatttacacgtacttccaaggtgtatttgttacttacatcacacacatctccttggctaaattcacatacatgcatactcaaagcattttggggtaccaaaaattgcacatgtgcacatcttggtatttctaatacctatacatacacaaacttcatgatgaatcttgactatcttcacaaaaaggtgctacacttcatccctttctcaagtttttgctacctaaagccgcatgcatattcaagcata

SEQ ID NO: 257934 - DNA, 482 bp, Glycine max
  unsure (1)..(482): unsure at all n locations
cctataaaactcagcttctcggatcttggtcatggtcagtatgagacatgtgtgtgttccaccccattgngngactttccatgaatcaattnttttagataaaattgctctcatatagaataagcaaggacactctacgctgttattcaagcaacaaacaatatacttgttcaatttgctttcaacaactttgaaagtttgatgcaccttcatagcatattgtttcagtgcattttttattgcatctttagtatcaaaatccatgccaacatataattcttgtccaacattaaaagttgatggcatctccaaaccacaaatgtcttcctcatcacgatgactccagttgatattgttataatgcagagcatcattcccaaatggagtttcaattngttgtacacctaatagttaatatntctttcaaatcatgcttatttaacattaaatacaattgacatcaaatgataaatgtattcacc

SEQ ID NO: 257935 - DNA, 367 bp, Glycine max
  unsure (1)..(367): unsure at all n locations
agcattacttcatagctttaaaaattcactatctgcctccacacgataacacattgcctaaaagctactatcaggcaaagaatatattgtgtccgatgggtatggaatatcaaaagattcatgcttgccctaatgattgcatactgtacatacatgaaantgaagaaatgtcgaaatgccctaagcgtggggccacacggtgcaaggtgaatgatgatgacgactacagttctaatgaaaactcacagaatggccctccaacgaaagtgttgcggtatcttcccatcatctccaagtataaacgtttatttgctaatgaggacgacgcataacatcttacctggcatgcacatgagagaaaatatga

SEQ ID NO: 257936 - DNA, 429 bp, Glycine max
  unsure (1)..(429): unsure at all n locations
agctnttgtgtgcacctctccaaggttgttatcaaaccttacttaagccttttcaagcaactctccaaaggtcatatccgaaccttaagctttttcaaaacttgttaatttagactagttcctttccattgatttgtttccaatatatttagatttatatctcatttttccacaatctattgttgccatataataactcaataaaattaagagatagtatacaataactcataatttaattcatagataaacttatacatcaactctaattagtagtgctggttacatcaacattaaatccaccctacacttagattccaaacccattccatacttaacaaaatagtagtgttggtacatgaacgtaaatctaacctacacttagattcaaacccattcatacttatcaaatacaaacataaacattat

SEQ ID NO: 257937 - DNA, 468 bp, Glycine max
  unsure (1)..(468): unsure at all n locations
nttcctttgcagcatattcatatcactaaatagttttgngtctatgtttgtagccacttgatttaatgcatttaaatgtttgctttgattcttcatcatgtgttcgatgaaaagttgaagcaaaattacctcattaagagcttatttgacatcatgtttgctctgatttggcatagcacaacaatagtagttgacaattatttatcagtatggatactaaccttctggactttgctatacttacttatagtcaggtcaagtacaagtgtggtatttctagtgcaagcctaaactcattaatagattaagactcctaatgctattatttcaacgtatttaagtagacaaatatactgagaatacgtatggacttaatcaacctatccccaattagttacattgttatagaaattatgcttcatgactctggtttgtagggtggagcatttcacattcccttgtaatact

SEQ ID NO: 257938 - DNA, 313 bp, Glycine max
  unsure (1)..(313): unsure at all n locations
gctttcttgatcatccacagaaaatatatttgtatattaaacgagcaccaaaggtactaagagggacacgattaatattaccaatgtgacatatttgaaatcacccacctatttggtccaccccacgatggggcacatatgcacgcctctacttacaaagcaacttgcctctgcacgtcctgaaatgtctagccactatctaaagacctctgtcgtcagatgatgacagaccacatgagtcgctgtggagnggagaaactacttctaagtagtagcatccaagtacataccaacaacaatgcatcctgcatga

SEQ ID NO: 257939 - DNA, 405 bp, Glycine max
  unsure (1)..(405): unsure at all n locations
tatttcttctcacaacttaatctcgaccgattgcttttgtgcacacaaatattgngaaattggtaaatactcattcttggtaaatactcatgttttttagctgctataagtatcatttaactaaagcttttatggtcgctaactgagagctgacaaataataataacatcagtttacatttatgtgtattgataacaagagccacgtggcgattgcagtatatgatataatagntatagcagaagtctacttcctatgaatatattatcttcttgaaaattacattaagagaagataaaaaacttaaccaagtgatcgagggtgctaatctttaaccacgtcgcattttcttatctatttatctatgacaatggcgataaaaagtattcgtgttagaatagtact

SEQ ID NO: 257940 - DNA, 416 bp, Glycine max
  unsure (1)..(416): unsure at all n locations
agcttgcatgataatgctcagatgaaccattaactctattatggatgttcccaagctgcaaaggatgaaaaaagtaatttagaaccaagaatgagagatttgcacaaaaatgatgaagaaatgagtagaaaataagaggtttatgagcttcttaccaaagcttcgggggaaagagtctcaagacactactatagagcttggaagaagatgaaaatgggggtctcttgctccttgaaggtcttgtgcaagaagaagaaaatgaaggttcaagttcttgtttctggagaggaaatggtgagaaatgatgcaaagctatgcccaatgctattgataagctcacttgacaagattgaatgaccatntgatggtcgtgttggacaaagggtgccataactangtaattttgcttttgagtt

SEQ ID NO: 257941 - DNA, 454 bp, Glycine max
  unsure (1)..(454): unsure at all n locations
tcagctgcagtcagacaggctgtctggggagccttttttttttgccagacctcaaggtgatggcactcacatttttcggattctacccactttgtgaaggaaatttgtcagaattttgggactgagcttggtccaactgagtagccatatgccccatctgatttgtcagactctgaatggaggctcttgtctcttgctaaaattgcatattctggatggtcatttgcctcactaactcttctaaggaagggtgagaaggagccttagttgcttggtatctttgttgcgactgatgttgctgtattacaggaggaacatatgacttgcttggaccagtatcattctgaataggagggacaggttgttgctgttgtggacgacttgtccatctaagattaggatgattnctncaacctcggatgtatctattggttaaaaggtcataattattcta

SEQ ID NO: 257942 - DNA, 302 bp, Glycine max
tgaagagcacatagtgggggccacgtggcatgccccagaacttctcaatgctacagatgcctactgccatcccttacaaccccttgaaataccgaatgccagaatggaccacatgtgaatagacacacgaaaattgaaaatatgtccactatgaccccactacacatctatgggcatccgaagaaacaacggaaagtgcacttactagtatggagtgaaaaaaaatgtgaaaagggaaacataaactcaacaagggaagctcgctagcatggtgcgaattaatgaccgagagctaggggctt

SEQ ID NO: 257943 - DNA, 341 bp, Glycine max
cacaaaactgatttcttattcacaataattggccttttctccacgatctccctcctcaagaaacctcaaaatcttaaagacttggagcttggtgtttgtgctctaaagaaaatcttttctcttctttttggtggtcaactgtgtcttttagagtggtaaattcatttttctctaaacacccatggaagttcatggaaaaacttattttttagaggttaattctgttttggctggctttggtgtcttggtgacgcatctatagcgggactattgtgggagtggaggaaaacttctctctttgacccataactcacttctttccattccttctttacaaagtc

SEQ ID NO: 257944 - DNA, 471 bp, Glycine max
tcacacctcgtataagggagcagatccgatcatgattgttttgtttcatagtggaagagttaagtttcagaccttgcatatgagagaaggtgaagtcatctccgactatttctctagagtcttagcaatcaccaatcatcttaagagaagtggtgaaaagcttgatgatgtaaacattatggagaaaattcttagatcgttagatctaaaatttgaatatattgtcaccatcatcgaagaaacaaaagacctggaggctatgatcgttgagcaacttttgggcttgttacaagcttatgaagaaaagaaaaataggaaggaagagatcatggagcaatgactcaagacacaagttaatttgaccaatgaagagagtagtcataataataaaagcaaacaatgacgatgtcgtggacaacgacaaggacgaggttggaggccctatgactacaacaacaacttccaaagaag

SEQ ID NO: 257945 - DNA, 447 bp, Glycine max
aaaactcagctcccgatgacccacaaattccgcccgtttttgttttttccccaaggaatgaatcagaaacgccttaggtgacatgtgtcaagaaacaccgaactactattttcagccgacattgcacaattacttttagaacagctcgctggcccataatgtgctttatacggcagaggaaattttcttgttatggagttgcataaataagttacacgtgtcatcggttaggtttttcgtgcgacgttaaccgacactatgttcctgacaggaaaacatatgcccacctttgcctattaaatatttgctaactagcttcatgcatacttcattcatcgagtgaatagaaccctcaatagccgacctctgttgcgaaataaacgagactgatcatattcagatcgagtttgtgcattaatttttaagtaaacactcgctagccgatat

SEQ ID NO: 257946 - DNA, 455 bp, Glycine max
  unsure (1)..(455): unsure at all n locations
agcttgtaatcgattacaagaagctgttattgattatagctcatccctgcctataaaaagctgcactttcgcagaaccctcactctcctcttctccttgacggcgtccaacctcctctaaacttcaaatcctcataactttctcgtttcttggccaaattacttcaaacaaagctcaaacttcttctttctttaattctccagaaatcctacctatcagaattagctgaaacaagctccaatggcagaatcttcaaagaaacgaaagggatcctcctccaccaccactactgtaggccaccgtcaccatggaacattcgatgacccaccagcatccattcctccttccttntcatctcccaggtcattaactctattctcctctgatgatcagtgtcagaggaattattcccaattctgaaaacgcgtcattcctgaccctaaatatatagatat

SEQ ID NO: 257947 - DNA, 470 bp, Glycine max
cgaagggacacccacattttctagtaccagtgactgttcttattatattctttttcctacacctatactcgccacttctttcacagccaattaacacaaacatagtccttcctttactacttgtgtttgtgtccgaccttaaaatcaccaccacaaatccgttttcatgagcaacggatcaagcccaccccgcaaaacatccgcttggcacttaaacacctacgaagcaatccacataatttatgttttctaccagtattcattttattaaatctgtgacatacactaacattataacctgagaagtattgaacgcatccgaacaatcaacatgtggttcattcacaccacatgcttcttcattttcataatccatatacgcttgttcagatattatgtcatacatccactcatcttcgaccatctaaccaacgcaaacaaataatggtcatacaaacagattaataatt

SEQ ID NO: 257948 - DNA, 428 bp, Glycine max
agcttcttagagatacactatttattgtttgtttgtacagaaaactctagcacatgagcgttcactattgaaagctttgacctggaaacatatttcacctttgttccaataacaaaaaatattacacttacactcttgttccttacacttcgctctaaccctttcacgatcattcttctttcaaacaaattcccttcctaggtgaattgtgtagtctctaagcgcatccttaaacaagttaaggttgtcaaaatccatccccaactctaggtgaacttgaccaaacgttgaatttggattaaaaattgggaaaacaaccttttcatcatcctcatcatcgtgaataaatgggcgtcttcacccctctgagtgcgcacggaactttgtctaactgcttattacattcatcacttggagggttcacactt

SEQ ID NO: 257949 - DNA, 454 bp, Glycine max
actaagctattgagttgctaaaccggggaggttggctgtttattagcatacaaatgctgacaagaggaggatttctttggaaaggaaagaaataagtttatcccatttacaagggtggggaccacaagtggagagggtccctatttgtcacatcaacgagagctttatcagtgtaggatggatgcatgaagatcaagttgctgtgctagatgaagaaaccaatcaagaccagccaaattgggtgcaatcgtgttccccaagctttgaattgaagaattggcaaatcatggagcgactcgagattattgtgtcaaatccaatgtaatcaagtagtttggaccctattgttgggcctaggctttaaggtctgtttctcttgctgggcatactttcctttaatgttccagtgattattaatatacagcctcttcttgagatgttccctctcgcacct

SEQ ID NO: 257950 - DNA, 406 bp, Glycine max
agctttgagggtgcgcagcccaccatcttttcatattagagcaccgagaatgtgtctaccatcacgaatatcgtctccctttttgcacatgttctgtagctgcatcctatccggaaccatatcagaatagtactgatactgcctaacgaaggcaaccattatgtccttccaagtatggactccggaaagttccaagttagtgtactaggtaacaactacctcagcaagactttcttggaagaaatgtattagcagctcctcatctttgtgtgtgcccttatcttccgacaatacatctttggatggatcttggggcaagtagtccccttgtacttgtcaaaggccagcaccttgaacatgggaggggtgatgatattgggtactacgaacaactcttctaggttag

SEQ ID NO: 257951 - DNA, 473 bp, Glycine max
  unsure (1)..(473): unsure at all n locations
cgcccagagaatgagtccacggaggaaatgctaccaccttaatgactggaaagcggnttctaatgactcctttgcggcttccacataaggcataaaggacgggcagctcaccaagatgtcttcctcgcctgacacgatgaccaaatgcccctccattacgaatttcaacttttggtggagtgtagagggaacaactcccactgagtggatccacgggcgccccaacagacagctgtaggggggttaatatccattatttggaaggtgactcgacaggtgtgagggcctatttgtactaagagatcgatctctcccctaacctctcggcgggtaccgtcgaaggcacgaaccaccatngaactcggctntaagtgngaagcatcgaatggtaatttctccacagtgctcttangcatcacgtataaactggaaaccataatcgatgagcactttggctatgacatggtccatac

SEQ ID NO: 257952 - DNA, 449 bp, Glycine max
  unsure (1)..(449): unsure at all n locations
agcttctctagagagcttccatgatttttgtctttgatgcaatccttcctgcgaagggacgagtcaccagagccatgagcaggaggctccaagaggattgggctagagttgctgaaaaaagccctaggattctcatgaacctcaaggtagatctctaagcccatgggccaaggttgggtccacttgtctttgtaaatattagaataggcttttcttcttttgggccttatattttggccattctagttgtatagggttttagccttgtatatcagggcattttgagtagactttgtagtacggactttnttctattttcatgtattctggcatgggggtgagcttaactattacaggggtgtgtgtagctaagctctgacttcttatctcaaggaggtgagcttagctattaaaaggtgtgtatagctaagctctagcctctcaaggaa

SEQ ID NO: 257953 - DNA, 460 bp, Glycine max
  unsure (1)..(460): unsure at all n locations
tcttcccaacccanaccattcatggcaccaccaatttccttatttacccttctttcttttctttctctcgcaattgtcttcaacctaccttttttccacacacaatttctctattggcttctggatctcctttgtctacctcttcttttcaagttcatgtgatgtgcaactgtgatctgttctagtgtatcatacaattcgcagtccattgattccagttttagaattttcaatttgttaatttttagagatcttcactcttcatggtacctttttttttctgttaatggtttagtttgagtattactatatgaaaatatacgtcttataattgatcttgagtttaaaatttaaatatagaactgtgtaaatactcataggatccaccgatataaaaaatattacagtatttatggatttttgacnaataataaatatacgatatcttaatgcataattc

SEQ ID NO: 257954 - DNA, 364 bp, Glycine max
  unsure (1)..(364): unsure at all n locations
agctnntgtcgcaagaattactgaatattatgtgttaaggcccaacgccttanataaccgccttgcaagttaaaagaatcgcttgatttgcctcttttgaaagaactacgctaagtctgattttctcttctatgaatggtacgtaggagcaatagccccacttttgtcgacctcaaaaataaaacagagattaaagttgatatacgtgatgtcacacaattctaatctaaggctgttgtcctttgggacaaacgtgagaggagctaataccttcctcaaacgtaaagataactcccgaatctgaaatattcttcatgaccggctgccgttggtttttctaacattctcctttcaataaacattg

SEQ ID NO: 257955 - DNA, 452 bp, Glycine max
tctcagcttgccggggagaagaccttcacgagcctatcttgttttcaagagggttgctgctagctgaagtcctagaaagctagctaccgttttgctacaaaaaaccacatgttgctcccgttgctagtcccaaagaataaatctagcccggccacgaacacaaagtggcggctagtatgcccgagtgacgtgaataacgatgctagatgaaaggtgatcgactcgttacatcaataggcaacaatgtggatggaccgatttgctcttattttgaacgagagtcaagaactttcccgattgctatccgaggccagagctatggctgacacctactccgcccccgaagagatccacggacttctcatgtattgtcagcatatgatatacttaatggcccatataattagaaaccgctacgaagcttgtattgtactcatatcttgactagatat

SEQ ID NO: 257956 - DNA, 374 bp, Glycine max
agctcgcctcggtaatatatatatttctttcattgaggagaaaatcgataatactccgttacattcttaagcaaattgaaaatttattcagtagtttcttcttggaacagatccctcttcttgattttctctaccctctctacgggtatgaatgcttatgctcacccttaaattgatactattgctgctctttcttagtttcatccatccgagtaagcttgccctcgtaattactgtacatgaataaaacaccactcattgagtataaaattgatactattgctgttcagcctatagaaagttgggctccacttcaccttatccgtttatgtgctgcttattgcgacatatttgaaaaaatatacagtgcttct

SEQ ID NO: 257957 - DNA, 176 bp, Glycine max
agcttggtgaaacaagacgaaaaggcgcgctgctttgtctataacgtgaagcctgctatacaccctactgagctatcagaggaggagtctggcgtggcacaattgaacggtgaatatggttatcctgagtccgaggattctaatggccgagaacgagaacccaaaggtgccctcca

SEQ ID NO: 257958 - DNA, 413 bp, Glycine max
agcttgggaagtcccattaacaccaattcaagtcatcgttatcctcaccccttgatatttctctcgtgtgctttagaactaggtaaggagaattagttcatgtgaactcaaaccccatggttgtttaagggaggattcaaccacggaattgcatgtgtgcctccattggtagtatttttgctatatatgttaattagaatgggtgaaatcttgtcttgttaacattctatattgtgttaaaattgacttgggagagtgcatgtgccttttctctccacgtattttactctagatttctttgggaaggctccaaatacaaaggagattcttgcccaattttatcaaatatttaacccaagcatttctctcgaaattcgaagccaaaacatctgaggcaatgattgtttcagctt

SEQ ID NO: 257959 - DNA, 419 bp, Glycine max
  unsure (1)..(419): unsure at all n locations
acttatgaatattgaagaatgacaaatgcttcaataggaggataccatgttaatggaaccacagcccaagttaagaagaatatagaagatgtagccgctagtgaatgaggttgtgattgcaaccgcacctctccaaaggatgttcccaaagaagacaccgaagatgaatccctcanacaacaaacacanataaaagctatgatggagaacatgaccaanagcatagtataacaacttcaaccattgatgccaccaaaacaactaattctctcatgtgaagagtgtggactgcaatgtcgtaacaacaagaaacgggttggaacttaagatgtacacccaatttttcgtaaataaattaaaatatttaaaataatagtttagaaaatgatgaggttataattaataataaaagaaatact

SEQ ID NO: 257960 - DNA, 412 bp, Glycine max
agcttggtgcatatgatttatatgctcccgcttgatgggtgagtgttgaatattctagtatttatctatgtttggtagcttagttggtaagttctattcagaaggtagcaatgaattgtcactgtcaatagtccttctctctctctctctctcttgtatcttctatatatgtatcattttgaaatcaataaaagctaagtgagaaagagtgagtttttaccctcaactcacctcagtcttcaagtgcaacaacaacaacaatgcaacaaaaaattgaaaaggaacaaccttaatattcaacaattttcatattgtgttgtaaatacatatttaaatgaaaacacatatatttaatgtattataaatattaaaagactaatgttaacatatttctctagaacattagttaaca

SEQ ID NO: 257961 - DNA, 516 bp, Glycine max
  unsure (1)..(516): unsure at all n locations
ctatactatactcaagctttgcanctngaatcatattaaggacatcccaactnggtacttatatcatgctacagatatgtataccctatctatagcctcttcttcttcttcttttatcacagctcccttatattggtgaatggattaacatactacttgtcaaactatatagttgctggggcatcacgtattccattatggataacagatggagtatttatgacaataatttttcatattggaccaatatggattctttattactggttacacagagcacttcatcatcacttcttgtaatctcgataccattcccaccatcattcttccattgtcacacagcccattacttgtgagtcacaatattaatctctgttacattgcttgtgtagtcgatgaatgcataatgtcacatatcttatcactttgaatgtcaatgtccatactctcgcacacactacaatgatgacttttgaatgtatttattttgtgtgaacgtaatttagattaattaaa

SEQ ID NO: 257962 - DNA, 412 bp, Glycine max
agcttcaatgcccctgccgcaatttcctggggggactatttttccagcttactgaatgtgctaaaggttgcaaaaattatatatttacaaatcatcaatagaaccatctttaatatgttaaaccatatatttttgcatttggtgaaacaaggtttcaaaagtctgtatttatattttaatttatatttcttattcatcctattaataaaatcattttttaaacaaaaaaataatttattagttttactttattttacctgtatctatctgaaaccaaggattaaataaaacatttttttgttttgaataaaagtttttaaactgataataggtataaactttgacatatatatgctatatagtcttctctttctagctagctcgattatgatgaaatccgaaattgatattt

SEQ ID NO: 257963 - DNA, 372 bp, Glycine max
ctttctttatcttcaaatcctaatggttgcttcacatacacctcttcatttatgaatccatttagaaaggcattcttaacatccatttggtacagattgatgtgtttgtgtgcagcataagctaagagtattctaatggcttcaagtattgttactggtgcaaaggtttattcatagtcaattacttagtgattgtattcttaaacaaccagtctaaccttgttttaaaccacttctcctgcttcattgagcttggttttaaacacctcttatttccaatcactgactgattcttatgaggaggaacaagattccaaaacgcgttcttggtgaactaattagttcttcctccatggctatcacctaagaatc

SEQ ID NO: 257964 - DNA, 414 bp, Glycine max
agcttgcctctccttcatcttgtcctaaaaaatcctgcactttgtcaccagctgattaaaatccgtgatctgcatatagctaaccgcctgttgaatctccaatcagagcccattctcaaactgagcacataaatcttcctcattccgagcatcttggtattgaggccaatactgtagaagttcattaaatttggccgtgtattccccaacggacatgttcccctgctttaaatccagaaattccctcgccttccgcttcctgagatctcgtggaaaataattttctagaaatttgtccttgaaggcattccaaggaatcacgcctccaggtgcagcaaatgaaggcttcataaacttccaccaattctcggcttctccttggagcatgaatgtcgcataagggaccttatgctc

SEQ ID NO: 257965 - DNA, 434 bp, Glycine max
  unsure (1)..(434): unsure at all n locations
gctttatgaagctggtcttgagcttaatgaggtccttctatggtgatttccaccatggagatgcagcagaagacataggagtagaggtgagaggaggtgccatccactatggaataaaccatggaagaaggagcttcaccaccaagaatatgccttggataagaagcttggagaggatgcttctatggaggaaaagaaagagagaggggggagcacataattgaaggagttaaagaaggagagaagctgaactctgatttgtgtctcacaagactttcattcatcaaatgtacagcaagtgttacacatgcttctatntatagacgaggtagcttccttgagaagctttcttgagaaaactcttcttgataagcttctttgagaaaacttgcttgagaagctataatctagctacacacacccgtctaataact

SEQ ID NO: 257966 - DNA, 425 bp, Glycine max
ctgctgcatgcaagcttgcactggctgctgagcgaggcgacactctatgtctgtcttgtgcactaagcgagttgtgtcaatcttaatctttttctgaaaaataacagtaaagtaaaggaattataatcaatcttagtcaaaatatcctattaattgaacctatattttacaactatcatcgatttttcagaaactgatgttaacatgagttggttaacatcggtttttacaaaaatcaatcttaaccaactcatgttaacattgaattttggaaaatttaacgttgtattgtcttatttataataatttttacgctgtttccagttcactcatcttcctcatgcttcgtctacctcacgcttctggcaacctcgaaccctttgtcactctcaaactcactctcgcggcgctgaaaccactatcat

SEQ ID NO: 257967 - DNA, 456 bp, Glycine max
  unsure (1)..(456): unsure at all n locations
gtgcacccacatgtttaatgttacaatatcttgattcttccagcttatgtgtttatatactaataatactataggacatcccaattccaatggctttctccttttctcttttggatgttatgtcaatctttaccagcttggtttcgtatattaggaacgccctctatcattctgtcatgtccttgtctatttcctttcatgaaatcagaatatatttggactattatataataatatcgagcatgtgggtgggtcttgcaattggcattaaccatatatanttacttattccttccaactaacattggggttaatgttgtggattctaataattatgcaatatttgcatttgtggaacatatggataggattaccttcgattttatatatatgagactatagcattcttcttcgtaaatacgatcacatgtacataaatatttgttataaactttt

SEQ ID NO: 257968 - DNA, 414 bp, Glycine max
  unsure (1)..(414): unsure at all n locations
agctatataggatactacgttgtctcctagtatggccttctcaacgtgcggagctagtcgagggatgatgatctgctgaccaccagcctaatgcctgctcgtacccgtccccgagcatctgaaagcgggaaatggcatttatgcagtgaaaatatggccacgctaccacttaccttggttcatccctgtctaggatttgatgttgtattaaccacctctcgaaatgatcatgtccttgtctaccgattcacaaggtccaaaatgcatgtgcctgcgtatgcatgaaaagtttcaaacgcaataattctttagcaaaaacccattgtgttcagttataaataagcgcttagggcatccctatgggtcgagcgaanaggatcggatcatttaaaaagaatatgctccttaaaggaa

SEQ ID NO: 257969 - DNA, 369 bp, Glycine max
  unsure (1)..(369): unsure at all n locations
aagcataacaaaactttttatgattggtttaaagatacaatctttgcatatgagaatgcttcagaaacattaagaaaactagcagatgggcctaaaagaaatgttataacctggcaaggatacaacataaacaggtattcattttacacaaaagcacaagatgacaaaagtacaatgtagaacagcagggtcaccctaagggctgaatctcaacactttgcaagtgtcaatgacgccaatcccttgtgtagcttcatcccttactttgggttcatntgatgaaattgggagcttaattatgtgaaatttacacgtatgtgtttcaaatgtaaatgggttgatagcaacaccggtgtgcacaccgatgat

SEQ ID NO: 257970 - DNA, 403 bp, Glycine max
  unsure (1)..(403): unsure at all n locations
agcttgngttcctaggcctagaatagcattctttctctcattttaaatccttcatgctgcccctatacatataaaacagtcccacaacccaaagctcacaaaaccatgctcatatctcgttgaggcatttcaccgagcacttggtgggcgcatgtttaggcacgaatatcaagagaatggggacaatgtggcatgcgccattacttcagaatacaccctaggccaaggccatcccttacaacccctcaatccaacaaaaacaagcaacaatctgaggataaatccctcacgtttcttagcaaacacatgcaatttagggcaccaaaatacatcaatggaaagctagaaagcccaagaatgaggtacttacctgttggagacgaataatagagcaaaacggaat

SEQ ID NO: 257971 - DNA, 322 bp, Glycine max
tgacatgaggaagtgttcgaaggcgaatcttcctgctcttattgtcgaccacacgagtggtacctcgtagatatgtggctgaggtcaagagaccttgtggacgtcaggtggtgtgctatagcccaaaaccaagcttgaccaatcccgacccaacccgggcatattcggccaatgagaacctgtgatgtacctaatcaagcgagctcctggcagtcaacagataaaaggaacaaacaccacaaagcaaggatgcttgtggtggctggccagctgcgaacattgatcgaaatgtgggttatggcctctgtgaatcgattaccaa

SEQ ID NO: 257972 - DNA, 382 bp, Glycine max
  unsure (1)..(382): unsure at all n locations
agctnataacatcaatattcatgcgcccaatgcttgttatatcattcctggctcccttcactatggtaagatattacattaatacactggtgcttgcttaagaggatatgttttatatgagggtatctatctctctttacaactgaactaaagggagatgctgtggctaattctatagctcataccaaacgtcatggcaaactttggctggaggaggattctctcttagtcctcaaggctcttagtgttatcaatatggctccttacgatataagatatgtctggatgaacactttattctattgtgcgcaaatggaattacgtgcacccatattatctgaaatagaatgcatgcgctactatggtgtagaactactctaat

SEQ ID NO: 257973 - DNA, 404 bp, Glycine max
  unsure (1)..(404): unsure at all n locations
agcttaaagagttatatacaagaacgtatgtatatattttangaaaacgacaaaagaggaagtcgtgatattgcacgagattagaaggcctaactctctaaaaaaagtccccagtggagtcaccaactgtcgcaacctacccttcggcaggagggcaacgcgagggctcacgggtgcgtctttcatgggaggaaaacgtgcagagtcgccaccaacgtttatttgaggataacatcgaaaaaactggaaaaggtgtggtctaagaactttaatcgtgaaaggtttgggagttgtttttacacacagggaaggtattagcaccccacgcgtccgtcacaagggacggcagcctttaatcaagtgtgcaaatatgacttcaaaatgttttattttcccttatttat

SEQ ID NO: 257974 - DNA, 446 bp, Glycine max
gcgtcccaacgctcagttcaagctcttccattatctaaatgttaatctaggatctctatcagatactatgcttgatggcacaccatgtaacctgacaacctcacttatatacaaagtggtaaacttctccaaggaaaatctgatattaatgggaatgaagtgagcagacttagtcaatctgtcaacaataacccagatagaatcctaacctctaggggttctaggtagttctaccacaatattcatggaaatactgtcccacttccactggggtatctctaagggttgtaacttcccttaaagtctccgatgttctatcttaaccttctgacagactaggcatgcatacacaaactcactaacctctctctttatgttgtgccaccaaaaaatcatcttatatcttgaacatcttggagcacaagatgatgctcaattactctatg

SEQ ID NO: 257975 - DNA, 405 bp, Glycine max
agctgtttgattcaatgccaacatctggcttttatcctaacaattaattacacttacagagcttttatagaggcactgtctgcatctgggagattagaggaagccaacaagatgttgtactcgatggaggcaaatggttgctctccccactcatatatatgtaacctaattatcaaaatattgattctacaggactacgttgaagcggcttaaaacatcataggaaggtgcagacagaagggaatatctttgaattctattcctaatttgtagactagttgtctgctaatttttaggatgatgctacattattgaggttgtgaaagtgaagatatcggctcagggtacaggtatgctagattataaaaatctgttgatattgagatcttgttatatggtgggaca

SEQ ID NO: 257976 - DNA, 219 bp, Glycine max
tgaatggttgtttttcaaagctacacgagatataacgtttacgacactcaagtgcttctgctctccagaaaagaagtgtttctcacgcaccaaaagacatatcgcagatcgcaacggtaagatcatgaaaatctgtcctttgaacctccataccaaatttcgagaagatccaatggttatcgaatgcacgagggtgcttttaccaagacagcttctagc

SEQ ID NO: 257977 - DNA, 386 bp, Glycine max
  unsure (1)..(386): unsure at all n locations
agctttacagcagattttaataatgactcacttttctagaattaaaataacttaatgccattaacctaaggaattaaaaaaaaaacttaatggctgagtgtaactgaaatagtggcaaccaaaagtcacccccaacagccaacaagtcagccaccatttggtctcccagagggctaatgcctaggttgccaattgngcccttattacaacttgaactaaacctactaaagcctttttagttgattaacccaaaacatatttttggtcagccaactttacaaggattgggccattatttagacaaactaaacactctaaaattgagacaaagtggtgccatttagtcctcctccatttgggccatgatacaactcacaaccttggac

SEQ ID NO: 257978 - DNA, 387 bp, Glycine max
  unsure (1)..(387): unsure at all n locations
tatanaaactccagcttctctaaatagagatcacgacaacgtcgagaaatactcgttgtcgccagcttacgtnaactcggcatcgaaaagctcagtctcagcgagcgacgtctagagaatgaaatcaaacgctggatatgcgccgcgaaagtcatgtctccatttaacttcaagcattgaagagatgaacattcaaattctcccaaatctcaaccatgccccatctgcatcaagattgtttcaccaatctgatattacatctccatacaaggctcatgtgagatctgtcaagtgtaggataaaacaagaaataacaaagaaattgacacacattgcatcaactggaagacatccattctaatgtcacatattccaccattcatgagc

SEQ ID NO: 257979 - DNA, 418 bp, Glycine max
agcttcacaagtaaattaacctcctgcctgaagtcctgactgtattaaaaagtaatcagcagaaagaaaaggataagtggctgacaaaaggataagatataaaaaatagttctgaaattacacaagcttaaaccaagttgtctgtctattgctatgaagcaaggactctaacactaacaccggacacgacataaatacttcaacacggctaatgtctaaaatataggacatggggacaccgcatatacacacaaatagagagattctaattaaatgaaatatgagtaacatagtggatgttatggtgaggaggaagatcaattttatgtgcctacaagaaactaagtggacaagtgaaaaagcgaaagaattagacagctcgggatttaagctgtggtatacgggaaaaatcagatca

SEQ ID NO: 257980 - DNA, 481 bp, Glycine max
  unsure (1)..(481): unsure at all n locations
gagagaccaatcacgagcatatagcatggtcttgaaagaggagttagcagcttgctcaaggtccaaaagaaacttgtctcagcgtttatgtgagacagagaccaacatgctagccatcgtcagcaagtaccaagaagaactaaatctagccatggcccacgagcataaagtggcggacgagtatgcccaagtgtacgcagaanaggagactagaggaagggtgatcgactcgttacatcaagaggcaacaatatggatggaccgatttgctcttactttgaacaggagtcaagaactgccccgattgctagccaaagccaaagcaatggcggacacctaccccgcccccgaggagatccacgggcttcttggctattgtcagcatatgatagacttaatggcccatataattagaaaccgctagaaagtttgtattgcactcagatcttgactagtataacttctgataaatgagttatcc

SEQ ID NO: 257981 - DNA, 234 bp, Glycine max
gcgtagaagattgcaaacaaatgtgcctcttgacaatgatatgagaatattcacccaccgcggcagacgataagagaaagtaacaattatagaggagcgttctcgatccaatcccacaggaacatggcaatgataaacggaggccgtaacctgacaggaaatccagtctgaaaagaaaaaacaaacgaaactaaggatcttaatgcgatgtagggacagagcaagaatataaat

SEQ ID NO: 257982 - DNA, 406 bp, Glycine max
cctgatctcgagcactgagctgcaacttggcttttgtctctaggtatcatttcttctttttattataatcaatctttttcttcatatcttgtatataatgggacgtactctttacaaccaatgtataatgggttgatgaaaagtgtaacgatatctaagaaatggaactcgtatgtttataattaacatcatataatgaaattatgagagagtgagctcagtgtttgtgttgataaaaaagtcagaggatctatgaaataccatctgtgatgcgaagactgttagttgtataagattacaaggaatattatgtatagaacttttgagtgaatctgcataggtgatttgaacttatgtctaactatggtatggcaaaatggacaatcatgctatatctattatatat

SEQ ID NO: 257983 - DNA, 394 bp, Glycine max
  unsure (1)..(394): unsure at all n locations
gccctctttcttaaattntctaacatgtgctatcagcttttatataacgcagctctgttaataaggaaaatgacaattgctaatcttcgacctgcatataactcttctgaataaatgaataaagaataattaaaataatttaataaatcaataattgagactttgaccactcttaaattctcaatggatgctcaagtcatttatctagcctatatcttcttaaacaaacattattatgtattaaaaataaaataagttatgtattacaaataaataaccttaaaggatatatttccgattgaattatgatctcataggacagaatatatattctaagacagtatcttatgtttatcgttggaactggatctgtagtacaaaaatttcttacaaa

SEQ ID NO: 257984 - DNA, 411 bp, Glycine max
  unsure (1)..(411): unsure at all n locations
agcttgtcttctacaaataaatcaaaatcgatcctctaatcttcaaagcccatttctagtttctttcttcccatgtcaactacacagcttgcagttaacataaatggtcttcccaagattaagggaatgtcattatcttcacagatatccattacaacaaagtctgctgggaagataaaatgttttactctgaccaaaacatcttcaattactccatatggtatggtaatggagcggtcagccaactgtaaagtcattctagtgggcatgatttccaactctcccagtcttctgcacatggagagtggcatcagattgatactggctcccaagtcaatgagagctnttcccactgtgacttcacctattgaccaaggaatggtcacactcccagtgtctttgtgcttcggt

SEQ ID NO: 257985 - DNA, 365 bp, Glycine max
gctctttgagaaaactttcttgagaagctagagcttagctacacacagccctctcataactaagctcacctccttgagaagcttccttaagaagattcctcaagaagctagagcttagagacacatacctctctaatcgctaagctcaccttcaccccctataataactaagctcacccccatgacaaaatacatgaaaataaagaaaatccctactacaaagactactcaaaatgcctcgaaatacaaggctaaaaccctatactactagaatggccaaaatacaaggcccacacgaaggaaaaacctattctaatatttacaaagataagcgggctcatacttagcccatgggctcaaaatct

SEQ ID NO: 257986 - DNA, 412 bp, Glycine max
  unsure (1)..(412): unsure at all n locations
agctttattatttcgcaaaacccatttgcttcccttcttcttcacgcttacgaagctcaaacccattttcttctcttcttctccaccttgtacctcgattccattgatgaaagcgtatgagtttggttgcgagggagtgaagctgaggatgagaatctcaccatcgctgatgtttaccacatattccctgaagatggttttggtggcttccgcgtcagcgtttagagaggcgttgaaaccttttaagaaggtgaatccgttagattgaacggagaaagaggcatcagtgcggggaaaggaagggtaataagctgggtagaagaagaggcgaacgaatttggggcccgcagaaacggtgaaggagtaattgaactgagaacgggataaccgtgctgtggtgtanggaacttga

SEQ ID NO: 257987 - DNA, 409 bp, Glycine max
  unsure (1)..(409): unsure at all n locations
tcgcctggttcatactgagctgcaggcttataagtagtggtttttctcttcctggatgccatctacaataataaaaaaccagaagttatcaaaattgaaacagaaaataaaaactgaaattagcaggccttatgaaaaacaacacactggctcagcgcaataggggtgcgcttagcctgtcatgacatataaattttctctgcataattggcttagcgagatatgcactcgcttatcacagagcacctttatttcaaccaatggcctatcgagcagcactggcttaaccttatgcatgccgcaaggaatagcgcttatcccacggaggcggcgcttatcgcgagcaacacttcaaaaanttgactatagtatgtgggcttagtgatgagactcacttatcccaatgact

SEQ ID NO: 257988 - DNA, 434 bp, Glycine max
tatagaactacctgcaagcatgcaagctacttatccaaggctcatactggtggtgattcttcttcttccatggcttattccttaatggatggcgcctcctctcacctctagtcctttgtcttccactgcatctccatggcggaaaaccaccatcaaaggaccccattgaagctcaaagatccagcctccataaaagccccacaagcaagcttccatcactagatctctctatagcttggcccattcattagttggacggcaaaaacgcctttctacatggagaactaaaagaaataatgtacatgcatcaacccttatgttttaaggatcctgatcatcctaatcatgtgtgtcttattcaaaaaactgtgtatgggctcaaacaagctctaagagcctgcgaaaaactatatgccgactatgcttcttctatt

SEQ ID NO: 257989 - DNA, 451 bp, Glycine max
acctctctaagcttcacatccaaagcacttctcttggtggtgaatctcctccttccatggcgtactacctaatggatggtgcctcatctcacctcttctcccttatcttgcactttgtctccatgattgaatatcaccattgaaagacctccatgaagctcaaagatctatccttcatagaaccttctcaagccagctaccattaagtggtatcagagcacaagagcttcaagtaggtgttccttagacctccattaattgttagatttaccttctcctccattgatgattcttcatatttctccatgtatctcctcacatgtcttgtgataaatgtcattaacatgattctatagaatttccaccaattaaactcgctatagaagctagatgtgattatctactggtcaaatttctagctctcgtcttgaatcatgaattgtgtagagtt

SEQ ID NO: 257990 - DNA, 414 bp, Glycine max
  unsure (1)..(414): unsure at all n locations
agcttgaagatgtttagaagaagttntggcttttacatgcccaactccttttagtggcatttgtattggttgttaacttgattgttgcatctttgtacatttgatatctgttttgcatcatgcatcatcatggttagagtgaagaaaattttctaagtttgaaaaatttcttcagaggcaaaatttctttgttttaatcgattacagcctcattgtaattgattacaacaagttgtctatagcttgtaaagttaagtcttgtatcggtttaatcgattacggtagcactttaatcgattacactgttggttgagacaatgactagctnttttaggagtctctgctttaatcgattactaggtggattaatcgattacttctagcttgtttaagttgttcagaagtgaacaagag

SEQ ID NO: 257991 - DNA, 434 bp, Glycine max
  unsure (1)..(434): unsure at all n locations
tccaactattatctataagctaagaattatctggcgaggctataacaacccctacaaataaggacccccaactatgctccactcctataaataccaggctccattgaaccctcaacaaatctctcacacacttcaacacacaagcaacaagcatgtgcctctctntctccctctttcgctcatttgagcttatacttaagcatatagttgttntatctcttaactcatatacttacttgagcatcagaatcctttgttttgcaggtcccccctttcatcctcttgacaagggcacctctcaaagctgatgtgcgaagtccaagagcctacttcgggcacatccacccagacgtgtgtcgttagtcgggcaatatgactaacttttgtgaaaaaaactgttgtaatntatacactcctccatgcatagtgtttgg

SEQ ID NO: 257992 - DNA, 405 bp, Glycine max
  unsure (1)..(405): unsure at all n locations
agcttctaacttatgaccctgagaaggtaaatgcttcatgagctacatgaattaatttggtaaataaatatatttctgaatattaatataagacctactattttatgcagcggatcactgccgaagctgctctaaatcatgagtggtttcgtgaagttcctctccccaaaagtaaagaattcatgcctacatttcctgctcaacatgctcaagacaggtattttgacctaataggaaatgctggagcaattntattaaagaaaaactttttgtaattctcttgtctagataaaagagggaagttgtgtaaatatttgttgaccctatataacatttatttttgacaagttgtcataatttcatcaatcatcatataaataggcgtgtgcggagaatatacaagag

SEQ ID NO: 257993 - DNA, 341 bp, Glycine max
tacttatatgtttttcggctctcctcatcacctggggtgtaagtggatcaaatctatctgtattgtggaatgggtcgaagcttgataacttttccccaactcgaggtctcacacaaagggatcatctttccctttatttgcttggactctatatggagaggctatcattgaggattgatgaacctacggagaacaatactggctccctattttcctctccagaaggggacaggacctcctttgactcacttgttctttgcaaaagatgttctcctcttttgaaagcaacgaaagaccataccatggtagcggattcacccttgctctctttggtgctgcgt

SEQ ID NO: 257994 - DNA, 407 bp, Glycine max
  unsure (1)..(407): unsure at all n locations
agcttgcttctacagaagacacattatccatttttgtttctctttaaagntatgtttatatgcatgtattgagaagatataagttactatgatgttgtatatatatatcacgtgatgtttctttttggtgttgtgcatttttagcctttggcctttgagacgcgaaaagtttacaaatactttcataaataaattaattgaagagttttaaattgattaaaataaagtcttccgcttgagatagttcataggtccatgtaacaatggtggatcttacatatatcctattagaatcaattatgtcttttgggaacaaaccttggggaataggtctattatatcttctattggtatagcttgattgtttggtttggtacaggtacccttcctatagtcaagtatgatga

SEQ ID NO: 257995 - DNA, 279 bp, Glycine max
  unsure (1)..(279): unsure at all n locations
agtattgatattgatgagcttgggggaaatattgccatgtatgaatgccaatcacatcatgtggttctccctcctcctaatctttctatttgtccatgcctcccatgtcataaagcatgaccatcaaatttatctcttctcatacccactttgatcctttcgccggtgaaaactaaataggctaatctagtaggctgtgtacccaccaacttctcatagtangacactagtaaccgtgtcactatcattgttatcatgctcttcttcacccttagggac

SEQ ID NO: 257996 - DNA, 407 bp, Glycine max
agcttgtctctcaacactacaaagctattcaccttttatccttttgaaaaaatatctgccagctgcatttcagtgctgcaatacctcaaatccagctatttcttgctcaccttttccctcagaaaatgaaatctagtctcaatatgttttgatcttccatgtgctactggattcatggccaaattgatagtagatttgttgtctacatacaatctaactagtctctgaatttccaccttcaattcttcaagcaaggagtccaaccacaaggcttgacatgcagcatagcaagctgctatgtactctgcctcacatgaggataaagccaccacttgctgtttcttggaacaccaacttattgatgtacccagaaacttgaaaagatagcttgtagtgcttttcctttc

SEQ ID NO: 257997 - DNA, 487 bp, Glycine max
  unsure (1)..(487): unsure at all n locations
tgtgataaagaccattcgtcaagtggtttaataaattatnttattatctatatactgtagactatatgtgcctatcgatggagcatggatggcgtgttaattatactgctgtacttacgctttttataatcttcaatttccgtaccacgcgttaattaaccgccaggatggggtatcatatcagttagagcttgagaggaagatttttccttaaaatagaggttaacaaacatttttatatacatatataatagaaatttattctattactgcattatattaataaatagaatgctgtgttatattaaaataattaacaagttctatacatttgtattaagaagaatttatattgnaaatgtaatgagtgacttgatcaaaaattttgtattgtgacgatagtattgatacaaataaattaacagatacaatttataagtcacatgttattacattagaaaaatttttactagtggagtaattgccc

SEQ ID NO: 257998 - DNA, 338 bp, Glycine max
atcccacccctatatgggtgtgtgttaagaccatataatcaaactcattcatgagaagagcccatttagaaataattctagttaaactgtcaagtcctattgtaatcaataagaagaaatccaggaggaatacttagaagtcaattcagaatttacatcccctgttctctatatatatggaatatatgtatgctgtgaatatttatatgcaaataatatccctagataactctctcattaatgtgttgagtctattatcttaataatgtgctacaacattctgattactcatagtatataggcccatcacgttgtacccctatttttcatgaactagt

SEQ ID NO: 257999 - DNA, 407 bp, Glycine max
agcttgtcgaaaagtgattttaagattattaattttattggaagagacaaaataatcagttttggcatagtaaaagagcataaaaacaactacaaaaaccattgaaaaataatcataagctatgaatttttagattcaggaaaatgacattttttagggaaaaaaaacttttttctaaatttcatctgtgtttccaaacatttttagctatgatcatgtttgaattcaaccccttataccaggaggaatctaaatacaaggtcaagcaataaggatgcttttttatgacaaaagttaagggaaaaataatagccatgttaatacgaatcaaatggaaaacaaaaaatgcagccatgaaacatgtattgtggatgcctatgagacatgtatgttgctctgttgggtat

SEQ ID NO: 258000 - DNA, 405 bp, Glycine max
  unsure (1)..(405): unsure at all n locations
aaatataaatatctcactttacattaaaaattaacaagactcataacattcataaatccaacgatccataacataggttcngagaatggaaaatagagaaaacccaagaatccattacatatggtcatggaataagcatacaaatgttttaatcaaatcataagcatattaataaattcaaagaattaagactatgtctttcttctgcatattgctagaaacatatctctctaaatagggtaatctttcaatgccttgactgccttngtaaaaggagcaacaccaattccttcaagttttcaaggatgcttaacaagtctataattcggtattatcctcattgttttgtcaactactttcccaccgaacattagggatgacctacattcaacttgggtgactttc

SEQ ID NO: 258001 - DNA, 412 bp, Glycine max
  unsure (1)..(412): unsure at all n locations
agcttaaaaccaattaagctntagcttgaggaagagactaatatgaaaaatatgatatctcataatatctcatccttcacatcaaagcaatatccatttcagattgtttagattctatcctctcttcttcctgtcagacataatttgctatttttgtccaactgtcctcattgaggcatttagacacttatcccattttcttgctagatatcatattgttaaatataagcaagcagtgggttgaacttgtgatagatttgctaaatctatgttttctattgtatcatttttagtatttagtatagtcacgctttctacaaagtagttttgttgaacatcatagacatctcacgttgtttaaaatatgaaactagcagaacagacttttgatagatatgcccaactntatgtt

SEQ ID NO: 258002 - DNA, 476 bp, Glycine max
  unsure (1)..(476): unsure at all n locations
tgagtctgaactccatgtagcatcaggacaaaactgaattatcaaaacaaaagcttgagtctaaactccatgatctgttatattgattgattagagtaatctttaatagaagcattcatacatgactatttcctttcttaactccgtagacgtgattacctggccttatgcaaaatttggttttggtggatttattgatttcaaattttatgctacatacaatgatgcaataacgaatactagtatttacttataagttataacacgataatagaacaatatactatccaaaccgtgtcttgaanaatatgtgccaaagttccaaggtaaaacagacacactattgaatggtcttgattnttgaccatttgaacctgacccacgtgctatgtatccatgtgaagagttataataataattactaatatcttgcaattaccgtacatgtggaatngaatcagattatttaaacttga

SEQ ID NO: 258003 - DNA, 413 bp, Glycine max
  unsure (1)..(413): unsure at all n locations
agctntgaccatgggttcgctnntaattattcgtatttggtatttgttaataactactattgctaattagttggtgtcgtgccaaataataattgttctgcaaatatactacatttttttgataaactcatataggttgttgataactactggcgagaaaaagaaaagtctcttgattcaatcacttctgtcctgattattagaacatttgataacaagatattttagtcttcatggatttgccaaaaaaaatgacataactaaccttgacagatctcatattatcaatatctacttttgatctcatactatcaataacaaacataaaatttttcgtatacgataaattacattacaacattttaatgataactntatcaatccatgaagcttagtgcatggtaggaaatcat

SEQ ID NO: 258004 - DNA, 264 bp, Glycine max
  unsure (1)..(264): unsure at all n locations
aacgccctcctctncttcagtgacaaacgtgttgtccgtctcttggccagaaattccctttctcgtttcaaagctctaatgctgcatatattataaaatgtatattccatgaaaaattctcattcataatgatgcacagctctatatatatctatctatatataactacctagtggtaaatatatattcgactgaaaattctgattcttaagggtaagtatatattcgatgaaaaattctgattcttaagggtaagtgtatatg

SEQ ID NO: 258005 - DNA, 414 bp, Glycine max
  unsure (1)..(414): unsure at all n locations
agcttgataagtaacctcatccttactaaattaagtatcttggctacaaagataaatcacaagatcttttatttggatgtattgggggcagggtgaaattgaaaggttggaattagaaagaacaagaaaaagaaaatggatactaatgaatcataataccttatcagaaaatacatcatgcaactaaaacacaagggtaccatacaaagagaaatcataatttgcttcctttcttttcatccttttttcatgaatatggtatctttcattctactagcttgacataacagttttttttttttttttgtcgtgtcaaacattgctgacacgttattattcaactnttaatccccacaaatntttcatatactgctagctggaagcactgagtcagtaccaacaattcattaatga

SEQ ID NO: 258006 - DNA, 395 bp, Glycine max
  unsure (1)..(395): unsure at all n locations
tgctatgctactcacattcttnctctcgattatcatatccttcattcttacatcatgagtgaacaacaacaagatcaatcactcaatgtacgcagtccttattactttcatccgggagaaaatccagggatagctnntggttctccggttcttgattcatccaattataattcatggagttgatctatgcttattgcattaagcacgaagaacaaatatgagtttgtcgatggttctattcgaagacctgcatcaaatcatgaacttcatgtagcttggaagaggtgcaataatatggtggttntatgggtggttcatttagtctctctttcaattagacaaaacatactgtggatgaatgatgcacaagatatttggaaagacttaaaatcacg

SEQ ID NO: 258007 - DNA, 413 bp, Glycine max
  unsure (1)..(413): unsure at all n locations
agctnttatgttgaacataggtagaccagtagcatcttacacatgattttcaacttccaaataaagcattaccagaagcagaaaaaaggtactgacaaaaaaatcttctattttctggtcgtattttatttttagcttaattttattagcagaaagtaagatcatgaaatgtagcttctgtaattcatcatatcaacttgggccatatataattcttgacattatagaatgttacctatgcagagtgcttgaaacaacgcgatattcagcaactctagagcaaaaactattatctctttctaagataaatttcatggtagaatagagtagatgagactaaaataaattagtttcccctgactagagacatggtatacctgaaaaagggtgaatcaattgatgtagcacggtta

SEQ ID NO: 258008 - DNA, 445 bp, Glycine max
  unsure (1)..(445): unsure at all n locations
tgtgaaaaattcttttgatatgttcaagagaaaaagagattacacaatcaacgtttttttctaaagaacaaggcactcatttctggtattctatatctataacgaattaaattaaattaatttagggtaaggttcaagaataaaataattctactttntctacattttgttttaaacattctgatgcccaaccaaataaaaaaatattcatgagagaatgaattgcctttcatgatggacaaaaccaacagcacttcaactgttatagcatgcaactcaaaattgaccagcacccaagcaaacacagttagtgcgtgccttcaaacagataaacttctataagtaaatatgtcttttttgatcttaaaaaaaaaagtctcaattctgatttttaattagatcttcaacatattcgcatttctttaactagcattgtcgcgtaaaa

SEQ ID NO: 258009 - DNA, 415 bp, Glycine max
  unsure (1)..(415): unsure at all n locations
agcttgacaataaagtcactatttgtacaatattttttatttataattattgataaaaactacaattttttgaatcttactaagaagtaatttcaagacaccaataaaaaattaataaataaaaatttatattgagatcaagaagaaccatgctaagtctttttttttttttttntaattttgatatcttaaccaatgtcttaatattaccggttagtatttttgataaaaaaattaaacttaaattatatacacttttcagattttttttttcttttgaaatgaattaaaagttttttatgttgttttagtttttttaaatgaaagaaattggttttagtgtgaaacaaattgtggtgaattttcaatttataataaagtattgtgcatatatctttggaatgttatattatct

SEQ ID NO: 258010 - DNA, 403 bp, Glycine max
  unsure (1)..(403): unsure at all n locations
agttacccaatgagaatagtgactcatgatacattattccacataattaacgcccaccaaattatccaagcaatttaaaattatcccctatacagttacgtcggaggatcctttctataaactatntatgtaacagggtctctttcgaaagttattacgcaaggggtctgtnttgtatgaaagccaccagtgtcattggcgataagtgggaactaccattgtcattggcgagaaaggagatgacatgaacggtcccgccccgccatttgctgtggcgagacangttgatgtggtcgtccccacctactggtggcagtattgggacgtggatatagttgacatgcatttgcgatataagttgcagctgggctcaacatacatgcatgcgatgtacatgtatact

SEQ ID NO: 258011 - DNA, 409 bp, Glycine max
agcttcgtgtttgccatggaagcacaacgtgttatcttttgtgaatgaatggccccaatggagggaagacggtctttgtaatttataagggcattgtgttgaaaaataaagtgtttcatcgtggcatgacttccggtggtgtggaccatggaaatatgtttactttcacttgttgacattgccctagactgtggtaatttatatatgtagcactgttcttctttcttactacaatcgatgcgtacctttttacttctttaatgagtagactgatttttagaacatacagcaagtagtactatatttgactgatatgggcagcatatgcttttgcttaatagattgattcattgaagaagtagtggaaaacgatctaacggtgagtcacttaattattgaggcttaatac

SEQ ID NO: 258012 - DNA, 379 bp, Glycine max
  unsure (1)..(379): unsure at all n locations
atgatactaacttctggatggacanatgagacgttgttatctatttgttttataaagccacgacggctgaactgttaatgtcaacgtgcattcatgaccagacaatcttgatctgatgtgctctgctgtgctgctcatgtaacaaatggcttgcccgcgtgaagtactaatagacaatgatgaagagctattgacaaaataaacaatatgatgaacaaagagtagaaattaagtgcataacaatcacaagagtctgagcatgctgtaacctttaatgaataccaaccaactaactagtgttggacataagaaaacttcattcacgataataatgtcgaatacacagaccacgtgctataacacacagctttattgacag

SEQ ID NO: 258013 - DNA, 407 bp, Glycine max
agcttagtcagtgttgctggtaaacgtgtatttttatttgttctattaaatgcattgaggcattgagcgtggcatcccataaaatagccgcctataaaacatagaacaatgataccatatatttttatagttgcacacattaaatgcatttgcagattatgaggtcagtaacaaaataataataattgtaaagtattcaaaaaatcagtgtattgaatattggatatatgaataataatatataaataataataaattatggaagtctgggatacgttaagcatgggttaaattcttttaaaataataataataattattattattattatataattgggattatttattataattattaaaatagtaataataataatattaatagtaatactaatattaattgaa

SEQ ID NO: 258014 - DNA, 363 bp, Glycine max
gcgcacctagcatctcgagcgggaccaatctacaataggcgctaaattctatttcaatacatactgaagaccgcaaaactttgtggtgaggaaccccaggttcaaacttccatttgtctaaaagacaacgtaatagattggcccacaatttggcccaaccagctttttctcatcacaatcatgtttggagtaagcaaatgccacctcatattgatgctcttatactatctaatgtaaatatggattggttggttgaaacaaattcagtctttgcatataagacaacatattatgaacatcaaagaaatattgaatggacttataccgatagtttgagaagatctaaaccctataagcactata

SEQ ID NO: 258015 - DNA, 381 bp, Glycine max
  unsure (1)..(381): unsure at all n locations
agcttcatgattgaatcaagaatgagtcatgtatctttattgattcatgatgatgaatcaagactgattcaaggtgttttgatgataataaagatgatgaccaaaagcccaagagaatgacttcaagattcagtcaagaacttcaagattgagtcaagaacaattcaagaatcaagtntcaaatttcacgaatcaagaatcaagaataatcaaaatcaagattcaagaatcaagaaaagactcaatcaagatangtactacaaagtttttcataacattgagtagcacatggaagtttcacaatatctcattaccaaagaagtttactctctggttatcgattaccagaatgcagtaattgattaccagtggtttcaaaat

SEQ ID NO: 258016 - DNA, 383 bp, Glycine max
  unsure (1)..(383): unsure at all n locations
ggtccttgactcatcttttccctgaagtgtcatctctaattatctntcttccttctccattctcctgtcattgatcctcaagagacaaaagacttcattgatgaagaagaatcatggcctacaagctccacatggagctacatcaaggaggaagcacactangatattgatttacatctttataataatgctatcccttctaatgttgccaacactgcataagtttaataagatgcttgatacagtttcctagcatggtccangatttgtccctttatcatacaatgatattaggatgaatgagataactcatctttctttgaagaatcatatagcttattggaaaaatctatatgtctataatgacagatggatgaactgat

SEQ ID NO: 258017 - DNA, 413 bp, Glycine max
agcttgtcggaatatggggtacccgacatttgtttgttcttgtggtgatcgggcgatggcgcaaatcaactattccactttcacaaatcaaacatgaacccaccatgcccagttgcccaaccttaactgagctgatgtactcacacgtatcccttatcctcgttcctctcaggaccgggtacccatcaaccgctccatgctttcacaaaatccaaacaattcaatatccaaacctgactgaactaccctataccaagaaaacaaggtagaggtataaaactatgccacaaacaaattcacatattacagctttccttactcaaaaacacaagtggcattgtgttgatacagattggggaaacgttggatcgacttgaaaatattactggaggttggtagtacagacgtctaca

SEQ ID NO: 258018 - DNA, 407 bp, Glycine max
agcttgaaggtgtgtagcccaccatcttttcatattataatactggtaatgcgtctactattattgtcatcattggttttctctgtcattgaggtgccacttgagctgccaggtctctccacctttgggcatattctttgaaagatctgtgcccctttttgcacatgttctgttgttgcatcctatccggaaccatatcaaaattgtactgatactacctaatgaaggcaaccattaggtccttccacgagtggactcgagaaggttccaggttagtgtaccaggtaacagctaccccagtaagattttcttggaaggaatgtatcagcagttcctcatcttttgcgcatgcccccatcttccgataatacatccttagatggttcttggggcaagtagtccccttg

SEQ ID NO: 258019 - DNA, 173 bp, Glycine max
  unsure (1)..(173): unsure at all n locations
gtgactngatcttaagcgaagatgttctcttgatagatttaagagaatcttcccatcatgtttccaattcagcattgaatactaaaggcaggggaaggactacccacataggtctgaatggtcgaggcagatcaagtggcctcagaataattaagaaccgcgggggggggggg

SEQ ID NO: 258020 - DNA, 406 bp, Glycine max
  unsure (1)..(406): unsure at all n locations
agctttttatgaaaggatatgactctttcaattgattntgaatttcaacgttcagatacactggtaatcgattaccaatatcttgtaatcgattacaccattttgaaattaattggaatgttgcaaatttagttgaaaactcttgaaatcaaactttgccactggtaatcgattacaggaaactggtaaatgattaccagagagtaaaaactctggtaacttagaaaattttgagaaaaactcttttgaaaaacaaaattatgctatgtttgttttttgaaaagtcttttcaatacttcccttgtgaagtcttcttaatttcttctcttgaatcttgaaatcaaacttctcttgattcttgaatcttcttgatttcttcttatgatacttgaaatcattctttggg

SEQ ID NO: 258021 - DNA, 460 bp, Glycine max
  unsure (1)..(460): unsure at all n locations
tcctncacttggaaaggatttaactcaaatccctatgttcttcatactctgggctcctgtcctcaacacctgtaaaaagaacagaaacatatatattagtggtgtttggcattgcgaagtaaggttaggtctgaaaacccattttctgngcatctttccatgaatgaacaatgtttctcaccaactcaatgagtggtgctacaagtatagaaaaatatgggacaaacctcttgtaaaagttttgtaagtcatggaagccccaaacttttcttatacttggtggagtgtgccactcaagaatgacctttattctcttagggttcatgcgaaccacctgatcactactttgacaataagaaaagtacgcaataaacataccttttctgatttgatattgataatcctaccaaagtttgacaaccttatgtgccatatgatacctagtatgattgaactaaaa

SEQ ID NO: 258022 - DNA, 413 bp, Glycine max
agcttatcataatcgattacatagttgtttttgagacaacaactaatttattcaggagtctctactttaatcaatatcgattgctcctctttctataagtgtttaagaagtatacaagaagactttaatcgattactttgaggatctaattgattacattgttcttgagttgtttccaatttttgggaagaatactttaatcaattgaaaagataatctaattgattagttcattgaaataatcaattacattgtagatttaatcgattacaggcagttataattattttctttataaataggtaccttttgttctcttcaaaatacaatgaaatgaacttctgagtgagcttgagtcacgtgttgatattatttaaagaaataagagaagaacaatgcttataaataatgac

SEQ ID NO: 258023 - DNA, 374 bp, Glycine max
  unsure (1)..(374): unsure at all n locations
ttcgatgatnacaaagatgatgaccaataagctcanaagtcataacaaagatgatgaccttcaagaatgagttcaagattgagtccagaacacttcaagaggaaatttgatttcaagaatcaagtttcaagattcaagaatcaagaaaagactcaatccagataagaattaaaaatatttttttcaaaaactgagtagcacattgaattttctcaaaaccttttaccaaagagtttttactctctggtaatcgattaccagattattgtaatcgattaccagtagcaaaatggttttcaaaaagctttcaactgaatttacaacgttccaattgatttcaaatgttgaatcgatacaatgatttggaatcgata

SEQ ID NO: 258024 - DNA, 413 bp, Glycine max
  unsure (1)..(413): unsure at all n locations
agctttgaccatgggttcgctttaatttattcgtacttggtatttgttaataactgctattgctaattatttggcgtcgtgccaaataataattgttctgcaaatatactacagtagtcttatagacgcacctaggttgttgataactactggcgagaaaaagaaaagtctcttgattcaatcacttctgtcctgattattagaacatttgataacaagatattttagtcttcatggatttgccaaaaaaaatgacataactaaccttgacagatctcatattatcaatatctacttttgatctcatactatcaataacaaacataagattnttcgtatacgataaattacattacaacattttaatgataactttatcaatccatgaagcttagtgcatggtaggaaatcat

SEQ ID NO: 258025 - DNA, 317 bp, Glycine max
  unsure (1)..(317): unsure at all n locations
cgcctcctctcctccagtgacanacgtgttgtcagtctcttgggcagaaattccctttctcgtttcaaagctctaatgccgcatatattataaaatgtatattcaatgaaaaattctcattcataatgatgcacagctctatatatatctatctatatataactacatagtggtaaatatatattcgatgaaaaattctgattcttaagggtnagtatatattcgatgaacaattctgattcttaagggtaagtgtatatgagagagtgaaccttgatgancacgagatagnttgttcttctccaacatgangagct

SEQ ID NO: 258026 - DNA, 375 bp, Glycine max
agcttcatgatgatgaatacagatagattcaaggagttttgttgatgacacagatgatgacaaatagctcaatggtctatattacttcttgatgacaaagatgatgactaaaagcccaagagaatgagttcaagaatgagtcaagaacacttcaggaatcgagtttcaagaatcaagactagacaagttgaagattcaagaatcaagaagatactcaatcatgatgagtactaaaaagtttttcaaaactttgaatagcacatgaattgttgacaaaaccttgtaccaaagagttgttactctctggtaatcgagtaccaggttattgtaatcgattaccagtagcagaatcgttctcaaaaagctttcaactga

SEQ ID NO: 258027 - DNA, 510 bp, Glycine max
  unsure (1)..(510): unsure at all n locations
actcaagctttctcttacccatccctttttcatcaagctctcccattgtctttggatctctttcggctcttctgggatatatctatatgtnggcttacttggtaagggcgctcttggaataagattaatttggtgctctatccctctccaagganggaacccatgagggggtgtctttggggaagacatccacaaactccttcagtaattctttcacacctatatgcacagaactatccatagaagacaaacagttatcatgagacattaataaatacataagttgcatagctagcatcactctcttcacctttttttctctcatgaacaactctatattgttctctcttcttgatattcatccttcttcttttacacgttcactctttttttatctccactctattctttcctttcatgatctctctttcatcaatatatgtatatcttttctcttctctcttggtctcttttcaccctcattcttatttgatcctcacaaacctcact

SEQ ID NO: 258028 - DNA, 406 bp, Glycine max
agcttgcacggcgaccatggatcgtgtaattataattatatttaattatactcttgcacatttgtacatgattctatataaggatgaaatcatatcatctacataatcaattagccggaatcattaatcatgtgtcatcggaatactacgctggcttaatgctacaacaattctgccttactacgagaagggataatcacacgctgttacatctcatatctcactaagtctaaaaatttatcaaagaatatcaaattagaagactattgttagatcataagtaagatgtcgtacaatatataatttttattgttttaataaattgtattcgtttataataaagagcatatttgaagaattaggttatgcactgtattgatgacatcgctcttcaacaataacttat

SEQ ID NO: 258029 - DNA, 384 bp, Glycine max
tatttatgtgttgatcgttatgacatttgcctcttataacctttccaccaagtatactcctcgtctggatttattctggaaaaccaaatgtctactatactcataaaaaaaaaaaaaaaatcgttggattacacaactggtatgttgcatcataaaattgcatattcagtcaattatcatagtcaagtgtgaaaaaagtcctactttaagagtggcataataaactgataataatctggatatacatatatatatgtgggtgggtgcatctaggacatcggataacctatgcagatgtaagcagagctaatgcatacttactgtctcgcagctaaaagatggatatgctgcaacaattttgcatctgatctcaatgttatcctc

SEQ ID NO: 258030 - DNA, 415 bp, Glycine max
  unsure (1)..(415): unsure at all n locations
agctttgactatgaatgcaagagagcatgaatatgattagcatggtggtgaggatttccctttaggacaacattcaattttgggctgcaccatgatgttttccttacacctagatgtttagaaatgttgttcatcatgaacataaaggtgtagagtaggtagcaaaaatgcctttgttagtttccttattaatttaagtagcaaaaatacttttgttaatttattcatataggtagcaaaaatacctttgttgatttacacctttgaatatgtatatatgtagtttaggtagcaaaaatacttgaatatgtatatatgtaattcttggtggtgaaaataccttgaatatgtatatatgtaatttaggtagcaaaaatacttggatgtgtgtatantgtaattttggtagccaaaa

SEQ ID NO: 258031 - DNA, 508 bp, Glycine max
  unsure (1)..(508): unsure at all n locations
actaagcttccttgggccatttcctgcgaaagccaacatttggaagttagttttacaagataatgcttatcttaacgcanaanatgtcatgctaatccctctgattntagaatgaactcatgtaatctatttatgcacacgcgtacatgtggaatatcctaccatttatatcaacatagaggccatcgaacacattctaattgtcacacacatatatgcatttgaaaagaacatacattcttacgctcaaggcattgcgtcaaaattcacacctaatttatatcctaaacatttgctattacaaactacctacatatatttgaaaaatatatcatacaaatttttattgtttcactcacatttattcatattggcangctatttacattatgcacacacttgcattcaaaagggaattccgtgctatcatacatttatttaggaagcgacctcaatattcattcacnctttgcaagaattcatgcgcctttattacctatattacata

SEQ ID NO: 258032 - DNA, 408 bp, Glycine max
  unsure (1)..(408): unsure at all n locations
agcttctatataagctgaaccattntatcaatatacacaagttgagttttattcagaaaattagagtttatctcttttatcttagtgagagtgattctcctaaattcttgagtgattcaagaacaccttggctgtatcaaaggactttcacaacctttgtgtgttgccctcactggaaagagtgattctttccttcctttcatgatcacccttgttctttcaaaccacaattccagaaaatccacctctgcccagaattatctcgtggccataactcccattttacgcactcaaattaagtgattcttgagcctaaattgaatttcaaaacgagacctttcacctcgttttggaatcacctcatttggagccctatagcttcagttattgccatttctatatttttgt

SEQ ID NO: 258033 - DNA, 422 bp, Glycine max
  unsure (1)..(422): unsure at all n locations
ctaagcttacatgggccgggattcaacactatgttcgaagcctacttccaaatatttggcttctgtagggattacctgctacttgatgacatatgtatatatgaaagtggagataacttcacgttgttgaatgagtttattcgattcacttaacacctgaagagttagaaatagctatttttgagattagaagttattctggttagatgttgcttttacacttgtccaataccgacatattgctgctatgtattgtcttatattatgtacgaaagcttgttgacattacaacttatgatttctgcttggttttttacanagtgcatgtggaatgaaatctcatcaggcaaagtcaagaaacaaaagtcatcataatcaaccacatactcagggataggcctatacaaaataattgaaccgat

SEQ ID NO: 258034 - DNA, 408 bp, Glycine max
agcttcagagacgaccgttgaagtggagcccactcaactaacatgtttttggagcaagtattcattcatgacagttgttatgaagtgacagcttgcaaaactattctaaggaagtcattttgaggaacctttctgatgaacattctaatgtatcatgaaaatagacattctatgtttgctgagaacgaatccatactcgtagtagatttttttgatgaagttcaactgatatacccttctgaagcagcacaacttcattaaccttaacacattttcacaacataaagcattctgaagcagattacttcatagatactgagtgaaggtacatttgttggtgtgttagtgttttgtcccaggttagactatgtaatttctttagtattttattatgatgcttctcattag

SEQ ID NO: 258035 - DNA, 484 bp, Glycine max
  unsure (1)..(484): unsure at all n locations
tacggacctataaaactcagctaatgttacctgcaataatcctagccttttcagaacactgcataccctaaccctaaacactgcaagcctacactgccatcctcaaaactgtggcatcttcaaaactgcactgtgcatggcgtgaaggtgtctcgccaatgggagaggcgagaccctcttcacgtagctccgacgtggcatgtctcgccaatggtaccagcgacactgtccacgtcaggtgtcttgccattcatcccgacggcacccttccatgtcagcaacaaattcgccattggggatggcggcacaggtatctcgccaactctgctagcggcatccatganaaaaacggacccccttttcaaatactttgaaaacaaaccttgattggaaatagttttaaaagtaacccctctgtggaaatatgccatttagntcctaatttttgcacctaatgtagaatcacttaccatttcttcactct

SEQ ID NO: 258036 - DNA, 379 bp, Glycine max
agcttgcctcaaagagatacacgatagacattgttgttgaaggaaccagttccgctcccaaatatgacagccatcgattaggagcgctgagcaccagcagcgcttctaggccatcaaaggatggtcattccttcgggagagacgtgtccggctcatggaccacgagtatactgccttccatgaagagatagttcgccggcggtgggcatcgctggttacccccatggccaagttcgacccatacgtaatcctcgagtgttatgccaatgcttggcctacagatgagggtgtgcgagatatgcgatcttgggtaaagggtcagtggatccctttcgatgcggatgccctcagccagttcttgagataccctttagtgctg

SEQ ID NO: 258037 - DNA, 409 bp, Glycine max
tcataaatagatactaaccggccaaagaatgatgaacgatgaataatgattatggaatcgatcactaaaatgttacggtagctttacagaagtgcctggaccgtgaatcttcttcttctcactaatttcactcgagtcttgttgattttagatgctagacccttccttcatcccccctcatgcctatttataggaaatgaggggtggaggatgcacaacagcttgcccaagtgagctgcttactttctccagaagtaacctagctctcccaggcgagctgcttacttcatccctaagcttcctagtgggcctaagggctgaaaagtgttccaaaagtgaccatattgcccttcttttgaatattattcatatctccttgccaaatgtcacaaaaccctatggattgtgc

SEQ ID NO: 258038 - DNA, 410 bp, Glycine max
agcttctattgacagccactcatgacacatgtctttatgcttccctcctttgtgagttattgttgcaatggcatgtcggcatggcatccctacatcaaagttgtaaaatcagcacacatgtaggttatgaatgaaaaaaaactataaagaacacaacatgttagtttccatactccacaagtgcatgtccattcagctaaattgacctcaaccttattcccccacatgtggacctcatatctcaggcccatgttatcaccacactaaatgggagtccattgattagcaaaatgaaattctttttctagtcttttatactgcactggacataatggtccaggctttccagaaagtttaatcttgtgggcagccatggttctcatgatataacttctaatttcttcaagcat

SEQ ID NO: 258039 - DNA, 415 bp, Glycine max
cgtgatacatcaggtagaggagtcatctattagaggtgacctctatctatcactatagattcattcaaccccatgagatattcatcaacttgcgtcttttgttgtgtgctccacatgtgcaaatagcatcattgtatgatcctaactcatcccacaattttttaactctgtatagtatgtaacaactatcattcgatcttgagtaaggcaagcaatttctctctcaatctggaaaatgcgtggtgcgttgctttgaaaaaaatgattctgaagatctttccaaactttatgagcagtgtcataaaaaataagactatatgtaatatcacgggtcaatgaattaagaatccattgacaaaccatatcattgcattgtgttccatgttgtatagtcttctggtttggatttgcagat

SEQ ID NO: 258040 - DNA, 393 bp, Glycine max
  unsure (1)..(393): unsure at all n locations
agctngcacacaaccaaatggtaacagattttgttctttcttgttagttattatgcgctgtgcaacgtggtgttgtgataaattgaggatgtgtgtgtgattatgagcacggttctcaagctgggtaatggggaagctcaagcaatcatggctgactacactggaccacgatatgagatcgataggagccatactatggttattaatcttgttcacgtgtgaataattctgattaggttaaactattcatttggtctctataattgnctccattttaagtgttagttcctacataatgcataagttttggtccttgttgctaacgtcacaaaagagtttctggcgatataaactgctaccaaatttttttggcagtgataaaccgttactaaa

SEQ ID NO: 258041 - DNA, 339 bp, Glycine max
  unsure (1)..(339): unsure at all n locations
ctgtgtatagtacagcaatgcttaacatttatgtgttcattcttcgacanatccacaatacatgtgtttgttccaataaaaagcatgctctctaattactagccaatgtcaaccaaaatggtaataaatcaaaattgccatagccttggtttaagctagtaatattattgcggatcacggtaaactgctaagctatggtaatggagcttagttgtttatgacaattgattggattctgaatggcgaatcttgcgagtgaatttcgattcttgaatctggccttaggtagngaaaacagatttatggtctgagcttttatgtgtttattatctgaaattt

SEQ ID NO: 258042 - DNA, 392 bp, Glycine max
  unsure (1)..(392): unsure at all n locations
agcttatattataatttaaattatttattatttatcttaaatataatttatatatctaaacatatttatttattatgaatattgtatatgggtagttntcttatatcttggtcaaagtcgtcctaagtttataacaatgactcaaattgtatttcaaaaatttataatcgacctacagatctacaaacaaaacccacacgctctaaaaaagagttctcttgcacagcatatgtaagaataagcataaagataatttgcattcaagggaagtagtatcttatttcacaatatatataagccctaacaagagctatntattacatagtattatgaaagtcggtaatcaaaggcaaatcttataagagaattaaatganaagatagaaactcaat

SEQ ID NO: 258043 - DNA, 378 bp, Glycine max
  unsure (1)..(378): unsure at all n locations
cttgagctaaaaccattactcgtgaatggtttaatatttaacattcagtacatacctactatgagaagctagacgaggcgtaagaataagacaaatacatgtagtgcatctggcaatgatcaaatctcttgaggataagcttatttaatgaaaaaatctcttagatgtaaagattccatatgtcttgtccgtttcctctgtctaccccacaaccaaccatgccattcacagaggaaatatctactcgcttgtcatttattccgacatacttcaacactgntcggtgctcattatcaggatcacaatgctgtaactctgcaataccttaatacacatccactctacgtgttactatttaatacttgataacctgtgcac

SEQ ID NO: 258044 - DNA, 409 bp, Glycine max
agcttgtaccctatgccccacagggaattaatatcttatgaagtgtcaaccatagggggtgaaaagaggtggaagccgatgccaacacagtggagttaaagaaaaaggaggcggcatcatatgagcactcatggtcaccacaccgacactcagcaaggatgtagcgacggtgaacgaaggagacacaatatgactagccaaagcagctggcgcatcaacttcagtagtatgagtggcctcctgaacaatcacaacaagaggaggtggaggagtaggagtaacaacaacaacaacagcgaaagcaaaagcctcaacggatcttgcaaacttgaagggtgacctgaatcaagcgtcaaccctacagcttgtctcatggcatgaaggctaaaaagagctctcaacttcttac

SEQ ID NO: 258045 - DNA, 422 bp, Glycine max
  unsure (1)..(422): unsure at all n locations
tagctgctggtaatttattcacagagcaaatcttgaattcaaattatactagttgtcgtaaatctgctctggccactggtaatctattacattctctgntaatcgattaccaaagataaatctcttgaaaaagatttgtaacttaaatttcttggcagaccgtttgctacttaaattggaattcccttcctatgtaatatactcttcctaagactctatagactgtcatgatcctccatctagaatatctttgagttctttgtcttgaataaagctttgagaaacatgcgatcctttggcatcatcaaacattcagcttgatcctttggctacatcatcgactactgtcatcaataatattcacaaacttgcacttttcaagatagaacatgccattgagtccaactgaatagctattagga

SEQ ID NO: 258046 - DNA, 412 bp, Glycine max
agctttaaataggctctgaatccgtgacattgcgcttagcgcgagttagtggatttgagcttagtgccagtcatgcgctgagcctggctaaagacaatcgtcctgcttagcgcgcgaccttgatatttaagctctgctagattcctcttccacgctaagtgcactgaagctgcgcttagcggtggatgcacgctgagcctaaatggtgagttgagcgcaactaccacttttagcactttaagacttagcttcatttaacctgaaattgagcagatttcatcattaaatccaatggaaagtattctaaagacaactataacaagaaaacaagatttatttacaaacccctacaaaataactataaattgggggaaactatataagtttgggaaatgttttctatacaaaagtt

SEQ ID NO: 258047 - DNA, 371 bp, Glycine max
  unsure (1)..(371): unsure at all n locations
tgtgaaagaaaagagccatntatagtgtaaattgagtgttgagaggtcaaattttgaataggtggagattntaccttanaattagtttgagcaagtctaattcaatgttatagacttgatgaagatgagagtttacccccaaaatcacccaatttttattttcacctttcaaaccttgaaaattcactaaatttggtgggttttggatacctataatatgctttaccttggtttgaagtttgtttttggcttgaacatgatttatacatggtttatgacttgtaggatccaatttgagtggaattggatgcatgtaagctggattttgaaaatcttgcaaattatgcagaaaagctgtccaattatgcagc

SEQ ID NO: 258048 - DNA, 404 bp, Glycine max
  unsure (1)..(404): unsure at all n locations
agcttgtatagagatctttgttctagtgtaatctattaccttatatttgtaattgattactttgttctgttgagaccatgttttttttcttaggtctttgctttaatcaattacgaagatataggaatcgattacatggttcttgaaagtgtttccagaagtgatcaagaatactctaatcgattaaatcaagaatctaattgatcacattgctattgaaagttttccaagtgttgggaagaacactntaatctattaaaatgagaatataatcaattacatctttgagataatcgattacaagttgttctaactattttctctatatatngccaccttgtgttctcactttcaagcattcaaaagatacgtttttgaatgaacttttaactcaagacttcaat

SEQ ID NO: 258049 - DNA, 413 bp, Glycine max
agctttgacttgagtcatcaagagattataaatatgtgaccatggcatgagtttcaacattgaatcaagatcatcaaagaatcaataatcatcaatcatctttgaatcatctatctttcaatctttacaacatcatctctcaacatctttcaatcaatctttcaatatgtttctacaaaattttctgattcatttctcttcatctttctaaaagtgttttatcaacactttctcttccaagaaaagttctttgttcaaaaactcgtgtgattcatctatttcattctcttctccctatgccaaaagaacgaaggactaaccgcctgaattcttttgtgtctctcttctcccttacaaaagaatcaaaggactaaccgcctcagaattcttttgattcttcccttccccttaac

SEQ ID NO: 258050 - DNA, 432 bp, Glycine max
  unsure (1)..(432): unsure at all n locations
ttgatgctngctttggactcttggaagccgncgaagntggtcgaagaattctctgaagttttattttgaccaatgtantttcgacatgtntcgctatatntcatgttctcaaatattttctatttttttctctttcttctttaatgttgatgtattgtattctccaagctagaagtgttttcaacacattccaccttgcggaggggtattagacataaagttaaattagttaattactataagttatttgagaaagttagttggttactcaagttatagttactagaagatatttgagtatagtaatgttggttactcaagctagttattttctatctttgtataaatacatcaactgtgtaatactctgatcaatgaatgaactgaatgaattcgtaaaatatcattcatgtctttcattcctaataagat

SEQ ID NO: 258051 - DNA, 395 bp, Glycine max
agcttaaggagtacaagattcggtgttctgtctattttctattttctcttgttacatctttcttggaaaattattccgatatgcagaaaaagtctttcttaagaatatgacataacatacattgaatacacctttcattatatctcagattacagtaaaaaaagttattattatggcccaattatcttaccttttaatgtttataataactctcttatatagatagatagtataatgtatttttttttatataaaaggagtgtcaatatacaacagagtgtttgcgaatgtattgttggattaccataatatcgatatagcgacttgctggtatggataaataatgtatctacaataattaatgagattgatatagggaaagaaaataaatagag

SEQ ID NO: 258052 - DNA, 494 bp, Glycine max
  unsure (1)..(494): unsure at all n locations
aactttaaaataataaaggctcactttcatatttctaacatcattataaaacttttcctaataaataataaatcatctcagctcaaaacaaggtcatccaagacttcatgtaattaatatagaaacatatatctcaatgtcacatcctatcacagcattgtgttcttgtgtcctctaacatgaagttcttcatagtcatccacctaaccatctacttccattaacacaaaatccagatcatcacaagatccaaacacacatagtacacggggagtgagttattacattcctaactaatagatagaaataagacaacatataggtgtaaatatcatatacacaaaatacaacttacttatgcatagctcacattatttcaccactttgtcacgcatcatcacattacaacaccacatgtctcattcgctttcacaacattcacgtacttaatgatcacaacacaatatcactanatcaatcaatatcgatcaatg

SEQ ID NO: 258053 - DNA, 410 bp, Glycine max
agcttcaagctccacattaagctattcaatatttgttttttactctgacaacttatcatcctaatcctttgccttttcaagttcttccttgagagcttctatctatatttttagtttaaatataacctgattttcactggcctcttgtggagaaaactctaccagttgatgatgcatcgattgggatgcaagaatttgagccttgtagttattaaaaactctaataaaccatcagtttaatctctaaagtattgtctatactctaaaagaataaaattatataagtacttagattttactaacctttagggactaacttgattttagtacttagaagagtactacttattataatttttaatatttggaatactttagggatgaaattgaaagtttatattcagttaaag

SEQ ID NO: 258054 - DNA, 419 bp, Glycine max
taaaagattctatcaaagtagtcgtataagcgtcttactactcccgcaagattataattgtgcttgtccttaagcaaagaataaacggttcacttgtccacaagttacaaagagagtggccaatcaatagataatggtgtttcattcatcaaggacatcaaccatataaattgattaccatgagatgcttaaatcaattagttctcacaagctgcaagtttttcgaagataagaacacaagtattagagtcacaactgaaataagctagttagcatgactgagatcaaggaaagatcatcaaccaaaacctcacagtcattggttcactcaaactcaagtgtttaggcttatttcatcatatacaaccagcacaagttccaacctttgccattcatctcctatcatacagtaatgaaca

SEQ ID NO: 258055 - DNA, 374 bp, Glycine max
cagcatgcaagcaaagaacgaaacacacaagatttattctatcaaaaagtagagggaaccgacaagcacgatccgactcggctctatatacttctgacacctgaacaataacacataaacttggatcatggaatacatgacacgccacacaaagaaagtcttaatgtaccgagacagaaaaaccgcgcgcctctcgtgaaagagacaaaacgaataggctgacgcttaaatcacaaatactaatctctggttgcaattgcataacacttctatgggcaatcaactgatatcacgcacacccagtacattccaactgaatgaacacaaaataccaacatgcaaagccttacccataagcaactggactatgtgag

SEQ ID NO: 258056 - DNA, 434 bp, Glycine max
tactcactgtgcttcacaaagaatagataagtatgaccatctctctttgtatatccttgcgtgctcttattatattctgaccacgtataccttcctgtttcttactaaaatattttcaatcatgtctcatcatggactctggtgattaattaatgtatcagtgaaagctcacttacaataatagtataaaaaaggtttgtagatgtattccttttcattagataccttaacagcatgttcaattccccattcacatgacataatgcattgcatcatcatagaggccaatatcaagctgataaacacagcatggaagtttctatataatgttcagaagaggatcaaaatatgatgcattccacacatatctgagtattaatccccttattgttgcgttgagatggacagctggcatgtgcggatgagatatagtc

SEQ ID NO: 258057 - DNA, 404 bp, Glycine max
cttgaaacattaaacaattatatgctcattttatttctgtttatacactaaaaccttgcaagatgcaacttgctatcagtgaaaatagtgactctcaaagagaaaatagtatattcactcaggatataatctgaagcatttacacctcttgttaccaaagtacaagtattcctttccttcctcctcattgcaattttgcaaggtaaggcacgttatattttggttatgacccttgttttcataaaaaccctgtagtatattgataagaaaaactaataaaaacataacttttaagagacctattccaaactgagtgagagatccttatggtcgcttttctggcttccataagaattccattgcctcgtgttccttgaaaatgtctaaactatatttctaccata

SEQ ID NO: 258058 - DNA, 327 bp, Glycine max
  unsure (1)..(327): unsure at all n locations
tcttgtcacatctttcgtggaaaattattccgacttgcagaaaaatgctttcttagagtttgacgtaacttacattgatgactcgattgtgctccacatttacttgctatgagctgagtagtactgtagctatgtttgaagccggtgctaaatagaacgctgtgaaatatgattagtcctcgacttttaatttatatatttgtaaaaacgtacggccctaggaaagcaagtgttataataggaactantaatcaatgcctctgtttgcatatagctcagcgaacaaatagaatctactcagtctagagaaggtggcgtacctgtaaa

SEQ ID NO: 258059 - DNA, 402 bp, Glycine max
  unsure (1)..(402): unsure at all n locations
cttaataanagagaagtagaanaatattgttctgatttgcttatataatnatgctgagcaacgtatgaacaaaaataacctatactttcaaaaaatctgtgaagattaaatgagtactttttaaataccctttttttaattcaaacaaatttatccctaataatttctcttctttaattatgtatgaataaaggataattaacttctctattntttctattctttattatgggacttaaaagttaatgacatatttacatttcatcatttaaataatattgtcaattaaattaaatttaaatctctctctgtgtaaactgaattaagtattaagtatccgtgtacatggtagctattgtatatttttgaaatcaatgaccttatggttagcccttacaactg

SEQ ID NO: 258060 - DNA, 410 bp, Glycine max
  unsure (1)..(410): unsure at all n locations
agctngcaaaatggaagcaaagatgtctctctatttgtgttttaataaccctcattaactctggtttaacagctttacccatttacttggtgtctttattcagaatccctaaaaaagtggtgtataagatagtctctattcaaagaaactttctttacaaaaaccttgactaatatcaagcatcttataacttctaaggagttatttactttcaaaaaagcaaatattattaacagatacgaaccttcaactatacagattattgaggttcttaatcagatagcanagaatgaggaaattgatctatccgtcaattttgctgcacaaatagctacaaattctaagcagaacctcataaaagcaatcatggctcttgaagcatgcaatgcacacaagtaaacttctgactg

SEQ ID NO: 258061 - DNA, 285 bp, Glycine max
ataactgtcccttgtcatatactctagccaacttaatattttttctctaagctggaataaaaaaatagcggaaagaatataaaactcatgtatgaaaaatcaataggatgctactgtgattacattctggataagtactaaacacatgtatgcgaaatatctctcctatacattccttcccaataatggaaaggtcatcctcctgcacactatcaattgattgcattggctagtgtgaagactcccaataataaatattccctatcatgggataaatatgaatca

SEQ ID NO: 258062 - DNA, 413 bp, Glycine max
  unsure (1)..(413): unsure at all n locations
agctttgagccaaaatcctgactcaccataaatttttttccanggtgagaatgtcaatccttaccctcggaagcaaaaaaagaatagaggggaaatttccaatcaaagaaaaagagaaggaaaatttccaatgaaagcaaaaaaagaaaagaaggaaaattccccaatcaaagagtgggagaaagcaaaaaaagaaaagaaggaaaattccccaatcaaagagtgggagaaagcaaaaagaaaagaaaggaaaattcccaatcaaagaatgggagaaagtaaaaaaggaagaagaagaaggaaagaaagctcctgatcagggatcgaaggaaaaacagaagaaatgtgcagagaggtctttggaccggacaatatctgaacaatacagaattgtcaccaaatgaacaaaaaag

SEQ ID NO: 258063 - DNA, 397 bp, Glycine max
  unsure (1)..(397): unsure at all n locations
agcttctacaagaagatatggccaagatgatctttgttggactactcatcaaaggcaaggaaggaaaaaatcacaaggagttgaattggagcacgttgaagattgttgaatagcatgcctgagcttagcgcaagctgtctggcttagcatacgatgtcaggcttagtgcaagctgtttggcttagcccaattccaacctgaggaaaaattggccttaacgcgagctgtctagcttagcccaattccaacccgaggaaaaattggccttagcacgagcttgttggcttagcccaattccaacccgagaaaaaattggccttagcgcgagctgtttggcttagcgcataccttcaacgtcaatttattgaaaatcctaattnnttgttatttgtgtaat

SEQ ID NO: 258064 - DNA, 304 bp, Glycine max
  unsure (1)..(304): unsure at all n locations
tattaacaacttgcgagtgcccatccggttgagggtgaccaatggttgaaaattaccatttagtggccaacttgcttcacaaaatgctccaaaaatgccaatcattaagcctacgtataagatgcctatatttaatggtgagggtattaagggctctacaatcagaacacatgcgccatgtgccatccttttttaggaccanaatcactatgacagcacaaggactcatactatctcttacccaacctttgctaatgagttcatccacttggctttgaatctctttgggttcttgtgaatacta

SEQ ID NO: 258065 - DNA, 405 bp, Glycine max
agcttgtccatgtcaagagctaacaccatgttgtttatgtttttacaaaagcactttcaggtttggtttttggtaaattcattgtcaaattgggaatgattaacatctattcaccaacttaaggggtatcacgattaagcagttgcagttaattacaagaagttatttgaatagttaattggttatgacagttagttagttactcgaagttatttgagtaagttagttgattactcaagttagttattttctgtctttgtataaataaaccaactttgtaatactttgatgaatgaatctttgaactgcttttcatttatctttatttttttataattatctaaaaattcatgtcaatttgagttcacaatcgtttttaaacacacactaagtgctggtgtgttt

SEQ ID NO: 258066 - DNA, 444 bp, Glycine max
  unsure (1)..(444): unsure at all n locations
gatgactatgcaatattattatactattagtatatcacccttcttcttttgatagtgtgaaanaattttatattatcatttaattatgattcatcatgtatgataacattggtgacttctataatattaagattatcaataatttgtatattcttttctaaacttatccttataattattgatattctactntcttattttcgtgtgatatgaacacgaagaaaatatgaaattgccttgaaaattttatgtttagagaatactagtttttattttttcagggaacagtatcgatctaactctcaagaaaataagaatgtaagtgataagtggtgtgaatttggtcatggaaagatgctctcataaaatcacatttggttctccttttntaaccatattatngatatagaatatctatcgngtatgttgatgtctaatatccat

SEQ ID NO: 258067 - DNA, 361 bp, Glycine max
  unsure (1)..(361): unsure at all n locations
gtcacctgcggcatgcagctnacatgattgttcttagataaaaaattttaattgtttgagtacctttgatatatctaagaattcttttagctccttgcaaaatgactaacgcgtggctcctccatgaatctgctaagcaaactgactccaaagataatattttatcttgttgcaaccaaatatctcaaacttccaatcaaactcttatatagagttgcatccaccattntgccttcaacatctcttgtcagcttcagctnttcttcaactagtgtggaaacaagctntaaattatccatctagaatntctntagaaaatcacgtgcatactntctctangagataaaatcccatcatctcg

SEQ ID NO: 258068 - DNA, 359 bp, Glycine max
gatttggttgtgaaatgaaatcaaatatgctctgcagatttgtgagtcgtaaaaatgcaatattttacgctccctgcatgagttggtgtgagctcagtctcacaaatctgcagcatcgcctcacagaatcattgaacttttgattctgcttggcaagtcaggttccaaattgctttggccattctgggattctgcaaactaagcccgtaaattcaagcccataaaccaagtgctcactaaccctaacactaagaaccaagaagcatctactgagagaaccgagaaatacaaaataactatgtgtcttcatcttcaacctctcgcaaccctcccccaaaacatatgtgattgtggatgtt

SEQ ID NO: 258069 - DNA, 401 bp, Glycine max
agcttgcttccatagtgctacttatcaattattcctttatatgaattattagggccattttcttccaataaaaattggagttttactttggtaatatgcacagtcttttaatgcatacctttattacttggattgccataagaaaacatcaattctagttgaataaaattaccaacagtcaacagaccgaacctatatttaagttttgttctatcccactccttcgttaataacttttttagagataataaaaaaaaaaaaatctatttgaggtgtttgagtataaaaaaattgtaaacaattcttggcgattaatgtgctgaagtacttcaacacaaatatatagttggtatccaagtgctgaagtacttcaactagataaatagttgatatccaagttc

SEQ ID NO: 258070 - DNA, 506 bp, Glycine max
  unsure (1)..(506): unsure at all n locations
gctggtcatggcaaaaaccttacatgagacgcatntaagctatttactaatactatttcaatcaggtagagaatctcaatatgttataagcatttgtaaagatcgaaataatattaaacattcgatgatatgcatctccatatgtaatagatatatcaatgaaantctgtctaatacataagttttctactctctatgtgaccataagaaaaacaaaaaaaaaatgtacaatggaagtgtgattgtagtgtacttttttatagaaaaaattgtaaataattccatgatgaacatatttgttcaatattctacaaaaaatatgcaaatatgttcatcaatcgtatgattcatacggattatgtaattcgtatgagttaattcgaatgactcatacaaacggattacgtgatccgcagatattgttataaaaaaaaattaataaattaattctgttaatagataataatttttatctataaaaaatatacagattaaataattcatat

SEQ ID NO: 258071 - DNA, 406 bp, Glycine max
  unsure (1)..(406): unsure at all n locations
agcttgagaaatatagggaaccgctagagatgctgctttgtcttccaaactacacacgtgactccacttagaggtaatggatggttatcacaattgggttagaatgaacatgtgtagggatccttggaggattaaattgggatttattttagtatgtttactgaattattattcttcctttatgtttataattacgatattgttgtgtttgacggaccaaattgatgtcctgatgtgaatcggttgataaattgagtgctcttggtgtttttgtgtttttgacctatgaatttgattccttgattntgatatgaatatgtgaaattgtntgaggggttttactctcgatgttgtgggaaacatttttgtataaattgtttgtgtnttggacgagaattactagata

SEQ ID NO: 258072 - DNA, 411 bp, Glycine max
tgcacgtatcagtcaagtgtatggaccatatcctagccaatgtgctcatcgataatggttccagtttaaacgtgatgcctaagagcactttggagaaattacctttcaatgcttcccacttaaaaccgagttcaatggtggttcacgccttcaacgacactcgtcgagaggttaggggagagatcgatctcccagtacaaataggccctcacacctgtcaagtcaccttccaaataatggatattaaccccccctacagctgtcctgtggggcgcccgtggatccactcaatcggagttgtgccctctacaatccaccattagttgaaattcgtagtggaagggcatttggtcatcgtgtcaagcgaggaagacatcttggtgaagctgccaatctctattgcctatgtgg

SEQ ID NO: 258073 - DNA, 409 bp, Glycine max
  unsure (1)..(409): unsure at all n locations
agcttgaacatctcttaattagttcgtgcgaatccgtgtatcatatatttgtggcggatgaaaactcgggtcaccatcatcatttcagaatatctgctccaactgaactggtgagcatttcaaattgctttaatttgttctttcttatgttagacttattagcattctattgtgaacctcaagcatattatcaactgtgtgatataggttccgattttccccaacttggagacatttgtgatttctcacatggacaacttgaagtcaatatggcccgaccaactcactgaaaattccttctataaattgaaaaagatggaaatcacatcctgtaacaatctcttgaatgtgttcccatgtcatgtgctagacanaatacaaagcctggaatcactgaatttatggaact

SEQ ID NO: 258074 - DNA, 370 bp, Glycine max
  unsure (1)..(370): unsure at all n locations
acctaagtaataagtgtcaagctattaatctatataaatcactcttatatttttctttttatattttacagctttagataataattcacaatgtatcacattttcacgtggtgcattcttatttattttgctatttccctcgtcattagagttcaaacttccttttacttccaaaacaaactaacctttttcatacgtaacaccctaaccctatcttaatgaagaatcaatcgcttgaattttgtcgctgtgtattctaattcatatattattctatcaagagaatatctcttctttagtcccatcccgtgcggactgtgctcttcctaaagagaacataacaattctggtctctcgngtgaatattata

SEQ ID NO: 258075 - DNA, 362 bp, Glycine max
agcttgtaagttatatattcaatatattttatatgttttatttatgtagatgaatatattttgataaatgaatagttttatgtagtataagataacaattttgtatagtttagtttgaattgttaatgttatatatgccagattattttttgataaatgaatagttttaggtagtataagataataatgttgtataatttattttgaattgctaatgttatatatgccagattatattttgataaatgaatagctttaggtactataagataataattttgcatagtttagtttgaattattaatgctgtctggatgattatatttacgcttatatgatgaattagtgacgccacctaccct

SEQ ID NO: 258076 - DNA, 500 bp, Glycine max
  unsure (1)..(500): unsure at all n locations
tcatttttctaactctattacatgaagaaaaaaatacacatcaataatttcttatacttctttaggtttaaatacactcgattgtgcccataatttacctattttttatattttaaaagtggtcctataattnttgtttgtgattaattggtccttgccactctctcaattataaattaaaatacacaatttataagtgaatattcttttagacgtgtatttttcacactactttcacatttgcctaatagttctctctaaattatattaaattagccttccttatactttatatgtacatttgaatttcttaattgtatatttctgtcaatttaccttattttattcagtttctaaattgaattgcataactttctttgagagagnatatcaacagttaataacaaacttatatttataattgaattattcattataaatctcaaatacactctatatatgtagatatatgtaattatagtatatgtatatattaacaa

SEQ ID NO: 258077 - DNA, 406 bp, Glycine max
  unsure (1)..(406): unsure at all n locations
agctntgatggtgtcgagaagaaatcatatgtttgttatcatcaaaaagggggagaatgtgaatgtatgtatacatgatttcgatgatgtcaaagaagaatcttacaaggcttgttcaaatgataagcatttgcttcaagaataattcaagattgcttcaacaaacaaagtcttgtttcaagattcactaaaaccaagccttgccttaaaacaaagtgctttcaagacatgcaaggctctagtaatcgattacccttcctggtaatcgattaccagaagacagggttgagaaatagctgttgaaaaacgttttgatattgaattttcaacatgtaatcgataccatatgtctgtaatcgattaccagcaacgaaacttnggaaattcatattcaaagtcataaccc

SEQ ID NO: 258078 - DNA, 404 bp, Glycine max
  unsure (1)..(404): unsure at all n locations
agcttacatcattaatatagaaatctaaatcgttattgtatgtaattttcccatcactatcaacagcatgtgtcttgtgcttgtatgtcatcaagatagtcctgtggccaagcatcaaaacggaagtgcatgaataagcttatgcacaatttatattttataaaaaaaaatcctgataaccaaggggaatgctaaaataattggatgtcttgcaaccttaaggtgggttcatccacttccatgtaacttgcaagttttgtgagggagattgttgaatacactttcaagaaggtccggacacctgatagcaactgttgttgctntgcttcataaaggaacagtttcaactgaagtctataggcatcctgacaaaacaaataacatttagttattcacaatntcac

SEQ ID NO: 258079 - DNA, 483 bp, Glycine max
  unsure (1)..(483): unsure at all n locations
tgaggcccctaacaatgtggatttgcattgaatcctctatattaatgtcctttctttagtataacaaccacgggcaaacacgcataaatatttagaactctctaaaaataacagcttgattaaatcattatctgccaaaaatgctatactttagatacaaatttcactactatatcttttctcatcccaaccaaccttattatatgcgtctatataatctataaacttacgctgatgtacctcaatttcccaatcgcaatccaacaatccagattgattattttgaatntatttaggtgatattgtaggtaactgattattggttttaaaccttggacatggactgattaaattgtacatagtcctaccaagaaggttttcaggattgccaagatcaagataacagagaataacaatgtatgataagagggagcataatttatagtgcatacaaatattgagtggaagaccatatttgtttta

SEQ ID NO: 258080 - DNA, 399 bp, Glycine max
agctttatatggagctacattatgtggtatcatatcatcttcatctaggtgatgttcttttgcttcctttatcttttgttcagccaattcactttaattcattgttcttcatcatcttctccatgtatctcctccattttcttgtggtttggtgcttttagagtattttttttttttaaataatttgattaaatactagatctccacttgttcttgcatttctatggttcaaattttatagatctactcttgaattgtgtttttgttttgattttacgttctatcatttttagtcataatattcttgtgctgacacctttgatctcaattttattgcaaaatattgattaaaaaataaaacacaaaaatctaagtgtaaatgacttcattcatgttggc

SEQ ID NO: 258081 - DNA, 318 bp, Glycine max
  unsure (1)..(318): unsure at all n locations
aatcctcgatagttttagcttcccaatgggatattntcttcatcttttggtgcgtcaaattgtgagaatgcgcttatatttgtggggcagttttggttggtttttatgcttgttttcttgagttgaagatttgaatgagaaggccttaagcctatgctgtattctgaaacaatggggcatgccacattgtccccattctcttgcaaattatgtcgaaacgtgcgcccaccaagtgctccgtgaaatgaccccatgatgtatgaatatgattttgtaaaatggtgagagtgggacaggttcttatatgtatgtacagca

SEQ ID NO: 258082 - DNA, 406 bp, Glycine max
  unsure (1)..(406): unsure at all n locations
agactactcatctaatcctatataagtgatgctttctattatagtagtatangaagcctcagtaggtttacatccgtttgccaccatatcaaccagaaaatctattgcaagactggtttgctgagctttacataatcccattattattgagttataaatgaatgcattgggtttaataccaaaccctttcaagttatggaaaaatttgagtgcttcatgaacctttccttcacgacttatgccccccactactgaagtgcaagtaatttgatcaggcttaagacccttataacacatctttttcaagagctctacagccagatcggcttttcccacctttaaaagcccattaattattatattgtaagtaattatatctgcttcaagaccgtttctgcacatctct

SEQ ID NO: 258083 - DNA, 345 bp, Glycine max
tatattgtgaatgtgaaagcataagattgtgttgtagatttttacacaagttgaatgtcatcacatcggcacatgttaacttatctggagatgtatagccgacagtgaaattgcctgacatttcttcaaatttcatgttttataaacaaaccacacatacctaagtggattggaaatttattcgcgaaaaattgtttggatgctctgttaccaatttgtcaaatataaagatcaataggtatatgtattcacaatagctcatctcaatcctcagattcattatatctatatgaacctggatcgtatgacttatcaactccaacttgataggaatgttaaatatat

SEQ ID NO: 258084 - DNA, 399 bp, Glycine max
  unsure (1)..(399): unsure at all n locations
agcttgagatgaggaagtgtataagggtgtttcttccttcttttattcgttgaccacagagtggtacctggagatatgtcgcgggggtcaagagaccttggggacatcaggtggggtgctattgcccaaaaccaagcttgaccaatcccgacccaacctgggcatagtcggtcagtgagaacctgtgatgtacctaaacaggcgagctcctggcagtctacagataaaaggaacaaagaccactaagcacggaggcttgtgtggtggctggccacctatgaacttgattgatgtgtgagatatggcctctggtaatcgantaccaagggtgggtaatcgattacaaggcttaaaaatgaatacaggacgctaagatggtctctggtaatcgattaccac

SEQ ID NO: 258085 - DNA, 422 bp, Glycine max
  unsure (1)..(422): unsure at all n locations
ctactatgcagagaatatccaaggaaaataccttcatctgacttatcatcaaattatcctaaggtaacttttccattattcaatacaaaacatttacaaccaaagatatgaagatgtgagatgtttggttttctgccattgaacaattcatatggaggtttctttaagacaggtcttattaaagccctatttaaaatgtagcatgcagtgttaacggcttcagcccaaaagtattttggaagaggagtatcatttaataaagttctagcaatctcttccaaagatctatatttcctttcaacaacaccattttgttgacggattcttggtgcagaaaagntatgctcaatcccatgcttatcacagaataattcaaattctttattatcaaactcaccccatgatcacttctaatagatata

SEQ ID NO: 258086 - DNA, 394 bp, Glycine max
  unsure (1)..(394): unsure at all n locations
agctngaagatatgtaacccaccattttttcttataatggttgtggttgggggcaaaattaaggcccctccaaagtgttgtgcacgggtataccaccaactgcttgcccttcagtggcatatccgagacaaggcttgaagtcagctagattgtggtggggaatttcatgtgtctcccctatgtttgagagagatgtgcatgatcaggttgaggttgtcggctttcaatgagtatgggagcggagttattgacattctcactaggagtgaatgccacattgggtggtgtatggttgggaggcaagccatatattgggaaggcatgcttgttntttgcactaaatgaaggccagccgtaccttccaactctttgccttccagacctactatatctg

SEQ ID NO: 258087 - DNA, 283 bp, Glycine max
  unsure (1)..(283): unsure at all n locations
tcttcctaattaaactaattacacaaagcaaagtccagattcacaacccaattattcatcaagtgcagaggttctgacttccaagcctaatttgaccctcagaatggtagaattggaccaagattatttgtgacaaanatgaatatttttttcttatctttccagggagtactcatatgctccatttggagttttgtagtgtcctataggccctacacaaggcagatatgccaagtaagcacaaaaatcctaaataagccacaattatcattgagctcatcat

SEQ ID NO: 258088 - DNA, 401 bp, Glycine max
agcttgagatgaggaagtgttgaagggtgaaacttcctgcttttattgttgaccacagagtggtacctggagatatgtcgcgggggtcaggagaccttggggacgtcaggtggggtgctattgcccaaaaccaagcttgaccaatcccgacccaacccgggcatagtcggtcagtgagaacctgtgatgtacctaagcaggcgagctcctggcagtcaacagataaaaggaaaacaagaccacaaagcaaggaggcttgtggtggctggccagctgtgaattttgtgtaatatgtggattgtggcctctggtaatcgattaccaagggtgggtaatcgattacaaggcttaaaaatgaagacaggaggctaagatggtctctggtaatcgattaccacggg

SEQ ID NO: 258089 - DNA, 404 bp, Glycine max
  unsure (1)..(404): unsure at all n locations
agctttacaacaaatgccactctactccaagtttttaaaggatatgttaacaaggaaacacaagtatattcaccaggaaaacattgttgtggaaggaaattgtagtgctgtgattcaaaagatccttccacctaagcataaagaccctgngagcgtaaccattccttgatcaattggagaagtcattgtgggaaaggctcttattgatttgggagagttggagatcatgcacactaagatgactttacaacttgctgaccgctccattaccagaccatatggagtaattgaagatgtgttggtcagagtaaaacattctatcttcctggcatactttgtggtaatggatatctgtcaagataatgacattcttgtaatattgggaaagctgcatagtttatatg

SEQ ID NO: 258090 - DNA, 405 bp, Glycine max
  unsure (1)..(405): unsure at all n locations
tgaacgaatgtaagacacatctctcttaacctctgtgattcttgacttcatttcattgaagcgcatatccacttgtagttccaaattgtcaaacctctcaccaacaaaggtttgaagaccatcaaacatgtctaaaatctttgaaaggatagatgaatcttctccatcatgtccttcttcaccaacatgtcgagcacctttcttcatccaaaaaccatcatgctccttttgataaccaaaagatgctatgactgaagcgcctatgaggaaagatctcttgattggaacatatagttcacaatcaagaggaatgttgaagtgttgaatgaaaanggtaacaagatgagggtatggaatggagcattcaatagcaatgccttatgcatgcgatatcaaacaagatgt

SEQ ID NO: 258091 - DNA, 360 bp, Glycine max
  unsure (1)..(360): unsure at all n locations
aaaagttattcttaaaactttactttacgacatcacaataatccatcaagaataaagaagatacacttttgtacacatacatgaaacattatgcatatgtcatatattacaacttttcaaaaaaaggaaaagaaagggccttacgtgtgtgaacctaaccaactatanatttgggtgtacaaaatacatcaacaagatacatgtggactcatataatntaaccaaattatacaatntactacagtacttttatatntaatatattatannttaatattacattctatnnttatattgagatattacagaaattttgtcactanaatttttaanggcttaaatgttagatattaataatct

SEQ ID NO: 258092 - DNA, 365 bp, Glycine max
gatgatgttgaagttgaaccaaagtcgagagattctgatataatggaagataaaagatcccggaggagggataatgatgatattgtaagcaagtcaagagaacctcatggatacagtgaagacaggaaatcacgaaagcacagtgaaggtgaatctgcaccaaagccaaaagaagattatgattcgaagcaagataaaagatcgtatagaaactatagcaatcaaacagagtcaaaagaaagatatgcttttgacaggagagaatataaagggtcaagaaagggcacgatcaacgtctggatatggcatgtcattcctttgtcgtggagagaaacgagtattagactaagttgaacaccatttga

SEQ ID NO: 258093 - DNA, 413 bp, Glycine max
  unsure (1)..(413): unsure at all n locations
agctttgatttgcttttcaacatactgttccaatcaatcttatacaatcctttacaagccttgaatctctttgaacttcttcttcttctttgtgccaaaagctttccaaagttttctggttttctaaaccttgaaaacttgtgctattcattcttttcatctcttctccctttgccaaaaataattcaccaaggactaaccgcctaaattctttntgtgtctctcttctcccttttccaaaagaacaaagaactaaccgcctgaattcttttgtgtctcccttctcccttgtcaaagaattcaaaacgacacagtctgagaattcttttgattattccctttcccttatacaaaagtgttcaaaggacaaactgcctgagaattcttctcattcacaaagtatcaaaggttta

SEQ ID NO: 258094 - DNA, 359 bp, Glycine max
ctacatcatcttctgtttgtatacaggatcccacatatatttgctcttgaatctaagaatttacgatgtatcaaatattataaatattgtacaaagtatgctattaaacaaataattgtaagcaagtaaattcacattgcaataccttactatagcgcataccaagagagtgattatattacatctcatctctggaacgatccaaagcctgaatgtattcctcaagcgggaaacttccatgagcccaatcttcatcctcacacacttattcttgtaaaacacaagcaacgtgtgttgtgtgttcagtaacaatgtttctctaccatggttatgatatgttgaatctgattgctcaatac

SEQ ID NO: 258095 - DNA, 414 bp, Glycine max
agcttcactcagagactcatccggaaactagtgaaatgatgagatgtctgcctttccttctacaattttagactcagggaaatacttcttcaaaaaaatttctaccacctcgtcccaagtcttaagactattgcctttaaatgaatgtaaccatctttttgcttctccggacagtgaaaatgagaacaaactcaaccgcacaacatctttcggcacacctgcaagcttgactgtattgcaaatttcaatgtaagtggccaggtgtgcatacgggtctttatttggtaggctatgaaataaatttccctatatcagttgtattaaagaatgagggtaagtaatattatatgcttgaacctctggccacgctatactagtgaaaaactgcggctcaacaaaactagagtagtcttc

SEQ ID NO: 258096 - DNA, 155 bp, Glycine max
ctgagcctctaaaccactacaagagcaaggggaaccaacatcccttggttacataaaggaaagttttgcccccctcttctcgctcatgctactttttcctgaacaaatgattggcttaatgttgaaacattttaaagagaactttgggaatttaa

SEQ ID NO: 258097 - DNA, 347 bp, Glycine max
  unsure (1)..(347): unsure at all n locations
agtcacctgaggctgcagctntcttctaataacctgttattgttattattttaattgcaagtcgcattctcgttctttctttgtctaacatacatacttgctcaaacttatgataagaaacacaaactccatcacaatcatgcattcaatccaagatcaattcataacaccaattgtcacaaagagataataactgttcactgcataatcatccaagtcaagttaaactattccatatgcttcaaaacaagcatactagctatccacanacaaaagagcagtgtatataaacattaaccanaataactaagacactaaactcgaatataataattatataaaaaata

SEQ ID NO: 258098 - DNA, 474 bp, Glycine max
cctcagctacagtgacccctgataacgcttgttagtttatcttcaaggatgtgaatgttactgagcagaatggtaagaatatcaatctctcctcttcttttacttctcattcctctcaggcgaattcttcaactgaaaaataatagtaaaaatcccgtcaatacaaatttgtcaggtagaatggaatctattaaaggttgcttaacaatcatactcaccataattacaagaatcccgactaaaacttgaaccaaatcggtaaacaaggtctaggcatgctttacatattccagatcgcccaagtgtgccctctcaactatttcttgggtgctactacaatgtaacctcaaacacccatagccaaagtacactgctacacattgaaataaacccatgttagaatacttttgcagttaagaatccagagaataaaaatctggacacttgtatcgtatagaatcgctctttttaaaa

SEQ ID NO: 258099 - DNA, 409 bp, Glycine max
agcttacgctaaattagtctaaactttcgtttgttatataagctgactctgatccaccaagatggatctgaggacaaaacttattttaagttaatctgaacctatgagggctgtctaaattatgcctagtccaacaagagggatctgaggacgaagcttacattgattcagtctaactagggatcgaggtttagtaatttaggcaacaacataatacacaaaagcatgattgattagagaaacatctatatatatataagctggtttgttagaaaaactcaacacccttacctactattgacaatcttacttacttgcatttttactggttttagcctagaattagtttaattctattctaaatcatcaattatcaatatttctttcaacaatgccttatttctgaatt

SEQ ID NO: 258100 - DNA, 268 bp, Glycine max
  unsure (1)..(268): unsure at all n locations
actcccaaaggtctgaaggcgagagatcaaagtcacatggaaaggtcagaccaaattgtgaaatgacattatctattggaattctgacaagagaggtcactttaccaattagtgcatggtgcccaagaagaacacgactcacaacaataagaagcgcgatgattatgaatccggaaatgcaacaacttatgaattcgatgatgcattaatntgcagcatggatagtcctagtgattcatgggttatggactcatgtgcgtattccaca

SEQ ID NO: 258101 - DNA, 414 bp, Glycine max
agcttatatgattatggggtacccatcacatgttgtactaggtggcggtcgggcgatggtgcaaaaggattctccacatccacaaatcacgtacaaacccaccatcccctgttgcccacctccaactgagctcacgtactcccacgtagccattatcctcgttcctctcgacgccgagtccccatcaatcctcccaagctcccacaacatccaagtaattccacatccaatcatcatggactaacaaaaccaagcaaaacagggcaaaggcagaaaactctgcccaaaacacaacccataatcacagcttttcacatacaaatatcccagtaaccttttcttcgttccatgtcgttaaccgttggatcgactcgaaaattttactggaagtctctagtacataagcctacattt

SEQ ID NO: 258102 - DNA, 393 bp, Glycine max
  unsure (1)..(393): unsure at all n locations
tgtgcaagcaatcaatggggcagaacacaccaaatgagtataatgatgggtggctcaaattctcacaaaggtgaaatcatcactttctaattgagctttcaaaactatcatgacatgttgaaaagaatcaaggatttcaagtcacacaatgtctagaactcttattttcaaaacaattacccatttcttgaacatattctatatttcaaagaaaaacatgccaagtcgtacgtgcacatgaaatngacccacaatattatactgagaattcgacgagacttacaacatttacaaattaacacaactaacaaattaacagaaccaacagaactatgcgaaccaaagaacactctccctccatacttatacaacacattgtgctctatggagcac

SEQ ID NO: 258103 - DNA, 412 bp, Glycine max
agcttagcagccaaatcttgaggatcaggcctcatgagtgcaaatttggaatatgtgcacaagttctcgccctcttccaacactacaggggtctttaagaatgtgttaagagtatccttatcaaacttcactaagtgacctctcaccctcacctgcttaggtgatttatcatcggggtcatagaggttggcataaaactccttcacaatggcgatgtctatattgttgtcataaaaatcagtcagcctttcatcccaatggcatctctcgagttcctccttgaactcatcaaactctatataataaattaccacattcctttctggtaaaagctttctaggcaccacaacgtcagtgtatctctcccaagcctcttgggatgtgaatctggatctatcgaatctggcttggg

SEQ ID NO: 258104 - DNA, 380 bp, Glycine max
  unsure (1)..(380): unsure at all n locations
tggntgtgggcaatagcacctcacctgacgtccccaaggtctcctgacccacgcgacatatcttcatgtaccactctgtggtcaatgaataaaagcaggaagtttcatccttctacacttccttatctcaagcttgtaggattatggggtacccatcacatgtggtactatgtggcagtcgggcgatggtgcacaacaattattccacatccacaaatcgcgcataaatccaccatcctctgttgcccaccttcaactgagctcacgtactcccatgtagcccatattctcgtttctctcaacaccgagtccccatcaatccttccaagcttcctcaacattcaggtatatcaacattcatacagcacatactaccacag

SEQ ID NO: 258105 - DNA, 58 bp, Glycine max
aagcttaagaaaacatatttttatatatttctatgtttgcttgcagttaatcttagtt

SEQ ID NO: 258106 - DNA, 407 bp, Glycine max
  unsure (1)..(407): unsure at all n locations
tgatgttgttattgcaggcaatatcacaaataaaaacagtttatgctttcngtggagagagctctgcaaccaaatcctttatagagaacatggaaaaacaatatgttataagcaaaggggaggcacttgtgaagggagttgggatagggatgtatcaaacagagagtttctattcgtgggctctcattgtatgggttggagctattgcggttagagctggaagagcaactccataagacataatgactgcagtgatgagtattctctttggttccatgtaaggaagaaaccaccttcangattgtttagaatggagaaaatggttaataattaatgactaagtaacgaaagtatccttgtgaatngcagatctctcacttatgtagcaccaggcatgcanaaattta

SEQ ID NO: 258107 - DNA, 403 bp, Glycine max
agcttgtgcattcaatatcctgatgagggtgtttcatatgttctgaagactggactaatacatttactgcccaagtttcatggtcttgcaggtgaagatcctcataagcatcttaaggagtcccatattgtttgttccaccatgaagccccctgatgtccaagaagatcatatctttctaaaggcttttcctcattcttttgagggagtggcaaaagattggctctactaccttgctcccaggttcattttcagttgggatgaccttaagagggtgttcttggagaaattcttccctgcatctaggaccactgccatcagaaaagacatttcaggcatcaggaaacttagtggagagagcttgtatgagtactgagaaagattcaagaaattatgtgcaagct

SEQ ID NO: 258108 - DNA, 262 bp, Glycine max
ccctttagagccttggatccctttccttggtttgaagctcactacaagccctaagtgaaaaaccatgatattaccatatccttaaggaattttggagctttggaattgttttgggaataagtgtggagggtatttagttcattggacaacttgttttgtagctatgctttatgatgtattttgggccatactcgatgtacattgtatattggttaaatgttgcacatgctgaatgaaatgttatttctcaaatgctaaagag

SEQ ID NO: 258109 - DNA, 333 bp, Glycine max
catcatgttgaagataggctccagatctctttgttgtgtctccctcctccctcgacatatttgttagggcatttccctttcgcagactatataccccctcttgtgacaagaataagccctatatactcaaccctcataccttaataacaactccgcctactccttattctatatactccctcttctacacttctcacacaaattgaaagtatttttctcctatcctaatcctaccaccacctccaccaaacacaatgcgccatatatgtgttcataccccttttaccctctcgcaagacatatgctttttcatgtgataaatacctcattctc

SEQ ID NO: 258110 - DNA, 407 bp, Glycine max
  unsure (1)..(407): unsure at all n locations
agctntcacgatntttattttattttttatggtttcttccattttattcacaaactccgtgcccataaaaaactaatctgtttcaaaagtggtcccttttgttggacagtcacgattttgagaacgtatccgcttcttgcttgcaattaaatcttgcaaacttttttattttctttgaaaaaaattcacataacatcatcatatatattttntcaacgtgcatgcatgtattattaaaaatgaagtagttttatttttttaatagaaaaaatgagacattattgttattttttttcttcaaaattttgaaagagggtggaaataccggttttatccaaaaagttgtagatggaatacctggctttcaagacggcgctcgaacaacgagctgtgctcgtgccccttga

SEQ ID NO: 258111 - DNA, 153 bp, Glycine max
caccgagctgcagctgtctactagccaaatactgatgtgttcttcttacacacgagacctcgacagagagggacctcgaaggccctcttgcgagaatgaaaccgcatactcaaaacaaacgtgagaatacagctgtagcagagtagactgaaa

SEQ ID NO: 258112 - DNA, 412 bp, Glycine max
  unsure (1)..(412): unsure at all n locations
agcttttggttgaatgatattgcttctcaaatgtgctagtgtgaacctcaggggtttctatttttgttttagatagatatttttttaacaatcacaagcgtgtgcgggtttcattccagaatccgaacttcaaaagcaaaattagtcattccttgatccacatgggctttattgggcttgtaacgtggttagggggtaagagacctatgaaagaaaggattagaaaggctcanagggtgtttgagggttacattgagtaagaacctttagagcgttgcttgtatcttttgggttaggctctactccttttgtattattcagtaatccttntcgcacttttgtgcatttcttgtaaaatctggagatgtttgtctttctttcnttttcttcactcacctttggcggattatat

SEQ ID NO: 258113 - DNA, 415 bp, Glycine max
agcttccaagaatcaagatcatgattcaagactcaatattcatgaatcaagagaagaattaatcaagataagtattaattttttttcaaaaactgagtagcacatggatttttctcaaaacatgtttaccaaagagtttttactctctggtaatcgattactagattgttgtaatcgattaccagtaagcaaaatggttttcaaaaaggtttcaactgaatttacaacgttccaattgatttcaaaaagttgtaatcgattacaatatttgggtaattgattaccagtgtgcttgaacgttgaaatttaaattcaaaagtgaagagtcacattctttcacaagaaaaagctttgtgtaatcggttacactgatttggtaatcgattaccagtgatagtttctgaacaaatcaaaa

SEQ ID NO: 258114 - DNA, 358 bp, Glycine max
tcccacagaacgatctcaagattcagtacgggttcacgatcgtgataaacttcaagtttcatgagaagaaatcatgaagattcaagaatcaagagaagtttgatttctagattcctgagaagaaatcatgaagacttctcaagggaagtgttgaactttttttttcacaaaacacacatagcacaattgtgttttcagaagagttttctcaaatttttaagtactagagttttactctctggtatcgattaccagggcaaaggttgatttcaaagtttttaggaatctgcacattcaaatgtttttaaatggtgaatcgattacatatattggcatcgataccagtgttctgatgtcg

SEQ ID NO: 258115 - DNA, 413 bp, Glycine max
  unsure (1)..(413): unsure at all n locations
gctnggtttgaggtacttacccgttgaagatcgaataacggtgaagaacgaatgaagaacgtcgaagaacggtcgaaaaccttcgcgaaattcctcatggaaaacgttacggaaacgtttcggaagcgcctcggcttagattttcttcacggaaacaatttttccaagcaaattcgaaagagagagaagtgcctaaggggctgaacccttttccttctcacttcctcccctatttatagcaaaataggggagatgcttgccgcccagctcacccaggcgagctcagctcgcccaggcgagcagggttgcttcctctagaagcaacagccttctggaggaatattctggagggcctaagtgggccgggttgctatttgcacccccatttttactaagtacacccnctgtctttt

SEQ ID NO: 258116 - DNA, 324 bp, Glycine max
  unsure (1)..(324): unsure at all n locations
atgtctactattatngctatcagtacattctgcgtcattgaaggaaccacttatgcttccagatccctccacctttgggcatattctttgaaagatccatgccccctcttgcatatgctctatagtggcatcatatccgaagccatatcaaaattatactgatactgcctaacgaaggcaaccattatgtccttccaagaatggactcacgaaggttccaagttagtataccangtgacagcttgcccactaagactctcttggaagaaatgtgtcagtcgattcccatcttttgcgtatgcccccatcttccgacaatacatc

SEQ ID NO: 258117 - DNA, 404 bp, Glycine max
  unsure (1)..(404): unsure at all n locations
tagctnttgagagaccatgaagattatatgttgctgtgcagatatcaactgagggagctccaccaagtgtccgcatcgaaattgaaaaacctttattcaaacctttcaaagatagtgagaaggctaaacggaaaattagggaacttagaaaaactaaatccttaactgagggcgtaggtgacaatcatagtgaattactaaacaagattggtagtttactttaggtcattccagatactccccaaatggtaacaagaagtacctccaaattaattaatgttataaatgaagatagtgaccaaacctcagataacacaactgagataggatcagtgtcagaaaagaatataaatccaattaattccaaacactggaaaacaccctccaaattatattaccaacgt

SEQ ID NO: 258118 - DNA, 463 bp, Glycine max
  unsure (1)..(463): unsure at all n locations
tcagtttgagccttgttggacttggtgacagtcttctcaaactcattagcccaaaaatctacaattctccaagtccttacttggaagttagcaatggaatccattgatgcttgttgatcggcttccctcaacatctcacaatctgactagctaagcattgaagactagataaaggcatgtgggttgaagtcctaatcccaaagagttaaccctatccttcatagaaagaaaggcgggtgactctcgatggaggaaggagtagcaattggaacaagttccaccctttgccttgttgctgcaacatcttggtgatgagaatgacttggatgggccctcttcgccgcactatgtttgatgaaagaaggaaggggcacccatntntcttncacctcatcatgcttcttgccttggcatctttagcttctcagcttcttttctcggctttatctcttaacctatgtgc

SEQ ID NO: 258119 - DNA, 409 bp, Glycine max
  unsure (1)..(409): unsure at all n locations
agctnttgttgatgttatttctgacttaattatattttgaggcgaatcttccagttttgtaagttaaggaattttttttgaattatttaattagagtaataattgttttgttagaatgaagtatcaatgtctagtttaagtttaatagagcaagcaaatagattttttttatttttatcattcacaaaatatttaactgaagtaataattgttttttttagaaaaaaaatttgaacgtgaagtttaagcgtattaatatttgtaattagggtttttactttgaagttgatttaattatgtttaattattttcaagcctttgttgatggtttttcaggccttacaaatatttacctgatttccttttagtttttttaagttagaatgaaattctaatctgtagtttaagt

SEQ ID NO: 258120 - DNA, 266 bp, Glycine max
tgagcaaggagacagctgtatcatcagatcctcgggcaaggcttcaaggcaccaggatcaaacatagagccgatgaatcgaatctgactaaaaattaagcagataaatcaggtagactcaatcactacatcaaatagaaagctatagaagtgaaggtgctatatgatcccatggttgtaactgtacaagagtttatttgatctacaatgtgatgtaccgtcaatgttgaaagccaatgattcacgtcatatcaagtgacatcaatt

SEQ ID NO: 258121 - DNA, 337 bp, Glycine max
  unsure (1)..(337): unsure at all n locations
attctgcaggaattcttctacaattgctctgtcaccaccaacgatactagtcacagcttttataaaaacaatccatatacactgcaagaattattccatttattgaagtcttaaatataaacttagtgtagtcaactacacttcaagtcaagacgaggagtacaaaagacaaaaaatcaagagctaccaagaggaataacacttacaggtataggtattcttctgtcatganaagaacattntgatacaacgaanatatcatcaatactagctcattnggcctanaagcattcaacaatgaacactacttagaaaaacatgttcatgcacatacaaa

SEQ ID NO: 258122 - DNA, 358 bp, Glycine max
ggcttctgttcaagatgtatgcagcagtgttcacagcttctccccacaaatattttggtagtttcttgctctttaacatgctcctcacacatgttcaacaaagatctattcttcctctcagctactccattatgttgaggagagtatggaggtgttacttcatgtgtgatgccttctttctcacaaaattcagcaaactcagtagatacatattcaccccaccatccgttcttaatatctctaaattctttccacactggttctccactgaaactttgaatttcttgaatacttcaatcacatcactcttcctcttaatcaaggtaatccaaagttctctagtcagctcatctattaa

SEQ ID NO: 258123 - DNA, 408 bp, Glycine max
  unsure (1)..(408): unsure at all n locations
agcttncaaaagtgtatagtaaaactatgaatacatgcttatttgcagtgcaatatttttcttggtttaatttttatattcacgggataataacaagaaacatatagaatgtttaaataattttctgaacgtaaactgagctatgcagctctacacggctgtttctctacttgttccctcgtctaagcttctgaggagtgaaacaatattttgacatagtaatatgaatatgacatggtaactttccaaagaaactgggccacaaggtacaatggttcaaagaatatcataagatcctgctatgttaatacaaattcatttcaatcattaacacccggacagaattactagaaaaagtctatattgtaactgaaaaaccactgctttatatggagtctcaatttcccc

SEQ ID NO: 258124 - DNA, 344 bp, Glycine max
  unsure (1)..(344): unsure at all n locations
tcaagaaaaagatagcctcagcaaattccttatttccagaatggaattctatcaatagacctccaatctctaatggagagggttaccactactgtgaaacccgaatgcaatatttttatcgatgcaatagatctaaatatctgggaagccattgaaatatggccttatatacccaccacagtataaagagtttcaatagatggtagttcatcaagtgaaagcataaccatagaanaacctatatatagatggtctgaagaagatagaaaacgagtacaatacaacctataagccaaaaacataataacatctgccctatgaatggatgaatatntcagagtttc

SEQ ID NO: 258125 - DNA, 414 bp, Glycine max
  unsure (1)..(414): unsure at all n locations
agcttataagaacaaaattgcctcaatcatttcctaatatgcatgtgaattaggaagcatcaacaagaatcaagccaaggctattgtgcaagcaatcaatggggcaaaacacaccaaatgattatgatgatggatggctcaaattctcacaaaggtaaactcatcactttcaaattgagctttcaaaactatcatgacatgtagaggagaataagggatttcaagtcacaaaatgtcaagaatttttgttttcaaaacaattacccatttcttgaacatatcctataattcaaagaaaaacatgcaaagtcgtacatgcacacaaaattgacccanaatattaaactaaaaatccgacgaaactaacaacattaacaaattaacacaactaacaaattaacaaaaccaacaaaa

SEQ ID NO: 258126 - DNA, 435 bp, Glycine max
ttacgcgacctatgaatctcagctgtaactgaattacaacgttccaattgatttcaaatggtgttatcgattacaatgatttggtgattgattaccagtgtgtttgaacgttgaaattcaaattcaaatgtgaagagtcacgtcctttcacaaaaatgctctgtgtaatcgattacaatgatttggtaatcgattgccagtgataagtttttaacaaaaatcaaaagatgtaacacttccaatggttttcaagtttttctaaaggttataactcttctaatggttgtcttgaccagacatgaagagtctataaaagcaagtccttaacttgcattttcaagacaacttacaacctttacaaacaacttttccatatattcttttacaacctttgaatctcttagaacttcttcttcttcttcttcttcttccttt

SEQ ID NO: 258127 - DNA, 397 bp, Glycine max
agcttgctacactcccggaatgatgaatctctatatgctctagaaagagaggggaaaacaagatatttcatctgagacctggattaatatgttgtgtttaaaagtaatcaagggatggaatcagaaaccatataagccaaccacaaccttaaaaattggcattgctccaatgtaaaacctgactgcatctgcataggcctccgacttgatgcacttgcctagtctatcggggagatcatatatgaactactcttcgacaaaggtaaaaagtatgtcagtcatataccacttccacagaagactcacaactcatatcaccaatgcgggaacacaatattgaaatgatgatgggccagaataaagaaacatgcatgattgctctaatacctgaacttta

SEQ ID NO: 258128 - DNA, 459 bp, Glycine max
  unsure (1)..(459): unsure at all n locations
cttntataatattgtcttatgatttatatactcctttgtttactatatattggggaaagctaaagaaataaatatcagatataattgtactaataaacaacgaacaaatgaaatcacataataaacttacatcctactttagatcaaaacattaaaacatcaaatatgcattcttagaatcaaatgcaatatcattgtcacctcttataattatcactaactagtcctcagttcaatatgattgataatattattcatgaaaactagtggagtttaaaaaaaaaacaaaattattaacaacgtgaaaatagccaacactaataagtttataatatatcctgactaacagataaagaagaatattaacaagcatttacttctatcacttttctatgattcttccctcttgtttagaagagagatcaaataaaattgataattttaataaattctagtaat

SEQ ID NO: 258129 - DNA, 335 bp, Glycine max
gtgcgcgtgcagacttccaattcttcttcaatacacacaaaatttgatgctaacgctattttcggagcctgcgaacctacctttcagaaaggaccttaatgccaggtagggaggactattcctcactcgaaatctgagggtgctgggctcttgcgagtgtataaagggtaccactactaggatatctcatttaagacgtagtgtgtgaaacaaatcgttgtagatcatgctagaactcgatatgtatgatataaacaacactgcccatgtatattgattagctagaaatgatgtttcgatgatatgaatgcttaaaaagcacgcaataaactggt

SEQ ID NO: 258130 - DNA, 130 bp, Glycine max
tttacaagcttccattttcaattatgagcatctcgatatattacgggacttaatagaacactcgagtataaagtattgggtgtttaaatgctcagagcttgttgtctcaatcttgagcatctcgatatat

SEQ ID NO: 258131 - DNA, 99 bp, Glycine max
ctacaagccaaatagtactttaagcttgttatactcgtatttccggcagtatcattttgctataagatgctttagtctttgagccaaaattatttctgt

SEQ ID NO: 258132 - DNA, 197 bp, Glycine max
  unsure (1)..(197): unsure at all n locations
acaatccanacacgttggttggaatggaccatatgtgtcgtctgtgtattgcattcgtcacattgcatcaaatctcatcacatacgttaataatggttacttaaacaaacacgtcatcaatatgggtatgtgtctttctatttcatgcatcatattcttgcttaatacatgctcactaaatattcactcatattcta

SEQ ID NO: 258133 - DNA, 170 bp, Glycine max
tccgtgatcttgatctcgtcagtattctgtattgccccgattgaacccatcaaattgtcttgagatcaggttatgactattgcagattatacctattatatacttgcatcgactgccaaatcattcttctcattgggtgagtatgctaataaaaactatgaaaaaatttg

SEQ ID NO: 258134 - DNA, 337 bp, Glycine max
  unsure (1)..(337): unsure at all n locations
ctgcagcttctcataantgctatgctgnatgctttctgaggcttgcctaatcacgaaaattctcaaaacccctttatgcatccatcgaaataacctagacaggagtcagccattttgccctcctccaagatgngaacagcttaaaagaatgatcttctggacatagggttatggggacaacatatgaactctagatgctagagatctaccgcagacatgaattggcgcaatgatatccccttagacaatgactgcggcctcattctttattttaaccttttgccatttatactgttgtctagtgcactataagccttattatggctcttactattga

SEQ ID NO: 258135 - DNA, 100 bp, Glycine max
agctgcactgatatacatctctctttaacaatactttgattattaaatcttcatgataacatctcccctcttgataagacaccacctgttgtccggagca

SEQ ID NO: 258136 - DNA, 443 bp, Glycine max
  unsure (1)..(443): unsure at all n locations
ctgcagcttgatcaaataataaaataattagacttatattagaaatattatatgatattttaatattctctgctttatatngattcaattatctcaaactcatacctcttgttccacttaacaatatataattaagaatataagaaaaatatctaatacttttattaatttatcgatctttgtaaatgacaggaataatataacccaaatgacatataaaatgatataaaaagagtattaagattgaagttaattaaatgtaaaatgacattaacatacttgcaacatatttataccttgttatntgaatatgtacaatatattttacgtatttaaccactcgttgttacaaatgatatgcaatatgataagaaacgacacatgtgctggtcctataatattataccacacatcgcagtgaaccactacataataaaaaaatg

SEQ ID NO: 258137 - DNA, 76 bp, Glycine max
actacttgtatgccatgctatccctgaaagcaggcgctaataagatgggacttcattccgtcctgcatatgattct

SEQ ID NO: 258138 - DNA, 394 bp, Glycine max
  unsure (1)..(394): unsure at all n locations
gtcacctgcngcatgcangcttgagaatattagagacatgattgtatacttagtcacattcanattattggccaaatttgccctcaacacatttntaacaaatcaatcaaccatatatctgtcgcacgagttaccaaccaaaagcaatcaaatactgtaaaaccaatagacanatattaccctccgctgctcagatggcttaacagagtctacaatctcaagcaacaacaacanataaagcaaggaaatacccctctgcaatattccacattgtgattcattngcacccatattacgtcatatntctccaccngtccttcanataacctgagaaaacaattgatcatatcataagtcaaaagaaatattataacactttagatgctacttagtc

SEQ ID NO: 258139 - DNA, 285 bp, Glycine max
tgaacgatacttgactgtgtactgcacaattctctaacttggggaaagaaatgacaagagaaatatttctctgttgtgcaactgagcataatgtaaaaataatactctatcataagaattgcagaatatttaaagaacattattaacattggaaagtcctaaggtcacgtccacaagttaacacccgatcaactgatgtctaccaagactaatatacagactctatgactccacagtacactatatgtgtctcattcactgctcacacattgatgcattcattat

SEQ ID NO: 258140 - DNA, 282 bp, Glycine max
tgcagcttatagtcggtctggaacaaggaagggtccatatttaaatatgtccaaaacttgattggccgacatgcctctgattcactgggaatggcggggagaacgcccgcttacacacagcatatgaaccttacgtttaaaacttatattggcctcgcttaaatttcatttgtaggcttggtctttgctttaattataaacaagatcttctatctgtctggcttaccatttattattgatgttacttttttaaacgaatccatacagtcccgaggctatcct

SEQ ID NO: 258141 - DNA, 68 bp, Glycine max
actgttcagcagaactctcttctaagttctgatatctatctttatctgatcttttcttaactgcatac

SEQ ID NO: 258142 - DNA, 288 bp, Glycine max
  unsure (1)..(288): unsure at all n locations
gcactgcactactgatcactgatggtaggaggattttctatactctcgaatattaattggactgccattgctgaagattgtctagattgtgactttaggctagctactatgagatgcatagtaaatgtacactgccctcagttttagaatacattctacactgaatccttttgtttacttataagcttgcatcattattaagcttctgtctantgaccaatatatagaaaataatgagataattgtggagacaactctcaaaagtgtgcgtgtatacataacaatata

SEQ ID NO: 258143 - DNA, 339 bp, Glycine max
  unsure (1)..(339): unsure at all n locations
ttgtctcatgcatgaagttaatccgatctgtatggggaaggcttttcacctggatgattctgaaaatggcttgtgatgaatgaacttattacttaatatataaaaatttggattgtattaaaccaaagatgggacatggacccataactgctttcttctggataaaaaaaattactgtgattacaacatacaacttattgtgattgcttacttattgtatcatatgtngtacttangatgtatcacatacaactcctacaacactctgtggtcggtgcgatatttgatataatgaagagaaagagtgtgaacatattatagaaactgaatgataaagat

SEQ ID NO: 258144 - DNA, 208 bp, Glycine max
  unsure (1)..(208): unsure at all n locations
tatgtatatatgtatgtctaggtagcaagataccttatatatgcatgtatgtagcannaagatacctcacaaaatatatatatgtatgtntatggtgcgatgataccttggatatgcatgtatacaacanaaataccttacacaacatatatatgtatgtttatgtagcaagataccttggatatgcatgtatataacatcaatacct

SEQ ID NO: 258145 - DNA, 366 bp, Glycine max
  unsure (1)..(366): unsure at all n locations
taccactactggaaacccaatgcaattttatcaggaatagactaatattgggagccatgaatnggccttattcccaccacagagaagagttcatagaggtgtcatcaggaaacatacctataaaactaagaaatggctgagaggataaaacgatacatcacctaaaccaaaactatacattgcctagaagggaatattaagtcaatgtaaggctagaatgggaatttcatacactaggactcatgtaaaactcgtaagcctacttgattatattaataacaagaatatagttcaagaatacctttaaattacccttgaaattcaagaatttacagtgtaagtataaatgaccatacgttttataaa

SEQ ID NO: 258146 - DNA, 279 bp, Glycine max
  unsure (1)..(279): unsure at all n locations
cttatattatatngatcgataccggccccgcttagatacattgtctaagctacttgtggtgaataatngactgcaccagtatggtccctaaataccagaccanagcgtgcctcatacagaatttcaagaaatcagtcaaattaaactaatcaatattaaaattcgatggtgtccagcatggtaagtgttcaaattcgttggacctctcgtgctcatgtcatctgattttgcatggactagtcttcggtctaaaagtattacaagtccgacactaacatc

SEQ ID NO: 258147 - DNA, 68 bp, Glycine max
gcacttgacttaactagtattgctcacgctactaaatctatagctgattaccagtcatactgtatcat

SEQ ID NO: 258148 - DNA, 82 bp, Glycine max
tagagaaaagccgaagaaagttattgtgtgggaaaacttgtaaaaaggtccttttcttatactgcagcatgtgcaaagcctt

SEQ ID NO: 258149 - DNA, 258 bp, Glycine max
  unsure (1)..(258): unsure at all n locations
gcttatataatctattcacatatatttaaattggccacacatttttttatactatgtntntagtanaaaaatatctaacagctcttatagtgactcaattatantgaaaaatcttactagttaatntangggtgtttcttttcaaaataagtnttttatccataacaatataaataaagatcaaatgattantttttcttatatataanaaattaagtaaatggtaattactgcaaaantcccttaattatatggatt

SEQ ID NO: 258150 - DNA, 220 bp, Glycine max
aatgggaaaaagaccaattgctatggttattagtattaagacagtgaaatgccctgctttttgctaggcccaatggagatgatttattatctgatgatgattggccattgagcaatctattatggattattggcgcctacaacagcaattctatggttggttactgagctagctgctaggtttaggcaggggacagctcttctaatatgatgcttcatat

SEQ ID NO: 258151 - DNA, 415 bp, Glycine max
  unsure (1)..(415): unsure at all n locations
ctgcagcttaaatttgatanaacgttaatactgtggaatcatacttattgttatcatacacagacaatttgattcgattaatagctgtgtaatacgtttggcactggaatcatacatctctgtaatcgataccagagagtaatctgtgaaaaaccttttgacttatatgtctttgcaaaccttttgcgacttcaataggaattccctcctatatatataccttctaaactctaagactgcttgacattcatcttgaatatttgtcttgataaatcttgagagcatggattatgtatccttggatatcaacattagctgatccttgctacaatctctcttttgagatacatactgaataaacagcttatcaatataccgtcccaccttctccctttttggagttgcaattgtttga

SEQ ID NO: 258152 - DNA, 182 bp, Glycine max
tgcttattttgtcaacagagcaatgatgtttgattgaattacaacgcataggttggattcatctctgttgaagctctgctgacaatgtgctttggcaacattagagaatatctcttgtgacggctactctttgttactcagttaatgctgtacaaggttgacaagtatatcttaagactaca

SEQ ID NO: 258153 - DNA, 161 bp, Glycine max
ctggttgcaaccttgtgctactcatccacaaccgtggagtcacactgaatctttcagtctacccagcatctcttggtaagacttccaaactcacctatctaaatgaaaaaagacattctgaaagattcatgcctatatctagatgatattgcagtctaagt

SEQ ID NO: 258154 - DNA, 233 bp, Glycine max
tcactatatctctggggagctaaccttataccttcatactccctgcgactgtaatatgtggaacagactactaatgcctttctattaacctccgtatgttatggcacctacactacatgaatcatagtcaccttctctgtctgcgaagtcagctctacttatctactacatattaatcagattgttgagtgttaaactcaatatactccctaagcctattatgacacctaacc

SEQ ID NO: 258155 - DNA, 333 bp, Glycine max
  unsure (1)..(333): unsure at all n locations
agcacctgtgctgcagctctacactatataggtgccctcatcaacgaagaagttcattaatcgagagttgtattcctgcgcctctatttggataaactcggctatacatcgtatgatatggttgtcaaagtctctatcatcccttctaatgtccttgtattcatatctgacagtgcacctatacattcgatatggtcctcgacaaactcgcncgactatgaaacgttctttggttaatacatgttgaacaggaactgtntcacacaaacaaagaccacaccatgtgtatgcagggaggtggtacaaaggggaaatantgatgtattctgtgca

SEQ ID NO: 258156 - DNA, 174 bp, Glycine max
  unsure (1)..(174): unsure at all n locations
gataaatctttatatactctattanagcactagttacagtcaattattacctaatcatctctgtagatgttaactttattcactcatatgctaacgctcctatgagacatctctgatctgtatatttgatagaactcagtgcattatcaatacaattcttctacagtatgatat

SEQ ID NO: 258157 - DNA, 242 bp, Glycine max
  unsure (1)..(242): unsure at all n locations
cggatctctaagtcacctgctgctgcagcttacattgattaagcgctcattatacctgctcatcgtcttctatgtaaagtattatcgtttgaaaatcctcagagcttcggtattcaatntcgagcgtctcgatatattacgggactcaatcanacatccgtgtaaaaagttattgtcgtttgaattagctctgatgttcagaattcaatntcgagcgtctcaatagaatacgggactcaatc

SEQ ID NO: 258158 - DNA, 325 bp, Glycine max
  unsure (1)..(325): unsure at all n locations
actgatatgcttaatatagttgcttaagcctgttctgatcattttttgagttttcttctttcaagcttctattccatggccgttcatatctttgtngaatggtggtggtcaaattattatttaatgattaatattcatttaacattangagctatattatacgaaaaacctcatgtactatgtcactagttgaanattttatattttttttttcgaaacagagtacgagtaaacctcggcaatcnagttaatatagatntgcgctaaataatatcaacacgaaatcattanataatatgtcaattctgttcagagaacaatatct

SEQ ID NO: 258159 - DNA, 260 bp, Glycine max
atgataaaaatggaaaggaggaagtactaagtattaaatgtggtgagggaagggaatttagtttaaccaattggtaggaattgattaggatgattataaagtatagactgagactggaacaatagaatatgaatgtaaaaacctttttgaatgggtgaagcgaatttgataggggattacttaatcgttgccattatatgttactttaaggaagtcccaatacatttattgcttcaataattcaatttggttgtcttttc

SEQ ID NO: 258160 - DNA, 220 bp, Glycine max
tacaatcatatgcctaatgtatgaccaactggtgtctataacaaacaaataatggagagctctctgaataatattgttatgcctgcactatgccaacaaagatttctagctcttctgtcggaactttcttgtgatagcactagattccctgccatgtaactcactcatatactgtaaacccctgtcaacttcttatactctcaggaacagtttgacttaa

SEQ ID NO: 258161 - DNA, 373 bp, Glycine max
  unsure (1)..(373): unsure at all n locations
cactccccccnnacaggcatgagcttgttgacctgaaccacacgcccgaaaaaagaaagctccgaaatttattgtttttagaaacttatttaagaagcaatacttaaatgtgggccactatctccacattaatgacccacagaaggtagtgccactaagatgccccctcaaaatgaaaatctgctgttcttaaacaatgatgaaacttgttataaacatacgtttttttttttttttctgcacttttgtaaaaacgcactcttttcttgcttccaattcacatattatcttattaaccttggttaacaaaacaaatttacgagagtgaaaaaaaagggaaacctaaaatggctggctgattttattataaggc

SEQ ID NO: 258162 - DNA, 251 bp, Glycine max
actacttcattgttaagggaggaaaagggggcctaccttttttatctggaaattcgaaatcacaggctgactcgagatacaattacgctaacaccgctatttactcacggagctacacttatatttgccggccattgcagttattgtctcttacccttgggtacatttagattgtataaaaaatccacggagttctattgtaaatcactccgcacctgaaaaagattattttaatctttaacaaccgcttt

SEQ ID NO: 258163 - DNA, 127 bp, Glycine max
  unsure (1)..(127): unsure at all n locations
tgcagctgtctagcgttatgcanacagagaccacatgtagctatcatcttcagtacgaagaagaagtaggtctagccacggcccacgagcatagaatcgcggatgagtatgctcaagtatatgcgga

SEQ ID NO: 258164 - DNA, 310 bp, Glycine max
ttctttagtgcttatgcttctgactcacagctggtgactcttctacttaagattcatatttgtgagcttttgatatgtatttgatctatcagtcactctcgcatatctagtgtggccgtacctgcttcgatgagtcgcatctagatataatggtgatactgatggtttggtgaatggagcatgatcctaatgtcgactgtcccacctagatatgctcttggctgcagtactgtggttctcatgtggattctggaggtgtcactgaatctcacgtagatctcatgctagtagacactgaagtttattactg

SEQ ID NO: 258165 - DNA, 149 bp, Glycine max
tcctctctatgacccgcacggctttctacttacattaattccgtcagcctttgacgtaacctctaacttttggtctgactcttggtttgactctgagtttgactattatccccctttacacactctgacactgtatccactatcctctt

SEQ ID NO: 258166 - DNA, 372 bp, Glycine max
gctgtgacatatgtttggaagtttgttcttgtccactcaccaattagctatcactgcttaggatgataagcaaatgcattcatgttcatatttcacactatcctgtaccaatgaactcagcacacttggggaacagtcagccccctctatgggtgctgtggctgcatactaggcgtccatcaattgtcagttgtgtctactatacaggaggatatgtggcatcttcctctttgcctctgacttaaatcagttgttattcactggcaggaacgggcactgcatgattgaccttgcgtaacagtacagaaacacacggatgcatctctccagagttttatgacagattatatgcccctcgtcctgatgatgcgg

SEQ ID NO: 258167 - DNA, 203 bp, Glycine max
  unsure (1)..(203): unsure at all n locations
caatgagataagaggggagtgaacttgagggctataaactttatcatcanantacaacaagtgtacacatgcttctatntatagactaggtagcttncttgagaagctttcttgagaaaacttncttgagaagcttctntgagaaaacttccttgagaagctagagcttagctacacacacacctctcataactaagctcacc

SEQ ID NO: 258168 - DNA, 362 bp, Glycine max
tcatatctggagggtcttgtctaactgctatcttgtgccagttatggctgcaggaaatctatagctctaaggtctatgtgtcactgaccccgtgtagagaatttttaacttctttttgagggggaaaatggttctacttgtccagctttactgatgactaagggtttggaaatatcctgatttgactccataaaaacttagctatactatgaaagttgtgatctggaaatcaaaatatcactgctacataataatttacactctttcattttagctacactgaggattatgtctcgtggacttgtattacctgtggtgactgaaaatatcatcacatatcaaagtttgcaaggctaggccat

SEQ ID NO: 258169 - DNA, 151 bp, Glycine max
tagtgtcattggtggggattgttacattggctgtggatacaagaaataattttatttcccctcccgtttatcttgaactcatcttttagaagagacctggccattctaatcttaagacgttagtgacccccttaactaattgcttggaaga

SEQ ID NO: 258170 - DNA, 359 bp, Glycine max
  unsure (1)..(359): unsure at all n locations
tcttctaactccccatttcgaanaacattctntatgcctagttggtgagaagcaatctagattactgctagagataataggacctgaacagaattattttaacaacaggtgcanatgtctcttcataatctactccatatgattgtgtaatccctttgaaccgaccgagtcttgtacctatntattngccatcaacattgcatnntaatgtgaatatnnctttacatnnccactgtatcttcctttttggatagtggtgacttccatgtgccattntcacaagtgcttgacttcttncatacagctgctgccattcggtctttgtatgcctctgaatagtctggattctacactgcaca

SEQ ID NO: 258171 - DNA, 235 bp, Glycine max
acatgtttagccaataggaataatcaaattagatcagacatctctgcacattatactaaagtttttaagtctcactgacatcaccattttttttaattgtatcaattgcttttttttaacatcaagtacttgatgtactaaaatttataatgattatgcaaatacagtctcctttccagatgttctacgcttttatatacttgcagcctgactgtacttgacgattagaggaagg

SEQ ID NO: 258172 - DNA, 339 bp, Glycine max
  unsure (1)..(339): unsure at all n locations
gtcctccgcatgtgaanntttcatcattggctgagatgtggatgtgaattcttcatgtagtaatgaagcactccttcgcaggangcacatatatgattcatatgactctattaaggtagaanacatcanatcagaaccctcccactaagaatttcttttcaaaaaaagaatagtttctcgcccactancgatgaggatatgtaagaaaagccggtggagtatatataanatataaaccacacatgatatatgtatngacacattatgnttcattctatttctatatgaatatngnattatctgcattcctgccaatgttaccttatatgaacttcccat

SEQ ID NO: 258173 - DNA, 311 bp, Glycine max
actcttgaatcccctactctagaccttctcactgatctatctcttaagagatcacttgtgccttttctattagttacatactgtcacactagtctctgcagctcacagacgaccatgtagaaaaagttgtactactcttgcttatacgccagatgctttgctaatgtgacctgactgccactctctgttaacatcttttataaggctgaaggttgtacaaaactactctgcttgatgatatagctgtgtcattgctgatgtagatcactgaccacctgtctgtcttcaagccccaacacctaaaaaagact

SEQ ID NO: 258174 - DNA, 148 bp, Glycine max
ctttgaatatttaattgttctttttggacaaccagtcaattggccttaagttcccatcaataagggactccaatgtgaatcataacatctgttttgatagcacataatgtaggaaatctattcatgcgcctgtatatgagcttgttta

SEQ ID NO: 258175 - DNA, 66 bp, Glycine max
ggtgtgcaatctgtgtactctaccagttcttccttattctataactcaccacagaaactttgatct

SEQ ID NO: 258176 - DNA, 264 bp, Glycine max
  unsure (1)..(264): unsure at all n locations
cagcacaagctatcattgttctagcaaacagagcanaggcagagaactctgctcaacacatcaaccanaatcacagctnttctcacttaaagaccacagtaacaannttctttgatccaatttcgtaaccgttggatcgactcnncaaatttacttggaagtctatagtgcataagcctacattttgaccgntgtgatctactatcanacatccagaactcattctgtactactctnttcacagccaaccacacacaagcattt

SEQ ID NO: 258177 - DNA, 292 bp, Glycine max
ggatcttaagcactgagctgcgctttggagataaccatcattggcatgacattaaagctttcaatctcaacttgtttccagtgctctaatttcaaatttcaactaaaccatccataaatcactctcatcactttacatttggcacactacacattgctgcgtctactcatgaattactcctcttaaacttaaccctacttggtatcttattaaacccaaatgtaaaatcctgaatgagcaaatattgaggtgtggacatggatggtacttatggtggatatttggtgaatga

SEQ ID NO: 258178 - DNA, 305 bp, Glycine max
atctacattgatcctctgatgattttatacctctaactatatcttgtaatggctcatcagttgcaatattatatgatattaattgactcaatgcttcttgaggtgggtctactgtcttgtagtgtgccaaaagatgtgaatcaatactaagaatatgtataagttcgtaagatccaattacaataaattattctattgaaacaccaactgactaaaaatgaagtttgcctatgtaatgtggtagtctattctgctcattatggagaggaagaatatgacacatcattaatcttatatattaatct

SEQ ID NO: 258179 - DNA, 176 bp, Glycine max
  unsure (1)..(176): unsure at all n locations
actagctgtctgattgattgattgatcattcctgactgaggctaattcttgactgaggcctgatctatctgacatctgactcttcttattgactgactttgtctacttgcatatnttgtatataaacattttgaataactgatctatgatcttgttctcagatatgcatctatctc

SEQ ID NO: 258180 - DNA, 311 bp, Glycine max
tgacatttttggatcatccgcaattgattaattatctgtgaatgtttgcctggatcaactcttggatcataccaaagaatgtgaaaacttgactaattctggcaactttgcatcatggatcctctttaaaccctctaacttaacgctgcatcattgatatttgctgataatttgaaactggatatgatcttgctataactactgtcttgtcactctcttgtagcatctgataaagtttcagaaacctcccactctccattgtggcacttgtgtattaaatgatgattacattacttgcttcagtttccttg

SEQ ID NO: 258181 - DNA, 74 bp, Glycine max
tgctgcttttgtcaacatgagcaatgatgttgcattaatttacaacgcatagggttcgattgcatctcctgttg

SEQ ID NO: 258182 - DNA, 338 bp, Glycine max
  unsure (1)..(338): unsure at all n locations
cttatcattgatgttgatacaacgttgctttaagtcatatatacaacaatcttcacctaaagaacattcagcccttaatataatatctttcaagtctaacgaataatgtactcacatttcatagacaagagacaacatgacattcgactgctggctcctttattcttnacattcgatattagatttaagcaacccaatatatgagtgaccttccacccgatttagtaagaaaaaaatcataatgtcatctgacacataattttaacgactctgcataacacaatgttctggctaatgctataatgatgataatactcctaaattctcacgattataac

SEQ ID NO: 258183 - DNA, 275 bp, Glycine max
  unsure (1)..(275): unsure at all n locations
ctcggatgaatgagagttggaactcactcnagnttactttctcctcttactcttaattcggctccctctttttcttctttctttctcatgagcatcttcagctttatcaggcattttgtgcagcttttttctgctatcctaagatggcctcttactttcttgctcgtcattctgggaatacttgagctatgactaaatccctctaactccacagctctttgacaattcaatccgttatcggaaactgcttgtgaggtgatgctttgtacggtctc

SEQ ID NO: 258184 - DNA, 228 bp, Glycine max
ttataacagctttgctatttatcatttgtttcttttgaagctcaggcattgtcgtactatttactagccaacttcaattctcactccgtggactaatatacaatactatcgttatggatgtctataggtgcagtcatacagctttgtattattattgatgcttgtagcgcagcttgtctgacattactagcaacttcaattcctccgttactatttcaaacctcttaa

SEQ ID NO: 258185 - DNA, 251 bp, Glycine max
  unsure (1)..(251): unsure at all n locations
ctggagatatttctcggnggtcaggagaaccttgggacgtcaggtggggtgctattgcccaaaaccatgcttgaccaatcccgacccaacccgggcatagtcagtcagtgagaacctgtgatgtacctaaacaggcgagctcctggcagtcaacagataaagggaactaagaccacacagcaaggaagcttatgtggtggctggcagctgtgaatcttgtggatatatgggtatggcctctggaatcgata

SEQ ID NO: 258186 - DNA, 61 bp, Glycine max
taagttttctataagtataactcttctgaatggtcttcttggccagacatggagagtctat

SEQ ID NO: 258187 - DNA, 209 bp, Glycine max
atacatacagcggctgagccttgaaggaatatttgctagccgtgtgcacatgtacgcgttcagatgttgaacgtctacttatggctttctccgctcactgccgttagaacatttgggctttcgggactgaggcctacaatgtgtagtggaagccctctaccgtgctttttgctttatcttgttactagcacacacttatggcggatgtt

SEQ ID NO: 258188 - DNA, 219 bp, Glycine max
tggctgatgcttactcttcattggctattgtatagtgacctttgagctatttttacaaagaaaatatgtatctccttatgcgatatcacgtatgatatgtgaatactgatgagaattacgcgtgatatttaaaattacctgaaagaagaccttcgttaaagtaattgtagaagaggggggattatgaatcataatggcacataatcattgtaatcctta
